United States Patent Application Publication US 2011/0183924 A1 - sequence listing, part 245

SEQ ID NO: 682992 - DNA, 1074 bp, Homo sapiens
  misc_feature (585)..(585): n is a, c, g, or t
  misc_feature (697)..(697): n is a, c, g, or t
  misc_feature (758)..(759): n is a, c, g, or t
  misc_feature (805)..(805): n is a, c, g, or t
  misc_feature (822)..(822): n is a, c, g, or t
  misc_feature (827)..(827): n is a, c, g, or t
  misc_feature (843)..(843): n is a, c, g, or t
  misc_feature (856)..(856): n is a, c, g, or t
  misc_feature (880)..(880): n is a, c, g, or t
  misc_feature (882)..(882): n is a, c, g, or t
attgctgtcctacaaaacatcagataataatggatgttgatcgcatctcatgttaactctttactgatatgttgtaaatacagaagtgaaatgtggacaaaatagttacgctattggttaatggtactagacaacatgtactcaatgacattcaaaaattaatggctagtgatatatataaagtaaaatttctttgcagtaaaatatgccctttattatagaagggaggatataaggaaccaacagttgtatgaaaatagctcaaataatatcttttatttgatcttaactatttcttattctggtttattagtgtcttagaacaaaatgggcttatataatgaaggcctagttaatgctggacggtaagatctctttaactggtccggaccagatagtgggggatgagagccgaataaggttgcctgaaataactgacactatataatttctgcttggcaaatactaagttctaacttgtcattcctggtagaacaagctttatttttcgagcctagcaatgatctagaagcagatgttatctcagtgcctttgcaattgttgtgtgggtttttttttttttanaaggccacacaataatttgggaaaaccaaggtattgggtagaacatgtgtctgttaatggcacacaaaaccacttttaaggggtacacgagttaaattggaaggaataagtnctagctgaagtattatgaactccaaataatggcttggaggacctccaagggtaaaagtacnnatcccttgggccatttatggagagagagagagagagagagtagggngactatagtaaggtatngatgntcttgctacaaataanggatattggagcngaggggggtgctaataacacggtntnggatcaatacccattggtttgtgaacacagtacataccccatattttccaattgtgttttcaacctttaaaactttctaatataagtatctctcaaacgtgtgggattcaaactccttcgaatttatatccaacatcttgaacatcttcaaggaaaacacgggtgaaaataaaccattctagatacaagggg

SEQ ID NO: 682993 - DNA, 1330 bp, Homo sapiens
  misc_feature (1330)..(1330): n is a, c, g, or t
tctgctaccgtgactaaaatggaacctttttgggggtcgcggcccgaattttgggcgggggtgtccggccccaggacagttttaccgaatttccgtccacttcccgaattcctttcagtggactccggcgttcgtgcatttttacagaggtctccaattcacgcggacccagaacccctgtggtgaccgggacctcagtcctcggcgtaaagtttcgagggcggaggtggtgattgccgcagacttgcgtgggactccatacggcctccttggcctcgttcccgaaacattctctcgcatttagtgcgagttcaacaacagttcccagtgcgtggggtgcccttgtggcgacttacgctgatttcccaggtatttgtgaagcaagtttctcggccagagtggctgatttgattgaggacgctctctgtgggagatgtgtgacacgagcttatatatgctccataaagcttatttcatctcattgcgcttgacccagggcctatgtgttacaggccgggcgcctcagaaaattgaacccctttttggtggacacaccatgtggctcaactcgagaggcaatatgcctagatgagaacagaagtcttcccctcctggtttattattgtggcgacctttgtcttggtgtggtaacgccttatggaaagcccccttcgtttggggcccactggcgtttatgggtggcataaaccttggtctacagccttcgtgtggcgcaaaagttctggggaaaaaagccaggcccagttgttaaagcccagaccggaagggcccggcggaattttaagttaagacacaggctgctattgccaaaagtggccgtgtaattaaacaccgaaagatggcccactgtttttaaaacaacccgggtttttacaaacacccgccattgtgtctcacccggaaaaaagcggtgtggctggaaacatcacggacgcggactccttttgttctcacgagagagaccccagtgtggggatatttgggcccccacattgtaaatcaccaggagggcctatggaaactgtgaataataacgcgagagtggcttttattccccggaaaaacgtggaaaggtttcccccatactattataaaccttgtgaagaacttgtgtgggctatgttccaaaagaattaaaaccttctttctttttgggaacacgcaacaatataaactcttctcttcacaacgtgccacacaccaccaaaaaaaaccctggcgggactctatttgtcgggcgggtgcgccacacagacggtctaccataaatagtggcccatttgtcattcaatcatgttttcgtgcaccn

SEQ ID NO: 682994 - DNA, 1020 bp, Homo sapiens
  misc_feature (585)..(585): n is a, c, g, or t
  misc_feature (697)..(697): n is a, c, g, or t
  misc_feature (721)..(721): n is a, c, g, or t
  misc_feature (768)..(768): n is a, c, g, or t
  misc_feature (771)..(771): n is a, c, g, or t
  misc_feature (810)..(810): n is a, c, g, or t
  misc_feature (872)..(873): n is a, c, g, or t
  misc_feature (888)..(888): n is a, c, g, or t
  misc_feature (890)..(890): n is a, c, g, or t
  misc_feature (898)..(898): n is a, c, g, or t
  misc_feature (912)..(912): n is a, c, g, or t
  misc_feature (914)..(914): n is a, c, g, or t
  misc_feature (934)..(934): n is a, c, g, or t
  misc_feature (938)..(938): n is a, c, g, or t
  misc_feature (947)..(947): n is a, c, g, or t
  misc_feature (949)..(949): n is a, c, g, or t
  misc_feature (951)..(951): n is a, c, g, or t
  misc_feature (956)..(956): n is a, c, g, or t
  misc_feature (961)..(961): n is a, c, g, or t
  misc_feature (963)..(963): n is a, c, g, or t
  misc_feature (966)..(966): n is a, c, g, or t
  misc_feature (970)..(970): n is a, c, g, or t
  misc_feature (976)..(976): n is a, c, g, or t
  misc_feature (996)..(997): n is a, c, g, or t
  misc_feature (1001)..(1002): n is a, c, g, or t
  misc_feature (1016)..(1016): n is a, c, g, or t
attgctgtcctacaaaacatcagataataatggatgttgatcgcatctcatgttaactctttactgatatgttgtaaatacagaagtgaaatgtggacaaaatagttacgctattggttaatggtactagacaacatgtactcaatgacattcaaaaattaatggctagtgatatatataaagtaaaatttctttgcagtaaaatatgccctttattatagaagggaggatataaggaaccaacagttgtatgaaaatagctcaaataatatcttttatttgatcttaactatttcttattctggtttattagtgtcttagaacaaaatgggcttatataatgaaggcctagttaatgctggacggtaagatctctttaactggtccggaccagatagtgggggatgagagccgaataaggttgcctgaaataactgacactatataatttctgcttggcaaatactaagttctaacttgtcattcctggtagaacaagctttatttttcgagcctagcaatgatctagaagcagatgttatctcagtgcctttgcaattgttgtgtgggtttttttttttttanaaggccacacaataatttgggaaaaccaaggtattgggtagaacatgtgtctgttaatggcacacaaaaccacttttaaggggtacacgagttaaattggaaggaataagtnctagctgaagtatctccaagcatnattgggagtggataatacttcagctacaaccaagcagaatctctttnttngggaggtcctcgaagcataattgggagtggataatactncagctccaattgggagtggataatattccagctagaacctagtagaatctggttttccctgnngaggtcctcaaagcntnatggggtncataatactgaagntnagaaccaagcagaatcggtntccntgagggagnancnggacncatanantgntgantataanccttagtaccctggatattnntggnnggcagtgaccagcntatt

SEQ ID NO: 682995 - DNA, 1084 bp, Homo sapiens
  misc_feature (585)..(585): n is a, c, g, or t
  misc_feature (697)..(697): n is a, c, g, or t
  misc_feature (785)..(785): n is a, c, g, or t
  misc_feature (832)..(832): n is a, c, g, or t
  misc_feature (835)..(835): n is a, c, g, or t
  misc_feature (874)..(874): n is a, c, g, or t
  misc_feature (936)..(937): n is a, c, g, or t
  misc_feature (952)..(952): n is a, c, g, or t
  misc_feature (954)..(954): n is a, c, g, or t
  misc_feature (962)..(962): n is a, c, g, or t
  misc_feature (976)..(976): n is a, c, g, or t
  misc_feature (978)..(978): n is a, c, g, or t
  misc_feature (998)..(998): n is a, c, g, or t
  misc_feature (1002)..(1002): n is a, c, g, or t
  misc_feature (1011)..(1011): n is a, c, g, or t
  misc_feature (1013)..(1013): n is a, c, g, or t
  misc_feature (1015)..(1015): n is a, c, g, or t
  misc_feature (1020)..(1020): n is a, c, g, or t
  misc_feature (1025)..(1025): n is a, c, g, or t
  misc_feature (1027)..(1027): n is a, c, g, or t
  misc_feature (1030)..(1030): n is a, c, g, or t
  misc_feature (1034)..(1034): n is a, c, g, or t
  misc_feature (1040)..(1040): n is a, c, g, or t
  misc_feature (1060)..(1061): n is a, c, g, or t
  misc_feature (1065)..(1066): n is a, c, g, or t
  misc_feature (1080)..(1080): n is a, c, g, or t
attgctgtcctacaaaacatcagataataatggatgttgatcgcatctcatgttaactctttactgatatgttgtaaatacagaagtgaaatgtggacaaaatagttacgctattggttaatggtactagacaacatgtactcaatgacattcaaaaattaatggctagtgatatatataaagtaaaatttctttgcagtaaaatatgccctttattatagaagggaggatataaggaaccaacagttgtatgaaaatagctcaaataatatcttttatttgatcttaactatttcttattctggtttattagtgtcttagaacaaaatgggcttatataatgaaggcctagttaatgctggacggtaagatctctttaactggtccggaccagatagtgggggatgagagccgaataaggttgcctgaaataactgacactatataatttctgcttggcaaatactaagttctaacttgtcattcctggtagaacaagctttatttttcgagcctagcaatgatctagaagcagatgttatctcagtgcctttgcaattgttgtgtgggtttttttttttttanaaggccacacaataatttgggaaaaccaaggtattgggtagaacatgtgtctgttaatggcacacaaaaccacttttaaggggtacacgagttaaattggaaggaataagtnctagctgaagtattatgaactccaaataatggcttggaggacctccaaaggggattagtagttggccggtggaggtcctccaagcatnattgggagtggataatacttcagctacaaccaagcagaatctctttnttngggaggtcctcgaagcataattgggagtggataatactncagctccaattgggagtggataatattccagctagaacctagtagaatctggttttccctgnngaggtcctcaaagcntnatggggtncataatactgaagntnagaaccaagcagaatcggtntccntgagggagnancnggacncatanantgntgantataanccttagtaccctggatattnntggnnggcagtgaccagcntatt

SEQ ID NO: 682996 - DNA, 492 bp, Homo sapiens
acttgagcccctgaaatttaacagatcgctactgaacacgctacttaatatacaccatgtgtacccctataactaggaatctaaaatctggaactctaagcaggattacagcatctagtatagaacaaccttcgtgacaagtatatttacaaaattgtaacttgaaagtactttcacacttacagaatggtagcaacgacagtacatgtaatactctgcaatatgtatacactttatgcagaatcatttgttaacatttagtgccatttgctttgtcataaggacttctatatacatgttttactcctgaaccatatgaaagtatgttgcttacttcaggcccccttgtacctcaattatttagtgtgccacggtacagttgtcaacttaaggtagtaaacatggctgcagttttttaaatcaaatgtttatcgttcatcttctagtttgtccagttgattcggtaatgtactttatttatatctttatttc

SEQ ID NO: 682997 - DNA, 97 bp, Homo sapiens
cagatttttttcaattctccacccgccaaaaggggaagggcttttccccagagaaaaggaaaggggggaaaaggggaaaaaacccaacccaaaacca

SEQ ID NO: 682998 - DNA, 111 bp, Homo sapiens
gcccccttcaccttcttacaacctcttcccctttacccaggggtcccgttctgcaatccagaaaattcccttaggtaagggctgggcagttaagtgtgaaattaatctaag

SEQ ID NO: 682999 - DNA, 1005 bp, Homo sapiens
  misc_feature (259)..(259): n is a, c, g, or t
  misc_feature (295)..(295): n is a, c, g, or t
  misc_feature (301)..(301): n is a, c, g, or t
  misc_feature (857)..(857): n is a, c, g, or t
  misc_feature (894)..(894): n is a, c, g, or t
  misc_feature (988)..(988): n is a, c, g, or t
cttcaggtatcaccagatgctgatcctatggaattaacatagaggtctcctcaaaaaagaagaagaatcacactggcctgagatgatccacacaaaatggagggagaagacaacagagcaagaccttctaagttatgaaaggtactactatatatcagtcagaacttgtcactctattatcgaaacacatcaaataaccctataatttgagacattgttgaaatactgtttcaggttttacactcttgcatgctagctncatttatcccttaatattaattttttgatggatctnacctcnccatgaataattaaattatggaaagatggttagtattgttacaaataccattagatcttcccactaacttcataaaaagatgccctagtgatcaccccatatctcaggtccaattctagacccttgcctttgattaggaacacccttggtacataattcttacttatggctcttataaaaataatatatataatttgcctgtaatggtcactttacaaatgtattcttcttaacgtcgctttatcttttggccctcacgcctttacaagggaactctccattactacgtgactatgcctgtatcaaggaatttctgtctagcggtatggtatttcactcaaacagagcgattaactttataccaccgaatagcgtatatcacttcttttaactacgtgtttaaccaaagtcccataggtggccacttatcaccataaaatgaccactgctttttgaagttttttcatatggcctcgccccccctaactatagtctccaaacttgacccctgattccctatttaatcggacgccatgttcttgtaacaaacctcggntctttcccaataggctcctctgtgctcttccttgtanaccccttcccttaccctttcccaacacccttatcctcttggaaatccagacctctctctatcacgacttaatgctctcctcgcgtgaggtgtgnaccccgctctccttgtt

SEQ ID NO: 683000 - DNA, 109 bp, Homo sapiens
accgcgtacatggcatgctgagcagctcagatctgaggacacggcgtgtattactgtgcgagaggagtggagggtggttattactacgcctacaggggccaggaactct

SEQ ID NO: 683001 - DNA, 151 bp, Homo sapiens
gctgttctagaggaccctgcggcgctacctgagtgcgggttccatcactcttctcgtgactccttctcactgtcgccttctttcccttttcctcatccttcttgggagcctcgctgggttatctctatttgcttcctcctcgtatagcacc

SEQ ID NO: 683002 - DNA, 188 bp, Homo sapiens
tcctcctgccattgcagcatcgacattccctcaggtgctgggatcagaagaatgggacgtggagaagggaaatgctggagggatcagccagacttgctcatatccctcacagcccccaaaaagtctgcaacccagtttaccggtcgctaccgttacctggggggtcgttttgtgccacctgctctgga

SEQ ID NO: 683003 - DNA, 901 bp, Homo sapiens
ggcgttgtagaccactgttggaatgtgcgcagctagttaggtacgcccgcctgtttatgggaggtgttgctctcatcaaacaataggcgtggacggtaccgtctatattaggactcacgatagtttgaagtgacctggttaaaaggtgcttggggtgcccgttctaccattagataatataagaatgttagcctcggggactcacataagccgtataaaagtggacctcttattggattggggttgacccttttcagtttgtgaccaaggccacgttcgtgtataatggggtaaaagacttggcctagacccagcacgttgtaatgtaaggagtgtaacacaaagttggaatgggtagttggtatagttgtttctgggcatactataggagggaagtcacctttggaggaaagttcagtgtgtcattgaccaacacatagtgtggactgacccaatgttgttggattgactcaggacacctgtgacttttgttataaatgttcaggtcgccccctgcctggtgttagttgtaacaggttagttagaacagttagtttgggaggtacatgggtaacagaggaaaaatagccagtatggtgtctagttggtgtgcggtgaaagttcgttactttgttcgaagtctaattgtgcgtgtacttggcctgaatgtggtgttctcaccttgcttgattttgcctgctgtttaaaaaaatatcaagacagtttcttcattttataatagcgttttattcatcatgtttgtattctgaatttgaaacctgctgtgttactgatcaaaaatgctttcagaggctgggtgcagtggctcacacctgtaatcccagcactttggaccagggcatcacgagtcagagtctgtctaccacaacccacataacaa

SEQ ID NO: 683004 - DNA, 422 bp, Homo sapiens
atgtccgagaacctcattgggtttttcccatttttcctatccagttggtctttttttttggagaccgagtctcactgtgttgtccaggctagagtgcgggggtgtgcatcttggctcactgcaacttcgtgcctcccaggttcaagtgattctcctgcctcagcctcccgagtagctgggattacaggtgcctgccaccacctccagctaattttttcagtatttttagtagagacagggttacactgtagtaggccacgctggtctcgaactccagaccttgtgatctgcccacctaggcctcccaaagtgctgggattacaagtatgagccactgccccgggcaatttttttttacaacaaagatcatatttatattaccaggtgatatgtcaaataagtcgggtgctgagggtctcttg

SEQ ID NO: 683005 - DNA, 728 bp, Homo sapiens
ggtaataaccgcgcgcggcgctcggcgtcccgcaaggtcgctttgcagagcgggagcgcgcttaagtaactagtccgtagttcgagggtgcgccgtgtccttttgcgtggtaccagcggcgacatgacggggtacactccggatgagaaactgcggctgcagcagctgcgagagctgaagaaggcgatggctgaaggaccaggagctgagccctcgggaagccgggtgctgccccccacaaggaagatggggcctatggagaaaattcgtgggaataaaattttggagaataaaatccccttgggagggaaaaagtgggcccagtgggggtatacaaaaaggagtatcttggttttcactcattgtactgtgtaccctgtctgggattatccattattacatgaaagtatcagtgtcttcttgaaaaaccatatggcatagttgaaaaagaaggccagattatcccctggtgatacaattcctggagactggagaagtaattccaccagtgaaaagaatttccctgatcaacatcatttaagaggatcatggtaaacaacggttaaagggcttatgagcctaagtgggtccctattataccatatttactgaatttcgggcaaaagtacttcaataaaggttatctctaaaaaaaataacgacacacacaaaatgggcgggcggcgagcccgaaaggttttagaccatgggggggggcccgggtggac

SEQ ID NO: 683006 - DNA, 698 bp, Homo sapiens
  misc_feature (271)..(271): n is a, c, g, or t
  misc_feature (334)..(334): n is a, c, g, or t
gagggcatgaatatcaaacgctagggggacagccactgtggtgtctgctaacctcatcctggtcactgcttctgtataacagccctaggccaggaatatgaacgaagtcgctgcttgtggatctctgctcctcacgcagaccatcgctggaaggcctttgtcgtctaacacaggaccgtctagtggggagagctgtttggtgatttcctatgagagatctgttacttgatcagtgtagaatcgttgcatcacaccagctggagtaagcctnctacatgagactgtactcttgtgtttctcgatgcctatagtgtatctctctcgtgacctacangcctctgtctacctagcaatagcccaagcgcagggatacatgagctagcatgagtttatacataaggaaaggagttggacgagtataagtctatacacttggcaagacacctaggagagttactactccaagggttatcgacacaagttcccggctccgagtgtcagcatctgtggtgagctgggagtcctcatcatggtattgctgaactttgggatcacctgggacacctttggtgaaacagggtctgcgacagggttacttggtggaagctcagtccaagattgtcctggggcaggaacaggatcctgatgggggcaagtttgataggagccagtgccttgtgagagagatggggatcgtc

SEQ ID NO: 683007 - DNA, 581 bp, Homo sapiens
  misc_feature (402)..(402): n is a, c, g, or t
ttagaagaacagttggatagactcatgcaacaattacaagatctggaggaatgcagagaggaacttgatacagcatgcaatcatgcaagcaaacccaaaaaggcaacactctgggagccaactaagtgcaatttcaattgcattcactcaacagcaaaattcatgtctggcacaatcatgcactttgtgtagcatgcaactcacagtggcacatgcagcttggcctattccaggccaagctcattcagcgctagtgtccgttttcacaacagccccgcaggcaggggttcatccaagcaatcttgcttttggccacaacatgtacaagccaacccgagtgctaacagacgtctaccggcaacaaaggcttcagccagcaggcattgtggatcagcaagaatncttgaattggctagtgaaaaaagcttgggaaatagaaaggaccttgttacaacttcaaagcaagtacagatgttgggcagcaatcaacttacgacaagacgttccttataaggggcaaaaaaaaaccgttatggggggaaaggcaaggcaaaaagggggctttgggaaaagtcgtgggg

SEQ ID NO: 683008 - DNA, 119 bp, Homo sapiens
ggcacgaggcttcgtggaggtatgccgggatgctactgtctcctttggacctcatgccggataattgagtcgcgattgtagatgttattgatcagaacagggcattggtcgatggacct

SEQ ID NO: 683009 - DNA, 366 bp, Homo sapiens
  misc_feature (8)..(8): n is a, c, g, or t
  misc_feature (47)..(47): n is a, c, g, or t
  misc_feature (71)..(71): n is a, c, g, or t
  misc_feature (95)..(95): n is a, c, g, or t
  misc_feature (137)..(137): n is a, c, g, or t
  misc_feature (140)..(140): n is a, c, g, or t
  misc_feature (166)..(166): n is a, c, g, or t
  misc_feature (175)..(175): n is a, c, g, or t
  misc_feature (192)..(192): n is a, c, g, or t
agttgganacggcctcctagggaaaagttcatagggtctcttcaggngcttagtgtcacttacctagattnacagcctcacttgaatgtgtcacnactcacagtctctttaatcttcagttttatcttgaatctccnctnttatcttggactgacatttagcgtantaaggtganaaggtcatagctgaganctgtgggtcgggtgttacgcacacgtacttaaatgaaagcatgtgggcatgttcatcgtataacacaatatggaatacagggcatgcattttgcaggcagtgagtctcttcaggaaaacccttttctacagttaggggttggagttacttccctatccaagcccagttacgtgg

SEQ ID NO: 683010 - DNA, 146 bp, Homo sapiens
gctcttggactctctgtaaaaagcttctgaatatgacttgtagccggctgagtaggctgtggctgtggacttcagcacaagcatcaacattgctgttcacacgacattacagtttacgtcacttccccaggaggtctggttacttt

SEQ ID NO: 683011 - DNA, 287 bp, Homo sapiens
agacgaccttgaaaaattatgctaagtgaaaaaatcagtcacaaaagaacacattgtatgttttcatttatatgagatgtccagaataggtgactgtataaagacaaattagtggctgtcagaggctgggagtgtggtgtacgagaggaaggaaatgggaatgactgctaatggtccaagatttctttgagggtgatgaaaattttctagtattagattgtgatgatggttgtacaactatgtatgctaaaagccattgatatgcacatttaaaaaggatgacattt

SEQ ID NO: 683012 - DNA, 275 bp, Homo sapiens
  misc_feature (29)..(30): n is a, c, g, or t
  misc_feature (61)..(61): n is a, c, g, or t
agtgggagttgaacaaattgagaacaccnncgggacccagggagaggaacatcccacatancggggccgttgcagggtgggggagtaaggggagggatagcattatgagaaataccctaatgtagatgatgggtgggtgggtgcagccaaaccacccctgcacatgtatacctatagtaacaaaccttcacattctgcacatgtatcccagaactgaaagtataatttttaaaaaatttaaaaaacaatatatgcttaatatagaaaagttgaga

SEQ ID NO: 683013 - DNA, 545 bp, Homo sapiens
caacgcatgtgccgctcccaacgcatgtgccgctcccaacgcatgtgccgctcccaacgcatgtgccgctcccaacgcatgtgccgctcccaacgcatgtgccggggcctttccggcggtgacgacctacgcacacgagaacatgcctctcgcaaaggatctccttcatccctctccagaagaggagaagaggaaacacaagaagaaacgcctggtgcagagccccaattcctacttcatggatgtgaaatgcccaggatgctataaaatcaccacggtctttagccatgcacaaacggtagttttgtgtgttggctgctccactgtcctctgccagcctacaggaggaaaagcaaggcttacagaaggatgttccttcaggaggaagcagcactaaaagcactctgagtcaagatgagtgggaaaccatctcaataaacacattttggataaaaaaaaaaaatttaaaatatctcaacaccatcaaaatccaaactaatctataacaataaatctacttaacaccccctcttctccaacttctt

SEQ ID NO: 683014 - DNA, 368 bp, Homo sapiens
gtaatgctttcaaggtttatacacattgaagcatgtatcgatactttatttctttttattgccaaataacattccattgtgtagagtatactgcgttttatttctccattcatcagttgatggatgtttggttgattccacttttcagctactctgaataatgctgctatcaacatttgtggaagggttttcgtaaggatatgtgttttcatttctctcgggctatatgccgtaggattgtcaaatgggtatactttttttttttttttttttggagacggggccctcactttgtttcccccgggcgtgtagagcaggggcacaaccacggcctcattgaggccttcgacccccaggagtttgctgga

SEQ ID NO: 683015 - DNA, 119 bp, Homo sapiens
cagcgtgcctgttgtagggagaacatctgatccgtattgaactggtttcaccaagcgaagaatttgactttgtgactctagtactacagagagccagataacatggcgcacatcgactt

SEQ ID NO: 683016 - DNA, 258 bp, Homo sapiens
ccgtaggacccagtttccttttttagctgatgtttttggccagaaccccgtgggctgttacttgctttgagttggaaacggtttgcatttacccctgtaaatgtattcctttttaatttatgtaaggttttttttgtacccaattttcgattttttgaaaagatgccccccaattttggttttttactgttttgtgagacccttaggccccccccccccgtctttgtgtaaggaaaaattaaagtgctcccgtaccca

SEQ ID NO: 683017 - DNA, 522 bp, Homo sapiens
caacgcatgtgccgctcccaacgcatgtgccgctcccaacgcatgtgccgctcccaacgcatgtgccgctcccaacgcatgtgccgctcccaacgcatgtgccggggcctttccggcggtgacgacctacgcacacgagaacatgcctctcgcaaaggatctccttcatccctctccagaagaggagaagaggaaacacaagaagaaacgcctggtgcagagccccaattcctacttcatggatgtgaaatgcccaggatgctataaaatcaccacggtctttagccatgcacaaacggtagttttgtgtgttggctgctccactgtcctctgccagcctacaggaggaaaagcaaggcttacagaaggatgttccttcaggaggaagcagcactaaaagcactctgagtcaagatgagtgggaaaccatctcaataaacacattttggataaaaaaaaaaaatgaaataaatataatattgatccttattatattgtatttaaatattttatgaaaatatt

SEQ ID NO: 683018 - DNA, 355 bp, Homo sapiens
  misc_feature (53)..(53): n is a, c, g, or t
  misc_feature (116)..(116): n is a, c, g, or t
  misc_feature (204)..(204): n is a, c, g, or t
tttggcgggggacttctggttcagacaagggactatcaggaaaacgcacccanaactgagaactcaggtggggcattagctaaagtggaggactccaacccctcagaagacttcanccactaaaaactggtttgaaagaatctaagcagccactggctgatgaagtcagagccagagagccgcctagagaaaggtgtagatgtnaagttcagcattgaggatctcaaagcacagcccaaacagacaacatgctgggatggtgttcgtaactacctggcagccctctctgggacctccctttcttcctaacccaagattcatcctgtgttgataatctaaattactctcttatgaa

SEQ ID NO: 683019 - DNA, 161 bp, Homo sapiens
ctctggctctgacacctgcctctccttttctccgtgctcgcgtctttcatgcttagttgcctctgatgtactttggcggtcttcctctttccattgtattttgtcatgacggttgactgtggtgtcaccttcatcttacggattttagctcgaactttggt

SEQ ID NO: 683020 - DNA, 457 bp, Homo sapiens
caacgcatgtgccgctcccaacgcatgtgccgctcccaacgcatgtgccgctcccaacgcatgtgccgctcccaacgcatgtgccgctcccaacgcatgtgccggggcctttccggcggtgacgacctacgcacacgagaacatgcctctcgcaaaggatctccttcatccctctccagaagaggagaagaggaaacacaagaagaaacgcctggtgcagagccccaattcctacttcatggatgtgaaatgcccaggatgctataaaatcaccacggtctttagccatgcacaaacggtagttttgtgtgttggctgctccactgtcctctgccagcctacaggaggaaaagcaaggcttacagaaggatgttccttcaggaggaagcagcactaaaagcactctgagtcggtcttggcatactgtgttcgtgagcgagagaggtaccgagccgcc

SEQ ID NO: 683021 - DNA, 164 bp, Homo sapiens
  misc_feature (85)..(85): n is a, c, g, or t
  misc_feature (137)..(137): n is a, c, g, or t
ggaaaaaagcagacctaagaagcttaaaacttacatggaaaataaaagaacacaaaatttaataaattgaagatggagcagtttntatccacaagggatatatacctaaaacaaaactcatgattgaaatattaggntggaaagagacataccagggtaatacc

SEQ ID NO: 683022 - DNA, 835 bp, Homo sapiens
gcacctttgaaaaggggccgcggcttaattccggaccgcctaactcccgcggcctcaaacaaatgcaaaatgggggagttcaacatggcgcgccgccccccctccccgatgttaagaccccggcgcccccccaagataggtcctgccccaacataatgggcggccgcccgcgacatacacaactgcgcgggatggtgagaaaaaaagcgctaatctcttcgcggacagctgtgtagaaggaagaagaagagagaggatatgcaaaccacgcgctgctatacagagtggtccacgcaggtcgcaccaccacagcgagatcttctccaacagcgaagacatttggaagaaaaaacaccctggtgtaaatactccccagagggggcgctctgtgtgaaagacatctgggcgagtacatcccccgcccccctctggagagagagtgaacgcctcggtgactccaccccccgcgcccgacgagaagaagacgccccatgagaaggggcaccccaacagcaagaacagaataataaaagagaaacaagcacaaggagcgaaacaaggaagcgaatatacaaaagccatacaagtgacaagtaaatacagggcccgcccaaaccccctctgtcgaacaggtagtctgcgcaccaaatcgttctggctgccgtagaccctcaaaagagagggcataagaacagatacatcacacaacaagaagagacaagagaggggagacagaagcgctatactaaccgggcgtgccagacgacaagctacgatagacgccccccgctgtaacagagaagagagggctccggctcgggagccacacaaaaca

SEQ ID NO: 683023 - DNA, 780 bp, Homo sapiens
  misc_feature (412)..(412): n is a, c, g, or t
  misc_feature (417)..(418): n is a, c, g, or t
  misc_feature (421)..(421): n is a, c, g, or t
  misc_feature (430)..(430): n is a, c, g, or t
caacgcatgtgccgctcccaacgcatgtgccgctcccaacgcatgtgccgctcccaacgcatgtgccgctcccaacgcatgtgccgctcccaacgcatgtgccggggcctttccggcggtgacgacctacgcacacgagaacatgcctctcgcaaaggatctccttcatccctctccagaagaggagaagaggaaacacaagaagaaacgcctggtgcagagccccaattcctacttcatggatgtgaaatgcccaggatgctataaaatcaccacggtctttagccatgcacaaacggtagttttgtgtgttggctgctccactgtcctctgccagcctacaggaggaaaagcaaggcttacagaaggatgttccttcaggaggaagcagcactaaaagcactctgagtcncatcnnaanaaacacatntgggtgagaagagaaatcacacacacaaatgaaaaaaaaacacattgtgggccgcaccgggacccatgaaaaagtatttcagaaacccattgcgttggggcggcgccgcgggcccacataatggtcaaggtggccacagtggggtcacagagacgtgtgtccccgaggaaaatcgcgggcgcaaggaacaacggtgcgtggggattctcccacccaatttaaaacccgcccgggggggcaacaaccgcgacggtttcttggaacaaaattcccagagagggagcttgggagcgccccatgcagggtttctaaccaagggggcttccaaaagacgactcgaatatcaatag

SEQ ID NO: 683024 - DNA, 191 bp, Homo sapiens
agacatgtctaattgcttcagtagagccacaatatgtatctttgctgtacaggtgcaaggaaatctaaaattctgggccactgagttagatggtaaatactgacttacgaaagtagaattgggtgaggcgggcaaatcacctaaggtcagcagtttgagcactagcctggccaacatgatgaaaccctgtc

SEQ ID NO: 683025 - DNA, 444 bp, Homo sapiens
caacgcatgtgccgctcccaacgcatgtgccgctcccaacgcatgtgccgctcccaacgcatgtgccgctcccaacgcatgtgccgctcccaacgcatgtgccggggcctttccggcggtgacgacctacgcacacgagaacatgcctctcgcaaaggatctccttcatccctctccagaagaggagaagaggaaacacaagaagaaacgcctggtgcagagccccaattcctacttcatggatgtgaaatgcccaggatgctataaaatcaccacggtctttagccatgcacaaacggtagttttgtgtgttggctgctccactgtcctctgccagcctacaggaggaaaagcaaggcttacagaaggatgttccttcaggaggaagcagcactaaaagcactctgagtcgaaagtgctactctggaagtggggtccgagcag

SEQ ID NO: 683026 - DNA, 510 bp, Homo sapiens
caaacgaaattcatactcataagcagtcactctggtatgtatccctcctccaggcccggcgaaacacaagtctacttggtgtctctggatttacctattctggacacaccatgataaacagagtaagacaatatgtggctctttgtatacggcttctttcacttagcctgttctcaagttttatccatgttgtatatgtattaatggttcattcctttttattgccaaataatattccattatatgggtttaccatattttgtttatccattcatcaattgatgaatatttttgttgtttccatttttcaactattatgaataatgttgctatgaacatttgtgagcaagtttttaatatggacatatgttttcaattctctcgggtatatacctaagaatggaatcgcttggtaatagggcaattctatctttaagattttaaggaactaccaaattactataatttccacgatggctgcaccatttcacattcccactagccatgtat

SEQ ID NO: 683027 - DNA, 766 bp, Homo sapiens
  misc_feature (99)..(99): n is a, c, g, or t
tgggacacaagaggtttcaaacaaccccacaggggtcttggtgaatacctcgagacgttgtgtaaattttagtttcgaatagtgttccgagttagcctnggacacttgggtgcttcacacaccccggttgatcgcccgcccattgtggggagggcgcccagtgccaggccggcatcaccctgtaggtccaaggagttctcgaacaccacccctggcgacaaacatggggggaaaccccccatctgtttgtcccgggatatcaccaaaaatctaggcgttgggttgtgtgttggttgggtccctgtaatccccagcttactccaggaggcttgaaggttagggataacatctcactttggaagcccttgggagtttaaagcgttcccacagtgaggccccaagatgcgccacccactgccactcccacacctgggccacaaagagtgaatcccccccgcgccccccccccccctaaaaaaatggccacggcatggtggctcacacctgtaatccccgcactttgggaggcaagaggcacggtggatcacgaggtcacggggttcgagacccgcctgacccacaatggtgaaacccgtctctactaaaataccaaaattaccgggtttggtggtgggcgcctgtaatcccagactactcaggaggctgaagcaggagaattgcttgaacgcgggaggcggaggttgcagtgaaccaagatcgcgcccctgcactccagcctgggcgacagagcgagactccgtttcca

SEQ ID NO: 683028 - DNA, 468 bp, Homo sapiens
caacgcatgtgccgctcccaacgcatgtgccgctcccaacgcatgtgccgctcccaacgcatgtgccgctcccaacgcatgtgccgctcccaacgcatgtgccggggcctttccggcggtgacgacctacgcacacgagaacatgcctctcgcaaaggatctccttcatccctctccagaagaggagaagaggaaacacaagaagaaacgcctggtgcagagccccaattcctacttcatggatgtgaaatgcccaggatgctataaaatcaccacggtctttagccatgcacaaacggtagttttgtgtgttggctgctccactgtcctctgccagcctacaggaggaaaagcaaggcttacagaaggatgttccttcaggaggaagcagcactaaaagcactctgagtctgtttattgagatggtttcccactcatcttgactcagaggtcgacgcggccgcgaat

SEQ ID NO: 683029 - DNA, 358 bp, Homo sapiens
cgtctcggtaccccagtttgtgtcaatttgcgcttctccctccgggtccatgcacgactgtctggaaggccctgaagtcggtgagcgtgacttcagcgttctccggacacacgtctatcttgtctaccaccttgtctgcatcaaagtcgtcctggttcacgtcgccctacgctcgtcctgttcgcgtcctcctggccggggttaggcaccatgcggtagttgtcccgactgacagggactccgtcattgtctgcgtcgtcgtcgcatgcatcaccctgtgcttcgtggattgagtcctcctgggcactgttaggcaccgtgtgacagttgtatcgagagttctgacgtacgtattcat

SEQ ID NO: 683030 - DNA, 363 bp, Homo sapiens
aattcgcggccgcgtcgacacggtgcgagaagacgacagaaggggcctttccggcggtgacgacctacgcacacgagaacatgcctctcgcaaaggatctccttcatccctctccagaagaggagaagaggaaacacaagaagaaacgcctggtgcagagccccaattcctacttcatggatgtgaaatgcccaggatgctataaaatcaccacggtctttagccatgcacaaacggtagttttgtgtgttggctgctccactgtcctctgccagcctacaggaggaaaagcaaggcttacagaaggatgttcttgggatgaaagccctcgacatgaagggatcctctagaaacgacgcagca

SEQ ID NO: 683031 - DNA, 396 bp, Homo sapiens
  misc_feature (346)..(346): n is a, c, g, or t
  misc_feature (351)..(351): n is a, c, g, or t
  misc_feature (355)..(355): n is a, c, g, or t
  misc_feature (360)..(360): n is a, c, g, or t
aattcgcggccgcgtcgacacggtgcgagaagacgacagaaggggcctttccggcggtgacgacctacgcacacgagaacatgcctctcgcaaaggatctccttcatccctctccagaagaggagaagaggaaacacaagaagaaacgcctggtgcagagccccaattcctacttcatggatgtgaaatgcccaggatgctataaaatcaccacggtctttagccatgcacaaacggtagttttgtgtgttggctgctccactgtcctctgccagcctacaggaggaaaagcaaggcttacagaaggatgttccttcaggagggagcggcacatggaattttatcntaagngtcnggacntactaaggtaatagtgggagaaggcaattttgcgct

SEQ ID NO: 683032 - DNA, 1420 bp, Homo sapiens
  misc_feature (1420)..(1420): n is a, c, g, or t
gggcatgtatcagagagagtcccgacgaggttctgtctcattgcattcaacaagtgtatagagacaggaacagaatccgagtggacatcatcttcacagcctccgaccagcccatccgatataccatacatccgcattgaaaccctctcgaggacccatacttactcgagccactcttccatgcattactggaggacactgcacaagacaccgtattataaagatagagttaggctaccattcctatgccaaaacccaagcacagtgacgactaccacagaatttcagtccaggaaaattaataacgcagccgaaacgttgacaagcgaagacacgatccaagcaagacctaggatacacacttcttggtcacccttagccagagacactaccttaaacaagccgtaccccttcctactacatggagaacttcatgataatatagagcggcagcattgattgtgaggacatcgtggggaagatggacgattgcacccccaaccttatacttacaacggcggaaacttgtgtgaccaggaaggggcagacaggcagcgcgacggggccataccgagcaagcggatctatccattggaacaggattgccaaacaaacccatggatgtggacaggacaccgagcggcactcatcgattatccaagtgaaacaacataaaaacgaaaaggcacagacgtcggacacaatgaacctagagcgttacaaaacacccccagaaacggcaccaaagacaacagcacagccaaaatgggacccatgcgcaagcaacaaacagccatgacaccccagggacacctgaaaagagcgacactacaacaacaagcccccaaggaggatcagaggccccggaccaacggcgaacaccacaccaaacatagatgagcaaccatgaccgatgaaagcaactaccaatacccattcagcaatgaagagaacgcagaaaaggcatacatcaaagagaagaaagcaggagacaaaacgaggaacagagagcctccagaaagagaagagaatgccccgacagacactgcaaccggaaagcataccaatcgcgacaggcactagctataaacgacggaaaatagacgccatgacggacgccagaacccgtacttgaaggcaaccatgcagaggtaacgaggaagaggagcaaagaactacctcaagcaaagtacgcacgtacacaccctcaacgatggcacgaaaggacaaacgagtgaccgaccaacagagactagaaaccacacgtcgctctaccgcagaagcatcaacctctgcgagcgcgaaagaaaagacagacagccgcagagacgagagagacaagaaagagagggaaaccaagagctgacaccgacaccgctgtacgtcgagagagcagaaagacagcagatagtgccatatn

SEQ ID NO: 683033 - DNA, 248 bp, Homo sapiens
gtgtactccctgtggtactcctcccatggatgttaatgcccaggatgctataaaatcaccacggtctttagcatgcacaaacggtagttttgtgtgttggctgctccactgtcctctgccagcctacaggaggaaaagcaaggcttacagaaggatgttccttcaggaggaagcagcactaaaagcactctgagtcaagatgagtgggaaaccatctcaataaacacattttggataaaaaaaaaaaa

SEQ ID NO: 683034 - DNA, 524 bp, Homo sapiens
gagcggcggcgggcgcagctagcggagtcggccgcggagcggaggtgcatgctcggcttccgccggtacaccgttcaacctcgtggcgacaaagttgtccaacagagtgaaaaggcagggagtatgagctatgatagagaccgtatgagggaaggaaagaagtgggtaccgcggtacagcaggcagccccttcgacggcactaagtcatagaagcgaggaccgaccgaataaagagcaaagacgagaagccaacacccacaaaaagaagtagaaaaaggcacaaagagacaatagacacaaagaaaacaaaagcgcaaatgatgaagctaacaccacacaaaagagtcaacaacaaggcaacaaaaacgcccaaggacaaaccgggaacaagaacaagaaacaaaacagaaaaaccaaaaaaacgacaccacgaaaagaaggcgatgcaaccaccaaaaaaaaggtcaacaaaacaaagcagagggcacaaaagaccgaacaacaaaaagaccacaacaacaaa

SEQ ID NO: 683035 - DNA, 704 bp, Homo sapiens
  misc_feature (405)..(405): n is a, c, g, or t
  misc_feature (412)..(412): n is a, c, g, or t
  misc_feature (430)..(430): n is a, c, g, or t
  misc_feature (479)..(480): n is a, c, g, or t
  misc_feature (521)..(521): n is a, c, g, or t
  misc_feature (564)..(564): n is a, c, g, or t
  misc_feature (638)..(638): n is a, c, g, or t
  misc_feature (640)..(640): n is a, c, g, or t
aattcgcggccgcgtcgacacggtgcgagaagacgacagaaggggcctttccggcggtgacgacctacgcacacgagaacatgcctctcgcaaaggatctccttcatccctctccagaagaggagaagaggaaacacaagaagaaacgcctggtgcagagccccaattcctacttcatggatgtgaaatgcccaggatgctataaaatcaccacggtctttagcaagatgagtgggaaaccatctcaataaacacattttggataaaaaaaaaaaacaaaaaaaacaaaaaaaaaaaaaaaaaaacaaaaaacaaaaaaaaaaaaaacagaaaaaagaaaaaaaaaaaaaaaaaaaaaaaaaaaaaaaaaaaaaaaaaaaaaaaaaaaaaaaaaaaaaaaaaaanaaaaaanaaaaaaaaaaaaaaaacnttgtgggcccgcttggcccaagcgcttttaaacttgggcaaggtttagnntggggcccgaattcggggctcacttggcaaattcccccaantgggggggtattaaaattaacgggccggggtttaaaaacgttnggactgggaaaacctggggttacccaacttaaatccctttggagaaaaaacccctttttgcaaagtgggaatancnaaaaaggcccccaccgaaacgcttttcacgttggcaaacccaaatggcaattggtttgagcctt

SEQ ID NO: 683036 - DNA, 268 bp, Homo sapiens
gggataaataattgaaagtagtgttcctatggccttagtgtttttgtgaaaagggtaaatgtagtgaaaaaggttttttcatggccttaataaaaaagcccttctgtaatatatatatttttttgtaaacctttccctgaagggccaaaagttaaattataactaaatccctgtgttttcagaatgatatttaaccccaaacccgtggtcaaacccaaatagtgggttgaagtgtattattcatcttttagtgccttggcaattgcca

SEQ ID NO: 683037 - DNA, 310 bp, Homo sapiens
gcagatccctcataggctgttggagttgcaatggtgtgatctcagctcactgcaccctccgcctcccaggttcaagcgattctcctgcctcagcctcccaagtagctgggattacgggcctgcaccaccacgccgggctaatttttgtatttttagtagagaccgggtttcaccatgttgaccaggctggtcttgaactgacctcaaatgatccacccacctcggcctcccagagtgctggggttacaggcatgagccactgcgaaaacagaagagaacttccaccaggtttgcaactccaacagcctct

SEQ ID NO: 683038 - DNA, 1145 bp, Homo sapiens
gcgtacgaggagggtaggatcacttgaggtaaggagtttgagactagcctggccactatggtaaaaccccatctctactaacaaataccaacattcgccgggcatggtggcatgtgtctgtagtcccagctactcgggaggctgaggcaggagactcgcttgaacccaggaaacggaggtcacagtgagccacgatcatgccactgcactccagcttgggcatcacagcgagactctgtcaaacacacaacaaacacaaaaaccaacttacagaggtaataatagcacatacatatcttatgccagcagatataaataaacttggacccatactggtactacagactaaagctagagacatctaaacagtagcatggacaagccatggcacagacaggcccatcctctaacaggggatgccaggaatggagcaaagcaaatcagtaaccaagctcagccaccagacgaccaggcagtcactcatataaacttgcagtctcgacagtcatcgcaggccacgccacgccagaccttccctgacacctcacactcatctggctggtcacactccatattcccacccagaccagaataccctgagttgctcgagcaagactcctagaccaacacacatcacgaagactccccttgtaaacttcacgccaacagaatcccacactgtccaaaacctattccagtatcagaaccagcgcacgccaaaaccagggtggcatacccattcatgaccaaggaaggcaaggagtgtgcccatgatactgcgaacacatggctgcacgccatctcacaataagtcgtgctgacataaggatgccacacatgagatggcacacaccatctagaaactacacctaacgacgctcaaccagaaacacgtccccatatgctctctacgaccaccagacaccagaattggtagccactagacaagcacaaccagagtcaacgcgacagagctgaatatggcggagaaagggaaaccctccatccaggacgagattcgaatcaaaaccgaaagcaggcacgccaacgggaagaagaccacatgagaaacgcatgtctgaagagagaccaaaaaaccggcagcgtagatggagaagaaaaggtgagcggagcccaaatgcaac

SEQ ID NO: 683039 - DNA, 245 bp, Homo sapiens
  misc_feature (50)..(50): n is a, c, g, or t
gggaaggggtctttggaaaggggagggaagagtgggaagggctgcatctnatggcttgagtgccagctcagccacagtacactagaacaccaagtagacttctaaggtttttaactgcagtccctggctcccagacagcacctctagacctgcccacggcctgggggaacttgctacagaggttacactgagccgagatcatgccactgcactccagcctgggcgatacagcgagactgcatctc

SEQ ID NO: 683040 - DNA, 290 bp, Homo sapiens
tagatatgtggtgtaggtcacagacatggctcggatcccgagttgctgtggtgtggtgtaggctggcggctgcagttccgatcagacccctagcctgggaacctccacatgccatagatgaggccctaaaaagcaaaatagacaaaaacaaacaaacaaacaaaaaaaaccaaggacattggatgcccatcatctaattctgctgcctcaggtacagatgtagaaaatgaggttcagagattctaaaactactgtgttcaaggccatacaagtagtttatccattatatc

SEQ ID NO: 683041 - DNA, 633 bp, Homo sapiens
  misc_feature (2)..(2): n is a, c, g, or t
  misc_feature (5)..(5): n is a, c, g, or t
cnacntacagcagctatccaagcaggcactggccatggctcaagtgcaagtccagttcacatcatccaggttcgagagatcgcgcacattgagcgggacggctatgcacagatcttgagggatctgggtggcattggtctgggccaatgcttgtggcccctgcattggccagtgggacaggaaggacatcaagaagggggagaagaacacaatcgtcacctcctacaacaggaacttcacgggccgcaacgacgcaaatcccgagatccatgcctttgtcacgtccccagagattgtcacagccctggccattgcgggaaccctcaagttcaacccagagagcgactacctgacgggcacggatggcaagaagttcaggctggaggctccggatgcagatgagcttcccaaaggggagtttgacccagggcaggacacctaccagcacccacccaaggacagcagcgggcagcatgtggacgtgagccccaacaggcagcgcctgcagctcctggagccttttgacaagtgggatggcaaggacctggaggaactgcagatcctcatcaaggtcaaagggaagtgtaccactgaccacatttcagctgctggccctgggtcagttcccgggca

SEQ ID NO: 683042 - DNA, 964 bp, Homo sapiens
cggcagtgcagacatgactatactccccaaaaagaagccgacgcctcccgacgccgaccccgacaacgagccgacgacgaccgggccgatgcccccggcgccgcggcgcggcggaggtgtgggcgtggtgcggcggcggcactggtgctgtgtgtgcggctggcagatcgcagaccgtgactccgtgcgtctgtgggtgggcccgtccgcgagcttcgccaccgcctcaaggcccgctaccaggaccgccgggcgctcttcatcgcctgggcgctggccgtgccgcctgtgtgcaagtggcgtggtccccgtgccacaagcaggcttctcgcaccgtccttgcggggtgcccaggtggtccctggctggctggtccctggctggacggcgctgtggcgcagcatggctgggccggggtgttgggtagcctgctgggcgtagcgtggtaggcgtgtaggggtggtgccgtaagggcgtagcggcggcatgctagctccggggccttgggccacaggcaatgctgggcgaccgttcaagctacccgggggttgcgcgccggttggccagcggtggcagtaccacgagcgtgacggcaccggacaggcagcagggctaaccaaccagttgacggacgaagtatgagggccgggctgacaggcaccggcaatcggagcggctatgggacccctgcacacctgtacggcagcaggcagcgagcaatagcggtccaggaacacagggccctaacgagcacaacgaacggccttcatccatcaaacgcagatgcacggatggataggcgcccctggacactacccgggagctgaaagcatgaacccagggtgaactggaagaccaagggacagtgcaatgaaggatgaccgaagaggccagttgccagggagctaatctgcacttgaacaaatgcccgagtaacggcgccgagaaactgtcacaagacgga

SEQ ID NO: 683043 - DNA, 1119 bp, Homo sapiens
taggcctgacttacaagtgatcagattgactcccctctggggtccccgccacactctgctatcaggttggagtcccaggctgggccctggtggggtctccagggagtcccatcatggacattgaatggagcaaggagggactctggaagcttcctcctctttctctttccctcccaacacccacttggctaattggactatctgtgggacagaagccgggctttctgtctgggccaccactcccaatcctggagattggagagagcataggatgtcccggccccttccctaagccttcggtctggatagacctcaacatcacctctgcaataatgtctgtgtcactctcccatcggccacaggacctggagaatgcactttattctggggggtgaggcggggaagcccccatcctccttccttgctgctcctggggctcagttccacaggctcctttcctctccagaatcacatcacaggcacacaaaggccgccaggcaatctcagccctacacaggcaccatcccttgtggctcagaggaagagtggccgtggcagggagcagtcccaacgtcctcctgcagaatcccactttggaggctaagaatgagactggtgtgaccagtatgactcaggctcggcaggtgtctatctcccagtcttccctccctcttgagcccggggtggcgctggccttctggaggtcagaacccaacaagcacaagaatgggcatagctggcctcgaccactgctcccccatggccctccttttgtgccccaagctgacactcactcacctgcccctcctccagctgcctgctgctcactcaaacttctgttcacatgtattcatcttccggtcagcagctggttcctggacatcagagcggcggggcctggacatcaggtggcagacacacctgtctatcttcttggtgggtccaggatcatcctatatctggtttctcctcctccaggactctttccccagtccctgtgctcactcctctgtatctgccccaggttcttctcattacacagagaccagttgtatttgtgggatttcacccattattaattaaaacctatatttataccagtaaaaaacaaaaaaaaga

SEQ ID NO: 683044 - DNA, 1212 bp, Homo sapiens
agcggatcttgtgtctggcggctcggctgtaaggaggtggcagtgcacaaccacaacacaacggccgggggcaggagaaggcggcagcggcgattcttaagcggcccaggcggcggggcagcaggcagcaaaggcaaggagggttgggcgggccgggctttggccttccgtgctccttgcaaggaatttgggcgggcgggcgcgaacccggggggaaacccgagcaatttggattggttcccaggcattcggccgacttggttccaaaggaacaacgttcaggcaggtggttcccgtggggaccttggaattcccaaacaggccagggggttttcttaatcttgggttcacacctgggccccaggtaccggatggtttggttcccggaaagtggccccttcgggttggcccaaacaccaaacggggcacattggggccaacaggacaaaccgggcacaaggatggacaatggccaaggaaccaatttatggaaccggaagtgcgagcacctgttttaactttccacgccaggggcacagagactggttaattggttggttaggcggggcccaattgaaccatggccacactggacaaatgtctgggctttccgaaggaaaccaatttccccacacgttagtttccccttgcggtttcattccacagcgggccctttgcacgtagcgagcctcttgtgatgagccgcttcgcggaggaaattctgggatttaacacgccaaacgcggatttcaatttccgctttttggggttggggggagtagattcacaacagggacttgggtgttaaaaccccttataccaatttggacgccgaagagtgagccacaccttgtggcccccctacgggataggtgcgtggcttggaaatgtccactttttatactccgtatccccaccgaaggagattatccgtacatcgcccttgggcatggagggtcacacggggaatggggcgaagcccaactatcggacggtgtataacagacaaaacgctcgggtgtgagtcaccacgtgacacgggggttgtactctcactcacccacatgcgagacacccccacgcgtgaccgattccggaaggctgtgcaaaggcgacacttccacaacacccacggaccgcgtaaattaggtcatgagcacgcttggtgattcaccaccactgggaccccgttctaacccacccctgttagaa

SEQ ID NO: 683045 - DNA, 104 bp, Homo sapiens
ctgggttgtgatgtggaatgactgcttgagccctgagttcaagcttgcaatgagctatgatcatgccactgcactccaacctggtgagacccctgtgtgaaaag

SEQ ID NO: 683046 - DNA, 397 bp, Homo sapiens
tgtgtcttgtgatcccctcgcgacggggatatcaaacgtggttctcactacataggagcaaataacggctcatctaaggagctttataaaaatttctacacattaacttcaatccagaggccctgccttatactcttgcagtgagatcccgaagtggtagacttaacagaagtaagtcaacacaaagggcactctgatgctacatgagaacacccaagccaataaagacggctactggcctccacacatctcccttcccttcttcattccaaacatcccatagggagcagcaccctaagtaggtcgatgtcctctaaaggaacaaaaccgaaaccacagagactgaggggtgatagagtctcaatctcaagccacagagcacacaatatcctcatct

SEQ ID NO: 683047 - DNA, 558 bp, Homo sapiens
tttatgcttgcagagtgttttcattcctgggagataagtgttgaagtattaaaaagtaaagtgtcagatgtctgcaacttactttcaaatgatttagcaataaaaaaaaaaatgtgcatgcccgtgtgtgtgtgtgtgtgtgtgtgttggagagtgggtcagagacgaatgttgggacatgggagctaagggcttctgggaaagattcccgtgggggactgtccagtgttctcagttgtccctggggtgctacttctggccggatgggcacttcgaccagccggtggtccctgggaacccaaaagcaacatgagacatttggggattctgaaagcagcacattgtgctggggggcctgcctccttattccaatgttggccaataagcccctataatttgagggacgaggaaccatccagggttcagagtgcaaagcccaacttgagaagggaacggagtgagagtctctgtggagcagtgcgagtcatcgtgggctgatgtatggcgagatcccttttgcaagccttgtatacacagttgtaaacagtgtgtgtccta

SEQ ID NO: 683048 - DNA, 262 bp, Homo sapiens
  misc_feature (105)..(105): n is a, c, g, or t
caacattatgaaaatactatggtatgagagaataagtatttggaaaacaacggataattctttaaatccagaactactttttatcttctggatatcatagaaacnatgttcattgtaaacttcttgagggggcatccattgccccagataaacgtcccaggtgatttgtaaaacaggaattctccttggtgggtaaataaagattaggggaagtttttgggaaagcaaacaaggcccaaccatctagtgggggtcagtctca

SEQ ID NO: 683049 - DNA, 479 bp, Homo sapiens
gagagattctacagcacatgcatgaatgaggaggaggtggtgtcccaagggcatttatatctttgctctgtatttggaggagaatggagagttccaaatgatcagagcttgcacattactagatcccctttctagggaaaatgctgcgatcaattgaagttgtcatcctcatgaagctcatactgttttgcctgaaaaataaatgtaaatgcacattcttggtcttaaaatacatagaaacaatacttttttccctgctactagctttgtaagataaatagggttcatgtttaacatatatactcaatacttgggcaatttgtcttcatctaatgaattattatttaccatttttaaattatctgctcagattacaagattctttttaacaataaccaaattttaattagtaaaacttttggtcactttatattttctgatgtgcatattacaataaaatattattttgctgaaaaaaa

SEQ ID NO: 683050 - DNA, 113 bp, Homo sapiens
gggctaaagtgatactactaagggagactatggtctgtagtacatagcgcagggtagataggagcaccagaggctagctatcggcacctatagggatattcgctatattacac

SEQ ID NO: 683051 - DNA, 194 bp, Homo sapiens
ggggccccccggggggggggggttggggtttttgggggggggggggggggggtttttgggggctttttcttcccccccccccccccctttggggggggggccgggggggccctttttttgggggcccccccccccccccttctgtttttttccccggggggggcccccccttttttttttttttttttttttta

SEQ ID NO: 683052 - DNA, 998 bp, Homo sapiens
gctcttcctgcagtcacgtgtgcaattccagcgtctttgattcccagttagcagtatgctccaactcacgttgctggcaagggccatttgagagttggtgagctgaggttcaaacgtccccctgcattctctctacctggcagtgccactgggtgaagggaagacactttcagggagaggagtgctacttacagatctattggtgagtcatgcgcatctatcagcatccagatcaccagtggcatctagggagctgctggctataaaagggatcatccagtggagttgtaaacgagggaaccatcttgcaagatctaggaccgacggaaggggagggatgtaggactggagtctgatacattaggcctctagggagcacttgatgacatgacgtgtcgtggctctatgagagatctacttgggatgcatccaactgtcccatcccctgttaatcccatggcacggaacagtgatcggtggccgcaggatgcaacccagcaggtctgcctggaaagcttcgtctccacatcccaggctggggattgaactcactcatggcgatggtgatactgatggtcgactcttaaacccggctgacttgacgccggccacggtgcaatacatcaaaattcccacgggatgtgtgaagcaaccgtgggacagtcgacaagccgcgacgcagacacgggcactgggccgtcggagtaggaccaagggggaggccatccatgtctcatttcaggataagtgccgcgaataaagtcattccccaaagcaggcccgtggcacgagcggatagggagtctgggtggggccacagcgacccaatgcagctgggcgtgggaacgtcggcaagcgggggacgcagcccatagggacaagcaatccatcggggcgggaaccccccggaaagggaaggcacgcatcgggaggggagaaacccagaggacctcggggaccttggcctgagctccacacgggggccacgcgaagaaccg

SEQ ID NO: 683053 - DNA, 167 bp, Homo sapiens
  misc_feature (59)..(60): n is a, c, g, or t
  misc_feature (69)..(69): n is a, c, g, or t
  misc_feature (122)..(122): n is a, c, g, or t
ctgagccgcccccatgatcttgcccgagcgggtcttcggcaggccaggggcccactgcnngtgatccgncgcggcaatcgggccgatctccttgcgcaccccgccaccagttccttgtgcantcgtcgctgggggcttcgtcggcgaccagggtgacataggcatag

SEQ ID NO: 683054 - DNA, 170 bp, Homo sapiens
tatggtatgacaggggttatattgatattgtgtgatgagattgatggcccctaagatagaggagacacctgactaggtgtaagcgagaagatgcgttacggtctacgtgcatgctccacggtgtgcagtatttccctgctagcggagggtagactagttcaagctgttcc

SEQ ID NO: 683055 - DNA, 491 bp, Homo sapiens
cggggatcctgaggtcatcatggctctgaagtctctagtcgtgttgccactgctggtcctggtgctgctgctggtgcgggtccagccttccctgggcaaagaatctagagctaaaaaattccagcgtcaacatatggactctgactcgagcccgtcttcttcttctacgtactgcaaccagatgatgcgtcgtcgtaacatgacccaaggtcgttgcaaaccggtgaacactttcgttcatgaaccgcttgtagacgttcagaacgtttgcttccaagagaaggttacctgcaaaaatggccagggtaactgctacaaatctaactcttctatgcatatcactgactgccgtcttactaacggatcccgttaccccaactgcgcttaccgtacttctcctaaggaacgtcatatcatcgttgcatgcgaaggctctccgtacgttccggttcatttcgacgcgtctgttgaagactcttgaagtcgacctg

SEQ ID NO: 683056 - DNA, 330 bp, Homo sapiens
acctctgtctatggagactttagctgtaagggaggagccaaaattgacagcccagggggggatattgggctgagtctacagcgtgtcttcacagatctgaggaacatggatgccacctggctggacaacctttctgaacccagttcggttgccctccatccagggcatttcctgttcaccgtggcagggcccctggggcccttttatttctttaggcaagcgggacctggcatcatggtggatatggtgcagagaggctggatttttttggggcccttaacagccaagtgttaccccattccaaggtggggtggggcttccttccttggg

SEQ ID NO: 683057 - DNA, 153 bp, Homo sapiens
cagccaagcagcagtgcccacggagccagagtcagcccagacccttcttggccctatggggagcctagggctaggtgagaactaggccagcactgcgatcctgagccaatccgccttggggctgaggtttgtgccccgagcacagtttccctt

SEQ ID NO: 683058 - DNA, 148 bp, Homo sapiens
  misc_feature (148)..(148): n is a, c, g, or t
gggaatttgcagtgtggttttcgagcctcatgccgctctggcgaattaacccttgacttctattctttgttgtacttaatttagcctaagccaggcctttctttcatgccacctttactccatagccaccatttccttgttgtttaan

SEQ ID NO: 683059 - DNA, 1283 bp, Homo sapiens
agctgtatgtactagcgctgaacgatgcataccttacttagggacagagggagacgatatactgctactacaaactcgatagtccttcctctattagtgatgtataactgaagtaatagctatccgcttagttcgtcatacgtctatctcgtcactagagtctagtcaaagacacacaatattgccctctttatatgcatgcgtagttgatgcacgtagtacgccactaccaatgatcattatgatctgcagatgcggatatccggtactgctgatgacgatatgtccatacatacgcttgtctaggtcatgctagacagattaattggcccgtatggagctatcgaatatcagtaatcgcataatagccttagctcgtgaagaggcatagagtgcaacctaagatcgggtcacctagagtgaggacttgattcgtggagggtgagcacgattgttgaacgcaattgcatcgattgtgtcgcacacttagacgacgttctttaaaggtacggaacatgttcgcatcgaatcgagaggtcgcaatgcgtggcagaatcgattgggcgcgttgatataaagaagtgtcccacgaactgatgtgccaagtacttcgcactaacagttaacccctatactctggtttcactgctgtagagcaagcggaggaagaggttggctatcacagatgacgcaaaaaggtgactgtacaattgtgagaaaacggccagtgtggtttcaccacaccggcaagatgcacttttctttttcgccgtacaactggtaaacgcactcagcctatataagcgagtaatcgcccacgttcacatagcatcttttaataggcccagtcggtgatatcgctattaggcgccaattgagaattgtgtccccaataaattgccgcaacgtttgggtttcagattctggtgcgtacctggtgtgggaaagaggggcgcctagtgcctggcacctgtcacgtttggaaaagttttacgaaagtgaataggaaaatttgcccattcaaatccggtttcgaggggccgcacacatttggaagtcgctgaaagcagtgcaattagggtcgggttctgttcggggtgacattaccctgttgcctaggttcggataccgcagcgataaacgagaagaagatccattcactgtgtgtcgaaaggggtgttaggttagacggcgcaaattgttcagactctagggggcccatacaggacggaaggagccgtcatttcttccgcaggttcacgttcgcggaaatagcaatagat

SEQ ID NO: 683060 - DNA, 330 bp, Homo sapiens
tacgaggacgagaagatggagtaaaaccttttatgaccggtgctgctgaacaaatcaatgcacatccttgctacattcaaaaactaccagttctttattgtgtgaaaacatgaatccagatggcatggttgctctattggactaccgtgaggatggtgtgaccccatatatgattttcttcaaggatggttcagaattggccaaatgttcaccaatgtggcaatgattctggatctatcacctgtcatcataactggcttctgcttgtcatccacactacaccaggacttaagacaaatgggactgatgtcgtctcgtctctctcttgta

SEQ ID NO: 683061 - DNA, 250 bp, Homo sapiens
ccccccaaaaaaaattttgggggggggcccccaaaatttttttccccccttaaaaggggaaaacccccttttgggcccccaaattttttgttttttaagggggggggaaattgggggggggcccccctttgggggggggggaaaactttttttttttgggggttaaaaaattggggggggggcctgtttttttttttttcccccggggggcccccccttttttaaacccccccctttttttcccccttta

SEQ ID NO: 683062 - DNA, 370 bp, Homo sapiens
agcacagcatactttatctcttacagtttctggagactggcaatcccgaaatctacgatgccagtcggtctagctttctgcgtgtgtgacctcttcctgacttcctcacacggcggggagagaaagggatgacacaagctctcttcagtgttttcttatatgggcactagttgcatccggagggttctaccctcataaattacctccaaagcttctatctccaaatgccatcacattggggattaggatttcaacatatgacttttgtgtgacacaaacatttagcccatagccgagaagaaataaaacagtagttttcaggtgatgggggaccctgggtttctctgtaggagaaggaatgctgtccaag

SEQ ID NO: 683063 - DNA, 535 bp, Homo sapiens
cagtgctgggcttcacttgaactagagaaatgcaaatcaaaaccacaatgggataccatctcacaccagtcagaatggctgctattaaaaggtcaaaaaataacaggggctaatgtggttgtagagagaaaggaatgtttatacactatgggtgggagtgtaaattagttcaaccatggtggaagacagtgtggtgattcctctaggacctagagtgggaaatgccattcaacctaacaatcccattattggtcttctcttggttctctagttctttcggtggtgtgagttggttaacttgagaaccagtatggttaaaatggccatatgacccaaggcaagttatagattcaatgccatgcctgttaaactatcatggacattcttctcataactagagaaaaactattttaaaattcatatggaaccaaaaaaaaatggccaaatagccaaggcaatcctaagcaaaaagaacaaagctgacggcatcatgctacctgactttatattacaggcctacagtaaccaaaacaga

SEQ ID NO: 683064 - DNA, 836 bp, Homo sapiens
  misc_feature (143)..(143): n is a, c, g, or t
  misc_feature (481)..(481): n is a, c, g, or t
  misc_feature (559)..(559): n is a, c, g, or t
  misc_feature (627)..(627): n is a, c, g, or t
  misc_feature (666)..(666): n is a, c, g, or t
accaggtcaacagctatttctgttgaccccatctgaattaactgggcctcgaagctaaacctgacaattttgcggatcctgcacatctggtctagggaagggaaggtttaattcttgaacaaagaccaaagacttaaaagggngtttggtgcatcaagcttaatctctttctaagggaccttaataagaagggcaactttgtggtgcttcaaacttttcttactagcaagatctgaggcatgttggagcataaatatttctactaggatatgaagccctttaactatagtggtttattctttttactaggatggatttttaaccttccagtggaatgataaaggctaagtcacttttcctaagcaaagttttaagatgatttttagaacaggtttaggtttacagcaaaattgagagaaaggcacagagatatcccatatactcctgcccccatatacacacagtctccctactatgctgnagccatatttacagcaacttttccggaaatgtaggattagaagttaggctttctgaattttttcctttaatttggttntagatttttttaatatggggaagacattgcttttcttctgttagatatagtagggtttgggaatatangaaatttttagaactaaaaatcaatttcttcagaaattntgaagggcctggttaataaccttttagattccaggaccactattaagataataaatttttattatgattctaaacatggggggttgggccttatttcctcttttggaaagagggagtctctttatttttggggcgccgaactaagatgagggaactagttgggggtgttt

SEQ ID NO: 683065 - DNA, 1554 bp, Homo sapiens
  misc_feature (700)..(700): n is a, c, g, or t
  misc_feature (1553)..(1553): n is a, c, g, or t
cgcgagggagcgaggcacagacctggctcagtgagcgcggggggcgagccccgagtcccgagagcctgggggcgcgcccagagccggtgcgccgaccctcctctccgctcccgcgcccatccccttcggcagggctacaggttatttttgatcgcgtgcgcagatcaagccctcgcttccgtcctcatcgctcggcacgagcctcgctcgctcatgcgctggtgggagcctcagcatcagtaccgccagtccgtggacccctcgagtcagcggcgagctcccaagtactccactcgccttaaccactgcagacagtccaattgtgggccacacaggtaggctgacatagaacgcatccagggtctcgcgggctcagggccgggcactaagtctgctcgatcctacgatcagtgttggcccatgtatctcggtagcaagcgcaggccgaacgtgctggacctactgtctggattgctctggactacatcagaagctcagctaccttccacgcagtaggaaggcaccgcattcgtactaatagtgacgacttacggggaacaggtcggcgccaactctatagaaggtccggatccccgcaaccatataaggcgccttttattgccacataacgaatgcccaaatcttccccgcgtagcagatcgtcatggtgccaaggaggcgatttggtctagcacggtcnttccaaccgtgagccggggcgtgattcctagcttaactgggtggccactgtgggcgtactcgcaaagggttccttgatggaggcggacagggcagggcaatagagggtcctgcagggggccccgacttcgggtgcctaaggaaaggtggattttttccacacttaaggaagcagttctgatttgaacgggatagggaggcgcccggtagtgtattagacctcgctaataaggcagcggccccatactgaaagcgccccgactgagcaggcccttggaaggtcccgtgacagggtaccacaacgggccagggcttgggtaggggcacagggggaccgaaccttggtgggcccacgagggttccaggcaaggcgcgcccggggagaagcggccaaacccccgtgacgggatgagtcccggggaagacgcgggggggggccctggagggggccaccggggaagagaccgagcgccgtaaaaggtggccggaggaacggagacacagcgcctccgcaaccacgtggagaagacgacgggcaaaatgatgccgccacgcggggagtctcacgggagggagcgaggggcgaagacgggtccccccaaagaccaacatgtttccagccgggtgtggggacaccccaccgactgatgcagcgcagggcaacatgctaagaagaacaggacgccgggagatgtgcacaccatgatggtagacaaaagacggcatgtatcgtaccagcacgagcgaacacacaatacgggggtgtcgtgcgcgaccaacaggcagagagcatggctgcatcacccgaacgaacgagggcgacaaacaccctctgctgccacgtctgctgacgng

SEQ ID NO: 683066 - DNA, 1043 bp, Homo sapiens
  misc_feature (92)..(92): n is a, c, g, or t
cgtgacgcgtggtgtcagagtccgggactggtcggcggcggagccgggggacggcgacagcgggtcggcgggccgcaggagggggtcatggngtaaagactactaccagacgttgggcctggcccgcggcgcgtcggacgaggagatcaagcgggcctaccgccgccaggcgctgcgctaccacccggacaagaacaaggagcccggcgccgaggagaagttcaaggagatcgctgaggcctacgacgtgctcagcgacccgcgcaagcgcgagatcttcgaccgctacggggacggaaggcctaaaggggagtggccccagtggcggtagcggcggtggtgccaatggtacctctttcagctacacattccatggagaccctcatgccatgtgtgctgagttcttcggtggcagaaatccctttgacaccttttttgggcagcggaacggggaccggaaggcattggacattgatgaccccattactctggcttccctatgggcatgggtggcttcacacaacgtgaactttggccgctcccgctctgcccaagagcccgaccgaagagaagcaagatcccccagtcacccacgaccttcgagtctcccttgaagagatctacagcggctgtaccaagaagatgacaatctcccacaagcggtaaaccccgacggaacagagcattcgaaacgaagacaaatattgaccatcgaagtgacgaaggggtggcctgcaggaacctgaatcacttttccccagggaaggagaccagacctccaagaagattccagctgatatcgcttgtgttacaggacaagccccagaatatcttgaagagagatgggtctgattgtcagtttatcctgcccaggattcagcctcgggaggctctgtgtgtgctgaccagtgaacagtcccactctggacggagacgatacccgcggaatcaaggatgtttcaggctggatgcgggaaaagtctgggaaaggcccccttcccaaaacgccgaaacatgggaccccaatgagggagggactccga

SEQ ID NO: 683067 - DNA, 394 bp, Homo sapiens
caacctaatatggtgatgtcatcgattcggacatcaggcgtggtggctaaatttgaagcccagccagatgttgattatcgcggtgatatccacttctttaatcatgcgattcccaacactttttattcaatcggtgtgactttagcagccggggatgctaacgcttggttcaagtctgtctttggacaagatatcccatttgcggaatgggtaaatgctgcagcagagtcatcagttggggcgaacgggttgatctttacgcttatatttctggtgaacggacgcttatccagatgctgatattcgtggtagctttacgggcattgatcgacccatcaacgcgccgactttattcgcgccgtgttggaagggattattttcagctttaaaggca

SEQ ID NO: 683068 - DNA, 1565 bp, Homo sapiens
  misc_feature (92)..(92): n is a, c, g, or t
  misc_feature (1341)..(1341): n is a, c, g, or t
cgtgacgcgtggtgtcagagtccgggactggtcggcggcggagccgggggacggcgacagcgggtcggcgggccgcaggagggggtcatggngtaaagactactaccagacgttgggcctggcccgcggcgcgtcggacgaggagatcaagcgggcctaccgccgccaggcgctgcgctaccacccggacaagaacaaggagcccggcgccgaggagaagttcaaggagatcgctgaggcctacgacgtgctcagcgacccgcgcaagcgcgagatcttcgaccgctacggggacggaaggcctaaaggggagtggctcctcatgatggctggtacgctgcgcggatgagttgtccagattggtagcctactcttcgagctacagcagtttccagtgggagaccgctcgatgccaatggttttgctagacgtatcgtatcgcgtggccaagaaagtcccctttgagctagcctgtttgcgggcgcagccgagacatcgggcggaggaacgcgcgtggatcacttgcatgaccccagttctgctggcttccgctatgggcagtggagtggcttcaccaagctgtgaacctttgggccgctcaccgagtctgatccaaggagcccggcccagaaaagaagagcaaagatcacgcctcgagtctagcccacgaaacctttcggaggtctcgccttgaacgaggagtctagcagcgtgctggtaagcaacgaagcatgaacaattctcacaaaaagcgggctaaaaaaccgcggacgggagaacagtagccccgttccgaaacaggtgcagagcaagcacaccatacgtggaacccaaccggaatgtggaaccacaggggggcgggccaccggaaagggaagccacacaatcgaacatacccggacgggccacgcgagaccgtagcaccccaacaaagaattacacacagggagaacacgggcacaggtagcacaaggggcacaggccccacacaataactgttaaacgaagacgaatgggcacctgcagtgacactatacccgtggcgggaataacaccggaggaaggacccaggcggcatgaccatgacaggctccccacggaagagggagcggacaacgcgctgatcaaacacgttaagcacagaaagagcggacaaaatctgagacagagacccaccacacaaaacgccagatggacccccaagggaggagcatatcaaagaggcgaacaaaaaccaacgacgatctacaaaaaacagcctacaggacgaacaaagacagatgatacacgatcagaaggaggcgacggcatgcgatcaacagtgacgtgcttagaggtgangcgagtacataactcatacaacccaccaaccatatccaaaatctaactagaccaaaaccaccaaagatacacaacaacaacaaaacaaaaacactaaacaagaacaaaagataagaaattaaccacatagcacccgacaaccatcacacaacacaaagaacacacacataactagcctaacaaaacaaaaaccgacacataatacgcacaacctcacatccaaa

SEQ ID NO: 683069 - DNA, 1293 bp, Homo sapiens
ggtaaacaaggccaatgggaaatgtaaggtggactccggcgccctagactgatcagtgcaagaagcaggagagctaagaaagatggtgaatgcacctatttgagaaaaggccatatggaattatggtcgattggaccagtgactatctaagcacctaataagagaccatcagccgcgtttgtcaaaatggcgcgctatgtcaggttgcatgcgggctcgtagaagcctatccatcgtatcaagcgtgttgcaaagtgccgtccttgcgaattaacgcagttcagcactcaaggctccgtggtactcgcacaaaaatcagcatacctcatgcatgcgttaaaagtccgttggaccgactaagtacatgaccctaaggaagtacgacaatatgcaaattggagaatgagaggccatgaagacttagtgtaggggccacgggtccggacgcaatggaatgggcttgcatgtgcaccaagtggggactgtctccgaaacgaaacgagaccgaccgtgtccgtatctgagcgagtgaggttacacaagccgtcgagccagctttggtaggagaaacacaggataaagctcaagctgagtggtgcattagcacgcacagaaccagtgtgattcctcgatcgaagctggattgtcgttccttgccctgtcccttgattgtacgtatagaattgcggggtccccgttacctgcgatttattcaacggggaaacaagggccaacgaacttggagacctgtcttaagtacaccagggaaagcacctagccagccacttgtccgccgtatcatcagcaagggtgaaccttcgggaagacctaaagggcgcatattgcgctttaagccttggtcgggacacgctattcgatgggacccaaagtttagcaaaatgaacgcggaataactcgatagaagatccagcacggtcacttgggggtttgcccacatggtcccttgggatccctagaagtctagataggcctccgtaattcggccacacgacttccgacgagacaggcgtcaacaagctgctcttaaacgagaaaccttttgtccgcccttaaaagctcgcgggtgtcaacactggctaaccacttggtttgaagttttttcttggtagccattttagaacccacttcaattctggcacaacataaattacccaaacattttcttccctttcccaaaacaaaaacaacagaacaacacagcctctgggagcggcatcgtcataaagtcgccggggccggacggagcacacacagtgcggtcacaccgagagc

SEQ ID NO: 683070 - DNA, 182 bp, Homo sapiens
  misc_feature (147)..(147): n is a, c, g, or t
gaggagtgagctgctggacacggctcagcagatcgtgtacagaaatgtgatgctggagaactataagaaccgggtttcctgtgggttatcagcttactaagccagatgtgatcctccgtgtgggagacagggagaccgagcccgggntggggtggagagatgaaattcaccaataagaccca

SEQ ID NO: 683071 - DNA, 1013 bp, Homo sapiens
gcttgcgaagtcggctccagcattagcctgtggtaatgccatggtcttataaaccttctccctttacacctgttgactgcattgctactggctgcagaatctacagtgaggctgcgtgtacctcctgcggctcttcaagtgtggtgcacgtggaggggctgccacaggccagttatcgtgtgtcagcatcccgatgtggccaaacgtctccttcactggaatgtgtgcccactggcatgaaggatcatgtgatgcatgtcatgctaagaggaatcaaagcactgttaccattgagaagcttggcatgtgcaagatcgtccatctcatcatcgtatctacagactggtgatatgaagcaaatgcgtcgtaaagcgggagcgcttgatggcccaacttccctccacgacacagggccaagtgttgtgcgtcgtaaactgggcgacaaaggagttatttccgtcgctacgaaaacgagaagttctttgatagaatctccacgaggaggaaaagtcggtgagacacaaggaagccgagagagcgatctaatccattggggcagaatcctcctttctcatgggacaccaatgactgagaggcaatgagggtctcaacttcgattcgaaaccgaacactacgagccatggccagcctgagatcccgttaagcgcagttttgtcggaacaagagtagagtctgggccgacacagcgagaagcccaagcgttcttaggcttagcctaacggttgagtccgactccgttcagaagttcgcgcccatgaactattcacttaatgtgggtgtacaccctttgaagaaccgaaatttcgcgccaatacacgtgtcagaccacgtgtgatggcccattactttgaacacgagtctcgaactgaaccacttcgaggttgggctccgttgtgagtaccttcaagcaatctggcaccattggcagcaaaacgagaaccagttcagaccccctcggtgttcacacatggcaacatcgaggaaaatccata

SEQ ID NO: 683072 - DNA, 129 bp, Homo sapiens
gttgctcatgctgttcaagaggatccccctacagcgccttaattacaggcttggaggaggaagcagagcagagtgcgagatcctgacccaagagcaccataacatagctccgaaagggagagcagagat

SEQ ID NO: 683073 - DNA, 253 bp, Homo sapiens
agctgttgctcggggctgatctagaggatcccggtggggtgacgggatataacagacacttctcaaaagaagacatttatgcagccaccagacacttgaaaaaatgtcaacatcactaaccatcagggaagtgcagatcaaaaccacgatgaaatatcatcttaccccaattagaagggttattactaaaaacagagtaccagatgcgggcagggattgcagagaaaggggaggggtacccgagcccgaattc

SEQ ID NO: 683074 - DNA, 269 bp, Homo sapiens
tgcgctcctttctgcctcctttcctgccccatgacagcaggcagatcccaggagagccgagctccggagatgggaagaggatctgtccagggcttagccctcacgggtgccttggcgttcttaacggcacccatgctttctttgcggagttttgtgtctgtgggtgaggggtcggggctcacctcctcccccatccctgcccagaggtgggcagagtgggggcagtcccttgctccccctgctcactctctgctgccctccggctccct

SEQ ID NO: 683075 - DNA, 808 bp, Homo sapiens
cactgtttgcacttgcatgaacaatgggtttattcgctgatgtaaacggttcgagtgaagaattaatgcagtaagtatgacaacacatacacacttgcctctccccatctccagaagaggggagcagagtccgagcttatctaaatatgaatgtggccacaaagctgtggaaggtgacaaagcttaaacaccttgtgccctggctctgcatgtcacctagagagcaagaggtctatagaaacatcatgtcacatgaaacgattctctgcttttggttctgaacttgaagtccctaaactgcaaaatctaagagtgggtggttattaaaatgcttttaaagtcaactgtggcaccaattctaatgtaatccaactgtgtgactggttttttttggttggttgggttgtgtgtgtgtgtgtggcactgggaaaagtggaaacaaacatatattgaaatacatatggggaaataaaaatggttgagcgtcagtgatattctcccagaaatgtacttgatctaacctcggatgtactgtagtcactcagtatttgtatatgtggtagaattagatgttaaatagtgaatttacatgtgttcatggggttaatgtatatatgtttgggccagatatgggttaataaaaacctgagttgaggtttcaaaaaaaaaaaaaaaaaaaattttggggggacgaagttttaaaaatctgggcgggcaagattaaagggaggcagagaccgggaaggggttcacaaaaaggggaaggttaaaccgggttggttgttcgcgtcttcacgcgccgggaaag

SEQ ID NO: 683076 - DNA, 884 bp, Homo sapiens
gttatattaatcccgagcgcttcctttattgtgagaccccctccggtgttctcccctcgtgggtaagaccccctctttcacacgcccggttgtgtgagccccccccccttaatggtgagagactccccccgggggcgcgagttttctcgccctttccgggggctttttttatccctatgggccccgcgcggggcggcgagtataccacacttgttgccacccccgcgggtgaccatcgtttttggcccctcttttgggccccctatattttagaggggggaccccactatttagggcaccccgctgttgtgcacccgcaaaaagcccgcggctgtggtggtacaccgctgcccccgcgtatttctcccgggggtctcactccacagcccctctctcgggtgggagcctcaaaccacgatgtgcgctcccacttttttctcgccgttgagatattctccacacgcctttttctcccggcgttctggaaatggggccgccccccacatgcgtctctctgcgcacccacacgggggttttcctcctgcggcccttgctccccggcttctcttccacaagtgccaagagggtcgcaaactgcacccctccctgccagaagagcttctgtgtctcttgtgtagccccccttgggcgtgtgtcaccaaggtgtgccccccggcgcgtggtttcgccaaagggagccttggaggagacctgccacgtgcttggtgccctgaatttggggacagcgttttttctccccgaaggttataggacacaatggcccaaccccgggttttttttccaaaagaaatgggcccttttggcaattttttttttgtgttaaaaaaggggggggccaataaaaccaattttgtaaatgttga

SEQ ID NO: 683077 - DNA, 213 bp, Homo sapiens
attcttattaaaaacctctaaacgaataaactgatatcttttctgaacaacatagtcgtaaaagcattgaaacatttcacgcccaatacctgggttttggatttcctgcaaaagataaaaagcgcgaatttcagctacattattttcaggatttaaatatccatctaaaaaaccctttattttttgatcttcattataaactaacaattgatg

SEQ ID NO: 683078 - DNA, 188 bp, Homo sapiens
atcagtctgggcacatggatgagacccgtctgtaccacacacacacacacacacacacacacactctagataatataagtgaaaaagttgagagcaaagcccataatgctataactttcagtatacaacatattatggaatgtggactttgatgtgtagttagagatagtggggacgcagtcagagag

SEQ ID NO: 683079 - DNA, 927 bp, Homo sapiens
  misc_feature (832)..(832): n is a, c, g, or t
gtgggcaagataccctacatgcccgcgtgtaccgcgtagtgtcgcccatggccctttcggggctctctttaggggctctccttcatttggcgctccccggggttcggtcccaaaagtcctctctcggagagtgtggcgttgtgaggcgtttctgatagacttgaagttgctcatggaacttgaacatcgcccgcctgattctttcgggttctcccgcagtgggcccccgattccattcgattggttggtcccgcccgtgtgttcccgtcggctccgagggcccgattccttccggcaaacacggctttcctctctgaccccccaaggcctatgtcttgtgaaaccttacccgttactccccccacgttttgaaaaacagggtcttcttccccaagggaagccccatcttcatccattcatctgagaaatctttcttcccgaatgcgtcaccccaaggtctattccaactatcttttagccattggagacgaaatttccttgaaaacatatcgctgaacccactttgcttataacaacgtattacccgttctagattcaacattcttgtgaaccccctaatcatcggctgtccttctttatcattaaccccactaggtaacttttctccttccccgctttataaaacaaattggtcccccggatcacacttccccggaatattgtttctagccccaatagcccactttcatattttttacaaatgggaaacccccccccctgtgcttgactttttttcaataaattgatacgagaatttctattataaggaacaactaatttagtcagcgcagttcgttccacaatatggcanactatacttgaaggggaccacccacaaaaaaaaaaagggagaaacaaacccgtttttttaaaaaaaaacccggtgtttttttgggcagacaaaac

SEQ ID NO: 683080 - DNA, 1440 bp, Homo sapiens
tttgttttcctcccccccgggggggtttgtttgctcccctctgtctgtgttgtgtgtggtgttgattttcaccgcccccccccccctctgtgttgggtgcccctccctgcttctttgtttggtttgcgtacctcttctgtcctccctgcaccatctagggtggtcaccatccttatggtgcctgtctattactactacctccctctccagcactatgtagtttgttcttcggtctccgttcgccaccaacgttgtgtgtgttccgccgcggttggttgggtggccgccccctcgttcttcttgtcgtcctccccctctcttgttgattgagttggtgtttcttcccgcggcggtggtggtggtcatctccgcttgttgttgctcccccccccccctcccctgcggtgttatagggaccactcgccgctgctgtggtgatagagcacgtccccaggagtgtgccctccctcctgctctctctgtgtgtccccccgcgctgttgtgtggagacacactcaacagcttgtctcgctgtgttgcgtggtcgagagagaaatagagagattattgtgcgcccgccggtgtgtggatatccccgccgcgtagcgcgccgccgctttgttgtggtcgcacgcagagagtcgttgttgtgcgccgcacctcccgctgtgttgtgcgccccccattggtgtgtcgcgcgcgtggtgtgttgtgtagcgcccccccgcgcgcgttgtgctgcgcgcgctcacccatcgtgtgtgcacacatcatcgtcgcgcgcgcagagtagagagtatgcccacacaacgcccccccgctcgtcgtgcttcgcggcaccgtcgcgcgcgagagttctctctcacgcagcgcgcgtcgtgtccccgcgcgcgtgtactacaccgcgcgagagagcacacaacacgcgcgcgtgtgtgctccacgcgcgcgcgcgcgtcggtgccacgcgccaacacgacgcgggcgacacacagagcgcgcgccgcgcgcgcgaagagacgcgtgtgtggagagagagagagaaactcctcacacgcgcgtggcgtgtctcgcgcccacaccgcgcgcagaagagagacacccccgcgcacagaatagagtgtgcccacaccgcgtggggaccccgcgcgcgccacaaacacacgtgtctccgcgcccaaagaggggtgtaaagagaggggcacacccgcgtcacacacaccgcgcggagacacacacgcgggggcaagctcccccacaccccccccacacacacccccgcgggtgtgtgtgtgggaaggcggccacccgagaccggtccccaaacccccccaccccacccccccccgggcccgcggggccccccgcgggccccgccaaatgaccgggaccccaaaaaaaaatgtgtctcccgcccccggtgtcccccaaaaaaaaaaa

SEQ ID NO: 683081 - DNA, 105 bp, Homo sapiens
aatcgagctggaccgccagcactcttttcttcatcctgtcatcattgtataactatttattttgagacggagtctctctctgtcacccaggatggtgtgcagtgg

SEQ ID NO: 683082 - DNA, 181 bp, Homo sapiens
ccccaccatgtgtgctccagaggcattgagtgtagctataaggcagagacagatgccttctcgagtacggaacttacttgtgtttgaagcctccaagcattctgtcccatacgtactggggattagcagctagatccatgatctttagcagcagagttgggtcctgctccctcacagagtc

SEQ ID NO: 683083 - DNA, 91 bp, Homo sapiens
  misc_feature (5)..(5): n is a, c, g, or t
atganctggtgactgactagactagctgactgctgcatgagatagtatagatgatcgatcgagtagatagatcgagtcgagtcgagtgact

SEQ ID NO: 683084 - DNA, 949 bp, Homo sapiens
gactcccggaagtagatagtttgtcgagacgggtgctgacgccttgcgtctctttacttctacgcagtctgagcctatcggatgacgccacattatcagaacctgggagagtaggatacaagcgcgcagactggcagaggaaggcgttaacctgcttggctcgaggcctcagttggatcgcagcagtggtgggtgactcacatagtaggtaaggcacttctcgattgggaaccttcgtctgttgttaaacgtgggcacgagtgatttgagttccggggaacagagtgtctatgcatctatatgctcatggtcttgccaagatcgcccgaagggctggtgatcatgttctcggctcgctatcctgcgactctactctggggttgcaagaggtcctcttggtttagcctcctgaaaataagcatgatgaatacgggtgctttgcgtttgtattacaaaacagcacccaaaggggtccaaaggaatgatttatacgatagtatctgagtaaaatttgctagcgagtcagagcgattaactgtcggaatttaattgggtagcggcaagggaatgggccgtaagtgttcttcctatggaagaaattgaggtgaatgggtttttcggatatgaagacttgagtcgtgtacttaggaaggtaaatatctttgaaatttagagaaagtgttagggacaggaaagttaccttttattgttggctaagagtggggctgttcatgaaagcctgtaagagtgtcatttgttgtgtcaatttttcttttggaactttgactttaagagaagctgggggatgcaacatgttcttcaagaataaggaacacggcgtttattttacctttttcgggaaattggaaccaagaaattgggatctgggctgagaaacctggggaattatttgagtgttgggtaaaaagatgtaatttgtttctctgca

SEQ ID NO: 683085 - DNA, 253 bp, Homo sapiens
gagcgactgagtcgtccgtgatgaacaagaggcgaggcttttccgagatcgtctcagtgatggcgcttcggtcgcagttttgggggttctcggtttgcaggaaccctgggtgcaggttctcagccctgtcaaccagctctgagccggcagcgaaacctgaagtggaccctgtggaaaatagaagctatagccccagaattcaccaaccggaacccccggaacctggagctattatctgtagccaggaaagagc

SEQ ID NO: 683086 - DNA, 123 bp, Homo sapiens
ttatggggattattgaatatattattggtacgggatgaaaataccaatattggctggtcctgacctacacaaatggtgattcaataggtaacatcatggtaggttataaagcatgagaatata

SEQ ID NO: 683087 - DNA, 137 bp, Homo sapiens
gtcgtccgtcggccggcgcgtcctcctgctctcctccgcagcatcatggcggagccgagcggctcgcccgtgcacgtccagcttccccagcaggcggcaccggtgacagcggcggcggcggcggccccggcggccgc

SEQ ID NO: 683088 - DNA, 105 bp, Homo sapiens
ttactgactttactcctctagatagtcaagttctgacctgtcttctcagctgctccgccatggcctgtgggcctgacccctgggggacgaatccgatggcctcat

SEQ ID NO: 683089 - DNA, 767 bp, Homo sapiens
  misc_feature (32)..(32): n is a, c, g, or t
  misc_feature (88)..(88): n is a, c, g, or t
  misc_feature (135)..(135): n is a, c, g, or t
  misc_feature (148)..(148): n is a, c, g, or t
  misc_feature (207)..(207): n is a, c, g, or t
  misc_feature (282)..(282): n is a, c, g, or t
  misc_feature (327)..(327): n is a, c, g, or t
  misc_feature (333)..(334): n is a, c, g, or t
  misc_feature (338)..(338): n is a, c, g, or t
  misc_feature (353)..(353): n is a, c, g, or t
  misc_feature (395)..(395): n is a, c, g, or t
  misc_feature (398)..(398): n is a, c, g, or t
  misc_feature (406)..(406): n is a, c, g, or t
  misc_feature (433)..(433): n is a, c, g, or t
  misc_feature (523)..(523): n is a, c, g, or t
  misc_feature (539)..(539): n is a, c, g, or t
  misc_feature (559)..(559): n is a, c, g, or t
  misc_feature (571)..(571): n is a, c, g, or t
  misc_feature (573)..(574): n is a, c, g, or t
  misc_feature (589)..(589): n is a, c, g, or t
  misc_feature (616)..(616): n is a, c, g, or t
  misc_feature (664)..(664): n is a, c, g, or t
  misc_feature (672)..(672): n is a, c, g, or t
  misc_feature (694)..(694): n is a, c, g, or t
  misc_feature (696)..(696): n is a, c, g, or t
  misc_feature (749)..(749): n is a, c, g, or t
ctcccgcacaggcctccctcatcccgtacacngcaccaggccgcttcgcagcccactcaacacgtccaccagcccctccgtagtttcnggctcagctccacaccaagctccaccagcatctctcccagggccttnatcttcttctgtnccacagagcttggcagcttcatccgttggctccgcagcgtgacatctgcagacttgaantctggaaacttgacgcctgcagtctcaggaacagccggcttctcagcctcctttttctggggtagcttctttttnggggccttgcgttccgtgcgccgctgctctgcagttgtgtctgcngctgtnntcancttctgcaggtcctngctgcgtttctcccgctccttcttccgggcctcaatcttgcncantccctgtngcaggtactcctcctctgccacctgcnctggggtccggttgtagagacgctcaagctgttccttccgccgtcgttcgtgcccagcatcaaatactggtatcttaaggtctgttcctngcacagcccgcacgtnggcaagcttagcacagattntggtagttccgngnntttcaggtcttccanagaacgcttcttgaactgctggggggnataccgggtatggataacaacaaaacgcaggtcaaagcggcggctgangtcaagangttgtcagtttctccttagtcnancatcaccgtgagataagctgggactcttctccgagtcacaggacttcacagtntattaacctggaaagggt

SEQ ID NO: 683090 - DNA, 337 bp, Homo sapiens
  misc_feature (13)..(13): n is a, c, g, or t
  misc_feature (132)..(132): n is a, c, g, or t
  misc_feature (252)..(252): n is a, c, g, or t
tttttttttccanagcacattccacccagtgggggctttattcagtcacgtccccacgcccacggttccctccaccaggcagacagaagggagagagcgcacccacacgtgtcaaagggtgtcccaagcccnagtgtgtgggccaccaacctcaggaagacgtggtccccacctggagcttccctcggctgccctggcccttgagcccgtcctgaggatttgtgctttgactctgacgagggagagagcccnaaaggccgagggacaaagctgccagcccactgcctccatgggggccctcggagggcagacggtggagcggcgcttcctcagtccc

SEQ ID NO: 683091 - DNA, 176 bp, Homo sapiens
acggacgtccagctgagatctcctaggcgccggcgtccttaaaaaaaaaaaaaaaaaactgttactcttataaataactcccaaataactcacgtccctcttcccgaactacggaaccccaccctcctctctggggaggggaccctaggacgtcgagatcagagggcaccaccccc

SEQ ID NO: 683092 - DNA, 133 bp, Homo sapiens
gaaaaagatttctatcttttatcttagcgcattatggaaaaaatattaactgtcctgaatatttataatttgtaggaaaaatatgcatctattttttcttgacttctttatatagtaataaaagttattttgg

SEQ ID NO: 683093 - DNA, 410 bp, Homo sapiens
  misc_feature (206)..(206): n is a, c, g, or t
  misc_feature (213)..(213): n is a, c, g, or t
  misc_feature (410)..(410): n is a, c, g, or t
agatcttggtcagtgatctctggggtgatctctcattctggtcatcggaggatcgagtgtgaattcctgaagaacgttggggagagtgtggcagctggccttatgcctctgtgcattgaagttgatatcgatgtggagcaggagggaaaagaagccggctgaaccccgtctctccagagagttccagcacagaggagaagagcagntcacagncaatgcagttgctgctctgaccccagcaatgctgggtgggaattgttgagggcgccacgcatgtctcttggcggagcaagatgagaaaagatcgtcttggaggtccgaagggggcgccctgagggaacaggatgggggtcggaataaactgttcagggagggatcactttgaggttcaaggtgaatccttccttggn

SEQ ID NO: 683094 - DNA, 347 bp, Homo sapiens
ctctgacttggcccattctatgcactctaaacacagctggacctcgtgccctgtagctgcttccatatcaagaaccagctcaagaagagatcggaccaggcaagctgctttagccttgctgatggaattcaagaaggttcgtacatacttcaggagtcctccaagctctacagcttgtccagtctttgccaggagagatccacagttccgagtatgctgtgctctttgacttgcatgcctttctcgtttcctaatgcacgcttcacatatgagagtggagtatgtctatggaggcctcgcggtcggtgctgagtagagtctgggctctctggaactccaccagcgcc

SEQ ID NO: 683095 - DNA, 119 bp, Homo sapiens
tctagaggatcccggctaatcacagctcactgctagtcgtcaaattcccgggctcaagcgaatcctcctgcctcagccctccaaagagttagtactacaggcatgttgcatcaatatcc

SEQ ID NO: 683096 - DNA, 120 bp, Homo sapiens
gttaatttgggtggcctcgagagagtttgtcgggtaggggcacggcgggagggggtaggagaccgacatcgtttttttctagggattgggtgtcctcgagagttttggtcgagcgagagg

SEQ ID NO: 683097 - DNA, 126 bp, Homo sapiens
gagcagcgcgattggtgtacgcctctaactcggtaaccgtcttggtcttcacctcattccgccggtgctcacagctcagaggctcacgctccagcacgttagcctgcacgatccagttccctgagt

SEQ ID NO: 683098 - DNA, 412 bp, Homo sapiens
atacaatattaaggcagcaattttcaaatgaaagaatgtaatgagttccaggtgggggttagtagatttttttcagtaggtcaagttgagttgaggtggctactgtcagtgtcaatgccctgtctgaacaagttttaatttaacttcaagcaatacataggcttttggttagactgtttgcatatatttgtctactgctgctaagaggcaaaataacctttttctcgagaaagtgagataaaactatgattgcaaaaatgtttattttttaatcttttcatgaatcaagtaattttatctaatttattcaacaaatatttattgaatagttactgtgcataaggcccagttgggaatatgagagaatataatattgatatagattttatcaccaagaaggtctgagtcttat

SEQ ID NO: 683099 - DNA, 317 bp, Homo sapiens
  misc_feature (52)..(52): n is a, c, g, or t
  misc_feature (57)..(57): n is a, c, g, or t
  misc_feature (94)..(94): n is a, c, g, or t
  misc_feature (104)..(104): n is a, c, g, or t
cgtcatagccgtttctagaggatccacaattcgccccggatcactgaaggcngaggnctattgcttcctggcttgtagaggccagaggagatgnttctaagttngggctgtggattggctgatttacagtttttggaatatgtatctgttctgcccaggttttcagatttaattgttcacgatagtgttttttaaatctttcatctactgttacttgcatctctttacttttcttgattaatcttgccaaaagtttgtctatcttataaaatcttttgaaataactagcctttgattttgttcatctatattttgtt

SEQ ID NO: 683100 - DNA, 125 bp, Homo sapiens
cagagatcacgtcattgcactccagcctgggcgacagagcaaaactccctctcaaaaaaaataaaaataaaataaataaataaagttagtttgtatggaacaagcactcctgggacacccctctg

SEQ ID NO: 683101 - DNA, 235 bp, Homo sapiens
  misc_feature (9)..(9): n is a, c, g, or t
  misc_feature (14)..(14): n is a, c, g, or t
  misc_feature (24)..(24): n is a, c, g, or t
  misc_feature (26)..(26): n is a, c, g, or t
  misc_feature (32)..(32): n is a, c, g, or t
  misc_feature (218)..(218): n is a, c, g, or t
aacaaatgncgggnagacgacctntncctgcnaagatgtggtttaactagcattgccaaggtgtggagaaaagcgttctgccagcacagttggtagtagcaccctgagctctctgtcttctaggtagcgggggacaggcctgggtgactggcatgaacccagcttctctgttgcaacccccagcttggaatctccagtcaccatggatgggagaactnacaggcagggagaaagc

SEQ ID NO: 683102 - DNA, 234 bp, Homo sapiens
ccccccaaaaaaaaaaaagggccttctgtccgggggcccctcccccccttagggctgggaacccccctgggctgggtttggggtcccagggagggggggcccccccccccctaaaccttttcaaaggccaaagaagccccccccccccccccgggtttcccctggggggggggggggtttttttttgtcccccaaaaggggaaaaaaaaaaaattcccggtgtttttttgggga

SEQ ID NO: 683103 - DNA, 278 bp, Homo sapiens
ctggatactattgatagtaagtaacctaaacatacagttttgtttcaaaagaaacatagtggaagatcaaaggcacaggtgccaacggaaacgtgtacgtgcagcttttacccgacaagctaactatcgctcgccctaccactgacaggcatccatgaacccctgcacgtactcattgctggccacttctctccgcaccagcttctatacctggcttactgaactgccttctagcactacacaggagcctgccccgaacacccactgcttacctacgc

SEQ ID NO: 683104 - DNA, 756 bp, Homo sapiens
  misc_feature (54)..(54): n is a, c, g, or t
  misc_feature (66)..(66): n is a, c, g, or t
  misc_feature (75)..(75): n is a, c, g, or t
  misc_feature (104)..(104): n is a, c, g, or t
  misc_feature (107)..(107): n is a, c, g, or t
  misc_feature (161)..(161): n is a, c, g, or t
  misc_feature (170)..(171): n is a, c, g, or t
  misc_feature (236)..(236): n is a, c, g, or t
  misc_feature (238)..(238): n is a, c, g, or t
  misc_feature (244)..(244): n is a, c, g, or t
  misc_feature (261)..(261): n is a, c, g, or t
  misc_feature (271)..(271): n is a, c, g, or t
  misc_feature (304)..(304): n is a, c, g, or t
  misc_feature (306)..(306): n is a, c, g, or t
  misc_feature (318)..(318): n is a, c, g, or t
  misc_feature (367)..(367): n is a, c, g, or t
  misc_feature (376)..(376): n is a, c, g, or t
  misc_feature (414)..(414): n is a, c, g, or t
  misc_feature (426)..(426): n is a, c, g, or t
  misc_feature (622)..(622): n is a, c, g, or t
  misc_feature (690)..(690): n is a, c, g, or t
  misc_feature (748)..(748): n is a, c, g, or t
gggccggggccaagggtgggctgagacctgggccaggggtagccgttccgaggngttatgcctgancagtttggngatgaggtctgggctccatgggcacgggngcngggaactttaggttcaccttgatgatgcggcgataggtctcgttgtgtgatggnctctcaaanngtgggtttttcaccagcagctcatagcaaagttctccaatgcaccatagatccaccttcttattntncatgcnctccttaatcatctctnggggtaggtngttcagggtgccacatattgttttcttcctcangnagggcgcatgcncagaccagccgaagtcagcaatcttcagctctcccttgagccctaagancagattttntggttttatgtctctgtgaatcaccttcttcccatggnagtacattagancatctgccaactcctccatgatcgtggctgttcgctgctcgtcaaatgtgcagctcttctgcagctccttgtagagctccccgcggggggcatactctagaatcaagtagatcctcctccggtcataaaaatagttgtagagacgcaggatgttgggatggtgcaggtgggcctggatttcgatctctctgcgcantgagtgctccacgccctccttctctatctgggacttgaagaggaccttgagcgccacgatgaaatggnttttcttctcccgagccaagtacacgtttccaaacttgcctttggccagaggaggccnatctcaaa

SEQ ID NO: 683105 - DNA, 683 bp, Homo sapiens
tatgacaaaaataccattgactgggtgacttaaataacagacatttatttttcatagttctagaggctggagagtcccagatcaaggcaccagcagatttggtgcctgacaagagactgtttcctgattcatagatagccctctgctcattgtgtcttcacatggcagaaagaagggcaagagagttctctagggtcctttttataagagcactgctcccatttgtgaggactccaccctcatgacctaatcatcccacagagacctcacctgcaaatatcatcacattaagaattaagcttcaacatataacatattagggggcacaaacattcagccctcagcagaattaaagccctacaaataacttatgaaagtcgattgtaggtaccttatttaatgtctagcaaaccatactctctttaacacagttttctggtgcttgcagttgagttgaatcgtgtcttggtgaccataacaggaatcacaatatttaattttcagttctagaatcaggatttaaaatacaggcaagtcagtaaccttctgaaactcagttggctcatctttaacatggaaatggtgaaatctaccttacagggttgaaataatatggttgaaagcttttatcaaagtgaagtaaaatattgtcgtgagtcatacaattttagtattaaaggtat

SEQ ID NO: 683106 - DNA, 264 bp, Homo sapiens
tagaggatcccccctggttctggcttaggatctcacacacaaactgataatagatttgtatcatacagaatcagaggcatattaatggactggtaaatgtcgataaagaggtattaatatcctagaccttgatcaactcactttaaactggtctctgatatcctcatctgtcaaatgagtattacgaccctctgtacttcccatggtagtatttttgtaggagcacatgctattatgtatctagaagatatggcctgacaagca

SEQ ID NO: 683107 - DNA, 104 bp, Homo sapiens
gagttggcaagactgtactgatcatggagttaatcaacaatgtcgccaaagttcatggtggttactctgtgttgctggggttcggcgacccgaccctgaaggca

SEQ ID NO: 683108 - DNA, 188 bp, Homo sapiens
cggctcggtgtagaggatccccccttaagtgctgacacgcctgcagatgataagtaaactgtccatggaaacacagctagtaataagccctagagcaggttcttcaagtgtgttcgtaaatgctattttatgttggagaccaaatcctcccatccaccttaggtactggtaaatatcttattgtaccc

SEQ ID NO: 683109 - DNA, 138 bp, Homo sapiens
gtctttgacgtcggtgtgcattgcatcgtggatgagccaggtcacttattacattaccaagcattggtgtgtacgtagtagttactttgtactgaaagagctcgctgaggttttattttcggaccaaaaaaaaaaacc

SEQ ID NO: 683110 - DNA, 152 bp, Homo sapiens
actagggtattaattttctttaattagggttattcacattttctccttaaaaaaatggctaatttactgggccttttaaaaagctaatttttgggttatcaccacttaaggttttctgaggcctaatatttcctattttaataacgggtccg

SEQ ID NO: 683111 - DNA, 1706 bp, Homo sapiens
  misc_feature (409)..(409): n is a, c, g, or t
  misc_feature (539)..(539): n is a, c, g, or t
  misc_feature (1197)..(1197): n is a, c, g, or t
  misc_feature (1484)..(1484): n is a, c, g, or t
tcggttttctttgttaatcccctgacgattggtttaccggtggtgcgccatcgtgtcagacgctgccgtagactccagcatcctgatggtcccctactcaatgcgtactttaatggcgaagagagcaatgggaacgttgatgagacacgatggcaaagaaatttgggaagaagaggacggcccgcttgcataactgggaaatggcgtaatctgattgaagatattggcgtggcagtgatgggctgtacaacttgaggtacgtagcgacaggtaagacggtagaggaatgcgtgggtgaggagaaatgatgcgatggatggaaagaatgagaggtgactggctgaggtgacataatgggagtggtagtactgtataggaattgacgcgcaaaggcatcgaacgatagcangacttatctgagtgcaaaaagacaggagtcagagtcttagaaggagtgtagactttgactgcgactgtgactctggaatctgtgtcgacttagtccacattggaaatttgcgtgtaagctaagcctgagngtgagtgtgagtgttgagactctttgaggagagcgacattaagaataagtgccaaccacagatttaacatagcgttgacacaggaaacacacagaagagaggagtgccagtttggccgcgtcgttaatcccttgataagtcttctaaacccaccttaccctagggtggtttgctcaggataactccgaaaacattataacattagataccgtgggaggggttcctcacacctattaccgaataggttcagattatggccccaagacggcttggcaaaggggccccataggcccccaattaaaccgagggtagccgagaggcaaaaaggtaggcgacaattaatcttcgagggagacaaaaaattgtaatcgatcctaagcgggcggatacattgctccaaaagccagaacctctataaaacacttcctaaaaatgcacacacattatcgtattggaggactttatgggagaccaaccccaccgggaagcagaaacagagcggacctcaacgaaccaaacatttgtaataggtacttaggacaccaaaacgttattaccccagtaaggggggtatcctcggcagatagagacattggtggatctggaatcctacactcttataatttaggccagttggttcaaccgttcctcctaaaanggatatagacggtgtaaaaaccacatttttgcgcgctcattgtggagtcattttcccaacacgcggagaggcatattgtgacgcaccaaatcttggttccaaactaacctcaggtttacacggggtcgacactatgttgacatttacggtatggaccgagcgggatgtgtcagacaaccccccaatcatgtgctttggacatgttttgggaattgccggcctctcgcgtcagtgtgagaacttcgagaactttcacgcaatgagcgccctaattcccgggagacatnacacgggtatcccctaactgggtgtacaccttaaaaagtgcgccccttgttaggagtattacacaatagcgaacggttctagtcacacagttgtggaacccgtcttgtgtcaccacaataactatagaagtcgaggaggcaaaaagggggagagaacatacgaaatcacacatcggttttgtgggtcacaagagatatgaggagcagaacatatagggtgga

SEQ ID NO: 683112 - DNA, 381 bp, Homo sapiens
gttcgaactcgagctctggtaccggtctcatcttctgagagtcctacacccaggattaggagaatgatttttccattattcattagttctactagattacaaggtaggtctcatgttataacgtcccccttctctcccaagatctccagattcatacttaccatgatgcctgagaaactgattccttctatatatcacacgtagttggtgagtttattgctggatgcttaggaagtttgcccattcgggaaatactatagtatgttcacgattatactccaaagtgcaagcgtattcagcacacaacttaagcagcctccagacttccgagaccccattttgccctgcttacaacctgcgtgagattgtttatctctacat

SEQ ID NO: 683113 - DNA, 667 bp, Homo sapiens
gcgcatgcgcgctctcaggataacaggccctgcctgggacccacaaaaaaaaaaaaaaaaaaaaaaaaaaaaaaaaaaaaaaaaaaaaaaaaaaaaaaaaaaaaaaaaaaaaaaaaaaaaaaaaaaaaaaaaaaaaaaagcaacaaaaaaaaaaataaataataaaaaaaaagaagagcggagggcgtgccacagatcttttctctctctccggtggagcgacactctattatatcacaccccatcgttgtcttgtattgggaaagagggcttcgctctcctatcgtcgtgctgctcttcgttttatcactgtgacgcggcgcacctgtctctagtatataaatacataagaaccgcgctctatctgtatgcgggatgcaaatattcatgccgatgccctggctcgataacactcttagactaggagaggcaataacacaatcactcactcctatatccgcctgatggctagagacgaaaataatgatgagcatgcaggaggtcacatcaagtcactagatcgtagactaaattaatacactccccacgcgaccaacgagagagacagatacatacatatctgatctcatctgttgacgtaaattacatacgtgtggggaaagtatcaaacacgccacccaacgtgatgtttgatctgctatgctat

SEQ ID NO: 683114 - DNA, 123 bp, Homo sapiens
cttgaaaacaggctgtacctagtcttagattttttttttcctgtagcgccaagtatatagagtaaaaatcatagttggttcatttgattacaaaacatgaaacagggttgatgagtggcagag

SEQ ID NO: 683115 - DNA, 786 bp, Homo sapiens
gactcagctgagctggggaacactgctgtcgtgtgaatgtctacagtggccttgttggtgcccacatggctgtgtggatggaggaagctgtccctgacccagtgcatcccccagtgtcatcacggtggaagcgtggagggcatgtgccctgccctgccctctccttcacatgtgtcttgtttgcatgtggactccatgaagaccattcttggtgagcctgtggattgtgggtgtgctggagcttgggtgttttgggttgcaggtttccatgtggttgcatgtacagcatgtggccgtgacatacttgtgccctgtgactcccattttccaatgaacagccatgtgtgttgtgccatccctgtgtgtgctcatgtgtacacatgttggggtgtcgtctctggaatgccaccttgttgttcggtttctttcacatgttgcactgttttactttttccgcccttcgagcacttacaacaaaccgttctcaccacactcctgggagttggtatctccttggttggccagccttgctaaacgctttcacggagacgaatatctatcgtggttgtgcatgcattggcagaaggcctttagcgaacgacagggtgttccccaattggcatggtgtgaccatgattgacgatgccccccttgttgaggaggttgagcccctgtgttgccgtcgcccccttaagtgtgtcagggccattgcttgctgcccggggtcggcgaagccaccgccctggcgactggggtaacccccaggcgaagggtgggagaagcccc

SEQ ID NO: 683116 - DNA, 926 bp, Homo sapiens
  misc_feature (926)..(926): n is a, c, g, or t
tgtactgaagagaaagacgtgcatatgattaagaccctgtgtcttgaagagaaacctgcagcagagatgatggtgaaagtaaggcacatgtcactaagagtgggaacagaagagtggaggtcgtgttgtattattggctaccaccatagatcgggagatctgtcgccagtaacaaggaaaaatgaagtgtaaatattggagaggaacagacaaaaatgggatgaaatggtcatctgacaaataatattaagactcctgtggtatggattgagcagaggggatgagatttcaaaaaaaaggactatgaatgtattagaatggggaatatgatgacaagtgggatcaggaagatgagtgaacattaatggaactagttttttttacaggtggaggtagtatgtgctccaaagggggaccacttgaacatgaatataaacaaatgtgaatccagagattagatacagaatatatggaaaagctatgtagtaaaatgatatgagacttgtgaatagggagatattccttggaacatgtgacaaatgcttaccggtctatttatgagtaatgaatgctcaggaaataccgcaaaaggatacttaccgggggctgaatgggtgtagcccaacaatgtaaaaacaaggtggaaagtccataaggaacagacggcggaaaaccttgaggaatatatagttgcggaaagggcaccaaggagccgggtatgaacaaaaggtcccaaaggtgaggcggacggtcacaagtgacgcaggacaacgtggaaccgaaccggatcaaaagcacgaggaccgcacggtcaaccaggtcggtgaggtgacggccccgccgcaggagacacaagcggaagcaacgtcaatacatcgcagcacaacaatgccgtcacaacgagacagcaagtgatgagcgcacgn

SEQ ID NO: 683117 - DNA, 168 bp, Homo sapiens
  misc_feature (128)..(128): n is a, c, g, or t
cggccgcttctttttttattttaatatactttaggaaacaacaatatacaaagctgcgctttcctgctatttccagataacagcaggaagctccacttacacaaatttagcttgtgaggctagacgcngtcagcacagactaacgtgctacacacacctatcaagtaa

SEQ ID NO: 683118 - DNA, 765 bp, Homo sapiens
aagcgcaacgggcctcgggaccctgctgggagaccgctggattcctcatcagccgcccaaaccctgtatcccaaggtacacgaagcgcaaaagcaaagcctcgttggaacagcgttcctgggccaccacgagaaggcggaagagcatcatgaagctaggattttaccccatccgcagggtcagcgtccacctcggactaccgtcaggatgagtccgacaattattgagggggataatcggccctgtctggagactggaaaaatagtgtcagcctgggtcacaacctcctgcccatctgcctccctgagaacgataccttctaagacctgggcttgatgaggcatatcgtcagtggcttcggggtcatggaggagaagattgctgcatgacctcaggtttgtccgtctgacccgtagctaatccacaggcctgtgagaacttggctccaggagaaagaataggatcggtatgtgttctctcataaagatgtgtctgttgctggacacccatctcgtaagagcagatcgcctgccagggggatattgggggcgtctattatgcagtaagggacccgaatcactgatcgatgcggggacacgggcatcgtgtccaggggtcatcgggtgcagcaaggggctaaggcttctacaccaaagtgctcaacaacgtggactggatcaacaaagagatggaggaggaggactgagcccagaattcaataggtgtcgaatccacgagagcagtgtgtaacacagtgcaaagaca

SEQ ID NO: 683119 - DNA, 101 bp, Homo sapiens
gaggatcccggcgacatttccaattagggagatagttggtattaggattaggattgtgtgaagtatagtacggatgctacttgtcccaatgatggtaaaag

SEQ ID NO: 683120 - DNA, 297 bp, Homo sapiens
  misc_feature (235)..(235): n is a, c, g, or t
aattgataggggttgaagaaaaccggctggtttttttggtttaaggatattttgtttttgaagaaatttgtagatggagttaagggggggtagttaataaagagttaaaaggaggagttgatgggtggatttggggtaaaagaagattttttaaggttttaggaaatagggtttaagacttaaaggaaggggtcaggccttgaggttcccaaaaaccttacccgagggtggccantatggttatttttttttttaaaaaagccacttaccttcaataaaggatttacatggggggga

SEQ ID NO: 683121 - DNA, 122 bp, Homo sapiens
aagaaaaacatacgatagggacacgaatcactattaaagtttgatttttaaaatccccataaatcttttctgtcctaaggtagttgcaaaataaactcataacatggatagtcaacgtagga

SEQ ID NO: 683122 - DNA, 931 bp, Homo sapiens
  misc_feature (931)..(931): n is a, c, g, or t
gactcgggcaccggagacatgtcctcaactcactcttcagcttccctgctcgtgttgaagtccagccggtccatcatgtcctgcagtgctgaccagatcgctgaattcaaggaggcatttctcctgtctgacagaaacaggtgattccaacgaatcatcttaatgcctcagtgtcagtgagatgctccgttcgagctcgtggggcctacaaaaactcccaaccaagtgtcacgaggtcagcgaaagtttcatgtcgaaaaactccagcaaatgtaaggagttgtgatatgtcccacgataacattcgcgttcagacccatatttctgcctattgatgcatgccattatccaatcatacatgcgaccaggccacctattacacgacttagtcgagggtctgtgtgtcttcgagaaggaaggaaattggtacgagtcttgggtgcggcatactccgacatgtaactagtcaaccctgtgcggacctgatgtccgctggaagaacgctgaaccccctgatggcaggtcaggaaggactccaaacggttgtcgtcaaaatacgaaggctttgtctagcctcatcaatgtctatctgaatgggctctcaagaacccgcattgctttaggaagacggctggaaatttattttaatctacatccatgaaatactctccagatctgttaccatcattcaggaaaaccaagcatctggcggtcagaatgagcactccctgaatttatacctctcagtttctctgaattgatcataccacaacaagtgctgtggccagagagagaatcatttgatccggggaaaagagaaaaaattgggggtcccgcccaagttaaaagggggggcatagagagggagggcaagacggagaaggggtcaaacgggggcgggaaacagtggggtgttagcccccccgcgggn

SEQ ID NO: 683123 - DNA, 363 bp, Homo sapiens
tataggattccccgtgagctggacacttgcagtgagctgagatctgcaccacttcctggtacatcaaggcaagaacccggcacacagagagcctctctccttgcaataaggcaggtgtctaattgcgccgactaacaaaagctacctacagacggctaaactaaaagagcacctgtaacacacgcccactggggcttcaactataaacattcacccctggacactgccatgggtctccctacctgtctgcatgctctcctagaggtttgagcagtggggcaactgcataaacgaaccacacccgcatcgcatgcccttcgagggggataacacgaactattcccatttcctctgagacgccaa

SEQ ID NO: 683124 - DNA, 861 bp, Homo sapiens
ggtgaccgacgccaacatggcggcgccagtgcgtccacctgctcgtccgcaaaggttctcatagaattttctcttcaccactcaatcatatctattttacacaaggcagtcaaggcatgtccaaccaaaggaagaaatttcttttttcggagaccaagaggacgatatttccaacaacaggtaataggtttgcgccggccttggccaggtttccttcaagactacattcgcgggttccctaaaggcacctattaaaagaaagccagacttaattgtgaaccgaaccacgggacatttgtgtaaccccaagaacggtgggggacagcccagggctatttacgcaacgtttcacaggacattggaaagggattccacgaattctccaaaggggggcttcacaatcacagggctttgggtccaaaggctgtagggtccccctggcccaagggttcctctcccattctttgtggctgtgggagacaacagacatggttccacacacgggggtggggcagggtcctacaacccaaagaagggactttttacaagaaaaagcggacgtctttaacctattaatagggcgggggcagaacaagataagcacgtcccgttcttctattttgattagacccttattccttacctagtataaagacatagttatccatatatcaaaggtgttagcgacccattttcataaagttattggggtctagaagacaaaagattatatattcgtgggttgatacaacaattcaagacgtgggggtattgatcagcaagaaacctatctcagggataacgacgcgcccttgtgggggatttgggggagacaacagaggggaaaattatggcagcgta

SEQ ID NO: 683125 - DNA, 413 bp, Homo sapiens
gtaggatcagtatggtgccaagttctatggaagaaacagcagagctcctcagattaccaatcctccattctagtctcactgtgccgtgaactgccagtgggtcttagggatgtcggcccctgcacctctttcaggtcagtttccttgactgacacataaacactgaaggctctctgtggcttcttccagctatctaacatttatattccatggctgcttccagatgttttcttatcctgggttaccacctacattgtttcttggggagaaggatgcctgactcctacagagtaatgagacacaaggagggtgcctgagccatttctacagactccaagaggttctaaccagcccaggtcacttccacttttgagacctgggcacacattatggagctccataatgtgtgccca

SEQ ID NO: 683126 - DNA, 482 bp, Homo sapiens
tgggtgatccagcttcagagaggagaacacggggacttgagttcactgttgcggtgaagtcctgctctggccccaggcagaagtcaagatcaaagctcacactgcaaatattgtgctgattaaaaccaaactttctgcttttgatgtgggccaacctccattgctggtaggaacaaaggaggagtatagcaaaaagatactagcaatgttttcttatcctgggttaccacctacattgtttcttggggagaaggatgcctgactcctacagagtaatgagacacaaggagggtgcctgagccatttctacagactccaagaggttctaaccagcccaggtcacttccacttttgagacctgtggacacgttatgatgttatgaaatgccagagcaggattaccaaaactctcacatatttgtaaatgcttgtattttgcaaatgacccttatttacaaccaaaataaaacttcgtttgggaa

SEQ ID NO: 683127 - DNA, 483 bp, Homo sapiens
tgggtgatccagcttcagagaggagaacacggggacttgagttcactgttgcggtgaagtcctgctctggccccaggcagaagtcaagatcaaagctcacactgcaaatattgtgctgattaaaaccaaactttctgcttttgatgtgggccaacctccattgctggtaggaacaaaggaggagtatagcaaaaagatactagcaatgttttcttatcctgggttaccacctacattgtttcttggggagaaggatgcctgactcctacagagtaatgagacacaaggagggtgcctgagccatttctacagactccaagaggttctaaccagcccaggtcacttccacttttgagacctgtggaaaacacagatcttatgcaatgaaagcacaacatcaccacaactaatacactaacttctaaacgcttaaaacacaacgtcacacttataaaacacaacggcgaaacttcgaaaacacaa

SEQ ID NO: 683128 - DNA, 981 bp, Homo sapiens
  misc_feature (981)..(981): n is a, c, g, or t
gagcgggggcgggcttcgagatgcctcccgagccgcctgcgtagccccgacgccgcactccataccccacaggctggggacgggcccgggggcggctgtgtgggttcgggagcggagttgcagaatccgaagggacccatggggttctttctccgcacgtgcgtttatgggatggcattatgggccccatagacatcaatgacaaatactcatgctaagatccgatcctcgaagttcaattgaactcgctcgaggaagagcagatacaccgtcgtggtgattgtgagcactgtgaagagtagaggcacgaacaggatcgttcccatgcaccagtcgggagttgttgcgttgagctagaccatggtagttgaattactatcgtggtgagcgatttgttgcaaccatagttgaggcgtctacagaggcaaggggcaaggctctactgtttgacagtcctgacggtatagacttatgagcgtgcataacgcattgtggaagcatttacatataggaacttgtggtcgttacaccaatgaaaatgagagtacattgttgacacagtgtggcagaaattgtaccaaggaaacttgctttccttggctacgtaccaaggttcatggcggttcaagtttgacacagggtggtgacaacgaaaggcccttggcttgtggaggttccatgtaggaacatgttcagttgggacaccatatcatacatttgaccattggaggatatataagggggaaatttataggggcctggataaacagcgcaaacaaaacatttgcgtggttatgtaacacgtgtgagttgccacatggccatgacttggcacgcggtttatatataaaggccgaaaggacagcaccaagtattatcccctgggacagcttggggtaaccacggaaactggacacgaacgtttgcacattatcctactgctatgtgaaagttcagagaggcaagaatagggtgggaaan

SEQ ID NO: 683129 - DNA, 499 bp, Homo sapiens
gaagaattcgccgtagcggcaccagcaggccagcacgtccaccccacctccccctcgcagcgggtgggtcccgccgccagcttccggcgagccgccggcgggcggcattgcgctctccgggccggttcttgactgacggatggcgtcgccgggtggcgggtacgcggaccggccagcgccgccgctggacgggatgatcacggtggacgggggcgggggcaggacgccgccgccggcggggctgccgaggccgccaggttccgggggctgatgcagcagccgtcgcggctggcgtccggggtgcggcagttcgcgtcgcgggtgtcgatgaaggtgccggaggtggtgccgggcatccggccgggcggcgggcggatgacgcggatgcagtccagcgcgcagatggggctcaaggggctgcgcttcctcgacaagacctccgggagcaaggagggctggaaggccgtcgagcgccgcttcgacgagatgagcaaggcca

SEQ ID NO: 683130 - DNA, 819 bp, Homo sapiens
  misc_feature (216)..(216): n is a, c, g, or t
  misc_feature (312)..(312): n is a, c, g, or t
  misc_feature (702)..(702): n is a, c, g, or t
  misc_feature (709)..(709): n is a, c, g, or t
  misc_feature (716)..(716): n is a, c, g, or t
  misc_feature (752)..(752): n is a, c, g, or t
  misc_feature (760)..(760): n is a, c, g, or t
  misc_feature (762)..(762): n is a, c, g, or t
gatctcaccagtttgcatgtgaggatggctactgcctccacggcagcacgcgaccggtaaggtctttccacgacagcgtcgattgttccgatgacctcctctgccataatgtcctgcagcgctgtggcccctgtgaacaatactctgctgctgcaagtaggccaccacctgaagtatcactatcaagaccaagatggtagtgttatacccgacggnagtcgagagaagccttggaagggtcacctggcgaaggctggattgacgactgcactgaagacatgagatgctccaatatcacattcttgaagtggnatctgcggatgatgagtacatgcggtcgcgctcgattgcttccactactcgtgacacgagaacctcatatctagtaccgagtactgacatgatgacctgtagacacggtaaggcgttgcggatcgtgactttcctgtgcgattgctgggcttcatggggcattcattccaacgcccgtaccgaactgttcgctacagcgaaaccaggtcctaagatattctaaaggcccgttactgggagtagatgggaagcacttgcactgatctcccgtggtcccccccgacatgtccagtcaggggcatcgcggtgctcaacaacttcggatacttgattggcggggacaacaatgtccaaggatttcgagcagagtcccgatgctggaggtatganccacggnacaaccnctggttccagatccagtccctgcagcaggagcacgncgactgtncntgtgtgtgtaggcaggtacatctacgctgtggcgggcgtgactaccagcaatgacct

SEQ ID NO: 683131 - DNA, 383 bp, Homo sapiens
  misc_feature (60)..(60): n is a, c, g, or t
  misc_feature (149)..(149): n is a, c, g, or t
  misc_feature (164)..(164): n is a, c, g, or t
  misc_feature (181)..(181): n is a, c, g, or t
  misc_feature (219)..(219): n is a, c, g, or t
  misc_feature (221)..(221): n is a, c, g, or t
  misc_feature (263)..(263): n is a, c, g, or t
  misc_feature (268)..(268): n is a, c, g, or t
  misc_feature (344)..(344): n is a, c, g, or t
  misc_feature (349)..(349): n is a, c, g, or t
atggaaagtaaaagtacagaaaatttgttaaaggaaattaaaatggagatcatgtctcantaatctctgagcagacaaaattagttaggtctcataagtgatctcaacctcgcttgatttgcaaatacaaacaaaacttacattatttnttgtagctgcatatngaaaaaagagaaatgangctcaaccagtcagaagtagccaacaaccttatataantngaaactgtccaacaaggtaaacagacaaacaaaaaacaatanaaaangttgtgctaccaccaaatgatttctttggttctacattttttcaaataaatacttgcttcttacactgttcaatgnagganttcaattatcttttccgtcctgttatttataatt

SEQ ID NO: 683132 - DNA, 329 bp, Homo sapiens
ctgcagcactaatatcgctgtatccactagatgccagggcgcatgagttgattgtgaagctgtgcagtcgtcctcgctggtacttcatgagtgttgcgactttgttctgtgaggaccctcaactggccttcgcaatagactttttgactgggtacactgcgttgacctggatagccaaacatggtgacctcagggcccttcaggacttggtgtctggagcaaagaaggcagggattgtccttgatgtaaacgtgaggtccagttgtggataataccccgctggcacctggcagccattcacgggccaccagggggtccggcgggtaccg

SEQ ID NO: 683133 - DNA, 825 bp, Homo sapiens
  misc_feature (766)..(766): n is a, c, g, or t
  misc_feature (825)..(825): n is a, c, g, or t
gaggaaaaacaataatttacagatttttattactacgactttacgaacaacactttaaaagggggaaaatataagagaggggggtatagcaccacctcatagggttttcccctttgtttccccacaatttttttaaaacacttttttagcgcacataagccaagattagaatacctttcctcgggaaaatgtgaacattccacaagtacattttgtttgttagcccacaaacaacgcccaagggcacacagagggttgctagaggccctattgtgccaccaaacaaatgacccaacattactctggggtgggtcatattggaatccctggtctttaaaaagggaacggggtgtcttttctgccaccttgggagatttatctctaacaaaacacatttgtgtggaaccctttcttgcattaccctttttctatagaggcgaacccacagtaatgaaataaaagcttcctctccccacccgatttttaagggagagggttagtctctccaatatggcctctataacggttcttttttaaataaacaaaataagtggtgggtgggacacgtcctttgatacgccctggctcattgtggttttttctcggccaggtgtaaccacactcttgggtgtatataccacaagtatcttctataacacacacgagtgtgtattagaaaattatccaagacatggctcctatatatttcttagcaacccacatgtggtatgtgtggccacattattattttaaaaaactctttcancttctctaatagcgagaggtggggtgaaaaaaccttggcgccttaaatctttctcaaan

SEQ ID NO: 683134 - DNA, 685 bp, Homo sapiens
cgacttcttattcctaatctagaagaagggagaaatgaaatatgcctaaagctgtagggtaaaaaagccacacattttagctgacagggaactgtgtggtgtttttgtgcttagcaaagatttgaaagtttgtctaatttcatcacaaacacagaatgaccttgtttgacactgattttctgtgagatagtttatgtcaaacaagagtaccatggcctaactatgggcacaaggcaagctcccagcaacaccaaagcctgcaagttattgtcaggccagttcccaattctcagggactgtttttcttaaaagtatgcaaacatataattacaggttgagatgaatcatatgaaggaaataaatggggtactgaatagaaacagtagttggggagctactcaagacatggtggccgggcgcggtaggtcacgcctgtaatcccagtactctgggaggctgaggcgggtggatcgcctgaggtcaggagtttcagaccagcctggccaacatagtgaaactttgtctccactaaaaagacaaaaattagccgggcatgattgtcagtgcctgtagtcccagctacttgggaggctgaggcaggagaatcgcttgaacccaggaagcagaggttgcagtgagccgagattgcaccattgcactttagcttgggagatgagcgaaactc

SEQ ID NO: 683135 - DNA, 222 bp, Homo sapiens
gtgctatgagcgagataaccaccacactccagcctgggcacagagcgagagcccatctcacaaaaaaaaaaacctttcaggaaaaaatagaacaaactcgttggggatctaggcccaggcagagttctttatacttaaagataatctgtgaaaggaacacttaattgaatttcattaaaattaaaagcatttgctcgggaatcctctaaagatcaacctgca

SEQ ID NO: 683136 - DNA, 324 bp, Homo sapiens
aagaatatagcgagacccgtctcttagaaaacgatgatgatgaaacagaggacggggcacgtgcgggagccaggggcctgggaggagccgagaacagccttaacctcggggatagaggccaacagggaacgacagagacagtatctagttagagccttggctccatacaaggatgatttagccccgagttcctgagtctattttatgccccttacgtactttgatagaactaaggaaatagtggtttagagtgaagggaaaggagacccagaaacattttacgttgcttttacttctgtagtgtagatagccccgggccgaata

SEQ ID NO: 683137 - DNA, 972 bp, Homo sapiens
tcaggccactttcttcagactttaagtgtgtatgtaagtgtgggtatgtgtgtttcttcaagtgtgtgtgttccaaaataaatgtgttagtcttccctccctgttcctttaccgttttcatttgtccaagcagtctactagagaaaaacatggtaggcttgagaacataaaggaagaggcatgtattggacatggtatattgggccctttctttatgttataagttgagtagtagccctctaattgtagttgggcaagtacagccaagcaccctgactcttaaccttattatgagaacttcctttttaccccttttatgttttgtgcaaaacagagatggggttgaggaaggagggttggcgagcaaggccagcttctgccctacagaatagggtgtgtcttgtttttttcaagtgaggcttgggaaagtgttcaaatgagagcagtcttaaggtctctaagagatggggaatgtgctatgtatatcctgcctgtgaaagcccaaacatatgggagaagctagaggatactaaaaagcaatgaaatgtgatttggaagttagaacgatgttttaaaaattacattataaatgtcaggacatgcttttatgtgtatatccgaaggggaaagccaggtacatccctgcaaagttttggagctatatgactgtggggaatggagctgtgaattttaacacgtactggcttgcctgagcaatgagccaacgctagccacgggatccacatgggttaggaagggccacactgggaggctagggcccaggacagggggcaagacataaagccctaaaaatgggcaaggcggggatgggggtaagctccaatatgggcgcacacacttcccactgtgacaagcgatttgaccgggaacagcggacaaaagtcctcggttggcagaaagaggcaacccccagaggagcacacacctcacagagaagatatatagggttac

SEQ ID NO: 683138 - DNA, 131 bp, Homo sapiens
tttacgccggcgtcagtggactgtgtacactatgatcattgataccaattaagctggacttggatcctcttcgcttattttctagttctatgtcctatcatgatgaatataccccatgcgtggattgccag

SEQ ID NO: 683139 - DNA, 179 bp, Homo sapiens
tgttatcctgtctctcacggactactataattagcccttactggccctagttccttattcctcaattctactgcaatgatttacttatagcctttgctcaacacaaacaaataaaaccctttcaatgatctataactagaatacaagttcgaattctctgcccttacattcaatgaccc

SEQ ID NO: 683140 - DNA, 392 bp, Homo sapiens
gagaagtcctggctctggggtcaaagaaaggatggcctgagagcggctcgactgcgggagtagagcaggctgtgcacgcccagcgcgagggcccgcgggcacgcgagcggcgccgagattccctgcgcgtcccagcagagtcctggaccagcgggggacccctccccatattaacccacgcggcgcgcaataccatgccacacttgggagagccgcactcacacacccgctccctcgtgcaaacaccggcatgcacgtgcacgccgcgcttcaccggacagcgcccggactgtaccccgaagtcgctgcggcttctcgcgccttcctgccgcgctgggtagcctgatccctgcccctgccgagtcctcacctgggggcgaggaggacgcgca

SEQ ID NO: 683141 - DNA, 306 bp, Homo sapiens
gggttttttggggggggccctggggtcccccacccaacaaggtgttgcccttttagaagggcccccaataaaaactggggcagtttttggggggccaaattaaaatttcgggagggcccctttttaccaagggcaaggtcccccggaagggggggggggcccaagggtttcccccctaaaacattttttatttagtggggcaaaagggtctgggccctgtttaaaaggggggcccccccctgggaaaattgggggattatcctggccaaaaaaaccagtttttaaaaaaaagggccctttttttga

SEQ ID NO: 683142 - DNA, 143 bp, Homo sapiens
ccttcatcatacctacctgagcgtgtgtgtgaatgtgagtaaatgtgagcgtgtgtgagcgagtgcgaatgtgtgaatgtagtcactgtgtgtgacatagagcatgtgtgaatgtgtgtgcgagtgtgtgagcatgtgtgaat

SEQ ID NO: 683143 - DNA, 268 bp, Homo sapiens
aatctcccactcccacactaaaaaggaataaatgaaaattgcagcatgaacaaaaccagagtggagacatgggccatttcctgggagtggtcttgagccaacgagggagctgctctatggtccggtgcttgtaactactgacgggtctccgtgggcacagatagataaaccacaccaagttatgaaaagagacacgtaaattttacttaatactagcctatctctaccaccactgaccccaagtggatgaagtgtagttttgcatttg

SEQ ID NO: 683144 - DNA, 239 bp, Homo sapiens
agaggatggcggacagcgtcagaggtacttatcatgaatcctgcccttcgtcagacaaccttgatgtcatcgtatatcaacgtcctgcgcatcccttctgagccacccgcccctgtggtgcataaaccctgggtctggggtgatggtgtgaggacccatcatctcatctcactgacaccgagacaccgacttggcttctgtgtgtaggttaagttcctactaaatgtttctttccaaga

SEQ ID NO: 683145 - DNA, 293 bp, Homo sapiens
  misc_feature (290)..(290): n is a, c, g, or t
aggcaggaggatcacttgagccccggaggtcgaggctacagtgagccaagagtgcactactgtactccagccagggcaagagagcgagaccctgtctcaataaataaataaataaataaataaataaataaataaataaataaaaacaaagttgattaagaaaggaagtataggctaggcacagtggctcacacctgtaatccttgcattttggaaggctgaggcaggaggatcactttagcccttgtgtgttcaagaccacaaaggtcaacatagtgagacactgtatncac

SEQ ID NO: 683146 - DNA, 351 bp, Homo sapiens
gggcccgagttcctgtccagtttatttattattcaaataggaaaaattcctttccaggttgttttactgtagcttataatgatacggtagttattccagttactagtttactgtcaaagggctgcctttttcagataaatattgacataataactgaagttttttttataagaaaatcaagtatataaatttaggaaagggtttttttagtttttgggttgtttagactcaaaaaatcccaaatttgtcagtaacaggtagttgtttagttataattcagagggtacagaatggtaaaaattccaatcagtcaaaaggggtcaatgaattaaaaggcttgcacctttttca

SEQ ID NO: 683147 - DNA, 1164 bp, Homo sapiens
tgtaccggcctcggaaattaggagatatagtgggatccaggccttctgggatgtcctcagtgctaatgcttgtgagagagaaagagagaactactaaggaacatactattgatttaaactcgctcctagtgttacttgtggtctgtgtcaccgtatctcaggaagtccagccagcttgactggcgacacacccctccggacatccagcgtgacggagcccacactgccaccatatgtggccgcctgagaacctcgtggccccgagacgggaactggagagaaccacactagaatggacacaatcgaccactacacacgaccactccctaccatctacggagacacaacaagcgaaggagtgcgcggggaccgaaacaatcacaaagaagggacacacagaagcgacacaccaaagcagcacacaacaaacgcaaaacagagcaaccaccagcacggcaataagggacacgactgaacgcaaaaacagcagaacaaagacggatcacaacaagaacacaccgaacacacaacagacaagaccgccaaatagagaacaccacaacagtccaccacgcagaacaacaaacacagggaagacagcaggatgctcgagaacagccgagacagcgacaacagacagacgaaagcgagatacacgagaagagaccacaagccacaacccgagaacccacgcgatccaaaaacaacataacgcacgcgaaaaccgaaccaagacaccaaccgcaacacgacaaacaaaccaatgcaacgaacagcacacattccggaccgggacaacaagacacacaaccaaaacaaaacacacgagatgaacacaaaaccacgcaccacagaccaacaacagcacacagcacccggacaacgcatcaacaacacacagccagataaaaacagcaatcacaagtaactcaagaccacgacacgacagcgcgagacacgatagatacagcgaagcaacacaaggtaagaatggcttcagagcacaaatagccgcacaactgacctcgccacccccaacgccgtccagaacaacccgagcaaaaaataaaacacaacgaacacaggacaaagctcgataatgcacagaggcagaaaagaggacactacacaactagacaagcaacacacagaaacaacccaaaa

SEQ ID NO: 683148 - DNA, 517 bp, Homo sapiens
atgcattgacatactaatcgagaaagaatatctggagcgagtggatggtgaaaaggacacctacagtgacttggcttagcccttctgcgaacggtctgactgtgtgacccgtagtcaagatcagttcatgtaggacaacgaatgcaataataactcaggtgcatagcagtcagcctgccgacattgtacctcccttttaaaaactgagcacgcaagactcccatctagcctggtctcggtatttcactatcggaactgctcaggattgatacattctcaagtctgtaaatactggacaccaacgccatttaccctaatttaagaacagcggggactgaccctccgtgccgagggctgcatgctaccgcactaagtcaatacatgggctccccgattcgcagctgtcgtcttggcagcacttgtcacgttggcagcactttgagagcaagtctgagtggacccacatgtaacctgctatgaaaaccatttgtatagtgtgtttcatttttaatgtgtg

SEQ ID NO: 683149 - DNA, 856 bp, Homo sapiens
tctatccatccattgatctacctacctacccatcatctaccatctattcacccatccatctcatccatgcatccatctatccatccatctacctacgtacccatcatctaccatctattcacccaaccatccatctcatccatgcacccatctattcatcttcctacctacccatcatggaccgagatgtttggcactgggctgacacttagcatcggtcacatgatgggtacggtaggtagatggatggatggatgcattttatccatcgtatcgaggcagttgatgtagggagttaaacaagaccagctacgcagaatcttagcatactcctctaattaccacataggatgaataatagcagttctaacgtacgacctaacataaccattcttgatttaactatttatattatcctaagctactaccgcattcctactactcaacttaaactccagaccacgagcctactactatctcgcacctgaaacaagctaacatgagtaacacccttaattgcatccacctcctctcccttaggagaagctgccccggtaacggtttttgccaaatggggcattatcgaagaattcacgatagaactatagctcatgatcgccaacatcataagccacatcaacctccttaactctacttctaccttacgcctaatctactccagctcaatcacgacggactccccatatctaacaaccgttctagtaagcatgacccgtttgaccttacaaaagccgaccattacttcccaagttttcgcccttacaagttgtcctaactagttcccctgtatataataatctgtaagaacaaaaagggggcgtccaagacaccagag

SEQ ID NO: 683150 - DNA, 575 bp, Homo sapiens
  misc_feature (260)..(260): n is a, c, g, or t
ttattttacccagcccccattcaagatggagtgactctggttcaaatgcctctgacacatgtgcctcatgttgggcatgagacctcactgtgtaggtgcagagaagaccctgcctaaacatgcctacacgttgctcctttttcctgcctcaacttccttaaaatgacaagagcagagccctttgggagctaacatcaggactccttttctgtactctgctccgtgtgctgctagagccacaagcctattaaactttgccngaaacaaaaaaaaaaaaaaaaaaaacaaaaacaacaactgtttccggcgcgcctcgcggcccctgcgaaaaaaaagcctcttaaaacaattcgcgttgggggcacgcggggcccccataaaggaattaggcgaacggggcccaaatggcggcggttctccagagggagcaccgcgggacaagtgcacacacggcgtgggatcatcctcgacaataaaaaacagcccgcggggcacacgcccgtccgaaacaaatcccacagggacttccagggcgcacaacgggccatcccacaaggccacagagagccgacata

SEQ ID NO: 683151 - DNA, 129 bp, Homo sapiens
ctcattagagactcagtgccaggatttttattaggggcagtcacattctgcctgccacataccaaaattccagactttcacaagaaatcaggtgttcagcacaaaccatattgtttcacaaataattta

SEQ ID NO: 683152 - DNA, 916 bp, Homo sapiens
  misc_feature (681)..(681): n is a, c, g, or t
  misc_feature (916)..(916): n is a, c, g, or t
ggaacgcgtgggcggacgcgggtgggatcaactgggatgtttcactattaagtctgatgtgtggtccttggaatcctcctatacgagatatgtcacctatgggaaaataccctatcccagggtagaactaatgcgcgacgtgatgaccgcctgtgccagggctacgggatgccccgggtggagaactggccagatgagctcttatgactattatgaaaatgtggctggaatagaacaggcatgaatgagaggaccaaggtatgactacttacagagcgtccttggatgatatctactacgagccacgagtaagggcaattatccaggacgagcgagccgttagagcacagggtagacccgtgcatttggcatggtgtggctgcctcattgagagaggaataagtgagccatcactggttgctacttatgatttcatgtgcggggatcatctgcccgtgcctggatcctgaagatagaggctaacaacttagctcgaggaatgaacaccctctaaatgggaaagtattcttgtactcttagagggattctccatcagttgctacttggacttgtcctcggcagctggtagatcttgctctgttgacaacatctgagtgcgagcgttgagaagaaaagctgctatatctctgccaagaaatgcaacgcaaactaggctctatntttacaaagggacccttgggactcaaagttttcagagaccattggaagggatcccccataaatggacgagaagtgaagggtcgttaaaagggtaaaaagcggggattatactggaagacattattggggctagggttactgtttgaaaaaagaagagttatcaccgttgtaattgggagggagcagttaaagtggtccacaatagaggtttcgtcacccagatgggagtacagtn

SEQ ID NO: 683153 - DNA, 461 bp, Homo sapiens
  misc_feature (220)..(220): n is a, c, g, or t
  misc_feature (350)..(350): n is a, c, g, or t
aaagtgcagcaacatggacagggagggcagaggtaggacaacaccagggcaggcagtggctggggataagcaggagtatacaatagaagaagaaacggctggggtgaggaaaagcggatgctacatatcaatgtgcgcactttgccaggtaagtcgtaacttaatatggaggcctacctacaggtgtaaaacccccctactaagcatatacctaaacccngagtcgttgaccctaggcaaggcatcctaagaggtttatgccaggcagcatgatacgaataaaaaagttgggaacaacaatgtggaaattaacgacactcctacgcggtccaaccttggggtagttgcangtggcagtgcaggcgtacgtaggggtggtatatatagggctaagggttttgtggtacggggcttttccttttcttgcttttttggtttaggcttgactttttacacgtgct

SEQ ID NO: 683154 - DNA, 116 bp, Homo sapiens
ggtgggttccttgcagagttgctgtgcgcacacggagaggccctagagagcctcatggatgtaactagagaagaagagggttcctttatgtttttttaaaaaatgatttttaaata

SEQ ID NO: 683155 - DNA, 100 bp, Homo sapiens
acctaaggatccagtgctactccacaaacagagtgctacctccacacaacagtgtatagccagtggaatgtggcagtgtgctgtttgtggaggtagcact

SEQ ID NO: 683156 - DNA, 944 bp, Homo sapiens
aagtttcttcactcatggggatgtggtaccattggtgtcaggagccctgggggcatgctgccttgggatagctgcttgccaacacagacgtgtttctgtccagagccccagaatagcggtcctggagtacctggaggatatagacgctgagaatacactggaggaaggaaccgaaggactgttcaagagcacaaggagcgtatgggacaagaaacatggagctgtggattagtggccgtgcgggaggccaggctgtgatcctcgtgtcgcagaggagagctgcggagtctgtcctcccgtgataatagctatgtggaccagctggggcgtggcccgctctagtgcagggggtaagaggagcacagtctaggacgtggaaggtgagaggactttccaagctcttattgtcacctggaggaagatctttccttggagtgagcacgcgagacgaagttctaatgggtccacaacaggcgggaagattgactgtcaactggggattttatccgggactgggaagtgtggtacaacttcttccggagcctggaacggggggctctctgggaaaacctggaggggggaggcttcatacttggggggaggtgcggggggggacacggaaagcaggctttttcttgagcccgggaaacaaatttggggacccaggtgactcttcgagcgtgggaagaaggaggcataataagaggctcaaacaccaaccaatgggtgccccgaaggaaacaccgatgggtgggaaggcgcccaccaaggcgaagacaggagagacaaccgcagtcaagagaagatgtatcacccagacccgaagggagggagacacaatcaactcacagcggggagagagagatagaacatcggatgtgacgacagacaaacccacacacactgtcataagcgacgaacaagcgatcagcaacatcagagaa

SEQ ID NO: 683157 - DNA, 398 bp, Homo sapiens
  misc_feature (4)..(4): n is a, c, g, or t
  misc_feature (12)..(12): n is a, c, g, or t
  misc_feature (55)..(55): n is a, c, g, or t
  misc_feature (102)..(102): n is a, c, g, or t
cccntgggcctnggcagggaatcttcctttctccccttttaaatccctgggagcnactgctgaggtctgagccgttctcccaggcccccgtgctccccctancatggagcccagctcagggactgaaacctggcggtgtgggctggaatcccaatgcccccttactgaccaggaggccaggacgacagagacatggccatgcgtctgcagccagaaccccccagcccctgggccgcctcccgggggctgccccaactttcccagcctctgagcttgagtttccttgggacccgcctggccccagaccctgtgcccacccttcacctgcccggggccacgaggacgacggctgtgagggcacacttactagttgggaatataaaaatgctttaacttgc

SEQ ID NO: 683158 - DNA, 167 bp, Homo sapiens
  misc_feature (131)..(131): n is a, c, g, or t
agacgtccccggtagtggatcttggcttctctttcctcttctcctccaggtggtgtcactgctggtacttccagccaactcgtgagccaggcgccccagataggcaaacttctgtaggcttcagacgcacngaccttgagggcagcaggaaccaccatccgcttttt

SEQ ID NO: 683159 - DNA, 176 bp, Homo sapiens
cagtatatcaagtaaaaccaaccaatatattttacccaaaaatgttaattaaactaatttgggcatggacaaagaattctttctgtattcaaatggggctaattcagactccagactgaattttaattcaagttctttctcaagtctataaatattaaactgattatttcattcta

SEQ ID NO: 683160 - DNA, 311 bp, Homo sapiens
ctaccattctacccacgtgtttaagcaattctcctgtctcaaactcgcgagtagctgggattacaggcgcccgccatcatgcccaactagcttttgtattttgagtagagacaaggtttcaccatggttggccaggatggtcccaatctcttgacctcgtgatccgcccgcctcggcctcccaaagtgctgggattacaggcgttgagccactgggttgcggtctcactcatcatatatttttatgaactggtccattttggatgggttgcactcaaattattttgtatttgtccagttaatctttgttac

SEQ ID NO: 683161 - DNA, 255 bp, Homo sapiens
ggaataactaagtaaaataaaaaagaaagacagacacagccaagttctgctgttcatttggattcaccccgcgagccaaggacaactgtgcttggatttcaggagcccaagtatgttacactcttatgaaggaggttttccttggtctttctaaggtaggtccactaaggatcttaggtagagcccccaaacctgcttaaagataaccttccccaaaccagtgaactattgatctctatatagagggtgtgattt

SEQ ID NO: 683162 - DNA, 314 bp, Homo sapiens
gctcggtacttctctcctcccactcgcctctgagtagttgggatgacaagcacacaccacacaccaccacacccggctaattttttttagagatggagccttgctgttgttgcccagtcgggtctcgaacttctggcctcaagcaatcctgcctcagcctccaaaagtgctgggattacaggcatgtgccactgcacctggaccagtgtgtatttcatacttagtgctcatctcagtttggactggccacatttcaagtgttcaacagccacatatggcttgtggccaccatattggaggtgggaggagaggaa

SEQ ID NO: 683163 - DNA, 392 bp, Homo sapiens
  misc_feature (59)..(59): n is a, c, g, or t
  misc_feature (179)..(179): n is a, c, g, or t
cgggggaaaaaggggattaaaaagtggaaaaagatttaccctagaagtcacccttcgantggggggcaatccctgggggccttcctttccccccttttgaccctcaaccaaacttgcatggccatggcagggcctcgggaaacccttcaggagtggggaagggtttttcctccatgatngcccctcctggtccccccacaaatcagggacagaaagtttgtcccctttgaaaaaccctttccaggcggccccctgcccatttggacccattgccccgccaggagcccccaagtatgtgggaggggacgggggggacgagcttggttgttttgcggcccccgaaagctttttgttatcctaatttttgtaaaattaaatgattgggccccata

SEQ ID NO: 683164 - DNA, 759 bp, Homo sapiens
agcggagtggactggacgtcattgccgggaacgagcgagtcgccgctgcagacctagtgactgtgcgcctgtatcccgattgtcttctcctccaaggtctacatgattacctgacagtttactaagtaagaccactgcaattatggccatttcttcacatgaagcgttcaagaagtgagagactgtcgctagaaaatagacatgatttcaaagttatgtctcattaatctgactgtggatatcatatattctacctcctataggtaatgcaagaacgtgtgttgctgggaagcagagaacgcgaagcaactgatagtactcttgtgtctacacctacagcattacctgtaggtatacgccacagtcagtctacaatagaggttaagcatacaatacatacataacgatgtaaatggaccaaaagtgaagcaacattcttgcacgtacagcaacgtgtatactctaccaaagcaagccatggtcttacatattgggatcttacgaaaccttacgccactgtctgctacaccaaagggcacttacaaaaaagtgacacatatgtatgtcccgatattaaacagtactttgacctctgttatcaaaggctgatattatggccaatcaagaatgagaatgatttcaccgtttagctcacatttaagccaagttcccaacatctctaagaacaagtatcggatcagtggctggttaagacagaacaacatcaacaaggcatcaagatctctgaaaacaatataa

SEQ ID NO: 683165 - DNA, 122 bp, Homo sapiens
gatgggctactctccgaacgagcccctgaacttccacgccatgtaccagcccttccgtgagatgatacacgaggctcagcaggccatggacatccaattccatagcccggccttccagcacc

SEQ ID NO: 683166 - DNA, 1856 bp, Homo sapiens
  misc_feature (1414)..(1414): n is a, c, g, or t
actaaaacgtacgatcattctccctatcataggaataatattataattctcttcatagactcaactactccctccactcataatctaattgtccttatgtaatgcgagactatactcatatatccgtgtgattgccctcttattagccttaacatcatctactacaaaccatacaaactaaaccttacattaaccttacatctaatcctccaagtaactgcgtcgacgcgtacatattgacgcatataacctgatgctcgtatatcgtactgcccttggccgcagcgcaatgcaagtgctcgtaggctcctatgcacctctgacctcatgctccattacaccttatccgacactaccattatatgagtacatacaagactagacgggatcaatacagaccttacacatccctattatccaatcagacatttacaattagagtcagatcacacatggcatactctagatacttccatactcagacggaatactcgaaacccgatgcatacctcgtggcgcagaaacataaagtacgtatttcaaatctagcgcataagtccatagcatgtaaacacccacaactcaatatgcacctaagaatctaactgggggccgatacatggaccgacatcttcaccctttaagtatcgtggtttttgaaaccaccaaataacagtacgataacggtaaacatgacccactggaaatttttgaagacggtacggctactccgcccacttttacagctcacattaatattcacattcctcaggcaattaccacgcataagaaacggattccttgtgggccattactcctaatagtaaggcttagatctcacccatcgaattttacgggtcatatcaagaccatacaaccaagaatttggctagcagtttacacggcgcggaaccgggttccttaaaatagtccactacaccaccgcttaagatattctcacactcggtgttaaccgaaccagaaacaccagagcggtgcgtattactaatccttacgcttgagttatccaataagtggtccttccttggcagaaacttcacttgtttgtgccagttcagaaatcacaatcacagcctatttaccaatgagcgcccaatacgcatacccttaagaaaccattataactttttaccacgcacgttaatcacaacatttcttgtttatggaaccaccattacgggtggcaccccgcgataaataaatcaaaccgggcgataatattaatggacaaaccacacaccccccggtaaattagtacgcgcggcatttcgtaaaggaacgcacagaaaaaaccggtccactaggaaaatcaaggaacagatgaagcacagagtctacagcatattacacgcataagatagacattaaacgaagacgcacgaaaagagagagnagcatccacccaaatattcaaaccaagatacattaacctcagccacgcgcatagcaattgaacaccagacacagcaacacaacagcacgaaaaaagggcacaaaacacaaaacacaagacaacacgacaaacagcaccggatagcaaggtggacaccagaggacaaaaaatagagaagatagcgaacaaacacagagacgaaacgaggagaaacgagaaacgaaacgagacaaccacgaaacaggagaaggcagagaaaagcacaaagaagaacacgacaaacacaagagcacgcaacggacaagagcagcaacaacgcacgaacagagcagcagcaaagcacgaaacacgaacgaaataacgaccacaaacaacaagaaagtagagaaagcagacacagactgcagaagagtagaaaagagcagacacaaatcacaaaagc

SEQ ID NO: 683167 - DNA, 249 bp, Homo sapiens
atgttatcccaacacacactttaaatgtttgctcttttctctcagtctctatattttatgagatcatctggaaaaaaaaaagacctgattggtggcgtgtggttggcttggttaaggtaaagttttactacaaacccctcataatagagttggtattggtttggagggaaacttggtatttgaggaaataatagtctagttggtgctatagaactagagacagaaagtattttcaagtgtggggcgata

SEQ ID NO: 683168 - DNA, 1952 bp, Homo sapiens
  misc_feature (778)..(778): n is a, c, g, or t
  misc_feature (798)..(798): n is a, c, g, or t
  misc_feature (1188)..(1188): n is a, c, g, or t
tggccttaaacaatgttttttgtttatattaaaaccactttatacaactctccactcccattctttataggttgacgggatatggtggcgctaagtgatttatctgataaccattttttctattttcagaactccatataactccaaggtgcctctcgtgaattatttacagaggtgtacacaacaacagagtgtgggaacagtgtggcagagaagagacagagagacggaaacagacacagaggggcaccatagaggtgtatcctccgcgagttgtatagagagtttttgtgtgtctcccaatgtgagaggggggaaatgacaggcaaagtcttgtgacagagcatatcattctttggtgtgtagtgactcttttaactacatctactttatatcatacccgtggcgtgttacacacgtaatacatgtgtctttttcaccacaaatatataaaaattctacaagacgagagcgtcttatcccccgatgagagcgccgtgtatacaccctacagagagagattattacgcggctcccgtgtacaaacaccaagagtgttttttcttcccccaaacatgttgtgtgtcttctataacctataaggcatcttataagccacacacggacacaatttgcttcccacgcaaaatataacaacgtcatgaaggtctacaccaccgccatcttcttacaacacggcggcgcgggcgcaacaacactctccccccaataaagggataaccataactttcttcgtggcgttagtagtacgcgcaancggtgtaggtctattactanaaacaggcagcgggagcaccaacatctaccccattcttatcttgtcgcccgccatgttggggatgtagcacagggctcttctatacgacattatacaccaatttctaccaagccggaaaagcacacctttcctgttgaacgaccaacattttctgcacaccacctgtgttgctgtcttactatgcactctaacacaccacaccacggtgcggccagacacgcggaccaacctgtcagaccatttctttcccccgccctaataagcgtaagacaaccaccgactaccactcacacatcgtgtggagacacgcctctctaaaactctttttgtagacacacaccacataagactagtcgcccccaccgagtgtgttaaattcttgaaaagcncactaaagtcgaacgagagaacgtcttactgcagttacaagaagcgacgcacagaaaaacacccgacggccttttgtaaaaaagaatcacagccgcccaaggccgacttatttcataaacacgaggtgctgctctaatcacaccatcaaatagtcgacgcgccactacaaacacatcgctcgcgcacgactaaaacatatacggagagctcttattaaatcactgccgcaacgatacgtacgcctagtatttaccacccgcctacatacagcgatgatagtcgagtcctcaccacactggaagatcagctcggaccactataaaggggggggcaccacaaacacacacgggtcttccccgtgttctccggctcctccctcagctagcacctcaacaagtggctcgccgtcaacaataattggttagattaagcgacgcacgaagagccaaccattcataagtacgccagcaacagacaccacacaactcatcatcacaaacagacaaagcgtattgctccagtccgcccacgcacacagttatcctcgtgcggatcgcttgcacgtgagaataacacacatagacggatcagtgcacacagttatagatataataccacacagcagcgaaccagcgctcagatcagtccagtctacacaaacagaaatcacttcacgtcacctaagcaattcgacgtacacaatacgatgtcactcagcatgaatacgttcttagacttatttatatgtactcatatcacttat

SEQ ID NO: 683169 - DNA, 162 bp, Homo sapiens
ctctgagggcagtagaacgggtggccatagccacctcctgggtatagaagctttgtagttcatagcttcgagttagtgtgtcctctaggacatactgtccagcctctacagcattagctgtggtgaagcaaggcaacgtgtctctgacagggactatagtct

SEQ ID NO: 683170 - DNA, 463 bp, Homo sapiens
aatagtaggtgtatatatttatggaatatatgagatattttggtacaagcatgcaatgtgtaataatcacatcatggaagatggggtctccatcaccttaagcatttatgcattgcattacaaacaatccaatgatactcttttagttattacaaatgtacaattaaattattattgactatagtcaccctgttgtgctatcaaacactaggtcttattctttctatttttttgtattcatcagccatcctcacttaccctccaaccccccactacgctttccagcctctggtaactatccttctaagctttatgtccatgagttaaggtattttgatctttagatctcacacataagttagaacatgggaaggttatctttctgggcctcatttatttcacttaatataatgaccttcagttgaatttattttgtctaaaggttttcttttaacattggttt

SEQ ID NO: 683171 - DNA, 226 bp, Homo sapiens
ttcctggagcagtagagggcaatcgttaagattgtggattgactgttgtgtactggtgaaggattctggatttggccgggcacagtggctcacgcctgtaatccccacacttcgggagaccgaggcaggtggatcacaaggtcaggagatcgagaccatccaggcaaacacggtgaaatactagaaaatacaaaaaaaaaaagccgggcgtggtggcgggcgccgg

SEQ ID NO: 683172 - DNA, 250 bp, Homo sapiens
ctaattggttcttcgatgacggggggaaggaaggcaattgggtcaagctaagtggctgggctggggggcagggcaccggagaagatattctagaggcggctgtgggtgtgtgtgttgggaggggtcctgccaagacacttactccttcaggatctgcagcttctcccccttcagcatctgcaggtcccggtcgttcatggcattgtagttatacagggctaccacgaagcgtcatcgaagaaccaattag

SEQ ID NO: 683173 - DNA, 3163 bp, Homo sapiens
ggcacgaggtctccaaaaaaaaaaaaaaaagaagctataatatatatctagattaactaatggagtgctctgtgaatattcattaactacattttatctatttactatattttatatgggtaagaccagtggtcatccgtatttcttttgaaagcccacttgatcaggaagtttatattttaagcagtatgtttgcacaatggtcagttcacatttgattgcttgtattactaattagaggtaaaacttctattttttcttgataattctgtaggcaaaaaaaattggggaaggcaaattacaatcattcttcttctgtaatactttgggacaatttttaaacaactcagacccatgtttaaaaacgagttttgtgtgattaacccttgtatagtatccagttactgtcttctcttgaagtggtggttctttgagaagtagaattattttgtaacttttcttctcccagaaacagaagaatcaaatactattctgttaggattctatctagacctgtgactcttagtataataacccttttattattattattattttttttttttcagtaatctataaagtagagttgcttagttttgagcaatttagggcttttcttattggccagtaggttattcattttgctgctaaatataatttttgggttaattttaacattatagtgctggccgcttggttctatgattacctaaaaatctagtttttttcctccataggtagatgtgtgtgtatgcatacccccacacacacacgtacatatatgttgtcatagagaggtatttcaacccttatttcaaataacagtagaagatacgaacatgaatttatattttgtaaaaatgtcattcatccactttgttttccattggaaatagttttataagaagggttccccttgctctctccacttaacaatttcattatatacgtagaaaaagcagccgacttaagggcttgatgttttttcaggccttgtggattcaggtttccagtttcccagtgcccttaatggatgttatgaatgcataagcacattttcttttaaagaaagaagttagatttatagtgttatttcttacttgctatatttctttgcactaaaaaagagctatgtgtttgttttataggacactttagtaccgtattgcctacaataactcagtttgctccttaaattccaaactctgggaagttgataaataacttccatgatcacttgtaaaagttacatgcacatctgaaaaaaaatcacaaatctctatgacagtaggttatgttttgagcttgttaccttgcagtattcttctctgttccataggtgaaaacaaagggtgacagaggttatcaggcaggaaatgcctaaatacatacatctctgcatggtacaatttctcatattcatgtattccataaacagtgttttttctctgtttaagcagactgttgtttcttctgagtcagtgatatgtgatcttcgttggtttcattttgtgaagctcagtctgtctctgtaacatactttaggatttgcaccttgtgctccccaggaattatgttagtgtccttttctatgctgtcttcaaggatggacagaggcctaaaccacaacaacaacaaaaattagaaaaaaaaatacttagatttcggtaatcatccataggaactcatagcatcagtctcttttctctgtgaataatatctttgtgtaagttgtcataaaaaatcaacgttagaagatgacaattagatttcttcttaggtattgagggtaagaagttgtaaagaaagaaaattcgtgtttcaactaaaagattggattgcatatacctttgaagtggttttgtaaaaaaagttcagttactaaactgagtgtgccctgtaatcctttttgagtgcactgaagatgctttgaaaatactttgttggtcttcacattgtgcatcatgtcctgcaacttgtaaatatgtgcatgttgtttatgtttgtctgcctgtctcttattgcactaaattctgcaaggtgaataatttttttataccatttatttggaaaaagttcctcctccaactcttcttcactgaccttttaattagttggtaaacttagaaaaccaggtaggatttttgaagccctgagtttaaaagaagaatcgtggctatttgacatcatccttacattcccctgacttaaaaagctaacaagaagcacgagatcttccacctcattttagaaagcttttctacagaactatatgcttgcttatagctacctatctacagtttgaacagggagaaagggagatatgtatgtctggttacatcttccttcactcttgaattggctgggacagcaagcaacaacagtttgaggtccagtgacctacgtaaaatgagtgtcgtttgtgtcaggggacacatgtaactgtgcaacatggtattttctacagggagggctaggaagggtggttttggaacctaacctactttgtgtcttcattgtcagaactaaggttggaaatgccctttaaaggacttggtgaggcatatgctaggacaatagagctgctttagaaagaaattgagacatgttttgtcaggacagataaaagtttaatgcaggcttttgaacagatgttttaaaacaaatttgaccttaccaactatttttttcttctagccaaatcattgtacaggagtttcatatatgataaaaagtgttttgttattgtttttgctttcttggcaggggagaacccctaccattgtgagcagttactgtcactctggctgaatggacaaatagctgtgtaaatagcttctcataaaacgcttctactgatagctgtttgactttttcttcccgttatgaatgggaggaacatttgtaaacttcctttctgggtagctaccaaaaaacgtactggcttatggtcccatgtgaccttgtctccgttaagcccagaatctgagtgcctttagcaagtgttagcatttcacagagagaagagagacagaattattgctattaatcaccattcataaataggagcttggaataacaaaggtctgtgtgaattctgttctacgtcttttttttcccttttttaaataaatgtcaatttgatatcaagtaaaaaaaaaaa

SEQ ID NO: 683174 - DNA, 3097 bp, Homo sapiens
ggcacgaggtctccaaaaaaaaaaaaaaaagaagctataatatatatctagattaactaatggagtgctctgtgaatattcattaactacattttatctatttactatattttatatgggtaagaccagtggtcatccgtatttcttttgaaagcccacttgatcaggaagtttatattttaagcagtatgtttgcacaatggtcagttcacatttgattgcttgtattactaattagaggtaaaacttctattttttcttgataattctgtaggccaactcagacccatgtttaaaaacgagttttgtgtgattaacccttgtatagtatccagttactgtcttctcttgaagtggtggttctttgagaagtagaattattttgtaacttttcttctcccagaaacagaagaatcaaatactattctgttaggattctatctagacctgtgactcttagtataataacccttttattattattattattttttttttttcagtaatctataaagtagagttgcttagttttgagcaatttagggcttttcttattggccagtaggttattcattttgctgctaaatataatttttgggttaattttaacattatagtgctggccgcttggttctatgattacctaaaaatctagtttttttcctccataggtagatgtgtgtgtatgcatacccccacacacacacgtacatatatgttgtcatagagaggtatttcaacccttatttcaaataacagtagaagatacgaacatgaatttatattttgtaaaaatgtcattcatccactttgttttccattggaaatagttttataagaagggttccccttgctctctccacttaacaatttcattatatacgtagaaaaagcagccgacttaagggcttgatgttttttcaggccttgtggattcaggtttccagtttcccagtgcccttaatggatgttatgaatgcataagcacattttcttttaaagaaagaagttagatttatagtgttatttcttacttgctatatttctttgcactaaaaaagagctatgtgtttgttttataggacactttagtaccgtattgcctacaataactcagtttgctccttaaattccaaactctgggaagttgataaataacttccatgatcacttgtaaaagttacatgcacatctgaaaaaaaatcacaaatctctatgacagtaggttatgttttgagcttgttaccttgcagtattcttctctgttccataggtgaaaacaaagggtgacagaggttatcaggcaggaaatgcctaaatacatacatctctgcatggtacaatttctcatattcatgtattccataaacagtgttttttctctgtttaagcagactgttgtttcttctgagtcagtgatatgtgatcttcgttggtttcattttgtgaagctcagtctgtctctgtaacatactttaggatttgcaccttgtgctccccaggaattatgttagtgtccttttctatgctgtcttcaaggatggacagaggcctaaaccacaacaacaacaaaaattagaaaaaaaaatacttagatttcggtaatcatccataggaactcatagcatcagtctcttttctctgtgaataatatctttgtgtaagttgtcataaaaaatcaacgttagaagatgacaattagatttcttcttaggtattgagggtaagaagttgtaaagaaagaaaattcgtgtttcaactaaaagattggattgcatatacctttgaagtggttttgtaaaaaaagttcagttactaaactgagtgtgccctgtaatcctttttgagtgcactgaagatgctttgaaaatactttgttggtcttcacattgtgcatcatgtcctgcaacttgtaaatatgtgcatgttgtttatgtttgtctgcctgtctcttattgcactaaattctgcaaggtgaataatttttttataccatttatttggaaaaagttcctcctccaactcttcttcactgaccttttaattagttggtaaacttagaaaaccaggtaggatttttgaagccctgagtttaaaagaagaatcgtggctatttgacatcatccttacattcccctgacttaaaaagctaacaagaagcacgagatcttccacctcattttagaaagcttttctacagaactatatgcttgcttatagctacctatctacagtttgaacagggagaaagggagatatgtatgtctggttacatcttccttcactcttgaattggctgggacagcaagcaacaacagtttgaggtccagtgacctacgtaaaatgagtgtcgtttgtgtcaggggacacatgtaactgtgcaacatggtattttctacagggagggctaggaagggtggttttggaacctaacctactttgtgtcttcattgtcagaactaaggttggaaatgccctttaaaggacttggtgaggcatatgctaggacaatagagctgctttagaaagaaattgagacatgttttgtcaggacagataaaagtttaatgcaggcttttgaacagatgttttaaaacaaatttgaccttaccaactatttttttcttctagccaaatcattgtacaggagtttcatatatgataaaaagtgttttgttattgtttttgctttcttggcaggggagaacccctaccattgtgagcagttactgtcactctggctgaatggacaaatagctgtgtaaatagcttctcataaaacgcttctactgatagctgtttgactttttcttcccgttatgaatgggaggaacatttgtaaacttcctttctgggtagctaccaaaaaacgtactggcttatggtcccatgtgaccttgtctccgttaagcccagaatctgagtgcctttagcaagtgttagcatttcacagagagaagagagacagaattattgctattaatcaccattcataaataggagcttggaataacaaaggtctgtgtgaattctgttctacgtcttttttttcccttttttaaataaatgtcaatttgatatcaagtaaaaaaaaaaa

SEQ ID NO: 683175 - DNA, 1375 bp, Homo sapiens
ggcacgaggtctccaaaaaaaaaaaaaaaagaagctataatatatatctagattaactaatggagtgctctgtgaatattcattaactacattttatctatttactatattttatatgggtaagaccagtggtcatccgtatttcttttgaaagcccacttgatcaggaagtttatattttaagcagtatgtttgcacaatggtcagttcacatttgattgcttgtattactaattagaggtaaaacttctattttttcttgataattctgtaggcaaaaaaaattggggaaggcaaattacaatcattcttcttctgtaatactttgggacaatttttaaacaactcagacccatgtttaaaaacgagttttgtgtgattaacccttgtatagtatccagttactgtcttctcttgaagtggtggttctttgagaagtagaattattttgtaacttttcttctcccagaaacagaagaatcaaatactattctgttaggattctatctagacctgtgactcttagtataataacccttttattattattattattttttttttttcagtaatctataaagtagagttgcttagttttgagcaatttagggcttttcttattggccagtaggttattcattttgctgctaaatataatttttgggttaattttaacattatagtgctggccgcttggttctatgattacctaaaaatctagtttttttcctccataggtagatgtgtgtgtatgcatacccccacacacacacgtacatatatgttgtcatagagaggtatttcaacccttatttcaaataacagtagaagatacgaacatgaatttatattttgtaaaaatgtcattcatccactttgttttccattggaaatagttttataagaagggttccccttgctctctccacttaacaatttcattatatacgtagaaaaagcagccgacttaagggcttgatgttttttcaggccttgtggattcaggtttccagtttcccagtgcccttaatggatgttatgaatgcataagcacattttcttttaaagaaagaagttagatttatagtgttatttcttacttgctatatttctttgcactaaaaaagagctatgtgtttgttttataggacactttagtaccgtattgcctacaataactcagtttgctccttaaattccaaactctgggaagttgataaataacttccatgatcacttgtaaaagttacatgcacatctgaaaaaaaatcacaaatctctatgacagtaggtatgtttgagctgttacttgcagtttcttctcgttctaggtgaaaccagggggcgagttccgcgaagcaatactcatcgggga

SEQ ID NO: 683176 - DNA, 206 bp, Homo sapiens
tgtgcactctcctatatctactctctggtggtcatccttcccacgacccgctgaaggagcgcatctccctgccttctcggaggagcttctccgtgtctgcgggctcctggcactgctcaacctactgcaggggatggggcgtgtgctgctgtgcttcgacatcatcgaggggctctgctgtgtagatatagaagagtgcactttag

SEQ ID NO: 683177 - DNA, 338 bp, Homo sapiens
  misc_feature (36)..(36): n is a, c, g, or t
  misc_feature (93)..(93): n is a, c, g, or t
  misc_feature (171)..(171): n is a, c, g, or t
cacaatcattttttaatgtgagaaacccaccagganatggttggtagttgatttaataaatgctaataaatacccattgttctaaattgcctncaagagtttatgcaacatattggacatagtctttttttttttgagacggagtcttgctctgtcacccatggtggagtncagtggtgtgatctcggctcactgcaacctccgactcccaggttcaagcgattctcctgcgtcagcctcccaagtagctgggattacaggcacatgccaccatgcctggctaatttttttgtatttttaatagagacggggtttcactgtgttagccaggctcgtgc

SEQ ID NO: 683178 - DNA, 136 bp, Homo sapiens
cgcagccccgcaagacggtggtagattcctcatctgaggcctggcgtggtggtgctggccggtacactgcttagtgacgtgacacctggttggctcgggaggtggtggattcttcaccgatcgcctatggcttgtc

SEQ ID NO: 683179 - DNA, 421 bp, Homo sapiens
ccgcatggtagcaacactacatgtgagcagcatcacatggtagctttaccacatggtagcaatatcacatggtagcaggaccacatggtagcaacaccacatggtagcaccacgtggtagcaataacacatggtagcaacaccacatggtagcaacaccacatggtagcaatgacacatggtagtatcatcacatggtagtaacaccacatggtagcaacaatacatggtagcaatatcacatgtgagcaacaccacatggtagcatcatcacatgtagtaacaccacatggtagcaacaccacatggtagaatcatcacatggtagtaacaccacatggcagtaacaccacatggtagcattaccacatggtagcaatatcacatggtagcaacaccacatggtagcaacatcacatggt

SEQ ID NO: 683180 - DNA, 125 bp, Homo sapiens
ctagttgttcttcactgaatttatttattctttgtctaaaggtataggatcttctttgtctaacaggtatagtttagggttttcattctcttgtgaaggctcctatattatctttgaaaattagg

SEQ ID NO: 683181 - DNA, 412 bp, Homo sapiens
actaagagcactgaagttagtctgccggccattgcaccttagtaggtatagcagcctgtgaagagcgactgggtgaaaccagtcccagaagaaccggtgtgacacatactgtcctttgcccgcttgccagttagccatggcccgtttcataaaagcctcgtgggttgcctccttgtttgcagccttgccaccccagacagccagtgcatgtggcttgcagggccggtccataagagaaccttagtttccagggctttggtagaggccaaaggttgatagcattgaggttgagagtggcatcctcttcactcatgcccccagacaaaaagcagatgccaggcacagctgcaggcacagtacggtggagagctgttacggtggccatagctacgtgttctggagtatacctcct

SEQ ID NO: 683182 - DNA, 269 bp, Homo sapiens
accaggctggccttgaactcagaaatctgcctgcctctgcctcccgagtactgggattaaaggtgtgcgccacacctggctgatgttaataatcttaatagaaatacttatttaaaagattttaccagcatcaaacacaaagaagaaaggtggaggaatatagttggatagataacaggagggaatacaatgtgatgcagtttggtatgactaacataagtatatttgaggagataattatgaaactttgaaattataagtttctacat

SEQ ID NO: 683183 - DNA, 122 bp, Homo sapiens
ggtcattactacacatttttagtgtgcttaaagtagatagtatactttacatttataaaaaaaaaatcaaatttagtactttattttgtgtgtgcctgtgatgttttctagagtgaattgaa

SEQ ID NO: 683184 - DNA, 398 bp, Homo sapiens
attgagaagtgcagccagagtgaatcatcttgttgtcatgatcttggactttggaatgatactgtgtgatgtggcagtcagcaacagtgggagctcgaagattgatgcactgtgcatgttcaagcaacaaagtctaaaaagtgccagggcaatttcgtctcagtatatcacatgcacagcgtaaagtacgaagggcagaagaagccccatgccgctgttaaggcagggaagaaggctcactggtcctccgtcgtcagaatgtgagttccaaggctccaatgctcagtacgtcttcttgtgctctccttgcaggtggctcgctctgcttccagtatagtctgtgcctctatcagcagagtcatgttcatagtcatcctccacggtgatgtacccttggg

SEQ ID NO: 683185 - DNA, 982 bp, Homo sapiens
acgagtcccgcgttctctccttgaatccactcgccaggccgccgcctctgccgccgcagcctgcacacgccgcccctctcctgtgccaggaacttgctagtaccatgcaccatgccctaccaatatccagcactgaccccggagcagaagaaggatggctgttgacatcgctcaccgcatcgtggcacactggcaggggcatcctggcctgcagatgagtccacgggggatgcgattgccaagcggctgcagtccattggcgaccgagaacaccgaggagaaccgggcggcttcatacctgccagctgctgcatgacagctgactgagcgtgtgaagcccgtgcattgggggtgtcatccctcttccatgagacactctaccagaaggcggatgatgggcgtaaccttcccccaagttatcataatccaacggcggtgttgtgggcatgaaggtagacaagggcgtggtccgcctggtgggtacactatggcgatgactactcagccactggttggatgggctgtctgagtcgctgtgcccagaacacagaaggacggacgctgacttcgccaagtgccgtagtgtgctgacggactcgtggaacacgcccgtcagaccctcgcgatgatggaagaccgccatgtctggccgtgtttgcccggatctggcggagaaggcgtgagcccatcggggagccgatatccccctgatgggggaccagactgaaagcgcgcagatgtgccgagaaagagcagcgccgacagaagaccggtggaccccacatctacctgaaggcctgacagcccaaagggacccagccagctgcacagacgacaccggagatgcacgcgcacgcaggggcgcaggcccgcgcagcacacacgggcgccaagcgggcgccaccacagacacgcccgcacaacacaacgcgcccagacccacgccgcgccacggacaccgacccaaaaccccacacaggcc

SEQ ID NO: 683186 - DNA, 86 bp, Homo sapiens
ttttttcccccccccccccccccccccccggggtttaattttgtaaaggggggggggaaaaaaaaaaaaaaagggatttttcccca

SEQ ID NO: 683187 - DNA, 308 bp, Homo sapiens
acagtgcttttgaaaacacctcaaacttttctaaacatgaaagaaatcatagtggtgagaaatcctagaaatgtgaagaatgtgataaaggtttaaatggttgacacacttgattggaggtaagataagttatactggagaaaacttttacatgtgtgaacagggtgacaaaagttttaaccagtgctcacactttacttaacaggaaagcatttatacttgagaaaaattgtgcaaatctaaagactgaaaaagccattaatacatgctcacattttactgaacatcacagaggtctacttaataaa

SEQ ID NO: 683188 - DNA, 546 bp, Homo sapiens
  misc_feature (6)..(6): n is a, c, g, or t
  misc_feature (10)..(10): n is a, c, g, or t
  misc_feature (286)..(286): n is a, c, g, or t
  misc_feature (371)..(371): n is a, c, g, or t
  misc_feature (379)..(379): n is a, c, g, or t
  misc_feature (387)..(387): n is a, c, g, or t
  misc_feature (390)..(390): n is a, c, g, or t
  misc_feature (422)..(423): n is a, c, g, or t
  misc_feature (441)..(441): n is a, c, g, or t
  misc_feature (460)..(460): n is a, c, g, or t
  misc_feature (462)..(462): n is a, c, g, or t
  misc_feature (490)..(490): n is a, c, g, or t
  misc_feature (492)..(492): n is a, c, g, or t
  misc_feature (528)..(528): n is a, c, g, or t
agaagnacgnacagaaggggacacagtgttagacagaatccagggcccttaagccaagtgctccactggttaatattcagacatcagagcaaattagaattttgggataggggttaaaaaatcgaggcatataactcagataaccgaatgcttcaaatctccaccatgtcacacaagaccaggctacaactgcatatgatttgacgtggtttgttaactgctctctaacatcaacagaagaactcagcagggaatgggaaccagaatgccttaatttagagaccanggagtggtccgccatccattaatagtttccaaagattgggatggtaagagtaaccccaaaaccctccatttagggtttctcaccnccatcgtncttatttngcngtgggccaaccttttaaattggattttcctanngcccatgagggtttaggncctttttccaccaagtttngnggtggatttaggcagacccctttttggnancggaaccggtacggctttaatccgatggcaaggcanccaaggcatcgtagtgtg

SEQ ID NO: 683189 - DNA, 183 bp, Homo sapiens
cgttctggcccaccgattccatggcaaccccttgatacgggctctccgtattaaggaagacactagtgccatagcaactgtaagcggttcggtaccccgtgatggtgatcttcaggttctggccttcctgcacctcgatacatctgatgatggataggctcaaacgaggaaactccattcatg

SEQ ID NO: 683190 - DNA, 711 bp, Homo sapiens
agccatgtacattcagaggatcatagtggagtcttggcagcttcgaatatcatcaagaaggtgacatctgttggcgatgacgagaggccggtggtgttctggcacggttacggtgatagctataactctacagctatgcagcacgtcattggaatagtgcgagagaccaagcctgattcgtacacctattcgattaagctggacgacgatgactcgaaggaccaacggttatccatgttcagtgatgtcaacatggatatcgactatgtttgcaaacagctcagggaggttgattctcttgccaatggctttgacatgattgggttctctcaaggaggactgtttgccagggcagccgttgagcgatgcgcacttcccgttcacacactgataacgtttggatccccacactctggtatatcggaccttccaaagtgctctccaaatgattggctctgtaagaagaagaacgacgcattgaccaagccgggaaacatttggagagattgggtacagaataccatcgtgccagcacaatacttcagaagaagagatgactattacgaatatctggaaaaatctgccttcctcgctgatgtgaacaacgagagagaaaacaagcaacaactgtacaaggaccaatttgggttcctggaaagactggtactcatacaattcgagcaggaccagacagtttgtgcccaaatgtaa

SEQ ID NO: 683191 - DNA, 411 bp, Homo sapiens
taccctggtcgcaagtcgagactgcagtgagctgtgacagagccaccgcactccagcctgggagacagagaacctgtctcaaaaataatactaagtgggaaggctaaaatgaaccctgtagtggccgggcatgatggctcacgcctgtaatcccagcactttgagaggccgaggcgggcggatcacgaggtcaggagatcaagaccatcctggctaacacggtgagaccccatctctactaaaaatataaaaaattagacgagtgtggtggcgggtgcctgtagtcccagctactcgggaggctgaggaagagaatggtgtgaacccgggaggcggacttcactctagcctgggggacagagcaagactccctctcaaaaaaaaaagggtaataccatttaaagctttttc

SEQ ID NO: 683192 - DNA, 113 bp, Homo sapiens
ctagacgatcccctcgctatacatcggcacctcattcatcggcacccgtattgaattcaagtttaatatttagtatgcagtggacctctagagctcatggtgccgatgaatag

SEQ ID NO: 683193 - DNA, 559 bp, Homo sapiens
tttaaatagcttacaaggaatagtggttatatttatagaacattttataaaacagatttacacttgcaacaccaacaaaagcttgaaaataaaagtttacctaaagtaaaattggtggctgggtttggtggctcacgcctgtaatcccagcactttgggaggccgaggtgggcggatcacctgaggtcgggagttcgagaccagcctgaccaacatggcaaaatcccatcactgcaaaaaatacaaaaattacctgggcgtggtggtgcatgcctgtaatcccagctacttgggagctaaggcaggagaatcacttgaacccaggaagtggaggatcgcttgagctcaggagttaaaagaccagcccgggcaacacagagaaaccccccactctacaaaaaactttaagattacctgggcacagtggctcacacctgtaatcccaacactttgggaggctgaggcgggaggatcatttgagcccaggaggccgaggctgcagtgagctacgattgtgctcctgtactccagcctgggccacagggtcacaccctgtctc

SEQ ID NO: 683194 - DNA, 84 bp, Homo sapiens
tttttttttgcatttaacaatattttatttatcaaaagacacttgtctttctcaggtaagtgaaggtctagagatgaaacgagt

SEQ ID NO: 683195 - DNA, 771 bp, Homo sapiens
tggtaggtgcttggtaatcaatcttgcagtgtaaagtagtttgggtttattctttctttcagaatattaacttgaatgaatttcagggaaaattttgatactactcattttttttttttttttttggaaacagggtcttgccctggtcacccaagctggtgggtgcaggggcgtgatcacagctcacggcaatctaaaacttccgggcttaggtgatcttcccacctaagcctggtggggtacgctgagactataggctttgtaccaccacactttggccaattttggtgttttaatagagagggggttccacgttggtggttgtccagaatgggtcttgaactccggggctcaagccattccaccggtgcctcagcctcccaaagcgttggggatttacacacattgagccaccacttcccagcttgctaattggttttaaataccttttctttgggtgtttataaccctcattttattaatatgtaggaatagaggttagtaagtctatcaaatagggggcagctttaaccgcatcgagatggtgaccttaacctagttgaacactagagggactctcaaaactaatcacggaagttggagtccagagtatatccagagtatatacctgggtttcacaagtgtggcagaaccacacagtttttccccccaactctgtggtttccaacaacgacctaaggtatatgactaaaaattttcaccgtgggaacttatggggtgaataaattctcaggtaatagacctttttaa

SEQ ID NO: 683196 - DNA, 204 bp, Homo sapiens
agttagtcgggacgaactgtagcagccccatgttacacagcctctgaaggttctccaccaccgaaaaaatgttacgcctcttgtacagaagctgctgccgaatggggcctggggagaaagcggatcagcgtgtgcttcttcaggcgggtcgttcagacaattcctccagtgttgtccacccttggtagctgacttggcacaatc

SEQ ID NO: 683197 - DNA, 168 bp, Homo sapiens
tgtggtatttctcagtctgtctacttatcactctggattcttatcactctgggtgcatcttattgcacaccagactgatcaacatgttaggtacatctgcatcccagatgtgttcatttgttgatgggtgctcaaagactacttcttcactgtccctctaacaagaga

SEQ ID NO: 683198 - DNA, 103 bp, Homo sapiens
atgagacatctgataaagctcttccagtgtcaggatttgcgtgcctgggtcgcctgtgacggctagcggataaagaagacctggagattctcccgacccaggg

SEQ ID NO: 683199 - DNA, 777 bp, Homo sapiens
atttactttgtggattttgctgctgtcgaacgagtggattcgcctggctgtaggaattctactcgaggtttatttgatgatagcggattatatgcatttatctatcgtacctttgctacccaatactatgtcttatatgcttacatttattatgttctgtgacattatcttcaggattactatagagtccggtgatttagtcttcatcgagtttatagttttatatttgctctatgctctttatggttgtcttgttgtttgatctattccatattttctcttttcttctgctaaatcctgttctttgtgattttttttcttttacttctttttctctatctttgtatgttgtttgatgttttctatgtttttatctcacgtctattgattttcgttctatactagcttttcatgttcttatctccatcttgtctactcatatgatcattaatattacttttctaactttatttttcttttctctcctttatattattctttattactctgcttgattaatgctctgtattttcttatttatgtgtgtattgtaatgttaatcaatatgtaatttttatttcagtattataccactcttagtgttgtagttataatctattatgtattatatgatgacgttgtttaatacaatcttgtgatatgacgtttagatatgatcatgtctaatatcttatactttttatattgtatttgtaaacgtcttgctacgctgttatgcttatatagtcatcacgctcgtatactatattcttctta

SEQ ID NO: 683200 - DNA, 894 bp, Homo sapiens
tggttgtctttggcttgcgcgtttctcgtccattattggttcgctgtggcgcattgtatacattgtactgccgaaccctgtttatggtctgacactggtccccgattgctgtttctgttcatgttgtgtgctcggtcctgtgctcattggtcctctttgtggctcgggtctatgtactgcccctcatctgtgtgttgtcgttgtgtttggcaccttcttcggtgtcgtttgtggcttgtgtgtgtgctattttccccccatggtgcacttcccggcttggtaatttccgaatgcttgcatttagtgttggcaagtcgcatcgctgtttaataatgttgcaatttctgttaattattcagaactgtaattctgcaaaatgcccaactagttgagcgttctgggactacgctggactctcactgctgaatcgtcacactggataaagggttcgatctggttgcaagttgaatatgacctgacaatgtagcctctgtccttgtaagtcacgttgacttgccgcacatctctttgtgtaccttgtatcggtactggcagaaaagtcaggtcttcaaaagccataggcttttccttgcccttagctgtaataatgcatcgtgattctcgatgtgctccagagctgggtttctgtccatcacctgtgtagtgggtccctgtgcttactactctggcccacgcctcacccccttgctcccgtggtcttcgggagtttgcgacattgatttgaagatggatcggtgttctcttgagagcaagtgagattcttagaattaagtgccaactatacagtgttataacatagctataaggtgcataggtgctgatttgtgataactgatagataactgatgtataaacggaggacatttatatgca

SEQ ID NO: 683201 - DNA, 550 bp, Homo sapiens
  misc_feature (118)..(119): n is a, c, g, or t
  misc_feature (495)..(495): n is a, c, g, or t
acgccgtattatatagtgtaaatctgtgtctctccccaaaatgtacaaccagtgatatagaaatcatgtggcagctacactagagatgtcaacgcatgctatgggcgttgctcctctnntcccccaaatccaatatttactccacagaaacgtataggcttagagaagttctagctacaagactgcaagtgggaagtgggggtgactgagggctggggcggggctacccccaggtccagtgtttcaggtgatggaggaggaagaagcccaagctgaggacaagtacaggagcaggcacaaggaaacattttcctctccttcttgtcttcctcacccccagattctcagccagtggggtccagtgtgtgacagggagagagaagctgggggcgcagccacctctccaggaaatcagtgttgtccagtggggcccaggtgctccaatgggccatgtccagtgtctatcctatatttctccccacccttccccaagcnatggctagagggagggtggagaggatcccatcaaaggaccagctgggtggcgacg

SEQ ID NO: 683202 - DNA, 170 bp, Homo sapiens
gatttatttttggttcacatctcaactatcacagcagccgggcccgcggcttcacatttgtaatcccagcacattgggaggctgaggcaggggtatcacctgaggtctggagttctagaccagcctgaccaacatggagaaaccccccgtctctactaaaaatacaaaat

SEQ ID NO: 683203 - DNA, 232 bp, Homo sapiens
gggccccttttttttggggttttttccccgctttttttgaaaaagccaacccaaaagggggggggggttccccccaaaggggagggttttttattttccccccccccgggggggggggggctttttaaacccttatggggaaaaaagggggttaattttttttgggcccccccctccccccctttttgggggggggccttggctttttttaattaaccccaaattcccccca

SEQ ID NO: 683204 - DNA, 512 bp, Homo sapiens
  misc_feature (10)..(10): n is a, c, g, or t
  misc_feature (337)..(337): n is a, c, g, or t
ttaaaccccntgggctaagtatctgacagtctcacatcctcaaccagtgtgaattaagtgtcccatagcatcagctcaggaggacactctgggagagtgctgaccaaaaaaagggttattaatactgacctactacttccaagggcagttctgaggtgattagagctttttttaaaaaccaagtatttggggatcctcagcagaggtattcatacagactcccaaagaactatatatgttcctgagaccatcgtttagtctacattgctcttcccagagactgacagatatgaccagtcaaagtgcaagactacctacccactgccatgaaaaccantgcaggaaacctttcccttccctgaatgagatttttttttccctttttatgtggggtaattatttgtgacccaagtgtaatttggatgatttccattaatatcaactcttgaagcctacttgtactgattgagattgtatttgttcctaataaaagtggatctggttgtactgtc

SEQ ID NO: 683205 - DNA, 291 bp, Homo sapiens
  misc_feature (190)..(190): n is a, c, g, or t
cccccgggtttttcccccccgggggccccaaaaggggccccgggcccgtttttggtttgggcccccgggggccttgggggtcccccttgtttttttgggccctttccccggccccctttgggcctttttaggggggccctttggggtccccccccctttggggggccccctttccggggcccccttttgnttgcggggccccaaattggggggccgccgggcaagacccccccccccccccggttttttttttttttttgggcccccataaatttttttggtttcaggtta

SEQ ID NO: 683206 - DNA, 116 bp, Homo sapiens
gcctgcacaagaacatgaaaacacctgtggttcttcctcctgctggtgggcaagcttccaagattgcagtcctgtcccaggttgcaagtttcatgggagtttgggcccaagggctt

SEQ ID NO: 683207 - DNA, 889 bp, Homo sapiens
tcaaatcccccaggaagggtttattttttttttttacaaatttccggtccgggggttccctgtggtcttctttgtggcccctttgtgcccaaaaaccgcgggcggttgggccggggcccaaagcggaaaaaaacaacaagaggtttgtaaaattttttcttttcctccagggaagtaatccacgaagctcttttcccctttttatatataaagagttctcgcgaagagggcatatgataaccgcggcgccgcggacacagcggtgggtgtggcccagtttcacagatttctttacagaacaacaaggtgtgtctctccttttgtggggggccacaagggtttccgcgtggaggaaaagagaagatatagaattgtgggaagcgcggtacacatcctcttagcgccgcgtcgttgaaaaagtgtgggcccctcgggagagagaatctccgcgggaaactctgtttccacccgcctcctctctggagaatcatccacacaaatatatgggccaacaagtgggcccggggcgccccaccctctcttgtgtgagaaaaatatgcgcgcgcgcaccacctctagaaccctcttcccttcacagcgcgctatagacacccccgacggctccccgcggagcggcagacaccccttattgcggggttgtccccccgagaacaccggaggggcgagaacaaaccacaccacaacgtgggcccccgaatatgtggcgcacacccccaaaaacacatggacgacacacacacgggagaacaaaaacagaggggccgccaccccatttgaggcacatgaacccaggagcgaccctaaaccacgccggcgggagagaactcctaacacacgggccacccaaggagtgctgcaaaccccccag

SEQ ID NO: 683208 - DNA, 120 bp, Homo sapiens
acgagactctggaacccctgtgctcttctcctcatctagtgaccctgaggtgatggagttttcaagtccttccagagaggtgcttcagccgctacaagagcagaagcacgtgggattgga

SEQ ID NO: 683209 - DNA, 223 bp, Homo sapiens
ggaaaaaacccctttttttaaaaaaaaaaaaagccccgcgggggtgttcctttttggggtgtttttcggttttccccccccccccccaaaacccgggggggcccaaaagtttcttttttttcccccgggggaaaaaccggggatttttcccccctccccccaaggtggttttttaaaagtttaatgggggtttttttttggataaaaaggggggcccttggga

SEQ ID NO: 683210 - DNA, 1157 bp, Homo sapiens
  misc_feature (2)..(2): n is a, c, g, or t
  misc_feature (89)..(89): n is a, c, g, or t
  misc_feature (117)..(117): n is a, c, g, or t
  misc_feature (213)..(213): n is a, c, g, or t
  misc_feature (219)..(219): n is a, c, g, or t
  misc_feature (246)..(246): n is a, c, g, or t
  misc_feature (304)..(304): n is a, c, g, or t
  misc_feature (308)..(309): n is a, c, g, or t
  misc_feature (311)..(311): n is a, c, g, or t
  misc_feature (320)..(320): n is a, c, g, or t
  misc_feature (322)..(322): n is a, c, g, or t
  misc_feature (332)..(332): n is a, c, g, or t
  misc_feature (380)..(380): n is a, c, g, or t
  misc_feature (415)..(415): n is a, c, g, or t
  misc_feature (422)..(422): n is a, c, g, or t
  misc_feature (434)..(434): n is a, c, g, or t
  misc_feature (437)..(437): n is a, c, g, or t
  misc_feature (453)..(453): n is a, c, g, or t
  misc_feature (505)..(505): n is a, c, g, or t
  misc_feature (536)..(536): n is a, c, g, or t
cncctgaccccatgtaccaaatatactcttttgtctttctctttattcccacgttcgccctttgttcagtccaatacagggttttgggnccttaacagtgctatattaattggtatnattatttctgttgttcccctcttgtttttgtttttttttttgagacagagtctcagtctgtcacccaggctgcagttcactggtgtgatctcagcncactgnaacctctgcctcccaggttcaagcacntctcgtacctcagactcccgaatagctgggattacagacaggcaccacacacccagcnaatnntngtatttttngnagagacgggntttcgccaagttgaccagcccagtttcaaactcctgacctcaggtganctgcctgccttggcatcccaaagtgctgggattanaagaatnagccaccgtccntgncgtattttattatatngtaatatattttattatattagccaccatgcctgtcctattttcttatgttnaatatattttaatatattacatgtgcagtanttagattatcatgggtgaactttatgagtgagtatcttggtgatgactcctcctgaccagcccaggaccagctttcttgtcaccttgaggtcccctcgccccgtcacaccgtatatgcattactctgggtctactattatgtgtgcataatttataccgtagatgtttactctccaaaaaacataaaaaccagaaaaaagaaaaaaacaagtgggtgagaagcacgaggacgcccatgagggactagttgttattaagaacacataaatatataagtaaatgggagaggctcacaaaagatagaatgagttggcagatagtgtatacaaaggagtactactagaggaagcacccgtgtgatagatagactaatatatggatgagagagagtgatattgttatacccaaacattgaaaaaaaacaaacgaccgcgcgggaggggtataaccatggaatggtatgtttgtgaaaaaagataacactacagtgatgaggaaaataaatgagagaagtagatattataggaggtatatagatataagcagggagtgatcacttaaatagaagtcgtctagtatattattataacatatttacgcctcatagcaaagtgtaggctg

SEQ ID NO: 683211 - DNA, 116 bp, Homo sapiens
ccatcccctcagcctgatacttctcaagctttcatcattcctccacagctttcatcacttccgtcatgcacattcccagtcatccatcattcacagtcatgccatggcagcacagt

SEQ ID NO: 683212 - DNA, 871 bp, Homo sapiens
taaatttacacagacgttaaattagcttcattaacaggagcagggattttttttttcacagtctccaatgggggcctaaataacttcattaggcaaaaaggccagttaaaaaaaaatctatgcaaaatcctaaaaataacagatgtgggggctcctcaaaaaaaggcaagctggactaattatcagcaagtctctctaatgcctccagttaactccagaaagcaattctggttgggcaagtctctaactatcccatgattttggaaacacaagggcccactaataactggctatccctaatccaaagccctattagccactatcagtgttttcctattttttggggtggtcatctctgggtcttaacaaacacatgcgggtgtgtccccacaggtacatttcaccaccactatgtgtggacccccaaaaaggtcacagacgcgctgcgtctctggtgtttggaacacattttccgcggggaatattgggtgttgagtgaatcctgagtatctgggtgttaccataacagactatcctcggggggggaatcacatctctggggtctctctgggccaagtctgcggcacaattaatgtggtcttgggccaaatagggagccacaataaaatacaccgggggcggggaaacagactccttatcgtgggccgagttggtggccccctattggtgaattctttacccggagggaaatatatccccaaaaacaaaaaagtgagccccgcgtgggtgacagcgggaacactttaacatatatcagaaggagagcgcccataaatttctagaaggtgtatcaacacgcgggcaaccttagcggggggaaataaaaaagggggtaatgtcaccggggaaa

SEQ ID NO: 683213 - DNA, 961 bp, Homo sapiens
ggttggtttgcaggatcctcagccatgttgcaaacgtgaatgtaagcctgagccagctgcgtggactggtgccacgggggtgatcttgtccactgtccccctgggtacacgcaacatattctcctggcgccggaattgcctctggtcttgatatgcattaagccctgatggcgaccggtggctgcaggtgggtgcatggtatcttcacctttggaagagccgggggtcttccgtgttgcgttaaatgtgtgtaaatagtttgattgtatacggggtacgaagtgtgcgtcatcaccatcttgacattcctcttcctctcctccagaattctcgctcatgacgcatgcattaagatagtgtgcatggtgggacgcagagcctgtatgacgtcccactctgagtgtcttaagaaccagggctcagaagcagcctctctgttgctgtcatctcagatactagcaggctccctcgcatgcattctcgcagcatagcaaggcagctcctcgccaatctgcaggcgtggactcagtgtgctgtactggtcgttgggtgctaggtgaacatcgtcactcgcagaattggaatcctagatcacatcccccagtgtcaagtggccgagggagccccagcccaagatggcagctgaaactgttgggcagggctccctcttgttggccatgtacccaggggctggctggcttgcatttgctctccccggagacaggcgttcttctgaagcacaacccgtggctagccaaatcccaggtgagtgctcaaaagctcagcttttgggtcctggtgaccggcctaatgggatatccggtgatcacctggtccacccttcctggtaggggttttcgggctggcttggacataagtcttagtactgataactcccggggatactggggatttggtaactggcgattttaaactttgctagttcaaccttttattgtgg

SEQ ID NO: 683214 - DNA, 436 bp, Homo sapiens
accatgaaaggtgtggctgtctgggattctgtggtgacaaacttaagcatccgatcaagctggggctattccttcaaattccatcctgtacgctgtcactctagaagcagctgctgctttgaacacctgcccaccctccttcccaagagtttctatggtgttggccccttgtgtttcctttaccagtcatgccatactgtttgggaagtcatctctgaagtctaaccaccttccttcttgtttcagtttgtacagattgttattattgtctctgcccttgctagaatggggggcataatctgtgccttgttcccttgtccagtgtggtttacccttgacctcttccttcctccgcgctttgttttgtgattcagaaaactgcttgtcacagactattttttttttatttataatgatatatgcttttaacataaac

SEQ ID NO: 683215 - DNA, 129 bp, Homo sapiens
cggtaccttcctctcctcccacctccatgatatggacaaattccaatgcctaaccacatgagatgcaaaatcacatgatcactggatgtacttgccactactctaaaaaatgccagacaaatgacacta

SEQ ID NO: 683216 - DNA, 269 bp, Homo sapiens
  misc_feature (246)..(246): n is a, c, g, or t
ctgaaagacaaaaagtagttagcaaggccgggcacgggtgtacgcctgtaatccctgtactttgggaggctgagagagggcggatcacttgaggtcaggagtttgagaccagcttggccaacacagtgaaaccccatctctactaaaaattcaaaaattaaccgggcgtggtggctcatgctacttgggaggctgaggcaaaagaatcgctttaacccaggaggtggagattgcagtgaggttcancctgggtcacagagctagctacg

SEQ ID NO: 683217 - DNA, 456 bp, Homo sapiens
  misc_feature (101)..(101): n is a, c, g, or t
caaaatccggaaacacattccgggcccgaggtccaccttttccccccgccgtcgaaggagttggcccttaacaaactggttacccttacgtgcctggcacngggtttcagccccaaggacgtgttggttttctggttgcaggggtcacaggaatttccccccaaaaagtaccttttttgggctttccggcaggagcccaaccagggccccccccccttttgtgtgaccagcatatttgggggtggaacccaaggattgaaaaaagggggacccctttttttgcatggtgggccccggggcccttccgttggcctttccccaaaaaaccatcgcccgcttggggggtaaacccccccatgtcaatgtgtttgttgtcatgggggggggggggggcccctgttttttaaccgcccgcctgtccccccccctgaataaattccatgttccccccagcca

SEQ ID NO: 683218 - DNA, 654 bp, Homo sapiens
tacatgatggttcatttcaagcgagcatatgcgagaatgagagtgactcaggccctatagacctcacagtgagatgtactcactatgggctactgggcaggatatagccagtgtgagtgtcctctaatcccagacattgttctcgcttcaggaagtatatataggcattatatcttgtgaacaggcacaggtggttctgcatagagatgttcatatgagcagactacttgtggggacatgccgttatgtacaagcgcgcagatttagaagaacgcggaagaatcggatttccaggtgtctctcattccagacacgtggtgctccgtcatgtgcaacgagggagatggttttcgagcatgccgcgtgacgagtctgaatggtcccggatatacgaggatagtgaatatgcgccaaagacgctgcaaatcccctggaactgtggcagaaagctatcgttgtgttgtgttaaaaacctccctgactggtgaatggcatctcggattgatggggaccaagttccagttgtcaactcggcaagttctggccagcgacgttcgttcagactctaatcgtgtcaatcatctttcattatctatggactggtggttgacgcacgttctccagccgcaacttgggacgagctggtctcggaca

SEQ ID NO: 683219 - DNA, 721 bp, Homo sapiens
gggtagagagagaactgagctccgaagctgtggtaaattctggagtcctaataatgcctttgcttcaggagctgggttggtctgcgggattagtacatgtgaggccgataaaggaccctgtcgggaagtctgggtcactgtgcgagggagctgaagctgatcggcgagtatgggctccggaacaaacgtgaggtctggagggtcaaatttaccctggccaagatccgcaaggccgcccgggaactgctgacgcttgatgagaaggacccacggcgtctgttcgaaggcaacgccctgctgcggcggctggtccgcattggggtgctggatgagggcaagatgaagctggattacatcctgggcctgaagatagaggatttcttagagagacgcctgcagacccaggtcttcaagctgggcttggccaagtccatccaccacgctcgcgtggtgatccgcacagggccatatcagggtccgcaagcaggtggtgaacatcccgtccttcattgtccgcctggattcccagaagcacatcgacttctctctgcgctctccctacgggggtggccgcccgggccgcgtgaagaggaagaatgccaagaagggccagggtggggctggggctggagacgacgaggaggaggattaagtccacctgtccctcctgggctgctggattgtctcgttttcctgccaaataaacaggatcagcgcttta

SEQ ID NO: 683220 - DNA, 958 bp, Homo sapiens
  misc_feature (898)..(898): n is a, c, g, or t
  misc_feature (905)..(906): n is a, c, g, or t
  misc_feature (910)..(911): n is a, c, g, or t
  misc_feature (927)..(927): n is a, c, g, or t
gacactgggggaggacctttacaaatgggcaatgttttgctttttgatctttcctcaagccctttgttaatctctgggttccttggtcatactcttgtgggtttcaaagcatttattccgggaagttaatacctccggggtgccttggttttttgtggggccaattgtctgtcggcaccactgggttattgctaatctcattgttttcatgagtgcttgcgtgtttcacgactattgtgcatgacgtcgtgcgtcttctgtgggggcttgcttcaccattggccactaattccatattgtctttttgtgggttccttagtgctggggaatactttcacgatgtgttctccctactagttatgggggtttgaggatgagattattctgaatcacatattttgtggggattatatgggtgtattcactccttatatcccctcggtagggcgcactgatagtgaatctagtggctctaccctttccttttcgagcatccatcttggggttctcgcaagccagttggcaggcacatctaccggggtgtggtgtgagagtgtatagtatttggttcacggtagtctggggttaagcgtcacttttttctcttcagtccacacatctaccttgtcagcacggttctcagggtccgcaagcaggtggtgaacatcccgtccttcattgtccgcctggattcccagaagcacatcgacttctctctgcgctctccctacgggggtggccgcccgggccgcgtgaagaggaagaatgccaagaagggccagggtggggctggggctggagacgacgaggaggaggattaagtccacctgtccctcctgggctgctggattgtctcgttttcctgccaaataaacaggatcagcgctttaccaaaaanataaaannaacnnagactagtttctctcnttccacccagccgattagagtatagtatgcc

SEQ ID NO: 683221 - DNA, 734 bp, Homo sapiens
  misc_feature (674)..(674): n is a, c, g, or t
  misc_feature (681)..(682): n is a, c, g, or t
  misc_feature (686)..(687): n is a, c, g, or t
  misc_feature (703)..(703): n is a, c, g, or t
gagacctgtggtctaactttttggaacatgcctcgggttctgtttatttgggcattgctctgcacgtggttaaacactccgtgtcagtgtggggttcacgatatttcagactcggaactcgggggctctcacctggccactctcatttgctttgtggtcttaggtgggatactttcagatttctcccataaaatggggttgagataagtcatctgaagccattttggggattaaggtgatacccttatacccccgagggcgcacgtaggatcaggtgcacccttcctgcagcgccttggtgtctgccagcccgtggcggcctcacggggtggtgtggagaggaaagagtggtgcggtagctggggttagcgtccctttcttcctcccagtcccacctccaccttgtcagctgcttccagggtccgcaagcaggtggtgaacatcccgtccttcattgtccgcctggattcccagaagcacatcgacttctctctgcgctctccctacgggggtggccgcccgggccgcgtgaagaggaagaatgccaagaagggccagggtggggctggggctggagacgacgaggaggaggattaagtccacctgtccctcctgggctgctggattgtctcgttttcctgccaaataaacaggatcagcgctttaccaaaaanataaaannaacnnagactagtttctctcnttccacccagccgattagagtatagtatgcc

SEQ ID NO: 683222 - DNA, 117 bp, Homo sapiens
aaaggagttgggcgaggggggcaagacgtgggtgaggcgatgtggtagatgcggggcgcgtggggtgcgtgtgcgggcgaggtgcggttggggggggatcggccgtgggggggggac

SEQ ID NO: 683223 - DNA, 1087 bp, Homo sapiens
  misc_feature (50)..(50): n is a, c, g, or t
tgaagagtgaggtggcggagaagcgggaatcgcgagagcggagtagaggnaggagcaggtacgagaaggccgagcgagatgcacaagagggaggagcacgaggacgagaacagagaaggagaggcggaggagggagagagagggaggcggcggagggcgggcggatagtggagaggaggggggtaggtgggctgggggagggaaggggggggagggggagatgggggagcgggaggagtgggcggggtagggggagagaggcgaagtcgagggaggcaagggagaagaggaagtggggggagaaggagcggggggaggggggagagaggcagggcagaggggagcgagcaacggggaggaggggcagggagcgaggagagagcgcaggaggagagagaggggcgaggtgagggagggagcagacggaggggggaggcagcggagcacagggggagggcagggcgagcggcggaaggaggcagcagtcagaggccagggcgggagacagggaggggggggagggggaggggggaaaggggaggagagaaggaggagggagggaggcaaagggagaggaggaggacaagagcgggagggaggggagaggggagggagaaggggggggggggccggggagaggggggggggagaggaggcgggcggtgccgctaagggaaggggagctccagagggccaggggggagggtgagaggggttgaggaagtcaagggaagggaggcagtgggagtaggtggggtggcggagaggtagtgtgtgccagcgtgcggagtgcgcgtgatgttgaggtaggtggcgatgggtgttagatgttggtgtcccgtgtgtcagggagttgtgaggagcgcttagagcgcgatgtttgcggagtctttgttgttggagtatgttagtacgtgtttagagtagtatagtgaccgtgttaagtgagcacgtagtgggagcagggcttgtaaatgttttgtctaatgtttctaattgtcacccttttaagcactttatcacttcccaatttaactttgcacaagttacccatgtaaaaaaaaatgtacatttttcaaaagttgta

SEQ ID NO: 683224 - DNA, 801 bp, Homo sapiens
  misc_feature (42)..(42): n is a, c, g, or t
gcttcatcttgccctcatccagcaccccaatcggaccaaccnccgaagcaaggcgttgccttcgaaaagacgccgtgggtccttctcatcaagcgtcagcagtgaccgggtggtttgcttaggcgcagacggggaagcggagccaacatgccagtggcccggagctgggtttgtcgcaaaacttatgtgaccccgcggagacccttcgagaaatctcgtctcgaccaagagctgaagctgatcggcgagtatgggctccggaacaaacgtgaggtctggagggtcaaatttaccctggccaagatccgcaaggccgcccgggaactgctgacgcttgatgagaaggacccacggcgtctgttcgaaggcaacgccctgctgcggcggctggtccgcattggggtgctggatgagggcaagatgaagctggattacatcctgggcctgaagatagaggatttcttagagagacgcctgcagacccaggtcttcaagctgggcttggccaagtccatccaccacgctcgcgtgctgatccgccagcgccatatcagggtccgcaagcaggtggtgaacatcccgtccttcattgtccgcctggattcccagaagcacatcgacttctctctgcgctctccctacgggggtggccgcccgggccgcgtgaagaggaagaatgccaagaagggccagggtggggctggggctggagacgacgaggaggaggattaagtccacctgtccctcctgggctgctggattgtctcgttttcctgccaaataaacaggatcagcgcttta

SEQ ID NO: 683225 - DNA, 658 bp, Homo sapiens
agcggactttcagcgccgccgcctgcggtctcccaggccgtaactaccccaccgcctgccgcctgcgcccgcgctccagccccgccgcgcgcctgacctttccacgcgcgccccggcccccgcggcgccgcgcccgaccccgcgcgcgatggcgcctcggctgccgccgtgccgctgggcgcgctgggagcagggctgccccatccggcgtggagcacgaccgccggcgccgccagttcactgtccggctcaccggatgtcatgcaccgggccgtcctgctctatgagtacgtgggcaagcggatcgtggaacctgcagcacaccgaggtcccagatgcctacagctgggcgtggcatcgccaagcacctttgccaaggccgccctggacttcgtggtggaggaggacctgaacggcccatctcacctgctgttacatccagaagttcgtccaggagaacccccttgccgcaggtaccctggagctgcctgcagccgtacccctggcctgcaaagggcggggagcgctccctgccggacctcttccacgtggcgctttgcctggccccacgtgctctcagggaaccctggttcccacttgggaacaggagctcagaggttattttgtaggacactcatctgtgcccacgtccccgatc

SEQ ID NO: 683226 - DNA, 795 bp, Homo sapiens
ctgataggctctgacgtgcgtggtgcgtgaaaacgtcacgagacgccggggattatataagagcgcaggcgtggcgtatgcgcgcctctttctcaatgaccgggtggtttgcttaggcgcagacggggaagcggagccaacatgccagtggcccggagctgggtttgtcgcaaaacttatgtgaccccgcggagacccttcgagaaatctcgtctcgaccaagagctgaagctgatcggcgagtatgggctccggaacaaacgtgaggtctggagggtcaaatttaccctggccaagatccgcaaggccgcccgggaactgctgacgcttgatgagaaggacccacggcgtctgttcgaaggcaacgccctgctgcggcggctggtccgcattggggtgctggatgagggcaagatgaagctggattacatcctgggcctgaagatagaggatttcttagagagacgcctgcagacccaggtcttcaagctgggcttggccaagtccatccaccacgctcgcgtgctgatccgccagcgccatatcagggtccgcaagcaggtggtgaacatcccgtccttcattgtccgcctggattcccagaagcacatcgacttctctctgcgctctccctacgggggtggccgcccgggccgcgtgaagaggaagaatgccaagaagggccagggtggggctggggctggagacgacgaggaggaggattaagtccacctgtccctcctgggctgctggattgtctcgttttcctgccaaataaacaggatcagcgcttta

SEQ ID NO: 683227 - DNA, 193 bp, Homo sapiens
gaggcatcacgatgtcggtaaagcagctcagcggtcaggtgcaccagaccacccagcgggtaagaaaaaggacaacgggggaagcggtttcaaaaacaaagactaatctgggtatgtttttcttccccgactagcccgacagagtacttcgagtctcccttcaccatttccgacggacatcgtgatcctcggg

SEQ ID NO: 683228 - DNA, 99 bp, Homo sapiens
tctagccgcgcagtgcattgtcatggatctggagacgggtcacccacacggtgctatctacgagggctacgcctcccccacgccatctgcgtctggact

SEQ ID NO: 683229 - DNA, 659 bp, Homo sapiens
gatctgtcacagtacagtttgcacgacatctacgtacacacattagctcagttttcgtgtcaccaaagccaatatgtggttaggttcgtgtatgccgagaccatctatatgagggcccataaggcaccctccactattgcctgaggagatacaaaagcagaactaattgtgcatctgtactatgcgcacagagagggttgcagaggatccttgtgaaacactatttaaaagatgacgagtggggagaagtgcgaggaaataaggaaattagtcctactgggtttctggcctgcaccattgattcaatggagactggcgggaggaaatggaagactagggttggagatgggatgggtggggcaagggatggaaaggaaaaggcagacaactagtgcgttccatttataacaagtaatatatatcaaagacttaaaggagattaaagaccaatcagaataatttggcaactttaattcttaggaagatcaaagttccctccaaacctaatttgatgttttattactaaaagcaaagaccagtatggtacagtattactccagagaaattaaaggaaaatccttagggcggcttcacccacattcattttatgaatggatacctcccctaactcgaaatgctttagggaggtactgctacca

SEQ ID NO: 683230 - DNA, 869 bp, Homo sapiens
  misc_feature (42)..(42): n is a, c, g, or t
  misc_feature (809)..(809): n is a, c, g, or t
  misc_feature (816)..(817): n is a, c, g, or t
  misc_feature (821)..(822): n is a, c, g, or t
  misc_feature (838)..(838): n is a, c, g, or t
gcttcatcttgccctcatccagcaccccaatcggaccaaccnccgaagcaaggcgttgccttcgaaaagacgccgtgggtccttctcatcaagcgtcagcagtgaccgggtggtttgcttaggcgcagacggggaagcggagccaacatgccagtggcccggagctgggtttgtcgcaaaacttatgtgaccccgcggagacccttcgagaaatctcgtctcgaccaagagctgaagctgatcggcgagtatgggctccggaacaaacgtgaggtctggagggtcaaatttaccctggccaagatccgcaaggccgcccgggaactgctgacgcttgatgagaaggacccacggcgtctgttcgaaggcaacgccctgctgcggcggctggtccgcattggggtgctggatgagggcaagatgaagctggattacatcctgggcctgaagatagaggatttcttagagagacgcctgcagacccaggtcttcaagctgggcttggccaagtccatccaccacgctcgcgtgctgatccgccagcgccatatcagggtccgcaagcaggtggtgaacatcccgtccttcattgtccgcctggattcccagaagcacatcgacttctctctgcgctctccctacgggggtggccgcccgggccgcgtgaagaggaagaatgccaagaagggccagggtggggctggggctggagacgacgaggaggaggattaagtccacctgtccctcctgggctgctggattgtctcgttttcctgccaaataaacaggatcagcgctttaccaaaaanataaaannaacnnagactagtttctctcnttccacccagccgattagagtatagtatgcc

SEQ ID NO: 683231 - DNA, 985 bp, Homo sapiens
  misc_feature (42)..(42): n is a, c, g, or t
gcttcatcttgccctcatccagcaccccaatcggaccaaccnccgaagcaaggcgttgccttcgaaaagacgccgtgggtccttctcatcaagcgtcagcagtgaccgggtggtttgcttaggcgcagacggggaagcggagccaacatgccagtggcccggagctgggtttgtcgcaaaacttatgtgaccccgcggagacccttcgagaaatctcgtctcgaccaagagctgaagctgatcggcgagtatgggctccggaacaaacgtgaggtctggagggtcaaatttaccctggccaagatccgcaaggccgcccgggaactgctgacgcttgatgagaaggacccacggcgtctgttcgaaggcaacgccctgctgcggcggctggtccgcattggggtgctggatgagggcaagatgaagctggattacatcctgggcctgaagatagaggatttcttagagagacgcctgcagacccaggtcttcaagctgggcttggccaagtccatccaccacgctcgcgtgggtgacttcggacagtgaccaggtatcagccctcggaggtgatgggtgtgaattcggccagagggtacagattacacctcctagtacaccagttcaccaggaagctggggcagggctctggcacaccaataggtccagcgcgagggtcactgcggtctaggcgtacaacttgtgaaggcctctgcaggcatgtggggagctggacagggtccgcaagcaggtggtgaacatcccgtccttcattgtccgcctggattcccagaagcacatcgacttctctctgcgctctccctacgggggtggccgcccgggccgcgtgaagaggaagaatgccaagaagggccagggtggggctggggctggagacgacgaggaggaggattaagtccacctgtccctcctgggctgctggattgtctcgttttcctgccaaataaacaggatcagcgcttta

SEQ ID NO: 683232 - DNA, 141 bp, Homo sapiens
ttaccgcgaggttggtgtggactgtgacgtcgtctcccgcctgtttccttggattggcggcagggccccggcggggtgtgtgggccgacacgccttgccacggcggacttttcaactcacagatgcagctggcatctggga

SEQ ID NO: 683233 - DNA, 992 bp, Homo sapiens
  misc_feature (1)..(1): n is a, c, g, or t
  misc_feature (64)..(64): n is a, c, g, or t
  misc_feature (86)..(86): n is a, c, g, or t
  misc_feature (92)..(92): n is a, c, g, or t
  misc_feature (99)..(100): n is a, c, g, or t
  misc_feature (108)..(108): n is a, c, g, or t
  misc_feature (112)..(112): n is a, c, g, or t
  misc_feature (136)..(136): n is a, c, g, or t
  misc_feature (168)..(168): n is a, c, g, or t
  misc_feature (196)..(197): n is a, c, g, or t
  misc_feature (202)..(202): n is a, c, g, or t
  misc_feature (241)..(242): n is a, c, g, or t
  misc_feature (244)..(244): n is a, c, g, or t
  misc_feature (261)..(262): n is a, c, g, or t
  misc_feature (270)..(270): n is a, c, g, or t
  misc_feature (274)..(274): n is a, c, g, or t
  misc_feature (278)..(278): n is a, c, g, or t
  misc_feature (281)..(281): n is a, c, g, or t
  misc_feature (288)..(288): n is a, c, g, or t
  misc_feature (292)..(292): n is a, c, g, or t
  misc_feature (310)..(310): n is a, c, g, or t
  misc_feature (316)..(316): n is a, c, g, or t
  misc_feature (331)..(331): n is a, c, g, or t
  misc_feature (334)..(334): n is a, c, g, or t
  misc_feature (345)..(345): n is a, c, g, or t
  misc_feature (356)..(356): n is a, c, g, or t
  misc_feature (369)..(369): n is a, c, g, or t
  misc_feature (391)..(391): n is a, c, g, or t
  misc_feature (406)..(406): n is a, c, g, or t
  misc_feature (414)..(414): n is a, c, g, or t
  misc_feature (421)..(421): n is a, c, g, or t
  misc_feature (434)..(434): n is a, c, g, or t
  misc_feature (436)..(436): n is a, c, g, or t
  misc_feature (442)..(442): n is a, c, g, or t
  misc_feature (468)..(468): n is a, c, g, or t
  misc_feature (486)..(486): n is a, c, g, or t
  misc_feature (508)..(508): n is a, c, g, or t
  misc_feature (516)..(516): n is a, c, g, or t
  misc_feature (530)..(530): n is a, c, g, or t
  misc_feature (536)..(536): n is a, c, g, or t
  misc_feature (553)..(553): n is a, c, g, or t
  misc_feature (559)..(559): n is a, c, g, or t
  misc_feature (572)..(573): n is a, c, g, or t
  misc_feature (589)..(589): n is a, c, g, or t
  misc_feature (593)..(593): n is a, c, g, or t
  misc_feature (644)..(644): n is a, c, g, or t
  misc_feature (658)..(658): n is a, c, g, or t
  misc_feature (716)..(716): n is a, c, g, or t
  misc_feature (735)..(735): n is a, c, g, or t
  misc_feature (742)..(742): n is a, c, g, or t
  misc_feature (815)..(815): n is a, c, g, or t
  misc_feature (882)..(882): n is a, c, g, or t
  misc_feature (920)..(920): n is a, c, g, or t
  misc_feature (986)..(986): n is a, c, g, or t
nagattccgagaccagggtgaaaaatctgctctgaaccaacaaagcacccccactgtgcttggnagccgatcagccactgtgggangatganccaaganncccggacntcancctgatgcccccatctggagaatntcgggaaaaagcaggtgtggcgtctggaatgnactttattggacaagtggtggcccaagnnttggnctggaagaaatggggccctgggacaaaagaaatgagttnnangaggcccagaattcagnnctgtttgnagcnaggncanaagaagntggngggggagccaaggaagangttttntttgttggatttggnganttcggccaggngttgttgttcnttttgttttagcnggttttgggctgtttgaaagcngccagggggttatcntccagggnatagtgntccagcacggttngnacgttntccacaccatttagtgcaatggtttnggggaaggcagatagatncaatatgatccggtcattaganttgctgtnccagggccgcaggnaacgtngttatagggttgttggnggaagnttttttttttttnnttcacaattattattngagntgggtcccgatttatatatgaaatattctttatatggtgttcatccatgtntcttgtggtgtccnggaataggcggtaggagatgaagccatgggggtccacactatcaatgagtggaaactnattcatgccagtttctgangtaaagntgacaatttcatataaaggggcaagctgctggaacaaggtctcgatgcctgggcgcttcttaaacctccagcnagtggccagcgaccactcaggatgcaagatgacgccggtgagctccaaaacgagcgtgtagggtggntggtagtacggttcctgcagagggtctgcggagaaggnaaggtctggtgggctcgatgatcatctgtctataatctttgaaatatttgtatgtccggcgcactnctgtac

SEQ ID NO: 683234 - DNA, 966 bp, Homo sapiens
  misc_feature (351)..(351): n is a, c, g, or t
atgaccccaatacgcaggaattaatccccgcataataaaattagattaaccgctctattcatcgaccgtcgccgcaccccactccaggcatcttccgacagtgatgaaacttcggatcactccttggacgacctgcctgatccgtccaaagtcaccatcaggactatgcgctagccaatgtaactatctcatccagacgcctcaggacgtgcttttcactcaatcgcccacatctactcgcagacgtatattatgggctggaggtcagtccgtatatccatttgacggccaaggggcgcctgcaatatgtctttatctgccctcttcctgagcacatcgtgagtgcgaggncctatattgacgcgatcgatttctctgactcagtagaagcctgaaacatcggccaggtatcctcctgctctgcaatggtatagcggacgaagtcttcatcaggctatggtcctcccgtgaggccgagagttatcatccgtgagaggggccgataagtcattttacaagatcttagatatccggcatcccattagcattaggtgagcagaccttatgggtccagattgaactcgtagaaggcaggctcacttgcagtgatggacaggtcaacaaccctgcacgagagaatttccttgaacctgtcccactttgcatacttgcccctgttcattgtatatgccaagagcacattaggccagacagttccaaaccctgcctaattcgtgtggcaccgaaaaaaggggattcaaatactagcccccctagagaagtcgagctaccggaatatccggattaaaaatccacccttttccacaccgcttaattaagtagaactcaaaggacaggcccctcgggattaaggtttctctatccggttgtctccctttaatggacattttaaccgcgtaaattttcaccagtaacctccataggggaacgcaaaaagattattcc

SEQ ID NO: 683235 - DNA, 950 bp, Homo sapiens
tagtgtcgcgggtttcggcgcgggccacgcgtgcgggaccaggaatcccactcccagccgaccttgagctccagggagttcgtctcttagcgtctgcggaagtgctagcgtgcctcagcttcgttcaggcgcaggttgacaactacgagggcatcgaggccatggaacgtctggaatgtcctgtcgctggtattgtcaattgatcttaagccaagctatcccttcaggttacaataggaaaggtgcctctaatcaaggcgcgaagatatggcggtactaacttgtagcaaccacgttgtccgtgcagtgccacaggaggctaggagcagctgacaatggctggtggcgaaccagggcagtgtaggcgaggtgcgttcatggttcaccttttgtcaaccttgtctcaatttaagttgtcagcaagctcggcaggtggatatcgtgttagggacaggctgccgccaggaccaactccgcaccccgcgctaaccttcaatgcaggctgagcccttatcgcctgaatatctctgcagctgctttcctgaaccgttatctaggacgctatatgcaaggtcacacagagcttgctacatcgaatgccctctgggtggcacaggggggaggtcatgagaaaccgtggattacacccccttgtaaaattcctattttcagaagataatatattgtaagccggtcatgatgattatatgtgggtcacagttaatgtgaactaagcatacccccaagggtcctctcttccccaatataaacgccctcatttggtgaagctcaagggtggcgcctccggactggtggagaagcctggcagggtgataaattactgggctggaaaaaaggaagaaccaacccggggttccccaggggccgaaagggggataaggccggggcaggggcggcccgtttggcaggggacccgcccaaggggccta

SEQ ID NO: 683236 - DNA, 114 bp, Homo sapiens
cccactgtgtctcatcccacctgtttcatcccacctgtgtgcccatctccacctgtgtgctcatctccactgtgtgctcatcgccacctgtgtgctcacccccagctgtgtgct

SEQ ID NO: 683237 - DNA, 150 bp, Homo sapiens
ctttcatcctgtcagatgtctcccgtggcctgtgacttctctgctgtccctggcagatggcaagacgagaggcatagggggtgagggactttgagtccttgtcgatggagcgtgcgttatgtgcagacttgcccatgttcccacgagtcc

SEQ ID NO: 683238 - DNA, 150 bp, Homo sapiens
gcgcaggagataatcgcggttgccggtcatcagatagcattccagcacctcgtcccatttcgagatcgcgcgggcgaagcggttgagatcctcctccttctgccgcgccagcttgatcgagatgaagacactgacatgcagccccagcgc

SEQ ID NO: 683239 - DNA, 647 bp, Homo sapiens
tcctattaattaggaaacgtccccataaacagtacttgagtaaggcacctctcaagtcgaataaagtctccccaaggaaaactttaagtgtagagcagtttgcaaagtgcgaaagccgcacctttagccagattccttacaaaagtggggtcccatgaaagggggcaatgttaacaggtaaacaaagcagtaatcaggagggcgaacaggagtagtgtcatacctaccatggcaggttgcaagacagttcaacagatcaaagaatacgtgtcccagcgaccagggtgcacagaagtaccttttgctccagtccagcatatgtgttgtcatcagattggccaagaatgacttggaggtcttgaatgtgtcccatgcaaggccccaagggcactcatttcaccagcagtggcagcagctccagctcattcaatctttctttggcccttgcctcccagcccttgttggcctgtgggttacggggagagggatgcaggagcccttccacctggacctctggcatcaggcatgccaaagcccgtcgtgcccgctgctctgccagtcgcacaactgccgctaacagccgcacccacagcagctgcacctgccggcatagggatgcatcacagatcccaaggagctgttctcgc

SEQ ID NO: 683240 - DNA, 170 bp, Homo sapiens
cctccagcgagacatcccagccatggccatgcagagaatgctttgaccaggatgagctgggccagcttggacctccttcctgctcgggggtgaacatccagagttgtggcgcgatgagcttgacagtcaccaacccccaggagggttgcccaggccgtttagtagaagcg

SEQ ID NO: 683241 - DNA, 576 bp, Homo sapiens
  misc_feature (327)..(327): n is a, c, g, or t
  misc_feature (576)..(576): n is a, c, g, or t
cgaactttgtctatgacactatttttatcagttttttaggaaaaaaagagtcacactgtcagtgtttccagatgtttcccattccttcccctttatttggtctctgtgtggcactaaacttagaggcaggagtgctgggagacgtttgcaaggatatcagcctctccacaggttaaacccgaacacgcctctcttctggtgaggggccctcagggttaacaagcatcatccacgagggaccagggcaacaggctcctccgctggtccaggggccctcggggttaacaagcgtcatccacgagggaccaggacgacagctcctccgcntggtccaggggccctcggggttaacaagcttcacccatgagggaccaggacgacaggctcctccactggtccagggaggccctgattggggcgcgaagtccacagacgcatccctagctacggggtcccgtgtgtgcttagcagtggccagggcagcggtcagtcatggatatgtcctctcctgacttccctccgctccttcgggttcctcgggtctccttccaaataaacaactgaacgaaaaaaaan

SEQ ID NO: 683242 - DNA, 121 bp, Homo sapiens
acactgggtagagttcatgatctccaacatagggcagtatacagccagaaaagaggagacagagcaaacagctctactataacagctcatgtacaacacaccgaacgggtccagggccact

SEQ ID NO: 683243 - DNA, 473 bp, Homo sapiens
ctgtagctttggaggttggtatttatgttaatcagaaagaaaaggggaggctggatgcagtggttcatacgtctaatcccaaagtgctagaattacaggcgtgaaccacagatctggatgaaaatgatacatttaaatgagaaaaataaaggttaagtggagagatagccaataaccattgatatcaagactaaacaggaaaaatatcagtgtttcccaagttaattaatatacttaatttctattaatatgtaaatagaattcattatatagtctacataaataatttcaaaattcatatgaaaaagtaaatgagtcagaggatcaaaagacggcccaaattggtctgagtattgtgggttattgttaagctgatttaatattgtctcccccgacaaccatgcttgactagcttaaaagaaaaaaaaaaggcccaaaaggagattgggcaatgtggagacctgactagccag

SEQ ID NO: 683244 - DNA, 446 bp, Homo sapiens
  misc_feature (210)..(211): n is a, c, g, or t
  misc_feature (387)..(387): n is a, c, g, or t
  misc_feature (389)..(389): n is a, c, g, or t
gggtgcggcctttgtctctcgctgcagtcagagctccaggtctggttcttacttctcctaaaggcccaggctgtgtggccccgtgtcctgcaggtattgggagatccacagctaagacaccgggacctcctggaagccaaaaatggtgagagtgagggtccgacatcccgagagaggagaggactggttggaaccggtgatggctgtggnnggactcaggcctccccgcagtcagctccacagtctgcttcccccattctccttgctcagtcggccttcatcctgtttcagccattggcagctgcgctgacagccggcaccggcgtcttgtctcttcatgcgcgtgactaacctggcctggagcctctctggcagtctgcaccgcancntggcgtctctccagattgtgcaggaacagggaggtgggcagggagtcctgtcgggtg

SEQ ID NO: 683245 - DNA, 769 bp, Homo sapiens
tatatgtgtggtcgtgcaggtagaggcttactaaaagtgtgaaaacgtaggctgtggattaaggcgacagcaattctctaggatagtcagtaaaattagaatggtgaagatgataagtgtaaagggaaggttaagggttgattattggctagggtggccggctcccaattaggtcgcatgagtaggtgcgcctgcagtaatgttagcggttaggctgtacggccagggctatgggttgaatgagtaggctgatggttccgataataactagttagggggataaggggtgtaaggtgtcgccttgtggtaagaaggtgggctagggcattttaaactcttagagcgaaagcctataatcacggcgcccgcctcataaggggagtggccagtggcataggtctaacagatagtggggagggaagggtgctacatgagtgaggcaggagcccgaggaaggtcagttggggcactaaacaagtgcatcacggacacacatagctaataagagactcagcgtacgccccataaggggaagcgacagggaaccccatccgtccagacagctaaggatgagatataagaccatggtggagaggggggaaaagccggcttgttgaacaagaaaatcggggggggggggaccaccacgggggggaactaaacgcaccgaaactgggggggaaagccataaatgtggggccataattgcacaaattcggtcaattgcgaaggggcgcaccccctccggaaggggcccctaccctttaac

SEQ ID NO: 683246 - DNA, 824 bp, Homo sapiens
ggctccccagtcggcgctggcgcggagaattcatcgctgagatggtctaaagccccaggaaaaatggtgggaaaattcaccgtcgccaagtagtccagaaagagcgatttatggctttgttcttttcttaagctcccaatttggcttcatactttacctcgtgtgggcctttattcctgaatcttggcgtaaactctttaggtttaacctatgggctcaaaaagtatgggcagttgcatgacctgtctacctccttattgctatagtagttggctacgtgctcttgttgggattaacatgatgagtacctctccaattcgactccatccatacgatcacagagtaactatgcgaaaaatcaatcagcagaagaaataccaagaggaggcattccagccttaagagatatttctattagtgaagtaaacacagaatgttctttctgtgcaggcaagagaagtttacacgaaagagtgaatgtgtgtaccatagtaacaccaagcacgtatttattctgtagttgcggccattatactttggaccataaattaagttgacgcagtctctcttatgtaatacgagaagttccccaatgtaccttgaccttctcttagattgttgttccactgcactatcgtacatgttcagtatgggcactggattggactacctaccatattgcttcgcgaaacaaggagcgctcacacaaacttggggggcggcgggccagaaaacttttaacctcgtcggcgggcggccaatgatggaaccgcgcagggcccagggacgggccagcggggggtccccaaaagcgggcccggtgc

SEQ ID NO: 683247 - DNA, 267 bp, Homo sapiens
ctgaagtgctcgactctagagcactccccccttagtaaagaagattcaataggcatccagttaacctctccttatcagtcacactattgaaggttagagtatgcaagtgttttgtgtatatccgtcctttcatattagtttcctaggctgtatttcccacatatagggactctctctctctctcctctctctctctctctctttgtgtgtgctgtgatgctgtgtctctatttgacgcatctctccttcgctctcatctatgggagt

SEQ ID NO: 683248 - DNA, 266 bp, Homo sapiens
tttttttgtagagatggggttttgccacattgtccaggctggtttcaaactcctgggctcaagcattcttcccatctcagcctctcaaagtgttgggattataggcgtgactgctgtgcctggccaactgtgcaactttctagtggcaatttgatgacaacaggttaccaaaattctacatttagtaatatatcctagggaaataactgaagacggacacaaagaagtatgtttcgggatggtcacctcatcattatcacgggtcg

SEQ ID NO: 683249 - DNA, 353 bp, Homo sapiens
gagagagagagagagagagagagacagagtgagagagagagagagagagagagagacatagatacagagagagctagagacacatggattaagtttctcataattgacagctctaacctcgtgactgtatctcgctccccactgccattgcctaatggtgtagtcctgtatctgatgccagagtgtcgtccgttttcccatgcaggctcggatactgaatcgttgatcactcctggcacccctccttactcgacctatcctctctctgcagcccatcttcaaccctgtgcatcctccagcccaatcatctcattcagccccctctcggcttattgctccctattactcacccc

SEQ ID NO: 683250 - DNA, 1432 bp, Homo sapiens
tattttgcgtagtgttttttacgctacttgactagcgatcgctaagatgcctgttaccatcctgtttgcacccctcattgtgatacactcgtgatgcgtctgaccggcctgcgagcttacggccctgtgcgactccgtcacgagtaaataacatttttcatgcgaccggtaatcgcgtctatatatggccatgttatgtgcataggttatcgcgctgataacagtgttgtgagtccatggcgttgactcagtactatggcaacgggtggtggagctcgttctgcggaaacttccccgggtcttcccgtaggggaataactcgcctgaagtcccacggcaatggccacccttgctgcgtgttcttcttcatgtgctgctttcgtgtttattcgggtccttaggtggtccgccctggtccgtccccggcgttccgactctcttgtctgtctctcgctcgcccagtcaccaacctgcttggggccttccccagcactcggtcctcgttgcaatggcaatctcgtcccaaccagggaacttccgaagcctgggtgccagcgcgtgtattaaggatgtcttcatccgcggagtctgaagtggagtagttcttatcagacccttgtgattaagtgatttgtcgcccccgcaaagacgtgactttcgcgggacacttacgatccgacagtctgatctataaggagccacgtaatggacccattacacgccgcttctgacaacgtgcctggatagagtttcttatgcaccttctgtgaccacctctggagctggtcgcctatgcgcctggcgcattgatgtgccctgtcaacagagtttggtcgacaggtgcccaacgcacttcttcacaaccgttagtgttgcacctcctagccaacgcaacgtccctacgccagtcgcgagcctgacagctctcgctgctaaccctcacgtacctggcgaggttctatcaggagcccagatttcctgtgcccaaggcgacacttcacaacacggcctcttgctggaacttgttcgcctgacaaggtcacgggcacatatcatcccgcaccagcctggctgctccctggggccgcatctctgtgaattgcgggatcagggtattggggcaggcaacgtggattggtgtggtggtgtgcaaagcggaactgaagagcgtccctggggctctaaacaccatgcaggtcctcctctcttcctgccctgagcaccgcagccgtgagccagcagggggcagcagaggccaacagggagctcgacaggaccgggctccctgctgttcctgcccctttcttcctgctccccctcctagcctagggtagactttgaaactgtgctgtgattgatgacttctctgttccacaggccctccctcaaattcttgcctgggtgtggagacctggcctgtcccctctcccta

SEQ ID NO: 683251 - DNA, 710 bp, Homo sapiens
gagacaacacacgacatcaacaatgcatttggcccaggaagtgctaatgaacatacagtgccgtgatggctcaagaagttttgcaaaggagactagagccttgaagatgaggagtgcagtggccagtcatcggaaattgataatgaccaattgagaaaatcatcgaagctgatcctcttacaactataagagagctgcccaagaactcaatgttgaccattttatggtcgttcggcatttgaagcaaattgaaaaggtgaaaaagctcaataaatgggtgcctcatgagctgagtgaaaaataaaaaaattcgttgtttgaagtgtcattttctctattctatgcaacaataatgaatcatttctctatcggattgtgatgtgtgccaaaaggtggattttatacgacaactggcgatgaccagctcagtggctggactgaaagaagctccaaagcacttcccaaagccaaacttgctccaaaaaatggtcatggtcattgtttggtggtttgctgccagtctgatccactacagctttctgaatccaggtgaaaccattacatctgataagtatgctcagcaaatcaatgagatgcaccaaaaactgcaatgcctgcagccggcattgggcaccagaaagggcccaattcttttcacgacaacactgggccgacgttgcacaacaacgcttcgaacattgaactaattg

SEQ ID NO: 683252 - DNA, 1068 bp, Homo sapiens
ctggagtcggctggtatagtattctagcgactatgtattcgggactgcatagcatagagaagcatagtacttcaggcaacatgctaaaattgggcacccatgaaccccaactctcaaagccacagcatagtaaatagccagataggtaccagatttaaagatatacagcctagtctagactaacaaaggaaaactatgtatcgtagtaactaacatatatacaaccctcctatgacctaacaacactacacgcatggatggcccacaacggcacgacatcaactggcttaaccaaggtgaaataaggagaaagaaacagcacacatacaaacagaacacctccaacacatgacacacactgcatgacaatagcgcgcccacaccactgcatgcgacatacaccacctctacctacaggtaccactacactaagcccaataggagcgctaccccactcaccaacccataaaacagaaaaaccaacaggcaagagaaacacaggcgaacaacccaataggcacgagcaataaacaccgtcactagggacaataccacggaacacccgacaaacgcagacaaccccaacacaggcataccaacggacatacaactagcgacaagaaactaccacaacagcagcctcgcaactacgcaaaaagagaaccaatacataccagcaacacccacacaggaggacccacaaaaaaacacaaaagacccaacatcgcacaataaggaaccaacacgggaggtacataaacccatacaacagaaaaccacgaaataccaacacaagccacacacaaaatgaaaacccaacaacacccaggacaacagaaacccaagaacaaccaatggcacgcagaaaacattgacaacaaacacaaaaacagcaacaaccccaacacataaaccaaacagaccacaaaacacgacaaccacacaacaacagaactgacaacaaaaacacaccaaccagaaagccacgaaaacaccagcaatgcaaagaccacccaacaaacaaatgacaacccatacagacaacacacccacagagacaacatatac

SEQ ID NO: 683253 - DNA, 113 bp, Homo sapiens
atatcttatatgcacacgtgtatattgaggtatagcaattcactgttgtggcagttgtgtgtgtgcatgagtaagaaagcaagaacaagtaatcacaatagaatccactatac

SEQ ID NO: 683254 - DNA, 395 bp, Homo sapiens
  misc_feature (18)..(18): n is a, c, g, or t
agatcccaagctccaacnaagagcgaaactctgtttccccccaaaacaagtaaacaaacagttagtgacacacaaacaaaacacaaatgaaacaacaaaaactgtttggaggtatacttccaattttagtaccacataaagaatttgatattttgaaaaatgttgagtctgattcatttgtgtttcaagactcactcatggagaatgattttctgcattcacgtttgaattggataaggtatacacatgtataagcatctgctagatttctgtttcctcacagccaaaaaaataaaattgcaaatcagagcttttttaagaatggctgttatttgagtcaaagtggattatgacatgtgttagttatgtattgctacataacaaattgccacaaa

SEQ ID NO: 683255 - DNA, 929 bp, Homo sapiens
agcggagagagagggagggagggagagatgagcgcgctagacgcgagagagcgagtgagcaagcgagcacgaaacagaggtgcgagagggggggaataagaaagagagagaaggaaatggagagaaggccacggacagaaggctaaagggactgagactaattcatgctgttgctgtatgagaagagactcaaacatggttgataaatcatatgatgactgaccgaacaagattgagactaaggatgggtgatcaaacgcgagaagataaaggctcgagtcaaggccagtaatccatacatattctaaggctagcttcccgtgtgacacagtaacacagggaccatagcgtcaaagggaggagaaagaacggatgagtgtccgaagagctgcggtgaggcatgaaggcgtaagtaatgacaggatgaacgtccccattgttgcccgaatgcgaggtgcgatgaagacagggacgagggcagctcgactaacttgcctgaacggcacgtgccctaaggcacttggtctccaaggccttgatgaggccacggacaaagcatggatgaagactaccttacctgatggcaggaacgaattggggcgagggttgatgcatggcacgaagagcagtgcatggctcccacagtgctccatgcactcgctcaagaaggatgaaggacgggatcagctgatgacacgtaaatgtgcagcgtaaagcttccactgactaatctcgtccgtcctcgctagggctgaaggatgcgcaccaggccaatgggaggagcctaaacaagccgatgtgcctgctcgctgtcactagactggtgcctgacaccaacgcctgacgcagaaggatgcttgctgcccagggcaacgagaccaggtttccaacggcagactgggggatgagcatgccgaggttgatacgaa

SEQ ID NO: 683256 - DNA, 458 bp, Homo sapiens
tattgcagcactattcacaatagcagacatagaatcaacctaaatgcctatcagtgatagattggataaagaaaatgtacatatacaacatggaatactatgcaggcataaaaaggaatcaggtcatgtcgttcgcagggacatggatggagctggaggccatcatccttagcaaacttacacaggaacagaaaaccaaatactgcatgttctcacttacaagtgggagcaaaatgatgagaatacatggacacatggcggggaacaacacacactagggtgtgttggagagtagggagaggatcaggaagaataactattggataatgggcttaatacctgggtgataggattatctgtttatctaacctccatggcacacatggacgggagggggagaaggccggcatagcctgcacatgtatccctgaacttaaaataaaagttggaaattaaaa

SEQ ID NO: 683257 - DNA, 998 bp, Homo sapiens
aataaaaccaaagattacgggccctagttgtgtaaatttcacgtggacatacctgtatagtgttctggtaataatttgcgagaagctttctggactaatcgactaacggaactcacactagaagatcacgttcattgtcttatcagtgtgcctcacagggtgaaagacatagtgtcttactcaagctcaacgcagtgaactaggggatgatgggcactattatataccaaacaacatgtgtctcatcgttagaaacactatgtgatattattatatagttcaaggattcgttagcagtatagtcattcgtagctcaatacggaagaagtcaatcatggtatcttttacttatatatatagatatagctttagatcgagtccacataagtgcgctattttcttacagagaatgaaaatctgtgcacggaaaattggtatactgttatgttatccgaagctacatgttaggtaacatatatttttggattggatcaatatggtcctttcataagtttttggggactagttgcagatttaaagaagtttgatatgccttctaatttttatgtgagaaagataattggtgaaaatggacaattgcgtgttatctaacgccattgactaagtataacatagtggatggctagtaaattcattttaggtagacttgatgaagtcaaaggtatgactattatttattgtacattttgataaagagaattttggggaagtcttgaagtgcataaaattacttgatatcttttggcatttcatttttactatattgtacttctgaccaaatctttaattccctggggtgggtattttaagataatctttacctaataaaaaatggttgagggttcatacggaatcgaaaagaaggctatttgggtgatttgttcatttaggaacctggaaagtgatacgggaaaatttccaatcaaatgaacacttatagggatgggagaatttacatattaggaacaagagataat

SEQ ID NO: 683258 - DNA, 558 bp, Homo sapiens
  misc_feature (441)..(441): n is a, c, g, or t
ggtggcggctgggggcaggctgacatgggattgggaaactctttcctgttgcgtgcttcagggaacccagtatttaatgatgcctctgattggaagatgctgctaatctataatcactcaacatgacatggggtgtcttggttggtttaatggaaatgggctgcatcagttgggtgtgcccagcggtccgggaggaagtaggggaaaaaacaaaaaacaaaaaaaaaacacaataaagcggaggttgtattctagtgtggcagcattggaggagatgcagaaggtcttccaagatattctttccctcctcgggctcagtacaaggccggggttttccactagtgatggtcagagttacttccaagaactagaagagccgggtggagaccattccacaacacttctggacggtaatgggctgagtccacggagacccagggnggggacagggtctttctaagaccatgcagagaagtatgagtggtggctccatccttcagcccagggctgacacctgcaaaccactcactatgtgtgtatttattaagccttagagac

SEQ ID NO: 683259 - DNA, 561 bp, Homo sapiens
tttttttttatattctttgcattttttcttacttgaaggacagagaaatgtggcttaacgattaaagaaagttatggtagttagacaggattgctggctctacaccaacggataagaaaaacctatccctttccgtttgaggctgtataatcttattcttattcccctggtacgatgagatgcttccaaacgggatggtataagcctaatgcagattgacttgcattaccatggttaataccctactaggcatagatgcgcctctttatcagtgagcacgtgcatacttctcatcaaaagctgcgaaatcattcataagcatctttcaggagctactttagttgccttgggctagaagttcacgagctcaactagcgcagaatgccacgagatttgtctctccttctcaaaaagcgtgtgtatatctgcatggtatgtgcccgtacagaattcatcactttagaaacttatgtgtcatcgacagacatagcttattagcatggacgcctgctcaccaaggacgcagtgcaatatattgcggctattgcacttactgggtga

SEQ ID NO: 683260 - DNA, 299 bp, Homo sapiens
  misc_feature (104)..(104): n is a, c, g, or t
  misc_feature (172)..(172): n is a, c, g, or t
  misc_feature (175)..(175): n is a, c, g, or t
  misc_feature (190)..(190): n is a, c, g, or t
cctgaacggtgcgccctcaacgcaaggccccaagatgtacgcaacatcaacatgaatcgcttttcccggtcaatcggcggcacaatgcggcaagtaagaagcangccgcgcttttccgcaccatcgaccgaaacatcgcgattctcataatgttcaatgggataacgcgacnagntgcgttgccgtgatngcttccgggtatacggcattgcgaccgtaggcaaaatcgctccacatagtgtcggcgagaaactcgtagtgcgaggtatcgggccagttttccacatgcagcggatgaa

SEQ ID NO: 683261 - DNA, 187 bp, Homo sapiens
taacactgcactccagaaaacacaaccatgtaaaaaaaaatctcatcattggcatatattcaccagtgaaaacgaacgagatggagcagccgtatgcgaatggtgatggaagacctgcccttaggggaggaggtgaaggccaccagcctgcaggaaatcgacgggtacaggctcgccgattgtgccc

SEQ ID NO: 683262 - DNA, 114 bp, Homo sapiens
gctggtcgatctcatagcaggatcccccagcaaatccaggagggtgacgatgcctcccatgaacaatgccgttgtttgtaagcaggaagctgacgctgcgccatggatgtacgg

SEQ ID NO: 683263 - DNA, 1115 bp, Homo sapiens
atgggtcttttattataataccccggaggcgttcgttgtttttgtggtgcacccccttcgggctgttgtttcctcctcctcgtgggtagtctcgctcgatcactcacgccgcggtgtgtttgtaggcccccccccctttgtgtggatgaatcaccccgccggggggcccgcatgttactcacacgctctcccccgcgcagcgtgtttttatgctctctagtgtcgcccgcgcgtcggcgcgcggcgtgtgatacacatctgttttttcacacgcagctgggtggaacaccacagcttgtattgtggtacacccatctgttaggggtgccccctcatttatgtagagggggtggacaccacatcatatatagtggagacacaagcatgtgtggttgctctacacacaaaaaagcgacaggagcgggtggtgttcacacgcgctctcggtggaggattttctcccccgggggtgattttttttcgcgcggcgcccgctcacccacacagagtgtgtgcgcgcgcaactagagaaagtatatcttctctgtgtcgcaaaaagaaagttctctttcacagagagtgtgatgtctcacacacaatgctctccgcaacagaggagaggcgcgctcacaccacccacggggggggtttctttttatggcccggcgtgctccaaaagtatttttgtctcgcgcggttttctcccgtgtggtgtagagtgtatgaacgacgcaggggtatcaaaattgtggcgagattttggaaactaccttgtgagagtacccccagcaagatgcgtggtggaaaaagttgttttgtgtgacaacacctcctcacagcagccgcaggggtaacaaaaattggggggggagtacaaccccccagtatttggcagggcgcgacttctgtagacatcctgggataaatagggcagaataagatattgtctgtctcattccccccaccgttgggtgttttattgttggtgaccaacatccctcctggggattcctatgggccactgatgaagcaaagagaaaacccaggggggaatcccggggtttttttttttgggggggaaaaaaaaaattccaaaaaaaacccccggggtttta

SEQ ID NO: 683264 - DNA, 1623 bp, Homo sapiens
  misc_feature (207)..(207): n is a, c, g, or t
  misc_feature (249)..(249): n is a, c, g, or t
  misc_feature (296)..(296): n is a, c, g, or t
  misc_feature (543)..(543): n is a, c, g, or t
  misc_feature (1018)..(1018): n is a, c, g, or t
  misc_feature (1032)..(1032): n is a, c, g, or t
  misc_feature (1048)..(1048): n is a, c, g, or t
  misc_feature (1052)..(1052): n is a, c, g, or t
  misc_feature (1058)..(1059): n is a, c, g, or t
  misc_feature (1079)..(1079): n is a, c, g, or t
  misc_feature (1095)..(1095): n is a, c, g, or t
  misc_feature (1097)..(1098): n is a, c, g, or t
  misc_feature (1113)..(1113): n is a, c, g, or t
  misc_feature (1116)..(1116): n is a, c, g, or t
  misc_feature (1118)..(1118): n is a, c, g, or t
  misc_feature (1121)..(1121): n is a, c, g, or t
  misc_feature (1134)..(1134): n is a, c, g, or t
  misc_feature (1151)..(1151): n is a, c, g, or t
  misc_feature (1158)..(1161): n is a, c, g, or t
  misc_feature (1175)..(1175): n is a, c, g, or t
  misc_feature (1199)..(1199): n is a, c, g, or t
  misc_feature (1213)..(1213): n is a, c, g, or t
  misc_feature (1226)..(1226): n is a, c, g, or t
  misc_feature (1232)..(1232): n is a, c, g, or t
  misc_feature (1235)..(1235): n is a, c, g, or t
ggcgcggcggtagggaaggcgcctcccgcagtcgctcggaactgccgacccgagtgcttcccgcagagggctggtggtgggagcggagtgggtcgggcggggccgagccgggcctgtgggccgtgtgggggcctgggctggcgtgccgggcctggcggacggctgggatggtgctgcacctgtgagcgcctgaggacaaggctggcnggcctgagctgctctaagatgatcgacaagaacctgcggganggacggaggagaaggcggctgcgggagggtgaagttgctgctgttgnggtgctggggagctcagtggaagagcaccactccgtcaaagcaggatgacagactcatccacgaggatgggctactcccgaggcaggcacatgccggcagtacctgggcgggttgtctacagcaacaccatccagtccatcatggccatattgtcaaagccatgtggcaaccctgcagatctgacttttgccgagcccctccagagcaggacgagcgccaggcacgctatttgcactggtcctgcanccgccgagtgagcaaggcgtgctccctgatgacctgtccggcgtcatccggaggctctgggctgaccatggtgtgcaggcctgctttggccgctcaagggaataccagctcaacgactcagctgcctactacctgaacgacctggagcgtattgcacagagtgactacatccccacacagcaagatgtgctacggacccgcgtaaagaccacggggatcgtggagacacacttcaccttcaaggacctacacttcaagatgtttgatgtgggtggtcagcggtctgagcggaagaagtggatccactgctttgagggcgtcacagccatcatcttctgcgtagccttgagcgcctatgacttggtgctagctgaggacgaggagatgaaccgcatgcatgagagcatgaagctattcgatagcatctgcatactacaagtggttcacagacacgtccatcatcctcttcctcaancaagaaggacctgntttgaggagtaagatnacancacagnntccctgaccatctgcttccnctgagtacacaggggncnnacaaatatgatgagncancnagntacatccagagtnagtttgaggacctgaanaagcgcnnnnacaccaaggagatntacacgcacttcacgtgcgccacngacaccaagaacgngcagttcgtgttngacgcngtnaccgatgtcatcatcaagaacaacctgaaggactgcggcctcttctgaggggcagcggggcctggcgggatgggccaccgccgactttgtaccccccaagccctgaggacgatggggcgcagaagatcacgctccccgcctgttcccccgacgcttttctcctcttatctctctttgtctcaggtccccctgttccctcaggtccagacgtaggggacggggtggcactaggcctcccggttgaagccctgcccttgcttgcgcatgcggtactggcttggaccgccttttggggctcagtcgggtttacccttgcttgccctgcttacggaatgggactgttagatccagatgttgtatggcctgtttcgcctggccacttccacac

SEQ ID NO: 683265 - DNA, 667 bp, Homo sapiens
cgggagtggccgacttttccagttgctgtccgtcacccctttctttgactcggaaagggaactccctgaccccttgctcttcccaagtgaggcaatgcctcgccctgcttcggctcgtgcaaggtgcgggcacccactgacctgcgcccactgtctgccactccctagtgagatgaacccggtacctcagatggaaatgcagaaatcacccgtcttctgcgtcgctcacgctgggacaatttttttttttctttcgagacactctcgcactgtcgcctgggctggagtgcagtggtctgatctctgctcactgcaacctccacctcctaggttcaagcaattctcctgcctcagcctcccaagtagctgggattacaggcgcctgccaccacactcagctaattttttgcatttttagtagagacggagtttcactatgttggccaggctggcctcaaactcctgaccttgtaatcaatccacctcggcctcccaaagtgctgggattacaggcatgagccaccacacccggccaaaaattttaattcttataagttcaagaaaaatagaattaatgcctatgtggcgcttagaaaatatactccaaaagtttggctcttgggatgcaagcccttgactaaataggaggttcagaaagatcctgaaa

SEQ ID NO: 683266 - DNA, 329 bp, Homo sapiens
  misc_feature (3)..(3): n is a, c, g, or t
  misc_feature (162)..(162): n is a, c, g, or t
  misc_feature (270)..(270): n is a, c, g, or t
  misc_feature (283)..(283): n is a, c, g, or t
  misc_feature (293)..(294): n is a, c, g, or t
ccntggtttaatctatgcacaccacaatactatgcaccatgttcacctcctattcaccactccactaatgcaccagttcacctcctattcaccactccactaatgcaccagttcacctcctattcaccactccactaattcaccagttcacctcctattcancactccactaattcaccagttcacctcctattcaccactccactaattcaccagttcacctcctattcaccactccactaatgcaccagttcacctcctattcaccantccactaattcancagttcaccnnctatttctacaccagaaccccatagctggttacag

SEQ ID NO: 683267 - DNA, 702 bp, Homo sapiens
ggcatctctatactactaacagaccggaacctcaagaccaccttcttcgaccccgccggaggaggagaccccatttctataccaacagcctattctgatttttcggtacaccctgaagtttatatgcttatcctaccaggctacgtgagtaatctgcccatatttgtaactgtactactccgtgagacataaaagataccattgtaggaatactttaggtaatggtctagagagtatgcatagtcagattggcttccatagaggtgtatcgttgtgagcgaaagcatgatagtttacaggtaggaatacgacgtagacacacgagtcatatttcagccatccgcgtacacataagtgcatcgcgtatccccaacgtgcgtcaacagtattatagctgacgtctgccacgaattccacgggaaggcgagtatgaaatcgatcttgctgctagtagctctagagacgcctgatggattgcaatctttactatttcagccgtgaggtgcgccctgactgggcagtttgtattccagcaagtcgctatcactaagactatgcagtatctactagagagcacgtgacgtacgtgtgtagactcactatccatcatattgtccgtaatcaattaggagcctgtattatgccatgcatagagaggcttgatacacgtgatgttcccctatttctcgaggcataaatcca

SEQ ID NO: 683268 - DNA, 654 bp, Homo sapiens
  misc_feature (18)..(20): n is a, c, g, or t
  misc_feature (44)..(44): n is a, c, g, or t
  misc_feature (66)..(66): n is a, c, g, or t
  misc_feature (133)..(133): n is a, c, g, or t
  misc_feature (135)..(135): n is a, c, g, or t
  misc_feature (164)..(164): n is a, c, g, or t
  misc_feature (168)..(168): n is a, c, g, or t
  misc_feature (200)..(200): n is a, c, g, or t
  misc_feature (233)..(233): n is a, c, g, or t
  misc_feature (303)..(303): n is a, c, g, or t
  misc_feature (510)..(510): n is a, c, g, or t
  misc_feature (534)..(534): n is a, c, g, or t
  misc_feature (569)..(569): n is a, c, g, or t
  misc_feature (575)..(575): n is a, c, g, or t
  misc_feature (621)..(621): n is a, c, g, or t
taactgaagctcccttcnnntagtaatttctcactatgatgtgncgacatcttgtgtctgtgtggnatgtgtgtttgggtttaaaaaattcctaaaattgattctcttctgaggtcctaaagggtcttttgcngngagacttcctcaaattcgtcttttacaangctntaggagtcatctttgtgaaacatagattttcncattttacaactgtgtaacaacttattttttgncaagtattgggattagctactggagttagtaaagtgaatattagggtgcttacttttgagaaaaatgctnaaaaatagtatagccatcatttactggaacttttttaagtgctaggcacttcatgtatttatcccttataatagtccttcagtgtagatattattagccactgttacagatgagcagccattctcagaattctgaggactcacatagtaattcattaggcaagtgataagctttatgataaatacttgaaagggaccctaagagcantagaggagggatcatcctagtttnagagttggaagattataccgaattaggcctccccngagaanatgatgtttttaggccgagctattttaaggccagttggaccctggnccaatgtgttgattggaatgagtgtgtgttcgg

SEQ ID NO: 683269 - DNA, 1029 bp, Homo sapiens
ctccaccccgggatacacagaacctcatctcctacggtgctagaagcctgtagtagggcaggatgggcaggaagagctagatccgcggagtctgcggcgcgggtgaagatctggcgcgtaattcccgctgataagattgttccgtgcccgccaagcctcctggactatgcaggatccgaattccctgagcgcgttgtcgtgacttataggcgcagacgttatgagatgcccggggcattaagagccgcgctcgccgtggttagccgtcaccccctagccttctttaaggcctctcagggctgggcccaagtgcccagacgacaggtcacccaggtggccagtaggacaactgcgggcctcatcttccaagtgattacaggaaagtaacgaccggtgactgcttgaatcctccaagaatgtctgtgagacaccgggtgagatagatcgcattatgtcacgatctcggtgaatcaaagcgttaccgtgatgtggctcctatctgtgggaccgtgctcgtacgccgtcctttttcctaaaccttctggtttttcctttggaacactcctggtaatgcccctctagccctcagtatcagtggggtcttatggcgtgatggtgatgtgggcgtgtaagctcttgagggtggggtcgggcggagcaggtctgtagtgctgtggcatggggtgtcccgtttccgttgtgcagatgtggcccgtggcgtcgggattctactttggccgctctcctcttgaagcaggataactgcgagggcatccccatcggcctggattcgtctgctgggggtgggcttcgccggtggctggtcggttgtccccgtcgtggactcagaccggcctacatgggacacgcgttgcaagcttcgccgctgtgggcttaacgggagggccgcggcctacggcggagctcttaggaagccctcggatccttttagcacacatttgtcgacgggcccttgcacctgggtggtgccgacccgttcctctcgctcgcgcttctctccccttgagc

SEQ ID NO: 683270 - DNA, 185 bp, Homo sapiens
  misc_feature (116)..(116): n is a, c, g, or t
  misc_feature (118)..(118): n is a, c, g, or t
  misc_feature (166)..(166): n is a, c, g, or t
  misc_feature (179)..(179): n is a, c, g, or t
ccacgggcgggaaagacacaagcatcatgcagtggcgcgtcagtttagtacccaccgagagctgtggggagcagcagtgggcaaggaagacacagactcgcattacccttggtcanangtgatttctgttttgtttaaaaaattcttacaaacctcaggataactntaccctccgccgnctacct

SEQ ID NO: 683271 - DNA, 291 bp, Homo sapiens
ctgtgcacgatctcatagcaggatcccctctctagcactgaggacgcaggcgtctatttaacgaactgaaagtattggaaccctggccctccctcccacataccagacaagcagtgaagcttaaggggctactctcattcctcccagagttctacacagttcctcacacctcgccacacagcttcctgcttacacttcactacctcagtgagtttctgtttgctggtttgctgttgttgaattttttttgttttatctgcctgacttccgtcaccatcctctgtctagaga

SEQ ID NO: 683272 - DNA, 117 bp, Homo sapiens
gcgccttttccctccttccgctcagctggggcctctcgtactctcttccgtggtgtgtccttttatgctctgcaaactttagcatcaaactggggccatcttctcacacagtttcac

SEQ ID NO: 683273 - DNA, 1100 bp, Homo sapiens
cgcaatagtcctctgggacgaaagcatggccggaaagcagcttgtgtcaaacgagtcgttacaggtagtcataagtctcagtattagacattctgagaggaacgatagaagagtgagaccgtagtctagaataccagtcggagagactcatggagagttgggagctagttgactagcgtagtgacaggtagcgttgaactgaacatcgacagagcagcagagcgtccaaggctacatacttatagtaactgaagcacgattcgaaagaatcacataagcgacggctacacgacaacgtgtcacagtggatatcaagagaacgtccaagcaaaacattccatacttatccagaggccccatctatgcatggcaagacgggaaaccccgttgggaacccgacgaagacatggtaccatgcacgttcacacagacggatgtggacactggacagatgcgtccttaaaagatctacatgatagaccatttctaaaagagtagtagcattgtgacaccgtgccataaggatacttggaactgctaaattcactgcaatgtcacacataaggttcacttaacagtgcaaaagcgattaacaagacatcatttccttgcatttgccatctacattcactatcacgataattacggatgtcacgacttgcatctcagtgttaaatcttttactgactacgatgtacttacagtaacatcatgacaaattctacttgtacactatagaacgtgaatttgtggcacggtagacatggcttgtgcctatttagggattcaatgggcacttagagaacgcaatatttgtacttacagtaaactaaagtggccaaaaacattccaatgggcataactgcactggatctcaagacttaaaatacataccgtatgacaagataccaaacactccccaaatctggatagagtggatactaagcaaaggagggagacaaccaaaagcgacaggaaccgcgccaggacataggagaccagtcgccaaatctcaccaattagcgagtataacccaggtaaggcgcctctaaagaccacgtgagactcagagagacggagccccagcataggaacaacac

SEQ ID NO: 683274 - DNA, 327 bp, Homo sapiens
acgcgcaccgccgttcaaatctctttccgctatgtaagatcctcctcttttaccacgatccttacttggaaggaagtccatggactaaactcctctcccaggcatgttttaccctaactataagctcttagcccacttgattcatgctactttgtaacaagactttccttctcctaagacagtccccaatgtgaatgaagctcacaggtcttagatgtaaagctggtcgatgcaattgaatcgcagtacaatgtgtgccttcaggggctgatgtactgtttgaaccggcgatgccaaagtggtctaccgagctctcattcggactca

SEQ ID NO: 683275 - DNA, 150 bp, Homo sapiens
tggatcgtcagaagctgttgtaaggcatgtgtgtgaactgaggaagaggcattagtgccacacaagtgacataccctctggagctggttgggcctgatccttatgacgatttggaatcatacataatgcgaagtcctatgattagtgtta

SEQ ID NO: 683276 - DNA, 147 bp, Homo sapiens
gcggccgcctactactactactgctcgaattcaagcttctaacgatgtacggggacatgtgaacccaggaggtggaggttgcagtaagccgggattgtgccactgcactccagcctgggccacagagtgagactccatctcaaaata

SEQ ID NO: 683277 - DNA, 345 bp, Homo sapiens
taaaggagagagtctggctctgtcacccaagctggagcacaaggggcgatctcggctcactgcaacctccacctcctgagttcaagcgattctcctgcctcagcctcccgggtggctgggattacagacatgtgccaccactcccagctaattttggcattttggatagagatggttttcaccatgttggccttgatgtcttgaccttgtgatctgcccgcctcaacctcccaaagtgctgggattacaggtgtgagccagctggaacatttttaaatgaggctaggaaaggtacaattgtttgagcacttttaatatacatataacgttctgatacggtttgga

SEQ ID NO: 683278 - DNA, 175 bp, Homo sapiens
gagagatggccagcaggaaggcggggaccggggcaaggtggcagccaccaaggcaggcccaacgtgggttcttccaaccggcttttccatgtttgaacaagcccagatacaggagttcaaaggaggccttcagcttgtatcgaccaggatcggtgatggcatcatctgcaaggca

SEQ ID NO: 683279 - DNA, 946 bp, Homo sapiens
attctagaggccgaggcaggtggatcacgaggtcaggagatcgagaccatcctggctaacacggtgaaaccccttctctaataaaaatacaaaatattagccgggcatggtggcgggcgctgtagtcccagctactcgggaggctgaggcaggagaatggcgtgaacccaggaggcggagcttgcatgttgagccgaggatggtgccactggcactccagcctgggcaacaagagtgaaactctgtctaaaaaaacttgaataaccataaataaggtaactaacctcagtaacttaaaaccggcttggcaatttatacctgaaatttaaacaagtacacgatggcttgtggtaggccaaaataatggtcccaaaagatagctaggtccttgctctgtccgtgagaccaccaactctacacagtaaaagtcctccctcatggtatgctcgtggcctcttgccccttccaactcaattcaagttgcgggcccctgtcactcttggcccctgaactccaaaggcacacaatcctcctccaggctgtgcaagtagtattccctctgctgaaaatgaagctgtatatctcaggtcagtgtcccacaggcgcctgccaccaggggacgcgtggtcgggtcatcaggtggtcagccgatccagtcctgagtatagaaggagagcctgtgcggttgccgttgccacaagggtctgagtcggggaactcaggtcaccaatgtccccaggagggacttttgggccagggcgagggctcagtaaaaaccagcagggtggtgccacgtgccgcacaggggggggagcgcgcctgcctcggcgggaacaaccccgcgggggtctaaaaaaaagcggtcactgcgctgttcttcgtttctatcacactcattgtatcctagtgatcatgtgtcaaggatacacaaagcagaatcacgcgt

SEQ ID NO: 683280 - DNA, 140 bp, Homo sapiens
aaaagccccaggggggcctggggccggggtttttttggaaacctttcccaaaaattttttttgggggggggttttttccccccccccccctttttaaaggggtttttggggggtttttaaaagggtttttttttttttta

SEQ ID NO: 683281 - DNA, 387 bp, Homo sapiens
acgcaatgagggaggggtggcattgacaagttctatattgtccttcctaccatcttcggtgcctctgcagcaatatgaagttaaaaccagctactgtgatcagtccctgatttttggttcttatgaaggtgctttgcttcctgcttctgcctcctgcttctgctgtcttcctagcttctgccgtgtttctcccagggttcttggtgagggcttcctgcttctgccaatgaagagtatgcttcagcttgcttgaggaagctgtggaaccttttgtatctgttggtgatgtggaccattatttacaagccgtcaaagaatatgaggaagttgctgtatgacatactgctggcgctgttattatccatcatctctttttggacacttctg

SEQ ID NO: 683282 - DNA, 940 bp, Homo sapiens
  misc_feature (940)..(940): n is a, c, g, or t
ggcaaaccatgtctctactggaaacgcaaaattagccaggcatggtggtgcatgcttgtagtcctaaccactcgagaggctggggcaggagaatcacctgaacctgggaggcaaaagttgctaggttgctgtgagccgaattcgcaccattgcactccagcctgtgtgaaaagagcaaaactctgtctcaaaaaaaaaaaaaaaaaaaaaaaaaacggcccaaagcgggttttggaggggggtggcctctccattttggggaaaaaaattgtccaggggcatatagttcctttttaaaaaaccccattaattcccccgggcaacacgttatgcgtacccataaaacaacttttgtgtggaagttgtgccccatatatacacagtgtgttttccccctcgaagtgaaacactgtgggtgtttcccctgggaacacagaagccaacgtcgtcattgggcagaccattttagcaccaccggaatggaaagtatgacgcgtttaaaaacactgccttaaggggcctccgtaaagtacaaaactcgagcgcatagagcaatccgggtaaattaccactctgacggagtgcacaattcttagtaaattggactatttcacacccccagttctattctcattacacaatgggggcggtatcagcaacagtggtaagaccccaagggcttccgcagagagaaaacgctcgcgtgttttaccagttaagacacttggaggctggaccttatttgagcagaacattgagcgatgggctacacagcgtccttggacagacccgagttctttagacgaaaattttccgcaacagttccgggggaaagggtccttttagagaccaattagtccagagcggggcaatgatcagatagggcgcaacttatcccgagggacacatgcacggtgacaccacatcgctctttaagcan

SEQ ID NO: 683283 - DNA, 284 bp, Homo sapiens
cgtcgacggcggcacgtgcctgtaatcccagatactcaggaagctgaggcaggagaattgcttgaacctggaaggcagaggttgcagtgagctgagattgcaccactggactccagcctgggtgacagaggaagactccatctcaaaaaaagaaaaaaacccaaaaccaaaaagcaaaaattagccaggcacggtggcacatgcttgtagccccagctactcaggaggctgaggtgggaagattgcttgaccgctgggggcagggactgctcagtttgtcgacg

SEQ ID NO: 683284 - DNA, 491 bp, Homo sapiens
ctagggagtcgatatcactgggggacgggcctagagagaggagtcagctcatgattgacgttgtgagtccagagtcgagggttcattctagcacagctcactacctccccagggagcagagctggaatggagatgcctgtccagcgccccagtattgccaggggccatctgaaacctggagcactttcccaggtctccccagggtctgtgaccgcttcttgtctttctcttttcccagtccctgaaagccagaacacaaaggcagcgctgccctgacagcggttttcacattcatatgtagctcgaggaagcagcagcaccctgggcttgtgcctgtcctcctgcatgtgcagcctgcccaaaccataggtgatcacaagcctaacttcaccagcacaaacagaatttactgggacagataaataaagcttctcaagctttaatctctcaaggcacttaacaggaaatttcactttcctaggatacagtag

SEQ ID NO: 683285 - DNA, 712 bp, Homo sapiens
caaataaagcattcaccttagtgttagactatgtaaaaaaaagactgccagctttgacttgttcatttgcattactaggctagaaagaaccgcaaaatcgcatttttttctccccttttcaggaaggactgctagtccttcattatggccttgcggcttctcctatgaagataactggacgatcctaggcacatcttgaggcgggaaacaaaggaggcttgtgcaggactgcatctcaccaacgattaccatgaaatgaaattgctaccacatttgctgatcaagacataactgacctattgttagcaccaagaattatagcgggtataagtacaacttgggacgacggaaagcatctggtactagagactggatataaaaagcagccaaagctcaacggaaatttttcaaaaattgaattttagaaattggatagctgtctttgctcagccatagcaagtatggaggctgggatacatgctctctgggatggcatcaggtgtgcagtcatctctttgcacgagagtgagcttttgagttgaagatccaaagccagtctttgtacactgcagggtgtactctgaaagaccaacctattggacacttttgtatgtcccagcacatactgacgtgtaccttgttatactacgcgctacagcgcgaggtactcactccaaacggtgattggtatttgtgagagagtctctactta

SEQ ID NO: 683286 - DNA, 1227 bp, Homo sapiens
gccctgctgaattccgtgccgccgccggctcctgtgaagagaggaatgcgggagaggagcccacgtcgcctgtcacccaagtatctccagccgcgcagtcccgaagagtgtaagatgttcgccatgctccagagctcgtccttgtcacccccttctcttgatccgacgctggattccagaggttgcatacagaccaatttctgcatcagtgttatctcgatccagtaggctagtagtgactggagagggctctacgtgtatttaatggggcccagtaactggtgtgtctcagctaatccaaaggcgagctttcacgaccagttgcaatcagcagagacattgatactgctgccaaatttattggtgcacggtgctgcaacagtaggagtggctggttctggatgctggtattggaacagtctttggcaagccttatcattggcttatgccagaaacccttcgctgaagcagcagctgttctcatatgctatcctgggatttgccttgtcctgaagctatgggtctctctagtttgatggttgctttcttgatttagtaagccatgtaacaaattactgcttgacatgttggccattcatattaaattaccggactgtaatacctgtgctctcttactgtgactccgaaaactgtagtatatggtgtcatgggaatgtacgtcaatttccaaagccatctcactacacatgaaaacctttcacaacacaaccaaacataaaaaacaacccgaaattcttatactaatctacatctcataacctcatacacacaatacaaatatcaccatcaaaccatatcattccacctatactcactctataataaatacgaatcacaagcacacacaccacacatcacaacaaccaacagctaagcaccctcatcacaataaaataacactatcatcataacataacccccacaaacgcataaaacttatctaacaacgtgaatcaattcatactacagtaataccatccaaatctgactctacacctcataatacacttcatcaaacctcacaaacatacacacttcccagacacagcactcaactcaatcccacacccacataataatatatacgaagaagtagacaaatcgaaaaagtcaacaactaaacatatctaccacaaccccacctcctaatcactctacgcccacagccatcttcaaaccattacaatcacacagatgactcacaaa

SEQ ID NO: 683287 - DNA, 281 bp, Homo sapiens
caccttctccacatactaggccatttaccctgccaggtgtcctttttgacctcttgactcttgactcaaggtcagctcaaaggttccgaactcgggcctgggatgtgcgggggtactgaacctaagttatccggagtcgttttccctgggtcccttagtcgcgtccttgaggcacctcactctagatcggagccttcatgtcccaaactcactctagtgagtttccacatacagccccatgagtgcccggtagacacagcactagaatagaaaatctcgtc

SEQ ID NO: 683288 - DNA, 787 bp, Homo sapiens
  misc_feature (2)..(2): n is a, c, g, or t
  misc_feature (84)..(84): n is a, c, g, or t
  misc_feature (90)..(90): n is a, c, g, or t
  misc_feature (94)..(96): n is a, c, g, or t
  misc_feature (103)..(105): n is a, c, g, or t
  misc_feature (127)..(127): n is a, c, g, or t
  misc_feature (146)..(146): n is a, c, g, or t
  misc_feature (152)..(152): n is a, c, g, or t
  misc_feature (165)..(165): n is a, c, g, or t
  misc_feature (315)..(315): n is a, c, g, or t
  misc_feature (320)..(320): n is a, c, g, or t
  misc_feature (424)..(424): n is a, c, g, or t
  misc_feature (428)..(428): n is a, c, g, or t
  misc_feature (463)..(463): n is a, c, g, or t
  misc_feature (468)..(468): n is a, c, g, or t
  misc_feature (559)..(559): n is a, c, g, or t
  misc_feature (701)..(701): n is a, c, g, or t
  misc_feature (708)..(708): n is a, c, g, or t
cncctctataaagagctcaagtgtggagctgactcatctatagattaaggcatcacaaagtaccatagtcacttaacaaatgcncaaaanaaannnaaaagcnnntgttttacctttcaactgctgntgttatgtacaatctatcncaaaangcatagctgtgcnttcatgagctgattatatccacctctagaattttagaaacgggcccctctaagcctatggatactctcttaccttacaaagtaaaagcattttctattttaaaatttttatttctgtgtaaaacaaagaattcctagaggtcaaataatntaccnaacttaaagccctattaagtcatgaaacaaagaagattctggggtagaagtcaagccatttaatccccagtttcaggtattccccgcaaccatcgcatttcgcnagtnagatctattttttttaaagtctccccttcccaaanatccntaatcccttctgtaaaatccggtgtaaaactatggccccccgggggcccccccccttttctcctggtaacagagtaaatgcttttactaanagctgccaacatttctatcagtagtaaccgtaaggaggccgctggttgtaaccataatgtccatattgctggggatagtaaggttcttgtctgtgttgcgggtagttgttaccccaggatcgtccatgccactgattggatngattgtnacttggccacccccatctgttgtccctgcctctgaactgtctgttgtcttgcaaccgattgcctctgtttctttggttc

SEQ ID NO: 683289 - DNA, 257 bp, Homo sapiens
taaatgttaaaacatactttaaaaatatacaatgtaaaataataagttataaggcaactaatataagtaaaaaaattacaatgtaaataattagttataaggcaaagatcagagtatacatgtgctttccaccgatcaaagtggatgggcctgcgcccctggcgtatccacagaagccacgtggtggccctggccagcctgtgccaaggacaggcaggccccgtgtcctccatgcctctaacggcaggttttggagt

SEQ ID NO: 683290 - DNA, 393 bp, Homo sapiens
ctgtcttcaggaacttagagtaaattctagaaagtctctaggaataaagaaaccaaagacggtctggtcagtcacacattctcaggtttaaccctatcttataaaagtcttagggggaaaagttgggagtttttcttgaactgtacatatttcacatacttccctagtcttggaggtaggggaaacagatctagagatgtttgagaatctctgtgtaacttagagtatacccacaatatgtagtaagtgtattcttttgagacagaggttgaggtgttacctagagcaccactctccctgttaatcttggaaatgaactaactggctgtaagagcttttgttgaaaaagttcatttcaaggctttgggttttctaattacttctccaaaatga

SEQ ID NO: 683291 - DNA, 910 bp, Homo sapiens
gggggttggggcatggaattctacaggagactggagtcttgcttgtgtggatcctttgggtctccgagttcctgcaggtctgcaggtgctgcgccctgggaacctgcgtgcctcagccccgctctccctgcctgagagcacactttaggaattctgcataggatgtgacaatgccgtctgtctcactgagagactttctacatgcgctccaatgtactactattctagtttgttgcagttcacccatctttcgtacatactagtacaggacgtagttgatagattagactagactattgcccccagattgtatctatattatcagaaaacgaatcaaagtgtcggagggtcatactcaccgggcctacgaaaagaggataagctgaaatggggagctatctcgtgtcatgcccgtcgtagtgctccgatgcgatctgtttctctcgtatccagagtgggtttgacctttttcctggggtcctcccttgtgtatcagcgatcggtatgtgatgtgtcacggatatacaaggcgcaggttgtacccctcaccttggaggtttcgagggaaggaaagaggaaaagccaagataccactaccgggaaagaacgaacacaagctcatgaggcttacggaaaccaggccgagaagaaacgtgggagaagaaatttgacaaatacacagaggtcctcacagacccacggactccatggtctgagccccaataaagactggttattcctcatgcgttgcctgcccttctccattgttgccctggaatgtacgagaacccaggggcagcaacaggccaggtgccacaggacgcctggacatcgaagatggacacaggaaggtctagtcatccctcccgaatgtgaagcacagagaattggacggtttatctttacccag

SEQ ID NO: 683292 - DNA, 418 bp, Homo sapiens
cgtgcgacttcactccttcgtagtccctttcgtcttcacctgacagctatctggatttggacttctattgcggctggaagggcgacgtcgccgcggcttcatcgctcgattccagcttgctgcactactactatccgggctccagctcgcccaagggcggccactacaactacaccgacctgtacctagtccgcgacctatgccaatctacatcctcgagtattcctacacgcccagcgacttcttcagtcacgccccacagccagggcacctcgctaccttgacggcaccgcccacttccgacctgcgccagtgctggcggcctggtgggccacccctctgttacccacaagctcatgaaccacgtcaacatgcaacgcgattccatcggtccactacgtctactatcaggtcgggc

SEQ ID NO: 683293 - DNA, 279 bp, Homo sapiens
cacgagtctagtgggctgtctacaggtgtatgtcatgctgagctcccatgggagaagcccctgctgtgtcttcggcagtaggtgagggggagaagaagcactcccttctccaaggtccttcacaagcaccaggcttcctggctgttggggtagaggtgcagactttccctgctgagcccggcactgcgcctatgcctctgctgaaacttcccacaagcggaaagttcagggactcaaggcctgtgtttggattcttttgtcccatgcgtggattgccag

SEQ ID NO: 683294 - DNA, 192 bp, Homo sapiens
ggaagagagcgaggagctgtattctctattccacaataagatgatgcaagtattaatatcctatgaaagggtaaactgaagttggtatacctatcagaaaagggtcactcctggcaatgtacctcacagtaggacatgaggtccgcatgatgccttcgaaaccatattatactatcaataggaggcttctaa

SEQ ID NO: 683295 - DNA, 662 bp, Homo sapiens
ttgatttcttcagccattagacagggtattgtaacaggctcaatctggcacaggggtacgcagtgataaaggtcttaggggtagtatctcattaataacgcatacagttggatctgcaaagggacagcaggaccataccatagagagatatctcacggtcgtacctgaataaagctcacagagaagcatgctccgagttacgtgaaagactcacacatgaggtgatctgcataatcctatgcatctctcatgaacgcctcacagatttcatcattgcaggttcatcgtaggtagggtattcatgtggtacgtgctccagagcagctatgcagagcattgggtccaggccatctctgctgcagcatgaagcatggcttgggtgaccgaggaatgcacaatgactgtcataggatgtggcaggcagtgctgaggtactggtgtcataccattcagaggtcagcgccttcagtgcagcaggattcggacaagaagacgacttccctacaagttggctacatgttcaaacggctctgggtcaatgttatctccaggcagtcatgagtcgtttaagattccaggcctctgtgtaaagcatgtccagattccacagcaagctgtagttccaggacactgttcatttttgcaccagagagtcatgcagc

SEQ ID NO: 683296 - DNA, 149 bp, Homo sapiens
ccccccccccaccccccccccggggccccgggggagcccttttaacccaaaaggggcccagggggcccccgcccccttaagattttttaagacctggacctggggggggaactggtttttgggggggaaaaaagcccgtttttccttga

SEQ ID NO: 683297 - DNA, 125 bp, Homo sapiens
cggtaactgtacttgatttaatgtatataaaatattcagtaaggctgcttttcaaagaggatccactgtccatttaaaggttacatagttatcttcaatggggtagtattagtttgggagcagtg

SEQ ID NO: 683298 - DNA, 152 bp, Homo sapiens
cgtactagatcgaagcatctacaggatgatctacagtcagagagaatacagatacagtgctcacaggccgaagtcataaaaaaaataatccggacaggcacggtggctcacgcctgtaatcccagcactttgggaggcagaggtgggtggat

SEQ ID NO: 683299 - DNA, 272 bp, Homo sapiens
  misc_feature (19)..(19): n is a, c, g, or t
  misc_feature (46)..(46): n is a, c, g, or t
  misc_feature (141)..(141): n is a, c, g, or t
  misc_feature (149)..(149): n is a, c, g, or t
  misc_feature (157)..(157): n is a, c, g, or t
  misc_feature (216)..(216): n is a, c, g, or t
tcgggtagccccttgtaanccctttgaaccccattagggagttttncaagtaatcagttaatgaagagagaaagttacaacattatttggcttaatgagtcatagtaaagacgggtcttaatataaaaaaaaataattttnctaatgcnctttaaantgttttttgagaacatatgataaattacccttcaatgaaatattaagattggtatatgncctaattgaaaaaaattcaggttttagaaataaatgacatctattagtgtgtcaaa

SEQ ID NO: 683300 - DNA, 114 bp, Homo sapiens
aaaattttggatttggggctaaggggtgggagggaggccaaagctttgccccctcaaagggtaaactggggtcagtcctttttttcctttgttccaaataaaagatttacccca

SEQ ID NO: 683301 - DNA, 634 bp, Homo sapiens
  misc_feature (599)..(599): n is a, c, g, or t
  misc_feature (625)..(625): n is a, c, g, or t
  misc_feature (627)..(627): n is a, c, g, or t
aacaagcttgaggactacaactggagttttcagaaggtggagcagaatgggttctgtggcaaccaaggacatcttcaggaatatgcaccagggtctaaagcatatgggagcacagctgatcggcttcagtgagagtgtggttaatggtgtcaaagtaggctttctggcttctcctaggccactcattcagtgataggggctgtgtctcaaagcccagggaactcacttcattgatttggaacaaatttagcagtgcagaagacatctctaacctggtgtcacaaagaatcatgcagttttagagctagaagggaccttagagattatgccaaagctgaatctgagagaagtgtcctcccaggaaaacgccaagattctccaagacactttcatatcctaagccctgttctgtttgttcttgtgtagtaaattggcaaatttggcagtacagaagacatctctaacctgatgtcacaaagaatcatgtctggcccatacaaagtattctaactaaccatgtaagccactagaatgttaaactaatgctctggcactgaggtgggtatcttgagcatttgtgactttacagtttattatcngtattggttaaaatatatatgaacanangctaaaa

SEQ ID NO: 683302 - DNA, 195 bp, Homo sapiens
gtacacattcaagcatcctcgttccagtgagttcacctctaaatcaccacgatcatatgtgacaagcatcaagcacgcagcaatttagctctaaacgcttagcctagccacacctcacggtaacagcagtattaacctttagcaataacgaagtttaactagctatactatcccagggttggtcatttcgtgcca

SEQ ID NO: 683303 - DNA, 326 bp, Homo sapiens
caggaggggcaaaggaaaggagaggaagagaaggtcatgaatcttatccagggtaaattaagggtccactggtgcctgagggacggaacgcagagagacgacaatgttccggagatggggtaccacgaagggtgttttctcatgcacaatgcgcggctcggaatttgaggaccggacagtccgcacctgaaagatgagcacaagacagcggcttgacggcaaagctcaaaagggctttcccatttaaaacttcaacatctttacaaagtctgataacttgacactcctcttaggtttacttgtacccttctcccccagtgcttcag

SEQ ID NO: 683304 - DNA, 137 bp, Homo sapiens
ccacattgtcccactggaaggtcttcagtgggcgataacgtgcatggagctgacatctcctatgataacaatcgggaatacctactgtaaggacctgcctgagtgctgtgttacacttgaacttttttctttttctt

SEQ ID NO: 683305 - DNA, 806 bp, Homo sapiens
cacaacatgaagctggtgcagggagagctgatagacataccgggaaagatacacaaacgagactatcattcctgctctcaagcgcctgagtcatgggccttttctagctagtgggctacacactgcatcagcccccacatctacagcaagtactattctcctctactgaagatctatgacaaccaacccttcgtggttccgctgcatgtacatgctgatctggggcaagttcgtgctgtacaagagtatgtcacctgttggctggttcacacgaaggagtatgcagtttgtgacggggcctgggacttcaatggcttagaagaatggggcaaggccatagtgggatgcctgtgccatatcatgaaggtgtggctctgtgaaacaaatctcccgtttcacatgggcaccattgcactcattcaaggagtactagagcactcaaacgcccgtggggtggacccgcgtagcagtcttcaaacggatctcaagttccttggaaactcaacagaatctctctcagggtctctcgtagctgattcctggccctctgggcacgggctgcgactcaggatacctggtctgcttgccagatggaattcctcatatgtcatggtggaaagacccggctgcgaggctcattcaagagagcccgagcctggagcgagctggaacgcccattactgtcctacgagcccttctactaattttgggtgcaaacaagacctatccgactgggctcttcatgggttaactgccatgaatggctttctgcctcttcaaggtggggaccaaatgggtttagaggg

SEQ ID NO: 683306 - DNA, 298 bp, Homo sapiens
  misc_feature (37)..(37): n is a, c, g, or t
  misc_feature (58)..(58): n is a, c, g, or t
  misc_feature (75)..(75): n is a, c, g, or t
  misc_feature (83)..(83): n is a, c, g, or t
  misc_feature (116)..(116): n is a, c, g, or t
  misc_feature (132)..(132): n is a, c, g, or t
  misc_feature (158)..(158): n is a, c, g, or t
  misc_feature (162)..(162): n is a, c, g, or t
  misc_feature (170)..(170): n is a, c, g, or t
  misc_feature (176)..(176): n is a, c, g, or t
  misc_feature (228)..(228): n is a, c, g, or t
  misc_feature (256)..(256): n is a, c, g, or t
  misc_feature (276)..(276): n is a, c, g, or t
taaccaaaaaaaaaaaatcctgcctttttagccaaantgcctaggatgtttatttgcnccaaaaaccaaggttgnttttaagncccttggcgccattaaccccccttttttcatgnagatttccaaaaatgnggaatttttaaagccttttttttggnaaanataggtgnccccgnaaaaatcttgttttttttatggaccttgggccaatttttccttccctttgcnctttgggggtgggtctaaccccaactgnattgttttgtttcctccaanaaaccttttttgtgggcccgga

SEQ ID NO: 683307 - DNA, 288 bp, Homo sapiens
  misc_feature (172)..(172): n is a, c, g, or t
  misc_feature (204)..(205): n is a, c, g, or t
accttagaggatccccggcaggcaggttcgtcatgttgcccaggctggagtgcagtggctattcacaggcgcgatccactactgatcagcacgggagtttttgacccgtgctccgtttccgaacttggggccggttcacccctccttaaggcaaccttggtgggtcccccgnctcccgggggggttcacccatattttgatgcnncgaacttaagttgcggaacaccccggaattcgggcattaagcgcaactaacaagccccaagaaacttcccttggggcttcaaa

SEQ ID NO: 683308 - DNA, 662 bp, Homo sapiens
  misc_feature (481)..(481): n is a, c, g, or t
  misc_feature (657)..(657): n is a, c, g, or t
gattagactctaagatattcataaccattagtttattaatagctctataaaagttttccatgttctagggtcctgaggggaatggtctagataacctaacagacttttccatccctcatgattcattttactctattgaaaattatcttaaacagaaggaaacgaataggcctggtagaaccagattcgaaacagtgttgcttcagtgggaagggagtggtttcttagtcagtgcttgtggaggctgttactccagaggcagccccgcttctctgcagttagtaaatactactgtagcccagtggcagatactgcggacataaatcttaaagctagtaacatgttgttcttctaggaattccattcagctacagatttaaggtttatcagtagtatttccagaaagatggtccgacacagtggctcacgtttataatcccagcactttgggaggccgaggtgggtgaattgcttgagtccngggagttcaagaccagcctgggcaacatggcaaaaccctgtctttgcctgtagtacccccagctatttgagaggctgaggtggaagaatcactgagcctggggaggtcagggctgcagtgtgctgaaattgcacaactgcactccagcctgggcaatcagagtgagaccctgtctntaatt

SEQ ID NO: 683309 - DNA, 111 bp, Homo sapiens
aacatattgagacacaattctgtttaaaagcagtctcagttatgtctttatagcagtgtgaaaatggaataatacaggaaattggtaccggtagagtggggtactgctata

SEQ ID NO: 683310 - DNA, 202 bp, Homo sapiens
caaggaatttggggggattttccacccgaggtgtattgaaaaaattcctagtatttcagtaaaaaggcctgttgtgagatgaccctccgggaacttctatttgtttttttttgggggtcagggagaaactagcatttttttttttccaaactactttttgtccctgtgccagttgtaaataaagtttgaaaatgctttccca

SEQ ID NO: 683311 - DNA, 1113 bp, Homo sapiens
tctcgttacccctgcttggctccttgtctgttcttttacttctccgtcttcttttcccggctgacctgcttatctttctgtggctctgtgtttttctcctcttccgatttcatactcttttgtgttttgtcgtcgctttagtgtgtctctgctatttcataataatgtttggggctggctttcattttccttgagttctctccgtggatactccttctgtgtttttggtcctggtcctccaactccttctatttctgctcagtgtatatctcttgtggtcactgtccttttggtgtgtctcttctttctgctgccgccgccctcctgctgactgtgtacctaatgtgccttgttcttgatctggcgttgctatacgggtccctgtctggttatcgtccgtgggtgcgccttgtgtttctgatggtttcctcctcctcttggctgcttcgcctttcgctgttggtttgtcctatgtgttggggctcccatggtctttctcgtagtctctgtctaggtgctccttgttgtacccctgatcggtgtctaggccctatcgtgctgctctagtttggcctgcctttggcggttcatcccgtatcatcgctctttcctgtacctgtcccccctgtccccctttttactggacaccccttctctgctgtggacgtgtctgcgtgcacactgccgtctccatctggtgtgtttctcagtgtgttgcatgtcgtcgttgggcaaccccacctgtgggaccttatggggcgccttgctatatacctacaactggactccggccctctcctaccagtgcgcccagtccgtccacctcgacgtttacgaagccccccacttccacattttccttgtatggtgtgtcttcttatgctgcatggagaactagacgtcgattcatattgcaatataatatattgtgtgtattgtaacagggaggggagagagggggcgtatcgcggcggagttggcctcctgccgcctggtactcaagcccgcggggacattgggacggggacccccgccacgtggccctcccctctctgcaccgtactgtggaaaagatacacgcacgtagtctctaaagagtttatttaataggcc

SEQ ID NO: 683312 - DNA, 92 bp, Homo sapiens
aaaggaacccacccccaaacaatgccatccctggaatttccccccgctttgtgagccgtgtggtatgacctagtaaactttgtccccattca

SEQ ID NO: 683313 - DNA, 279 bp, Homo sapiens
tagctggaaatgtaatgtatccttttggcaccgtgtcttggtaggagtcctgctgcttgccactcttgtcctcataaacctgtgtggcacaatcttcagtgatgcagtctgtgggaggccagtgtgtgttggagtgtgagtcttgtctggctccccgcgcagcagcattgcaaagctcctgtggcatgttcttggcacctgtagctgtgtccccaaacggcgacgcttgtggatgaccatgcgtcactgtcttggagtacttgttggcttgggcttgtg

SEQ ID NO: 683314 - DNA, 1091 bp, Homo sapiens
  misc_feature (457)..(457): n is a, c, g, or t
  misc_feature (659)..(659): n is a, c, g, or t
ttttccccccccccgggccgtcccctaaaggtagatttttagccgtggacgtgtgtgccccccgacgtctccacccgggggaccctcattattttgagaagttggatttctcggccggcccgcgggtggcttctgttggggcccccccttaatggggattttcctacatcatttgttcggttggtgtgctcccgcccgttgatggcgtgggccgccgctgtgatacctggggccactttgtgtatttagcgccaaaccgtccacgtccaccctatggagcctctccgtggagtcttatccacccgagcacccggcttgttctatgcgctttggttataggcttcccacgtttcccaccctaatatggtgccctatgtgccacatatagagaggcctcgttaaatttttggcccacctcacactatagggagaggcgtgtcttcacatgtgtccaccntggagttgtgtgcccgcgcctatatgttcctccacaggcgttatacacccccccgtatggagcccacacagacccctgatacgcccccacaatatgcccactcttctaccctatttacacatatatttccacatcgcgcgcgctaagaatctctaacactcttctcgttctccgaccacacacacactgtttctcggcgccncatatatcccgcgagagatgtgccctcgcacacgcttatactccgcgaactatccccggcagatgcacatatccaccccaccacatgtgaacacactttcctcatatcacattctcgttatgggcctccacattacacatatattttctaataccacgcccacgctataatatattataataaatttgttcacatgagatttgtagagaaagcctctcgcctttcgaagcgcaaaaagttcctcataaatgtacgagagagaccctcccactaaaccctcggaggtgagctaatatggagtgccccccacccctaccaccaccactttcgagagaaacccctattatcactataaatttagaccaaaaggaaggaatcgaacccccccaagctggtttcaagcccaccccctggcccccctgactttttcca

SEQ ID NO: 683315 - DNA, 443 bp, Homo sapiens
cgtgacaaagctgcctttgcttttatcactttgcaaaacaaaaaaggggacatgttgggaacaggcccctgaatctggccataaactggccccaaaactggccataaacaaaatctctgcagcactgtgacatgttcatgatggccatgacccccaccctgaaggtcgtgggtttactggaatgagggcaaggaacacctggctcacccaggatggaaaacggcttaaaggggttcctgtaccacaaacaatagcatgagcgatctgtgccttaaggacatgttcctgctgcagataactagccagagcccatccgtttattttggcacatccctttatttcccataagaaatgcttttagttaatctataatctatagaaataatgcttatccctggcttgctgtcaataaatatgtgtgttaattctccaaaaaaaaaaaa

SEQ ID NO: 683316 - DNA, 655 bp, Homo sapiens
  misc_feature (94)..(94): n is a, c, g, or t
  misc_feature (96)..(96): n is a, c, g, or t
  misc_feature (186)..(186): n is a, c, g, or t
  misc_feature (194)..(194): n is a, c, g, or t
  misc_feature (199)..(200): n is a, c, g, or t
  misc_feature (217)..(218): n is a, c, g, or t
  misc_feature (223)..(223): n is a, c, g, or t
  misc_feature (234)..(234): n is a, c, g, or t
  misc_feature (240)..(240): n is a, c, g, or t
  misc_feature (248)..(248): n is a, c, g, or t
  misc_feature (253)..(254): n is a, c, g, or t
  misc_feature (258)..(258): n is a, c, g, or t
  misc_feature (273)..(273): n is a, c, g, or t
  misc_feature (289)..(289): n is a, c, g, or t
  misc_feature (295)..(296): n is a, c, g, or t
  misc_feature (299)..(299): n is a, c, g, or t
  misc_feature (303)..(303): n is a, c, g, or t
  misc_feature (308)..(308): n is a, c, g, or t
  misc_feature (316)..(316): n is a, c, g, or t
tgtagaaagagacatttaatacttctggttacaaaattcaggcgtacattttagattgccctggaccgtgcccaaagctgtgtgctcatctctncncccctcatgtacttctgacgaggggggtgcagggcagggcagagcagagcctggggtccggaggcttcactggaccacagggggaggggnatgtgaangtggnntggcccagctcccattnnatcgnttttgcattgngcgatntaggaagnagatnncggngctgcctgccttggnctagaggagatggttntggccnnttnccanagggngaagtggnaatgggacattttagggcagtcagacaatcctggcttgtggcatacttcggttcgggaaccagtttctcttgcttgaagatcgcaaggccgatttatctgtaaatctgtgagcctgtgcgcacgcctaaatcactcggtttgcctgcagaccctcaagaaagacaatgggttgcgcgatctgattcttttccctcctgttaggaggatggctgctctcccctcacactgctttcaccccacaggacgtttccacttgctaacgcctgcttttcctgaacactttattcctctaatcggcgctcgggcatcccgttttctagccttccagtacctctgcg

SEQ ID NO: 683317 - DNA, 258 bp, Homo sapiens
cgaagttgcttctcttgagagcctgctcacctgggcgcctcccttgaaagccgggtctaccccttgtctttgtgcacgtgtcctcccgtgtatggagcctccggttggggtgaccccctaggggctgccccctgcaccccggccggggccccccacccctgtttgggcctcgattaggggttaccaagaccctgcttttttcgggcccggcccctgcccttttttcccagcccctggcctccctagaatttttccaca

SEQ ID NO: 683318 - DNA, 242 bp, Homo sapiens
cggaatggtgagaccaccattcttgcccctgttcctcagggccgagaatttgagttgaacgcccgcaagtgagaagcgcaatgcgcgcttggcgtctgcgacaaggccttcttcgtctgcgtcttcgggctgcacgccacgcgcctcgatgggcacggctgtgaccgcgcctggcaagtctcccccaagctgcgcgagaaggagatattcgcgtaccggctttcggctaagtaatgaaagag

SEQ ID NO: 683319 - DNA, 496 bp, Homo sapiens
  misc_feature (94)..(94): n is a, c, g, or t
  misc_feature (96)..(96): n is a, c, g, or t
  misc_feature (186)..(186): n is a, c, g, or t
  misc_feature (194)..(194): n is a, c, g, or t
  misc_feature (199)..(200): n is a, c, g, or t
  misc_feature (217)..(218): n is a, c, g, or t
  misc_feature (223)..(223): n is a, c, g, or t
  misc_feature (234)..(234): n is a, c, g, or t
  misc_feature (240)..(240): n is a, c, g, or t
  misc_feature (248)..(248): n is a, c, g, or t
  misc_feature (253)..(254): n is a, c, g, or t
  misc_feature (258)..(258): n is a, c, g, or t
  misc_feature (273)..(273): n is a, c, g, or t
  misc_feature (289)..(289): n is a, c, g, or t
  misc_feature (295)..(296): n is a, c, g, or t
  misc_feature (299)..(299): n is a, c, g, or t
  misc_feature (303)..(303): n is a, c, g, or t
  misc_feature (308)..(308): n is a, c, g, or t
  misc_feature (316)..(316): n is a, c, g, or t
  misc_feature (339)..(339): n is a, c, g, or t
  misc_feature (353)..(353): n is a, c, g, or t
  misc_feature (369)..(369): n is a, c, g, or t
  misc_feature (399)..(400): n is a, c, g, or t
  misc_feature (405)..(406): n is a, c, g, or t
  misc_feature (418)..(418): n is a, c, g, or t
  misc_feature (426)..(428): n is a, c, g, or t
  misc_feature (467)..(467): n is a, c, g, or t
tgtagaaagagacatttaatacttctggttacaaaattcaggcgtacattttagattgccctggaccgtgcccaaagctgtgtgctcatctctncncccctcatgtacttctgacgaggggggtgcagggcagggcagagcagagcctggggtccggaggcttcactggaccacagggggaggggnatgtgaangtggnntggcccagctcccattnnatcgnttttgcattgngcgatntaggaagnagatnncggngctgcctgccttggnctagaggagatggttntggccnnttnccanagggngaagtggnaatggtttattaatgggagcttnggtactaggggttnggatatttgtttattngaattttttttttttgttttttgtattgtnnttttnntctttttttatntttttttnnnttgtttttgttttgtttttttttttattttttttttatntttatatatttttttcttggtttggatgg

SEQ ID NO: 683320 - DNA, 417 bp, Homo sapiens
  misc_feature (9)..(9): n is a, c, g, or t
  misc_feature (29)..(29): n is a, c, g, or t
  misc_feature (35)..(35): n is a, c, g, or t
  misc_feature (112)..(112): n is a, c, g, or t
  misc_feature (159)..(159): n is a, c, g, or t
  misc_feature (205)..(205): n is a, c, g, or t
  misc_feature (314)..(314): n is a, c, g, or t
atacaaganggttggcattgtacaagatnacttgnctgagtgtatggctgaaacccatactcctgctgccccaagctgtgtgaccctagaggaagaagccctatataaaaanaattagaaagacatggtttatttgcccagtttggagacctgagttancctagagcaagtgcccatttctattccatgcacaaaagtttagtanggtctattagtggtccgtgccacattaggtgagtttgtgaactgtgctttcttgggaaggagagcatcttgatggctcgctttcatcttattctgtctgggccatctcngggagaaattttttttatgtactttgcttatttttcagctggtatgtaagaggcatttgaccctattcttctgttcttacctctctgtgaagccctactttat

SEQ ID NO: 683321 - DNA, 565 bp, Homo sapiens
gttattcgtcactgactctcttactaaccagcgcaaacagactgttgatttccaactaaggatggggggaaagtgaaaacaatggaaataaaaggtcaaagaatccctcagcacttctccttgctgctgccatatgaagaaggatgtgtttgcttccccatctgccatgattgtaagtttcctgaggcctctccagccatgctgaactaatgcatgcgatttgttaatcatgatggagatctcagatgcttttgaagaggctgaactgatatgagaaagtcttaaccagttgttgcttctttgaagaagaaggaaggggccacaagccaaggaatgtggtggcatctagacactggaaaaagcaagaaaatgaattctccactaaagcatccagaaacacagctctaaagatccccagttttagtccagtatgacccatgttggacttctaaaccatagaattgtaagatactaaatttatgctgttttaaaccattatgttcatgataatttgttacagtagccatagaaatctaataaaattgagatacttctttccatttga

SEQ ID NO: 683322 - DNA, 1180 bp, Homo sapiens
ctatgttttatatactatatatatatatctatatatgtctatagctctatatatatacgccataccgtgcaaaagagacaacggaaaaacactcaaactacttcccacggaacacttggttctcactcggagaactccagcacaccaacgcagacgacaggacacgggacccaggcacacgcaatagcactccgacaaatcacacactgccagccggcttcctcctgacctgcaaacacagccgcaacctctcgcacctgagcgacacacgaggctccatgctctcacacgccagccctctgcaccacactcgacacccttggcctattaagcaaacactaactcacttcccatgcccctagccactctcctcctctcatggcccatcggaacactaagataccacgatgcgcacctgctcctgacgcgatccacgctgcctcaccccgcgggtctccctgatgctgcctccccatcactctctcctcccctgcgcacctctttcaccactctctacccgccctcccaatcgcccccgaacactcctgcgcgcggcgcctacgcttccagcacacacccccctccccctccaacagccctacgcctcccacccacacacccctcgcacccccccactccatctccacactcaacccctccgcacacctgccacgccggacacccacccacccctcaccccaccccctcgccactgcgccctccgcccccaaccctcacactcccaccacaacacagcaatgctcaccacccactctccatcgccgcaacagcccaccaaacccaaccccacaccaaactgccacacaacaccccgcccccccaccccgcccacccccccgccccgctgctcacccctcctcactggctctcacctcattctccctcctggcagtgccccccagcacccttcttcccatccccatctcctccctacacccgccagctgcacccccccacatctttccctgcccacctcccctcagcggccccctccacactcccgcccgcgcctcccacacccccctcacgctcccctctcctccccccccctcaggccacatttccgcacctcatccccctcagcgatctcttagctctcactcctgcaactccgcccccaacactgcgcgccctatccacaccctccctctccctgccg

SEQ ID NO: 683323 - DNA, 464 bp, Homo sapiens
gttattcgtcactgactctcttactaaccagcgcaaacagactgttgatttccaactaaggatggggggaaagtgaaaacaatggaaataaaaggtcaaagaatccctcagcatgcgatttgttaatcatgatggagatctcagatgcttttgaagaggctgaactgatatgagaaagtcttaaccagttgttgcttctttgaagaagaaggaaggggccacaagccaaggaatgtggtggcatctagacactggaaaaagcaagaaaatgaattctccactaaagcatccagaaacacagctctaaagatccccagttttagtccagtatgacccatgttggacttctaaaccatagaattgtaagatactaaatttatgctgttttaaaccattatgttcatgataatttgttacagtagccatagaaatctaataaaattgagatacttctttccatttga

SEQ ID NO: 683324 - DNA, 946 bp, Homo sapiens
agaaagagctgtccctgaaaatggtaacttgggtccaatacaagctgaagtgaaaggggcaacaggggaatgtaatatatctgagagaaagtctcctggagtagcaaataaaaagtttgagagcaattggatagtggcattggcaagtgcataaaatagctgaaggtttttcagaatccaagaaaaggtcatcagcaagcatgacaaatgcaacaatcaaacatagcagtttcaggacagcacacaggcaggcatttgaagggggcaggattccttggacagaaagcaacgttccctatctggcatcatcaccaagtacttccgcatggaggaactgactcacctggtactgcgtccccatctcctacaaagactactccatctcctcggcataaacaaaagtgattcttcaggtcaggagtacagacttgtgaaaactcaccaaaatgaatagtagtcatcgtgacatttagatgaaagttaaactttactgaaatttcagtacatgagtgtttgacactaagaactttacaagataaaattggacattcatttagtatcttgatgaaccagaattactgtggaatcaagtgagatacaataatcactatctcttgttgaccattgttggaaattgggagaaacttgtacaaagtacatttaagcaggatcaatttataaaagcagggagtccatttaaaacaattagcgacgataataggggatgggaaagcatatgagcagatatgaataggatggtgccatataggtggagcatcccattaagaatccatggggcaacgagcaagactgcataactaaacctcaccatcgcagggcaatggactaaaaaaggacacattgaagtgaataccactaggcctacagaactaggccgcgaaaacaacgcgacgcacaggcaacaaattgacgaaggcaaaaggga

SEQ ID NO: 683325 - DNA, 102 bp, Homo sapiens
cacgtggcttgtcgcaggtgtacggcgagctggcggatgtagaggaaggcgtgcatggtaggccacacccggctccaggaccagcagcttattagctattaa

SEQ ID NO: 683326 - DNA, 865 bp, Homo sapiens
  misc_feature (640)..(640): n is a, c, g, or t
tctatgattagattaacctagagatgtgtgtactcgccagatatgagttcttcatacggatagctgtcgctatgttgtcttcccatctccagtgtgccatatcgagcatggcggtctgtacccaagattgatatctacgtgaagtgttgaagctgtgtccatgtgcactccaggatccttatgatatgtgaggtcccttagtatgagttatgaatgggtaatattttaccttgaaccaattaatgcggttctccaatcacatattgcccctacgctggttgatttggtaactacatgtattttgaacgtctacagacctcacgcgagtcggaatatagtttagtcttgtgcccaattgagctgttatgcagtgttggaccagtttcattatggatgggcgaggatgtgacagaatgcctagtatgccctaatagagtctccgccgtgtaagatgtctgttccacaaggcttatacgtgaactgggttggcatacattgaagacaggtatggtcctactattgtctcctcatgatgtgacgtcctgcactcatgtgaatgtactctatatgctatccctaatgccacgtactacctgggcgttaagtagaatgtcggggcccgaaaaatgggccttgacanttttggtaccgaattgtagactatggtcacgcccgttatggttgtaaggctgacgcgcacgttacagtgccggatcacccatgaattgctggatggcccgacaatgaacataggcgctacggaaccttaatacgctcccttaagcctttagggagctaaggggccaacattgtgtttcccaaaactctccgaacataccggggcccctgtggggggcgcgcgcaa

SEQ ID NO: 683327 - DNA, 851 bp, Homo sapiens
  misc_feature (63)..(63): n is a, c, g, or t
  misc_feature (66)..(66): n is a, c, g, or t
  misc_feature (69)..(69): n is a, c, g, or t
  misc_feature (90)..(90): n is a, c, g, or t
  misc_feature (99)..(99): n is a, c, g, or t
  misc_feature (102)..(102): n is a, c, g, or t
  misc_feature (121)..(121): n is a, c, g, or t
  misc_feature (123)..(123): n is a, c, g, or t
  misc_feature (156)..(156): n is a, c, g, or t
  misc_feature (158)..(158): n is a, c, g, or t
  misc_feature (174)..(174): n is a, c, g, or t
  misc_feature (195)..(195): n is a, c, g, or t
  misc_feature (204)..(204): n is a, c, g, or t
  misc_feature (213)..(213): n is a, c, g, or t
  misc_feature (224)..(224): n is a, c, g, or t
  misc_feature (244)..(244): n is a, c, g, or t
  misc_feature (283)..(283): n is a, c, g, or t
  misc_feature (285)..(285): n is a, c, g, or t
  misc_feature (311)..(312): n is a, c, g, or t
  misc_feature (314)..(314): n is a, c, g, or t
  misc_feature (327)..(327): n is a, c, g, or t
  misc_feature (354)..(354): n is a, c, g, or t
  misc_feature (358)..(358): n is a, c, g, or t
  misc_feature (366)..(366): n is a, c, g, or t
  misc_feature (380)..(380): n is a, c, g, or t
  misc_feature (399)..(399): n is a, c, g, or t
  misc_feature (415)..(415): n is a, c, g, or t
  misc_feature (466)..(466): n is a, c, g, or t
  misc_feature (497)..(497): n is a, c, g, or t
  misc_feature (504)..(504): n is a, c, g, or t
  misc_feature (582)..(582): n is a, c, g, or t
  misc_feature (656)..(656): n is a, c, g, or t
  misc_feature (702)..(702): n is a, c, g, or t
  misc_feature (714)..(714): n is a, c, g, or t
  misc_feature (741)..(741): n is a, c, g, or t
  misc_feature (779)..(779): n is a, c, g, or t
  misc_feature (849)..(849): n is a, c, g, or t
acggggagagcagcgagcgagcgagcgagccgagccgagcctcccgccgtcgccatgggccanaanganctgatgggcacggccgagganttcgccgancanttcctccgtgtcaaaaaanantacctgccccaagtggcgcgcctctgtctgatnancaacttcctggagganggcatccgtatgtggttccantggagcgancagcgcaantaaatcgaaancaactggaaatgcggctaantgctggcctcgtccttcgtcttcctcaaattgctgggananctgaatggctgcgtcctggtgttgannangaaattcgtgcantaagcctgcttcgggctctttggaatnatanctctgcanaagattgcctaaanaattttatgggaattgaantttttgatgaggaacntggccctgggaggaggcctgttgctgctcctagcagaatcccgttctgaanggaaaagcatgtttgcgggcgtccccaccangcgtganagctcccccaaacagtaaatgcagctcggaggcagggtcttgctggttctgatgttcatgaacctccttcaatttgangccagcttcttttctattgtccagaaaatcgtgggcacagctctgatgattttagtggccattggttttaaaancaaactggctgctttgactcttgttgtgtggctctttgccatcaangtatatttcaangccttctggaccattccagtctacaancccatgcatgacttcctgaaataagacttcttccagancatgtcggtgattgggggcttgctcctggtggtggccctgggccctgggggtgtctccatggatgagaanaa

SEQ ID NO: 683328 - DNA, 265 bp, Homo sapiens
agaagccagggtgaccaaacgggccgttaaaaggggggcgcctcgacttatgctgaaagagaggcattaggcagtacctcccaggaggattgggacttgggatatttttaaccccttaaaaagaatagctgtttctatgttaaaataccaaagaacatggataaaccccacattccaaggtaggttaggtccacctatattgtagaaaattattagaatgactaagggtcacctcatcggtagatctatactgtttatactataa

SEQ ID NO: 683329 - DNA, 509 bp, Homo sapiens
ggagcaacgcggaggaaacgggtgtgaatttggagcgtacggaccatgatgagcctattaagcacgtcctagagagagacgacactgaaatagctccagaagcgctaggaggacgaattgagcaccaattcactatctgtgctcactctgtgagcacacagcaatacccaagcgctaatcaagtgctgaaacactgcgaaactactgagccgcttgtgggccttctgtaggcactgaatcatgactctgacaaacggcaaggaaacgtgaactgaagtacccctgaggggcacgggaatggaaaggtccaggccatgcaacaacgaccgctacatgtccgatatgtttctgcgcggctactgagccatggctgacctgtggaacccgttcatcgcccgctcataggcgccaggctggtgtcgacagaacttagtcctatgtcctatgaataccctttgcatagcggttgagaagaatttagcactgatatgttaatagaaattataaag

SEQ ID NO: 683330 - DNA, 984 bp, Homo sapiens
  misc_feature (521)..(521): n is a, c, g, or t
tgcaaaagcccagggttaggaaccgtaggcatgctgcgccccaaggctttgacccatggtgctaagccatagccaacactggaggtcgtccagagtcaccctgctagctgaataacgaggtgatctactgcatggcctactctggttacggggtacatctgacgccctgggtcatccgctgccatagccagtaatcatctgggccgcctacgatccggaacgggaaccaagcgttataatgaacgacaatctcaaacttcatcctcatggactgcattggatgggccgctgtagccatcacccgagtggccaaccttctgctgtgtatgtatgccacaggacgaccgtgggctcttggcaatgctcaatggccaaggcccaggctttgcgtgcagtcacctggcaggagcccctcacccgaatgtggcgagcatcttaacggctattggtcggaagctcggggtcacgagaaagagcaaatgcaccatttgcgaggcggcgtgggcctcctagtaagaacncttcctttagacacattgggagggaagcgatgcgcgacattttgatcccttatccacagaactaatactttccaaccttcctgctacacacaaacaaccacacacacaacaacacctttgttgcggcacgctcttgtggcccctcgcgaaaggcctttccataaaccacacttcgcgttggacgacgcgtcgtgtcgacccccaatatagtcgtaacctcttgaacaccgattgtgctcacattaatctgcgtggtttccccctatgaaggaaacaaattccctcgctggcgtcatactgtcacctataagtcgaggctcatgggagcatttctctgactcgatatgtataaactaaacgcgccactgaggagtgacacaccgcagagcggcttcatgaaacgaataattccccggatatgaacattaccacgaaagtgccactttacctggggcaactatcc

SEQ ID NO: 683331 - DNA, 250 bp, Homo sapiens
cggggccccccccctttttttttaaaatgttttttggggttggccccaggggattgaaaggggggggccccttttttttggtgggtgggccaaggggcccttcgtttggcttttccacagaagcccttgggcggtttggggggttacccccccctttttaatgttttttttttttggggggggggggggggcccctgtttttgggggggcggctttttcccccccctggataaatttctggttcccccca

SEQ ID NO: 683332 - DNA, 308 bp, Homo sapiens
gtaaaagcacacccactggatggtctgggtaatggcgaggttgcccttgatcaattccgagaaaccgacggcaaagatcaggatcgaaatcaggtacgacacactggcgccgacctgcgccgggatcgaactgcgcaggccgtcctccaagcccaggctcaacaacagcaacgtcatggggcccgggctgaaggtcatggtggcgcaaaacaacagaaagtagagaaatgaagacagggttaacgcacttgtcatggccagcaccttgaataaagagaaacagcagcaacagggcgaacgcggccagc

SEQ ID NO: 683333 - DNA, 205 bp, Homo sapiens
ctgtgttgcaatgcacccatctctgcaacaatgagctgactgagcccagaatggcttcaggatgtggaggccaggccgcaacttgcaacacactgtgatggccctaatgtcttccctggatgcagagaaggcccaaggccaaaagaaagtggaggcgcttgagggagagatcattactttaaaccataagcttcaggacgcgtct

SEQ ID NO: 683334 - DNA, 392 bp, Homo sapiens
  misc_feature (269)..(269): n is a, c, g, or t
gcctcctccccatagaatcctaaagggtgggaagaagaagaagaaaaaaaagcaaaagcaaaacaaaacagaaatcaaaagtacactcaagttcttgtcctgtatcaaatatccctaggtcatctgccacccactttccaagacctttctcctactcaaccaggaagtcatggtttctgcagtccagagccatggcaactgagattctaagctctctttgtctcatccaggcaacttttctgtctcccaaccaaggaattcctctgctnaggctccgtgttgcccaggatagctctcttctataagccaggatgtggagcttaaggagactccaatgtttactttctccagtcctagctctgccatataaacactgtctcatggttgtgctt

SEQ ID NO: 683335 - DNA, 380 bp, Homo sapiens
  misc_feature (272)..(272): n is a, c, g, or t
  misc_feature (329)..(329): n is a, c, g, or t
  misc_feature (380)..(380): n is a, c, g, or t
tccttcaaaagctcagcaacttcctgttcttcctcccaggcttccttgtgtgttagctgactgcttccagtactattgcacgtccaaatgcgctcactgtacctttccaagcgagcttcatactcttcccaggtgcggaaggcctcctgagtgtgcgggatggtgaagagcggctcctctccgggcaacggcttcaccagcgggaaaggcttgcggcccaggagcgggcctatcgcggcggcggcggtggggactggcggctgctggggcgngcgcgtcgcgcagcacgtagccccgcggcccggagcgcagcccggcgcccgggttgngggtaggttaagggaggggtgagagggcggcgcgaactccggctccctcan

SEQ ID NO: 683336 - DNA, 614 bp, Homo sapiens
tgtcatagctgttcagaggatcccggtgttcctttgtctggggacgcgaacaagacggacttgacttaccagtattaccgtatgccaacaaggggaaagagtgggttggctatgacaatgcacatcagctatcagttacaaggcatggtttatacggcgagagcattttgggggggccatggtgtggacattggacatggatgacgtcaggagcacgtactgtggcactggccctataccccctagaatacgtatagaatgatatcctgatgcgggttgatttcagtacaacttctttaccacgattttaggctgtcatctgctgtgaattcttcacgcactgaccctgaaaggctggctgtgaccacagaatggacccactgatagtaagattttgcccccaggaggagaggctggggtcactgcgatccacggaacgtgtgaaaatatgactataacccctagaggtacaactgtgcaccctacaaaggaaactgtatcccttggaaagcacactgtcgctctaggagagaagactgagatcactggggcaacgaccatgacttctgtgggtcatcagtccatgacccctggagagaaggccctgacccctg

SEQ ID NO: 683337 - DNA, 106 bp, Homo sapiens
ctctagaggaccctgttcatagcgacgttgttttgtccttcgatgtcggctcttcctctcgtattgagcaggattaccatggcaacaacacatcaggtgggtacgt

SEQ ID NO: 683338 - DNA, 850 bp, Homo sapiens
  misc_feature (704)..(704): n is a, c, g, or t
gggagtctgcgacgcggccggagtcggccttgtggggcaaggtgcggagatcgcgtgcgggcgctgtcttgagcgccggagcgcgtcctgcccttagcggggcttgccccagtcgcaggggcacatccagccgctgtggctgacagcagccgcgcgctctggagtctgcggggtcagcgtgcatgctctgcgatccttgccgcgtgtgccgaccatgccgtcaaggtcccctgcccgtgctgggctggctatgcaaggtgccctggggtaaatggctgcgggttgctagcgcggggggccccaaacatgggccacacttctttgccgccgagccaggacttgcccgttggtgggtagaacgatggttcatcaaggcacgcatgggcccccacaagtttctcaacccaggggccaagagcaggctttgaaaccaaagaaaccaaaaatcttggcgagcaatcgggttggcccccggaaaagacgggtttaaacccgaagaaaaacaccggttgttcctttcgcccaaggttggggtggacccttccctcgggtgcgcgggccccttaatatggggaccttccggttgatttcgattggattggccgttgtgacatttttttttgtggattcccaacaccaaagagaataagcaaccgcgggggggaggtttataaaccctgggttgtttttggcgcctagagggnttgtgggcaaacaaagaaaaaagggccgttcccactccccccaaagggaaaaccccacatttttatcacacaacgcgattccccccaaatttccaaaaattttcttcccaattttttggcccgggaaacaatattacgggaaacaa

SEQ ID NO: 683339 - DNA, 164 bp, Homo sapiens
cggagctgtctctaggcattgctggaactggaggagactgtcagagtggtttgggtattgttgttttgctccgtttactgttgctccctttgctgtccgcttactgatgctccgctccctacctgagctcaatcttcgctcctcgtggttcatatgctagtatc

SEQ ID NO: 683340 - DNA, 426 bp, Homo sapiens
tagcctgttgcctccaaatttgccacttgaatatcattttctttaaatcgctaagaatcagtttatacactagagaaactgctacactctaagactgcctgagaattgacctttacagtgccaagttaaagtttaccttattctcggccgggtgcagtggctcatgcctgtaatcccaggactttgggaggccaatgcgggcggatcacgaggtcagatcaagaccatcctgccaacatgggtgcaacccggtctgttactaaaaaaaataaaaaaattagctgggtgtggcggtgcacgcctgtggtcccagctacttgggaggctgaggcaggagaattgcttgaacccgggaggcggaggctgcagtgagccaagatcacgccactgcactccagcctgggtgacagagcgagactctgtttc

SEQ ID NO: 683341 - DNA, 145 bp, Homo sapiens
agagggcagaagcagaaacaccaagaccctgaagacaataagacactacaatggtacaacaaaaacaacaaatcaaccaacttatctcttaacattatcatttaaataaatatggaactggcttgataacatgaaatcaagtcac

SEQ ID NO: 683342 - DNA, 105 bp, Homo sapiens
atcctgtactaaccggtggctcagtgaaaggaaaatggctggattgcacaggaggcgcctagttctgaggctgggctcttgctaccaggtaggaaggattatggt

SEQ ID NO: 683343 - DNA, 536 bp, Homo sapiens
ccctggggtgtgtctcggtgacgttttctatcagacgtgctccctcccatcctccagccctgcctcacctatctcaagaaggaactaaacgggataacgaaattcatgactgtgaacttcgagtacataggacagacagtaggcacggcccgcagctggcatctgtgcgtgtggggtggcccgtggttggtatctgtgtgcgtggttgtggcccgtgggctgctccatctgtgtgcggtggccgtcgcgccgtggccctgcgcgatctgctgtgtgtggcgctggcgcccgcgggcctgcgccatctgtgcgcgtggcgctggcccgctgggcctggtcgatctgcgtgcgtggctctcaggacgttctatgaactcaggtgcaataccgggaattgacccagactatctgaagccagacagcgaacagaccgccagagggctgaagctgagcgtgtacgttcatgtgaatgtatcatagtcttggcagaggtccaaatgatattcatgatggtcaataagcgcagatgtatgccc

SEQ ID NO: 683344 - DNA, 277 bp, Homo sapiens
ggagagaactagtctcgagtattttgttttttttgggaaagtcaggtcaggggtagtaatataatggtggggacgataagtttaagcatgggagtaggtaaggtaatgtacgtatcaaggccatatgtgttggaaattgaaactatagggctaggcccaccggtgcttcgcaggcggcaaagactagtagggcaactgggccaatatgggctaagagggagtgggtgtggagggtcatgagagtacctataacggaacagcgatagtatcatccctc

SEQ ID NO: 683345 - DNA, 292 bp, Homo sapiens
  misc_feature (259)..(259): n is a, c, g, or t
ggaggtgcagcctttggtccaagtgaaagtacactctctattttcttttcttttttatttttgagacagagtcttgctctgtcacccaggcttgagtgcagtggtgtgatctggactcactgtcgcctccacctcccaggttcaagtgattctcctgcctcagcctcccgagtagctgggattacaggtgcctgccaccacgcccagctaatttttgtatttttagtagagacggggtttcatcatcttggccaggctngtcttgaactcctgacctcatgatccacccgcc

SEQ ID NO: 683346 - DNA, 210 bp, Homo sapiens
cggaacagagtagtgacacaatatattagatagactcactatatgctagcgagcatcgtactctgcagtgcagctgtcagaatacgatgtcattgttactattgtagatcttaaaatgtcctatcttgaaaacgagccttagggaaaaacctccaggggcaaacctctgatgtcttctttgcggccggtagcttgactgcagtactgcat

SEQ ID NO: 683347 - DNA, 367 bp, Homo sapiens
ccttaacttttggccaagtttgttttttaaaaaaaaaaaaaaacaaaaaaccattttatgggtggttgtaaattcaaacccttttcccatgaatgggtttttgtaaacaaaacttttaatgtttttttttcaaaaggtgggttgaaaaattttttgaaacccttttaaaaaatatttttttttaaagtaaatttcgggatgatgataaaaatttttttttttgttttgataaaaaagccagtaaaatgttgccccgggtttttaatttttttttttaaaaggggttgggaaggaaggtttttaaacccctttttcctttgaaattttcagtttttttattttttaaaaatgaatccctcgggcggta

SEQ ID NO: 683348 - DNA, 726 bp, Homo sapiens
  misc_feature (33)..(33): n is a, c, g, or t
  misc_feature (138)..(138): n is a, c, g, or t
  misc_feature (242)..(242): n is a, c, g, or t
  misc_feature (272)..(272): n is a, c, g, or t
  misc_feature (274)..(274): n is a, c, g, or t
  misc_feature (288)..(288): n is a, c, g, or t
  misc_feature (566)..(566): n is a, c, g, or t
  misc_feature (575)..(575): n is a, c, g, or t
  misc_feature (624)..(624): n is a, c, g, or t
  misc_feature (662)..(662): n is a, c, g, or t
  misc_feature (666)..(666): n is a, c, g, or t
  misc_feature (684)..(684): n is a, c, g, or t
  misc_feature (699)..(699): n is a, c, g, or t
  misc_feature (706)..(706): n is a, c, g, or t
  misc_feature (720)..(720): n is a, c, g, or t
attggctttgctggtgccccatgacccctgatncatacatggttgagggtggtggctcaagcacatggctcaggccaagcgctggctctatcaaagacctcaggctagtcaccagctgcttcgcatcctcactgatgntctggtccatatctggtaggacagtggtggctggtgcccaggcaatgcagctgtttgagtcccatgcagggcatcttggcccacagcttttcaacaagtttgcnctgccttacatccgtgtatgtggccaaacnantgaaggccaggttncgggaggcaggcctggcaccagtgcccatgatcatttttgctaaggatgggcattttgccctggaggaactggccccaactggctattaggtggttgggctttactggacagtggccccaaaaaaaacccgggagtgtgtggggaaaacggtgacattgcagggcaacctggacccctgtgccttgtatgcattttaggaggagatcgggcagttggttaaacaaaatgctggatgactttgggccccatcgctacattgccaacctgggccatgggntttatcctnacatggacccaaaacatgtgggggcctttgtggatgctgggcataaacnctcacgtttggtttgacaaaactgagggtatacctttncccncaaggacccctaacccanatgattggttgtttncagggcnataaaagttttggngttgga

SEQ ID NO: 683349 - DNA, 204 bp, Homo sapiens
atatttcattcaaaagttttcatttctattgggtatgtacctaggaatggaattgctgggtcgtaaggtacctatgtataaccgtttcagcaatcccctcacagatttccaaagggggcacgattttactttccccccggcaatgtatgaaagatttaatttttcaatgcactccagcctaggcaacagagtgagactccgtca

SEQ ID NO: 683350 - DNA, 687 bp, Homo sapiens
  misc_feature (589)..(589): n is a, c, g, or t
ccccgggggaaaaatttaatctttttttttttaaaaattttttttgaaaccctttcccccaaaaaaacacgagggcccgcaaaaatttttgcaaaagagaagctttccccgttttttaaagggaaacccgggggaaggggtcccctttagggggcccccttaggtccgggggaaactggtttttttaaaagaaaaccccctttggccccggtttcttttaaaagggcttttttttctttcaaacggctaaggcgggcccccccaaagggggaaaaaagtttttttaaaaaaaaaaacaacccttgggggggtgaaaaaattttccgtcctttttttccaaccgggttttttaaaaccccttaaaaaaaaaaaagggggggggaaacccagtttttttaagtgtttgggcggcccttttaaacggggctcctccggcgggggggggggcctccccccgtttttggctgttttaaaaaatttgggggggggggggttaattttggctacccaggggcgggaaaatagttttttttaaaaacaaaaaaaatctccaaacctcttgtgccttattccccacaagttaatctgnggggggtatttcctggagacacccccgggcgcgtgtttgttcgccaccatatttggtgcccccacccacacagtgtgttatttcccctttggcgcccg

SEQ ID NO: 683351 - DNA, 86 bp, Homo sapiens
gcggccgcctactactactactgctcgaattcaagcttctaacgatgtacggggacatgaaataaatttaataagtctagatcagc

SEQ ID NO: 683352 - DNA, 439 bp, Homo sapiens
taccattgtgccctggatgctgactgtaatcatacaggttaaatacataaacttttttttctttttttgagacaaagtctgctctgtggcccaggctggagtgcagtggcacgatctcagcttcctgcaacctccacctcccgggttgaagcaattctcctgcctcagccaccaagtaaatgggattacaggcacacgccatcgcactcggctaatttttgtatttttagtggagatggggtttcgccatgttggtcaggctggtctcgaactcccaacctcaggtgatccacctgcgtcagcctcccaaagtgctgggattacaggcgtgaccaccatgcctggccctgtttttagttctttgagaaatctccacagactgcttttcacagttgttgaactaatttgcattcccaccagcagtgtctaagtgttccct

SEQ ID NO: 683353 - DNA, 356 bp, Homo sapiens
tcaggtattatccagatcacgggcttccacagcgtagggaacgggaggcttgcaggatggtcacgctgacggggggaactaatcgagcaggcggcgcagtacaccaacgcggtgcgcgaccgggagctggacctgcgggggtataaaatccccgtcattgaaaatctaggtgctacgtaagaccagtttgatgctattgatttttctgacaatgagatcaggaaactggatggtttccctttgttgagaagactgaagacattgttagtgaacaacaacagaatatgccgtataggtgagggacttgatcaggctctgccctgtctgacagaactcattctcaccaataatagtct

SEQ ID NO: 683354 - DNA, 189 bp, Homo sapiens
ggggggggggtcccccgaccccccagggaagatttgggcggcaacccgggggcgctgggaaatccccccgggggaatccctttcaaaggggccccgggtttttcccaaagaaccaggtaggggagggtttatggggagtggtttaatttggtaagaacaagggagaaggggatttttaaaaagccctta

SEQ ID NO: 683355 - DNA, 585 bp, Homo sapiens
  misc_feature (19)..(19): n is a, c, g, or t
  misc_feature (25)..(25): n is a, c, g, or t
  misc_feature (28)..(28): n is a, c, g, or t
  misc_feature (37)..(37): n is a, c, g, or t
  misc_feature (44)..(44): n is a, c, g, or t
  misc_feature (92)..(92): n is a, c, g, or t
  misc_feature (123)..(123): n is a, c, g, or t
  misc_feature (133)..(133): n is a, c, g, or t
  misc_feature (158)..(158): n is a, c, g, or t
  misc_feature (205)..(205): n is a, c, g, or t
  misc_feature (251)..(251): n is a, c, g, or t
ccacggagcttggaggtcncctctntcnaacttcttnaagagtntgctgaagtctgcagagcttctgtcaaccttttcactgtagttttctngagagtctttcccttctcagcaagctccctntgctcttgcncttcttcagctacgtgttcctgtcncagttccaataactcctcattcctttaggagctcctcaatgccatcntcagccaaacccagattagagttgtttgccatctgaaccacagccntgttgacttttgcaacctcctcatccttggcaaatcctttgaaatcatggaaaaacctcttgagtgtcttcctccagatgccattcatacattcctcggtggcatcaccccaagcccaagctcaaagtgcttgacacagtaatagatgttgtaatccttccaaaattacatccatgtcttctcagggtcttcctcagtttcagcaacagcctgggcaaaagtcctccttaggtaatagtcttaaaagctgttataattccttgatgcattggttggatcaaagaggtggtatttggagggagaaacaccactttgatattgagatgaaaatgac

SEQ ID NO: 683356 - DNA, 229 bp, Homo sapiens
ggatccccgttactggcatttcgttacctgcattttgtccagactccttaaaaaccccatcctcaaacctcttgaggaggctaatttgaggtttcctcccatcttctcattcagctaccctgagatgattaaactctttctctgctgaactcctgctgtttcagtgtgttggtctgttactgcacaatgggtttaagagcatcctaagagctccctactcctcacacac

SEQ ID NO: 683357 - DNA, 424 bp, Homo sapiens
ttcggaagatgaaatatttataatgagttatggaaccaatgttttagaaatgtttttcttggggtaatttaatgcagatttttcccccaattttgttaaaaaacttgataatttgatccccccatctatttaatatttaatattttcagattttagaggatttaaaatttaaaccccattataaaattaattataattcccacttatgttagctatgatttagggccaaaactcccctggttttgtcttgcaacttgaaacattgggtattttaaactatataatttgggaacctttttttatagactgtggataacccaaaataagatttgtgatttttaatgcttcatttgggtaaaatcctttgtatattctatttatagtatgccttttttagctcattaaaagtccagaaaacccccca

SEQ ID NO: 683358 - DNA, 153 bp, Homo sapiens
tttttttatatctctagttgtatttttatacctccccagtttattttgaaatattaatgattttgacatatatctcacattcacacagagattacctacacatctgcctatcacatatataaaatgctgatgaggagtactcatcacactatt

SEQ ID NO: 683359 - DNA, 349 bp, Homo sapiens
  misc_feature (55)..(55): n is a, c, g, or t
cttcaggaacaacaagcaattattcctactttccaagttattttgtttccatggnggctcatacctataatctgagtactttgggaggctgaggtggactgatcacttgagcccaggagtttgagaccagcctgggcaacatagcaagactccatctctacaaaaaaagacaaaatttagctgagcgtggtggcgtgttcctgtagtcccagctacttgggaggctgaagtgagtggatcccctgagcccagagaggtcaaggttgtgatgagctgtgatcacaccactgcacttcagcatgggagacagagtgagaccctgtttcagaaaaaataaataaataaaacc

SEQ ID NO: 683360 - DNA, 194 bp, Homo sapiens
aagaagagggtggccatgcagcttaagtagagatcggacaaggaaacaacttgtgagagcagcacgccgtcgtgggcgaacgatcacaattacaatgcagtaaagacagaaaagactgctgctcactcgccggcactgttgtataaatgtatgtatcacctaggggttgggctcctggacccctcctctttcga

SEQ ID NO: 683361 - DNA, 325 bp, Homo sapiens
gagagtcgcgtcctcgatgactcgctggggctggataacgagatggacttgtccttgcgcctcttagactgtgtgaccacgatgttcatggtggcaagaagcacttctgagaggttgtgcctaatttcatcactgaaatttctgaaggcagccactctctcttccacactattacctgactcaggggcaccagctacaagcgctcaatgataatcaaagctctatcaatataaccactataatactacgtaaaaaaaggtaatacaagtccaaaagaaagatagaacgtggagtccaacaaaatttatttagcgcttatacctaa

SEQ ID NO: 683362 - DNA, 145 bp, Homo sapiens
cccaaacccactccaccttaccaccagacaaccttagccaaaccatttacccaaataaagtatagggcgatagaatttgaaaccctggcgcaatagatataggtcccgcaagggaaaggatgaaaaattttaaccaagcttaata

SEQ ID NO: 683363 - DNA, 923 bp, Homo sapiens
gctcaacagcggctgcaaaccctggatctacatgctgtgcacggtccacctcttccacgaactaccgtgcagacgcttcctgtgctgctccgccagactacctggaagggcagacgcctgggagagacgagtgccagcaaaaagagcaaaatcgtcctcctttgtcctgagtccatcgcagttccagccataggcagctgctcgccaggcctagtcctgcgggcgtggaccccaccgagccagggcctagggtgtgcagcctgaggctctaggctgctgcgtggcgatatagtggcgtcgtgctcctagtgctgatgcggggtatgtttcgtgtatcaggtacctatcatgtttgtatccctccactccttggggtggcttcggtgccggtggcgatgtggcctcctagtgcttggacagacttgataggtgggactcaagatcctcgagagcatcatcggcttgggcttccgtacagggtacgtacgtacactacctcgtgtatccacgtgcgtagccctgtggcatggagagtggcttgtgttttctcctggacttgtaaatttcactccagtatatttttacttcttcattctgggatattgtgaaaagcggtaaatataggattggtggaccaattggcgtcaggacagtccaagtgttctggactttgagggtaaagcaggtgggagtaggggaccgtcagacttgggagccgcgttggtggctaagaattcctcctgaacttcacaagggtatttgcctttaaggcggaccaaatgcgggggcctcgggggcccgcctgtagaaggatgcctacagatggggatacctgtaagccatgggccggggggcttattaactggtaaatgtccacccatgtaacgttgcaccccctctcttcctttctcgaggccttctaa

SEQ ID NO: 683364 - DNA, 947 bp, Homo sapiens
ccggggccacttcgtgcaaatggggttcacggggggccaaaacccagagcaatggccctggtgtgttgggagcgccgcgaaccgtgtcaggcgagagtgtccacgggtactctctctgctggggggatgactccgcgtccgtggaaggtgccccgggtaaattctcgggaaagacggtgagctccacggtttcgcctgatttgccccccaagggttcaacatgaagccactcgttgttggaagaaagggccagggaattgtgtcccccccttcaaagtgccagcaggcttacaaaggcatgctgtagacccactgatatcgcgtgttaactccgcgtcataaaactctgtccacactccgaggactgcctttggaaaatttgtaaaggggtgaagatatcccacatgacccatgtgaatacatagaataacatcttatcgcccacataccccaccgtgccacggaaattgtgtttgagggtgcccacacattcgagatttgggcccacccagacaccaacagccttctggggttgaaacggcatggctgatgttcatatgccgagttctcacggacccccacgtataactcggtttctcgggaagatgttcccacttaggaacagtttttcacgcaggacaggtccggggcccgcgtgtggctcaccgacctgtaagtcccagcaccttcgcggaggccccaaggtgggcgcgatcaccacacggtgaacgagatggagacccctgctggcccaccatggtgaaaccccgtctctatcttaaaataccaaaattagtctgggcactggtggtgcaatgcctgtagtcccacgctatttaggacggcacgaggcacgaatagcttgaacccgggaagtggaggttgcagtgacgccgagatcatgccccatgcactccagcctgggagaccgagtgagactcttccca

SEQ ID NO: 683365 - DNA, 105 bp, Homo sapiens
  misc_feature (43)..(43): n is a, c, g, or t
  misc_feature (65)..(65): n is a, c, g, or t
  misc_feature (87)..(87): n is a, c, g, or t
atatggtcactaccctaatagactaaatgaaatcttgcaattncaaattactctttctccatatnagatttacccacagctatattnctgtttaagtactagggt

SEQ ID NO: 683366 - DNA, 127 bp, Homo sapiens
gatttgctggtgcagtacaactaggcttaatagggacatgggcaacagagcgagactccgctcaaaaacaaacaaacaaacaaacaaacaaacaaacaaacaaaaacttaagagactgattcagggt

SEQ ID NO: 683367 - DNA, 184 bp, Homo sapiens
  misc_feature (15)..(15): n is a, c, g, or t
aacgatggtcctcangctgactttgataagggccgggcgcggtggctcatgccttgtaatcccagcactttgggaagctgaggcaggtgaatcacctgaggtcaggagtttgagaccagactgaccaacttggtgagaccctgtctctactaaaaatacaaaaattagctgaggaccatcgttg

SEQ ID NO: 683368 - DNA, 841 bp, Homo sapiens
tccaaataaacgcttaccctttcctttagagtatctttgttctctgtctctctcggcacgtcaaagacgtagatcgcgtagtgtaagtgtgtaaggccattcttctgcgagagtccacaaggctagtgaagagcagcgcatgtgttgcagaatggcagtttccatgagatttctagccgagaccactagaaggagttcctggaagaccctgcggtagctagcactgaagactatttttctattggtagtacgccgaccatctgaatggggaaagggaaagtcaaattaatttttctcgttagacataaggaaatttaaggaaaaacaggtttaagaacagttactcagcgtagatgtgtgttcacatcaaattgctctgcattcagtgttcattgtgaattgggagtgtgagtctttctgtagggtagaaagaagcctcctacccagcaaatccagtagagccaaaagttgaacaaaaactgatgacagacaacaagcatgaagatggcatatttgatgtcactttggttctttttcccagaaggcttatacagtgactcagtcgggaaagctttccagcttccagcccttgaatgtgaaagtgtccattggcatgtctggcagtagtctctcattcactcctcaataaacaacatttgaataccaaagagggttgtgttaaaaactcagtactggtctggcttggattcatttcatgttttcaatattacgcaatgatcctaatatttttaaagtaatagcaatcagtaatagctgaggggttttcccctaatatattcctggtgccattcagaatttagcatcgagttttaccttttca

SEQ ID NO: 683369 - DNA, 225 bp, Homo sapiens
atactgggccggacactgggcatgtagcccttgttggacgaacgaagaaggacattttagaatgtgaccagagggacagatccagccaatagctattatttgataacggaacccaaggccctgggaggctagacaaggctagcccttagattacatggctagctgagagcagattaggagccaacgttgtttgctcatgtaccatcacacctgcagatgtcagac

SEQ ID NO: 683370 - DNA, 172 bp, Homo sapiens
tagcggaccacgccggtatgtcccaagcttatcatcacctttttatgtcgtttcctagaggattcaaaagcttcatcactatcattatcttcatctgaactgatctcagcatatttgggcttttcattaactgtgctacgcttgcgttggttcattttcacacataaccgag

SEQ ID NO: 683371 - DNA, 406 bp, Homo sapiens
acagaggatccgactagtccaacatacctcatgttaagtctctaacactacacaccataaaaatctccccctcaccttgacgccatctagcttgttcactcccttctccagcagccttatagagttatccgtttgaatatcttatttatttttccaaccactgcaaattctttactagcctttccatcaaaattgtgttccctttgattattttattcttcagttatttattttgtttccccttggttactgtatttgtttcacattatagatgtacaagtatatttgttatctacattttactaatctgtaaatgacaactgcacatgaaattcaataaaccggtttgaaataaggaagtacttacagggtaatgtacaacgcgaactaattttcaacgatcttg

SEQ ID NO: 683372 - DNA, 293 bp, Homo sapiens
gcttatgtacgcaagctggaacagcggtgtgtatacgatcagggggtcatgctagccgaggcatgtatcccatgccctgactgaagtacttgaaggcctcagcgagcttgcgctggctggagatctgcgggaggccgccacagtccgccatcttgaggagagtggtctttgttgggtccaattttgagttgcactccaccacggcatccactgcaggcgagctgtccccaaccaccaacagagcagggcactgcagggtgactgtttggggtccgggcattggtccgtcaatc

SEQ ID NO: 683373 - DNA, 824 bp, Homo sapiens
  misc_feature (140)..(140): n is a, c, g, or t
  misc_feature (142)..(142): n is a, c, g, or t
  misc_feature (157)..(157): n is a, c, g, or t
  misc_feature (228)..(228): n is a, c, g, or t
  misc_feature (324)..(324): n is a, c, g, or t
  misc_feature (326)..(326): n is a, c, g, or t
  misc_feature (338)..(338): n is a, c, g, or t
  misc_feature (341)..(341): n is a, c, g, or t
  misc_feature (345)..(345): n is a, c, g, or t
  misc_feature (349)..(349): n is a, c, g, or t
  misc_feature (365)..(365): n is a, c, g, or t
  misc_feature (432)..(432): n is a, c, g, or t
  misc_feature (439)..(439): n is a, c, g, or t
  misc_feature (444)..(444): n is a, c, g, or t
  misc_feature (453)..(453): n is a, c, g, or t
  misc_feature (455)..(455): n is a, c, g, or t
cccagccgaaacggctgctggggcaagaaacttcttgttagaactttccacctccggcttccccctccacctctttaccgtcccaaccttaggagacgctttttctcccccagaggagaatttatcttttttttttttgntntttcctttttctcancccggtgctttgcattggggaagaggtgatttcaagagttggccaggtgggacgcctctctcctccttatncggttataccatatctattggtccgggggtgtttttaaatccctgtattgctcggcccggggagttatcgcccccgtgcccggctccgcggcgcgnanggatgtttgtgnaancggntggngcgcgctggtgatgtnccctctacagatgaccaatctggggggtgaaagcagccgtcggacgggtgctgcccgccaagcttgngggaccntgtcngcgggaaangntcctcatcaccggcggcgggacgaggcatcgggcgtcagctcgcccgacgagtccgcggagcgcggcgccagaaagatggtcctcgggggccgaactgaaaaatgcctgaaggagacaacggacggacatccggacaaatgggcacctgagtgccataactaacatctgtagatgtgggcaaccgcggagaaggttgtaccagaaggccaaggcgcgccgggcaaaagcgtggggggacatcacgcaccctggggtcaaccaagagtccgccgtaggacccaggtggaaaagccgaagggaacagggaacgaggatgcccccctcaatggcccgacacactcacacccgtgggcagaccggcaccacaa

SEQ ID NO: 683374 - DNA, 361 bp, Homo sapiens
tacaagcgtctcaaatatgccatactgtgtcactggtgtagagacagtgtgagatgtacgtaccaacaatgggtatcaccaaacgaagcagcaggtttagagtgtagctccctttgtggggcttcagtttattttggcctgcatttatttcctgtggattcctgccatacagttttaacaaggttgtcactcacaatacttgtcacctcactcgcagggtgagcacctgaccctggcctcctaatcataattcaggctaatgctggagtccaagagaagggccttgtgaccaggcaaggccaattagaatctttccctaggactgatgtataaaagctggggggaaaatgctttctctttc

SEQ ID NO: 683375 - DNA, 762 bp, Homo sapiens
  misc_feature (13)..(13): n is a, c, g, or t
ccattatggccgnggcaactggtattaagtgttaatattggactatgtagaaattttatctacatttaaatcctaggatctacacctcataaagttattgaattattacccccactttacagacggaaaactgaatattaatggcagcgattcaaatctacacaatctagatgaaaagttctagaacaacattgccactgactgattaaaaagtcaactgaaggaaaagccagtgagaaacaaggcaatcaattactgtacagtatttagctttggatatgttaattctgagatccctattagacctccaagatattgggagaaatttgccagagatatggcgactggagatacaaatgcgagagccaggtacttaaagccactggacttaacagaggagaatacacagggagtggctactaataaagacgctgcaggactgactgagccctgcgagccttccaacatttacaggcagggacgacacggaagattggcgctgacggcgaaagccagcgacggaccgcgccccgacatacgtatgaggacactaatggcccagcccccgtgctggccaacatgcgaaaccccgctcttatcaaaccccacataaccgggctggcgcggctccctgccccgtttttgcacccctcccccacaactgtcaacccggccaagcgcctctccgtcgccagatcggcccttgcttgcctggccacacgccacgcttcctctcacaccccccccgtccccggcgccccc

SEQ ID NO: 683376 - DNA, 992 bp, Homo sapiens
gacccacgcgtccgcattatgtagacaaggtttatcttgaactcacagaaagagttctgcctcaccagtgctgggattaaagggatgtgtcaggagctggagagatggcttagcagttaagagcactgactgctcttccagacagaagtcctgagttcaattcccagcaaccacatggtggctcacaaccatctgtaatgggatctgatgccctcttctggtgtgtctgaagagagcaacagtgtactcatatacataaatcttttttaaaaatttaaaaggctaaacaagccatggggagcaagctagtaagcagcaccctccatgtcctctgcatcagctcctgcctccaggttcctgcctagcttccctcaatgggttgtgatgcacagtatgtaaactgaataaaccctttcctctccaaaaaaaaaaaaaaaaaaaaaaaaaacaaaaacaaaaaagacgaaaaacaaaaaaagaaacaaaaaaaaaaggaaggggggggagcatagaaaatacccccggagggggccccggaattgaagtcgcccctttttttgtgaaagagggccccccaacggggactactataaaagaccaggagcgcgagggcagctgaaacaccgggcgggagggaagacaggcagcggggaacttggggaagaaccccacttgcgggcggcggtggcaactagggcggacaccacccacccaagagtaatgagggccccgggtacaaaaaacactggggtcgtaggcgggtggaacccccggacattgtgcggcgagcgagaaactttggttccctgttctctttttaatattgccccgtcgtgcactaaaaaaccatggagaagagaacacgagaccccagcagagacgacgatcggacgaaggacaagcgatcatacaaaacaaaacacaacgcaagagacacagcagaacaagacagcagcgcacgaacacgacacaacacacacattgaagcaaga

SEQ ID NO: 683377 - DNA, 1599 bp, Homo sapiens
  misc_feature (630)..(630): n is a, c, g, or t
  misc_feature (745)..(745): n is a, c, g, or t
  misc_feature (1052)..(1052): n is a, c, g, or t
gggacagtgtcagctcccgccgtatcctgagagggatcggcccgattggccacgctcctttcaataccgacgcacgttacccccgagagacaagggacgaaagcctcaggatccccaaagcagagcgcgtcccgtcgcccagagagcccggcgtggaaatcccgccgtgtacgccgcggctgcgggaggagaggccggtcccctacacaaggatggtgttgtcctgcgccgggatcattgtgctcatatcacgacgggtactcatggccttccggcgcccaaatagcatggcgagtaaggcagcctgcggtccacgggtggtcttccaggggtgttgcacgattggaccacgtacaaatcggagacctcacttgtgctgcttctcttgtgcgtgggctctccgagacggcggacgtcgcctcgctcggggcacgacattacaccgggacccaggtcgcccgactgggcgccttcggctccgtacacaagtcgcgcggtgagagaccaaagagataggagctagaaaggctgctagagggctgggtgtggctcgccgacgagggggcggcattgctcatagtgggggcgctcggctgacacggccagcgggccggggattggcgatagaancgttctcgcggtgacccggggcctctgtacccgcggacgttcgaagcgaattcccccgtggctcgtggtcctttttctggcaaacccactagagggtgttgccattccgtatggngcggaaagcgccaggacaagtgcggttgtacacgccatccagtgtaaaacaaagctttctccgttggatctttcgttgcgcagggggtatatatgtggccatcccattctccatctgtgctttgtgcgccctttctcccacggtggaactgatcgtgacaaaggtcgtgattggggcctagttgcccccttaaaaagctcctgtggcagggaatttgccacaattgcacctaattccttccttccacgcccccccgtgggtggggaacctttggtctgagaaggccattttaatgggcacaaggggncccaagaagggcacagcaaactcctttggcgtgtgggcagttattctcttagctgttggggggggcttcacatccccggggcgtatgatatcccttgagaattgcgacacgaggacaactggggtgcgcgcccaacctttggaatgcgccgttgcgcacagaccggaagcgttcttacaaagtcatttaattcctcccaacaaagttttcaccaagccaccgggcgcttgtgtgggaacagcacagcggagcctgtaatagccctgtggcgtcacataggagggaaacacccccaagagggcgttgtttcccacgacagcagtcttgttgaaccaatctgttttttagaccgtgccagagagagatcttcgcccgcgcagcacttgctggactacacgacaactcgttggtgttaccatgcgcacgatgagtacagtggtgttcctccttgaaaaaacagcgcaagcgttatgtgtaccacctcattgttgcttgtttagtgttcctcacatcggggacaggacaacagttctctgtcatgtagcgt

SEQ ID NO: 683378 - DNA, 149 bp, Homo sapiens
atacagcggtatatataaaagtatcccgagtatacttaaatatttccagacatttgcctaatgcttgagatccagaatgaagagagtgtggtgctttttctaggtcgcgtggactgtgacagagatcactcgctcgctggtgtatactg

SEQ ID NO: 683379 - DNA, 706 bp, Homo sapiens
ccacatccattagttttacatccttggcattaaagatcctaaggagaaattggtattcctgtctggaaaaacttgctgttgcttaatttatttaaaagtaagttatttttaaataaatatgaaaccccatctctactaaaaatacaaaaaattagctgggtctggtgatgggtgcctgtaatcccagctactcgggaggctgaggcaggagaattgcttgaacctgggaggaggaggttgcagtgagctgaaaatggttgcaatggattcaagccggggcaacaaaatgtgaaatctcgtgtctcataaatatatatactcatatgtagtgtatgtatgtatgtatgtatgtatgtatgtatgtatctatctatctatctatctatgtatctccatatatacatatagagagagatatatagagatctatatagagatagatatatagagatctatatagagatatagagatatatatagatatctatatagagagatatctatatatctatatagatatctatatgatatctagtatatatgtatatagatatgtagatatatatgagagagagagactggagaacatatatatcaaacaggtgcatgtataaccttcgggaataggtgggaggatgaagatgatattatgtgatcgtattggtgaatggagttcgataaataaacaaatggagagaacttctaa

SEQ ID NO: 683380 - DNA, 201 bp, Homo sapiens
cctaatcacaaatgtagtcagataggtggtgatcatacatcatgtctgagtatgtcacaggtgaaaggtgaaaaggggagaagagtgctgtacctgtcccagtggcagaaccagcctttaggagtggcgtttatttcatactagtattagttgttctgctgcatcctgaagttttcgtttacggtacgacattgtgattca

SEQ ID NO: 683381 - DNA, 496 bp, Homo sapiens
gcatcaccgcgtccgcggacgattggaactatctcatcgacatctggatcccccaaccccacattggacattgagcctaagaacctggctttcctacacaccagctgtgataggcatgacctccccatctcacgtcaatgctctccttgtgttttggggagtgcactatcgaaagtccccagtggcccacgggtcactgccccagattgtggcttcctcattatacttgcgactcttcccacaggaaagaaacacccctctcacatgctccaatgactccccttgtccatcccttttccctgttttgaacggaccccagggcgaacaggcctgttcatccacaacctcacagctgagggccctcctgcagttcttcacaggagagagaaaggaaggcgcacctgcccagcccggccaagaaaacaaaactctctcccatgggtgcgggaggctgctgcctgcctgctgagcagctcagggcagatgtcgctatggg

SEQ ID NO: 683382 - DNA, 379 bp, Homo sapiens
ccccgactacatacttccgtataaaaggcctgcctatgaaaattacggtggcttttacatcggacccctaagcattcggggaaataaaggtaagaaccctcaatagggagttcctctgagcttaatacatttttataaaatactagatggcgaagggcatgacttcaaatacagcggaaaattaataggggaggtttcccttatgaatgcttaaaagatttgggggaaggggaaggctctatatcctttccttccctagcatgtaagggcaggataaatacttcaggcctggctggtcattaataaagggggggtgaaatccagatttcaaataatcttcgaggcttgatccccagttctgcggagatcatttttttta

SEQ ID NO: 683383 - DNA, 198 bp, Homo sapiens
cccgggggggggggggtttggcccccccccccccccaaaaaggctttttctttttcccgggggaaagtggggggggggggggggccccccccccccccggtttttttttttgggggggggggtttgggggggccccccttttttttttttcccgggccccccggggggtttttggcccccccccccccctggggggga

SEQ ID NO: 683384 - DNA, 345 bp, Homo sapiens
agagaagcctgttggaaatagccttggctgtaaagcttgcaaggacttgggctgagacatataacccactggcgaagactgatttcttccaactctcttagcctggtctactgtacttgactcgggaggtgtctgaagagaagtgggtataaactgcatgtcactaatttgattgtttgccaaatgataaggctcttgagcatttacagtaatgtttaagttagcttcagaaggtgtactcttagccacatccattgttaattgtgggcctgatgaaaaaggctgctcttccaaaccatagttgctttcttggtgcaagacgtgtgtaaagcttacttccggatg

SEQ ID NO: 683385 - DNA, 182 bp, Homo sapiens
gtagtccaacttgctctattgttagtaacctttaaactataagcgagtttagtaacatcccgcgaggcagattttaaactatgatacagtttctatctagtgccactgtgtatacgtgtgtttacaaacatggcctggagtactaggtttcttcatcatcagctgaacacatgatgctgtcc

SEQ ID NO: 683386 - DNA, 1021 bp, Homo sapiens
  misc_feature (169)..(169): n is a, c, g, or t
  misc_feature (204)..(204): n is a, c, g, or t
  misc_feature (209)..(209): n is a, c, g, or t
  misc_feature (213)..(213): n is a, c, g, or t
  misc_feature (225)..(226): n is a, c, g, or t
  misc_feature (228)..(228): n is a, c, g, or t
  misc_feature (230)..(230): n is a, c, g, or t
cggagatctcggccgccaagctccgcctcccgccccgggctgtgccccggggctcgcctgaggccgaccacccgcaccccacctctagcggctttgctcgaggcccaccttcttcccacccccggcaaactccagtaggctcgccctcgctgactccccgccccgcgtnactgcaaggggccgccatagcagtccggggcggtngtcantgancggaactccccnncncncctcccgcggccctggggccgtaggaggccgcatgcgaaggaggtagacggggcgggggtgtcgcactagggtgtcccctagagaacgaggactctgaaggctgggacactagatgggcgacccccgggcaggggccaaggcccattaaaagcaggtcccactatcgtgtgccagaacaacatgaaacatggcgcatcattgaccgggcatcaatctctataatcctcagaagcatcccagggagctccacaggatccccaatatcctggggccatgagatgcagtttgaacagcacctgacccattgtcagattcccacggacatatcaagtatgagagatcacctgcaaaggtctgatccaccagaataaacggcaagctgctgcacaacgctccagaagggacttaatggcaatcgaccattaaagcgcagctggaaacaccactgccaagcttgaacactaggaagaccccctgactggaactaacatagcccaacgccaggacgccaatgaagatgatagcttagaagaaccgaaaaaccccaatgacttacattcaaatccagtaaacttggtgcaaatgggaaattaacggcaaacagaggtttgaactcttcatcgtatattactccatgaaaaagtccgtagagatccagaagaagcccaattaaaactttagataaacatcaccctacacaaaagaacaatatgagaaaacaccctagtaaagcaagacacactgcacaagcgcgcaaggcaatgacaaggaggcacaaaaccatccgcac

SEQ ID NO: 683387 - DNA, 431 bp, Homo sapiens
  misc_feature (57)..(57): n is a, c, g, or t
  misc_feature (428)..(429): n is a, c, g, or t
  misc_feature (431)..(431): n is a, c, g, or t
gcacccgcctttacctttgggaaacccccccgtgaattaaaggttattaaatataancccagtagtaatttaataccataataatacctaaataatccatagaaaattatttataggaataccccaacacctataggatggtgttatggagaggaaaggtgaaatgaaataaagacatttcctcaacattattgttcaatgtagtctaacatgtccaactgcatttttagttgaaaagagtttcatcataagcaaggaaaacccacggcaaatgagtactggagattcctttaaagattcttagaaccaggcagggcgcggtggctcacacctgtgatcccagcactttgggaggccgagatgggtggattgcttgagctcaggagtttaaaaccagcctaggcaacatgatgaaaccctgtttctanngn

SEQ ID NO: 683388 - DNA, 131 bp, Homo sapiens
gctagtgatgatatctgccatcgtgtaccaacttgacaaggttgaatagggcaaaaattgctcctattagcataggcagccagtgcagaacgctgacgtgttgtcgtctacagtgcgaatctaggggatcc

SEQ ID NO: 683389 - DNA, 346 bp, Homo sapiens
cccgaaaccaatgtttaaacccaagccgatctgttgtttgtaataagtaacccggggttttaaaacaaattaattttttagctttattgaagtttgtttttttccttccgaacttggggtttcattttttaaacaccagtttccccccagaatagcagtgccctttctttttgtacatattgattggccctttctttactgttacgtggacactttctatgttagttttgatgcataattctttgaatccttttatccaaactagaatgtttgtgtaagaatacctttccctgcaatgttgtaactacaaacttttttttaaataaatagaaaacttgttttttta

SEQ ID NO: 683390 - DNA, 112 bp, Homo sapiens
gatagtgatatagctgatgccggcactcggacggggagagataggagaaataggactgctgtgattaggacggatcacacgaagaggggcgtcaggtactgggttatggcag

SEQ ID NO: 683391 - DNA, 256 bp, Homo sapiens
ccctcaggctgatctctctatttcaggcgcccaaattcatgggattagagacttaatctaccactccgggacatcgtttcactgatgactcagggttccgctatattagaccggctggaatgcaatggtggagttgtacgtcactgcagactctaagtactgagaacaagcatagcctcttggctcagcctcccaacgtgctagcatctcaggcgtgagccactgcacctggcccgaaaccaagctttctcatccc

SEQ ID NO: 683392 - DNA, 123 bp, Homo sapiens
  misc_feature (17)..(17): n is a, c, g, or t
  misc_feature (51)..(51): n is a, c, g, or t
tctggaaaggggtgccngtggcgaagaagttctggacagcagcttcttggngtctggagaagactggattgttgagcgagatctgacagtcttagcgtggagccagaacgcaggcagctgaga

SEQ ID NO: 683393 - DNA, 633 bp, Homo sapiens
ggcaccaccattttcaattctcatgctgaggtcttttaacatgttctgcggagtgtgcgaacaaaagtttgtgtcctgagaatgtaagtcttttctccgctttaaaattgagtgggttcgtgaggtagctaaaatttagcgcccctggtcttgcatatttttttggagcgcagaacattgtgcttcatgtcataagtgattgggagctttggtaaagggaccccatagaaggagtcccctgcagtcttttgtttttttaaatacttagaacttagcacttgtgttattgatgagtcaggcgccagtgaggcacatccgggtatttggaaacaagtggtcattgttacattcatctgctgcacttagcaaaacggttcatcctggagcaggcacaggtgatgcattttcctggtgctggttctcagtgctctctttccaatattgatgtggttatgtttgggttgtacgggatgttaatcatccggaggatccttgatgttattacatatgggtggttagcgtttgagtgttcccaaagcctatacctttatcacccttctccagggaaaatattcaaagcatgaaatatgttgctttttccagaagacaaacagtaaagtcatgaaaaagaaa

SEQ ID NO: 683394 - DNA, 266 bp, Homo sapiens
  misc_feature (108)..(109): n is a, c, g, or t
gggggcccccccaaaaaaaaatgggggggggatttggggggggggggaaaaaaccggcctcccccccccccccccgtttggggggaaacccccccctttttagaaaannccccccaaggggaggaggggttgggggggccccccccccccccgggggggggggggtttttcaggggggttttttttttttttttttaaaaggttcccccggggggggggggggggttttttttttttgggggggaaaaaagtttttccccccccca

SEQ ID NO: 683395 - DNA, 175 bp, Homo sapiens
tctcattaaaaatatctagcagttagccaggcatggtggcatgtgcatgtagttgcatgtagtgccaccgacttaggaggcacaaccaccttagtctggaaggtcgaggtctcagtgaattgtgctcacaccactgcattggggcttgggtgatggagtgaaaccctgtttcaaa

SEQ ID NO: 683396 - DNA, 859 bp, Homo sapiens
gacagaggcagaggggtgggcgggctggcccatggtgagacctctctcccagagctggggggagaggacaaagccacgcttgcccagatcctggagctggaggagctcctgcgggcaagggaagtcttcttgcagccgtgtggacgaagttgtgcccaaccttttcataggagatgccagggggccaggcacagcctccctcctgtccccatggcttgccggcatcaagtgcccttcctgccctccccaggccacggaaaaaaacgcttttgagctgtggaagcttgggcatcacccacgtgctgaaggccgcccacaagggcttctatgttcaggcggcctgacttctacggcagcagtgttgagctacccgtggggttgccagccaagacctctctgattttgacaattcagtgcctactttctcctctgcggtgactttcatccaccgtgcctcaacaacgcctgggaaaacagcatcagttggtcgggagaaggcggttgaaagccaggagagaacgtgcccgtcaaaaagtgccacacgctggcccagatattccccacagatgcctccggtgcggaaggaggactccggggccccaagtccattgggcagccaggcattccctacagcggcatttggttcgtgagcgttgtgtggtccggcagtgccactgacatatcgttgaggttggcccactctctggggatgggtccggcggaggcactgtccgtgggtacccattgatgcgggggctccgggccaggcaatccggctgcggctgatcggcggacctctccggtttttggggttcgtggtcaccgcgggggccccgctgtttgcccgccattcgtcgtg

SEQ ID NO: 683397 - DNA, 566 bp, Homo sapiens
  misc_feature (94)..(94): n is a, c, g, or t
  misc_feature (141)..(141): n is a, c, g, or t
caaagaccaaccgcccccacacccccacagaccaaaagagagcgcaggccgtgcagcgccaacccaaccttgacatcacctcctgtaagatgcnaagcccctctccagcctcactccactgattgctgcagctaaggaggnaacaaagaacaatcactaaaaccacactcaccccagcctcattgtgccaagccttctgtgagataaatgcacatttcagaaattccaactcctgatgccctcttctccttgccttgcttctcccatttcctgatctagcactcctcaagactctgatccttggaaaccgtgtgtgcagcattgaagagaactgcaactgaatgactactcacatgatggccatttctaaataaggaacttcctcccaattcatggatatcacggcggttcatgactaacggcctatacaactaaatgcccctagccttccgtgtgtcaaaatcctaacctccttcataaccatctcccacaactaactcttgactctataaattcatggcctgatgatattacaacacaaaaaaaaatggcctctatggcctcac

SEQ ID NO: 683398 - DNA, 654 bp, Homo sapiens
aggtcgctgagagctgggaagaggcggcatacagcggggaaattccaaatcgtccgtcccaacagtgcccattgtgattcacggacgatagccttcccgtggggccccctccagcagatccgcatcctcaagaggacccacctagcaatggtgtggtcagtcagccccatactcctagccatgcatggtgccaccgcttccagatcaagtccctaacacagcgagaggccgaggtacgccgaggcccggaagcggatcctgggcagtcgcctaggccccgaggaggagcaggatgaatacccagtcgctcgatcgaggccaaggcagagatctccgcaaccgcgaagacagcaggcagcccaataatgtgactcagacagcctttgggggtcctgcatgggtctcaagggttcaaacagcgcatataaatgcagcgcaagaacacagatgccgccgctctgctgccgtcaccggctcctgggtcgtcctggcaccgggttgcgctgccgtggtagacatgctggcacttgatgcagagggaacgacctgacgttacttgtcgctgtggatccccctttgggtccgaccactgtgtccttgtaactcgcatgacatggtgatcttcgcccctttcttgcccttcctagtgtggtg

SEQ ID NO: 683399 - DNA, 712 bp, Homo sapiens
  misc_feature (10)..(10): n is a, c, g, or t
  misc_feature (12)..(12): n is a, c, g, or t
  misc_feature (29)..(29): n is a, c, g, or t
  misc_feature (49)..(49): n is a, c, g, or t
  misc_feature (170)..(170): n is a, c, g, or t
  misc_feature (205)..(205): n is a, c, g, or t
  misc_feature (226)..(226): n is a, c, g, or t
  misc_feature (239)..(239): n is a, c, g, or t
  misc_feature (241)..(241): n is a, c, g, or t
  misc_feature (253)..(253): n is a, c, g, or t
  misc_feature (265)..(266): n is a, c, g, or t
  misc_feature (317)..(317): n is a, c, g, or t
cttttctaananaaccaagcttttggttncttgaccaggtatgttccantggaaaatttgatgagttgtatctaattccgtgaaaatgccttggcctaatatgaaatttttgaaggaacttaagatatgtttttccaggttccttttgctttaagaatcccgtgccaaanccaaaacttaataaataacacatcgtgaattaagnggtatggaaaagggtttttcngtttacgggaatncnctgttaggttcnttctcttggtgnncaggaatatggattgacctgtcttttcttaagttgtttaggtgaatggttnatgataataatctatctaagataattcacaaatggcaagcaaatacctcatttaatagctgtctacctgtacatttatgggttggacatgtggatttttacaagcaaatagtgaagtagaggtgaggtggaagaagcatggactttggccccccagatttaggttgaagttgccatttcctcactgtgcgacctggaatagttatgtaacctcattagcctgtttccaagtctataaaatgggaatgatagctgggtgtggtggggggcacctgtaataccagctactcgggaggctgagggaggagaatcgcttgaacccaggaggtggaggttgcagtgcgccgagatggcgccactgcactccagcctgggtgacaagagcaaaactccttc

SEQ ID NO: 683400 - DNA, 538 bp, Homo sapiens
  misc_feature (302)..(302): n is a, c, g, or t
  misc_feature (411)..(411): n is a, c, g, or t
  misc_feature (538)..(538): n is a, c, g, or t
agggtattattatgtacccctggctgcttgtaacttgctatgttgactaaatgacctcagactcagagatctacctgcctctgcctcttgagtgttgccattaaaggtgggtaccatcatacctagcttctcggcaggtctctctctttcttaaaggtttgttttgtattttttttacaattttatgtaagtgtatgtgcctatgtgtgggtatgtgcacttgagtgtagataggaactacctgatgtgggtggtgggacctgaatttgggtcttctgtcatctctctagaccttaggctangctataaaatactctcagacacagagcagaacttcaaagagtatcagtcattgggtccttgccaggtgtggtggcacacacctataatctcaggatttgggaaactganggcaggagaacaattgagtttggggcagcacagactatactgggagaccatgtctcaaacacacaaggctggcagaacagctgagagaaggtgcttgcctcaagcacatagtggaaagagaaatagn

SEQ ID NO: 683401 - DNA, 260 bp, Homo sapiens
aaccagccttgattaaccaggcctggcagattcctggcactatccagctgacagctcgatcatgaattcctggggctggcgctggctgatgaacaactgcgggccacgcggctccgaacggacttcggccaggtagccgcgcacgcggtcaccagcgcgcagcacgtcgcgcggaaggcccttgtacttcggtaatgaagccttcggcgtttgcccaccgaggtacgacatagatgttagccgcgctctggcgcgctatg

SEQ ID NO: 683402 - DNA, 697 bp, Homo sapiens
  misc_feature (155)..(155): n is a, c, g, or t
  misc_feature (190)..(190): n is a, c, g, or t
  misc_feature (211)..(211): n is a, c, g, or t
  misc_feature (224)..(224): n is a, c, g, or t
  misc_feature (226)..(226): n is a, c, g, or t
  misc_feature (238)..(238): n is a, c, g, or t
  misc_feature (250)..(251): n is a, c, g, or t
  misc_feature (302)..(302): n is a, c, g, or t
cgctttgggttttgtgccaaaaatatgtccctgtgaaaattaatatgaggggtatcattccctggaaaatcccttgtgctaaaattgaaaattttaaaagaatctgagattttttaattccaggttccttttgctttaagaatcccgtgccaaanccaaaacttaataaataacacatcgtgaattaagnggtatggaaaagggtttttcngtttacgggaatncnctgttaggttcnttctcttggtgnncaggaatatggattgacctgtcttttcttaagttgtttaggtgaatggttnatgataataatctatctaagataattcacaaatggcaagcaaatacctcatttaatagctgtctacctgtacatttatgggttggacatgtggatttttacaagcaaatagtgaagtagaggtgaggtggaagaagcatggactttggccccccagatttaggttgaagttgccatttcctcactgtgcgacctggaatagttatgtaacctcattagcctgtttccaagtctataaaatgggaatgatagctgggtgtggtggggggcacctgtaataccagctactcgggaggctgagggaggagaatcgcttgaacccaggaggtggaggttgcagtgcgccgagatggcgccactgcactccagcctgggtgacaagagcaaaactccttc

SEQ ID NO: 683403 - DNA, 119 bp, Homo sapiens
  misc_feature (37)..(37): n is a, c, g, or t
  misc_feature (80)..(80): n is a, c, g, or t
cactcctgaaaaattttatcaaaagttactggaactngaaaaacacattagggccactattcaaaaaacagataattcangccaggctcactccctcatccctataattccaccacttt

SEQ ID NO: 683404 - DNA, 81 bp, Homo sapiens
gcggccgcctactactactactactgctcgaattcaagcttctaacgatgtacggggacatgctcacttcttaaaagtcat

SEQ ID NO: 683405 - DNA, 262 bp, Homo sapiens
ctgcacaaactcagtgctggcaagggtatgaaaatacttaggatttaatgcctacttttaggatcaaaagcgctactggagcacagtggatatacctgtaatcccaagcctttgggaggccgagggaggaggattgcttgaggccaggagttcaagatcagactaggcaacatagcaacaccctgtctctacaaacaattaagaaataattagctggctgtggtgctgtgcacagtgtatacaggaagctgaggtgggtgga

SEQ ID NO: 683406 - DNA, 1027 bp, Homo sapiens
ctgcgatcctcttacctctctacatctttctcttctgcccttcttttggaagaaggggtttcaaaaccagtttagtttccaaaaagtgtacatttgtggggggggggggtcataatttgaaagcgaaaatgtgtatgtgtgtgtgatggtaaaatgtagtgagattatatcatcatatattttaaaatgccagtacatctttgtatcagtctgtacatgggtcatatagactgttatcagattattacagatgtacttgaggcatctgaaactgcaaaaaagacaactcattaaatgtgatacttcttactacacaggcctgactgctagtagatgtgtaactaaccccattccccaactagtcttcccatccttataccaactttggaggaaaactccccagtaaagcccccatgacctgcaggctgtgtacctggacaggtgtgaagagggaagacaatggccaagtaacagggagggacagagaaagtaaacgagtctacaccatgaggtacagacacacacgggaacctgagagacaacgtaggaacaaccataaagcaaacaacccagaatacacagaccacctaccaggatgaaactgaacagcaggataaggcaaaaaacaaaaataacgtagaacataagaacttgccgcaatatgagtgtgggagacgcaaaaaaaagaagaaaaggataccgcccggggataacacatcaagacaggacacacagacgatgggacggcagaagggaggaaccatgaggcacggagatagaccacgagatcaacaaggagaaacaaagacacaaagaaagaaaaaagcaggaatgaggaagagcaagaaacaaaacagagaggaagaaaagaacataacagagggaaagcgaaacagaagacatcagcaaggcgaaatacacagacaaaacagaaagaaaagaagaagagaaagaagatagagaggaaaaggaacaagagaaaaaagaacaaagaaaagcaaaagaagaacgacacctccagtctcgc

SEQ ID NO: 683407 - DNA, 243 bp, Homo sapiens
agaggacttcctgcatgtaccgggggggagtgggtctcataaggttgtatgatgagaagcgcaaggtacttgttttgttttttttttggagacaatgtcttgctctgtcgatcaggctggagtgcagtggcgtcatctcagctcgctacaacctccacctcctgggtttaagtgattctctggcctcagcctcctgagtagctgagattacaggcacgcgccaccacgcccggtacatgcaag

SEQ ID NO: 683408 - DNA, 305 bp, Homo sapiens
  misc_feature (5)..(5): n is a, c, g, or t
  misc_feature (180)..(180): n is a, c, g, or t
ctagnttttagaagttcaatagcacacacacacgtattcctgtatctttttttttttaagggggctagacaaattctaacagagcggtaacactacacacttctttttctaaggacgggtcatcaggcatggcttggcgggccattccccaagccctcggtccaggggagagctcccggnaattccccaccccccacctcagcctccctcacacaccacggcaccgggctacaaagcttctcgggttatccgggggcagctgagatggagacccaaggccggctatggaaccttctaaaactagg

SEQ ID NO: 683409 - DNA, 444 bp, Homo sapiens
  misc_feature (245)..(245): n is a, c, g, or t
  misc_feature (284)..(284): n is a, c, g, or t
  misc_feature (317)..(317): n is a, c, g, or t
  misc_feature (352)..(352): n is a, c, g, or t
  misc_feature (362)..(362): n is a, c, g, or t
  misc_feature (394)..(394): n is a, c, g, or t
  misc_feature (408)..(408): n is a, c, g, or t
  misc_feature (435)..(435): n is a, c, g, or t
atctagaggatcccggacgagcatcctttacacacggcttacacttcagggtaaaaaggtcaggccggattatctaaaagctattgggaaggtaatcaacggggagaatgtaactgaaagatacagggctggcaaaaagtaaaccacgatcgttatgctgagtatgttaagctctttatgacggttttggtagtggtatagagtactgcagaatacagtaagcggctctatgtgcatttctggangtggcttagtcacttatttcataaacaacttaaggttcngaataatttcttactaaacatttggttatgggncaagtgatggaaaatagtaaatgcttggtgtgatngaatctgatnggacattttcttcagagagctaaattacaatngtcatttataaaancatcaaaaatattccatccatatactngggggactg

SEQ ID NO: 683410 - DNA, 389 bp, Homo sapiens
  misc_feature (50)..(50): n is a, c, g, or t
cccatctggcgaggcagtctcagactccttgccttaagcagtcctcctcnctagcctcctaaagtgctgggattacaggcgtgatgcattacatccaagtgaaactccttgagatggttacataatgtctaaatctgctggtgtagaagttaataaagtgtagaactgaataaatattaaatattagatcaagtttctcatgtttatcttaacgtataacgatttatcttaaagcactgattttcacaaaataacatcagtgtgaaattggaaaagaagccaaatattttatttcacgtatctgggaaatgaggtgctttagtcaactgaatctgcccaaaactaaaaaggattaattaaaaagtacttaactcagaaattataaaaat

SEQ ID NO: 683411 - DNA, 296 bp, Homo sapiens
tactactactaaattggcggccggtcgacggtgtgtgtgtggagtatgcggtgtgtgtggagtgtgtgatgtgtggtgtgtgtggagtgtgtgattggtgtgtgtggagctgtggactgtgtggagtctatggtgtgtggagtgtgtgtggtgtgtggagtgtgtggtgtgtgtggagtatgtggtgtgtgtgtggagtgtgtggtgtgtgtgtggattgtgtggtgtgtgtggagtgtgtggtgtgtggtgtgtgtgtggagtgtgtgtgtgtgtgtgtggtcgacgcggccgca

SEQ ID NO: 683412 - DNA, 114 bp, Homo sapiens
atcgaatgccatcccaaggctcttcagctcgcagagcactctatctacattttttcgcttctcttgcccatatagttatattgcgtctgtataatctaaatgacgggaaaataa

SEQ ID NO: 683413 - DNA, 809 bp, Homo sapiens
  misc_feature (43)..(43): n is a, c, g, or t
  misc_feature (67)..(67): n is a, c, g, or t
  misc_feature (427)..(428): n is a, c, g, or t
  misc_feature (700)..(703): n is a, c, g, or t
tatagatgtacaaagcttaattcatcgcagaagtctgtctgtngacaatacacacggagactaggangtgatccgggaggctgaagagcttgtcaaggtcacagacccacagttttgggcccggtagggtccaagctctttcctggacatctgcaggcaatgtcgacaccccctccattgtctgtggcgggcaaaggatgtttcttcacccccaaacctttccatcctgtgctaaaagtgtccctcaacctgtttcctgagaggcccaagggctttggggttggtactttttctttctctttaaataaaacagaataaaagacagggccttgttggcctcatctgatggaactctgagggcccttccctttaattgaagggtaattcatgatcctaggtcacttgactcggtgggctcgggcgcgcnngtgcggccagcgggatcagcctcacctaaaggccgtaataacgctttttccaaaaataatgtggttatcctcagaaataacatgttgaacaaaaagccctctaagcgcgcaggaaccctaacaaggccgcgctgcttgccattgttccataaggtcccccccctctgacgagcgatacagaaatgggacgcctcaagtcccaggggggggaacaccccgccaggagcttaaaagaaatcaagcgagtttcccccttggaaaagctgcctttnnnnagctcttcatgtttcgtacccttgccggtttacagagaaacgtgtagccactttatgttcctttaaggaaaaagggccgcgcctttgttctattaactaacgcgtg

SEQ ID NO: 683414 - DNA, 1100 bp, Homo sapiens
gggtcaatgtcgcgcctaaccctcatctgctgctctcggcgagccctggtcctgaccgtagactgggcctgctcccactctatgaaggtatttcgacaccgtcgtgtcccggcccggctcgggacgccccgcttcatctcagtgggctacgtggacgacacgcagttcgtgcggttcgtcggcgatccgcctcccacgtccggaagaaggttgagccccgtgcgccgtggctgtgagcagtcagggtgccgtgagatagttgtgtcatcccgtgtggacaccactagagtactaagcgccatcgcacaagtgcattgagccgaagctgtacactgtgcgggacatctgtcacgggatacatagctaccgagagactaagtgacgggtctcacaccctccactggatgttggctgcgacctttggcccgatgggtgcctcttccgcagttatgagcacgtccgcctactagcgggtaaagaatgaccactcggccctgatagggaggagctgtgctcctggacccgtccgtccgtacaccgggggtctcacgattcacccacgcggcagcgtgggagtacgtgccgtaacggcggaaggcaagtggaacgacgctatctgcattggcaacggtgcgtgacctggctccgctctatacctggagagcgtgatggctgacgctcgaggcgcggaactcccatcgacacctggtgacctcaccaatccgtctcttatcatgaaggccgcctagatggttctgcgcctgcggtttctaccctggcgagattggactgatctgacagggcgatgtgaagaaccattcttaagacccgagcttgctgagaccggcctctggagatgatcgttccaccagtgtgccgtgtagggggttcctttggcacatagcaggatcacgtgcatttcggcaggctcggttcaccctcttaagtgagctttcagcaaaacctattgcgtttataacagagacaaacacacgctaagggatgaaaatagaaaactgaacgagtaataaaagccaagaataagaaaaagagaaaaaaaaaacaagaaagaacagcatcatacatatatttaagaaagg

SEQ ID NO: 683415 - DNA, 327 bp, Homo sapiens
  misc_feature (6)..(6): n is a, c, g, or t
cagttntgcttcactttccttctcttccatttataaatggcaaacacaaagtagtaacttgctcagagaatgtcttactgcaacattcaaactgatgggaaggcaggcccagtgtggtagattataaaagcctccttgaatctgggctatgtgagagagcccagccaagatcagcaaagccagccctcagtcaacccacaactaaacataggaacataagtgagcccttgtaaagaatggctaagttcagacaaaaccattaagaactgcccagtcaacatgcagactcagtgagtttgtaaatactgctttatgccactaagtgtt

SEQ ID NO: 683416 - DNA, 271 bp, Homo sapiens
tccggagttcggggatgcgctgccacatggaggtcgagtctccccagtgtctcataggacacattttgtcagtatttgacctagaaaagcttgggaaggaagcgctgttctgtgctcacggactgaggcggccggcgcgaaagccttcccattcctttctgtagggaaaggagcctttatttcactaactttgtattcatatttgatgaataagtatctaaacagagcagtgtaccggaataccaagttacctaccaaacccaaaacacaa

SEQ ID NO: 683417 - DNA, 548 bp, Homo sapiens
  misc_feature (539)..(539): n is a, c, g, or t
cagcggctgccggtgctttaatactttttagaggccctaaaaatcacaaacatatgctcaactcactgtctacagttcttataactgccaaaatctattttcttcctcatacctgacgcatatagccgggtcttggcatcctggaggtggccgcaatggtcctggtgctccaggcgggcccgtggacccctaacgtacattccatagtgggcccgtggggctcctggtgcatcttaataaagtgagagctgtgggctgcacgcccccggcacctggtggaaggcgccgtgctacgagacggtgaaggtgtggcttcaggagaacctgctggctgtgggcatctttgggctgtgcacggcgctggtgcagatcctgggcctgaccttcgccatgaccatgtactgccaagtggtcaaggcagacacctactgcgcgtaggccgcccaccgcccgcttctctgccaaaaggacgcccacggggagatggccgcacccacaagctgcctttcccaccaccaagcctcggtgctctgcccatnagttttttt

SEQ ID NO: 683418 - DNA, 150 bp, Homo sapiens
ccaagatcgccccactgcactccagtatgggcgaccgaacgagactccgtctcaaaaagaaaaacaaagtgtatgtatacatatacacacacacacaaggctcataagtgtactcctttatgactattgattatagttctctcccattgc

SEQ ID NO: 683419 - DNA, 1418 bp, Homo sapiens
  misc_feature (38)..(38): n is a, c, g, or t
gagcaggccgtaaagctgcggcggcggttcgcgtttcncgtgtccgcttgactgacagctgcgcggcgggagcgggcggcgcgagcgggaggcggcggcgcagagcttggggcttccttggtcgcacccaccacctgcctgcccactggtcagccttcagggaccctgagcaccgcctggtctctttcctgtggccagcccagaactgaagcgctgcggcatggcgcgcgcctgcctccaggccgtcaagtacctcatgttcgccttcaacctgctcttctggctgggaggctgtggcgtgctgggtgtcggcatctggctggccgccacacaggggagcttcgccacgctgtcctcttccttcccgtccctgtcggctgccaacctgctcatcatcaccggcgcctttgtcatggccatcggcttcgtgggctgcctgggtgccatcaaggagaacaagtgcctcctgctcactttcttcctgctgctgctgctggtgttcctgctggaggccaccatcgccatcctcttcttcgcctacacggacaagattgacaggtatgcccagcaagacctgaagaaaggcttgcacctgtacggcacgcagggcaacgtgggcctcaccaacgcctggagcatcatccagaccgacttccgctgctgtggcgtctccaactacactgactggttcgaggtgtacaacgccacgcgggtacctgactcctgctgcttggagttcagtgagagctgtgggctgcacgcccccggcacctggtggaaggcgccgtgctacgagacggtgaaggtgtggcttcaggagaacctgctggctgtgggcatctttgggctgtgcacggcgctggtgcagatcctgggcctgaccttcgccatgaccatgtactgccaagtggtcaaggcagacacctactgcgcgtaggccgcccaccgcccgcttctctgccaaaaggacgcccacggggagatggccgcacccacagctgcctttcccaccaccagcctcggtgctctgccccatgctgggaggagggagggagggacaggtgcctggagcccccggaaccctgtttctggaaggccctggctcaggtggcttcagggcctccggaccccccctgggaggggtggccacgtgctggctgcggaacccagggcaggggtgggaggggcctccagcactttttatatttacgtattctccaaagcagtgttcacacgggagccagcctgtggcccccagcctcctggaaaacaggttggcgctggaggagccgggtcttggcatcctggaggtggccccactggtcctggtgctccaggcggggccgtggacccctcacctacattccatagtgggcccgtggggctcctggtgcatcttaataaagtgtgagcagcaa

SEQ ID NO: 683420 - DNA, 1433 bp, Homo sapiens
  misc_feature (18)..(18): n is a, c, g, or t
  misc_feature (20)..(20): n is a, c, g, or t
  misc_feature (22)..(22): n is a, c, g, or t
ggtacggtcggaatttangnanatcctgctctgggcagaagggcaggacagggccctgagtaacggtggcctggggtcagagccaggttcagctgcgaggctgctggtggctgtggagagcttggggcttccttggtcgcacccaccacctgcctgcccactggtcagccttcagggaccctgagcaccgcctggtctctttcctgtggccagcccagaactgaagcgctgcggcatggcgcgcgcctgcctccaggccgtcaagtacctcatgttcgccttcaacctgctcttctggctgggaggctgtggcgtgctgggtgtcggcatctggctggccgccacacaggggagcttcgccacgctgtcctcttccttcccgtccctgtcggctgccaacctgctcatcatcaccggcgcctttgtcatggccatcggcttcgtgggctgcctgggtgccatcaaggagaacaagtgcctcctgctcactttcttcctgctgctgctgctggtgttcctgctggaggccaccatcgccatcctcttcttcgcctacacggacaagattgacaggtatgcccagcaagacctgaagaaaggcttgcacctgtacggcacgcagggcaacgtgggcctcaccaacgcctggagcatcatccagaccgacttccgctgctgtggcgtctccaactacactgactggttcgaggtgtacaacgccacgcgggtacctgactcctgctgcttggagttcagtgagagctgtgggctgcacgcccccggcacctggtggaaggcgccgtgctacgagacggtgaaggtgtggcttcaggagaacctgctggctgtgggcatctttgggctgtgcacggcgctggtgcagatcctgggcctgaccttcgccatgaccatgtactgccaagtggtcaaggcagacacctactgcgcgtaggccgcccaccgcccgcttctctgccaaaaggacgcccacggggagatggccgcacccacagctgcctttcccaccaccagcctcggtgctctgccccatgctgggaggagggagggagggacaggtgcctggagcccccggaaccctgtttctggaaggccctggctcaggtggcttcagggcctccggaccccccctgggaggggtggccacgtgctggctgcggaacccagggcaggggtgggaggggcctccagcactttttatatttacgtattctccaaagcagtgttcacacgggagccagcctgtggcccccagcctcctggaaaacaggttggcgctggaggagccgggtcttggcatcctggaggtggccccactggtcctggtgctccaggcggggccgtggacccctcacctacattccatagtgggcccgtggggctcctggtgcatcttaataaagtgtgagcagcaa

SEQ ID NO: 683421 - DNA, 1456 bp, Homo sapiens
  misc_feature (9)..(9): n is a, c, g, or t
  misc_feature (17)..(17): n is a, c, g, or t
  misc_feature (20)..(20): n is a, c, g, or t
  misc_feature (31)..(31): n is a, c, g, or t
gcggcgganaggtaccnagnggggcttgtgnggggcgtgcggccagggtcccgtggccggaggtgtccgaccgggagcggctggagccggacgcgagcggggcgcgcgagttcgagcccagagccgacacgcagcaacaagagcttggggcttccttggtcgcacccaccacctgcctgcccactggtcagccttcagggaccctgagcaccgcctggtctctttcctgtggccagcccagaactgaagcgctgcggcatggcgcgcgcctgcctccaggccgtcaagtacctcatgttcgccttcaacctgctcttctggctgggaggctgtggcgtgctgggtgtcggcatctggctggccgccacacaggggagcttcgccacgctgtcctcttccttcccgtccctgtcggctgccaacctgctcatcatcaccggcgcctttgtcatggccatcggcttcgtgggctgcctgggtgccatcaaggagaacaagtgcctcctgctcactttcttcctgctgctgctgctggtgttcctgctggaggccaccatcgccatcctcttcttcgcctacacggacaagattgacaggtatgcccagcaagacctgaagaaaggcttgcacctgtacggcacgcagggcaacgtgggcctcaccaacgcctggagcatcatccagaccgacttccgctgctgtggcgtctccaactacactgactggttcgaggtgtacaacgccacgcgggtacctgactcctgctgcttggagttcagtgagagctgtgggctgcacgcccccggcacctggtggaaggcgccgtgctacgagacggtgaaggtgtggcttcaggagaacctgctggctgtgggcatctttgggctgtgcacggcgctggtgcagatcctgggcctgaccttcgccatgaccatgtactgccaagtggtcaaggcagacacctactgcgcgtaggccgcccaccgcccgcttctctgccaaaaggacgcccacggggagatggccgcacccacagctgcctttcccaccaccagcctcggtgctctgccccatgctgggaggagggagggagggacaggtgcctggagcccccggaaccctgtttctggaaggccctggctcaggtggcttcagggcctccggaccccccctgggaggggtggccacgtgctggctgcggaacccagggcaggggtgggaggggcctccagcactttttatatttacgtattctccaaagcagtgttcacacgggagccagcctgtggcccccagcctcctggaaaacaggttggcgctggaggagccgggtcttggcatcctggaggtggccccactggtcctggtgctccaggcggggccgtggacccctcacctacattccatagtgggcccgtggggctcctggtgcatcttaataaagtgtgagcagcaa

SEQ ID NO: 683422 - DNA, 333 bp, Homo sapiens
gaaccggtcgcagaggcttacgcctgtaatcccagcactttgggaggctgaggcccacggatcatgaggtcaggagattgagaccattctggctaacacggtgaaaccccgtctgtactaaaaaatacacaaaaaagtagccgatcgtgacggcaggagcctgtactcccagctactcaggaggcatgagggaggagaatgacctgaacccaggaggcggagcttgcagtgagctgagttcgcaccactgcactccagtctgggcgacagagcaagactctgtcttaaaacaagctacctgagagaaaacatgccatcacgactagtactagg

SEQ ID NO: 683423 - DNA, 963 bp, Homo sapiens
atcttgggttacgaatctcgcgaatagtcatgttctacagtgagtactcccagaatccagcgttgcttcctcttgccctatgtcagcctgatagtgatcgtgtgcaggtgtgccgcgattcaattgttcccgaagaagcccatgacatagtattcgatgaactgtgctcaggccatccaccggtgtatgcattgttcctagtaagccactgaagggatcttaataaggatgttacactcttagcgagaaacaagttggttgtcccactttgcagaacagatggcaaaatgcgatgggagtgttggctgtgttgtgcagtcgtgccagaagacgacctgagaggtctggaacccaccagggtcgtgacggttcccacaaaattgacgacgcaagaagtttgaataagttgcgagcattggcttgtgatatagaagccgcgatggtatcattgtaaaattgcctagcaatttttaaagggtgattcgtcggaattgtccagaagtactcgttgagatccgtggcgaagccatagtcccaagcgattatcaatctgcagccctacgaagtttccaccctggcgggggaccataacgggaagcattcattgagtcaggaattatactccctattggacagtgtaagtctcttcccatgtctcaactgttagtcgtagtgaatcctgtaacgtggagtaggactacctaattgtggttccttgagattgctgtcatgacgagatgctcggcccagaaaagtaaattccgcttggattgatgcctcgaaagcattggtgtaaaactgtgtgggtagcgtttgcgtaggggaccacgggcaattcctgggttacggagccttgggggtcatacgcagcaaaattcccgttggtggccctggttttttatcactcatctggttgggccccccctttacaacatctcggtgagaactgcggcaagaataatg

SEQ ID NO: 683424 - DNA, 1476 bp, Homo sapiens
gagcccctgagatctggagactgccccagcctcaggctctgtgcatctcccccgagcccccaccacatatgtgcggaggcccctgggggcccaggcctgtcctcagtcccgactgggctctacctgaggaccctggggagcctgggcctggccctcctcagagcttggggcttccttggtcgcacccaccacctgcctgcccactggtcagccttcagggaccctgagcaccgcctggtctctttcctgtggccagcccagaactgaagcgctgcggcatggcgcgcgcctgcctccaggccgtcaagtacctcatgttcgccttcaacctgctcttctggctgggaggctgtggcgtgctgggtgtcggcatctggctggccgccacacaggggagcttcgccacgctgtcctcttccttcccgtccctgtcggctgccaacctgctcatcatcaccggcgcctttgtcatggccatcggcttcgtgggctgcctgggtgccatcaaggagaacaagtgcctcctgctcactttcttcctgctgctgctgctggtgttcctgctggaggccaccatcgccatcctcttcttcgcctacacggacaagattgacaggtatgcccagcaagacctgaagaaaggcttgcacctgtacggcacgcagggcaacgtgggcctcaccaacgcctggagcatcatccagaccgacttccgctgctgtggcgtctccaactacactgactggttcgaggtgtacaacgccacgcgggtacctgactcctgctgcttggagttcagtgagagctgtgggctgcacgcccccggcacctggtggaaggcgccgtgctacgagacggtgaaggtgtggcttcaggagaacctgctggctgtgggcatctttgggctgtgcacggcgctggtgcagatcctgggcctgaccttcgccatgaccatgtactgccaagtggtcaaggcagacacctactgcgcgtaggccgcccaccgcccgcttctctgccaaaaggacgcccacggggagatggccgcacccacagctgcctttcccaccaccagcctcggtgctctgccccatgctgggaggagggagggagggacaggtgcctggagcccccggaaccctgtttctggaaggccctggctcaggtggcttcagggcctccggaccccccctgggaggggtggccacgtgctggctgcggaacccagggcaggggtgggaggggcctccagcactttttatatttacgtattctccaaagcagtgttcacacgggagccagcctgtggcccccagcctcctggaaaacaggttggcgctggaggagccgggtcttggcatcctggaggtggccccactggtcctggtgctccaggcggggccgtggacccctcacctacattccatagtgggcccgtggggctcctggtgcatcttaataaagtgtgagcagcaa

SEQ ID NO: 683425 - DNA, 1902 bp, Homo sapiens
  misc_feature (18)..(18): n is a, c, g, or t
  misc_feature (20)..(20): n is a, c, g, or t
  misc_feature (22)..(22): n is a, c, g, or t
ggtacggtcggaatttangnanatcctgctctgggcagaagggcaggacagggccctgagtaacggtggcctggggtcagagccaggttcagctgcgaggctgctggtggctgtggagagcttggggcttccttggtcgcacccaccacctgcctgcccactggtcagccttcagggaccctgagcaccgcctggtctctttcctgtggccagcccagaactgaagcgctgcggcatggcgcgcgcctgcctccaggccgtcaagtacctcatgttcgccttcaacctgctcttctggctgggaggctgtggcgtgctgggtgtcggcatctggctggccgccacacaggggagcttcgccacgctgtcctcttccttcccgtccctgtcggctgccaacctgctcatcatcaccggcgcctttgtcatggccatcggcttcgtgggctgcctgggtgccatcaaggagaacaagtgcctcctgctcactttcttcctgctgctgctgctggtgttcctgctggaggccaccatcgccatcctcttcttcgcctacacggacaagattgacaggtatgcccagcaagacctgaagaaaggcttgcacctgtacggcacgcagggcaacgtgggcctcaccaacgcctggagcatcatccagaccgacttccgctgctgtggcgtctccaactacactgactggttcgaggtgtacaacgccacgcgggtacctgactcctgctgcttggagttcagtgagagctgtgggctgcacgcccccggcacctggtggaaggcgccgtgctacgagacggtgaaggtgtggcttcaggagaacctgctggctgtgggcatctttgggctgtgcacggcgctggtgcagatcctgggcctgaccttcgccatgaccatgtactgccaagtggtcaaggcagacacctactgcgcgtaggccgcccaccgcccgcttctctgccaaaaggacgcccacggggagatggccgcacccacagctgcctttcccaccaccagcctcggtgctctgccccatgctgggaggagggagggagggacaggtgcctggagcccccggaaccctgtttctggaaggccctggctcaggtggcttcagggcctccggaccccccctgggaggggtggccacgtgctggctgcggaacccagggcaggggtgggaggggcctccagcactttttatatttacgtattctccaaagcagtgttcacacgggagccagcctgtggcccccagcctcctggaaaacaggttggcgctggaggagccgggtcttggcatcctggaggtggccccactggtcctggtgctccaggcggggccgtggacccctcacctacattccatagtgggcccgtggggctcctggtgcatcttaataaagtgtgagcagcaaaaaaaagaaacaaaaaaaaaaactttgggagggcatcttatgggcgggtgtcggcggaaaaaggggtgaatggaatggggccacttgggtccattaggtgtgttcccttggacccaagtttttttgtgtcacaaggggggaaaatctgggggggacccccatattagggaagcgagtaataaattgcgagattaacgccggggtttacccgggctttattgactcgggggaaaacaggtgtgaaaaggacagaagaggagaagaagacacgagaagaagaagagtggatgagagaacaatgtggcaccacaaaggagggggcaggcgagacaagaaagcaaacgtgacacagcaacagacaagagccacggcagccgacaagaacaacagggaaagagaaaaagcagaagtcaagagacaccggcgacagaggcccgcagacagagggcagggaggtacagagaggagg

SEQ ID NO: 683426 - DNA, 115 bp, Homo sapiens
gagagacccaccatggtgctgtctctgccgacaggacaacgtcaaggccgcttgggttaaggtcggcgcgcacgtggcgattatgtccggagccctagagagtagtcctttcctt

SEQ ID NO: 683427 - DNA, 796 bp, Homo sapiens
  misc_feature (401)..(401): n is a, c, g, or t
gcttgagagaggcatggaaagctgtccaggaaagtggttgtgctgtgaaatccgtgtgtcattgttaacagggatgaaatgaggagtcttgcactgtgctctttggtatgtatcctgccctggcaggtgactcagactgtgcctgtattgttgtcctgattgtataagggaatccccgttgttattggtatggtggaaatcggccacaagaggcgcattcccacatacagatgaaaagacaacaaagagagggaactgcacgcgtgcctgcgggcgcggttctagggttgtaagacatagaagggggcggcgttgggcgattgtgtgggctggatccagcgatgtttgataacgctcgcatgtcgaatagactcctcatgagcctgatggactcaggtccntgactggcaggtgcaagactgcgatgggaatgacccgtgacatagcatgccaaggtccaaggatgtctgtagtccccgctgttgactaggcatgtggcaagactagtcttgtcaaagtcaccctaggagagcatcgccgagtacacataacatggtgttgttgggcccgctgattggttgcttgcacaggtcgataaacgaatctgaagaggctccttgagacccccaggaatcattatcagggtataacctaccttggttcgagaggtggaaaaagcccataagggtatatagggaataccacttgcagatgcaggttggccggttcgccaacagcgagtccgtccactgtagggggaccttgggagtgcttggctgcgtagactccaccaatt

SEQ ID NO: 683428 - DNA, 563 bp, Homo sapiens
gatctagaggacccttgcgaggtctctacctcttgactgaagctgaatttagttggggtgagtcagggttgggtattggaggggggggggggggtgaaatgttgagtgtgaagccacccacaaacacacacctgttgtttaggaacccggctgtggttgtttctgagctgtttggcttcagttgacagtttcttgattgcctgagcaccaggtctcatcttgcatctcatccggggcgggagaacattcagtttccttccaagccttcccacctttcccccactcccttggaggaacagaagtgggggttgaggcgagccacatggctggagtgtgtatctgaaggtctttctgtcacctgttcagtgtggtctgccccacccttgttgaccaagagggagtgagagtgtaaaataatacagagcatctcacactcagaagggcgggcacattttttgaaagcccatgtgtggttaagtgggtggaacaacgataattcagcgggctttatgagtagaacttgtgagacatattgtggccggccactttgcaccatctctggg

SEQ ID NO: 683429 - DNA, 1669 bp, Homo sapiens
ggccgcagcgcgcgggccgggcagatgtttgggttccgccgccggggtccgagcggatccgcgcgacccgctgccaccgcgggggccagagcgggagcaggagcggggccggagcaggcgccggccggcgggatggggcgttccggggcggcgggtgcggggcgctgagcggcggccccggcacacccgggcgcgatgcgccgctccagcacggacgagtccacgtaccggcgcagcccctctccggagggcaaggagccggacttcgcgcgcggcggccccttccggcgctacagcagcctatacgggcgcgcgggcggcggggacgccgggggcgccttcttcggcctgcacgcgaaccccggccccaaggcggcccaggcgcgctacacgtcgcccaagggcaacaagtacgtggttttctacctggacctctccttcatcttcctcctagaactgaagcgctgcggcatggcgcgcgcctgcctccaggccgtcaagtacctcatgttcgccttcaacctgctcttctggctgggaggctgtggcgtgctgggtgtcggcatctggctggccgccacacaggggagcttcgccacgctgtcctcttccttcccgtccctgtcggctgccaacctgctcatcatcaccggcgcctttgtcatggccatcggcttcgtgggctgcctgggtgccatcaaggagaacaagtgcctcctgctcactttcttcctgctgctgctgctggtgttcctgctggaggccaccatcgccatcctcttcttcgcctacacggacaagattgacaggtatgcccagcaagacctgaagaaaggcttgcacctgtacggcacgcagggcaacgtgggcctcaccaacgcctggagcatcatccagaccgacttccgctgctgtggcgtctccaactacactgactggttcgaggtgtacaacgccacgcgggtacctgactcctgctgcttggagttcagtgagagctgtgggctgcacgcccccggcacctggtggaaggcgccgtgctacgagacggtgaaggtgtggcttcaggagaacctgctggctgtgggcatctttgggctgtgcacggcgctggtgcagatcctgggcctgaccttcgccatgaccatgtactgccaagtggtcaaggcagacacctactgcgcgtaggccgcccaccgcccgcttctctgccaaaaggacgcccacggggagatggccgcacccacagctgcctttcccaccaccagcctcggtgctctgccccatgctgggaggagggagggagggacaggtgcctggagcccccggaaccctgtttctggaaggccctggctcaggtggcttcagggcctccggaccccccctgggaggggtggccacgtgctggctgcggaacccagggcaggggtgggaggggcctccagcactttttatatttacgtattctccaaagcagtgttcacacgggagccagcctgtggcccccagcctcctggaaaacaggttggcgctggaggagccgggtcttggcatcctggaggtggccccactggtcctggtgctccaggcggggccgtggacccctcacctacattccatagtgggcccgtggggctcctggtgcatcttaataaagtgtgagcagcaa

SEQ ID NO: 683430 - DNA, 1163 bp, Homo sapiens
cgctaacggaagcataccttgcgatggctggaaaaaatcgccccttccgcactataaaattggtggcatcgaggcgcgattgaggccctgcatcgccaggtctgtcagcgggtctgaagtgaatgcgcagctaatgctgcgatttcgtcgccgatggcggctcgctgattggtgctggtgaaaaacgcattggtgagatctgggccggttgactaatgccggcgaatggccttacagaatgaatatccctgacaatggtcgtctaaaccttacatagaacaatgttatgacacacccttaagtagaaactgtgaccaccgtcagcaggctattttgcctgcatgtgctttcgctctcttgtcgctagtctagctgaaccgggcactccgcacgtgagggctggacgctgggcacagaaaactggtgagcattgttccactctgatggcactcttatgtcggcttctacacttgatcgtatttgtctggtggttatgcacgtgctgggcgctattggcgtacttatgttgctgcgcttgagtctggcgacgcgggcttctctgctggccggcattaaaccgtcgcatttatcgccgtacttcgacgaccatacttcgacttaatgtctcccttcgcgctcaaaggacacgatctatgcgattaggcgaatcaacaggggctgacaagggcgaaaccggcctgggcctatggaagattaaccccattggcacgaagcgattggttgacctctatctggtaccccaggtagttcacgaacaggactttggcaaacttgggcgggccccagaattatctaaacacatacatgacaacatataaaaacaagttccccattaatcacacactaagtatctcacaacaagaaaatcccgggtgcatactctcacataaccatcaaacacattatcagcggggcatcaatattcggccaccggtcgtcttcgtgtctctccagtgtaaaaaacaccgtaggagaattgaaggcgaaaaccaatagaacagacgatacgtacacataacaatacgaagataacacgcgatagaaaacatgacagagatacgaaagtacatgtcatcatagtactcaatagccacagacaaacgcaacacgacacatcagcaaacacgaagacgatcatacct

SEQ ID NO: 683431 - DNA, 1318 bp, Homo sapiens
  misc_feature (38)..(38): n is a, c, g, or t
gagcaggccgtaaagctgcggcggcggttcgcgtttcncgtgtccgcttgactgacagctgcgcggcgggagcgggcggcgcgagcgggaggcggcggcgcagaactgaagcgctgcggcatggcgcgcgcctgcctccaggccgtcaagtacctcatgttcgccttcaacctgctcttctggctgggaggctgtggcgtgctgggtgtcggcatctggctggccgccacacaggggagcttcgccacgctgtcctcttccttcccgtccctgtcggctgccaacctgctcatcatcaccggcgcctttgtcatggccatcggcttcgtgggctgcctgggtgccatcaaggagaacaagtgcctcctgctcactttcttcctgctgctgctgctggtgttcctgctggaggccaccatcgccatcctcttcttcgcctacacggacaagattgacaggtatgcccagcaagacctgaagaaaggcttgcacctgtacggcacgcagggcaacgtgggcctcaccaacgcctggagcatcatccagaccgacttccgctgctgtggcgtctccaactacactgactggttcgaggtgtacaacgccacgcgggtacctgactcctgctgcttggagttcagtgagagctgtgggctgcacgcccccggcacctggtggaaggcgccgtgctacgagacggtgaaggtgtggcttcaggagaacctgctggctgtgggcatctttgggctgtgcacggcgctggtgcagatcctgggcctgaccttcgccatgaccatgtactgccaagtggtcaaggcagacacctactgcgcgtaggccgcccaccgcccgcttctctgccaaaaggacgcccacggggagatggccgcacccacagctgcctttcccaccaccagcctcggtgctctgccccatgctgggaggagggagggagggacaggtgcctggagcccccggaaccctgtttctggaaggccctggctcaggtggcttcagggcctccggaccccccctgggaggggtggccacgtgctggctgcggaacccagggcaggggtgggaggggcctccagcactttttatatttacgtattctccaaagcagtgttcacacgggagccagcctgtggcccccagcctcctggaaaacaggttggcgctggaggagccgggtcttggcatcctggaggtggccccactggtcctggtgctccaggcggggccgtggacccctcacctacattccatagtgggcccgtggggctcctggtgcatcttaataaagtgtgagcagcaa

SEQ ID NO: 683432 - DNA, 533 bp, Homo sapiens
  misc_feature (87)..(87): n is a, c, g, or t
taatgtcatctttttcacttgaaatgagtattagcaacagttacgaacgtgtagaacgacagcctgacgcaaacacacactacaganagacgtttttaagaacatttgagatcattttggctgtatttattacgatttattgtcaggatgtttcaaaacacttgtattatcatgttttttcattggcttaatatcatggtcgtttcaaaaattaacaataatcttttgtttatggttaatccgtatattgatgtttttaggtgtcagccagattttgctattctttgtgttttttatacatcaaaaacggttttatagagagatgtaccttttggttatacaagctgctgtgcaataaactcttcacgttcaccgagatgaacacctgttactgctgttgttgaaaattggacataattaggctggatttcccattaaattttgaaagaaacaaaatgttgtggaccattgaatgagtgtgaagtcagtcagacaatctggctaaatgaattgaataaatatttaatgaaaca

SEQ ID NO: 683433 - DNA, 184 bp, Homo sapiens
cgagtcgggtactggaggatcctctagatcgacagtgctccaggtaacctgatattatggaggtcagcacggtgctcactgtgtcgacggcactatgtacagggaggcatgcaccgagatgggtgaatacacgtcgaccaggctccaggataacgatatatggaggtcagcatggtgctcacgt

SEQ ID NO: 683434 - DNA, 1374 bp, Homo sapiens
  misc_feature (9)..(9): n is a, c, g, or t
  misc_feature (17)..(17): n is a, c, g, or t
  misc_feature (20)..(20): n is a, c, g, or t
  misc_feature (31)..(31): n is a, c, g, or t
gcggcgganaggtaccnagnggggcttgtgnggggcgtgcggccagggtcccgtggccggaggtgtccgaccgggagcggctggagccggacgcgagcggggcgcgcgagttcgagcccagagccgacacgcagcaacaagagcttggggcttccttggtcgcacccaccacctgcctgcccactggtcagccttcagggaccctgagcaccgcctggtctctttcctgtggccagcccctgggaggctgtggcgtgctgggtgtcggcatctggctggccgccacacaggggagcttcgccacgctgtcctcttccttcccgtccctgtcggctgccaacctgctcatcatcaccggcgcctttgtcatggccatcggcttcgtgggctgcctgggtgccatcaaggagaacaagtgcctcctgctcactttcttcctgctgctgctgctggtgttcctgctggaggccaccatcgccatcctcttcttcgcctacacggacaagattgacaggtatgcccagcaagacctgaagaaaggcttgcacctgtacggcacgcagggcaacgtgggcctcaccaacgcctggagcatcatccagaccgacttccgctgctgtggcgtctccaactacactgactggttcgaggtgtacaacgccacgcgggtacctgactcctgctgcttggagttcagtgagagctgtgggctgcacgcccccggcacctggtggaaggcgccgtgctacgagacggtgaaggtgtggcttcaggagaacctgctggctgtgggcatctttgggctgtgcacggcgctggtgcagatcctgggcctgaccttcgccatgaccatgtactgccaagtggtcaaggcagacacctactgcgcgtaggccgcccaccgcccgcttctctgccaaaaggacgcccacggggagatggccgcacccacagctgcctttcccaccaccagcctcggtgctctgccccatgctgggaggagggagggagggacaggtgcctggagcccccggaaccctgtttctggaaggccctggctcaggtggcttcagggcctccggaccccccctgggaggggtggccacgtgctggctgcggaacccagggcaggggtgggaggggcctccagcactttttatatttacgtattctccaaagcagtgttcacacgggagccagcctgtggcccccagcctcctggaaaacaggttggcgctggaggagccgggtcttggcatcctggaggtggccccactggtcctggtgctccaggcggggccgtggacccctcacctacattccatagtgggcccgtggggctcctggtgcatcttaataaagtgtgagcagcaa

SEQ ID NO: 683435 - DNA, 166 bp, Homo sapiens
ttacgatcctacactgtcgtcatagccatgggagaatatgtcctgctcacactcagtaacgcacgcacgactcaaagttgttgagtggcagcatccgaggtcagaaccgaactgggcaaaagcagcaaccctcacggaataaccttttgagccaattccagcttca

SEQ ID NO: 683436 - DNA, 1351 bp, Homo sapiens
  misc_feature (18)..(18): n is a, c, g, or t
  misc_feature (20)..(20): n is a, c, g, or t
  misc_feature (22)..(22): n is a, c, g, or t
ggtacggtcggaatttangnanatcctgctctgggcagaagggcaggacagggccctgagtaacggtggcctggggtcagagccaggttcagctgcgaggctgctggtggctgtggagagcttggggcttccttggtcgcacccaccacctgcctgcccactggtcagccttcagggaccctgagcaccgcctggtctctttcctgtggccagcccctgggaggctgtggcgtgctgggtgtcggcatctggctggccgccacacaggggagcttcgccacgctgtcctcttccttcccgtccctgtcggctgccaacctgctcatcatcaccggcgcctttgtcatggccatcggcttcgtgggctgcctgggtgccatcaaggagaacaagtgcctcctgctcactttcttcctgctgctgctgctggtgttcctgctggaggccaccatcgccatcctcttcttcgcctacacggacaagattgacaggtatgcccagcaagacctgaagaaaggcttgcacctgtacggcacgcagggcaacgtgggcctcaccaacgcctggagcatcatccagaccgacttccgctgctgtggcgtctccaactacactgactggttcgaggtgtacaacgccacgcgggtacctgactcctgctgcttggagttcagtgagagctgtgggctgcacgcccccggcacctggtggaaggcgccgtgctacgagacggtgaaggtgtggcttcaggagaacctgctggctgtgggcatctttgggctgtgcacggcgctggtgcagatcctgggcctgaccttcgccatgaccatgtactgccaagtggtcaaggcagacacctactgcgcgtaggccgcccaccgcccgcttctctgccaaaaggacgcccacggggagatggccgcacccacagctgcctttcccaccaccagcctcggtgctctgccccatgctgggaggagggagggagggacaggtgcctggagcccccggaaccctgtttctggaaggccctggctcaggtggcttcagggcctccggaccccccctgggaggggtggccacgtgctggctgcggaacccagggcaggggtgggaggggcctccagcactttttatatttacgtattctccaaagcagtgttcacacgggagccagcctgtggcccccagcctcctggaaaacaggttggcgctggaggagccgggtcttggcatcctggaggtggccccactggtcctggtgctccaggcggggccgtggacccctcacctacattccatagtgggcccgtggggctcctggtgcatcttaataaagtgtgagcagcaa

SEQ ID NO: 683437 - DNA, 118 bp, Homo sapiens
gagccttcagtcactggggaaagcaggtgaagcagtgtgagctctttattcactcccagcctgttctgtggcctgttccactgtgtgcacttgtctgtttggccctgctccacatcca

SEQ ID NO: 683438 - DNA, 230 bp, Homo sapiens
tctctagatttacgattgtttctcctaaggcagaggttctctgagacacagtggggaaggtttcagagaaatccaggaacccgcctaaaaatccgtacaaaattgtgtcattgtatgtgcagttttctggtgagtagacccagagctttcatcacatttccaaagggtctgtgcccttcaccctcacctgccaataagatgaagaaattataccagtccctaaggaggca

SEQ ID NO: 683439 - DNA, 904 bp, Homo sapiens
taatgtgccagtgtggccaattgattttccatggggcttcccgcgtgttgtgacgcccgcgttgcgacgcgttttccaccttgtgtagccgccatgtgtcgcttcgcctttgttgaggaggcgtgcccactacggcccccgtggggcggagacgccagagtcactgtttatggcggaggttgtgggtccccgcccggggacccgtatcctggggcccccttgtgtaaggaccttgtttgactggtcccgtgctcattgtgaaagacaccgttggtgtcccgcgcccacggacgtccacgctcttgtccggccctagtcgtcgtccttttattttgtccccgccctggggtaatcctgcgggttttcgccgccacgttagagcttgggggttaacctggttgttaagcagcataattttttaagggcgcccactaggtcccgccagcgtccccaggtgttgtttattgtggttgtttcccacagcgccacccttgctcccgactgtgtgttcacatcgttggtgcgccctctagggggagaaaaggaatgatggccccacccccccccactgtccatttccctcgcttgagaagttggaggcttggacataattttggtatattttttgtagatgagcagaatttttaactgggtgctactctaaaacaataaggatctgtgattgaagttgcccctcaaattggcactagagatgcactgtaatagatatgtacctctctctgtcaattgttttttatagtgtggctgtaataatcccggaaacctttggggtttataaaatttttggctttcaaaagttgggaacaccccctttttgggaaaaggagcccttttatttttttccattccctttggaagttaaaaaaatggaaaggtcccaaca

SEQ ID NO: 683440 - DNA, 119 bp, Homo sapiens
ccaatcccaggtccaatttcttttcattccctggatcacaacacaccacggaagagaggagtccagaatgtctctccctgccagtgctcccctcctacctcgcagctcgcccctgagtt

SEQ ID NO: 683441 - DNA, 390 bp, Homo sapiens
gagtttgatttcccaggggaactgtcggggttttgtagggcttcatatcctatatacagttccatagaagctgcagagctcgcagaaaggattgagcgcagggggccaatccttcaggaaatatggatgaacagtggtttgggcccctcgctcccaaaaaacatgggcccgtttttctgaaaaccccatgcattttgatgcggtcgccctttttgaaaaaggaagggtccccaatgccccccccgttttggttcccctgggccttttatgaaggagaatttgtcatgtccttcaaccctcgtgaggccaggaagctattaaagggatgtttcaagctgtttttagccccttcccaaataaatgaggagggaagagtttttgttttttgta

SEQ ID NO: 683442 - DNA, 124 bp, Homo sapiens
atatattttaattaatgataatgaactagaacacatctagcacaggtagtgaaactatttttaaaaaaagaaagaaaaccttctttggttactgaagagatgtccttacccaggggaatgctgt

SEQ ID NO: 683443 - DNA, 160 bp, Homo sapiens
cgccataccgatagcggaatattccatcgcgttccgaaagtgggtttcgctttcggaaatgtgtttcgcttcccgacgaaaggcatacatcaccatggtcatgatgttggagggcacgaggtatcagcaaaaacggtgaccacggcatatggctcatcag

SEQ ID NO: 683444 - DNA, 142 bp, Homo sapiens
gacccatcataagaagagataggagcgagtcagatgagtgcgctgggggagcgtggtggattagtctgtgtgtggaggtacggagtagagtgaccctcgagtctgatagtctgtcgctcggagtggtgtgttgggttggatc

SEQ ID NO: 683445 - DNA, 1139 bp, Homo sapiens
  misc_feature (1139)..(1139): n is a, c, g, or t
gaggcaacaatatgtatacgtcgatacttcggtttaatttcgtcacaggggctggggtttcattcgacgatagatggccggtggtgccaccagttcacacagacgtctctccgggcactcggacggcccacgaccgccgcaccccgcacaggcccgcgcggctccctcccccgcacggggcccgcgcccggcccgccgctacgccgctacgcgctactctcgctactacgcccggcctaccatactatggatacggacgctatccagacacccacgaagacacggaagacacgacaacaatataccaaaaattaaaaaaacaagaaacaaagaaagaagcacaacaaaagaaaagaaaaacaaaaacagaaaaacgaaacacaagaaaagaaaaaaaccgccacctacagaaaacagaagacaaaaaacgagccgcacacacacaagataaaacgcaggaggatggtagcaaaataaccaaccggagagaaagaagcgagggatacagccaaccgaggcagcagaagtgcagagaacgaagagacataaccggcgaaggaccgagaggaagaacaggaacccgacaccaataaccgagaagacacaagcgacaagagcccacacacaccacggaacaaaatcaagcacaagcaacgaataaagacagccacgaatgcggaggaaaagagacaaggacacgcagaaggacaaccaccaccaatgagagcaatgaggggacaacggagaaccacaaccagacgcatagagacaggacaaccacgcaataacaccgaggccgacgagcgagaggagcgagccaacaagagcacagacgagaacaaagagcccagaagagagagaaaaggacgagattcgagagccgcagaccgaacaactgatagacggtaggcgcagacgagaccaagaagcgtaaagaacgccgaaacacaaaaacagccaccataataccaagaaatcttcagaagatagaggcagcaacaggaccaacaacaaaacgacaagagcgggcaggggtaagaaaaccgacatggaacagacaagcggagtacagcaggagagcctaccaggacccacacaaagagagaacgaagcatcggagcaaactagacgaatagatn

SEQ ID NO: 683446 - DNA, 236 bp, Homo sapiens
cgtcaaggtagtaccaaagtattaggattacaggcatgagccaccacgcctggccaaaatgtatgtatgtatgtatgtatgtatgtatgtatgtatgtatgtatgtatgcatgcatgcatgtatgtatttatttcagacgaagtctcactctgtcaccagcgctggaatacagtggcgcaatctcggctcatctgctgccctccgctctccttgggtactacgcatctggcagggc

SEQ ID NO: 683447 - DNA, 247 bp, Homo sapiens
gggggggggggggtttttttcccccccccaaaacagccccccctttgggggtccccccccgggggaaaccccggggggggtcccctaaaacccccggggggtccccccccggggggccccccgggggggggtgggggggggtttttaaaattttttttttggggggggggggggggggccccccccctttgggggtttttttttttttttttttttccccccgggccccccccttttttttccccca

SEQ ID NO: 683448 - DNA, 659 bp, Homo sapiens
  misc_feature (236)..(236): n is a, c, g, or t
  misc_feature (352)..(352): n is a, c, g, or t
tgccagagcctggagtctgcgaaggccgggacccggttccccggcccacaggtgggggtgtgcaaacccgagagaactgggttgcaaattcgtgaagaatcagcatcatgtttggcagctgagtattggagccaggagcctgccatgaggtttgagaacagagtgctgttttagagctggcagcagcatctcagcccaagagaaggttatattcccagaggatgtcagtcccaagngaccagtagctgccatcagttggattctgaaaactaactggcatcaacactgggtgtagaaacatgcttgccttatgtatcagaggacatgctcagcagatccaagagatatattnggcaactttttctagaaaaggcacattgggtatcattcattacattcttgagttttttgggtttgttttttttggaaacagctgggtgtatggcccaggcgggagtgtgggggaaaatccacagtcaatggaatcctcaatcacccagggcctaagcaatcctcccacctggtagctggggactacagctcacagcacaccgggtaacaatttttaaagggggagagggatctctaggtggccagggggtctcaggatcgggggctcagatggcctccggctcagttcaagggaaaggccaagtggc

SEQ ID NO: 683449 - DNA, 345 bp, Homo sapiens
  misc_feature (202)..(202): n is a, c, g, or t
  misc_feature (289)..(289): n is a, c, g, or t
agactcgatgcatgtgagatggcatgaagatgtagagacgatcgagaagcgcgacagtcagctggcccatagctgaggtacgctggtagtgacactgtaaaaatatctggcggtgcatggtagagtcagacactaggcatacagcgagatgtcctacagtatatttgacaggtgcacgggcaatgtggaaactgtaactggncttttaaggaagggtcagaagagggctgctctgccagcccagagctagcagggaccacgatgcccacttaactgttttttctttttntcggacagagtcttgctctgttgcccagggtggagtgcagtggcaccattcttgtg

SEQ ID NO: 683450 - DNA, 272 bp, Homo sapiens
gcctgcatggcatcagactagccactcctgccaggccgccgacagggttcttctccaggtagactgcaccatgctgacatgctgctactgcacctcgagtgtcctcatggagaacccagggaacagctggtgctaattcagaactgagcgctcgcattgtgggactgccttacaggactctgtggctttcagccaacatgtcaccagaccactgctgtccgatcctgatgctcgctgcaccggactgatagacggattctggttgcgtactc

SEQ ID NO: 683451 - DNA, 1080 bp, Homo sapiens
gaagcagagtgggtgacgtcctggcttctggagcgtggatgtgttctgtctgtgccatgcgcactaacacaatgagaacttacactactgggatgatagttgacgcaacagtgcaacgaagcattctttatatatgcaagtgtatcaccagctgctctatcaccgctctgacacacgcggacggcaacgcacacagactgcgcgccaacactctaccactgcgctacatctatctgcggagcgagacacgcactagcgactcacgctgccaccctgcgcactacctcactctaccaactaggcttgacactaaatcaaggcacatcaacacacgagacaactcactacatgcgtgagcaccgcaccgtgcactactataccactcgacagttgtcgtcacgcactactcactgcgaccgaaaatccccccaaaggcacaccgcatactcatatcaccacattgacgaacaacacgacacagaccactgaactccctcatctggcctcagagacacaccttctacacgcacactgcacacagcgcaccctaaacacagcagcgccaagcacctacacaccttactcaccatctatatccctccacaaaacataacatgccctttaaccataacaacttggaacagctacaaccatacaacatattgtaaccaccactcttgcaccactcttcattcatcctaacatctcaccacacacacacccacccacacacttgaatcatcccaattgcaacctatatcacttcaaacatgtactggtaacaccaatccccctaacaaacactacacactacttcaattaccacaacccacacgcaaacctctccaacgaaatacccattgacaaatatgcatccttcgacccactaaaacataaatcacaggcatcacagcacccaaccctcaccattgaatcttcctacaacacacctctcacaccaccctgcccgctatgtactgtacatcacaacagcaacactaatagccacccaacacctcctcctcccacacctctacctaccatacagcatttcacccttcccaacaatatccaacacta

SEQ ID NO: 683452 - DNA, 313 bp, Homo sapiens
  misc_feature (235)..(235): n is a, c, g, or t
  misc_feature (258)..(258): n is a, c, g, or t
  misc_feature (285)..(285): n is a, c, g, or t
  misc_feature (301)..(301): n is a, c, g, or t
atatttggatagataattcaaaatagccattttgaagaaactcaacaaaatcatgttgataacagagaagaaattcagaatcctatcagataaatttaacaaagaagttgaaataattaaacagaaccaagcagaaactctggagctgaaaaatgcaactgacatactgaagaatgcatcagagtctcctaacagcagaatttgtcaagcagaagaaagaattaatgagcctgangacatgtattttaaaatacagtncaggaggctaaaaaaaaaagagagagngaaggcggccgctgtncgcgcggccgcg

SEQ ID NO: 683453 - DNA, 466 bp, Homo sapiens
gtaaatcgtatgtagtgagtatgtattataatatagtgtgtggggtacgacggaacttgtttacatagtgctagacagcaggcactgaatgatatcgactgggaggaaaagaaatgctattgtgaggagatgaaggttgtatgatgatcactattcaggatttaccttgttcagaaagctgtgggaggcaaccacgtactttagttacggaacagctgtctggagctatacctctatgctgtctgatctcagccgaaggtcggtcgctgatttttacttatgtctaagtgcatatggtatacaactagcatctcataactccaaggtcttctaatatgagcagctggtttctctttagttagccctaagaggcctccgaaataagtcctaaaagtcccccaaataagaacattcctctcctgaaaaaaaaactttgttgacccgaaagtattatatacttctagca

SEQ ID NO: 683454 - DNA, 170 bp, Homo sapiens
gagaggagaaaacttcagctgccacgatcgatctttttcaagtgtcaaggaaaatggagcataggagagcagccccacaagcagcgtgatgggcacatagagccgacgcatgtgccaggtcctagatcagagtaacttcaccatctcaacacaataaaatggtgatatga

SEQ ID NO: 683455 - DNA, 169 bp, Homo sapiens
acgtaccacctgtactccctgcgctgtctgcggaggagaagtgtctggccagcacagctatcccctacggcaccgattacgatgtgcgggtgctactgcgcttcccccagcgcgtgaagaaccaggtcacagcagacttcctccccaaccggccaaggaacaactggga

SEQ ID NO: 683456 - DNA, 95 bp, Homo sapiens
ggggtcgagccacatggaagggggtgcgtacggagcgggcaaagcggggggccttcgacccctacaccctggtcggcagccgacacgacctggat

SEQ ID NO: 683457 - DNA, 639 bp, Homo sapiens
  misc_feature (448)..(448): n is a, c, g, or t
  misc_feature (557)..(557): n is a, c, g, or t
attatcggcacctcttcaacaacgcggggccccatattctttgttgttcgtgaacccgcgcactcttatattaggttccttttctgctcctgctgcgcagtattctacttcatgtgtagggcggctctccgcaacgcactctcctagtctactctctgctggtgccctcgacactgattttctgggctctatttggtggggtgtcacgaccgaccaccggcccccctccgcagagtatagtccctccacagggctctccctcccctgaaggaaacacaacactgaggggtgtatttatcccctctctggtcggaccgtctcatcgaatccgcacacatctgtttctagactctcactctctgatgcccctcccctctcacagcggggggccgacctcgtgcttatcctctcagacatatacaggtcactctcttctggcccacgccgngcgattgatgcccctccaagcagagtgcgagcgcacgccgccgagtgaggcagaaggcaagacaaaccgcgacgcgccccctagggggtaagacacacgacaaacccanggcgcccgcagagggggcattggccccagaataaaaacacgcactcttttttctgccacaacaaaagccaagacgaaacaaa

SEQ ID NO: 683458 - DNA, 178 bp, Homo sapiens
  misc_feature (145)..(145): n is a, c, g, or t
aacacatctcaaaaaggcttttcaaaatcaaaattatggccaggatggtgtaatcccagcactataatcccagcactttgggaagacaatgcaggaggattgtttgagcccagagtttgagaccagccggacaacatagtgaggnttgtctctacaaaagattaaaaaattaaccacc

SEQ ID NO: 683459 - DNA, 456 bp, Homo sapiens
ttctagaggtcccggtgtccctttgtctcaaaatgtgtaataaatgccttccgtgagccaggcaccatggatcagcagtacccatgatagatgaggctctgcttgcatgggagagccagagaataaacagataaatgaataaacaagaaaagaccagatgagagtggctttaaagccaataaaacagggaaatggtgaatggagcaacgggggagaagagtcaccaaagtcagggaatcatggaagccttccccaaagaggtggcatttgaactggggcctgagtggtgaagcagccagccatgggaagggtttggggaacaggatatgcaaaggccctgtggtggaaacaagccagctgtggttgaggaacaacagcaaggcagccagtgtggctggagtggagtgagcagggtgggccaggggtgagggagaacaggccagacaaagggaaaca

SEQ ID NO: 683460 - DNA, 195 bp, Homo sapiens
gctcgtccgcagttatcatggtaccccgatatgatcgggcacacatcgggtgcatgacggcgaagcacgtccggtttcgtgaccgaatcgatggttgggcacacgctctgatagtctccccgaccagtgaccttcaagggtcgcgttaaggacgataagaaggcgcgcatgtgctgacgagagggatctgattca

SEQ ID NO: 683461 - DNA, 423 bp, Homo sapiens
aaatctctgatcagacctcaaattttccgggtcttaaaatggcaattctaaccacaaggttaggtgactagataagcgggtatataatttcctcgtgtgccagcatctgtaaaagatattacatctatccggggcaccgtcactccgatatatattggtaatagatctgattatatgaagtgtgaaagtcaatatgggtaatattcctttaaatgcattttaagaacaaacagcacttaaatgattgggggcacaacagggaaagggactattttaaggtaaaccaatattaaatcagcgtatgatgaggtagagtgctgaaactgtgaaaccggataatttagaaatggtacatgctttaattcaaaacggtaaagaggcaccaattaccctagttggctggaatcacagttcttatgaata

SEQ ID NO: 683462 - DNA, 82 bp, Homo sapiens
ggcccaagaggcggcctccgtgtgcagcgggttgctggggccacgggtgctgtccgtggagccgagagatgccttgcgcttg

SEQ ID NO: 683463 - DNA, 900 bp, Homo sapiens
gcagcgacatgctatttaggtgttgctcgcatccatattttcgtcacgacaccactgtaactcaccccctcctgatactgcctaactgggtcctagacctaaaagtcatggataggcctgaaggacctactttgtccccagtgataccaactgatcatcggaacaaggatgacatacgtaaccatctcatgataattgagatctgtcaccctactagaatcctacactttacgtctaatgacatgatttcagaccgagccgacaagtcaatggtcatttgcgatgatctatatcatcattctttctgtacgaagacaaccaccactgtgatcaccacagcgttgtgaatgaacaaggcctacaccgcatcgaggcctaacctaagcccccgaataagccgtggagagtgaagttaccattaggtcctcattggcacacgcttagtcagggtctgcggggtccccttactccattctgtcatcatgatgttacgacatcacaaccatcctatgtgattgtacttatatagattctgacatcaattcccttctcacttgcccgaagtaattgatccacttaccttgagcccaaccaaccttaataatcgactagccttacgatcgaagtacgcttcttaatcagtaaagatacctccttgtacgggactccaatttatggacgtccctcaacgcccatgtcggacagccccgcgcatcgcctgggtcaactaagtcccttgccgggagtacatctcaaagagctcagggcggcctatcgcgtatacatacgcctccacagctcattctcaacgcccttgacaaaccccacattagggctaaccccttccttgttactagtgcctaatggaaggcagtaattataaccgaagccccacctgcc

SEQ ID NO: 683464 - DNA, 569 bp, Homo sapiens
  misc_feature (39)..(40): n is a, c, g, or t
gagaaaaggagaaaggagagcgagcgataggaaggcaannacaaggagacggacaggatggaaagcgagggacgagggaaaagagagggaggggaggaagaggaggaaaagaggaaaggggaaagagggggaaaaggggagaagagaagggaaaggaagggggaaagggagagaaaaaaggggaagaggaaggggaaaaagaggaaaaaaagaagaggaagaaggaaagagaagagaaaaggaaagaaaagaagagagaaaggaaaaaaggaaaaagagagggaaagggggaaaaggggaaagaaaagagaaaggagaaggggagaaaggaaaggaggaagagagaagagggaggagaggaaggaagggaggagagaggagagagaaagaaggaggggaagagggaaagagcggaaaaggggaaagaaaggagagagaagaggaagagaaaaaggagaggagaagaggagggagagaaaggaaaagaaagagagaaagggggagagggagagggggaagagaagagaggagagagggggaaaggaagcaaaggggggcagggggggagg

SEQ ID NO: 683465 - DNA, 259 bp, Homo sapiens
  misc_feature (193)..(193): n is a, c, g, or t
tagcttttactgcaacctaggaagaattggtgtgatcacaacagagagaggcaccctggatcttttgacgtggttcacgtgaaagatgccaatggcaacagctttgccactcgactttccaagcattttttgttatatggcaacgggcaacaaatccatggtagtttctcttccccgcaggaaatggatatcncgcctcaccatttgcgtgacagagagacgacaaatagacttggcggtacaaagcttgaggtaccga

SEQ ID NO: 683466 - DNA, 1019 bp, Homo sapiens
  misc_feature (1)..(1): n is a, c, g, or t
  misc_feature (82)..(87): n is a, c, g, or t
  misc_feature (135)..(135): n is a, c, g, or t
  misc_feature (176)..(181): n is a, c, g, or t
  misc_feature (200)..(201): n is a, c, g, or t
  misc_feature (205)..(205): n is a, c, g, or t
  misc_feature (210)..(210): n is a, c, g, or t
  misc_feature (304)..(304): n is a, c, g, or t
  misc_feature (319)..(319): n is a, c, g, or t
  misc_feature (326)..(327): n is a, c, g, or t
  misc_feature (344)..(344): n is a, c, g, or t
  misc_feature (349)..(349): n is a, c, g, or t
  misc_feature (353)..(353): n is a, c, g, or t
  misc_feature (357)..(357): n is a, c, g, or t
  misc_feature (409)..(409): n is a, c, g, or t
  misc_feature (411)..(411): n is a, c, g, or t
  misc_feature (423)..(423): n is a, c, g, or t
  misc_feature (447)..(447): n is a, c, g, or t
  misc_feature (457)..(457): n is a, c, g, or t
  misc_feature (459)..(459): n is a, c, g, or t
  misc_feature (463)..(463): n is a, c, g, or t
  misc_feature (899)..(899): n is a, c, g, or t
  misc_feature (904)..(904): n is a, c, g, or t
  misc_feature (948)..(948): n is a, c, g, or t
  misc_feature (1009)..(1009): n is a, c, g, or t
natcttctcctttaattaactcatcaacctctcatggcaagaatttgaaaaagtaaatttatactaaggttctaattttaannnnnncggcagaggttactgctcagtgcaccatgaagttgagacagagttggngacacctcagccccacctctctggaacaggaaagatgattnnnnnnggggcacaggtcagcgtgnnttgngggtnatggtggacatgggggtggggtggtctccccacctcctcacattatgcctacacgaacacagacacatgcaggtgcctttgcagaaacaaagtnagggttcttcaagtnacaattnnttggtttggtacaactnttgcntctnagtnccacacaaggtagctgtttcacactttacaagctgtgagggacacatcagancnctgggcactgtnactgcttgcagcctgagtgttctncctccttttntntctnagctcttcctcctccacatcacggcagcgaccacagctccagtgatcacagctccaaggagaaccaggccagcaatgatgcccacgatggggatggtgggctgggaagacagctcccatctcagggtgaggggcttgggcagaccctcatgctgcacatggcaggtgtatctctgctcctctccagaaggcaccaccacagccgcccacttctggaaggttccatcccctgcaggcctggtctccacgagctccgtgtcctgggtctggtcctccccatcccgctgccaggtcagtgtgatctccgcagggtatgaagcccagggcccagcacctcagggtggcctcatggtcagagatggggtggtgggtcatatgtgtcttgggggggtccgtgcgctgcacgtctccttcccgttctccaggtatctgcggancactncacgcacgtgccaaccaggtaggctctcaactgctccgcctcangggccgcctcccacttgcgcttggtgatctgagcggcatgtcggcgcggtccaagagcgcngtctcgttca

SEQ ID NO: 683467 - DNA, 963 bp, Homo sapiens
gtccctctcgctcggggttcgtcgggtgggttaactcgcggttacaccctgcgtgtcgataccctgtcgcaccggcgtcgatggcccatctatcctgggacagagcgctggtgatgtccaggatcttagctatccgtattagcatcgagtcgtaacatgaattagtgtgtgatattcttcgatgatcggttatcatttgttgggggaagcagacgcagcgaagtccctccgccaagacgatttatgctggcaccatcacggattgctgcgcattttcgccagctgggtggcattgagctgcatggtgggtaatacctccgtgttgcggcaagggctatcacagtgaggcctcatgaaataccagcgagatctgtggaataatgctgacttgatgtcgcggggggagagtggagctaaagtctatcccacaagcggcgaacgcttacattttattcatgggaccagtcgttcgcctggagccaattaaaggagctcacggagcatggtcaggatatcatacagaagtccacgcctgaagcatcccatctgtagtccagagccccatctatgcgggctcggggccaacggtggctccatgaaaatggtagctgcagtgtactccgacggatgtggtctctgcgaaggctgctccttaaatcctctcgtggactccagtttcttgttctgtacctgtgaacaatgcccgttgtgcatacgtggacactggttgatgtactctgctccctccactcccggtccctctatagtgggcggggcgtccagcagggttttttgcctggttggcatctacctacttttcaggatgtttcgggtgccgaactgggtctcaggtggtcagcctctcgggggggtcggccttggtggacctggaggttgccttggcgcccgacgggttgtgggccgcccggttctgcccgggcaaggggccgcgcgtttttgacc

SEQ ID NO: 683468 - DNA, 858 bp, Homo sapiens
gcaaaactaacccccgtaataaaatgaacttaacctcacttcattcatcgatgctccccacccgatgcaacatctcctgcattgattgaccccttcggttcactcctcggttgcctgcctgatcctgccaaatcaccactaggaatatacctagccatgcaacttacttcatccatgatcgcctcaagagccgccatatttcattcatactcagcccagctatcatcttctgagagacgagtataataaaatggcctgatactcattccgttagccttcacgccacaatgactgcctcataatattggtcgttgaatcttcgccttgcttgtctctatcaacactcggtgcgacggcgcattctaatttaactggactcatttgtctctttactctagaaaccctgaaaactatctggacattatctctcctgccttgctacatattgcaaccaagcacttcaaataggcgtgacgtcctacccgatgaggtctaagatatcatttcatagcaggggtccacaagtgaatgaacaaagactttactattcgatgatccctattaccattgatgacgacgcaaccttaattccatctgaactctggacgagtacagtctacctgcgagttaagacatgcttccaaccgtcacaacgatatctttacctttcacttcatctgtgccctatcattgcattgcgaggccctagcagtgactccagcctccgtattcttgcgcgaaaacgggggatcaagacaaccccgtaggaatcagctcccattccgatgaaatcacttacaccgcttactacggaaacaaagaagccctcggttaacttcgtctgcttcctctccttag

SEQ ID NO: 683469 - DNA, 404 bp, Homo sapiens
atcacactcacgatctcacagactcactatctcactcactcataatctcacaatatcattcactcacgatctcactcaaaatctcacagactcaaacgatctcactcacgatctcattcactcacgatctcactcacagtctctcacgatttcactcatgatctaactcacgatctcactcattcacatacgatctcactcacgatctcagtcacagactcactaactcacgatctcactcatgatctcacaatctcatgatctcactcacagactcactcacgatttcactcacagactcactaactcacgatctcatgatctcactcactgactcactcacgatctcactcactcggacacaatcagttaaatttacaaggggatttagagggttctgtggg

SEQ ID NO: 683470 - DNA, 720 bp, Homo sapiens
gcagcgcagcttcgtggagcatgagtgctgcatgtgactgcatgtgcaatgctggcactggtgcacctggcctgaccctgggaaatgcctggggtccccggttgtttgcatgctccctggagctccgtgccggctggctccaccttgcgaaatgagatcccgtgaggtcctagtggacccacgcatgcctggctgtgctgctcatgtgctgtgtggcctgctatttttgtggcaatggtgcgtgcgttttgccaaagttgcttcgatgatctctggactgcggacaccaatggatggtgttctgctgggcaagatttgtgcctaagtctctgctgctcaatgcctgcaaccatgatgtggatgaagatgtccatggaaatatccattcacctgcagcctctgcccaccagcactgtcagtagtgattccactggctttttctgatggacaactgacttctgtgttcgtggtgttggatgctctgcctgccggaggtctctcctgtgatgctgcacaatgagtgatgtgaaatgccctgactgatgcctgaggccctgatactacctactggcaaattgtgcttgtgctgccagtacctgcaccgaaacctgagttattcatcgagacctcaagcttgggcaaccttttcctgaatgacgatctggcaggtgaaaataggggacttttggacttgtcaacaaagtcgaatctacggggagg

SEQ ID NO: 683471 - DNA, 286 bp, Homo sapiens
aatgcccagttcagctatgcctggcttcaaaggagagggccccagcttcccgaggtggagctgtcagtttccacaaagaatagagtatcaggcctttgtatgttgtcatatttattatacaaaacatcagccttggcgtgtgtgttcctatattaactccaaagggaaacacaccgactgcctcagcaatctatgcaaagaccttgcctggcccggtggcaagcgctgaaaataccgaccgcctgtaggctcctggaactatacagattggttaagagttccaagt

SEQ ID NO: 683472 - DNA, 391 bp, Homo sapiens
ccatggtttgaccaaaaaaaggggaaatggggaggggaaaagggtgggattgtccagcatgcttgtatgtatatttcagaaccttttttaaatgtaaaagctggacatttctgggaagttctgaatttcttttgtttccttttttccttcaagcattttgcagtgagctttttttatatatagccacccatttggaaggaccccaaaatatgggggagttcctttaaaaaaataactccagtatagcgctgggccaggaccctaaaagactttgataaaaagaaaccataataaaaggccccccttttaaatgtcattcatatatcccttgtggatgagggctaaaaacttttccccccttttttagagggattaattattgaattactga

SEQ ID NO: 683473 - DNA, 233 bp, Homo sapiens
gacctggggctttccagggcccctgggttgaggctgggagagaagggcgaacgtggacccccaaggccctagcgggatcccggggtgtgctgccaaggggttgctggacgtcctggagccgaagggtcctgaagggccaccaggacccaactggtgccggccaaaggagagaagggggagcctggtcgccctggggacccttgcaagtggtgggacctgctgttgctggaccc

SEQ ID NO: 683474 - DNA, 151 bp, Homo sapiens
  misc_feature (43)..(43): n is a, c, g, or t
  misc_feature (109)..(109): n is a, c, g, or t
agaacacccgatgattcagaatcgttccgaagtgctatatttnttcgactgctcagactgtacccctcaagtgatctgccctcctcagcctcgtaaagtgctgggattncaggggtgagccgctgtgcctggctggccctgtgatatttct

SEQ ID NO: 683475 - DNA, 104 bp, Homo sapiens
aatgcagttaatacagactcagactctggaaaaaatttttaaaaccaggaatagtaggcttgacctaccagtacccagctactcaggaggccgaggaaggaaga

SEQ ID NO: 683476 - DNA, 753 bp, Homo sapiens
  misc_feature (573)..(573): n is a, c, g, or t
aggccggggagcagccgaccgtggagccccagaaaatcatgccaccctcaaagcctcatccacctgtcgtgggcaaagtgactcatcacagcattgaattatactgggatctggaaaagaaagccaaacgccaaggacctcaagagcagtggttcaggttctcgattgaagaagaagaccccaaaatgcacacttatggtatcatttatacgtaggtgcagtgttgaattgcttgccactttgccttacttcctgattagctggaatgatttctgttgtctctaaaaagccactgcttgtttcaaattaaagaatgagtcagcatcatttgtattcatgctcttttatgaattacaatttttggaaaataggcattagcagtaactttgaaattaaacctctgtacctttgagagcttctttgacttctgaaatattttaatgatatgtatttaaaatccagaatgtagagacagactcaaacaatagcttgatgcaattaggggaggcttccatcaagctggttggttcactgaccgggaatgggcccccatgggctacccctgctagcttntttgatctcatggataccaatgtcccctgggaactcttttatccacgctgggtggctttaacctgacaggggcaagtggttccatcgcaagatcttgtcgttggtgggggttgaaaacaatccttctgttttttcaaaggggtcttacacaaggccatttagatgaaaaccccccccccc

SEQ ID NO: 683477 - DNA, 150 bp, Homo sapiens
ggagctcggtacctccttctggccacgctcaggttgatctggcggaaactcattatggcttgaactgctgggtgcctagtgatgacgtgtgcgtgaggagtctttcatcggtggtaccgagacacataacgctagacgcttgagcgtact

SEQ ID NO: 683478 - DNA, 93 bp, Homo sapiens
  misc_feature (23)..(23): n is a, c, g, or t
ctagaggatccggcacattgtgngttggaggctgtggctgctggctgagggttctggtgtctgtgccagcccattaaagtgcagttccctcgg

SEQ ID NO: 683479 - DNA, 558 bp, Homo sapiens
acaaggtctcactctgtctcccaggctggagtgcagtggtgcattcatagctcgctgcaaccttggactcctgggctcaggtgattccccaatctcagccacctgagtagctgggactataggtgttagccaccacacctggctatttttattttatttctgtagagacagggtcttactatgttgccaaggctggtcttgaattcccaatgttctcttttagtagtttcatagtttcaggtgtcagatttaagtctttaagccactttgatttgatttttttatatggtgagagataggggtctagttcattattctgcatatagacatctagttttcccagcaccatttattgaaaagactgttctttccccaatgtatgttcttggcagctttgtcaaaaatgagttcattgcagatgtgtggattcatttctgaattctctactgttacattggtctatgtgtctgtttttataccagtaccatgctgattcgggtctctagttctacaataaacttcaaagtccaggcaatgtaacaacaacatacacaacag

SEQ ID NO: 683480 - DNA, 325 bp, Homo sapiens
tgggatggagtcttgctctgttacccaggctggagtgcagtggcgcaatctcggctcactgcaacctctgcctcccaggttcaagcgagtctcctgcctcagcctcccaagtagctgggattacaggcacataccaccatatccagctaatttttgtatttctagtagagacgaggtttcgccacgttggtcaggctggtcttgatctcttgacctcgtgatctgcctacctcggccttccaaagtgctgggattacaggcgtgagccaccacgcccagcctaaacttgtacttaaattatatattgatagcttattcattttta

SEQ ID NO: 683481 - DNA, 1090 bp, Homo sapiens
  misc_feature (608)..(608): n is a, c, g, or t
  misc_feature (610)..(611): n is a, c, g, or t
agcgggaccgcgagccaagggcagcggcgggccgggccgtgactcagtgaaagccgcaacggccgggcctcggaaaacggcgggcgcgaagccgccggggccggggcgagaacggcggcgggggctcaccatgtccttggacgagcccagcttcttgaggccgtccaggggcagcaggtcggcggagtccttgtggatgaactgcaccgcctgcttcatccggcgctgctgtcgcagtgacgccgcctcccgcatgtcggtctccttgcggccgccctcagtgaggagccctgagtaaaacatcgctgaggcgcctggcggccctggtagcccacagccccccggcagcctcagcctcgagctcctccagcgccgcaagggccccgagccgcgccttttatagccgagcgtgacgtcgcggggagcagccagtgcgcgctgcggggggcggggccggcacagagtccacgccccgcgcggctccctcgcgtcccgcgtcccgcgtcccgcgtcccctgctcacccggtggcaaagccggcgaggaggcggcggcgctggtggggactgacccggcagtccgagaatccaccgcggcttttcacccaancnncccctcctgcgtgggggccccgcatcccctggactggcgtgggctctggggcccgatgccctggcagccccggccatctctgccgctggccgcgggtacctgctcacctgtccacgccgtggccgacccggggatcaccgacagccgggccatgcctcgagtcccgccgcccgcgccgctgctcggcttctcagaaacgcacctccacgccgccagccggggctccaggtcaaccgcccgggcccggaggactggcgactccctccgaggttgggagcgctccggatttctccaacttcaggcagtgtggatggggctcatgaaatagagaaatatagaggaacaagatatgtgtgtatctccaaagagtttatggttcatgcagagtcaggcatcaatgatcacaactccagtcttcatgcagagcacgtctcttcaacagtattgcctgctctatacactaggaaacattatgtgga

SEQ ID NO: 683482 - DNA, 492 bp, Homo sapiens
acaatgccacaggaggacggtgttcgcctaccccaagaggaggaggacggtgccgggggctggggatgagagttcctgtgggactggtggatggcacccaccggcgcagtaaaaatggcaaagccactgagaggcctggggactcgtgtcagtgagcgtcttctgtggagcccgggctgagactcaaggggcaaaccacactcctgtaatatccggcgcatcaaactcttttgaaccaccacaacagcccgctgaagtcctgcccatggagcgagttcccaggccagaacctaggactcgacccactccagcttacagctccgggtgcaaattcctgcccttgatcctgtcccagtttctgccccagtacccatttcagccacaaatccactaacattctccctgtccatatcttgcctatactactacccctccttcagagattcctccttgtacttctcctggcagattgctcaggcgggtacgagatcg

SEQ ID NO: 683483 - DNA, 165 bp, Homo sapiens
cttacttactagcaactactaactccggtttgatcaatccccaaacagttacatttttctttacaaatccttgccctcccattatatataacaaactccggtttctcatgaacgtttagtacggttagctcttacagtgatcacattggccatcgaaggactaaa

SEQ ID NO: 683484 - DNA, 725 bp, Homo sapiens
  misc_feature (85)..(85): n is a, c, g, or t
ccaggctggaatgcaattgcttgaacccaggaggcagacgttgcagtgagccgagatcgcaccagtacactccagcctgggtganagagccagactctgtctctccaaaaaaaaaaaaaaaaaagaaagaaacttgtgtgtatgcacaaggagatatgtttaacactattttgcagcattgtttgtaccagttgagtatcctttatccaaaatgcttgggaccagaactgtttcagatttcaattattttcagattttggaatatttgcattatacttaccactttaacatccctaatccaaaaatctaaaatcctccaaagaacatttccttgagggtcatgcatattatacactcaaaaacgttcagattttgaagcatttttggtttggggattaggatgttcaacctgtattagtaaaacagtggaaacaattgaaatgtcagtaggacagtagttaactatcatattcatacaatagaatattacatagtagtgaaaatgaatgttatgactttcaaatattttacctacagtgagaaatatatttcataccatgactcaatatatatatgcttatatataatcacatacatatatgtatataggcattaaattgagtacttatgatacattttatttactgttctgttttttctaaagcagttcatgacctgctatattgattttctgtgctactaatgatttgaaacctacagtttga

SEQ ID NO: 683485 - DNA, 338 bp, Homo sapiens
tatttacaactatctataactattagaaatccagtctgtcctattcaaacagatcttagccacacacttcttcaaggagtatctcccaaggttccttgtaagtggatatataatttttctccattggttagtatagtattatattttcatctgtcttatagctctagtttcctatctagtacacagtagtaacatttatgtatatatcttatccctcctagattattttacctttgccttacttaaattttcactacctgtggaacttccacatactagacttctggatcaatctagtgatgtgtaaaaatatacattagtaattaccttattaatgg

SEQ ID NO: 683486 - DNA, 1280 bp, Homo sapiens
ctttaatttattaatgcaaacagtacctaacaaacccacaggtcctaaactaaaaaaaaaaaaaaaaaaaaaaaaaaaaaggggggaggcccttcctttgcccggggacgccgaactctctcaatggtatcaacaggctccttcgccctctggctcctggtcatgttccattattggggagccccagcagaagaatggagaggaggaggaggctgagtttggggtattgaatcccccggctcccaccctgcagcatcaaggttgctatggactctcctgccgggcaactcttgcgtaatcatgactatctctaggattctggcaccacttccttccctggccccttaagcctagctgtgtatcggcacccccaccccactagagtactccctctcacttgcggtttccttatactccacccctttctcaacggtccttttttaaagcacatctcagattaacaagagagaagaacaagaagacacaaaaacagagaaaagaaaaagaaacacataagacaaagaacaagagagaacaaagaaacaataataacaagacagaaaaagagacaacaagagacgaaagagaaacgaaaaacgtgcgcgggggcgccgtgcagagtcatggacggccccgtgaggggactccgaagccgtcagcatcccgggaccaccgcaagacactgcatgtgtgcaacaccaacagtgggggggccctccaacgtgccagagagagacgagtgacccaatagggaacgagtaggaggacgagcggagtcccgtagcagtccgcggtcatacataggccagagcaaggggaggaatgcatagagaagcggaacaaacaacggacccggtaagggaccgaacgcgaagagaacgagcgggaacaggaacgggcacaatcgctaagatagctcacttaacgaggtgaggaggagagagagtaatacaaatcgagggagcggagacaccaaacagagccacgcaatcaccatagaggtaaacctaaggcacacgcggtctccgacagccgacacctgagagaggagagaagccaaattgacaaggtcaccaagagccggagaccgactctcgtgggggagcagttcgatcgaccgaacccaaattgcaccgaggggctagactcgataatgggcaaaccgaaggggacgtcgcaagaaaaagcgcagatagcgataggcacagcgaaacaggatgcaaaaaacccacaatagagcaaagagggacgacacacaagaagatttaaccccgaaggag

SEQ ID NO: 683487 - DNA, 605 bp, Homo sapiens
  misc_feature (12)..(12): n is a, c, g, or t
  misc_feature (21)..(21): n is a, c, g, or t
  misc_feature (66)..(66): n is a, c, g, or t
  misc_feature (86)..(87): n is a, c, g, or t
  misc_feature (103)..(103): n is a, c, g, or t
  misc_feature (109)..(109): n is a, c, g, or t
  misc_feature (114)..(114): n is a, c, g, or t
  misc_feature (141)..(141): n is a, c, g, or t
  misc_feature (163)..(163): n is a, c, g, or t
  misc_feature (170)..(170): n is a, c, g, or t
  misc_feature (178)..(178): n is a, c, g, or t
  misc_feature (190)..(190): n is a, c, g, or t
  misc_feature (193)..(193): n is a, c, g, or t
  misc_feature (212)..(212): n is a, c, g, or t
  misc_feature (227)..(227): n is a, c, g, or t
  misc_feature (229)..(229): n is a, c, g, or t
  misc_feature (238)..(238): n is a, c, g, or t
  misc_feature (247)..(247): n is a, c, g, or t
  misc_feature (255)..(255): n is a, c, g, or t
  misc_feature (275)..(275): n is a, c, g, or t
  misc_feature (279)..(279): n is a, c, g, or t
  misc_feature (286)..(286): n is a, c, g, or t
  misc_feature (291)..(291): n is a, c, g, or t
  misc_feature (294)..(294): n is a, c, g, or t
  misc_feature (300)..(300): n is a, c, g, or t
  misc_feature (303)..(303): n is a, c, g, or t
  misc_feature (312)..(312): n is a, c, g, or t
  misc_feature (364)..(364): n is a, c, g, or t
  misc_feature (373)..(373): n is a, c, g, or t
  misc_feature (390)..(390): n is a, c, g, or t
  misc_feature (403)..(403): n is a, c, g, or t
  misc_feature (407)..(407): n is a, c, g, or t
  misc_feature (412)..(412): n is a, c, g, or t
  misc_feature (420)..(420): n is a, c, g, or t
  misc_feature (437)..(437): n is a, c, g, or t
  misc_feature (440)..(440): n is a, c, g, or t
  misc_feature (446)..(446): n is a, c, g, or t
  misc_feature (453)..(453): n is a, c, g, or t
  misc_feature (461)..(461): n is a, c, g, or t
  misc_feature (470)..(470): n is a, c, g, or t
  misc_feature (473)..(473): n is a, c, g, or t
  misc_feature (504)..(504): n is a, c, g, or t
  misc_feature (530)..(530): n is a, c, g, or t
  misc_feature (556)..(556): n is a, c, g, or t
tatggggccaantttaaaaanttttatttaaaaaattgcattttccacttacaaaacagtgtttanaaagggcaatgttatttccnncccccgtgcatatgtnccaaantcaantattgagaatgcccagtaacttactanagcagcctaactttttaaaacngccacanaatttgcnacgaatttaggnccntcaaatgttttaaatgtgnggaacaatgccacancnacacttggntggcttaancaaccccntcaatggggggccccgaggnagcnccaccanagggnggngccccnccnccaggaaancccccaggcattccccccggcatgcctgtgagttcaaacttgccaagcaggntgttatccnttgtcatggcacgcccnccttcaaaaaccngaanaagcncaccaggntggttgtcagaataggnagngaaggnctgtgtntgcttggnaggaatggnggnattacgcttgaagaggacagtaatgactccnccagcagtttcaaaaccaagggaaanaggagtgacaaccaagagcagcaaancttgaacattctcagacttgtctccagacaagaaggctgcctggacagc

SEQ ID NO: 683488 - DNA, 935 bp, Homo sapiens
tataaaaatagctctgttaccggaaataactgttcatttttcactcctccctcctaggtcacacttttcagaaaaagaatctgcatcctggaaaccagaagaaaaatatgagacggggaatcatcgtgtgatgtgtgtgctgcctttggctgagtgtgtggagtcctgctcaggtgttaggtacagtgtgtttgatcgtggtggcttgaggggaacccgctgttcagagctgtgactgcggctgcactcagagaagctgcccttggctgctcgtagcgccgggccttctctcctcgtcatcatccagagcagccagtgtccgggaggcagaagatgccccactccagcctgcatccatccatcccgtgtcccagggtcacggggcccagaaggcagccttggttctgctgagtgcctgcctggtgaccctttgggggctaggagagccaccagagcacactctccggtacctggtcctccacctagcctccctgcagctgggactgctgttaaacggggtctgcagcctggctgaggagctgcgccacatccactccaggtaccggggcagctactggaggactgtgcgggcctgcctgggctgccccctccgccgtggggccctgttgctgctgtccatctatttctactactccctcccaaatgcggtcggcccgcccttcacttggatgcttgccctcctgggcctctcgcaggcactgaacatcctcctgggcctcaagggcctggcccccagctgagaatctcctgccaggtgtgttgaaaacagcgggcactttgcaaccgtgggcccatgcgccctggcactgggacaatattaacactcgtgaatatctgcagggctgaatcctggcccaagagcctaccaagagcagcgggagttctgacacctcaccagtccagcgagttacaac

SEQ ID NO: 683489 - DNA, 808 bp, Homo sapiens
tataaaaatagctctgttaccggaaataactgttcatttttcactcctccctcctaggtcacacttttcagaaaaagaatctgcatcctggaaaccagaagaaaaatatgagacggggaatcatcgtgtgatgtgtgtgctgcctttggctgagtgtgtggagtcctgctcaggtgttaggtacagtgtgtttgatcgtggtggcttgaggggaacccgctgttcagagctgtgactgcggctgcactcagagaagctgcccttggctgctcgtagcgccgggccttctctcctcgtcatcatccagagcagccagtgtccgggaggcagaagatgccccactccagcctgcatccatccatcccgtgtcccagggtcacggggcccagaaggcagccttggttctgctgagtgcctgcctggtgaccctttgggggctaggagagccaccagagcacactctccggtacctggtcctccacctagcctccctgcagctgggactgctgttaaacggggtctgcagcctggctgaggagctgcgccacatccactccaggtgactcactgcagtacccagggacggggtatccaacgtgtgtcactcccttgatgcctagccctgcccctccttgaacctctctggctgagctgggctgggggctggggtctggggtctggctgtcactcacatcttctcgggcaattaaagtatgtatgttctgttcatgcttgggcatgtacgtatttctctggctggtcccttgcaactttctgacctttatattttttagttctatcttctcta

SEQ ID NO: 683490 - DNA, 2089 bp, Homo sapiens
aacgtacaggcagggggaatgtctcttccaaggttgctaaaagtaaacatcagaacatatgataattccattccaatcagtgaatcaagcagaaaatcatggaatcaaaaacactttgctttgacatttcccaaaccactccagagaggtacaaatgataaatcaagacctttgaaatcacaaataacagttactagacatgacaaaagaaaactagaagaaggccagaaaccagctcataaatggataaggcattctttcagaaaaattttgcaatggccacccatttacacagctgccagggaacagactccattcagacatctttatacttccaaaacccatcttaaaaaagcagaatataaaaagtccaaagatgaaaaaggaggaacacctttgaagaaagattccaagaaaaaaggaggttcatatgcaacaaatccagaatccaagcaaatagtagaagagaaaactaaaagacaaaatgaggcagataaaactcccttaaaatcatcacatgaaaatgaacaatccaagaagtcaaaatccagttcagaaactaatccagaatcccaaaattctaagacagtctcaaaaaattgttcacaaaaagataagaaagattcaaagaattccaagaagacaaacactgaattcctacatacaaagaacaatccaaagaaagatttgaagaggtcaaagactagtaatgatcccatatcagagatttgctcagaaaatagtttaaatgttgatttcctcatgttagtgggacagtctgatgatgaatccataaattttgatgcatggttaaggaattactcacagaataattcaaagaattattctttgaagtatacaaagtatacaaagaaggacacaaaaaagaatgcaaagaaaagctctgatgctgaatctgaagactcaaaggatgctaagaaagattcaaagaaagttaagaaaaatgtcaagaaagatgacaagaaaaaggatgtaaagaaggacacagagtctactgatgctgaatctggagactcaaaggatgaaaggaaagatacaaagaaggataagaaaaaattaaagaaagatgacaagaaaaaggacacaaagaagtacccagagtctactgatactgaatcaggagatgcaaaggatgcaagaaatgattcaagaaatttgaagaaagcttcaaagaatgatgacaagaaaaaggatgcaaagaaaattacattctctactgattctgaatctgaactggagtcaaaggagagtcagaaagatgaaaaaaaggataaaaaagattcaaagacagataataaaaagtctgtcaagaatgatgaagagtctactgatgctgactctgaaccgaagggagattcaaaaaagggtaaaaaggatgaaaagaaggggaagaaagattcaaagaaagatgacaaaaagaaggatgcaaagaaaaatgcagaatctactgaaatggaatctgatttggagttaaagaaggacaagaaacactcaaaggaaaagaaaggttcaaagaaagatatcaagaaggatgcaagaaaggacacagagtctactgatgctgaatttgatgaatcttccaagacaggctttaaaacatctacaaaaatcaaaggttcagatactgaatctgaagagtcactatataaacctggggctaagaagaaaattgatgaatcagatggcacatctgcaaattcaaagatggaaggactggaatcaaagagaggattcagaatgtcatccaaaaagactacattcaatgaaaaaggggaaaaagcaagtacaggtagagttcctccatcaagagaaaaaccaccactccctgcttgtgagccttctctaccatcaccaaaggtcagacgtctttgttggtgcaagatgcctcctccacctccaaaaccaagatatgctcctttgcctgaagcaccgtggattcataagctgctttaaagaacaactgagcacttggtttcacagaatggccttaccacagtaagcaccacctactctcaaatgagcatttctacctctgtggaactgaaataaaaacaagtcttccatgaaa

SEQ ID NO: 683491 - DNA, 629 bp, Homo sapiens
cacggtgactcacgcctgtaatcccagcactttgggaggccgatgcgggtgtgatcacgaggtcatggagttcgagaccagccgtgtccatcatactgataaccccatctctgctgggaaacaatgatatcagaaaattagctggttgcgtggtggcaggtgcctgtaatcccagctactgagagaggctgggtcgatgagaatcgcttgaacccgggaggtggtaggttgcaatgagccgagtattgcagccattgcaggccggatgactagatgatgagactctgtctcacaataaaaagataccatcactgagataatggcttgtggggcacatcaaaatcatcaaaatagactgctccatcaatttggtctggacacgtggcgtccacatatttatattctatggtagcgatatgtgtcacgaatgtgaacccgcggacatcaagatataggtcgagagttgtcagcccttataaaatatacgccgggggaaaacccaaggtttctggaacaaatcccggggggggtccgagggcccaaaaaggggtttttatcaccggggttccaggggaggccccaaataaatttgcccctgggggattcccagaacaccgcgcaacagcgga

SEQ ID NO: 683492 - DNA, 1060 bp, Homo sapiens
gatgcgacccggatctctcctacggtcctcatcagctccatgtaagcttcttcacagtggtccgtgtgatttgtctgcatcctatgcgttgcctcgcagatgctcagatagactctgaaccattcttttcctctgattcgcgtttgcccggtagggcattactgtattgtgagtgcatcgcgaggacagtgatgagagtagccccttactttccctgtgacaatgcacgaggacatccctgatgttcaccatcaggcagtcggatcaaaatacttccatctgtctccgtcggcgacacgtgatgagtgcgtgccaatcaaggggacctgtgggggtgtgccctgcgacccgtatgatcgctgatcgaactgaattgtctgtagagcaaattgtccgacagtacgtcatcatgagcgccactgggttgcgagtagtgcacctcgcatggactcgaatcatgtgtctgtgcctaaataacatgtgggtgtcagagtagttgaggctggaggacctcgcacatacttgaccttacgcgtgaccccctggcaggggacagtgcccatgtgcgaagactaccgtgagctttcctccttcggtgtctgcctctcagtgagaacctgcgcactcatgtaccgtccccttgaggggtcatggggaactaacatatcgcttatgtagaagggtctcatgctccatgaggaagctgagcactttcgtgtctagtaactacgggcatcttatattgaatgcttttagaccagcgtacaatggcgaatagtttcttgcgaaaattgataacaaaattaaccttgttcttcggagcgccacttgtggaacacttcgtgacctaaagagttatcccagaaatcgccagcggaatgttagacgagttgccgccactctccccaatccagagaaccgaggaacaaaggtgggactttgtgaacctacatccatggaaaaaaacgcggacaccttttaacttacggagggagtaatcgcccccccattttggggatgcccctcggtgggggtactccctcctgggatttgggccccg

SEQ ID NO: 683493 - DNA, 343 bp, Homo sapiens
aacgtacaggcagggggaatgtctcttccaaggttgctaaaagtaaacatcagaacatatgataattccattccaatcagtgaatcaagcagaaaatcatggaatcaaaaacactttgctttgacatttcccaaaccactccagagaggtacaaatgataaatcaagacctttgaaatcacaaataacagttactcctgaagcaccgtggattcataagctgctttaaagaacaactgagcacttggtttcacagaatggccttaccacagtaagcaccacctactctcaaatgagcatttctacctctgtggaactgaaataaaaacaagtcttccatgaaa

SEQ ID NO: 683494 - DNA, 388 bp, Homo sapiens
tctttatcaatttgctcctaaagctcagaggagttattagtcaccttcggaagcttacttctgtcaattcgtcaatctcattctcgatccagttttgtgcccttgctggagaagagttatgatcatttggaggagaggaggcattctggtttatggaattttcagcatttatgtgctggtttttcctcaccttcgtggatttatctacctttgatctttgaggctgatgacccttggatgggatttttgtgtgtgggccttttgtttatgttgttgctttctgttagtgtttcttctaaaagtcaggcccctcttctgcaagttgctgcattttgctggtggtctactccagaccctcttcacctgggtatttccagtggtggctacg

SEQ ID NO: 683495 - DNA, 1424 bp, Homo sapiens
ggaactagtctcgagttttttttttatgtttatttgggcaaaaaaaaccttttaataatgagggggaaggggcaaaagggtgcaacccaggcaggcaggttgagggcaggacaatgccgccttcatagggctcctccagaaaaagcgtgtgttcaagcggaggacgttgggccggggaagggcccaagggctgcagcaacattctacacgaggggctcagcaaaattctccaggcggtttccacactcgttggcagacaacaagagggtggctcattgggcctcactcaagagctgtgggggtctctgccccgtggtgtttgttagggtgcaagtcttattttcccgtgccactttggcgcgcaggtgtgacccagggtcgtgctctgcgtgtgcgcgcacagtgtggcggggccactctgtgggggcctcctgcgagatgtgggccctccctgtgtggggactcatggggccctatatacgggagatatctctcctttgacaaggctctcaatctacaagtgtggggcaaatatctctccctctctgaggagggggcgtccatctcgaacaaggcgaggatcatctgtgccagtgaggggcgtcttgttatatgtggggccccccacagacacacaaagggccacaatattttctcacggggcggcggggacaaacggcggtcaccaggggaggggcgaccaccctgtggaggcggcacaagcatccacctctacacaaagggggttaggggggaggagaaacattacacgaggacctcctcccgcggaacacccagggagaggtgacacctataaaagatacacgcatcaacaaggggtgtcgtggtgggtgtttcccccaaaaagtgtggcgtccccccgggggaaaaaaagacgttgccagtgattcacccccgatcgaggagaacttcttttgagtagccgccggcggaaaacagattgggggcgccctcttccggtgaagatgtctcgcgcgaacaccccgagatgtggggccccccacctgttgtggggtcctcaccatgtggtggcccccgccggattcttgtggaccagcggggccgccagatcgcggtgtcatcacaacgacatcttccctgcggcgggggggacactcttgttgtcgtgtcaggcccgcaccacagcggggcaattctcaccaccgtggctgtgtgccacccggaggtggtccgcccccgtgggagcgaggcacacacttctggctggggggtagaaactccccttcccggggaaagctctccagcacgcgggtgttgccccccgtgttgggcgcaagaccttccccgggggcccctctttgttggcggcaggctgtggggggaacacctccgggggggagccccttcatgttgagaggggacaatcttccccctcttgggag

SEQ ID NO: 683496 - DNA, 792 bp, Homo sapiens
tctgagggtgaactgtgtcgctttgagaagttgtcgctgcgtgtagtccacccttcaccaagggtggtgccttgtacacttctggagtgggcttaaaaccagagctaaaaacggggagggcgaaatagtttatacttgggggatattctctccttcggtgatccgacacccgagtgtaccccgtctgttgtgtcaaggtacgacgacgcctgtgtacgacgcaactggttgtaggatcattaatagtgccacaacgcttagtactattgtggcccccagcttatcgcccatgtgaggatgaaggtcccgcgcggtgacagggtcttcttttcatcttgtgttgacaacgcacataatcatggtgggggtaagcaggggaatatatcgacgagtgtgtttgcacccccctgcccacatccgacacgaatctatgtacaggtcaggaactgactgctgtttatgaatagagtatgccgcacggtatggagctacaccacctatgggatggtgtcatccacacactgttagtgcccacacaaggtatgatccattggagggtttgtgctttagtccgcccctctctgtagtaccaagacacgctcgtcgagaagtcgcggctagctgtgatacagggggacagtaggtgcctgtttgcgccacccccaaagagcgcagttattacagcccggcggagaaaaatcccccacctgttgtacgattaagctcgggcgtaacaccccccgctaagagaagttcgtacagtagaacaccccccgccccccaaacaaaaca

SEQ ID NO: 683497 - DNA, 92 bp, Homo sapiens
ctaacacagagtttgtaatagttgttgtggacagtacagacagagagaggatttctgttaactagagaagaactctataaaaatgtttagcc

SEQ ID NO: 683498 - DNA, 210 bp, Homo sapiens
  misc_feature (27)..(27): n is a, c, g, or t
  misc_feature (54)..(54): n is a, c, g, or t
gctcctacccggatcacaaaagcgggncaaagaggagaacatttcttgtgacantctcgtcctggaaatcaactctctcaagtatgcctataacataagtctaaaggaggtgatgcaggtcactgagccacgtgtgtcctggagttcccccgtgcaacagtatggattcccctgcttgactccaagccgctttgtgtgtttccgggtacc

SEQ ID NO: 683499 - DNA, 903 bp, Homo sapiens
tataaaaatggagtttcgccatgttgcccaggtggtctgtgaactcctgagcttcagtgatccgcccgcctcggccttccgaagtgccgatcacaggtgtgagtcactgcccccgggtctccagggctttctaattccaagggatgcgatctggtttagagcctcatctgggtgactctaatccttatgaccagaatggtgcagggattctggactggcatccacactgggggaaatgtaacagctttagcctggggcacagaaggctttctcttcctggtgcttcctgaaccagaaacttcaggaccctgagggactcccgctggagggaatggaagcccagctcctaggacttattaacaaaaaaaatatggactttcagcatttatgggaggcgctcgacgcggacaagatctcttgaatacaaaacatcttatctggaaaagagactaaacaggccaaattgggcgacagggcacaacgacctcattatccaacttgggtcggccatgggaccacgtagaatcgggcaagtcccccattacttggccattctgatctataaaaggcgcggggccttcgacaaacgaccccatgaaacaacttcgccgagacggacgctgccgagcaagtgggaaaggggctcctcacagtagtgcctggacttgggataaactggacgctgcgcgtaaacaggtggatttcaccagttgaatcttccccttggggggaaattggcacacccggacgctacattggtaaatctctggggccccaggaccggaacttatcaacaccatgtcgcccggcacattgggcgacgggcgaccgaattgcacgatgtgcaaatcacgtagtccaaaaggcacggacatccttggtaagggtcacacatggcggacg

SEQ ID NO: 683500 - DNA, 346 bp, Homo sapiens
taggtggaactccagagccctaacggctagaggagtgataatgccacacagtagtctttcacatcttctgacaggattccttaagggatggatggaccctcacacctggtcagatccaggaatggtgtacaggcccctcgctggcccatcaagagtacttggtgtgggagatcttcttccagagcatagtcttgacgtggctgagcaccagcgagtgatgggcctccacctggctggccagcccgctcagcgtggtacaggtgcgcagctgtgtgcccagctcctcgcggaggtcggcgggcgcgccaggcagcaggttgccccgtagcagtgcgcacaccttggc

SEQ ID NO: 683501 - DNA, 250 bp, Homo sapiens
cagggggcagagtaacaggcagctgcgctcagcaaagcctttaaagtgaagccatattgtcgtccgagtatgcagtggtcataccccactcctggtggagattcacgagggcaggtggagagaggagactggagattcacagacctgcaagcacaaataaacggagtactcattactctcggatgagggccctacctctcaacgacaaagatcatctgccttataaaccgactacagaccatgactttca

SEQ ID NO: 683502 - DNA, 301 bp, Homo sapiens
gccgggtggggttggcccccgggggggccgggggccctcttttttttcccccctttttccttccccccacctccccccccccctccaatttttttttgggaaggtgaggcccccccttttgggttaaaattttttgagccggggtttccctttcctttgggtttttttttaaggaagggtggtttggggggtggggtttgaccccctatgattatttccttccgttgggggtgggttttaagatttgttttggggggggggttttttccttttgtgttattaaattttaaatgggaattga

SEQ ID NO: 683503 - DNA, 542 bp, Homo sapiens
actctaagcatctactagtgggtcagagcacacattgcttctgagtatggtgcccggccggcaagtatgtaactagttgacgttgtaatcgcgactcaaaagggcgtcccaccattctatcatccagctgcttcaggaagatggggaatatggtaagaccagtgaattccgtgagcatgagcccactgcctcacttctttacctgtaaagtgagtgcttggtcagaggtaatgctgtgtggaataccgtgatagtggataaggcattccttgagtccataaatggtagtcttggcagaagcattgcatgcaggtgggcaagcccatatactgagtaagtgcctgttccaatgaggacaaacctctctcctttccatggtggaagagttccaatataatcaacttgctaccgggtagctggtcgatcaccccaggaaatgatgccatacaaagggttcactgttagtctctgctgctgctgctggcaaattgggcactcagcagtggccacagacagttcagccttggtgagtggaattcacc

SEQ ID NO: 683504 - DNA, 318 bp, Homo sapiens
  misc_feature (247)..(247): n is a, c, g, or t
caaaaaaaaagtgcctttagaaatttaaaataaggcctagtgtggtggctcgggcctgtaaccccagcactttgggaggctgaagtaggaggatctcttgagcccaggagttgagaccagcctaggcaacatagtgagatactgtctctacagaaaatttaaaaatgatccaggtatggtggtatccacctctagtcccagctactctagaggataaggtgggaggattgcttgagccaggcagtanaggctgcagtgagtcttgatagattgtgccaccactctccaccgtgggtgacagagcaataccttgtctta

SEQ ID NO: 683505 - DNA, 242 bp, Homo sapiens
  misc_feature (20)..(20): n is a, c, g, or t
gagctcgtacccctaattgnttcttcgatgacgggcatggtggttatcctcgcgagggcataaaaaacccccttgcgggggcggtctttcctgcggcccgggtcagcgggtcacaaggaactcggcatcgaacgacatgacgagccggccggaggtcgggtcgtagtcgtccgggttgaagctgatgatgttccctagccgttccaccgcattgcggacggcgtcatcgaagaaccaattag

SEQ ID NO: 683506 - DNA, 431 bp, Homo sapiens
  misc_feature (9)..(9): n is a, c, g, or t
gcacccagnttgccatctccaaacccacctggggctgagggaaatcaataccctgaagggaaggacacaaacctggctgaattttccacctgctgattgtagatcccttggctttgagtgaacataggcagtagccaaggcagtggtcactgggtcttgggagagacacagtgctgtgctagctttggatctggcccagtgcagtcccagtggttgtagccacaggggttcttgtgtcaccctttccccagctctaggcagctcagcacagagagggagactctatttgtttaggggaagtaataaaagagaagaaggttctctgctggtaatccaagggaattcttccagatcttacctaagacatcaagatagtatctctatgagtttgcaagagcattgcattattaagacttgggatgcccccaaag

SEQ ID NO: 683507 - DNA, 172 bp, Homo sapiens
cccccgcccccccccccccaaaaggggtttgggttaaaaaaaaagaaagggggggcttttttttcggggtttttcccaaaaaatttttggggtttttttgggggtttttttccccccccccccaaaggggggggtttccctttaaaaaaaaaggggggggttttttttggga

SEQ ID NO: 683508 - DNA, 496 bp, Homo sapiens
ggaccggtcccatgcacagttggtggatacccacgtgatataaaaacaaatgctacacaaaaactgtgcacagatgttctttgcagcattatttataatagcccaaaattgaaacagccctaatttctatcaactaacaagtgaataaacaaaacgtggcatatccatacaaggaatattattcagcaataaaaaaagagatgaagtactgatatgcaccacaacatggaaaaaccttgaaaacatatcaagtgaagaatgccagacatgaaaggccacatattatatgatttcatttatatgaaatgtccagaacaggcgaatatatatagagagaaggcagattagtggttgcttaggctgaagggttggggaggacaaaggggtgactgctaattagtatggggtttcttttttggggtgatgtaaacgttgtaaagttgattgtggtaatggtggcacaactctgaatatactaaaaaccactgaattgtat

SEQ ID NO: 683509 - DNA, 703 bp, Homo sapiens
  misc_feature (194)..(194): n is a, c, g, or t
  misc_feature (223)..(223): n is a, c, g, or t
  misc_feature (272)..(272): n is a, c, g, or t
  misc_feature (450)..(451): n is a, c, g, or t
  misc_feature (474)..(474): n is a, c, g, or t
  misc_feature (487)..(487): n is a, c, g, or t
  misc_feature (495)..(496): n is a, c, g, or t
  misc_feature (499)..(499): n is a, c, g, or t
  misc_feature (536)..(536): n is a, c, g, or t
  misc_feature (539)..(539): n is a, c, g, or t
  misc_feature (543)..(543): n is a, c, g, or t
tggtctcgaactcccgacctcaggtgatccacccgcttcggcctcttgaagtgctgggattacaggtgtgagccaccatgcccagccagaaagttttaaggctatgattattagaccatcacacacacacaaagtacttaaaaagtctcaggaatgctgtccctcatggcctggtatgacaaagataagaagtnggtcgtgaaaatttctgaatgtggtttangacaaggaaccccagtaagattcagagacaacctagaaaattgaaaganaattttactactgaaatcatccttctataaaaaataatagaagatgtcaaatatgaaaataaaactgtcctctgggccctcaattttctgtgttatgggagaaggcagacagctactcagcagttatatcccataagaatggataatactaaaacaactgacagcatcaagtatggtnngaaagtggaactgattctctcantttcatgtagttnaagatggnntanccacttaggaaaatgtctccccatttcatacaatgcnaantatntacttattttataaccagaaaatccactcttatgtacttaaactcaagaaaagtgaaaatattattacagaaaaaaatatgtatatttgatttgttcgtagcaggtttattcatgataacctccaatccgaaactgcttttgggtctatccataattgga

SEQ ID NO: 683510 - DNA, 900 bp, Homo sapiens
gagcctctccactccacagtcatggtgaacctattggtcaatgacgctgtcagtgaatgagagtgacattgagagtctttctacgaagaagaaccagagattaatatagaggagaaagaactataaatctcagtagaatccgaatcataggaaggtagaatctgtgtcttgtatgcccactcattagtagatctgtctgtaataagttgggttccatcacactggtcgcaagggatgggcatttacatgtgtttaaggaatggggaaggagcgatcccagggcaagatgaatgttgggaagtacggattccactgaaaggagaaaatagagttgtcatataggagagagtaaagccacatggatatgtgctaatatttgatatttcatgggtgggatactacagagaaatgtttgttaactgacttggatgttcatcgacctaaaaaagagggtgtgatggtagttccagtgatggacaccgtagttgtataacttgtctagtattgtaatgtagctgtttacaggtgtgtaaatttaaacttcagaggttgataaaatgtgtacggcattgttaaagtgaaagattagtagtaagaggtattgggacttgtatttggaacacatacagcggtgggggtgattggagttgaattacgcaagcgggtgattgtaaccgggtattcgggttggaaaggttgacactcttttttaaaattcggtccacaaagggattagggtcctggagaacaggggatgcacggggggtcaggaatagggaagattttacttgtgttgcctaaaatgaatagtgatgatccccttatatttaaaaagctggagggattgtgatcaataggagagagggagcattagaagtgttagaggaacatcgatgtgaa

SEQ ID NO: 683511 - DNA, 722 bp, Homo sapiens
  misc_feature (148)..(148): n is a, c, g, or t
  misc_feature (189)..(189): n is a, c, g, or t
  misc_feature (197)..(197): n is a, c, g, or t
  misc_feature (203)..(203): n is a, c, g, or t
  misc_feature (211)..(211): n is a, c, g, or t
  misc_feature (213)..(213): n is a, c, g, or t
  misc_feature (215)..(215): n is a, c, g, or t
  misc_feature (218)..(219): n is a, c, g, or t
  misc_feature (241)..(241): n is a, c, g, or t
  misc_feature (243)..(243): n is a, c, g, or t
  misc_feature (245)..(246): n is a, c, g, or t
  misc_feature (248)..(248): n is a, c, g, or t
  misc_feature (285)..(285): n is a, c, g, or t
  misc_feature (292)..(292): n is a, c, g, or t
  misc_feature (301)..(301): n is a, c, g, or t
  misc_feature (322)..(322): n is a, c, g, or t
  misc_feature (328)..(328): n is a, c, g, or t
  misc_feature (337)..(337): n is a, c, g, or t
  misc_feature (340)..(340): n is a, c, g, or t
  misc_feature (346)..(346): n is a, c, g, or t
  misc_feature (373)..(373): n is a, c, g, or t
aggctcctcgcgtcactcgctgtcccctcgatgcgggctccagccgcatgccttagcttcggctcccggcttgggtggcgcggccgtgccctcgtttggcctccgaacgcggctcgtaatggcaagccaaaattccttccggatagantatgatacctttggtgaactaaaggtgccaaatgataagtnttatggcncccagnccgtgagntntncgnntgaactttaagattggaggttntnannanacgcatgccaaccccagttattaaagcttttggaatnttgaagngagcggccnctgaagtaaaccaggattatngtcttnatccaaagnttnctaatncaataatgaaggcagcagatgaggtanctgaaggtaaattaaatgatcattttcctctcgtggtatggcagactggatcaggaactcagacaaatatgaatgtaatgaagtcattagcagtagagcaattgaaatgttaggaggtgaacttggcagcaagatacctgtgcatcccaagcgatcatgttaataaaagccagagctcaaatgatacttttcccacagaatgcacattgctgctgcaatagaagtcatgaagtactgttaccggacgcccgaagttctgatgctctgatgccaatccaagagttgcccgatctcagatgggcgactctttcgggggcggccctttctggcgaatgggttgtcccctatg

SEQ ID NO: 683512 - DNA, 707 bp, Homo sapiens
  misc_feature (417)..(417): n is a, c, g, or t
ttggacgagcggcgcacaccagaacatgcctatcgcaaaggatcatcttcattcctcttgagaagaggacaagaggcaatcacatgatgaaacgcctggggcacagccccaattcctacttcatggctgggaaatgcccagaatgctataaattcaccacgtttgtgagccatgcacaaacggtaattctgggtgtaggctgctccactggactcagccagcctacaggaggaaaagcatggcttacagaacgatgttccttcaggacgaagcagcactaagagcactctgagtcagtatgagtgggaaaccatgtcaatacacacattttgcgttaatctaaaaggtaatttatgttgctcacttgtgcccgcctctgccaattcaaagatagagtccatcctgttaatgcatggngccaagattagatcttcctggcccgattcgccctgttggggggcagtttagatctatttggccggtcctttacaaccgatgcgattgggaaaaccctggcatctcccaattgaatggccctgaggcaaattcccctttggccagtggttataaaccaaaaaggcccgacccttcaaccttctaaaattgtcaacttaaaggcggggggaataaaagcctatcttttgttaaaatcccgtaaattttggtccactccaatttcaacaataggcggaagggggcccttattt

SEQ ID NO: 683513 - DNA, 160 bp, Homo sapiens
tacctaaatggctgtgcacctcatcaattactactcagtagtctatggaaatataaatagatgagcatttactcttaagaagcactttatatcacctggtctacactacagctctatgaccaaagttgtagagtgagtatgctaagaccatattgaacac

SEQ ID NO: 683514 - DNA, 1848 bp, Homo sapiens
cacgcctgtaatcccagcactttgggaggccaaggtgggcggatcacctgatgtcaggggttcgagaccagcctggccaacatggtgaaaccctgttgctactaaaaatacaaaaattggctgggtgtggtgtcacatgccagtaaccccagctactagggaggctgaggcaggagaatcacttgaacccgggaggcagaggttgcagtgagctgagattgcaccactacactccagcctggatgacagagtgagacttcatctcaaaaaaaaaaaaaaaaaccaaaaaaaaacaacccggttagcatgtgtccctttccccacgtgacaaacttattcaaattccagaagcttagaactttcgtctctaatttatttttctccgtgaacaaaatttacccaagttcaagaacaaaagtgtagtttttagaattatacggcagcattacgacctgaatttggtgagtatacggggcttatatcttaaatcaccattcccctaaaaatgggtttctttctccttagaaatgctggtgggcaacttgatgaagcagccaaatgcaccaggtcaggtcactttcccattacattgattcccgattaacaaaaccagaacgaaacctctttggcgagaacgccacgggccctatgggggtaacttaaaaggcccccctgtagcataccactttttggaaggcgcacattcctttacacacttttcattacccggtgcaagaacgttgacgaccatagccaccgggtgcggccgcgaatgtggcgggcgttatccccgagcgtaacgaggagcgagatgtaattactaccctaggtgtacgtcgcaacaagcagggcgagggcgccggcgaatcaatcgtacagcccgcaccaatctgtggtggcgctccgcagacatccacgcctcagggttcttgatccatgttcacatgtatactcacgcgacgcgcctgacccacgcacatcacccacactcccgccagcacaccacgagactagcgctcgccgtgacaccccgctcactgccctccccgccatcagcaccgcaccaccagccacaccgaccaccccgcagcacacggggcggacccgcgacaccgagagacggccccgagaggacgcgcgggcggagcgcgcgcagcggggcgggcacagcgacggcagctgggagcagacgaggggcgtcgacaggtcagcgaactcagggcggcggacgcgtggcggaaggggaggcacgcgcggcgcggccacgcggcagcgagcggcggcggcgaggggggcgcggcggagcgcaagtcggcgagagcaggtgggatcaaggacgacagaaccgagcccgacacaagcagccaagcaccgggaagaacggcaagagcgggcgagagcaacaagcgcgacgagagggacagcaaggacaagtagggaacgaggaagccagggacagccaacagagaaagcgagacgagagacacaggacagaactgcaacgtgacagaagacgcgacacggaaaggacacagtcgacagggcaggcacatagggcagaagggggacaggccaggagaggccggagagcgctcggaggagaaaccgatcaagccacagcacccaagcgcggcgaggcaagcagacagcggtacgccgccagagaccgcggggaccaggcgcgtacgagagcgaagagacggagcggaggcgcgagacgagagcgaacaggcgaggatggagagatcggcacacgagctcaggggcggagaggacgaagcagacgagaggcgagagcaacgaacgaaaacagggaggccagagccgcggagcgagacagcgacgaca

SEQ ID NO: 683515 - DNA, 130 bp, Homo sapiens
tggggaggtgatgtgaagttgattctggatgtatgtggaaggtgggacttgcaggatttgtgaaagaattggatgtggagtgagagaagaaagggaggaatccaggatggtttcaggatttttgacttga

SEQ ID NO: 683516 - DNA, 132 bp, Homo sapiens
agaaggcttttgtccaacatgatgcatttttggggttacattcagagggcccagacagagcggaaaagttgggaggaggcagatctgtagcgggaaagaagaagagtattctgtcgtagaggaggaggtgtc

SEQ ID NO: 683517 - DNA, 151 bp, Homo sapiens
actaccgatcttaacaccgcatctctagggggaaactagtttttgtttgtttgtttgtttgttttgagatggagacatttaagagctcaatattggtctattcagggtttcaatctcttcctgaatctatcttgggagattgcggtgtttg

SEQ ID NO: 683518 - DNA, 154 bp, Homo sapiens
gcggctgtaatgggcaataatgtgttttattttccttgatgcttacccttactaccaattgcaaaaataatactgaggagccctcctttgccttgtttgtagttggagttttggaaactgatcataaatcatgaatctggcgtattaatgctta

SEQ ID NO: 683519 - DNA, 234 bp, Homo sapiens
tgaagatcttgatgacttctgaaggtcctttgctcaaagcgggcggtatgctgtgtggaggccccgtgacgaaggcttgcttccagaatgtccatgctccgtttactgtcctccgccaacttttcaaacttgtgtggtatcagctgatgttgcccagcctgtgtgaatttgtgtttgagctggttcagtgcacattctcgtgcttgctgcctgtatgacgctatggtgatgttc

SEQ ID NO: 683520 - DNA, 322 bp, Homo sapiens
gtctgcggcgactctagaggaccccatctctaattgttgcacaattatgatcccacgcgggtcaggagagccatctgcattgatcagcttaactctcctgcactagagacatagctttagcatgttgaaaatgtatctcggttgaggaaaagcagtcctacgatagaactatattgcatgtacttgaagtttcccacctatgaaaggctcccgacgcagtagcgcctacactcagtctcatcgcattctgactcgcggcctggcgctacctcatttatttcacaagagtctcgttcatatgtcagacctccccgggatacag

SEQ ID NO: 683521 - DNA, 1361 bp, Homo sapiens
  misc_feature (1361)..(1361): n is a, c, g, or t
gagaagaagagattcagagattccaaactactttcaccctggaggatgctgatctgacgagtctcccttcgttgacatcgggtgtcctcttcttgcaaggtgccgggctgacttggcagtcggtggacgtgggcgcacttctttgtcaggcttgtttccgtcacagggtgacggcaccgtgctacagtggagatagctgtgttgctgattggtcgcatatgaggttctgcttcttgtttctgatgagtgcttacccggcctccggcctgttggagcccctgtgtcttccgtgctttcgtgtgctccccgcgacgctgatcattgccggcgcacggcgttttctctccatatgcctgtggcatctcgtcgtgtactctgatagcctctggttcgcagagtctctgcaggcgcatcgtgggcatcccaacttggttcgccggcatgcttgcctctggcttcagcacggtgactagtgtaccatcgcaaaggataacaatcatctgcaccatgtgtaccatatctgccagttgctatctaaggcgtctcaactgcactgtgtgtgtacatgcatgtccagtggctctctgtcgtgggaggaaatttccgcctgcttttcaaaggatgggcccaacccacttcgatctgagcgaagtgatcgcctagttctttcccaagtcccctccaggggcccgcaatgggaacttgcccctaacccgcattgagctttggcattcgcaaccgctttggtgacatggcggggtggcggttggtgtgcaacttccaaggaccatgcttggagtggggtttgccaaaggctgaggggccacctcgaaaagcgtgcacgctttggagccctcggggtttgtccctggtgggccctctcccacatagattgggcaccttccgctgaccccccaaggccttagctatcccttgcgcaagccttccaaaggggggccttgccgacaaagtgcaacgtggaataaccccgcgggaaacacgaaagaagaaccgcgtaggttccaccaagtccccccttggcaaagggggatgcggtttgtttccccgagaccgttccctttgggcgccccaaacattcgacccggacagaagtctttcccctaatgggcctttaggttgggccccaagtggccccagagacaagggttcccccaaagaggaagtacctttccgccggtgggctttaagcaagggccaacaaggaaaagaccaatctttccgggcctgtgacttccacttttcccaaagggtcgcgttctccttacaaggaaacccctttggacacgggacaaaccgcgggctccggccaaaacccatccggtttcgcaataccccaatgn

SEQ ID NO: 683522 - DNA, 196 bp, Homo sapiens
  misc_feature (107)..(107): n is a, c, g, or t
agttcgacggagactctcactcaaaaaaaaaagaaaaaaaaaagaaaattaaaagggcaagggcatagactagggggaaatattggagaaacatatgggctggacanaaaaagaacttggattctaaagtatatacaaaggaaatcttaacaattccaataaataagggcaaatggatccaattaaaaatggggcc

SEQ ID NO: 683523 - DNA, 135 bp, Homo sapiens
gatagcacattgacttcacacccggctcggagctgctcatcaccaaggccaagaacgggcacctggctgtggccgccccacggctgaattctcggtgataaaggcgcccactggaccctccacaacctctacaag

SEQ ID NO: 683524 - DNA, 758 bp, Homo sapiens
ggccggatcgagcgggtgctgctagcggaggcgccataattggaggggaacaaaactccggcgaccagcggagtgacaccaaattaaaccctgtggaccccttttgttccccttcagcttctaagggccgcgatgttgtaccctagaaagactatctggaaattgatgagagcaggcttcctagtggcactcttgcggagacccgctcaccaggggaaaaattgcgcgaggattgggacccttgccagtgtggcagcacatggcaacgggtgaattcactttaggaaaccaaacatgaagtacaggtggaaaatctccttttaatgaaatgttgcaagcggaacacaaaattaaacgcgtggagttggtatgggtgcacaggacggcaaaatgtggggcattacctatttaaaaaaacagaggaactttactttattaacaggacgctttggggggaaatgatttgcaggtatttggacagcaaggggggctcccacggtgtggctacaacacgacccccaacgaatttatttgtttgcacgttgtggaccaggccaaccttctacctaaacaaacaggcattcggaacaaacgcgcgacccaagagagaggcaagtcagatgtcgagacaatttattccccacataattagtcctccattaaattgtgcactggccaaagtggggagtgggatgccctccatacaccacacttgtggacacaaggcattccttgcttcccttaaagattattacgcc

SEQ ID NO: 683525 - DNA, 916 bp, Homo sapiens
ttgcgcagccgacttcttctgcgtcgaccagcctccgtgggtgcggtcaccgttgagtggctacctggatgcttcgcctggcgcgcgccgcagggtcgttagctgtgtcgtgtcgcgccgtcttctccgctgcgggctccgggcgttgcgcccgccgctgtcgtccgcttctcggtgggtcgctgtgcgcgccccatgtggcgctgttcctggcggccgggccgacgccgggcggtgcgtggacctggtcgcgtgcctggcccgcggccgtctgcgccggccgcggtggcgggggtgtgcggtgggcggcgctggctcgcgccggcgcgagtgtggagtggctgtcgtgctgttgtcggtgtgttcggtgcggtcgaggctctatgatctgcgatcgtcggctggctgcgtcgtcacgtctagcggtcctcgtctctttttcttgtgtctggtgggcggtctgggtggtggatggtgactgcggtcggctgggtcttgcagcacaggtaggtggtgtgtagcgcgagcggtggtaccgcctcgttgtgtcgtgtgtgaagcgacctggttgcgggtcgctcgctgttggctggggtttgatgaagcttctcggccgcgcggtggtagtggtgtgagagtgcgctgcgatatggtgggcgtcatatgtggtcctggcgcgcgtagtgtggcgtggctcgtcggcgtgtatagctgtgacgagtcacgcgtgccgccgcggctcttcgtgtcgtgccacgcctctggctgatcgtagcttccgcgattcgcgccggtgctcctgaagatagtatcggcgcgaggatgtcccccttcttccgcgcgggtttttatgagccgggtgccacagttgctttctgctatttttgttcttttgaggacccccttccccaaaaca

SEQ ID NO: 683526 - DNA, 848 bp, Homo sapiens
  misc_feature (149)..(149): n is a, c, g, or t
aataaatgatattcttctcgcctccaaaaagcgtctcgcctaattgtctcccgcgccggtgacaaaaaaaaggtttgggttcacacccccaacggcgccaaatgtgctggcctaattcccaacttccgctgctacctgatccgcgaagncttatccaacagggggcgttaattaactaccgaacaaccatgtgaggataaacacattattcgcggtctctaaagtcccgagtaaacaacccttctgcctcgcccgcaaagggtcaccagcaacaattgggcacatatagttaattcgcagcacgagttacccactccaaatttcccggataatgcccccaaaagtgaagtttcacctctgcgtgatcgaatacaataatgaggattctcgcgcccccgctgtcttcaacagcaagatatgccgcctgtgaatttctatcaaaatgagtgcgttcttgcccaccacaatgcagttaccccgcgcgtttcctcgacaagagggaaggagggcatatgcggttccaacaaaaccaaccgaggtttttctcgtgcggaaacaatccgccccaaaggtgttatgggctaacacaatgcccgtccccaaaaaattcgtctctcgtcaacaccacgttgagggaccctcacggttcttattgaccactcgagatcaccgcactcgggctcgctcgagaggcgcccctccgcgccacacaaggggtgagtaatactcccataacctttctcccactgggtgcagaggccccccacgaattacaaccctcgcgcccgcttgtcgtttgaaaaaccggcccttgggataacagccgcccctaaaaaccacccccaaaa

SEQ ID NO: 683527 - DNA, 1547 bp, Homo sapiens
cttctacctggtgtaattttttaaattccatatttaggatgctctgtaaatatgaaaatgtgtcacattggatacatttttcttttaggtttagtttttactactgagacttatttatagtcttaggctctatgccatttagaatatgataatcctcatgcctttaatctcagcacttgggaggccaaggcgggcggatcacctgcggtcaggagtttgagaccagcctggccaacacggtgaaaccctgtctctactaaaaatacgaaaattagctgggactacaggcgcctgccaccaggcccggctaatttttttgtatttttagtagagacggggtttcaccgtgttacccaggatggtctccatctcctgacctcgtgatgagcccgcttcggtctcccaaagtgtggggattacaggcgtgagccaccgcacccggcgatttagtatttttttctaatagactatgttcaacaaataagtaattctcgaatagttcagattaaaacatacaggaaccaagtacatacccagcatagaagaactttactaaaggcttcttggaaagcccttttttgaaacgacagtatcgtaagtaacatatcatttataatagaaatctgtgacccagtgcagaaaaataaatatagtaaaatttatttatctttggccagttttccaacacccaggtattagccttgaagttgaagagataaggtttcttgtatattatttttcatttgtgttctacaattaaaggttctgctttgatttgtcagataatttatagaaattttgttctcaaaacaaatgtttgataaaacagattattaaatttggggttgagatgtctaaattgaatgctagaagtaaagtagaagtgaccactattaaagatgtatagggagaagagtacagcacaaagtgataaaatagtgacacttttgtaggggtgtttattgtttggttaagtctgctaaattacggtatgcattatctggtgactatttgtgcctgaaaattcgttttgtattaaaattctggagaaggaattcaggactagaataaagagaaattttgtaaccttttttatcatgacagttttagaataatttttttagctgagattaaatgttcaaggctccaatattatttttaggaacttatttaaggagtgctactttacagaaattactaacacaccaaaacattattaattaaataaaatataagtttacaataataaaacatgtttcttttaatttttctgattatattttatgagttcagaaaggaaatggtaaaagaactatacattttcatgttttaacattttatgtacgtacttgattctgtctgtgtcataattacacatttacttgaacacagctatcctttatcttgtgctttctttaatagaaaaatgaacagaaactgaatgcagttaaatttttatttttagtaggttgtgaagttacttttactggagaaataaaaatatgttaaacttgattgactttttaagataaattgttaacactttt

SEQ ID NO: 683528 - DNA, 884 bp, Homo sapiens
  misc_feature (10)..(10): n is a, c, g, or t
  misc_feature (302)..(303): n is a, c, g, or t
  misc_feature (311)..(311): n is a, c, g, or t
  misc_feature (340)..(340): n is a, c, g, or t
  misc_feature (535)..(535): n is a, c, g, or t
  misc_feature (617)..(617): n is a, c, g, or t
  misc_feature (684)..(684): n is a, c, g, or t
  misc_feature (742)..(742): n is a, c, g, or t
  misc_feature (749)..(749): n is a, c, g, or t
  misc_feature (792)..(792): n is a, c, g, or t
  misc_feature (817)..(817): n is a, c, g, or t
  misc_feature (854)..(854): n is a, c, g, or t
  misc_feature (858)..(858): n is a, c, g, or t
  misc_feature (875)..(875): n is a, c, g, or t
  misc_feature (879)..(879): n is a, c, g, or t
aattcttcanattctatattttaaaataaattttacaaataccaatcacatcttcataacacttttcactatccacatcaactttattatttacatacttcaatacacaactctaacacaaatactttcttatcaccaataattaaaccacacgcataattttttcaaataatttttacttacacaataaattctaactttttaaactctaaagctacataaaactcaaatcaatctatttttctacctcacttcaaaattactttcctttttcctaactaaacataattcttaccattttnntaaatctnaattcattttttattctttttcaaacttntccaaaaaattttaacccctgctttatatacaaattctcatcttacacatatatatttacatattttttcttcaaatactaattacaatgtatgatgttaataggcctgtaatggaaccatgatactactaataatattaaataaaaatccactcatttatataaagtgttccttaattgtgcaataagaaatgngatcacagatttatgtacatatatgaatcactaagagttcagaaattaagctcactttaagaaaactcagccaggcacagtnggctcacgcctggttatcccagtactttggggaggccaaggcggggtggatcacgacgtcaggagtncaagaccagcttgacatggtgaaaccctgtctctactaaaaatacaaaaattagccgngcgtggnggcacacgcctgtgatcccagctactcaggaggcaaggcaggngaattgcttgaaccagggaggcggnggttgcagtgagcccagatcgcgctattgcactccancctnggacaagagagcgagantctnactcc

SEQ ID NO: 683529 - DNA, 1544 bp, Homo sapiens
gcaggtttgaaaactcactgaagaattcccacttcctctgcattaaaaataccttgttcaaggcagtaaatattaacctatgctggtttattcagaaactcatgttaaacaaggtagagaagacctaaaattatgtgttttgtttgtttatttgtttttgagacagagtctagctttgtcacccaggctggagtgcagtggcacgatctcagtttactgcaacctctgcctcctgggttcaagcgattctcctgtctcagcctcccgagtagctgggactacaggcgcctgccaccaggcccggctaatttttttgtatttttagtagagacggggtttcaccgtgttacccaggatggtctccatctcctgacctcgtgatgagcccgcttcggtctcccaaagtgtggggattacaggcgtgagccaccgcacccggcgatttagtatttttttctaatagactatgttcaacaaataagtaattctcgaatagttcagattaaaacatacaggaaccaagtacatacccagcatagaagaactttactaaaggcttcttggaaagcccttttttgaaacgacagtatcgtaagtaacatatcatttataatagaaatctgtgacccagtgcagaaaaataaatatagtaaaatttatttatctttggccagttttccaacacccaggtattagccttgaagttgaagagataaggtttcttgtatattatttttcatttgtgttctacaattaaaggttctgctttgatttgtcagataatttatagaaattttgttctcaaaacaaatgtttgataaaacagattattaaatttggggttgagatgtctaaattgaatgctagaagtaaagtagaagtgaccactattaaagatgtatagggagaagagtacagcacaaagtgataaaatagtgacacttttgtaggggtgtttattgtttggttaagtctgctaaattacggtatgcattatctggtgactatttgtgcctgaaaattcgttttgtattaaaattctggagaaggaattcaggactagaataaagagaaattttgtaaccttttttatcatgacagttttagaataatttttttagctgagattaaatgttcaaggctccaatattatttttaggaacttatttaaggagtgctactttacagaaattactaacacaccaaaacattattaattaaataaaatataagtttacaataataaaacatgtttcttttaatttttctgattatattttatgagttcagaaaggaaatggtaaaagaactatacattttcatgttttaacattttatgtacgtacttgattctgtctgtgtcataattacacatttacttgaacacagctatcctttatcttgtgctttctttaatagaaaaatgaacagaaactgaatgcagttaaatttttatttttagtaggttgtgaagttacttttactggagaaataaaaatatgttaaacttgattgactttttaagataaattgttaacactttt

SEQ ID NO: 683530 - DNA, 646 bp, Homo sapiens
  misc_feature (325)..(325): n is a, c, g, or t
  misc_feature (376)..(376): n is a, c, g, or t
ccggggagggaccgttgaaaagagggggggagcggttccttgtaaaatataagaatcccccagacatgtctcaagatccatctctcgataggcttgaggtgaagacaaagggattcaggctcaaactgcttactttgaaaacactggcaatccagcaattttgccagaagcttctttttttatggggggggagagaaacatctgccccagactgaatacagagctgtatgaatacatgcgtggtgagcttaaatgaagaagaaataagggcaaatgaggtcgtggtttctggggcaccactttagggggaaatcacaagaccttncacaataaacaaaaaagtggctaatgataactggaatgatgtgtgcgttcngagggtagacatccaccccgagcatcactccgtttattataggtaagagtcgatacaggaaaattggcattatccttttaccacacggtaaaaagactcggcgggcagtaaccccagggcaattgtaaaagataattattttggcccccgcttcacgcccaaacttcaaaatttcctgatcctgctattcccgactcttcccctcctccttcctatccccccctagctgtctctagacagatatacccaatcctccatcacaagaaaaac

SEQ ID NO: 683531 - DNA, 199 bp, Homo sapiens
gattagaaccgagctcggtaccctcgataagggccaagcttgttaggcatttgaagttgggggaaatgggagatgctcagtgagactatcagtacctgtctctgagggttattaagaaggaagagccaaaggctcacattcttctatggtaagtgcttgttgtggtactttccatgctttatgcattggccttatcgag

SEQ ID NO: 683532 - DNA, 204 bp, Homo sapiens
gtccaagagtaagcgcctgtgagccatcttacacacatctagtgctccactaatgcacttggaccatcgctgagctggaggtgcagcaggaagctctaggtgggctctatctagtgctctaggcccctatctggagaccgtcccctacaaacaagcacctactcagcctttcctatctgtttcccacggttaacaccacagtta

SEQ ID NO: 683533 - DNA, 329 bp, Homo sapiens
tttgatacttgggcacatgccattattgatattcagaaaaatatcgcttggctcaatacagagcgagaacaagcctttacagattctggttttgattatgacattgctagcaccagtaacttcatgaaagtctcacgtaagcaaccccatatacttagcgactggctatggcagtttttttgggattcacccatatttttgaaagaaattgcacctgaagatgggcattttaagatccatatgtggcctaagccagcaagcaatgtggacaggaaaactatttttcaactttccagctgctttattcaaggtggtaaagtttcaaaaat

SEQ ID NO: 683534 - DNA, 381 bp, Homo sapiens
gtggcctaggaaaaccagtactggctccatggagggcagctgtggccgccagggatatgggttcaagtcgcagaccacttggtctatgtcacggctgttttcccattaggggtaggaattccggcgaggtctagtcagagctaatgtttggcgtaatggattgctagaccctatataacaaaaccgccgtgttcaggtagaggcgcaagacgcttgttagacataagagagtaccatgtattggcactgtggcccttgtggtgtccaattcaatctcggacgcactttcgtttaggttccaacttcggacgggcacgtttccccaaattgggctgatgccctccgccttagttcaatagtgatctgcctcgcccgagcctg

SEQ ID NO: 683535 - DNA, 188 bp, Homo sapiens
atgtccctacgtggtagcggtgtgaactccacgtagttgcaggttgcctttcttatcagtgggtgcctcccggtacattctcgtccacttcctcatctgtgaaggcggccacccatggtggtgagcagctcccgtgttggtggccctctatggatgaaacctgtaggcttcctcagtcgaagcaggca

SEQ ID NO: 683536 - DNA, 690 bp, Homo sapiens
ggtggcacacacctgtaatcccaggtactcaggagactgaggcagtagaatcacttgaacctggaagatggaggtgcagtgagccaagatcacaccactgcactccagcatgggtgacagagtgagactccgtctcaaaaataataataataatagagttgtagctgggtgcagtggctcaagcctgtaatgccagcacttcagagcctgaggtgggaggattgcttgagccctggagtttgagaccagcctggaccacatggtagaccccatccctacaaaaaaaaaaaagtcgggtggtgggtgggcacacggcctggtaagtcccagctaactcaaagaggctgaagtggcggaggatccctaagcccaaggaggtcaacggctgcagtggacgccatggattggccacccactggcaatcttcggcggtcgacaaaagactctggtgctcacacaaaaaacacacaaacggggcacatgggggtaaacacagctgcacccctctcaacaggaaggtgctctcatattgccccccaggcacgaacaggaaaccccaagtctatggttatctaaacgtacagggggaccacaacatggggcgcaagaataacaaacccacaggcgtcctagcgcagacggcacgaaccccaaccaggggcgcggaagccacccccgggaacaccaagg

SEQ ID NO: 683537 - DNA, 989 bp, Homo sapiens
  misc_feature (12)..(12): n is a, c, g, or t
  misc_feature (131)..(131): n is a, c, g, or t
  misc_feature (139)..(139): n is a, c, g, or t
  misc_feature (151)..(151): n is a, c, g, or t
  misc_feature (170)..(170): n is a, c, g, or t
  misc_feature (189)..(189): n is a, c, g, or t
  misc_feature (214)..(214): n is a, c, g, or t
  misc_feature (225)..(225): n is a, c, g, or t
  misc_feature (250)..(250): n is a, c, g, or t
  misc_feature (325)..(325): n is a, c, g, or t
  misc_feature (359)..(359): n is a, c, g, or t
  misc_feature (361)..(361): n is a, c, g, or t
  misc_feature (381)..(381): n is a, c, g, or t
  misc_feature (392)..(392): n is a, c, g, or t
  misc_feature (471)..(471): n is a, c, g, or t
  misc_feature (512)..(512): n is a, c, g, or t
  misc_feature (514)..(514): n is a, c, g, or t
  misc_feature (772)..(772): n is a, c, g, or t
  misc_feature (883)..(883): n is a, c, g, or t
  misc_feature (892)..(892): n is a, c, g, or t
  misc_feature (978)..(978): n is a, c, g, or t
gcctggctggcngaagcctcaggaaacttacaatcatgatggaaggtgaagaggacacaggtgcatcttcacatggtggagcaggagaaaaaaaaaaaagtgggaagtgctacacacttaaacaggcaganctcatganaactcacttatnatgaaaagaacagcaaggnggaagtatgcccccatgantaaataacctcccaccgggcccctnctccaacattnaggattacaattccacatgaaaatngggtagggacacagagccaaatcgtatcaggtgctggtatctctattttgcagatgagaaaaccaggctcaaganattaggtgactggcccaaggtcatatagccagananttacaaatctggagtttganccctgacagtntggtcccagacaccccatgcttgacccctgcatggggctttgcacaggagtccccagggctgcatagcaaacctacgangtggaaggtgttattgtgtccatggtcaacactagtccctnanattcagagaggttgagtaactttgctcaaggtcacagagctagccagggattccacaaaggtcacgtcatgctgatgtaaaacctgagctcttggtactgggcaggggcctggcagtcaacactaactgctggccattattgttaggaaatattatccacgttgctttttcatcagctttaaggaaatagttatcaaactgcttggccttttggcttcccagctattctctaagatttcaccttcaccaaggcctctntggctggggtgcagcaggacagcgagttaaggtgcttaatgcgcagagaaccctcagctaagcaacctggggtggaattatcccactctggcctggcacgcttgagctgtncacagcaanagttagctgccgcctcgcgcctccgccctcagcagattgtaaagcaccgcttgggcattaaagcgtttcttaatatctggctttanctcgcagcaca

SEQ ID NO: 683538 - DNA, 1028 bp, Homo sapiens
ttctttttacatttcagctccagcagccagctatttaaaaaatatttttaaatatcttccccaaagtttaagatgtgggaccatctacttgtaagaaacagtggcttatttcttcatttctcagtaatcattgtaaacctttttttttttcttctccactctaacaaaagtaaaagaacaaaactttggctgaggtcttggactccactactaggttagttatgtggggctgggaacagatggcaggtctgtgccgagagaagccccacaacttgtggcaaagatggaaacattttataatctttggcctctccctttggtcacagtgttgtcgtgaagatcagatatgtatgaatgccaggtccaaataaacttaaaacattaggcaacgtgtcaactatcgttgccccaccggaatcttgaagggttagcaaaaaaaaaaaaaaacaagaatgtcctggtacatgaaacagactgagaaggcctttgcgacatccccctgaagcatagctcatccgttgtttagactaaaaatttccttgcaacggaaatagctacgcaaaacaggttttgcacgacacctccgtgtggtgcaaagtccctctcgttgttcaagtttacccccctcacagacgtccatacggggtaaagtcactttatggagctttattcttaaaaaatacgaacaactggcggcagggcaagaattcaccgtacttgggcccattttgacaagcagtggaagtaacaaattggtaacaccccgtagtagggcgataatttgtacctttggcccgtccacatatgctggacgattctacccaataaagtacctcccggaaaattccccctgggaagttgcgcactccatgaaacactcagattagtcattagtttcagcacaaatgtcttaacaggcttatcgtgggagcaacgataccactccaccttttgttttacacacatagtattgtgtctgcacacatcgggtcagggaacacacacgacgggtacatctcccgactaat

SEQ ID NO: 683539 - DNA, 421 bp, Homo sapiens
ctagtgtagaagttcatagcaggatctgtattcttagtttcattattttcttgggatggctatggaaacttctaaaactagggcttttctgctatggaaacttctaaaactaggaccacctttctgttactcaaactcgcttttcaccctccggctgggatgaatgagcagagtcatggctggtagtgtcccctttggctatggaaacttctaaaactaggtatcacagtattcattatataagctaaaagattgggcttctctttagggtagtccctagtttgagaagtttcaatagcatctgtaaggagtgttctaagtccttgtcatctgaagtggggtatttggggtttatatgccctcaagtaaaagaagagccgaaagggttaatcatatgggaaaaccatattgtatggtattg

SEQ ID NO: 683540 - DNA, 297 bp, Homo sapiens
ccaagtacacagacgttggggtatgtggcccattcgggtcggaaactgattgtctcagaaagtcggtctcttttacctactcgttatttgaacgaagagagagcctgtgcgggatcgccttatcttgtgtccacaggcactgaagtgaagtcacttggagaaggggagacagaggatgagcggcgtctgtgtagggacccccacccgggcctgcagaagggtggagtgctacccaggactggcatgacaggtagtatcctcctcaccacaggctgtgcccataagtctctagtgcag

SEQ ID NO: 683541 - DNA, 949 bp, Homo sapiens
gcctttgccgatccgccgcccgtccacacccgccgccatgctcaccatggatgatgatatcgccgcgctcgtcgtcgcacaacggctcctggcatgctgcaaggccggcttcgcgggcagacgatgccccccgcggccagtcttcccctccatacgtggcggcgccccagcgcaccagcggccgctgatgcgtggcgcatggcgctcagaagcgacttccctaatgtggcccgacgagcgcccagcagcaagcagacggccatccctcacccctgcacgctaccctcatcgcaggctcggccatcgctcacctaacctggagacgcacatggcacgcaaaatctgcgcacccactaccttcctaccaatgcagcctgccgctgctggcctcccgcagcgacgcaccaccgctgcctgcctgcacccgcaggccacgcccctgcaacccccctaacggccccaacccgccgaccaccgcactgcacctcaaccactcactgctcccgcacgaccctctccacacccacccccaagcccactgctcacgctcagccctcatccaagcgacctgctgcatcaatccccgtgcctaccgcccatctgcgcacgataccccactgcgccactcccgccgcacctcgagaccttctctcggctgcaccgcgacgctcacaacccaccacccgcgtagcccacctcctaacccacgcgcggtaattagccgcctcctccacacttgctaatcccgtggaccgatcacttgcgacacccctggtcccatagtccccccgcgcggcaacccatggcaacatagagaccgaagccccgcccacttgcacacggtatctccgcgtccacgcccgatagcccccgcccgcgcccctaccgcacgccctacttccaacaatgccaacaccgtgtacccactgaacgtcctcgtaacgtatct

SEQ ID NO: 683542 - DNA, 398 bp, Homo sapiens
tggtttcaagccaaccccatggcctccatgactttttctaaaaaaaaaaaaaaaaaaaaaaaaaaaaaattttgggggggcccggggcccctggaaaagagctttttagaaacacaatcgcgggtggggcgcgcgcgggggcccaggatgggtacaagtggacacacgggggcaaaagcggggtccctaagggaaacccggggccaaggaacaaagggcggggaggttctcccacccaatataaaaaacgccccggggggacacccaggaggggtcttgggaacaaaatcccaggagggagggtccacgagggggacctcacgggggagcctaattacaacgggggggtccaagggagggcccgaaattccaaatataagcccccggccagggggggc

SEQ ID NO: 683543 - DNA, 1075 bp, Homo sapiens
atccgggccaagtcacctagattcaccgcatgcggcggactcaccgactcgtcctgggaacaacctttccgtcggtcctccaattaaccgcgcgctcccgccgagtctcagggaccacggtgttttaacaccctggagaagtctcgcctactttccagagggaccaacagggtcatcatcgtccgcccccctttgcctgatgccccccatgagtcattcatcgcgcctgaaccgagatcgttatgaccaccgcgcgccacgagtcatcagcaaacgccctcctgcaccaccagccgccttagcaccctggcacaaggtccatccaagacaactgttggttctcactggaaagacgtcaactgagccacacgtccacgccactcactgccacccagaagcctgtggactggccccctccgggaatattgctcccggcgctgatggtccgcggggctctccagaacattctataccctgcctctacctaggcgcgtgccaaggctgctgcgcaaggtcatccctgagctgatacgggaagctcacatggcattggcctttcccgtgtccccaactgccaatggctcgtcacgtggtggaccatgacctgcccgtcatagaaaaacctgccaaaatactggaatgacactcaacgaaggttgcgtgaaagcaggacgtcggagggccccctaaagggcagtcctgggctacaactgaagcaccaggtggtctccctctcgactttcaacacagcgaaccacccacatcctccacatttgaacggctcggggcctcgtgcaattgccctccacacgaccagctttgtccaagctcatttccttcggtatgtacaacgaatattggcttacagcaacagggtggtggacctcatggcgcgcacatggcctccaaggagtaagacccctggaccaccagccccagcaagagcacaagaggaagagacgagaaccctcaactgctggggagtcctgccacactcagtcccccaccacactgaatctccactcctcacagttgccatgtagaccccttttaaccggggaggcgcacttatagg

SEQ ID NO: 683544 - DNA, 508 bp, Homo sapiens
gcctggccatgttgagctgttccttctaccagagcgttggggagctgccactgccgatggcaaactggacaaattgcagggcatacctctcaacgcggaagtccaggaccccgaaccagaacacgaggtcatgacgcaggatgctctgtgcgcccggcccttggaactgctggaggctgaggatggactgtaagatggctttgcgctgctccgccttgtccatatgcgcaggcaagtggcacgatcaggaagcagagcatgtgcccgaaggccgccaggcgcacgctcacgccacccttgataccccagtagccgcccaggccagtgcgcgtgcagtcggtctgcacgtctcgcaggaagggcaggtggtagtacttgccgaacagcagcaggatgacaccccgcatcctcaccgaacccaccagcacgaagttgaagggccctagcgcatccatggacagctcactccactggtccgcgaagagggcgtccttgagtcgcttgatga

SEQ ID NO: 683545 - DNA, 765 bp, Homo sapiens
gtgcctagtaccttactattccgcgtccccttcaccatcggggacactccaaggctggacacatgtgagaacggggttgaggagtgacacagaaggtcgaacggggcccaaagaaggtacccctgggagcccatcggagaccccaggcccccgcccagcaggacctacaagggatgtagccagccgagagcccatcggaagaccccgaggccccacgcccggaaggaccgtgcaggggactggagccagccgagagcaccatcggagacccacaggcccaagcccggaaggaacataacaagggatgagaccaagccggagaagccagtcgggaagaagacagaggccccggactcggaaaggaacttaaagagagaacgagcccaaggcccagtaggagcgctcaaatcggtgagacaccctcacgggaccctcggagccggtggagggactcgatacatggagagaaaccaaagaggccaatgccacagtactcgcaccatacggacaagagaccatgaagtgggcacacacggaccctaagaagtgagtacacgacattccaggaaagatacgaagacaggcaagaagagacacgcagataggggggatgaaccgatctgttgcgtgagccgcaaacggtcggaccatgattatgtgacgacggaccaggggagagaaacacggcagggagcagagagctcacaggcaccacacatagcggtcctcagtggagtaggtctgagggggcgatagggaacactg

SEQ ID NO: 683546 - DNA, 452 bp, Homo sapiens
gaagccatttctactaaaaatacaaaattagcgtgggcgtcatggcacatgcctctaatcccagctactcaggaggctggggcgggagaatcgcttgaacctgggaggtggaggttgcagtgagccaagatcgtgccattgcactccagcctgggtgataagagcaaaactctgtctcaaaaaaaaaaaagtctgcagggatccaaaggggcagcatggaaagtagatattggggggtgactggatggggtcgtttggaaagctgagagtaagaatctagggacccatttccggcaaattcagggaacgagttcactggaagggatttgggtataatggtcagggctctggtacatagacatttatttggggatacaaaaggtaaataaggtcaagaggtttgggtccttcaagggacactaaccattccaggaacgtacaattagaatttt

SEQ ID NO: 683547 - DNA, 230 bp, Homo sapiens
gactttcttcgagtctttgacggtatataaccaatcagaatttgtgcactaggtatttataagcatttcacttgcactaagaggtcatgggtgatatagctatgggctctatttttcttaacacacactccagatgtagtgcataaggaaaaaagggaacctttatggaattctctatagtgagacacttctggtcagagagttgtcatagagtaatcctcggagtagag

SEQ ID NO: 683548 - DNA, 94 bp, Homo sapiens
tccggcttcctacggaaagtccatggcttaaaaaatgtctaaaaactacggatttaccagtatgggaaataaccctacttaggactatggtaaa

SEQ ID NO: 683549 - DNA, 136 bp, Homo sapiens
aggtcactctagaggaccccagcggggaacactcactttggcagcaacctagcaaaagtgaacaaataggattacatgaagtgaaacagcttatgtacagcaaaggaaacaatcaacaaagtgattgttccccgct

SEQ ID NO: 683550 - DNA, 243 bp, Homo sapiens
actccagaggatgaagtcggttctaccatacttcagagctggtattttgacgtcaactcgacaactatgacccctatctctaagaggaaaaacaagagatatgataagaaatacgctgagattggccgggcacggtggcgtatgcctgtaatcctaccactttgggaggccgagaggggtggatcacctgaggtcaggagtttgagaccagcctggccaacatggtggaaccccatctctact

SEQ ID NO: 683551 - DNA, 286 bp, Homo sapiens
ggatctagacgatctatggagccttacctcgggagccttagtactccgggagccttaacctcacggagcaaagccatgaggtccaaccaggagtacaccccctcctcttcccaaggagcaaagccatgaggccaacattcaaattcaggaaatacagagaacaccacaaatatactcctcaagaagagcaactccaagacacataattgtcagattcaccaaggttgaaatgaaggaaaaaaatgttaagggcagccagagagaaaggtcgggttacccacaaagg

SEQ ID NO: 683552 - DNA, 174 bp, Homo sapiens
agccttacctcggaccttacctcggagccttacctcggagccttactctcattgcattatgtggctggtgacatcgcggctctcctctcccggccccccctcggagaacagtaaggaccctacttccatggtgtgctcctcttcgctgcagaacttgccgccgaagcccgtagt

SEQ ID NO: 683553 - DNA, 383 bp, Homo sapiens
  misc_feature (89)..(90): n is a, c, g, or t
ggccgagaagccagtggaatcttcaagggttttgaccccctcctcacctttgtggtggggggccccattgggaaaatgggagcccctgnngcccagtacaggttccggggggacccccggcagttgggccttgtggggggccggggcaggtccggggggttaatttgcccgcaggagggaatgggggccatccccaccccttttatccagaagggggacccctagcttggccggggggggggggggtccagggcaggcccaaaaagttgggtttcccggggatttggggggggctccccccccaggcccccctctgggaagggaagcattttcctttttgaaaggggggaatttttgtttttttaaaaaaatggcaaccccca

SEQ ID NO: 683554 - DNA, 292 bp, Homo sapiens
cgtaggatcattgtagccatcgagctcccaaaatcaggtgatcctcccacgatagaccacattgaaatagcaggcataacaagatgtgcaccaccatacccagactaatatatattgtagttaattatagagatggggtctctccatgatgcccaggctgattacgaattcctgagctcacgtggtccacccacctcagcctctcaaagtgctgggattatagagtgtgagccaatgcacctaaccagccttttgtttgacaggaaagagtgatagaggcccagagaaccaa

SEQ ID NO: 683555 - DNA, 171 bp, Homo sapiens
ttttttttttggggggaaggtcaaattaaaaaaaaaacattaaaattgttttaagcaaagataaggatttttatacggcagggctttcctaaatttcaaatagggggtatttttaaaaatgctaagggggtttgaagaaaggacaaaaggggggggttttccttcctttta

SEQ ID NO: 683556 - DNA, 846 bp, Homo sapiens
gagtgcagtggcatgatcacagctcactgcagccagtaatcctcttgcctcagcctcccaagtagttgagactacaggttgtaccactatgccctgctagtttcttcattttttgtagagagacgggtcttttttttttttgagacggagtctcgctctgtcgcccaagctggagtgcagtagcacggtctcagctcattgcaagctccgcctcccaggttcacgccattctcctgcctcagactcctgtgtagctgggagtacaggcgtgagccaccgcgcccagcaaggcgggtcttgctgtgtttcccagatctagactggtcttgaattccagggctcaagagatctcccacctcagcctcccacagtgctgggattacaggcgtgagccgccacacccagcctattcaaaattttcttccttagagaccgggtcttggtggcccaggctggactgcacgtgatacaatcatagctgactgaagcctcaatttcccaggctagggtgatcttctcacctcaggccttccaagtagctgggtccgcagatgcatgccagtacacccagctcatttacaaaacaaattttaccttttcggagagtctgtgcttaggttgcccaggctggattgcactggtgtgatctcggctcactgcaaagttccacctcccgggttcacgccaattctcctgcctcagcctcccgagtacgctgggactaacgggtgcccgacaccaaaccggctaacttaaggcattataagtaggagacgggggttacaccgtgttagccacggatggtcttgatctcctgacctcatgatccgcctgtttggcctccaa

SEQ ID NO: 683557 - DNA, 135 bp, Homo sapiens
tcgacacaacagtgaaaccaatacgccggttcacaactgttccctggtgttggcgcaatatccgctcaccccggcttaagtcggggatcattttttctttcaagcgttctctacccaagccccgcactacctggc

SEQ ID NO: 683558 - DNA, 742 bp, Homo sapiens
accttggcatccggtggattcgtccgggctaaatctaccgacaccacattggagcttctgcaaatgtcagcgtgcattgaggacattcacctgtacctggcgtcccaaacttgtgcaattgccgagacactaacccagctttgcccatttagaagtcactccgtatgcgactatcgccctgtctgggaattgtaaaaccaacctgaacaatgttattgaagggaacctggacatggtaagcctgccaaacttgctaagccactgaggcagaggagacttgctaaccccaaggcgtgcaatgaatctggctgctctttgacgatcgggcgactgcacatggacttgacagtatcgatgagttaccgtgcgtcaactgataactgccaagatcatgaagtccagacctgattctactgcttgcagaggcatatgtcgagcttgacaactagcagtgcatacctggtactgggacacactatgatgtactgctgatgtcaggagctgaccacatagtctagccctataagcttccaaggcagtggctagcttcgttcctatgcaacagtaacttgttgaggagacttgctgcctctcgatggatgtgcacgtaaaccattgattgcagggcttgaattctggccttcataggccaccgagacttttggacgctccatggcctaaattcagactccggggaccggccgccttaatcgccgaccgcgatgacttcaatttgtgcctt

SEQ ID NO: 683559 - DNA, 865 bp, Homo sapiens
aagcgttacctgtgcagcattgctaaagatctataatgcagactatctgaagatgtgaatgaagaggcagtacatgcacgtacttcagcacagtctccacaaaagccaggtgtcctcactcatcacagaagccgccttagctcccgttactcacagaagaacagcattacccttgcactacatggcgacactcaactggagagagagggcactcggggtcttctgatcatcgcagcgtgctatctgcagcctgaaatgctcatacagcattcccttctggcggccagtgacaaacaacgaagggataaccaagcgttggatatgtcgtctatagacaacaagatgtaagtcactgacgattggttagaagaccaaggaaactgttcatgcaaacagtgtcttcagcatgattctgaatcacacatgagtgaagaaaaaacggaagaacgatttactaaataatttcatgcaatcaatgtcaattgcagaacagggagaacatctgatgttaacttgacagtcttgtctcgtgtacttgaattcgtgccaaaggtgagggtaacggggtggtgagtagcgtcctgtatgttccaggatggcatcgttaagtttatctaagatcattaaggtaatcagggttcgtgtcacaaaacttaaaacaaatgtaactcggtctgatgtagttccagtgtacccaatgatagttactgtcacgcacacctcgacctgtaaacatatacttgtacccttctagcgagattacccatcaaaactttcttgcttccaacacgacccgacgacacccccaccaccaaccgggggccgcccaaaagccccccgggccccactccccaccggtttcaca

SEQ ID NO: 683560 - DNA, 1717 bp, Homo sapiens
tactatcttcgcgcgctccgtgctcttgtcgttccgtgtgtggcccgggggtctgtttggttgtatcctgtgttcgtctgtcgtgtggaggttgtccagctgctgggtgtgttgagttctattcgcgagatttcttgctttgggggggagcccccacgcagagtggggggcaccacccacacgcacggtggcgcccgctgatgatcccgtcagtcttttcctttccgcgggatgtgccctgttggggtgtccttggattggggcgcacatgcagaccccctccgcttgtggtgtgcgtcatacggtgcccattttgcccgggggggcccaccccgcttgggtgatgctaagtctccccccgcctgtctttgtgggagtatgacatctgcggctgtgcgcccttcaaatttatctcctcccggcgggggaataattggttgggcgcttctttttgttggtgtttctaccgccaccacaggggaggtgctgctcctctcctcctggtggtgatccgcaggggggaccaacatgttgtgggcttggcgccccctaaaatagaaggggggcgccccaaagccattgtgcgttgggctgccccagaggtgcctattgtggtgcgtacccccgcatttgtgcgcccccacgactgatggtttggaagagggttgctacactgttggtgtgtgctccacaaggccgcccctccagggtgaacactagccatgtggggttactttgcttggtggggccctccctggtagggtagaatgtgacccctgccccccctgcgtgtgttgtggtcccacagggcctctttttaatagggtgtatgttccaccgcccccgcgtgtgtagaaagttgtctcccacaccaggggggggcacacacccacgtcgtggagaaagttctcccctcgtagagttagtatattggggccaccacagtccttggatgttctcacaagagcacctcgtggaagggaacccccacaaattttgtgggagagtcacacgggcgagatagcccccacgcgcgtgtctctgagacacacagtgcgcctcacacacacgttcgtttcccccgcgtgtgcttccgctttggtggccctgtggtcacatctcacgcacacaggggtgtgtttctgaccacacatggggcacagcacatctttatcacacccccctgagaaggtgtcccttgaatatatcaccacagagaggagaaaacgtctgtgcacatgtcttctgctctccctgtgagagggggtgttcccgccacacatgtgtttgcacacaggtgttctctggtctctgcacagagaattgtgcaaacccacacacctgtgtgtgcactccacgtataccccactttctatcactccaccgggtacccaaccgaggtcctcggcctctgttctcgtggaagaccggagttacaccctttccccacttgctgaaaaaggttccaggcctcttcttggctgaatccactctgcctttgtggctgctgcccctgtggctgctgccacccaccacagctgctcctgctgctgctgcacgccccacgctataaggttgaaaccccaaggaaagaagttcggaaggaagtccgaccgaggatatgggatttggtctctttgactaatccacccaaaagccacccacttagcccgttttatttgccaaacaccaggaaataaaggcttacttcctttta

SEQ ID NO: 683561 - DNA, 677 bp, Homo sapiens
tcctgtgggacgtctggcgagcaggggtcatcaggtctgtgctctgaactccaggcaagggagcctggggagtcaggacaggaaaggacatgcgtgagggcctgtggctcatcaccaccctctgcgtcctagtttacgttctggtggcatctggtgccagggaaagccactcgtcaacacaagctgcgggaggagaggggagctatttggagcaggagacagactaagaaatagacattgcggtccgtggatttcagcccttttgggtttcagctgtgccctaattcttccctgtacggggacagctggatctttgcaggcagtgcaacagagctgcaactccagatgtagtgattccactttggacagaggtgccaggtgggggccccagacttgtgtccaggagggcattgtctgtgtgccacagtccaccggcctcctggaggtgaaatccccatgccagccaagaggggtacgcaatgacgacttagagttcagcatcactccacttctccactcgccatcactcctcaccttctcctgggccctgccctgattttctgaatctcctccagccctctgcggtggaaatgaggaggtcgatggctccgaaaccagcaggtctggggtgttaaggaagatggccctaggtatatcaattaggaagggttcagaag

SEQ ID NO: 683562 - DNA, 541 bp, Homo sapiens
tcggttttctaggaaattgggaattagttgcctagagaggatactgaactatgcagaaggagttaagagctgggatgaggctggatggggtgactgacagtccagatcattgaaacagattgggtcgtcggaaactggtccagatgaggctggatggggtgactgacagtctggatcattgacactgattaggtcgtcgagaaacgggtccagacgaggatgaggcctgaggctggatggggtgactgacagtctggtatcattgaacactgattgggtggttggtcagaaacgggtccagagaggatgaggtgaggtggatggggtgactgacagtccgtggatcattgaaactgattgggtggttggctcagaaacgggtccagatgaggatgcggctggatggggtgactgacagactggatcattgacactgattgggtcgtcacgaaactggtccagatgtaggctgggtggcggtgactgacagcttggatcattgaaatgattgcgtggtcagaacactggtccctatgaggct

SEQ ID NO: 683563 - DNA, 408 bp, Homo sapiens
aatgatcctctacttcctccccatcctgacaaaaatgagtccctatgtatcacagggagatgggagagtgagatggattagaaaaaaatgtattgtgtccatactaaaattttgggatataggcataatctaagttaggtagcctcaatgtccttggcccatcatgacactggtgtagcattaactgtaagtgttgtgcttccaaatcacttttgggtttccaagaatctcttgatactcttatagcctgtcttcactcttgatccttgattctattctattagtcaggtgcacaaagattaccttcctgttatagccttctgtctcgtcaccaaccattcttactgtggtggacatgtacttggaaaaaggccgcatgatctttctgggtccactcagtgtctaagg

SEQ ID NO: 683564 - DNA, 248 bp, Homo sapiens
ggggggttttttgggggctttttttgggggggggggtgtccccaacaccttgggggcctttttgttttttgggcccccttgctggggaaaagggggtttttttttagggggcccttttgggggggggggtttttcccctttcggggtttggggggggccccaattttagggttttttggcccgggcccccccccttttgggggctttttttttttttgggggtttaaattaaaaaggtttttccccca

SEQ ID NO: 683565 - DNA, 515 bp, Homo sapiens
  misc_feature (41)..(41): n is a, c, g, or t
  misc_feature (45)..(45): n is a, c, g, or t
ggagaggagaagagagaggagagaggaggtcgaaagccatngaanaggcggtgagattggggaaaagaacgggaagatgaggaaaaagggaggaggggaggaaaaggggagggtgggaaggggaggagggagggagaggaagagaggggaagaaggaggagggaagagaggaaagagggggagggaagggggaaagggaggggggagaggaaggggggagggaggggtaggaggaagagggggggagaagggggaaggaggagagaggagggggaaagagagaggaggagggggagaaagagagggagagagaggaggaagaaggaaagagagaggagagggagagaagaagagggaggaggaggaaggagagagggaaaggaggaaggaggagggagggagaggagaggaagggaaagagggaggaagggagggagagaggagaaagagagggaggaggagagagaggaagaagggaggaggagggagaagggaggggggaggagggggggggg

SEQ ID NO: 683566 - DNA, 189 bp, Homo sapiens
ttttttttacatttgaattggaaaacattttttgttgtttcttcaaatgacctgactcccacctttaataatactcaagcagcactgctagaaagtgtaaacttattttcagtagggtgatgatagaatgtcaatgaaagccattgacattctcatagtgagtacaatatatcactgcctgcgtcgacg

SEQ ID NO: 683567 - DNA, 311 bp, Homo sapiens
aatcgagccagtccccaaattatgacatgaggagttgggaacaggaatgctaagtccctgaacaatacaaatctctatgcaactcaaggctgccttatagagccagctccaggactctgccaacagaattacagctctgctgaaacctaatccattcccaggcctggataaaagtaggtagcctgttggtttgcagagacatcttataataatctagggtttggccatccagaaggcctctttctgctcagggttactgcagagtctttaggtgacttgttagcagccagtggctggactgttctcatggg

SEQ ID NO: 683568 - DNA, 832 bp, Homo sapiens
taatctactgtcagcaattttcaaatataaaatatattattaactgtagtcaccatgatatacagtagatctcttgaacttattcctcttttgtctgaaattttgtatgctttggccaacatctccccaatccccctgcctttcagctcttgagcatcatttaactctttttatgagtttgactttttcagattccacatataattaagatcatgaggtattcttctgtgcgtgatttacttcacttaatgttttctaggttcatccatgttgttgcaaatgacaggatgtccgtcttttaagactgaatagtatttcattgtgtatatatcacattttctttatccattcatccatggacacttaggctgattgtgtatagtggctattgtgaatagtgctgcgatgaatacaagtgcaggtatttcttcaacatactgatttcatttcctgtggatatatacccagtggtgggaatgccagataagttctatatttaagttttcgagaaaccaccatactgttttccataatggttgtactaattcacaatcccaccggtagtgtacaaggggttcccttttctccacatcctttgccaaaaactttgaaatctttcatctttggtcagcgtttcagagatggggtctcattatgtcgctcacgctggtcttgaactcctggacccaggtgatcctcctggctcggccttctgagtagttggactaagcgcatgtgcatcgtgctcagatctacttagatatggatacaggccttctaaaggtgtgcaggggaaatccaagggggccaattcgattcaccgatagggcat

SEQ ID NO: 683569 - DNA, 369 bp, Homo sapiens
  misc_feature (36)..(36): n is a, c, g, or t
  misc_feature (45)..(45): n is a, c, g, or t
  misc_feature (357)..(357): n is a, c, g, or t
  misc_feature (361)..(361): n is a, c, g, or t
ctcgtttcctttcccattcgagtccatttcctctcnagtccattnccgttcaatcccattccattcgagtcccattccattcgagtccgttccattccagtccattccattcgagtcaattccattccattcgatgtctttccataacgatccattccattctattcctttcgattccattccattctatttcattccattcgattcccttccattggactcctttccattcgagtgcattccattccgttccatttctttccgttctgtacgattcctaccgttcgatttcattttgttccagtccattcctttcgcgtccattccattccatttcactccattcgattccattcnccancactcgaa

SEQ ID NO: 683570 - DNA, 445 bp, Homo sapiens
tgctttccgcctctttgagaccaagatcaccaagtcctgccctcaccaaggatgtcaaggccgctgctaatcagatgcgcaacttcctggttcgagcctcctgcccccttcgcttggaacctgggaaaaaatatttgatcatgggtttggatggggccccctatgacctcgagggacccccccagtacctgctggactcgaatagctggatcaaggaaatgccctttgaacgcctgtgccggagcacccgccagggggcagcctgggcccagctcaacgacttcccccaggagtatggccctcaggggggccaggtgtgagggctgccctcccccctcccctgggaggaacctgaacctgggaaccataaagctggaagccctgctgggtcccctttcatgaacccagcctgggcccagggcatattaaaggcttttggccccca

SEQ ID NO: 683571 - DNA, 310 bp, Homo sapiens
tacccgatggcgtacagcacggtggtaactggtggtgcgtgaatcgcagatggccctgtcgtcaacgagggcaaggtggcgatctgttcgggcccggcacgtacaagctgaccacgcaaaccctaccgctgctgaccaacctcaagaactgggacaagctgttcgcctcgcccttcaagagtgacgtgtactttttcagcacacgccagcagctcgatttgcgctggggcaccagccagcccatcacgctgcgcgacaaggatttcggcgccgtgcgcctgcgcgcctttggcaattacgccgatgcggg

SEQ ID NO: 683572 - DNA, 280 bp, Homo sapiens
aactatatggtattatttcacgctgtacccagtccattgcttgaacttacgggtacctaatgaaacgtggaggtccggatgtatgaaaatctcctcttttcccctttacttacagcctctgtaggcaataattatagagtagtatagatgatttttcttttttataaatctgcctatctccaggaggatggggcgcgcacttttagaaatgcatataaatgctctacgctccttttttctgttacttaatcggcgccaaggcctttacatgaatactcag

SEQ ID NO: 683573 - DNA, 905 bp, Homo sapiens
tggcagacgggacgagctgttccagcacggagcccccggcccaagggcgacttctccagccgggcccgcgaagtgatttctcacattggcaaactgagagattctcttctggcaacacaggcaacagcattatattaatgctccatagccatacccatgtctgcacatcatgggcaggcatgcacagacaccagcacacgcagccacccagcatcagcacctaggcatgccccagcatcattccatgcaggcaccgtgcttcaagcacagccacattccagcaaacgtcacgcaaccagcacagcgtccaccacaggcagcatcacaattaacaccagaccaaagtgcacagcgcagcccaccagtgcacacagcctgctctctctgcgattctcacaatctcagcacagccatctcactatgcacacacagccaggtcattgttacacacgctgtatcacactccaagacaaccagccagccaggccacaatcacagcagacttcctacacagccagcttggctcgcgcactcacaggccacacacagccactacactcctaaaacaactcttgaacacacctcagccacacccccaacacattaaccccaaccagcaaccataagacacgcacaatcacccaacaactccctccaccttcgccacccaccacgctggtctcattccccgctccgacgagcaacgtcttcaccatgtatcccaacacgacacagacgcaaaccgtcccattaggacaacaactgtcaaactaagcaacctcccccatctggatccgccagccttcgggaccaccggcacaactcacggttatcaccctcatgtcaccagacatcacaagcaattacacaccatctggaggcctctcgcaaaagacgcccttacc

SEQ ID NO: 683574 - DNA, 428 bp, Homo sapiens
cacagggaggccctcagtaactgttattcgcaagctggttttctagacctgatagctggaagcatggtgagcaccgggctctggacgctcaggcgcgtgtcgacttcagtcatctccaccacacaggtacagcagcgctttctggtagtcgcccttagtgtcttgctggatataatagtacagggacttgccgtactttctcttgaattcagacctaattttcaacatgtccacttcactgcgggagaccatgactctgatcaggaccttatctcgcgtccccttgcccttcatggagtcatacagccgatcagcaaaatacaggggcttgttctgaatgcactgaaccaggttcaggaaagcattttccaggtctcctttaatctctttcctgatgctgtccaacatgtcataagggctgtaactct

SEQ ID NO: 683575 - DNA, 491 bp, Homo sapiens
  misc_feature (374)..(374): n is a, c, g, or t
  misc_feature (491)..(491): n is a, c, g, or t
cgaacaggacacgcaaggagcaggtgctgagtgagcaggagggggagctgcaggcacttagggagcagatcagcaggcgacaggaagagagagccgagctgcacacacagctgacgcagaagcaacaggaggctgagaggagggatgccatgtaccaggaggagcttggagggcagcgggacttggtccaggccatgaagaggcgggtgttggaactgatcaagagaaggacgcctgtggcagaggctccagcatctctcttccatggctcccgagtgctgtgtggcctgtagcaagatctttggccgattttctcggcggtatccatgcaggctctgtggaggcctgctctgccatgcttgctccatggattncaagaagagagaccgctgctgcccaccctgcgcccagggaagagaagcccaggtcacctgaccaagaccaagaccagcccatgactggcctcccacctgcctgcccatcccactcan

SEQ ID NO: 683576 - DNA, 828 bp, Homo sapiens
  misc_feature (25)..(25): n is a, c, g, or t
  misc_feature (306)..(306): n is a, c, g, or t
  misc_feature (310)..(310): n is a, c, g, or t
  misc_feature (328)..(328): n is a, c, g, or t
  misc_feature (330)..(330): n is a, c, g, or t
  misc_feature (536)..(536): n is a, c, g, or t
  misc_feature (544)..(544): n is a, c, g, or t
  misc_feature (560)..(561): n is a, c, g, or t
  misc_feature (567)..(567): n is a, c, g, or t
  misc_feature (604)..(604): n is a, c, g, or t
  misc_feature (732)..(732): n is a, c, g, or t
acgggcgctcgatcagcaagcgggncgtgagctgtcagtttgggcctgacgtcaccaaggccttcttggaagagaacaacctggactatatcatccgcagccacgaagtcaaggccgagggctacgaggtggctcacggaggccgctgtgtcaccgtcttctctgcccccaactactgcgaccacatttcaacaaaccctcctacatccacctccagggctctgactacggcctcagttccaccagttcacagcagtgcctcatcccaacgtcaatcccatgtcctattccaacacccttctccanctanaaatcatctcacctaacngncggggcttcctgcatcccaggtcccctccaatcccaccggacccaggccctgggctaggggcagagcaggcccccccccagggcaatgttggacccccttttactttgtaaagtttgtatttattcccctttaggtttgcagagggggtaggggcagagtcaggggctggccagagggtctgctccctggacagagaggaaggagntggagcanctggtgctggagcacnncctggncattctgtggggaggccgtcctcggggtggggtgggnccgagtggctgccctgcccccctcatttgcatggctcctcccccactcaagcaatagggccccgccataggaagacccccagagagagggtcagcagggggccccgcctgcgcctcccctcctatacnccatggtggggctaggctgggctcacccccctccccagctattttatgtctgtaattaaatatgttaaaataaagtcattatcgggaagtcaaaaa

SEQ ID NO: 683577 - DNA, 150 bp, Homo sapiens
  misc_feature (1)..(1): n is a, c, g, or t
  misc_feature (11)..(11): n is a, c, g, or t
  misc_feature (24)..(24): n is a, c, g, or t
naagtttaatncactgaaaactgnaaactatttttgagaagttttagaagtcaattcctagtgaaaaattaatgattgagacagatgcaccttggtgtggagtcaaaagtacacatgcgtggatcaaaatatataagaactgcatttcct

SEQ ID NO: 683578 - DNA, 572 bp, Homo sapiens
tcggaccgcagtcttctcccatcagcccaattatgtttcctctcccttcctttcacaggtgctgattcgtaaaaaaacattgagctgggcgcggtggctcacgcctgtaataccagcactttgggaggcctaggagggcggatcacaaggtcaagagatcgagaccatcctagccaacatgatgaaaccctgtctctactaaaaacacaaaaattagctgggtgtggtggtgcacacctgcagtcccagccactcaggaggctgaggcaggagaaccgcttgaacccgggaggtggaggttacttgagctgagactgcgccattttactccaggctgggcaacaagagtgaaactccgtcccaaaaaaaaaaaaaagatctgtccctagaggcttgtgttctggggggagtaactcagatacccatgaggcagatgtggggggcagggaggtatgacgggaaagaggtgggaaagcatagcttggtccagccgggggaaccaattgctcaaaatcccctaagtaggaaagcgctgagcttggtccagatagggataagttaaactccacaaa

SEQ ID NO: 683579 - DNA, 271 bp, Homo sapiens
tcgactcttaggatcccctgatcttccgtgcccctgggatgcacagttggttccttggagtcattatagatagcagatgccaagacctattagaaatggcttacagtggagtgcagtggcagagacctttgtatttattaccatgagcaaaggttacattctaaagaaagaaattacagttacattccttggtattgttgttgttggtgtagctcaatcacatttattgtttgtatgtgttaaggggacggaagatcagggacgaagatca

SEQ ID NO: 683580 - DNA, 719 bp, Homo sapiens
  misc_feature (107)..(107): n is a, c, g, or t
gtaagaagactgttagaatgccctcggtaacatagaggctgacgagatccttgacagtaatagtccttgttgtgggtctggaatctgatgcttccatcgcaggtaantgtcatgggagtcgatcaaattataccttatttggagcgaggcggcacaatgcgttggttcctcgagcattaacgtgtcatttgaatggggttaccgatacacaggacccttaggccgcagttggaaggggcaaattttcgccgttttggggcttaacctttgccttattctggtcgaattgcctgcacgaatagttacacatgaaacagagcatgttgaacagcccaattttcagtcgcctcacctgcgcagcccaggtataaggacgagtgcacaatctctgtaagcacggcgaagatggggccgaagacattgagtgcccccgtaaagtttgtacacttggtttgtgggccaattttatacaaatggcttggtttttaattagtgacaacctttaagggtaaagggcaacgtacgttgaccactattttttcctaataatcaccaaagttcggaatttaggggccttggttagaggttaagtaacaaaacacaccttaatatataggaactcagaccgaacctcgacacacgacaaggacggtttggagaaacgcatagtggttccaggggcgcagggaacacgggcggccccccagggcctaaaaaag

SEQ ID NO: 683581 - DNA, 267 bp, Homo sapiens
  misc_feature (89)..(90): n is a, c, g, or t
  misc_feature (109)..(110): n is a, c, g, or t
gtccaagcgaggtgggtgagggctagggatatcgggaggctttttgcgcgcggagggccgcgatatccggatcccgaaggatatccggnnggaactttgcggacggcgnntacccgcttggaactaaacacgcgggcttcgatttcggcgccgccccgggatatgcggaggggaaggattatgcgcatccaacttatatgcgggatgagagcgttatgcctctgccctcgcggagtgaaattaccaaacaaaatgaccttcttggcc

SEQ ID NO: 683582 - DNA, 155 bp, Homo sapiens
atctcctagtgagcattgaacaggagatggggagtctgaacttggaagccaatgtgacagcagatgtgagccttgtgccatggaaaagggactggcctctctgcacgagtgagatgagtggacgctggaatgtgcgcagctggcaaaggcacagg

SEQ ID NO: 683583 - DNA, 913 bp, Homo sapiens
aaggtgaaccataagcaagtactaccaatcaagtactgcaatcgattaataatcataatgggtatagctaggtaaaactaggaatagcccccgcttgtcacgttctgagtcccagaggttacccaaggcgcccctctgacatccggcctgcttcttctcacatgacgaaaactagcccccagtctcaatgcatataccaaagtctctccctcactaaacgtaagcctgctcctcactcgtctcaatcttatccatgatagcaggcaggtgtgaggtggattaaatgcaaaagcccaatctacggcagaaactcttaggcatactcctcaaattgacccagcgataggatgtaataagtaggcagttctaccgtatcaagcgctaaccataaaccaattcgtttaatttgaaagctatgtatagttatcctaaggtaactaccgcattcctactgaactcaagcttaaagctccagcaacacgaccctgactactatctcgcacctgaaacaagctagcatgactaagacccttaattccatgcaccctcctctccctaggaggctggcccgcatagccggctgtttgcccaaagggggcagttatcgaagaattcacaaaaaacgatagcgcctcatgatcccgcacatcattagtccagcatgcacctgccttaagctctagttctactacgcctgatctactccactcgaatcagactactcccgatatctaacgaacgtaaaataaaacgacagttgacattgaaaagccagcccattgctccccagattcattggcctaacaggtatctactattttccctttatattaataatcttttaaaaaacacacaaaaagaaaaggggggggaaaaaaccgggggcccgaaagcacccctttgaaaggggcca

SEQ ID NO: 683584 - DNA, 105 bp, Homo sapiens
ccctaactcctccctgactagtctccagccctaactcctccctgaccagtcctcctgcctaactcctccctgtaccgatcctcctgccctaactcctcccttttt

SEQ ID NO: 683585 - DNA, 182 bp, Homo sapiens
gatgccacccaaatctctccaaaacacaagggaggattggggggggccaaagtgtacaattttcatcccacaatggaaatttttaaatcatttcaggtagtctaccgaataggtaccaagatcacaaatagtgtggatcagatcttacaagtttatgggggcatcgataaacacggggtacc

SEQ ID NO: 683586 - DNA, 303 bp, Homo sapiens
gaaggccaagacatagtcttacgcttataggtagatacgtagccaggtagtcctaggacggcccacaaacatcatccaagacttctacaatccgctaggtggcctccgggcagaagcgggagatagggtgcctcgctctacgtcggctgggccgcctccggcctgctagtccttggcggggggctagtttgctgcaactagttcaacccgcacaaaacaagccttactccggccagtattctagtggccggtccggtggtggccagcaaataacgtttaagtgtaccacgggcaacccctgct

SEQ ID NO: 683587 - DNA, 201 bp, Homo sapiens
  misc_feature (38)..(38): n is a, c, g, or t
ccccccccccccccccccccgagtgcttagtgggcccnaaactcaaatttcctgtgaaatacgtattgataatccaattttgatttttccccccagaatataaatttcaggtaataaggctttagaactgctgataaaggggatcgttttcaggccctccccccggagtatttcagaatgcaataaatcaaaataatggca

SEQ ID NO: 683588 - DNA, 995 bp, Homo sapiens
  misc_feature (796)..(797): n is a, c, g, or t
  misc_feature (804)..(804): n is a, c, g, or t
  misc_feature (826)..(826): n is a, c, g, or t
  misc_feature (906)..(906): n is a, c, g, or t
  misc_feature (908)..(908): n is a, c, g, or t
  misc_feature (985)..(985): n is a, c, g, or t
agcgggccgcgctcgtggctcgagctccgcgcactccctccgcggccgctgagccgagcggacgcccccgggggccgcgtcgcagccctccgtgctcccccctatcatgcccggtgcccaggctggggccgcccaagcagccaggacaccatgcccgaggacggcgctggcgacggcggggaggtgcccgcgctcatcccggacggcgagccgctgcgggaagagcagcggcccctgaaacagtccctgggaagctccctgtgccgcgagtcgcactggaagtgcctgctcctcacgctgctcatccacgcctgcggggccgtggtggcctggtgtcgcctggccacagtgccgcggctggtcctggggcccgaggccgccttggcccggggagccgggggcccgccaccgacctacccggccagcccctgctccgatggctacctgtacatcccgctggccttcgtctccctcctctacctcctctacctggctgagtgctggcactgtcacgtgcggtcctgccaggcgccacgcaccgacgcccacacggtgctggcgctgatccgccggctgcagcaggcgccgccgtgcgtctggtggaaggccaccagctatcactacgtgcggcgcacacgccagatcacgcgctaccgcaacggcgacgcctacaccaccacgcaggtgtaccatgagcgcgctgacagccgcacggcccgcggcgagtttgactactcggcgcacggcgtccgcgacgtctccaaggagctggtggggctggcggacacgcggccannggctgcncttcaacaagtgcttcacttcngcagcgcggaggccgaggcctcgtacctcacgcagcgggcgcgcttcttcagcgccaacgaaggcctggacgactatctngnatgcgcgcgagggcatgcacctgaaggacgtagacttccgcgagtcgctcatggtcttcgccgaccccgcagccgcnctgcgtacgc

SEQ ID NO: 683589 - DNA, 1251 bp, Homo sapiens
tgggttaaaaggttataaaaatatccttgtgtgtctctcttatatatcccctctttatttacggtgtgctctcagatatatattctcctatattttattatctaccaggtgtgcaatatctccaaattgtggaaccattaagttttaaaaagggagaaagtttgggcccgtgatattattgtgtgggtacccttttatacacagaaataatacagagaatatatcctatttgtgaaaaacacctcctcttaaacacctgtgggcgccctcgagagagtgcgtgagagtgtgtggcagagagagagggcgccgcgtggagtgtgggacaactgtgtggacacctgatgacagcgtgagcagcgcagaaccacacagtgtgtgtatacacacaacagaggggatatatatattatactaagaaggtggatcataaaatagtacactagtgtgtataaagagagagaacatatatatcacacacacactgattatcatagtatagtgtagtggctccagaatatatcatcacacacatagtgtcgcccacactatgctgtgaacagcctatttatcagaagacactctcacagcagtgtgtggtgtgacagacgaaaactactctctgtgtgtgtagggctgatgtgagtagtatgtgaagtgtagtgtagattgtgcgccgactctcttctctctctctgtgtgccacaagagtgcgccctttgatggacagcgcgacgcagtcgcgccgggaaaagagcgacaacaataatgtgagaagagagaggcgccccgggtgtgagagatatcccacgcgcaccccacaatcataaatactcgcctatcatcaactgaggagagcacaacgtgggggtattatcacacatcacagtataacacaaagaagtccaaaagaacatagcgacccaagaagtggagagtcacccagaggggcgagggagagcaatctaccaccaaaaggagcgccccaggcaaaaagacacaccgactagtagcacgaaaccaaacaacaacaccgacgcgctgttgtatgacggaccaaaaaggggcggcgacccaacaaaacaaacaaaacaacaacaacacccaccaaccaccaacacaatcacaccaaaaccaacaaacacaaccaccgaacacaaccgacagaagcaaccacagagcactcacacgacaacacaacaaacgaaaaaaacacaaaagacgcggcagcgacgagaacagcgcacgaac

SEQ ID NO: 683590 - DNA, 1705 bp, Homo sapiens
  misc_feature (87)..(87): n is a, c, g, or t
  misc_feature (117)..(117): n is a, c, g, or t
  misc_feature (120)..(120): n is a, c, g, or t
  misc_feature (149)..(150): n is a, c, g, or t
  misc_feature (162)..(163): n is a, c, g, or t
  misc_feature (180)..(180): n is a, c, g, or t
  misc_feature (1143)..(1143): n is a, c, g, or t
tcaggggtcacggaggcttttaatttggagcacaaaaccacgggggatctagccgggggccaccccggaaatgacacgaggctcacntgactctagacactggggggaaagtgaggnganaaaaacaaggactggggccaattacacgnntggcaaagctannagctggccaacgagggnctctccgagggaagcttgggctttcgtggtagaaagtttcatagaggaaggcggtacaaactctccaggggcgggtggggcgctataacttaggcgagggacacccctgggcagagtgtgtgtgtggctcgggtggcctctcgagagcgtgcctgtggagctgtgaccacgggaggggagaggggctcgtggtgtgtacgccaaacgaggtgtgcacctgaaaaggggtcttgtggcgctgtgtgcccccaacagagggcttatactgtggggccaccagaagggcgtgtctctctgtgaaaagattctcgctgtggcgcgcggccaaacaccttttagccccttttttgctgtgtccccgaagagctctctctctcctttaccaaatttccgtgagaagagaaagccgtggtgtgtgtgatcactttgtgggcacaaagacgcgcgcctccagaagatcttcgcgcgccacagtgtgtgcgcccacctacggttctgtgtgaactctttgggcgcccagttgtgtgcgaacagtgcgccccaaacaacccccaggggtgtcagagcgagaaatagaacgggtatatctcctctcagaggtctcttcccccggagacagcgaattggagaaacccaacctagtgagaagcggcccccacaaagctctagttgtggcgctcgtgtggggccccaagatcttgtgggacagccgtctcgtggagaaaggagaagaaatcttgcgggctcccagcgggagaagcacccaaatcccgggtgcttgcgcacttttgagaaagcccacgtggaagggccacacttgtgggacagaggagacacatttccctcgagataacccacgggggcgcattgtagcggacagaactcccctactatgtggcgggtgtgggcgcgcgacgtggggaggaaagcattccatatccccccccacaatatcaaccgctnggggaattctcctgtgggacacgttgcggccgtggtgtgacaaccttccgtggcgccacaaaagggtttcccccccagaaggtgacaactccctcgtggggtcacaccagacggggggcagatcttcttgcgagatatgagaacaccccccacgtgggggcggaagcaccccactgagcgacagaaacggagcctcttgtatacacagcggccaccgccacagcgtgtgggccaccgcgagcaaaaaatggacccccggcggggtcggacacagcacgggcgaagaaccatcggagaaccccacggggcacctaatctcccgcggaacaccgcggagaaacaccccggcgggccgccaacacaccactgcccgcagcaaccacatacatcaggtggtgcacgcgtccacaaaaaaacatactcaaagcaacaggagcagcttaaatccaagaacgtgagggggaaaaaccacgcagtccccacaacgggggagggcacccaacacctcgcgcaatcacgcggggagccagccacaccaaggagcacaagcagaccaaggcca

SEQ ID NO: 683591 - DNA, 621 bp, Homo sapiens
  misc_feature (87)..(87): n is a, c, g, or t
  misc_feature (117)..(117): n is a, c, g, or t
  misc_feature (120)..(120): n is a, c, g, or t
  misc_feature (149)..(150): n is a, c, g, or t
  misc_feature (162)..(163): n is a, c, g, or t
tcaggggtcacggaggcttttaatttggagcacaaaaccacgggggatctagccgggggccaccccggaaatgacacgaggctcacntgactctagacactggggggaaagtgaggnganaaaaacaaggactggggccaattacacgnntggcaaagctannagctggccaacggggctccagggagctgggctccggtgagaagtcctaaggaagcggtcacgaactccacggggggggggcgctaactagcagggaccccgtgcaagttgtgggctcgggggcctcgagctgcctgagctgacacgaggggaggggtctggtgtagccaacgggtgaccgaagggcttgccggcccacagctatcactgggccagggggttccggaagtccggcccggcaaacttagcctggctggcccagctcctctacaatctggaggacgcgggtggcactgggccaagcgctcagatcggcagggggcccccagtctggatctggccagggcacagccccacaaccgggtccagcgatgaaggtatctccagtctcccccgaacgatgagacccatggaggcccaaccatgggcctgggccagcttgcacgctgaagagaccga

SEQ ID NO: 683592 - DNA, 354 bp, Homo sapiens
agaagggacacagtaacaacagaagggctgagaatagagtaggcttgagtagagtaggtggagtgagaggagtatgaggcaggtagatgggaagtgggtgatgtaggataatggaggccattatgagaaattcaaatattcagtgaacatgtgacactactgaaaaagtcaagagaagggggcagtgtagcctgattcaagttacaccagattgctagtggtcgccatatggagactagttcaggcggaaacaggagtggaagcaggacaagcaacgaggacaggctgctgctctaggccagacgagagtccccgatggtcaaaccacacaatgcatcaaagaggactgagtgg

SEQ ID NO: 683593 - DNA, 224 bp, Homo sapiens
aacgcagagcatgcattacatgccgtcaagatgcggcaggagacagactccgtcatccccatggcagatagctttaaatcaggatcgatttgaaagaatcctggttatcaccaactttaaacgacgatttggatcgctacataggatacgcgacaagcaaaagattctacgatatagttcgagaagcagttccaaacatagtcatatcagaaaacaaatttaca

SEQ ID NO: 683594 - DNA, 400 bp, Homo sapiens
ggggaccactggactgctgggaggaagattgcaaaaagatgaaggagccaacgctttcttcaaaggtgcttggtccaatgtactgagaggcatgggtggtgcttttgtattggtattgtatgatgagatcaaaaaatatgtgtaatacccaagctcacaagttcacagatccattgtgtggtttaacagactattcttgaggaaataaaacaaaaaaaagagacagatcttggataaaaccagaccgtaaggaatacctcagaaaaaaatgcttcattgagtattcattaaaccacagaagtattttgtatttattttacatttagattcccacagaaaacaggctagcttatcatacttgttcacctgattaactgaagaactgatgctgaaaagtaac

SEQ ID NO: 683595 - DNA, 534 bp, Homo sapiens
ttgaattgcggtctcatcagctgtagtcagtgtctttctagggcagtaacgccacaacatgatgttcatcagtattatagattgttctggcgtcacattttcataagcaatgacctggcaacttgtcaatgaatttctgtactgcttcatgatcagcagatgctttatcaccataaacctttaaaaatgcaatgctgtgccttttcataaatttgtgcaacccacctattgagtatttatagttcccttcagtttttcagctcatccggatggatatttgcttgtgtcatgatcagaataccattaagtggcatttgttcactgtgacactgttggattcattcttttaatacacagttgaaatcttcatttttagctttgtacagcatttctcactaacttctgtttatgaatttcagcatgtaactaactgtctttggtttcttctactttttttttaagatggagtcttgctcttttcgcctaggctggagtgcagtggcgcgatttcaactcactgcaacctccgcctcc

SEQ ID NO: 683596 - DNA, 425 bp, Homo sapiens
gtggcgccgccgacttaaggatccccgtgtcctccccctttttgtgaggcacggtgagggaggaagtgatgattggggggactggaacgccaacgctatggctgggagtttgtcaggagcaggtgagagtgttgtatctagcacagagcccaaataggtgtgtcaaagttatgcaggcaggacactcagacgtgtcacatgtaagcctataggacacagcaacagagacagaataaaagtttaaaacacctgggttcaaggctcaccccccacagctcgtttaccatatggactcaagcaagtccttttgtgtgtcataaacctcaatttccttgaaaagaaatacaaagggatatcggtatctctgcttcttatcatgaagatggtctcaaaatctgaagaaagaatgccatccacacttgttt

SEQ ID NO: 683597 - DNA, 250 bp, Homo sapiens
ctgtctagtttttatgggaagatatttcctttttcaccttaggcctcaatgcgctccaaatgtgcacttccagatactacaaaaagagtgtttcaaacctgctctatgaaagggaatgttcaactctgtgacttgaatgcaaacatcacagagatgtttctgagaatgcttctgtctagattttatatgaagatattcctgtttccaatgaaatcctcaaagctatccaaatatccacttgcagtgagcc

SEQ ID NO: 683598 - DNA, 140 bp, Homo sapiens
cgctctagaggatctctccagagctgaaaagcataatgaaaataaaaaagactctgccctccctcctcttaccactttggtttattgagtcatcattttatactctccacattccctctatggtactactctggaaaggg

SEQ ID NO: 683599 - DNA, 149 bp, Homo sapiens
cgagtcttaggactcccccgtgacgccacagctgctccaagctgctgggattacaggcgtgagtcctaccggtggtccggccttttatgccatttctttgttgtaggaatccagctccatttttatggcaatctatgagccttcttgag

SEQ ID NO: 683600 - DNA, 152 bp, Homo sapiens
tcggtacctgtatcagcgggagcttaaaagctcactacaagaagcttatcggttgggaatgaaaggtgacgtttggaggttggaagggtgagcagttgttggtgataggctatggaatgaacggcctagatgtaccaaactagtatcaaacg

SEQ ID NO: 683601 - DNA, 560 bp, Homo sapiens
  misc_feature (553)..(553): n is a, c, g, or t
gggaggcagaatgatgatatgagagcctgctgcatggtcagggtgtgtatggtgttgatggtcagcagattaatggtcggtactgtcgttgtggggcgaaaggataagggaataggctgggggaaaatataagtattaagaagagtagtttaagtaggccccattgtatgtggtgtctccagcatggagattggtgttgtaggaatggacatcggtggcacctgggagggtgatgaacccagcattgggtgggatgtcagaacttccagaaccagcaccggccacctcatatgctgtagcgggctggtgatggtgtgtgggtggattgtgactgttgcaatagaagaaatagcggggtttcgcctatacgggggctccgtaataatggggttcatgactgaagcctttgccaccgtaatagtagggataatcatagttgttgtaataatctttagctagggcagagtcgtattcgaagatgtagaggacgaatccatgttggaagccaggcaggtcctcccaccacaaacgtgggatccgtgcacgttaacgnatactag

SEQ ID NO: 683602 - DNA, 242 bp, Homo sapiens
  misc_feature (227)..(227): n is a, c, g, or t
atccaactagttgcaccctccatattcagctgcttggtgctgaatctcgatcgaacgttggaaaatggtgtcttttttttttccctttaaattatgtttccttcttttggtgatccctttgtataatcttacttttgttggagaggattacccttttgtttctcttttatttttggagttcaatgaactttatctgaacgttaaatatgtgattaaataaaattgcnttctttgtttttgga

SEQ ID NO: 683603 - DNA, 416 bp, Homo sapiens
acaggaagagtgactctgtctcatataaaataaaaaataaaataaataaaatgtatcacactaagtatatggttttgaatctttcccttttttatttaaagaacaccttggagtactttctcattctctgttgcagccacatagtattttattgtatggatgtatcaagatttattttttctgtttcctattgatagaaatatgggttatttctaatcttttgctgttacagaaaagctgcaatgaatagccttatacatacgtttctcgtgagtgcaaatatatctgtagaatcactcccattagtgggaatggtatgtttgcaagtttgatggatattgccaaattaaccttataggatttgtaccaattttcacccccatcaccaacaaattagaatgcctgcttatccacag

SEQ ID NO: 683604 - DNA, 127 bp, Homo sapiens
cacgaggagtatatcggcctgcatatcatgccccaggctcttccaaaattcctaacgcactccacgttgagcctagccggcgaccagaaatttgatagcagccacctgcccaatttcaaactcggtg

SEQ ID NO: 683605 - DNA, 197 bp, Homo sapiens
atctcccactccggatcggatgcggggaagaggacaggcttcacggggcgcacatgcgggagatccgcggggctgaccatggagcgaagtgtaccaacgaacgccactgctcgcatcacgcgcccccctccgcatgcgacgtgccacctggcgcgtcgcatgacctccgcgtgttgcgcgtcgtggccctgaccatg

SEQ ID NO: 683606 - DNA, 680 bp, Homo sapiens
cctacagccaattgtcaggtgtggccagagagggtccctagggcccctagatggttctaaccccaaaccccttaaccatgagcttccctgtcaactgccacccacagggagctgggagtgagggctgggaatcagggttgcccaatggaagagccaggaattctggagcccaggttcaaatctagactttgtcataaatgatggttatgccctggccagtgggggacagagtcaaagcactgcctggttcaagccccagctctgtcacttactagttgtatgagcttgagtgagttattaagcctggctttgggaaattgatagtccctctctaggtgtcaatattttcatctgtgaaatgggtttaatagtactctaagaattaaatgatatgggaggatcgcttgagcccaggaatttgaggctgcttagagctatgattgtgatgtgaatcagattcaaccattaaactgatgtagatgattcagatgtgaatcaaatattaaagtctctacttttcaaagaggcagggtggttgtgccagagagcaggaatggtctcagtccagactgctatggaatgctgggcaaatcatatttcatatttggacctcaacttctttccttctctgtgaatgaaaggaatttgattaaagaggattttaaaaattaaaaaaaaaa

SEQ ID NO: 683607 - DNA, 758 bp, Homo sapiens
agcggaagatatatttaacggtaggaggctagaacgtatctcctttagtatatagcttcatatacaacctttcaaatattcagtcaaaaagtatgtgggccttcatttacacttatgacggggctcacaaataggggtggtcgtgccccgtttccttacgtccactctttcttcaaattaaacttgctacagcaggaaattactgaactgtggatcttctcctacgtccgccttccctatgtcaattccgcatttccacttggtattctacaaatagtataggactgtaaattctaacctataagtataatttcgacgcgcaaggttgggacatgaagaagggattagtgggaaggtaaaaagaacaagagaggatgtgtacacaaaaaggggagtcgaaacacatagtggagcaacaggcgctaacaagacgatgcacgcaaacaaaccagcagaagacggaccaacccagctgggccatctatgggagaaacacatgcattaggatccaataagtgggaaaggggggaggaaagagaaggaccaacccgacaaccaaacgggtagctagacaatccaacacaaacgaaaacaggacaatagaaagattagacagggaacgacatccaaaacaaacagacacggtattgaaaagcggatatgcagattgaacaatacacaaagatactatcacgtgaggaaaacacagatacacatagaaaaaatattatgcagcaaagtactgagtgaaaaaagga

SEQ ID NO: 683608 - DNA, 231 bp, Homo sapiens
agagatggactctctaagtcacgggggttcgactagaatcgatctgcgggggtcggacggtggctcaggtgtctgatggaactagtacaggcggcgtgcaccgcagtggtgaatacacgtcgaccaggctccatgtttgcgatatttggaggtgagcacggtgctcacgtgttgacggaacttgtccagggaggtatgcaccggcacgtggtgaactacacgtcgacgctg

SEQ ID NO: 683609 - DNA, 1357 bp, Homo sapiens
  misc_feature (1038)..(1038): n is a, c, g, or t
ccacccaccacacagaaattggaagggggaagccgccctcgtcttttgggggggcgttgtccccgacacacaaagagtggcttcggtcctccacagcccgccacaatgaaatgatgccgcccgcgccgtgtgtgtaaccaaaaagggccgccctcctcatggtgtacctatgggggaacacccccgcttggggaagaatggaacccccacaagcgttttcctgaggccaatagggcctcgaaaaattgcctccgcctttgtaaaaaggggctggacatccgcgtcggttggtctcatcgccgctcctcggggtggtgagcaccaatgtgtcctcccctcttctcggcggggacactaataccgcggtgctttctctttgggggcgaccacacctcggggctcaaacaactttgcatcaatggggagtacctgctcaccaccacgtctcttttgtgggggagatctttcctgtcccccttcggggtgattatattgtctcttggagagagccccccccctcgctgcttatcaacactggtgcacacgagtggtacggcgggcctcctcgcgaagaggggttttttctcggcaagcgcccaccaccccacgggggggtgttgtcccccgcacaaccttctggcgggtcctctcctttcgtctcctcggggagggggcccacacgacggcttcgggtgttatcacacggcgccaagagtggattcctcgctgcactcttctcgctcacggacccacacttgcccccggttttctcgggggtcccaccgcgccacaggccacacatcgcggggggtttgcccgcgagaaacttctggtggaaactctcacaagaaggcttctcacagggtggcccgctgaaaccccacagctctgtgacacactggcacagctctctcacacccaccctcggggtctccgaggcgcctggggtggtctcgtgggaaacacgtggctcttggggccctggctggagacccccacgcgggagacacaccaagagagcggtgctccaagcacagnccacaggtggtggtggtgaacacaaacgcggggtgcttcttcttccacaccgcccccacaagccacgcccgggcggccgaacccctggggcacaggccacaggccacaggtcctccctgagatggaacgcctgccgccccccacacccccacatctccacaccccaatcacatgtttaaacagggttcggcggcacagcggttgtttccacagaacgccgcctccccccccagatcccggtataatagagatatagcctatttatatttacttgggtaaaaataatcggacgacctgggattaagagctctttttttta

SEQ ID NO: 683610 - DNA, 758 bp, Homo sapiens
  misc_feature (28)..(28): n is a, c, g, or t
  misc_feature (32)..(33): n is a, c, g, or t
  misc_feature (39)..(40): n is a, c, g, or t
  misc_feature (43)..(43): n is a, c, g, or t
  misc_feature (48)..(50): n is a, c, g, or t
cggctggtcgcgttgcaggtgaggttgngacnngcgggnnggncgcgnnncaggcaacatgtcggaaggaaacgccgccggcgagcccagcacgccgggagggccccgacctctcctgactggggcccgggggctcatcgggcggcggccggcgcctcccctcacccccggccgccttccctccatccgttccagggacctcaccctcgggggagtcaagaagaaaaccttcaccccaaatatcatcagtcggaagatcaaggaagagcccaaggaagaagtaactgtcaagaaggagaagcgtggagatggcacatccttgctgctggggacttggccctgctatttatttttgtatttatgtcttaatctcttccactgatgcatcctccaagggtagatggggagggtctgtgtgaaggggccggcttctcttggtgcctgctgggttgcaggggcaggaagcgtgtggactgcagcttctgctggtgctccccccgtcctcctggaggcagtataggagagagagcaaggattgagtctgagacttaagcactcggtcccagcttgccagttcctggttctgtgtccttggacaaactacctaacctttctgagcctcctatacctcatccgacacaaatggggatgatacctacctccagggttggcgtgaggattcatgggctattatagatgaaaactgcacaaggccagaaccagcaggcactcaataaacgttcatgtcctttttctct

SEQ ID NO: 683611 - DNA, 164 bp, Homo sapiens
atgacctcaagctaatccattaccacttggacctccctaaagtgctgggcttacaggtgtgagccaccatgcctggagacgtagacaaatcttcactgagcattttcacacaaccttttacaaatgtacacactcgaggagcgcggccgaactcaggcagcgcg

SEQ ID NO: 683612 - DNA, 1073 bp, Homo sapiens
ggttgccgccgccgccgccgcccgccgcccctctgccagcagctccggcgccacctcgtggccggcgtctccggcgggcgggagccagtgcgctgacgtggccgcaggcgtggggccgagacgaactgctcctgcggctgcgacatcagagctccgagagtctagcgacttccccatgtgggctaggcctgcaggctgcctgaggagcatctgagatttgtcacctgatagttccaatggtgcaaacaggcagaggggatattggaatatccttgggagaagattggccatattgatgaaagaagagcatgggaaaaactagttatcatataacaaaatacacaaatcatcctaaaggattataaccaagtaggggagacacagtacaaaggaacaatccagtgaaacacaaggttaggggtaaatggacaagaaggatatgaacatggccaacttacccatacggaactgaaagaggctataataactatgcaccaaggggaacacactaccgtagggaacgcaagaaaaaacattgaactagcaaaagacacaaacatgagcataacgtggcaatgaacagagaggggaatgccccatatcttaatgctggcggcaggaaaccatggaggacacacgaaatgcctacaaagaaaaaaccaatcataggacgaagttggcatataaaaaagcctacgttcgcacaatcagatgatagaaagaccaacatataaacatagccaggattcaaaaagtagtacaaatagaataataccacaaagcacaatccgaagaaaggaagccacaaaggcaatagaacaccacagagaacaagaggaataatggaaacacgaagcgaaacaaaaccacaaaaacatggaaaacatacaaaggaaaggaggaagccacaaaaaaacaaaagaaagacgaaagaccaaccacacgcaaacaaagcggcaaaacaactccataaatcacacagagacagtaccaaaaagaaaaaaaaacacacagacaaaatcaatagaacaaaactgaaaccaataactagccgcagacaaaaactataacag

SEQ ID NO: 683613 - DNA, 465 bp, Homo sapiens
cagctccaccaagatcaaagaagtcttacagtgccagtcacagtggctcatgcctataatcctagcactttgggaggttgaggtgggaggattgctctgatggacaggaatttgagagcagcctgggcaacatagtgatgactccatcactacaaagaaaaaaagaaaaaaaaaatagctgtgtgtggtggtatgtgcttgtagtcccagctacttgggaggaggctgaggcaggaagatggcttgagcccaggggtttgaggctgcagggggctgtgatcatgtcccactgcactccagtctgtgtgacagagtgagaccctgtctcaaaaaaaaaaaggagggagggagggagagagagaaagaacgaggggaaagaaagaaagacgacagggacggaaggacagcagaggacgaggagaccgacgtgacacggaaggaaggaaacgagacagacggagaaag

SEQ ID NO: 683614 - DNA, 466 bp, Homo sapiens
  misc_feature (225)..(225): n is a, c, g, or t
tgcgcgtaacaaacttaaaaacaaatggctgaacacgcaggaacaaggaaaacctgactgaagaatgagacgttaaaacttaagggccttaggtcctggcacggtggctcacgcctggaatcccagcattttgggaggctgagccgggtagatcatttgaggtcaggagttcgcgacaagcctggcctatgtggtgaaactccgtctctactaaagaatacaaanaatccgccgggcgcggtggtacgtctgtaatcccagctacacaggaggctgaggcaggagaatcgcttgaacccgggaggtggaggttgcagtgagccgagatcacgtcagtgcactccagcatgggtgacagagcaagactccatctccaaaaaaaaaagggagataaaaatttagttactatcacgggatggtggtgaagattaaaggaggtaagatatggtatgtgctgagaacggtt

SEQ ID NO: 683615 - DNA, 1988 bp, Homo sapiens
caattgttattattatgtcctacaagcattaaaaaaaaaaaaaaaaaaaaaaaaaaaaaaaagatggcggcgcccaggccctgccacgcagacttccgcccggcgcgagaccgaagctggcggctggtcgcgttgcaggcaacatgtcggaaggaaacgccgccggcgagcccagcacgccgggagggccccgacctctcctgactggggcccgggggctcatcgggcggcggccggcgcctcccctcacccccggccgccttccctccatccgttccagggacctcaccctcgggggagtcaagaagaaaaccttcaccccaaatatcatcagtcggaagatcaaggaagagcccaaggaagaagtaactgtcaagaaggagaagcgtgaaagggacagagaccgacaacgagaggggcatggacgagggcgaggccgtccagaagtgatccagtctcactccatctttgagcagggcccagccgaaatgatgaagaaaaaagggaactgggataagacagtggatgtgtcagacatgggaccttctcatatcatcaacatcaaaaaagagaagagagagacagacgaagaaactaaacagatcttgcgtatgctggagaaggacgatttcctcgatgaccccggcctgaggaacgacactcgaaatatgcctgtgcagctgccgctggctcactcaggatggctttttaaggaagaaaatgacgaaccagatgttaaaccttggctggctggccccaaggaagaggacatggaggtggacatacctgctgtgaaagtgaaagaggagccacgagatgaggaggaagaggccaagatgaaggctcctcccaaagcagccaggaagactccaggcctcccgaaggatgtatctgtggcagagctgctgagggagctgagcctcaccaaggaagaggaactgctgtttctgcagctgccagacaccctccctggccagccacccacccaggacatcaagcctatcaagacagaggtgcagggcgaggacggacaggtggtgctcatcaagcaggagaaagaccgagaagccaaattggcagagaatgcttgtaccctggctgacctgacagagggtcaggttggcaagctactcatccgcaagtctggaagggtgcaactcctcttgggcaaggtgactctggacgtgaccatgggaactgcctgctccttcctgcaggagctggtgtccgtgggccttggagacagtaggacaggggagatgacagtcctgggacacgtgaagcacaaacttgtatgttcccctgattttgaatccctcttggatcacaaacaccggtaaaatgagcaggtggaggaggacggcgcctgtgcccacggctgctgcctgctccagacattttgttcttgaatctgtgagacccagaaggggcccactgagcccactcactccagcctttggcaaccattgttccaggtcccccagggcttcctcccacagcagctgtgaatggcacagtgaccttcctgcagcgtggagatggcacatccttgctgctggggacttggccctgctatttatttttgtatttatgtcttaatctcttccactgatgcatcctccaagggtagatggggagggtctgtgtgaaggggccggcttctcttggtgcctgctgggttgcaggggcaggaagcgtgtggactgcagcttctgctggtgctccccccgtcctcctggaggcagtataggagagagagcaaggattgagtctgagacttaagcactcggtcccagcttgccagttcctggttctgtgtccttggacaaactacctaacctttctgagcctcctatacctcatccgacacaaatggggatgatacctacctccagggttggcgtgaggattcatgggctattatagatgaaaactgcacaaggccagaaccagcaggcactcaataaacgttcatgtcctttttctct

SEQ ID NO: 683616 - DNA, 877 bp, Homo sapiens
ctgatacagaatcctctgtcgtgctcggggaagctggtggccgcggtgcaggctgtggcaggctgggaggctgtgggcgcctggcgagcatcagctggtgtcccacgtcaaggtgatcgagcccccaggggcatttacacgggaggggaccacccaaaggaagctcttctgtgcgccagcaattatgcacagtgcaacagcagtcaccgtgctcacagccactgaccctcaagaccggagatggaccaacccagacgggaccacgctccaagatcttggtatcgtggccaagaagccgggaagcccgtgggagaatgtgtgtcacctgctgttgtcagagcttgacccagatcagacctgctggcgccatggtcaccttcatcaccagagttctacgtgggccagagaaaatgaaggaaggagcacaagctcagagcccacatcggagcactgccccgcgctcccagcaccccacagccctcacatcccagtggccgggacgcaggagacccaggagaaagcaccctcccttagtgaatgaggagtgggcatcaggccgtgggacacggcttactcctggtaccgccgcacgcccagccatgctcagttaagtggacaggcccacaagatcgaccttgcatgctgagcagatggcagagatgggatgtgtgaggggatgaggaggcatcagcagatgagaccccgaaggagatcaggcagccccacctgcaggagaacgatcagccctcacaggggatcagcccactgccagttaccacccagctgcaggtgccagccacggcagggatgggagaggggtggggagcgagtcactgcctcctctggtgcagagattcagagtaacatcacatgaata

SEQ ID NO: 683617 - DNA, 1925 bp, Homo sapiens
ttaggtacgaggcctggtgttaatcggccgaggtgtcagtcccctctggtgatctcgtcgccccttctctcccaggcaacatgtcggaaggaaacgccgccggcgagcccagcacgccgggagggccccgacctctcctgactggggcccgggggctcatcgggcggcggccggcgcctcccctcacccccggccgccttccctccatccgttccagggacctcaccctcgggggagtcaagaagaaaaccttcaccccaaatatcatcagtcggaagatcaaggaagagcccaaggaagaagtaactgtcaagaaggagaagcgtgaaagggacagagaccgacaacgagaggggcatggacgagggcgaggccgtccagaagtgatccagtctcactccatctttgagcagggcccagccgaaatgatgaagaaaaaagggaactgggataagacagtggatgtgtcagacatgggaccttctcatatcatcaacatcaaaaaagagaagagagagacagacgaagaaactaaacagatcttgcgtatgctggagaaggacgatttcctcgatgaccccggcctgaggaacgacactcgaaatatgcctgtgcagctgccgctggctcactcaggatggctttttaaggaagaaaatgacgaaccagatgttaaaccttggctggctggccccaaggaagaggacatggaggtggacatacctgctgtgaaagtgaaagaggagccacgagatgaggaggaagaggccaagatgaaggctcctcccaaagcagccaggaagactccaggcctcccgaaggatgtatctgtggcagagctgctgagggagctgagcctcaccaaggaagaggaactgctgtttctgcagctgccagacaccctccctggccagccacccacccaggacatcaagcctatcaagacagaggtgcagggcgaggacggacaggtggtgctcatcaagcaggagaaagaccgagaagccaaattggcagagaatgcttgtaccctggctgacctgacagagggtcaggttggcaagctactcatccgcaagtctggaagggtgcaactcctcttgggcaaggtgactctggacgtgaccatgggaactgcctgctccttcctgcaggagctggtgtccgtgggccttggagacagtaggacaggggagatgacagtcctgggacacgtgaagcacaaacttgtatgttcccctgattttgaatccctcttggatcacaaacaccggtaaaatgagcaggtggaggaggacggcgcctgtgcccacggctgctgcctgctccagacattttgttcttgaatctgtgagacccagaaggggcccactgagcccactcactccagcctttggcaaccattgttccaggtcccccagggcttcctcccacagcagctgtgaatggcacagtgaccttcctgcagcgtggagatggcacatccttgctgctggggacttggccctgctatttatttttgtatttatgtcttaatctcttccactgatgcatcctccaagggtagatggggagggtctgtgtgaaggggccggcttctcttggtgcctgctgggttgcaggggcaggaagcgtgtggactgcagcttctgctggtgctccccccgtcctcctggaggcagtataggagagagagcaaggattgagtctgagacttaagcactcggtcccagcttgccagttcctggttctgtgtccttggacaaactacctaacctttctgagcctcctatacctcatccgacacaaatggggatgatacctacctccagggttggcgtgaggattcatgggctattatagatgaaaactgcacaaggccagaaccagcaggcactcaataaacgttcatgtcctttttctct

SEQ ID NO: 683618 - DNA, 299 bp, Homo sapiens
caccatcctactttctgactactctgggaacctcatacaaaaggaatcatacaatatttgtcctttcgtgactggcctgtttcagcgcaacgtattcaaagttcaaccatgttgtaacctgtcaggattcccttcagcatcttaaaaatataatttgaatatagttttttttttttttccaagaacccacttatttacaccctttacaaagtcctacattctgccacatcagtttaacacaggggaagggaattagaagaggggaatccacgtcattcacagacttcctgtcagcccct

SEQ ID NO: 683619 - DNA, 450 bp, Homo sapiens
ggatattcaggtagtgggtgtagagcttacgctatgttacttggtggctgctataagagcctactatgggtgtaaattattactctctctacaaggtttttcctagtgtccaaagagctgttcctctttggactaacagttaaatttacaaggggatttagagggttctgtgggcaaatttaaagttgaactaagattctatcttggacacccagctatcaccaggctcggtaggtttgtcgcctctacctaacaatcttcccactattttgctacatagacgggtgtgctcttttagctgttcttaggtagctcgtctggttacgggggtcttagctttggctgtccttgcaaagttatttctagttaattcattatgcagaaggtataggggttagtccttgctatattatgctcggttataatttttcatctttcccttgcggtact

SEQ ID NO: 683620 - DNA, 846 bp, Homo sapiens
taaagtcttgcaatgaatgcaagcgcgtcacggggttagacctggccgttgtcgctagctagcagagagaagttcgctggccccgtgtgagctgtgaagtttgtcgggccctgaagtgtgacgctttgcctgttgttgtcgaggagttgcggagtgtccggcgacgccactttaaagtgcgctgtcctgtcgggttaagacgtgtatgatgctaatggtctctattgtgtcgctttctaattctcgctgagtattagcctccgctcgccgttcgtaaaagggtgctgttgcgagcactctggggacggtcaatggttgccaagtgtgcgttctactgagtatgccgtccctcaatcttggtagctgtagacaagtgcgcgtgcgagtgtgagccttattgtcgtgtcgctaaggctagatagcgtgcgatatagcgtgagcggatacggcgaccatgcagcagggtcggcacgtcagtaatccctgctgcgtcaagggaccgttcataatcgtcgtatcgtccgcagcgtaagtaggcgttgttgtgaatggagctgtgctaggcagagccgtcggcgtaagcctgcagccgttagcccgcccgcacgtattaacctagctgggagaactgctcgtgtgctagtgaacgcacgttctctctgatcagaatatctactctccgtacgttagcaggagctgcaacatactagtcacagccctatactccctctacatagttgtagccacaacagcaactggggctcactcacccaccacagttgacaagcataaaccctcattcacacgagaaaacaccctcataaatcacacagggtatggcccgca

SEQ ID NO: 683621 - DNA, 1903 bp, Homo sapiens
  misc_feature (28)..(28): n is a, c, g, or t
  misc_feature (32)..(33): n is a, c, g, or t
  misc_feature (39)..(40): n is a, c, g, or t
  misc_feature (43)..(43): n is a, c, g, or t
  misc_feature (48)..(50): n is a, c, g, or t
cggctggtcgcgttgcaggtgaggttgngacnngcgggnnggncgcgnnncaggcaacatgtcggaaggaaacgccgccggcgagcccagcacgccgggagggccccgacctctcctgactggggcccgggggctcatcgggcggcggccggcgcctcccctcacccccggccgccttccctccatccgttccagggacctcaccctcgggggagtcaagaagaaaaccttcaccccaaatatcatcagtcggaagatcaaggaagagcccaaggaagaagtaactgtcaagaaggagaagcgtgaaagggacagagaccgacaacgagaggggcatggacgagggcgaggccgtccagaagtgatccagtctcactccatctttgagcagggcccagccgaaatgatgaagaaaaaagggaactgggataagacagtggatgtgtcagacatgggaccttctcatatcatcaacatcaaaaaagagaagagagagacagacgaagaaactaaacagatcttgcgtatgctggagaaggacgatttcctcgatgaccccggcctgaggaacgacactcgaaatatgcctgtgcagctgccgctggctcactcaggatggctttttaaggaagaaaatgacgaaccagatgttaaaccttggctggctggccccaaggaagaggacatggaggtggacatacctgctgtgaaagtgaaagaggagccacgagatgaggaggaagaggccaagatgaaggctcctcccaaagcagccaggaagactccaggcctcccgaaggatgtatctgtggcagagctgctgagggagctgagcctcaccaaggaagaggaactgctgtttctgcagctgccagacaccctccctggccagccacccacccaggacatcaagcctatcaagacagaggtgcagggcgaggacggacaggtggtgctcatcaagcaggagaaagaccgagaagccaaattggcagagaatgcttgtaccctggctgacctgacagagggtcaggttggcaagctactcatccgcaagtctggaagggtgcaactcctcttgggcaaggtgactctggacgtgaccatgggaactgcctgctccttcctgcaggagctggtgtccgtgggccttggagacagtaggacaggggagatgacagtcctgggacacgtgaagcacaaacttgtatgttcccctgattttgaatccctcttggatcacaaacaccggtaaaatgagcaggtggaggaggacggcgcctgtgcccacggctgctgcctgctccagacattttgttcttgaatctgtgagacccagaaggggcccactgagcccactcactccagcctttggcaaccattgttccaggtcccccagggcttcctcccacagcagctgtgaatggcacagtgaccttcctgcagcgtggagatggcacatccttgctgctggggacttggccctgctatttatttttgtatttatgtcttaatctcttccactgatgcatcctccaagggtagatggggagggtctgtgtgaaggggccggcttctcttggtgcctgctgggttgcaggggcaggaagcgtgtggactgcagcttctgctggtgctccccccgtcctcctggaggcagtataggagagagagcaaggattgagtctgagacttaagcactcggtcccagcttgccagttcctggttctgtgtccttggacaaactacctaacctttctgagcctcctatacctcatccgacacaaatggggatgatacctacctccagggttggcgtgaggattcatgggctattatagatgaaaactgcacaaggccagaaccagcaggcactcaataaacgttcatgtcctttttctct

SEQ ID NO: 683622 - DNA, 2827 bp, Homo sapiens
  misc_feature (1940)..(1940): n is a, c, g, or t
  misc_feature (2275)..(2275): n is a, c, g, or t
  misc_feature (2373)..(2373): n is a, c, g, or t
  misc_feature (2484)..(2484): n is a, c, g, or t
ttaggtacgaggcctggtgttaatcggccgaggtgtcagtcccctctggtgatctcgtcgccccttctctcccaggcaacatgtcggaaggaaacgccgccggcgagcccagcacgccgggagggccccgacctctcctgactggggcccgggggctcatcgggcggcggccggcgcctcccctcacccccggccgccttccctccatccgttccagggacctcaccctcgggggagtcaagaagaaaaccttcaccccaaatatcatcagtcggaagatcaaggaagagcccaaggaagaagtaactgtcaagaaggagaagcgtgaaagggacagagaccgacaacgagaggggcatggacgagggcgaggccgtccagaagtgatccagtctcactccatctttgagcagggcccagccgaaatgatgaagaaaaaagggaactgggataagacagtggatgtgtcagacatgggaccttctcatatcatcaacatcaaaaaagagaagagagagacagacgaagaaactaaacagatcttgcgtatgctggagaaggacgatttcctcgatgaccccggcctgaggaacgacactcgaaatatgcctgtgcagctgccgctggctcactcaggatggctttttaaggaagaaaatgacgaaccagatgttaaaccttggctggctggccccaaggaagaggacatggaggtggacatacctgctgtgaaagtgaaagaggagccacgagatgaggaggaagaggccaagatgaaggctcctcccaaagcagccaggaagactccaggcctcccgaaggatgtatctgtggcagagctgctgagggagctgagcctcaccaaggaagaggaactgctgtttctgcagctgccagacaccctccctggccagccacccacccaggacatcaagcctatcaagacagaggtgcagggcgaggacggacaggtggtgctcatcaagcaggagaaagaccgagaagccaaattggcagagaatgcttgtaccctggctgacctgacagagggtcaggttggcaagctactcatccgcaagtctggaagggtgcaactcctcttgggcaaggtgactctggacgtgaccatgggaactgcctgctccttcctgcaggagctggtgtccgtgggccttggagacagtaggacaggggagatgacagtcctgggacacgtgaagcacaaacttgtatgttcccctgattttgaatccctcttggatcacaaacaccggtaaaatgagcaggtggaggaggacggcgcctgtgcccacggctgctgcctgctccagacattttgttcttgaatctgtgagacccagaaggggcccactgagcccactcactccagcctttggcaaccattgttccaggtcccccagggcttcctcccacagcagctgtgaatggcacagtgaccttcctgcagcgtggagatggcacatccttgctgctggggacttggccctgctatttatttttgtatttatgtcttaatctcttccactgatgcatcctccaagggtagatggggagggtctgtgtgaaggggccggcttctcttggtgcctgctgggttgcaggggcaggaagcgtgtggactgcagcttctgctggtgctccccccgtcctcctggaggcagtataggagagagagcaaggattgagtctgagacttaagcactcggtcccagcttgccagttcctggttctgtgtccttggacaaactacctaacctttctgagcctcctatacctcatccgacacaaatggggatgatacctacctccagggttggcgtgaggattcatgggctattatagatgaaaactgcacaaggccagaaccagcaggcactcaataaacgttcatgtcctttttctctacctgagtctatttncaaacaaaatagagattctaaatctcccagaagcagcgactagagctgctcccgtccccactcttgccccttcctgctttatatcccgtcctcaccctgggcctgatgccctaaatttatggtgtcagatgttctatgcctttttctcctggctcctgttagccaggtgcctcctgtgtgagttactgtaatagctgcaggtaatagaaaggaagaagtcagagacccctcccagcaccctacaaaagccttgggggacatgttgggcccaggacatgttccctgcactctttcctttgcagttagtactcatgtatgagccgaagtcatatatngctaacaaaaaaactaaatccttcataagagaagttagggatgtattgaataatggcctctttgacacttggccgatgatgcccacttcaaaaacttngggtttcagaggcctgcccgtctcctgtcctagcactgccagagccacctactcagtgttactttttgggtctgtgatcctgttccctttaccaggtcattgtactgtgtngtccctggaggaacagcttctcctcttgtcttgacagtagggctgggggtcttcgcaccctggttcagctggagggagacgtgttgcagggttaacgaaaaggtctccctggcggcagcgtgtgtggcgggtcagaccgctgatgggcacaaccttccctttggtggggtcgggggatgctggctctgggaagtttgaacccataggggtccgggaaaacgctaccatcaccaccaatcctgaatcctagggccctgatatgggacacgcatacgagaactttcttaaagcacacgggaacatgagagggggccaaaacacaagcgaaaaggggggagtagaa

SEQ ID NO: 683623 - DNA, 254 bp, Homo sapiens
aaattttcccccccacccttgtgatttgtttttttatgcaaattagttaaaattccctgccaggttttttttgccccccaaaatgatcccgtttggaataaccttttgtaaaaaaaaaatttttttttttttttttatagctggctggaaaaaatttatttttttcccccactttttgcatgtttaaaatattttagcttttttttttttaaaaaagtaaggtttttggcccttttttgggaacccccggggga

SEQ ID NO: 683624 - DNA, 2773 bp, Homo sapiens
  misc_feature (1886)..(1886): n is a, c, g, or t
  misc_feature (2221)..(2221): n is a, c, g, or t
  misc_feature (2319)..(2319): n is a, c, g, or t
  misc_feature (2430)..(2430): n is a, c, g, or t
ttaggtacgaggcctggtgttaatcggccgaggtgtcagtcccctctggtgatctcgtcgccccttctctcccaggcaacatgtcggaaggaaacgccgccggcgagcccagcacgccgggagggccccgacctctcctgactggggcccgggggctcatcgggcggcggccggcgcctcccctcacccccggccgccttccctccatccgttccagggacctcaccctcgggggagtcaagaagaaaaccttcaccccaaatatcatcagtcggaagatcaaggaagagcccaaggaagaagtaactgtcaagaaggagaagcgtgaaagggacagagaccgacaacgagaggggcatggacgagggcgaggccgtccagaagtgatccagtctcactccatctttgagcagggcccagccgaaatgatgaagaaaaaagggaactgggataagacagtggatgtgtcagacatgggaccttctcatatcatcaacatcaaaaaagagaagagagagacagacgaagaaactaaacagatcttgcgtatgctggagaaggacgatttcctcgatgaccccggcctgaggaacgacactcgaaatatgcctgtgcagctgccgctggctcactcaggatggctttttaaggaagaaaatgacgaaccagatgttaaaccttggctggctggccccaaggaagaggacatggaggtggacatacctgctgtgaaagtgaaagaggagccacgagatgaggaggaagaggccaagatgaaggctcctcccaaagcagccaggaagactccaggcctcccgaaggatgtatctgtggcagagctgctgagggagctgagcctcaccaaggaagaggaactgctgtttctgcagctgccagacaccctccctggccagccacccacccaggacatcaagcctatcaagacagaggtgcagggcgaggacggacaggtggtgctcatcaagcaggagaaagaccgagaagccaaattggcagagaatgcttgtaccctggctgacctgacagagggtcaggttggcaagctactcatccgcaagtctggaagggtgcaactcctcttgggcaaggtgactctggacgtgaccatgggaactgcctgctccttcctgcaggagctggtgtccgtgggccttggagacagtaggacaggggagatgacagtcctgggacacgtgaagcacaaacttgtatgttcccctgattttgaatccctcttggatcacaaacaccggtagacattttgttcttgaatctgtgagacccagaaggggcccactgagcccactcactccagcctttggcaaccattgttccaggtcccccagggcttcctcccacagcagctgtgaatggcacagtgaccttcctgcagcgtggagatggcacatccttgctgctggggacttggccctgctatttatttttgtatttatgtcttaatctcttccactgatgcatcctccaagggtagatggggagggtctgtgtgaaggggccggcttctcttggtgcctgctgggttgcaggggcaggaagcgtgtggactgcagcttctgctggtgctccccccgtcctcctggaggcagtataggagagagagcaaggattgagtctgagacttaagcactcggtcccagcttgccagttcctggttctgtgtccttggacaaactacctaacctttctgagcctcctatacctcatccgacacaaatggggatgatacctacctccagggttggcgtgaggattcatgggctattatagatgaaaactgcacaaggccagaaccagcaggcactcaataaacgttcatgtcctttttctctacctgagtctatttncaaacaaaatagagattctaaatctcccagaagcagcgactagagctgctcccgtccccactcttgccccttcctgctttatatcccgtcctcaccctgggcctgatgccctaaatttatggtgtcagatgttctatgcctttttctcctggctcctgttagccaggtgcctcctgtgtgagttactgtaatagctgcaggtaatagaaaggaagaagtcagagacccctcccagcaccctacaaaagccttgggggacatgttgggcccaggacatgttccctgcactctttcctttgcagttagtactcatgtatgagccgaagtcatatatngctaacaaaaaaactaaatccttcataagagaagttagggatgtattgaataatggcctctttgacacttggccgatgatgcccacttcaaaaacttngggtttcagaggcctgcccgtctcctgtcctagcactgccagagccacctactcagtgttactttttgggtctgtgatcctgttccctttaccaggtcattgtactgtgtngtccctggaggaacagcttctcctcttgtcttgacagtagggctgggggtcttcgcaccctggttcagctggagggagacgtgttgcagggttaacgaaaaggtctccctggcggcagcgtgtgtggcgggtcagaccgctgatgggcacaaccttccctttggtggggtcgggggatgctggctctgggaagtttgaacccataggggtccgggaaaacgctaccatcaccaccaatcctgaatcctagggccctgatatgggacacgcatacgagaactttcttaaagcacacgggaacatgagagggggccaaaacacaagcgaaaaggggggagtagaa

SEQ ID NO: 683625 - DNA, 2063 bp, Homo sapiens
  misc_feature (1884)..(1884): n is a, c, g, or t
ttaggtacgaggcctggtgttaatcggccgaggtgtcagtcccctctggtgatctcgtcgccccttctctcccaggcaacatgtcggaaggaaacgccgccggcgagcccagcacgccgggagggccccgacctctcctgactggggcccgggggctcatcgggcggcggccggcgcctcccctcacccccggccgccttccctccatccgttccagggacctcaccctcgggggagtcaagaagaaaaccttcaccccaaatatcatcagtcggaagatcaaggaagagcccaaggaagaagtaactgtcaagaaggagaagcgtgaaagggacagagaccgacaacgagaggggcatggacgagggcgaggccgtccagaagtgatccagtctcactccatctttgagcagggcccagccgaaatgatgaagaaaaaagggaactgggataagacagtggatgtgtcagacatgggaccttctcatatcatcaacatcaaaaaagagaagagagagacagacgaagaaactaaacagatcttgcgtatgctggagaaggacgatttcctcgatgaccccggcctgaggaacgacactcgaaatatgcctgtgcagctgccgctggctcactcaggatggctttttaaggaagaaaatgacgaaccagatgttaaaccttggctggctggccccaaggaagaggacatggaggtggacatacctgctgtgaaagtgaaagaggagccacgagatgaggaggaagaggccaagatgaaggctcctcccaaagcagccaggaagactccaggcctcccgaaggatgtatctgtggcagagctgctgagggagctgagcctcaccaaggaagaggaactgctgtttctgcagctgccagacaccctccctggccagccacccacccaggacatcaagcctatcaagacagaggtgcagggcgaggacggacaggtggtgctcatcaagcaggagaaagaccgagaagccaaattggcagagaatgcttgtaccctggctgacctgacagagggtcaggttggcaagctactcatccgcaagtctggaagggtgcaactcctcttgggcaaggtgactctggacgtgaccatgggaactgcctgctccttcctgcaggagctggtgtccgtgggccttggagacagtaggacaggggagatgacagtcctgggacacgtgaagcacaaacttgtatgttcccctgattttgaatccctcttggatcacaaacaccggtaaaatgagcaggtggaggaggacggcgcctgtgcccacggctgctgcctgctccagacattttgttcttgaatctgtgagacccagaaggggcccactgagcccactcactccagcctttggcaaccattgttccaggtcccccagggcttcctcccacagcagctgtgaatggcacagtgaccttcctgcagcgtggagatggcacatccttgctgctggggacttggccctgctatttaactttggctataagcgctaaactcttcacatggcgcatctcctccaggcttatcgtgctgggcctcttataaaggcctgctcttctcttcgggcacttctcacttttcaagatccatcctcgcattctctctcttaccatctcatcgtgctatcccacatcttcatctgagatcttccgctcactacctcatcttcactcattatctctctaccacctccatcccctcttcttaccggctactcctcgtctgcatctacactctcaatcctcctcccctctcatctctcgccacacctcccctctactcttctctctcaactatactatacgcgctcactacatctcatccggctcttctctaccttnctgcctcatgtcattactccgctctctacactctcttgtctcacgcactcactaactcctcctactagccctctctctcacctcactaccatctccgttactatctctacacatctctctctgccgacccttcgcgctactctcacaccgctcgtagatcctctatcttctctttcccg

SEQ ID NO: 683626 - DNA, 1877 bp, Homo sapiens
ttaggtacgaggcctggtgttaatcggccgaggtgtcagtcccctctggtgatctcgtcgccccttctctcccaggcaacatgtcggaaggaaacgccgccggcgagcccagcacgccgggagggccccgacctctcctgactggggcccgggggctcatcgggcggcggccggcgcctcccctcacccccggccgccttccctccatccgttccagggacctcaccctcgggggagtcaagaagaaaaccttcaccccaaatatcatcagtcggaagatcaaggaagagcccaaggaagaagtaactgtcaagaaggagaagcgtgaaagggacagagaccgacaacgagaggggcatggacgagggcgaggccgtccagaagtgatccagtctcactccatctttgagcagggcccagccgaaatgatgaagaaaaaagggaactgggataagacagtggatgtgtcagacatgggaccttctcatatcatcaacatcaaaaaagagaagagagagacagacgaagaaactaaacagatcttgcgtatgctggagaaggacgatttcctcgatgaccccggcctgaggaacgacactcgaaatatgcctgtgcagctgccgctggctcactcaggatggctttttaaggaagaaaatgacgaaccagatgttaaaccttggctggctggccccaaggaagaggacatggaggtggacatacctgctgtgaaagtgaaagaggagccacgagatgaggaggaagaggccaagatgaaggctcctcccaaagcagccaggaagactccaggcctcccgaaggatgtatctgtggcagagctgctgagggagctgagcctcaccaaggaagaggaactgctgtttctgcagctgccagacaccctccctggccagccacccacccaggacatcaagcctatcaagacagaggtgcagggcgaggacggacaggtggtgctcatcaagcaggagaaagaccgagaagccaaattggcagagaatgcttgtaccctggctgacctgacagagggtcaggttggcaagctactcatccgcaagtctggaagggtgcaactcctcttgggcaaggtgactctggacgtgaccatgggaactgcctgctccttcctgcaggagctggtgtccgtgggccttggagacagtaggacaggggagatgacagtcctgggacacgtgaagcacaaacttgtatgttcccctgattttgaatccctcttggatcacaaacaccggtttgagcccaggagttcaagaccagcctgggcaacatggtgaaaccttgtctctgaaaaataaataatacacacccacatgcacacacatccagttcttccatgttaatgagtatgttgtgtttcacatacttctgaattagccgaaggaatttaaaggtagcatcttttaatcctcagactgccctgcgtggtccgattgaattgggcagtcagcactaggctcttcaaagggaaacaggcttctttcttaggacggtgcacagtgaaagagtggcacacacgctgttcatccagtgctccaacccccagtcctggtgtcagatacttctacatttggggcatttccccttgagatggctgtggctagcgacacatgatgtgaacacctctcttggattgtggttcggccgcacaaggccccatcagagttctacaggtggagtgtggggcccagaaggggctcaggtcttaggggtgtcatcgtttctttttcaccacctgtatcgctaatcctcttaactggcaggaatggggcaagtcaatttcaacacgcgagtcttaggctaaatctgtttataggagttgcccccagaaagggagt

SEQ ID NO: 683627 - DNA, 156 bp, Homo sapiens
ctgaggggctcaaatacgaattcaagatccgtggccgttcacatggtttcaaggcacaatgagactcacttgcccttggaaacttttgcttttgatgtcaatatttcttctttctgctttcactttcgttacccttagggacaagacaggagaggt

SEQ ID NO: 683628 - DNA, 1946 bp, Homo sapiens
  misc_feature (1703)..(1703): n is a, c, g, or t
ttaggtacgaggcctggtgttaatcggccgaggtgtcagtcccctctggtgatctcgtcgccccttctctcccaggcaacatgtcggaaggaaacgccgccggcgagcccagcacgccgggagggccccgacctctcctgactggggcccgggggctcatcgggcggcggccggcgcctcccctcacccccggccgccttccctccatccgttccagggacctcaccctcgggggagtcaagaagaaaaccttcaccccaaatatcatcagtcggaagatcaaggaagagcccaaggaagaagtaactgtcaagaaggagaagcgtgaaagggacagagaccgacaacgagaggggcatggacgagggcgaggccgtccagaagtgatccagtctcactccatctttgagcagggcccagccgaaatgatgaagaaaaaagggaactgggataagacagtggatgtgtcagacatgggaccttctcatatcatcaacatcaaaaaagagaagagagagacagacgaagaaactaaacagatcttgcgtatgctggagaaggacgatttcctcgatgaccccggcctgaggaacgacactcgaaatatgcctgtgcagctgccgctggctcactcaggatggctttttaaggaagaaaatgacgaaccagatgttaaaccttggctggctggccccaaggaagaggacatggaggtggacatacctgctgtgaaagtgaaagaggagccacgagatgaggaggaagaggccaagatgaaggctcctcccaaagcagccaggaagactccaggcctcccgaaggatgtatctgtggcagagctgctgagggagctgagcctcaccaaggaagaggaactgctgtttctgcagctgccagacaccctccctggccagccacccacccaggacatcaagcctatcaagacagaggtgcagggcgaggacggacaggtggtgctcatcaagcaggagaaagaccgagaagccaaattggcagagaatgcttgtaccctggctgacctgacagagggtcaggttggcaagctactcatccgcaagtctggaagggtgcaactcctcttgggcaaggtgactctggacgtgaccatgggaactgcctgctccttcctgcaggagctggtgtccgtgggccttggagacagtaggacaggggagatgacagtcctgggacacgtgaagcacaaacttgtatgttcccctgattttgaatccctcttggatcacaaacaccggtaaaatgagcaggtggaggaggacggcgcctgtgcccacggctgctgcctgctccagacattttgttcttgaatctgtgagacccagaaggggcccactgagcccactcactccagcctttggcaaccattgttccgagctccacaagtttttctccaaacaatttggaaggccaaggggcctttctgcaacgggaaatgcccatccttgtttcggggacttgccctcgtattaattttggtttagggcaaaactttccccgaagaactcccagggacatatgtggtcttttgttaaagctttccttctttcggcctccttctcttctgctataaacgctttctcggacttttcttggcctccccccgcttctgggtgcctcctgacagtatcctggctgcctctctccaccctcctccccttgctgtnctcctctgcttccgctccttttgaggtttactatcactcaccatggggtgtcccctctccgccgtcgggttatcttcccttcatccatctctgctcttccactcgctcgctttcctccgtctgcctctttcctcatcacctgcttctatctacatgctcccgtctgctctcttctctgccttatttcccctcatctctctctgctccctctgcgtacctgtcttcgcggctctctctctcccg

SEQ ID NO: 683629 - DNA, 1143 bp, Homo sapiens
agcgggtgaattctccaacttgtacttctttttctttatctacttgggaccccttgaaattccatatgaattttgaggatcaacttttccatttctgcaacaaaggctgttggaaatttcatagtaatgcattgaatctgctgatcacttttggtagtattgacatcttgaagatattaagtcctcttatccatgaacacaaggtgtttttccacatacttagatcttttatggtttttcttcacactctttaggagaatactaatttagtcaaaaccacccagttcctaccaaagttaccaaggatcacattggcaagaagtcttcaatgttgaatgattccattaaaatgcatttcactgcaattcacaaagcattactttatttttatttaaattttaataatcactgatgaaggaaaaacaaaattatgacaatcaatatttacttgggaaaccattttcataggtcactgatgaaggaatgtggtacacagcttcagagtggcaagggacatagggacaagcacacaagattgaaagcgtaaaagcatattctcataaggaccaaacaatccttattgttggaggaccaaatggaatcatcgttaactgtatgtagaatcaaaagttcacgatctgtaagtcctttttaagatatgcatgattcagcttatttacagttcgagcaaaggcatatttagaagcacgggtatatgcttcccaaacttgtacacttttcttgaaggtccagatcaccaatggattgtcctggaacgaggacatgaggcacacctgatttaagtgggacgcccagaaaagtaagtaggttcccgggatcctctccatatctccttgggcatgctcactggatgggacggcctcaggaccagccgactgtttccaaaacctcaacagggggcttccaaaacgcacctcagtcacaggcaagggcgctaacaaccaaccactacgaaaggggactcggaagccgcccagggtgtcccctgaaacgatacaagggcgcccaccagcagaggcacaacagcacctcaaagactacagcaccgacgaaccgacgtcagacgtagtcaccgacacaggcaacgcgcaacacagtggaacaaccagcaccccccaccag

SEQ ID NO: 683630 - DNA, 2196 bp, Homo sapiens
ttaggtacgaggcctggtgttaatcggccgaggtgtcagtcccctctggtgatctcgtcgccccttctctcccaggcaacatgtcggaaggaaacgccgccggcgagcccagcacgccgggagggccccgacctctcctgactggggcccgggggctcatcgggcggcggccggcgcctcccctcacccccggccgccttccctccatccgttccagggacctcaccctcgggggagtcaagaagaaaaccttcaccccaaatatcatcagtcggaagatcaaggaagagcccaaggaagaagtaactgtcaagaaggagaagcgtgaaagggacagagaccgacaacgagaggggcatggacgagggcgaggccgtccagaagtgatccagtctcactccatctttgagcagggcccagccgaaatgatgaagaaaaaagggaactgggataagacagtggatgtgtcagacatgggaccttctcatatcatcaacatcaaaaaagagaagagagagacagacgaagaaactaaacagatcttgcgtatgctggagaaggacgatttcctcgatgaccccggcctgaggaacgacactcgaaatatgcctgtgcagctgccgctggctcactcaggatggctttttaaggaagaaaatgacgaaccagatgttaaaccttggctggctggccccaaggaagaggacatggaggtggacatacctgctgtgaaagtgaaagaggagccacgagatgaggaggaagaggccaagatgaaggctcctcccaaagcagccaggaagactccaggcctcccgaaggatgtatctgtggcagagctgctgagggagctgagcctcaccaaggaagaggaactgctgtttctgcagctgccagacaccctccctggccagccacccacccaggacatcaagcctatcaagacagaggtgcagggcgaggacggacaggtggtgctcatcaagcaggagaaagaccgagaagccaaattggcagagaatgcttgtaccctggctgacctgacagagggtcaggttggcaagctactcatccgcaagtctggaagggtgcaactcctcttgggcaaggtgactctggacgtgaccatgggaactgcctgctccttcctgcaggagctggtgtccgtgggccttggagacagtaggacaggggagatgacagtcctgggacacgtgaagcacaaacttgtatgttcccctgattttgaatccctcttggatcacaaacaccggtttgagcccaggagttcaagaccagcctgggcaacatggtgaaaccttgtctctgaaaaataaataatacacacccacatgcacacacatccagttcttccatgttaatgagtatgttgtgtttcacatacttctgaattagccgaaggaatttaaaggtagcatcttttaatcctcagactgccctgcgtggtccgattgaattgggcagtcagcactaggctcttcaaagggaaacaggcttctttcttaggacggtgcacagtgaaagagtggcacacacgctgttcatccagtgctccaacccccagtcctggtgtcagatacttctacatttggggcatttccccttgagatggctgtggctagcgacacatgatgtgaacacctctcttggattgtggttcggccgcacaaggccccatcagagttctacaggtggagtgtggggcccagaaggggctcaggtcttaggggtgtcatctgacaaaaccagagatggtgatgggacaccagttctaggagccctctgcatggccaatttctgcctcagctcttctaaagcatttcttctgttcccttccatgggtaaccagtgatctgtcttccaaaaactgagtcagaagctgcactttgcttaacttggttcatcttaattctaacgatactccgtccgaacacccacatgccgcctcacttgtctaagaaagccttacatgggcccagcaccatggatccaaaccgtaatcgccaaccggccgaattccgccgtgaacaacaacacagccggctcttcctcaacgaccgtaccaccggtctgcatacccgccacgcctagaatccgcccggcttaacgctgccagcccaccgcccgcacatgttcctacggccctaccatagtcactcaccgaggcacaccacc

SEQ ID NO: 683631 - DNA, 303 bp, Homo sapiens
tgagtgaaaggaaaaggtcaggggaaacaggtggctgccgctttgttcaacttctagtcatactaatctgtgtacagcctatcccttgaggcatcaagctcttccttgaaattctctgcttcagtttcattcattttcagtaaaagaatattttctgaaactcttaagatatattgaaggtcagaggcagagctaaacaggtgatgccactgggtcttttgcaataataaatacaaacttactattggcattgggattttctcatatattttttctttctttttaatatcattagtataaaga

SEQ ID NO: 683632 - DNA, 211 bp, Homo sapiens
tgtgacagaaattctactgaaactagctcagaaaaaaagacaaaatgtattgacttgtggaatcacaggaaatgttgaatagttaaaccacagtatacacaagaaacaagctagctctcaacaacaactgaaccagggaatgttcacatggcagagttacctcagttcctctccctaattctcttctactgtttgtttcacatggccactc

SEQ ID NO: 683633 - DNA, 1550 bp, Homo sapiens
ccccatgacggcctggcatgtacacgttgaccatgaagtatggtggcgaactcgtgccacacattccccgacccgtggtcaatggctgtgagccctgcctgtggacaccatgcagtgatcaaatgtcttttgtgaccatgtgaatatgaatgtgtgaaatgatgtgttcctgtgtgaatgctaccacctgactttacatgtttgactctctgtgcctgctgacccagtgtttgtgtggtgttgaccactatacaatggtcccacatattgccaaaccccatacagtggggcctaccaacctgatgtgctatattgtcacatgaacaattgctgtgatgtgtgaccctaccatgtgatgtgacatacaacatccctatattgaatgcaaatgtgtactaccattgtaagttgtgatgtgttgaccataattgattgactgttagcctaatacccaacaacatgtccctatacaatggttgtgctttgtacaacttgaaatgtgcttggccagacccaatactaaggtggtagcaaatgccctaaatgtggaccttggactttgaaatgatgtgcctatatacgcaaacaaaagcaccaaattgtacattcaacctgttgggtataacccaagatgtgctgcatgtgacacttatggttggggctttgtgaccataacctttgattcgcaggtgaccccattacaagaaagtctgacacgaatacaacatatgcatacaatgaacagaacagatggacttgagacaagacctggcaagcatgcctagacgtaacaatatccctaataacagctgccctggtggagacttaccgaattgataaacataatccaaccaattactttgaaggtgacggcctcaaaaaatccgcctatgagacaatacccacattatcagcggggattacccattgttaagcactgtcgattgcttcggctggacacccaccccaggccaaacgtggagcagacagaattatgcacatggtcacaccgagtgggcttgggaacaactcagagggcagagtaccgagaagccccactgattatattctatagcaagataccacgttacaacaagggatgagcaaccaagcaaaacaccacatgggaccgtgggccgatggacactaccgaacgcagaccacagagatgaaccgtcgaaacaacgagcaccacaccgaaatggcaattggcgcagggcagcaccacaggaggacagcacaattggcgggcacaccaacacaggaaagacacggccaacagcgacccagaccgacagtgaagcgcacaaacacccacacatccaaggcgacagagagcacccctaacacaagtgaaacaaaaagcgataaccacgagcatgaatgaagacggaacaaagctgccgagaagacgcccacagaggatgcaggaacaatgcaccacacagcgatgaccacagaagacagaacgaacacagtgacaccgtgacgaacgacacccacagccaggtgtcgacacacactcgctgacacagtagactaacaccaca

SEQ ID NO: 683634 - DNA, 807 bp, Homo sapiens
gctactggggccgtggtgctgatcccgtggtgatgctacgcggctccctgggctccaggctgtgcggggtgtaggtggcagtcacagacggtcggggcccgaggtgtccggaagtggcgcacatggtgtggcaggggagagcatggctcacgctggatggtctgggtgggacctggagatgacaggattggacattgagaaggacagattattgagatggcctgtctgataactgactctgatctcaacattttggctgaaggtcctaacctgattataaaacaaccagatgacgttgctggacagcagtgtcagattggtgtaaaggagcatcacggggaagtctggacttacccaaaggcagctgcaggagagtacaacttacattgcacgcaggcagagtatgaattcctgtcctttggtacgacagcagactcctccaggggctctgtacaccttgcggggcaacaatctcagctccactgtacatcgataagaaagctttcttggagcaaatagcattgcccccaggttcatggaaaccatctttccatttgtcacgaatacactccgcacgctgagccactgttaacatgaacctgtgcagacgctggttatcccaggagagacatattgacattttgcagcccaaaggaaggggtgcttctcatatgggacacttggaatgacattaagtggaaaggctcaagagagcttcgagtataccgagataacatcttagtgaacaaaattggattgaacagagagaggaaacgcttcatgacacaatggggaaaaggggaaaga

SEQ ID NO: 683635 - DNA, 141 bp, Homo sapiens
aaaaagccatttttatggtttttgaaaatttgcttcattctgccaggattcaaactagactattctgaggccctaaaggttctaaagcagttccagggcaacattttaaattaattaagtagtaaaacaaggagaaaccag

SEQ ID NO: 683636 - DNA, 691 bp, Homo sapiens
  misc_feature (616)..(616): n is a, c, g, or t
tggaaggaaaattggtattatttcaattattttatatgtacaaaaaactcaacagggtacattaaacccagttaaggggcaagttcttaagcccttgtgccttttcgagcctgtggggatacgacccaaaaacttaaggacccaggacatggccaccccagtgaggggggatctcatcgtatctggtcatggtaatgggcccgagatagctacccaccagctaagccaaagcgcctatggtctcccgagtcaccggtgtgaaggcgacagtggtgcaggtctctccgggggactagacgtcccagtctggccttccccttgaataatgcagtaggggacccccatttaacgacacagggcaggcaagaagacaaccagctcgaggggacccacgtcgttgtgcaatcaccaccagcgtgagctatctgtgtctccaccagggtggtgacggtgtaaactccggctcgaaggacagggggtctctcacgtgggagacgtccccttggccagaagcctatcaactcggcccggggccaacaagtctcggatatctctctggctaaggcctcgggtctagtcactggggggccagctaaagcagtgagtagctgttggncgggccaggccctggggtgaccgcggtaatcgagaggaggcatttacaggcggtaaaagagaaggcccaagcaga

SEQ ID NO: 683637 - DNA, 188 bp, Homo sapiens
gaggctcccccttcatctactaaacaaaacagtagtaatatatagcttcatactaagtgatgcatgatataccagtatggtacggcaatggtgcagtcaaggatgcatgatataccagtatggtacggcactggtgcagtcaagatatggactacaaaagaagttagagaaggtagagagccgggcaa

SEQ ID NO: 683638 - DNA, 109 bp, Homo sapiens
  misc_feature (13)..(13): n is a, c, g, or t
catccccaacctntgccccttgggaccctctcccagggccaccacctgttttgccccactccccacattcccacctttaagaataaataagttttccttttgttttcca

SEQ ID NO: 683639 - DNA, 462 bp, Homo sapiens
ttgcgtctcaccttgacttttgttttttgttgtgctgtggtcttgttttgttttgtttgagacagagtccgctctgtcacccagacggagtgtaatggtgtgatcttggttcactgcaacctgtgcctcctggcttcaagcaattctctcctgccttggcctcccaagtagctgggattacaggtgtccaccatcatgtccggctaatttttgtatttttagtagagacggtgtttcaccatgttggccaggatggtctcaatctcctgacctcgtgatccactgtcctcggcctcccaaagtgctgggattatagtcgtgagccaccgcactcggccaatacctcaattttaataagagctgtgtcctcgctttggttctggaggccccacttacagctagcaaaaaatggccttggactacagccttccaaatgtatcgtatttatcttattattatttt

SEQ ID NO: 683640 - DNA, 294 bp, Homo sapiens
cagaggcacatggaggtagaagccacgtcagagctcagatggaaaaagacagaaaggcatgaagaggcaacgttgccgaaaatcacagcagaacagagaacggtcacgaaaattaaaaggtttaagaagacctttcggagggggtacacatatctgtatatagagttcgaaatttgagcacaccagccaagacgttccagacttgaaggccaagtgctggggcaaactgtacctgacagggggttggtggtacttgcacaagggatgtcacacgtggttagtacgtggacaggg

SEQ ID NO: 683641 - DNA, 1566 bp, Homo sapiens
  misc_feature (485)..(485): n is a, c, g, or t
  misc_feature (1443)..(1443): n is a, c, g, or t
  misc_feature (1566)..(1566): n is a, c, g, or t
gggggtggcgtcaggggatgcggtgcgagagtttgccctgaatttgctggtcatgcctgagaacaccgcacaggtgcgctgtgcgtaccaaccgctacagaattgcagtcatgggactacgggggtcgtgacgtcttcgaaaatgctgtcgtgtggtgcagctggacgagtgctcgaattacgtatcgttcgtgtggagacgacgactcattggtgtgaggtcagcctgtcaggtggccaagtggtgaccataaacatcctcggtatgatagcctcaactgggtcatgtgcagcgcagtttgagaatacctcccggtgaaggccaagtatacgctaacgtgcttagcgtgtgcgttggcttaacgcatgcgaagagtacaagtcttttagagaccttggggtgcttcccattggatagcatagtacacgtgcgcgataggtaagcccctaacttggtacagaaagcccactcctaggtcttgaanacgcgcgaacagttttgcgaaaatcactcctgaagtggtcagcgccgatgcaccttgaacgcgtacgtgggaccccctcattgggtggctttcttcaccacaacagaccgcggcagcggtattaaaagaacctttgttccttagtgaggcacctcgaccttcgacaatccggggaaggggaaagccccgggtggaaaaaccgcagggccgtgaggctgtgtaaacgttgcctgatagatagttgcaccctgtgcgcgctttggggtcctggtgtcccttggcgcctgttctgcgggtccgggcaaaaccgccacggggctgtagatgatcttccccattccccacacgttgcgggcacgtgctcccctatttcaacccagttggcgccattgaacggtttgccattgagcgccccctgttaaggggttgttgggcattggtggcatgtgccatccggtggcgacccctttgagggcaccccataggggtgcacatgtggcggcctttggcgcaagggtgacgccgaaagagatggtccctgcgtgacaggagagcacacctcgaggaaaaagcaagctgttaccccgttggtcgaattcccccaattaagattcccatgagaggcgtatgaagcacggaccaagtgccggtgccaatgatgcgacaaaagacccatttgcgagagtgaatccacccgtgagccattgttaacgactgccctttctccacattttgtgagcctgtgtctgctaacggtcattacgagcacatgggttgtgccgactacccaaaagcgttgggagttcacattttccactaaaaaacgcagcatgtttcgggcgagcaattggcacccgggggaggtcgcccctggtagggagaggacccccacaccaattggtgtgtccccccaatttggcccttgtgatgggcagacggcaatgaacgcgttttggtnccaacacccactgtcgttgcttatcccgccactatgtcttgggttctccccgccacatatgtcgtacgcaacatagcgccccgtctaaccacatgagcgtgttggtctaacaccaccaaccan

SEQ ID NO: 683642 - DNA, 211 bp, Homo sapiens
tcctgaggagaaaactccgtgagcccagaggaatctaaattactctattataaagatatggccaggtacggtggctcatgcctgtaatcctagcactttgggaggccgaggtgggtggattgtctgagttcaggagatcaagaccagcctaggcaacatggtgaaaccccgtttctactaaaatacaaaaaattagccaggcatggcagcg

SEQ ID NO: 683643 - DNA, 582 bp, Homo sapiens
  misc_feature (213)..(213): n is a, c, g, or t
gcctggtgggccgcggtgcggggttcccaaaaatgcaaaggcgcccattgcccctttcaaaaccaggggcagcatccagtttggggattggcgcccccctggttctaaggtgggcctcaccaccagcccccccttggggggcttgggggaaacctggccaaggtacaaaaagttgggggcatgttgagcacccccccacccattttttagggntgggttcgcctggcccccaagttttcccttttgtatccccagggggcctttgttccttggtacgtggggggggggatggaggaaggcgatttttcaagggcccgtgaaaatatggctgccccttaaaaggattttaagggggttgggggggtttttttttaaggaggggggggggaaaaagggggggaaaattaattatcccttccttttggccccccagcaagtcagggtcccagaattttgggttcgggtttactgccagaggttaaagcttttggggtagattgttttccctggggggtcatgttttttcccgggggcccgggaatttttttccctcatttttcaagggaaggtcttttcccccca

SEQ ID NO: 683644 - DNA, 803 bp, Homo sapiens
  misc_feature (398)..(398): n is a, c, g, or t
gagggaggcgccgcccccaaccaaactgtctgggggacccccggggggggaacaacgcgggccaaacggccagactccctggggacacacccagttgtccagacctctcgcggagaggagaaatttttacgcccccaactgggggcccccccgggggccccgggaaccgcgcctgggtggggcgcgggaacagttttttcagcccccacaacctggggaggcggcccccctcccacacacgcggctgtttttatcccccccagaagagagcgcgctttttctcccacagagaaaaagttctggggcgcaagggagacttccggaagaccccctgggatacacatcctccgcgagccagagtattactcccctggaatttttttcccccttccccaganccccggtggcctgtgacattttgtaacaaaacatctccccgtctcaagtataagagggccccgatatttctacatggcacaatgggccgtcggtacattggcgttcttctcacacccggagatgggccagctttgctagccagactggggtccacatcccccattctatcctggctgtaaaaccagtagctgtgctttgaaatagcaccccccatggattaccccctctgattaccccgaatttgggcgagcacccacccagtgctctccccagagatggtttggccctctatgggggaaaccagggggtgttaaaagagccaatttaatttttggggggttttaacccccccaaacaaccttcagtagagccctgatttaaagggaaccccccgagattttcca

SEQ ID NO: 683645 - DNA, 381 bp, Homo sapiens
ataagaaaatttgatggcagggacaaaggggtagcatttattgttatttaataaagaccttggggcaaatgggccacttatgaggggatcagttgttgcatgtaatttttgcctttgtttaagcctgggacttgtaagaaaaagaaaatttaatttttttttttagggcgagctatagaaaagctattgagaggatttagttaatcagggcagtagttggaaaccctgctgggggatgtgaagggcttttgggcttttgaaagactttatcatttagtttttgtctatttttcctttgatgttcaagtcctagtttataggattggcagtttaaaagctttactcccccttttaaaataaaagattaaaatggggtttgga

SEQ ID NO: 683646 - DNA, 168 bp, Homo sapiens
ctaactacaaagctgcattaaataattacggttggggcgacctcggagcagaacccaactccgagcagtacatgctaagacttcaccagtcaaagcgaattactatactcaatagatccaataacttgaccaacggaacaagttacccttgggtactacgctttggca

SEQ ID NO: 683647 - DNA, 120 bp, Homo sapiens
tatggaatgaatcgaatggaatgggatcgaatggattggaacgaaatctgaatggaacggaatatgaatatgactcgaatgtaatggattgctatgtaattgattcgaatggaatggaat

SEQ ID NO: 683648 - DNA, 663 bp, Homo sapiens
ggggtcttatcactaggcgtctcgtctctagaaagcacaacactaatgtacgtggccttagatctcagcttcaaatgccccgtatcaatatcaatgatagacgctacatatcccagactgtatgctgttgtcaactctatgtagtggttacctgcttatgtatcgtacttcttggtacagccacttgtgctatctcactaacaccttgaagtgagttaggactaccagatcttactccacgtatacttgaggtttgtgaaggcatcggttaagggcacaaagacagccatggggacatttatgtaaatacgtctctaattgccacactgcagctgaacagtgtgtagtattttcccagtcagctttgccatactgacgtcaatcatttgagagaaattattcagattttattttgtatctgtggtaacaaaacattaaccaaaagattttctgtccagaagcctccccgaccccccaagctatttgctcacattaacaaattaaagtgcctgaagcataattcattctttacctgtatactaaaaaccctgtgtatcgatttttttataataagcctttttacctctggtgtcacacatatatatacaagtgttgatgtacattttagttcttacttttttatggttctaatatgtatgacaa

SEQ ID NO: 683649 - DNA, 260 bp, Homo sapiens
actcaagaggatcccctcttctccgaaagcaacatctctgtggtgcagtccaccgtctccaggggctatggcggggccagtggtgtccgcacgtggctctacggcctggttggatggaatgcagcctagcctcctagtagcagtgtggtcttgtgctgttggagagtggcgttcaggtctccccgccacgtggacagacgccagttgcgggcgctggcctgcagtctctcgtatggacggcgagcatgttcccaccactc

SEQ ID NO: 683650 - DNA, 144 bp, Homo sapiens
cccgtttctgtcgatcgctgccagtacccggcagcttgctctggctactgtgagaactttggcacatgccagatggctgctgatggctcccgacaatagccgatgcactgcctactttgacgggactcgaggatgtgagagtga

SEQ ID NO: 683651 - DNA, 953 bp, Homo sapiens
aaaagtgaattaaaaaaaaaaaactttaaacatataaatacgaatccatcttcctgccttgggataaggggtcaaggccttttcttggagtgtgggtatgtgatgggagttctgtgtatctttctggcttaaaccacacttgtaatgcagcatttatcacttggagtttgggtgggagtgagaatttagacagtggagaagcagtatgaatatagactctcttcagattggttacagttttggctccaatatttggtggttaccatgcccatacctaatttaaaacataattttaagggtctttttagttttccaaagtattcaattaagttatagaaacaatggtttctatattcctatttcaccatttgcagtgagccaagatacacaccagtgcacttcagcctgggtgacagagcaaggtctccaagaaaaaaaacacagggttgcatgtcggaatgggacatgggcgtgagtcgacccacacaaaacaaaaaaaacggaggcactgagaaaggagaggaaagcgaaagagcaaaaacgaaaaaaagagaacgggaaaaacaggacacagggcaaaaagaggaaaaagacccagccggaggaggcacaacagcaaggggacgacggacacacatggacaacaacacaagacgacatgtgcgagaagcatcatagaaacgaaggagacgaacaggaaaacacacacacagactgacgaagtcacagaacaagacacgaacgcgaccaccacacaaacgaaagtgcacgcgcagcacaaacagactggaggacagactcacaccgaaccaccggatacaaagacacaaccacacccccaagacagcaacagaaacaacacacacaaaaagagccacccacaaagaagaacaacaaacaaaacaaacacaccaaacaaaaaacgatacaacacaacaagcaacaacaccaag

SEQ ID NO: 683652 - DNA, 416 bp, Homo sapiens
aagaattatatataaagaagggtgtttaataatgatagttataataataaataattgaacccatctgaatcccctgcaattggaggtaaattatgttttagttataattagattgtgaatcagccccctgaaaatcctttttgcatatttcaatgtcctaaaaagacccggttgctctatatatgaagtgaaaaaaggatatgggagccttttatagtactagttttgctttaaaatgctatgtcaatacccacaaaccctagaaagaaatatatatccccctgttattgtatttgggggagggaaactgggataatttttattttctttgaatctttctgggtcttcccctttttttcccgtgaatttaatccaatagtaaagttgttgtaaaaataaaagtgggtttagaaaga

SEQ ID NO: 683653 - DNA, 936 bp, Homo sapiens
gaactctttttgacccaatggttgtactctcagatgcatctctgatgctgtgtaacttctatcctatccaatgtaaaggctacccccacctatcactgtaggattcaagtcatgaaatgccgatggtcctagtcagtgaatcttgaagatactgatatgtgacataaggagttgaaaatgtatgtgtaatcgaaaaatgcaatgtatagggctaatatggcagtggcatgaagattggtaaactgttagagtcaagaatatggttcataatgagtgtgtgtcattcattggtcttatattagtttttcttggatatagaggtagtagttggtatttgtctgattctgttttcaattcagtacgagtttggtataataattaagttgtcagtctctgtgctcgacatactgatccatttgtctaccctatgagctggtgttgagcatcttctgtttgtccctgagataccttcaaagggtcagaaagggcatatgtctatcagtgatgactgtgaatcctttgctaatatgcaaaggccgagatgctactactcggaaaatctacctcggtactgacttaaatatatttcctttaccatctctttcacagtgcaaggggctgtttttgtgaaacctaagtgtcatgctcatggaagaggcccatctttatacaatagttctctagatacatcgtctgtctagaaacttgagttcatggatgtcttagtgtttaccgtgtttgcgaggtggtaacaaaaatgaaggcttgcaagggctccaccctgtttcatatggaccctgaaatagcatttacggacagaacgattggttcttacaggttcttaatgtatttccacaataataaatctaaaattggtttcccctttttaaagaaagtccgtactttctcctcccactgatctctgcattcttaatg

SEQ ID NO: 683654 - DNA, 172 bp, Homo sapiens
ggacctgattgatgacagtaagctcaaggacatcgagatgaggcctggaacatgagctgatggtggctgaccggcgccagaaagcgagagaattcggcagctggaacaggaactgcattagtggcaggtgctagtggacaggcatcacatggcatgagctctccggacttcg

SEQ ID NO: 683655 - DNA, 392 bp, Homo sapiens
ccaaactcgctgagagtagctatcgctcccattttgggagggcggcgcactcatgcacgccgtggccctagttcttgtcccattccctttgttttaattgttttcccgtaatgaagtgtgtttccgaaatggtaggccttggggttggggaagacctgggttcggctctgtcttactctgctttgtgctcacaggctgggtaatttacgactaacacaaatgtattggctcatagttcttggggctgggcagttggacagcaggggccgttgcacagcaggggccggtatctgtcaagggccttttgctgtgtcagtccatggcagaagaacaaagagaaggtgagagaagaagaggggctgggcttgtccttttattgggaagctgctcat

SEQ ID NO: 683656 - DNA, 113 bp, Homo sapiens
cactgtacccatatcgaacaagggggttgtgtttctcaaccatcagatgttcctgggaaattgtcaaccctcgtgatgcagtagaaacacctggtgtatttagatttggaacg

SEQ ID NO: 683657 - DNA, 151 bp, Homo sapiens
ggatccggatacccaggtgtcttttcccctcaacaggctacattccatccagtcttcacatttagctgattatcttgcctgtgttgatctggtatatccgaaaaagaatccttcagggattaagcctacctacctatccagctgcgtttca

SEQ ID NO: 683658 - DNA, 86 bp, Homo sapiens
atttaatgtagaatattgcttttttaaaataatgtttttattttgctgtagaaaaataaaaaaaaatttgattataaaaaaaaaaa

SEQ ID NO: 683659 - DNA, 147 bp, Homo sapiens
tacctactaatgtgaaatgacagaactattttacctcacaggctgtacaaaaacagggacaggctggtttggcctctggacccctcaatgcattaataataatccagattgaaagtctgcataggtggggtccagaggccaaaccag

SEQ ID NO: 683660 - DNA, 853 bp, Homo sapiens
gatgacgtgcagccggtctctgtgttccaaggatatgggtctctcggttgatgactggcgtgcgtgtactgatcataatagctcaggaagatgagccgtgcgtagtgctcgtccccactggatacacgttaacgcagtccaattaagcgctattgtaaccgaagaatccgcgcaccaggtgaaatgtcatagctaatccgcaatttgcgtatccatcttgtgggccatggtacctagaagtgagttgacggcatcagatgaggccctaattttggcttagcattttggtggagttctgcactttcgttgccgaaaaaattaggtttttcgcgaaagaaaaagtctcattattggaggactaattctagaaagagctcttgggtctctctattggacccggaattggaacattatggagcctagatgatgggttttctactaacggtgtttgaacttttcaagaggtagctagctggagtgggtgcttgaagaacaataacatttcgaatctaacgattcttgggaatgctatcgaattgaggggtaaaaactttcggttatggcagatataggcttttggagaaagaattttcaacaaatcattaggttggaaaaggaagaacaaaagcttgtataagatgttttaaatgatcgtcttgatatgtcttaagaggaagtgggggactataacttctggtcttgatgtgtggggtaaggaaaatgagtttcttaaggacgcgtgtttgaccttgtttttttgaaccatagtatgttttaggcactttccaaatagggaattacaagggggtgtaaatttggaaatttaatgggtaccctgaaggtttcctgaaaa

SEQ ID NO: 683661 - DNA, 1197 bp, Homo sapiens
gagagaactgacgaggcgaagatgtccttcctggtgactctgaacaacgtggaagtctgcagtgaaaacatctccactctgaagaagacactggagagtgactgcaccaagctcttcagccagggcattggaggggagcaggcccaggccaagtttgacagctgcctttctgacttggccgccgtgtccaacaaattccgagacctcttgcaggaagggctgacggagctcaacagcacagccatcaagccacaggtgcagccttggatcaacagctttttctccgtctcccacaacatcgaggaggaagaattcaatgactatgaggccaacgacccttgggtacaacagttcatccttaacctggagcagcaaatggcagagttcaaggccagcctgtccccggtcatctacgacagcctaaccggcctcatgactagccttgttgccgtcgagttggagaaagtggtgctgaaatccacctttaaccggctgggtggtctgcagtttgacaaggagctgaggtcactcattgcctaccttaccacggtgaccacctggaccatccgagacaagtttgcccggctctcccagatggccaccatcctcaatctggagcgggtgaccgagatcctcgattactggggacccaattccggcccattgacgtggcgcctcacccctgctgaagtgcgccaggtgctggccctgcggatagacttccgcagtgaagatatcaagaggctgcgcctgtagctgcctggatgagcacacctggctcatcacacttgcaggcctgttccctaaggggccccagccaaggagctgagcgaggctgtcgggcttgggggagatctgacagcccagacctttctacggctggcagcagagaaacaaagtctggacccactccatgctctgccctcagacctggccaggtgatgctctgggggcagcatctccccaccgagagaagcgggctcctaatgaggtgggaaagccacggcaggcagcgagcagcccaggccagctttctgcatggatggtcagtctcttgccctcaaacactacagcaaacaagctacccctgccagtcctagacaacttgggtacatctggggacctagcagttaggcttgactttgaggagaggctgtgatgtttatgatccctgaataaagctactccttggagaga

SEQ ID NO: 683662 - DNA, 1113 bp, Homo sapiens
gagagaactgacgaggcgaagatgtccttcctggtgactctgaacaacgtggaagtctgcagtgaaaacatctccactctgaagaagacactggagagtgactgcaccaagctcttcagccagggcattggaggggagcaggcccaggccaagtttgacagctgcctttctgacttggccgccgtgtccaacaaattccgagacctcttgcaggaagggctgacggagctcaacagcacagccatcaagccacaggtgcagccttggatcaacagctttttctccgtctcccacaacatcgaggaggccagcctgtccccggtcatctacgacagcctaaccggcctcatgactagccttgttgccgtcgagttggagaaagtggtgctgaaatccacctttaaccggctgggtggtctgcagtttgacaaggagctgaggtcactcattgcctaccttaccacggtgaccacctggaccatccgagacaagtttgcccggctctcccagatggccaccatcctcaatctggagcgggtgaccgagatcctcgattactggggacccaattccggcccattgacgtggcgcctcacccctgctgaagtgcgccaggtgctggccctgcggatagacttccgcagtgaagatatcaagaggctgcgcctgtagctgcctggatgagcacacctggctcatcacacttgcaggcctgttccctaaggggccccagccaaggagctgagcgaggctgtcgggcttgggggagatctgacagcccagacctttctacggctggcagcagagaaacaaagtctggacccactccatgctctgccctcagacctggccaggtgatgctctgggggcagcatctccccaccgagagaagcgggctcctaatgaggtgggaaagccacggcaggcagcgagcagcccaggccagctttctgcatggatggtcagtctcttgccctcaaacactacagcaaacaagctacccctgccagtcctagacaacttgggtacatctggggacctagcagttaggcttgactttgaggagaggctgtgatgtttatgatccctgaataaagctactccttggagaga

SEQ ID NO: 683663 - DNA, 106 bp, Homo sapiens
tgccgaagtgaccacaggtcttagattccctgtgcagatgaaaagatttgtgcctttaatgatgaaagtgatctgcaaggaaccgacgctctgcaaggaacccacg

SEQ ID NO: 683664 - DNA, 1442 bp, Homo sapiens
gagagaactgacgaggcgaagatgtccttcctggtgactctgaacaacgtggaagtctgcagtgaaaacatctccactctgaagaagacactggagagtgactgcaccaagctcttcagccagggcattggaggggagcaggcccaggccaagtttgacagctgcctttctgacttggccgccgtgtccaacaaattccgagacctcttgcaggaagggctgacggagctcaacagcacagccatcaagccacaggtgcagccttggatcaacagctttttctccgtctcccacaacatcgaggaggaagaattcaatgactatgaggccaacgacccttgggtacaacagttcatccttaacctggagcagcaaatggcagagttcaaggccagcctgtccccggtcatctacgacagcctaaccggcctcatgactagccttgttgccgtcgagttggagaaagtggtgctgaaatccacctttaaccggctgggtggtctgcagtttgacaaggagctgaggtcactcattgcctaccttaccacggtgaccacctggaccatccgagacaagtttgcccggctctcccagatggccaccatcctcaatctggagcgggtgaccgagatcctcgattactggggacccaattccggcccattgacgtggcgcctcacccctgctgaagtgcgccaggtgctggccctgcggatagacttccgcagtgaagatatcaagaggctgcgcctgtagctgcctggatgagcacacctggctcatcacacttgcaggcctgttccctaaggggccccagccaaggagctgagcgaggctgtcgggcttgggggagatctgacagcccagacctttctacggctggcagcagagaaacaaagtctggacccactccatgctctgccctcagacctggccaggtgatgctctgggggcagcatctccccaccgagagaagcgggctcctaatgaggtgggaaagccacggcaggcagcgagcagcccaggccagctttctgcatggatggtcagtctcttgccctcaaacactacagcaaacaagctacccctgccagtcctagacaacttgggtacatctggggacctagcagttaggcttgactttgaggagaggctgtgatgtttatgatccctgaataaagctactccttggagagatgccagtgttgctgttcacctggtagggccagatgctatggggccgagccggctctccgtgctcgacttggagtgtaaacccagatcgctggtcccaccgggcgcccgctgtttcgggccctgttgggcggccctctcttcctcttcgctctgtccctgccagtgggtccgggtccgggtgaggcgcccggcgtttgcgcccgggggttccaacgacccgcgcggctttgggcaagtcggccccg

SEQ ID NO: 683665 - DNA, 732 bp, Homo sapiens
  misc_feature (190)..(190): n is a, c, g, or t
  misc_feature (212)..(212): n is a, c, g, or t
  misc_feature (238)..(239): n is a, c, g, or t
  misc_feature (602)..(602): n is a, c, g, or t
gactccatgattgaaatcacaattgggataaagttggtagagatgcttcttaatttacagtggggttatatcctcataaacccctcataagttaaaaatattgtaagtggaaaatgcatttaatacacctactgacatcatagctcagccttgtctgccttaactgtgcccagaaatgcgcattagcctncaatgggggcaaaatcatgtancaaaaagcctattttgtattaaagcnncaaatatctcatgtagtttattgaatactgtattgaaagtgaaaaacagattggttgtataggcactcaaagagatctcagttctcttgcaagctccttaaagatgactggatgaggctttacaccattgtgtgtttgccaccgtgtttgtacacaggaagggctcaataaacaaatcattggtgactctttgacaacacagaaaacgattttgacttacagtgatttaaaggaattttagacccttttagcttgaagtcttaaaggaagttaagaagatagaaacttatttttaagagcttcccctacttgcattaataatgattaaatgttgaatcaaattagaatgaccaggctgcagtncgtataccaatgtttgggaggtgaatgttctcaatgagggtcatgattctaacaaaattagttgttactcaaagcctgtttttcaacttccatttgcctcctactttgcccacaaaaaaaaaacaacaaa

SEQ ID NO: 683666 - DNA, 362 bp, Homo sapiens
tagtggtctctccacattggacgtgacctccattgtcacacaaagacctccacagccacgtggacgagacctccatagtcacacaggagctccacaggcacatgggaccatgggacgtgagcaccatagtcacccaaagagctccactgccacgtagactagacctccatagtcagacagagaccgccatagggacatggactagacctccattgtcacacacgcgacctccataggcacattggactagactctccattgtcacacagcgacctccacaggcacatttggatgcgaactccatagtcacacagcgacctccatagagacatggactagacctccatagtcagactgcgaac

SEQ ID NO: 683667 - DNA, 577 bp, Homo sapiens
  misc_feature (269)..(269): n is a, c, g, or t
ggactggaatgggtagccagcggccaggataccaaagccttacaggacttctcctcaagtgtcaagatgtgccaaggtaatcgagacacttactttcacctgcttcagactctgaagaggctagatcggagggatgaggccactgcactctggtggaggctggaggcccaaactaaggggtcacatgaagatgctctgtggtctctccccctgtacctagaaagctatttgagctggatccgtccctctgatcgtgacgccttccttgnagaatcttgcatattttcgctaaagttttggagcatgtaggtgccacgttttgaagagcctgagctgggtccccagtgggctgtctctatgaggggagggctttctggttcaccaacattaggaatgtggccattcctaaataattcatgaagtggtgagatgggtggtaggcctgtggtatttgcccaagtaacaaccattgtcgtttcggaggaaacaatcttggccaccaccgagtcattgagtttgtccgaggcgccttttttccggcttttcatattgggttgtggagtgaaatttcagattt

SEQ ID NO: 683668 - DNA, 322 bp, Homo sapiens
  misc_feature (240)..(240): n is a, c, g, or t
cgcagtggccgagagatagggagtagaatcgtgttatggccgagggataccttcggattaagaccagtctggcgcatccatcccgacacatctccttctccatcatccgttctccaccctcgcttgcgtccccgctgctaggtctgtcctatgacctcctctccgtgccgaatcggtggcctccaggatcccacaggactccctgagagcccccggggtcctgcctctacccggacctgngctagaggcctcctaggctgggcctgtcttgagcacacaggacgccattcgctgtgaattcctcgaattcttatgactattc

SEQ ID NO: 683669 - DNA, 355 bp, Homo sapiens
atgcttgttggtcgtctctagacgatcccctttcgccatgtttcccccacatttgaaaactcaattaatgtatgtccactatatcaacagactagtagaggtaacaatcagcgtggtcacgattgtatagatgcagaaatatgcttttgacaaaattcaacacggattcaggatgaaaaatcctcagcaaactaagaataggggtcacttccttgtagtaaagaacatgtttaataaatacttgttgtttacatcattactttatagtgagacattagaggctttctcactatatcagaaacaaggtaatgatgttccctctcccaatttcttttcatcactgcagttgacgtca

SEQ ID NO: 683670 - DNA, 665 bp, Homo sapiens
  misc_feature (192)..(192): n is a, c, g, or t
ccctcaatagaatgttttcaagcataacttaatataaagttcgcaaagaacctgtcatgtaaaataagtgaaatttcaaaagtttatgtcaagtacatccatatccgttacccaaattaagacgcatgtggtcctaaaattctatatcaaattcatatcttgaaaatctacacgtgtaataatctaaatgtncatttctattggtgacaaagtcacaggtactctgatcctactgtgacttgtttccatattcgtaattaaaggaatgttatatttcaagtagaagtttggtaaaaagaaagatttaaatttttccccatccaagttcaccagacccctggtttagaggttgtcttaattttacttttgtcattttaagagtaaattattttgttttcttgttcaattctcaattatttgggcttattttactgcctcttgcatgcttttttatgcttgaatggtttttgcagtgttagaacagtaataattgaagacttgggtggaaaaaaatcagcacctgattgaaaatgaaaggtttcaacaaaagctcttgataatgttacctccaggtgtaccatcatgccaccattattggtgctacaaatctgttaatttatttatgcttaagtatgtaaactttaaaaaacttggatcatctgcat

SEQ ID NO: 683671 - DNA, 208 bp, Homo sapiens
gggagctcacactacattaggtgagatactatctctaaggatagacggcccgtgaaggggccccgccttttctgggccctccagcaaagctgagaaacagaggcggcaacatctccttgtactatctcctatgtctgctgtgtcaatatggactctctgggccagggaattcagtgtggagaccgccaggcctgtctctgtttctagt

SEQ ID NO: 683672 - DNA, 327 bp, Homo sapiens
  misc_feature (281)..(281): n is a, c, g, or t
gaagaggtcctgcccctccaccagctccacgcccatctgctgggccaggaaggcatgctcgaagtaggccgagttgtacatgcccggcgtcatgacgacgacggtcgggtcggccacgcccgagggcgcgacgctgcgcagcgtgtccagcagcaggtccgggtagtgggccaccggggcgatgcggtggttgacgaacaactcggggaagagccgcatcatcatcttgcggttctcgagcatgtagctcacgccgctgggcacgcgcaggttgtcttccngcacgtagtagtggccgctgccatcggcgtggccggcgcgcacgat

SEQ ID NO: 683673 - DNA, 449 bp, Homo sapiens
ttcctctttctcctcctgttttttttccttttctttcctcaaagagaaaactaggaagagaataatgaggattgattaatggtcaggggaatacaattcacacagaagaaagaaatggagactaaatggttattggcagcataggaatctgatagaggaaaaagaatatatgttttttggccgggcccagtgtctcatccctgtaatcttagcactttgggaggccaaggcaagtgaatcacctgaggtcaggagttcgagaccagcttggccaactggtgagaccttgtctctactgaaaacaaactaaaaaaaaaattggccaaccatggtggtgcatgcctgtagtcctagctactcgggaagctgaggcaggaggatagcctgagcccaggggagttggggctgaagcctgggtgacagaggaagaccttgccttcaaaaaaaca

SEQ ID NO: 683674 - DNA, 893 bp, Homo sapiens
cctcctgttttttttttctcttacattcttttttttttcccggtttatcctttaaaacaagataagattggaaatattctcttgtgcaattattggtggcactccccagggtgaactctcaattagaaaagtgtccttctctctggggtaaaagggatgggttccctggtatatggactatagagtaagatgtggcgcaggcaatcttcccatggccttttccaagcagaaggggcacagaacaggtagcgggagactggccatctctgggcaagattccgagtgtaaagaatctcttctaaatttctacctccctggttctctgaatcagcccatagtttgtgtgcatgaggggccactcttaaagagtcacctcagtactcgggggatcttacggtcttggtccaagggtcaattaaaaccctagtctcctttaatcctacttcctatcctcagctagatttgaaccctcagcttttttaccttttcgggaccttattactagtggacttagtattcactttacctagatgacacgaattcttcttaacaacatttaatatctttgtaagacttcacaaattcagattcctgtacctggtgcctgggtcgggcccaagggtggattctccctagaagaacaaaacacatcaaggctttctgtcgggcccttagcagatggcaggggcggtctcaaacgaacgttttcaccattgggaaatccctaagggcggaaagtccaccggtacacttgatctctatccaacttcaactacaggcttattagatggtttcccatgtcgcagtctggtctccaagtttcaccacaacctgtaaggcttagtgctcgtcaactttttaaccgtacttgactggaagcaaagttcaaagga

SEQ ID NO: 683675 - DNA, 238 bp, Homo sapiens
caataataatgtggcatattgggatgtattgaaggcatgtaaaagttgaagatctgggcaaaagtggattttgaaagaatgaaaattaaagaaaaagaatttaaaaatgtgtgtaatgtgccaaaattggttctcagtagacttaaaacagggatgttaactattactttggatgaaagtgattgttttgctgcctgggtttctgcaaaagatgctggtttcagcagccctgatgggt

SEQ ID NO: 683676 - DNA, 388 bp, Homo sapiens
gcattactttcatatattatctcacttatttttatattttaatggaaatatctactcagcatgataaaacagttttgtttttctcatattgccagaaggaatacacagtttctttaatatgaaaggcaattttatacatccgcacaaagagtaacacttcattcatagtatgctacacgtataggaaggttggtgaatatctgcagtttgtactttcgagttgagtgctttcactataccttactgcctttttttagaatttatatattaaaaatatattttaatcttgttatttgattaaaacccaatttgtacaattcatgatactggaaaaattacaaggtttgataaatttattctgaataaaattaagatatgtaatttgaaa

SEQ ID NO: 683677 - DNA, 379 bp, Homo sapiens
ccagatggtgtcaagagcctggacaccacagctggggtcgagatcccaccagtgtctggggaccttccccaggccaccagtatcagattctattccattgctcaaatcacaaaacattgaatggagaggtctcctctggaagcataaagtaaagattctgtggcatggtggccagttaggcatggaaggcatggcaaaatattgaaaatgagggattaggtgacggtatagtaactgctgaatactaaatacttgatccaggccccattccctggagactgacagagagacacatcgtccaggtagtagtggagaaatactttctgggtatctgaccagccttcgtggaaagaactggcaccatcctgcaggtgcaact

SEQ ID NO: 683678 - DNA, 496 bp, Homo sapiens
cctcgccagtgcacataggagttagaaagagctgggcatgatgactcatacctgtaatcccagcactttgggaggctggggcagaagatcacttgagatcaggagttctagaccagtctagccaacatggtgcaaccctatctctactaaaaatacaaaaattgggctgggtgcgatggttcatgcctgtaatcccagcactttgggaggccatgatcctcatggatcatgagttcaggagctcaagaccagcctggccaagatggtgaagcatggtctctactaaaaatacaaaaattagccaggcatggtggcaggtgcctgtaatcccagctacctgggaggctgaggcagagaattgcttgaacttcggcggtggaggttgcagtgagccgagatcgtgccactctactctagcctgggcaacagagcaagactctctcaaaaaaaatacaaaaattagttgggagtagtggtgggtgcctataatcccggc

SEQ ID NO: 683679 - DNA, 259 bp, Homo sapiens
  misc_feature (33)..(33): n is a, c, g, or t
tggcctggggagggggccgtggcccttaggccnaaagtgccttccaaacggcccggtttgggggcgggtgttccctgttagcccgagtccgcttcaggaggggagccttcaggtgccggctggttaggggattaccccctgtgggtgggaggaggcagcgcccctttcaacagccccagggctgcctggggctccctggcaacccagccccggggaaaccgtcagcttctgtggcaataaaacctgccccgggtttgga

SEQ ID NO: 683680 - DNA, 128 bp, Homo sapiens
ataacgacaccgtacccacatttcccgcctgtttgattttatctaattgaaatagtatcagaaaggattttctctgtgcggcacattcttatttgttattgggaagactttctgacttttaatctctt

SEQ ID NO: 683681 - DNA, 165 bp, Homo sapiens
  misc_feature (49)..(49): n is a, c, g, or t
  misc_feature (61)..(61): n is a, c, g, or t
gatccacagtcagcaaatcacatgaacagttcactgctgactatatatnggaaaggaaatnctgattctgtttcaaatactcctgaggttggagccaagaggaaccacctcttcaacaccacgaataagatcaaaacaggctacattcccttgaagaccctgcca

SEQ ID NO: 683682 - DNA, 239 bp, Homo sapiens
gcccgaggaaccaactgttttgagcctactttggggataaaggattatttggttttctggatttggaggcaatcagcggacaacaaggaaaatgtgtgctttggctcggataaaaaatgggacatcattcagtccctagttggatggcccaaggcttttcccaaacgcatttgtagcagagtggaacttgtactaacttatgatagaatgtatgggatattaatgtttttaccagtcca

SEQ ID NO: 683683 - DNA, 337 bp, Homo sapiens
cctttttttttgttgaaaagcccccccatggggggttttcctttattgggggttttaatgggaaatttcccttttttcaaaccaattgaaagccctttttttggatttttcccttgccgtggggtccggaaacccacattttggttcttccccccccttaccccgttttttttttgtttttgaaacaaaattgtttggttttggtttcggttttaaatttttttgcccccggttgttttcccccccccccccccggggggaaggattttttttccctttttaaaaatttaaaggggatttttttccaaattttttccaataaaattttttgttttta

SEQ ID NO: 683684 - DNA, 397 bp, Homo sapiens
cacagagcaagatccatgtaatgtcttgtggtaggaaacagctgggtgggtgctggcccacccaaggttgctcattcactaccccagcctctctgcaggcttgctacaccgatccgccccagcccagcctcagcgggaaggcctctcttcctccaccattaccaacaataccgactcctacagccactcggcttactgtcccgggcttaccagataaccagctaatgttttaagtgaatggataagttaaagggaggaatgaaggggtggagtgagctcacaagaagagtttagcgccaaacctagagaaaagtccaaaaggagcactgccacctggaaaataacgcgttggtcaatgttgtccccaacacccgagcagcgtgcctcgcagtccccg

SEQ ID NO: 683685 - DNA, 158 bp, Homo sapiens
ctatcttaccccttacaggtacattggctgttgggatgagaaaatacgaggaaacaagaatcatttgttcgtttggggcatgcaatatggtgggcaattatatatatggcacaccaggaggggaagtgatgtaatacatggcaagtggaaatcaagca

SEQ ID NO: 683686 - DNA, 370 bp, Homo sapiens
attctacacggatcccccacgaattttggttcaatacttcgggttacaaaacaaagtatcatttcagacatcagctgctacaattattattcattactttttcggagacagagtctcactctgttcgcccatgctgaagtgcagtgccatcatcttcgttcactacaatcctccatctcctgggttcaagtaattctcctgcctcagcctcccgagttgctaggactacaggcacgcactaatatgcccggctcatttttgtatctatagtgtacaacgcgtttacagtgtttgccaggctgttcttgtactcctgacctcgggtgatccacctgcctctgcctcccatagtgctgggattacaggcgtg

SEQ ID NO: 683687 - DNA, 469 bp, Homo sapiens
ccaggtaagactttattatattaacaaaaaaaatgtaactggaaataaaggtaagtcattttaaaagattgacagtttttaaacccctataattctttaatggcagcattagggaccactgcccaagccactttcaacccaaccaagatgctggaaagcagagcacacagttgtgcccaccaagcccaagagggcgacggaccccaaagctcctagactacacttggtgggatctcccgtgtaatagccataagcataaagaactcgtccaacaatccaagccaagcccagaccagaagctatacgcggttggacaacacctccagccgctagacaaacatagaagggaggatacactgccaacgtgttctgacgggctcgctgaatgcagttgatgacgcgcccatcttcaagggccgtgctgaacatgatacgatactccactttgcacttagtgacagccttgaaa

SEQ ID NO: 683688 - DNA, 685 bp, Homo sapiens
aatgtccttaatcctttccctaagttcatgggttactgcatgctaggagggctttttggttacctgcactggctgctttgccagcgaggccaccattcattggtcatcttggtatctgtgtggacatctcactttcctcaatgtataaaggaaccaagtatggatttcagaggtgctcttagattccccatacacccaagggtaataaacgtgtacaagtacagtgttcatgatacgtgccttggtgggagtccgtggtgcctcagggaaggggctcacgctgcttctggtctccagggacagtgctgctggaaaggctagtgatgagcttcaccctggagctcctcccgggaccttgcaagcctctccatccagcatcttctctatcttagttgaatgccttctttctgaacatctgttgtaagaagtatgttatggaggcaccaatacttcgctggatttctttcttaatctcgatctttttgttataaaaatgtatagtgattccatgggacatgtgaagaatgcagtcaagtaaccactttaatgcaatctctgttatcataatattgtatttcgtggtagtcctttccggtagatatttttaaggccctttaatgccattgtcgccttggatttatgagttccaagtgtttcttaaaatatagaaataatgtcagaaaaa

SEQ ID NO: 683689 - DNA, 545 bp, Homo sapiens
ttaaagcaagcaagcaggacatgttgatggccaacagtaaaaccttccaggctgggaaggcgaggggaactctgggagtggatatcccagtttccttgcttgaggaagtccatctggctccatgaaatgagtagacactggagaactacagcagtgcagagataggctgaatctattctacatgttcctcttgaaccctgtgaagcactatcaacaactgttctttctgaacaagagagtgcggatggctatggagcagattccccagcagtaaggctctgcacttggctggcaagttggacttactctggtagtcccaggaggctgtgacagtgcctgacatgagcagacacttacttactacagactggattttgcatacctgctggtagatgcaaatgcccaaaatactatgaaaggactaaaacaaggctgggcgcgatgggtcacacctgtaatcccagcactttgggaggctgaggcagggagatcacttgaggtcaggagtctgagaccaggttggtcaacatggtgaaatcccatct

SEQ ID NO: 683690 - DNA, 181 bp, Homo sapiens
  misc_feature (3)..(3): n is a, c, g, or t
  misc_feature (21)..(21): n is a, c, g, or t
ctnagcaatatactccctacnaaagggggccacttcaccctggggattaacaacataaaaccctcattaacaggagccatcaccctcaggttaaaacacctttccgccattatcctcataccccattaccctgaaatccttcaggggtgttcttattacagggttttcctattaaaaaaaa

SEQ ID NO: 683691 - DNA, 970 bp, Homo sapiens
  misc_feature (3)..(3): n is a, c, g, or t
  misc_feature (112)..(112): n is a, c, g, or t
  misc_feature (114)..(115): n is a, c, g, or t
  misc_feature (122)..(122): n is a, c, g, or t
  misc_feature (154)..(155): n is a, c, g, or t
  misc_feature (158)..(158): n is a, c, g, or t
  misc_feature (204)..(204): n is a, c, g, or t
  misc_feature (232)..(232): n is a, c, g, or t
  misc_feature (241)..(241): n is a, c, g, or t
  misc_feature (245)..(245): n is a, c, g, or t
  misc_feature (251)..(251): n is a, c, g, or t
  misc_feature (270)..(270): n is a, c, g, or t
  misc_feature (287)..(287): n is a, c, g, or t
  misc_feature (300)..(302): n is a, c, g, or t
  misc_feature (308)..(308): n is a, c, g, or t
  misc_feature (315)..(315): n is a, c, g, or t
  misc_feature (317)..(317): n is a, c, g, or t
  misc_feature (347)..(347): n is a, c, g, or t
  misc_feature (354)..(354): n is a, c, g, or t
  misc_feature (379)..(379): n is a, c, g, or t
  misc_feature (381)..(381): n is a, c, g, or t
  misc_feature (396)..(396): n is a, c, g, or t
  misc_feature (436)..(436): n is a, c, g, or t
  misc_feature (440)..(440): n is a, c, g, or t
  misc_feature (451)..(451): n is a, c, g, or t
  misc_feature (507)..(507): n is a, c, g, or t
  misc_feature (517)..(517): n is a, c, g, or t
  misc_feature (526)..(526): n is a, c, g, or t
  misc_feature (561)..(561): n is a, c, g, or t
  misc_feature (563)..(563): n is a, c, g, or t
  misc_feature (727)..(729): n is a, c, g, or t
  misc_feature (747)..(747): n is a, c, g, or t
  misc_feature (809)..(809): n is a, c, g, or t
  misc_feature (811)..(811): n is a, c, g, or t
  misc_feature (966)..(966): n is a, c, g, or t
ttntttcctcatattattagaaacagtatttcctcatttcatggagtttcttagaaagttctaagtattaacagaagagaaaaatgaaaccgtgggggagattaaataacangnngtttacnccacagcaagggtgctcacccatcccaatttnnggngttacacaagtgactattgggtgatatagtcccgatcatgcaaatnatcgtatgatcacttggtatcctttggnagttctganattnattgtnactagcacagatatttaantgagtcagatggctgcngtgagtggggggnnntttttnggttttngnggtggggggggggggggggggggggggggngggcgtnggctcatttccttacatcggacganantgttcgcagctgacnatccgttgctctgagccccagagggcgcacctggtgtctncgcnacacgtctganaggggtggtcgcagtatcctctgccttccatctaatggcactggtttatctgtggncagcagaacnccacaaatnagcatcgagagcacgttttcacaaaataggcagtnanaaaattaaatcactagaacctggcaatgttaaatttgtgttttcatgagccaaaggtcatagcacaaatgaggtctaaatgtcatcacagcggaccatgggccacagaaagacacattttcaagttatgttgaccttccaggaagaaaaacagagatacagagnnnagcaaacacgtgccgggnacgcacggcggagatgcacggcgtccctgtgaaatatgaacggcgccatttacatggaaatncngccagcaggggcattgagtttcctgccggctcgtcggagctgctgtcatggaaagaagctcagggcaatgtgaccggggtgggcagaggggcaggcaggctgggaaatgtcaccatctcaacatgtgttctaaagtgacttcgaggtgatcatcnttta

SEQ ID NO: 683692 - DNA, 318 bp, Homo sapiens
tattaccaggcttgcttctgctttaccagggttgcggcttgttgatttaacatgtacggcatggtcaacaagtatcaactccacttggtctgcatttaagaatctcttaccgccgggcaccgtagctcacacctgtaatcccagcacggtgggaggccaaggggggcggatcacttgaggccaggggttcaagactagtatggccaacatggtaaaaccgcatctctacgaaagatacaaaaattagccaggcgtggtggcacatgcctgtggtcccagctattcactgaggtgggagaatcgcttgaactcaggagg

SEQ ID NO: 683693 - DNA, 366 bp, Homo sapiens
ggagacagagtctcgctctgtcgcccaggctggagtgcagtggtgcgatctcggctcactacaagctccgccttccggggttcacgccattctcccgcctcagcctcctgagtagctgggactacaggagcccaccaccacacccggctaattttttttttgtatttttcgtagagacggggtttcaccatgttagccaggatggtctcgatctgatggtctcgatctcctgacctcgtgatccacccgccttggcctcccaacgtgctgggattacaggcgtgagccaccgcgcccggctactattatttcttttaaggtggtggtttggtttcagggtcccccagcactgcaatggcagcctat

SEQ ID NO: 683694 - DNA, 594 bp, Homo sapiens
tagggggtctgcgcggggccggataagtcctaaagtgctcttgtaggctgcgcggcctcgcgtccttgttctcccccttctagagtgttactgtgtgactctgtgggtcccgaagtggtgacgtgatgtcctctccacgtaccagtttagaacgaacactggagcaaagagccacaaagtgggatgaaccatgctgaaacttaacgatcatctagagaagcgatataacgaagggcctatagaaaaatttgttaaacaagaggtctagaataccacgatgacattacggtcacgaatggacagaatgcgcacagaatctacgtataacgcaacggcaataaggacaccctgtctccagacggagatccagcgattgtccatccaacaatgcagttcttgacacaccatcatgtgtccatgcggatgtggcaagttcgtgctaagaacagcactgcacacatgacaacactgacacatgaaagctcctactagattgtgtccgtcacgcaggcttgggaacattcttagaagcaagcggtcctgtgcccacagttcttcttggcagacattgactctccagcggagggtgcccaa

SEQ ID NO: 683695 - DNA, 1539 bp, Homo sapiens
  misc_feature (1539)..(1539): n is a, c, g, or t
ctgatcgcgtacggcgacccgacagtcgttcctgtcagaccgctcgctacgtccgtacgatgtatccgcatgtactaaatcgctgagtggacagtgtcgctaagagtgctgtaactccgaaaggaataaatttctgaggtctgatgatgaccataggttacgcaagaggctcgcctaacgattcgtcatgggcccctgatcgggtcttacgtacgaacaccttacggcagcacgtccattaagaactctaacatcaatggagtccccttagtacgccgtcaaggaatcttcaaacactcaatgcgctactaattactgcatgcgccaccccggtacacatggacgtcgtactacaacgcgagtacgggttctgttcctatctaatggagaacacactccccctatcccagctaatcctctacacacgcgaagtgggatgcatcgcccttccaagacataatccgaacttcggtggagtcggaatgcctggagccgcatgcatgctaacgctctgatgggcaggttccaaccttggatgctctttctgaacccaagcgagtggaagcaaatggctgggtgggccatccataatctggccacggggagctgggagccccaaaataggggttccaatcgataatcgtccttgagatccaacttccttcgcttagtagcgagccgctccacaatcggttatccgtacaattgggtgcttgatgaaatccaattgagggaaaacgtaattggacagcacggaggtccctcatatagattcatttctaggcaaaaactgtacattcccaattggaaatcaaaacgaaacctggccttcttatgacaatcgaccctttggggtgccaaatgtgatctagatccccaagtgcacgaaaccctttgtgtggttcgacccggtggtaccattccgcgagcttccagatgaccccacgaagtcccaactggcgcaatccaaccatggccgatccccgtagaccgaacgtggtgggaaattggaacaccgataccggggtcaaacactttggtggggcgatgactagaggcaggggggggcttctcccatgaaaggattcctttgtcccttgccctacttcctgggtggctcgcccacagtgtctgtaggggcacaaaggaccctccccctggaggttcgaaagtcgggccagtcgtcacctggggcatatgtgccttgccaggttgtcccccacgtggccaatacggcgcccgttgttgggccctcgaaactagcgcgtcttggaaaaaccgcggggacaaatgaagaacgaaaaagaaaggggggcgaaaagcgggcagggaagacccacaagagcacgatgagaaaacttggaacagcggtgacaccatgaagagggcaccctccatcacaaacggtcaagcacacaacaaggggcacaaatcgagacgaaagcaccagaggagagtcaagagagaaaaaagagcaaacacagaaagacggagctcagaagaacacacaacagagaggtgagagtgaacaaacaagan

SEQ ID NO: 683696 - DNA, 462 bp, Homo sapiens
agacggtgccccaaaaaactgtcatcccgtactatcttcggtctagtcatactcctattcaccgttctcaactactcgtacatgccctgctcttgtgtacactgccggtttacactgattttccaagccatcacagctgatatctccgggtgctgtccccaaactgccactcttaactctggaagtaaataaataatcttggctggcaggactatgctgaatctccttaggcactctctaatcagatatcctgagtcatcccaattattagaccttttatacttgtttttctccttctgttattccatttagtttttcaattcatacaaaaccgtatccaggccatcaccaatcattctatatgacaaatgtttcttctaacatccccacaatctcaccccttaccacaagacctcccttcagcttaatctctcccactctaggttcccacgccgcccctaa

SEQ ID NO: 683697 - DNA, 530 bp, Homo sapiens
cttccggttttcgtgagcgtgaggtgtgggtgttcgttggggaggtagggcatggctaaaagcttacgcagtaagcgcaaaagaaagatgcgtgctgaaaagagaaaaaagaatgccccaaaggaggccagcaggcttaaaagtattctcaaactagacggtgatgttttaatgaaagatgttcaagagatagcaactgtggtggtacccaaacccaaacattgccaagagaaaatgcaatgtgaggtaaaagatgaaaagatgacatggaaatggagactgattttaagagaaacaaaaggactttttagaccagcatggacagtacccaatatggatgaacccaagggcaaagaaaaggcctgaggccaaagcgagagaaaagaaaggcgaaaggcaaaccaaaagcagtgaaagtggccaaagggttggccctgtaagactcttaaaaactttgtaaaaaggcccatgggaatagatgacggattaagattggttccccctgtttactttggatttcaaccggcacc

SEQ ID NO: 683698 - DNA, 1271 bp, Homo sapiens
  misc_feature (1271)..(1271): n is a, c, g, or t
ccataattattgactatacccctcccggtgtcaaggatatttacgcttgatatcggtccatgcttccacggattgacactatgaattgatctgcctgcgaagggactctgagctccctaaggacttcgatccttcacgtattgacactcagtatggtgagccatgatatggagatcgtattacgcaaaattcatcactagagctgtcgatagattaatgaggatagtaaggtaaagtatagatcgtcatccagatgtcctgggttagtagttcgcctagtgctaagtacggagcatagtgatatcgctcaatccataagtgaggcttccatgcccacatgggatttccctcgtatatctccaggccggtacaacccttaagatgtaaaagcctcacgccaggaatccgattctcactgtaatcactttatttgcattcggggacgtaaagattcgtaagacgtatcgtctttccccaatctataacacagttctccattacgggtaccgtgacttctcgggaaagttgcgcccacggaacagttataactcacgggactgaatcccaccgggcattcgacaagttaccgccaccataattggaaaaaaattctctacttacaatcttgttagaggctgtcaattttcccatttatcttcctacaacatggggaggtcaaatactttaagtctacactcctttactcagtgaatgtaatatcgtagaaaggtccatgtcaggtcattcgtaaacggctgggaaaaaggtaccgtataactattgctggggaaatgaaagcccctgccgatttaaggaatcgtggggaaggtggacgctaactttgtgggaatggcgccccccggaacgccacattaattcataacaatttccgaaaacgaaaacccgcggtgaattttcaatttaaccgcgttccaaggtgcaacaaaaacccccgaggacaagggcaagtccgatgatcgccccctcaaagaggagagcatgggtttttcaccacggaccggtaaacccccgagaggagggtccgtgccaaatggaactcgttttagttcccacggacacatggatgtaaaccaacgaaaaacgcaaattcaacaacttacattaagcatagtttgcagcgagagctacactctacgaagtgcacaccctgtgacaagagcgccctgttttcaaagaccacaactatacaatattgatcaagcaacagaggatgcgcacaatgaggtagtgatcgagacattgacacagan

SEQ ID NO: 683699 - DNA, 1516 bp, Homo sapiens
ccacgcgtcggtccgccggagacagccgtgacagagaggacgtgcggacgggccaccaccccagccctccaacgtaggtcaggctgctgccttggcgcctcccctctcgcaggtccatcctggctctgttggcccgctgtggctgcctcggtgtcatctgactggcccctgagccagtgccctgtctcttggagcatggagaggcctgcgtgggcacgtcagtcctggagcgatgggtccacttcagtgagtgaaccgactgcacgtgaaagctatcggtgcgcgtgagagccgtcggggcgtccatggaaccacggacctctggtcacaacgcgcagcctaacagacggccatggtgttgccttaacgcgctagctcacactgcacaaccagagacggcgggtggctctccaaggtagacatgcctggaagcgcattggggtgggtacctggacgacggtgtccttaggtttgcgcaccaccgaataaggaagggaaaacgggaaacacttccatattacaccgggcaccactattgggacaaacccctaagggcacaccctgataaggcacggggccccagattagaggaaccgaagattacggggggggagaagggcccccccaggcttaggcaggcccacacacctgagatcagaaagaagaagccacaactaatagacagcggggcccgcgggagggaaacaaacccccagaaaggacttattttgtcccacatagatttatacacacggaccccaccacctgggggcgaagaaacaaaaggggggcagacccccccccatttatttaccacacgcccccacaggggagggagacgcaaacacaagaaaacaccacccgacataggcggggggcggggggggcgggcgagaaaaacacaagccgcactcacgtggtagtacggcggcgcgagagaagacaaacacacagaatccacacaccgcgcagacattaactatctacacaccacctacccattgccccgcccgctatgaaaagaaaataaagaatgaaaaacacacaaccgcgcggggggggcacacagacgggggggggcgagagtacaaaagggggggggggggagggaatagaatattctaatatcacgaccaccaacgacagtactgtagtttaatattcacaccacgcaagacacccctgctgtgacacaaagggggccacacacccacccccaccccacaaaaaacaacaaatacataactatcttcaccatccaactacacatccaccaacccaccccctctacatgacaacaacttatatatatcatatattattatcccaccacaccacacggcgaccgacaagcacattcttttctttggatgacaaaaacaaaacagaccaaccaacgccaccgcggggggggagagataggaaagagccagacgagcacgaactcgcaaacacacaaaaacaaagaacatgacacggaccccaaccacacagcgacaacgaaccaccattcaca

SEQ ID NO: 683700 - DNA, 327 bp, Homo sapiens
ggaattttttggggggttttcccccctgattttcaaaaaaaacccccgggggcctgtgtttgtggccgctcccatcccggaagcccggggtggtgttcccccccccctcgtttttttgtaaattcaaaacaatgtttttttttgggtttttaaaagaagggggttcaccagtaccacccaggtgaagggaccccgcggggtgttttttttgggcttttttttatggggcattcccgcaaaaggggtcagtttttgtgtgaaaaccacccccagtttttgggtcccaaagtaaaaaccccattcccaaaaaaataaaaacatgtttca

SEQ ID NO: 683701 - DNA, 101 bp, Homo sapiens
agcaggctggtaccggtcccaagcgtatgatctctgtgcgcgctccgctcggcagcctgtgggacgcgaccgcggcgctagtctcgttcctttgtgctgcg

SEQ ID NO: 683702 - DNA, 142 bp, Homo sapiens
gccacaggatcgtgacgatcccgaagtcggtgtgctcacccatgcccgtgagtcgccgtcgagctcgacctcggtgccctcgggaagggcgtagcttgttcatgcgaagctggtcgatcgagtggtccgtgaacgcgtcgaa

SEQ ID NO: 683703 - DNA, 1401 bp, Homo sapiens
ggcgcagccgcgcctccctccctcgccgacctcccgtggcgcctggggttggcgatgtggagacgtgagtgggacccgtcggatgctccggcttctccaggactccgccagtgcgcccgcagcgtccctccatcaccctggaggaggagacggctcctgcgcggggctccgaggacgggcgaggcgctggtagcctggattcccatgcctcgcacaatgggacatacctgtggagctgcatctctccaaagtgccagccggacgccgcacacacgcgtccggcgcccgaggctcgccgcctgtgaacccgccccgcccgctcgcagggcagatcacggcagacgcgcgccacctagtcccgccaagcacacccacacccgcgcaggccgctcatcctctcactacccgcctcagcatgctccgcagccacctctcactgagacgtcactggatcaacccttgccagaccaacccgacagctccaaacaccacgtccccccacccacgcgctccacataacaaacccctggcacctgcctcaggcgcatacagccgacaacgccctgaactctagagactgcccccataccgacaatccaataccacaagccaccagcacacccactgacggctggcatgcgcacccaccccacgccccctccctgcacaggcacgccgacacctccccgcacacaacagctcacccatgcccgcgtcagaacgaatcccgtgcagcctccacccttgctagtcgccttctggcacccaggatactctccaccactcgccatcactcccccttgcgagcaggcaacagtattcttgactggccgacgatccccgggtcaccggcagcacgcacccatcctgtgcgcccgtacgacgtgggatggcaagaggccccacgagtgaaggccgacagcgaccacgtggcacaccctctcatgccactgtgccccgtgcacacggacaacctggcagcaaccccttagggcccaattgctgtcagccctagggcgaaaccacaccccacggcaacaggccagcacgaacgccgatccccatcactgaccagaccacgaggcactcgccccacccacgacaaggcctaccccactcctgcccaccatcggccattctcacacctaccacgacgtccctcaccaccctactcacgacctacatcactccccaccgacaccaaaagaatacctaccacacaccccagcaccacagtccccctataatcaccgcactctacccctcactcccccactcgtacccaccgtcaagcaaccaaccaaacccaccaaccacccacccccccacacccccaccacacaacacctcaaccctaactcctccatcacccccaccccccccactctccccccacccacc

SEQ ID NO: 683704 - DNA, 643 bp, Homo sapiens
tgccttgtagtcattgtttgatgggaccaacttgtaaagtatgagccttaaataaatctccatgctgaaaaatgtgttctaatgcaacacaaaaacatgaagtgactgcccagaggtagagttagtgtttaggtggaaagggagatgacagctttccaaagaaggacctaaaacacaccaagattgtcttctacaggaattgctgggcaggtctccgactaaaggtcttatgatgaaaaggaagaaacaagcccccaacacaaggctctgatactactggtaaatgtaggagagaattaagaatctgttaattaaaatccaaacagagcttatttcaatagtcaagttacctgacatgaaaattatttctgcaggataaaagaggttttatggtcttttttggaacttatcttcttggaaaaaattctaccaaaaatggtttcttcaatcctgtggggcctaattaaatgaagccggcttcacagaccccaaggcctctggtttttggtatacttttgggacaaaaagggttttggcttttggtttgccttaaagaggtccctagggaggaaccagggctttttggttttgggggagcctttggcagacaggatcaaacatagggtttaacggggcaaaggtg

SEQ ID NO: 683705 - DNA, 754 bp, Homo sapiens
gtcccctggcgcctacacacacacaaaccctcacgcacacaccacacacacacacacacacacacacacacacaccccacaccctgctcgagtgtgtggtggtggtgggtgtttcaacactggggagggatgtggtgtgtctggtcgtcagtggtagttgccatactctgaatacttcttcctagtcatcgttgtcgtagtcgttgtttttttgttttttatttttatccccccccccgcgcccccgcccccggggttgtgatgcatgtgtaggcttccagagtgccctccctacaggatagtgagtattcttcaacagagtgggataacaacagagattaggaacctaccccatgctgcgaaacgccgcgtgctagttgtatgcacatactattttttttctgttatcttttctactccatcttagaagattacaacgaatagggagtggttctcatttgcggcggtggatggtggtggtgtgttgttgatgaattgtgagtggagagtatctttgttctatgttcttctagcttataatagatctattaagtacgatggtgagtgtggggagtgctgacagcccctctttgtccctcgcaaacctcccacagcacctccctcaagttctcatgtcactaagagcacaagcattgttactgcgcacggtgactgaaaaacaagaagaatacagaagacatcaagttcttgtgttctaaatcattggactggagagaagactaatactgcgtgg

SEQ ID NO: 683706 - DNA, 186 bp, Homo sapiens
tgcaattctttcaggctgtaggtggccgtggctcttctccctgtgacaggtgacgaagcgctgtgccaggggctggtcctggacgtggcgttcttcctctgtgatcctctccagcagcctgtccttcatccgtgtgtagtcagcgatggagtcttcccactcacagcccaacacttcacagaagca

SEQ ID NO: 683707 - DNA, 616 bp, Homo sapiens
tggctgagctccatagcagaatggaaatgacagaggaaagagtcactgaacttgaagataaatcaatagaaattatccaattgaacaagagagaaaaacgttaaaagaagaaggaaacttaaaagaaaaaaaaaaaaggaacagagcctcaggtactggtaggacaataccaaagggtctaacactggatgtcatcagagtctcagaatgaggataaagaatggcaaaactgagtgaagatttcaaaaacttaatggattggaaaacctcccaaatttagtggaaaccacaaaggcctatagcttcaagaaactccatgaaccccaagcaagataacacaaaagattactgtccagacactaaatattcaaactgctgtgaaacctaaagacgaaaaaatttttcaaagcaaaacagagacaaaaaagggtggttacctgtggggaaattaactcccagggatggtggattctaattcaacaccaggagggcagaaggagtggtacacttctagatggtccatgaaaagaactctcaatccaaatttttggtctagcaaagatatccttccagagtgaaagagtatctaaaagagtctcagatgaagcaaagctgt

SEQ ID NO: 683708 - DNA, 384 bp, Homo sapiens
cgttatagcaccgtggtagcttgctaatggcaaataactctcagcatttgtttgtctgaaaatgtctatctttccttcataagtgatgcttagtttcactggatacaaaattcttggctggtaattgttttgcttgaggaggctgaagataggtccccagtcccttctagcttttagggtttctgctgagaaatatgcttttaatctgataggttttcctttataggttagctggtgctctgtctcagttcttaagactctttccttcatcttaactttggataatctgatgacaatgtgcctaggtgaggatctgcttgtgatgaatttcccaggtgttctttgtgcttcttgtgtttggctatctaggtctctcacaaggcc

SEQ ID NO: 683709 - DNA, 708 bp, Homo sapiens
  misc_feature (137)..(137): n is a, c, g, or t
  misc_feature (284)..(284): n is a, c, g, or t
  misc_feature (354)..(354): n is a, c, g, or t
caacaaagagtatcaatctttttccaaacaccttcccaaagaagcccttcaaattgtccccagaaagaaatgagtcccttaaaataaagaacccaaccctcctcccacttttatctccgtgtcttaatttcatagancctaagaaatatgaaggccgagtagcgccccattaaagaacgctctcctgggggttaactgtgaagaatgaagcacaccattgcccatgttgcggagggttactattcatactccactctatgaccggttgttctatctaaactatnccattctctccgaacaatataatactgtttcattctacactatataaactgtactatctgtctattctanactatttcttctaaactgaaaggagttagccagcttgctttaggcagacagtaagcgaagggtcccagacagcctccagcccatgttttgtgcagataggggaacttgctcagggggcttgcctaaacatgctcacagtagactgagggtccccatacacatgggggaatggggtggagccaccagaaattcgctccttatgcaaacagggagcccagccccatcagcttctatgtaaaagcccttgtagtcaactgggaagggggcaaccagcaacctgctctcaggacccctctttttgctgagacctttccttttcgcttaataaattctactgcactcagaaaaaaaaaa

SEQ ID NO: 683710 - DNA, 409 bp, Homo sapiens
ctcctgtgtaaagtagggataataaaagtatccatctcactgggatattttgataattaactgagttaacccatgtcaaacatttagaacagtacctgacacacagtaaatgctcaataaaaattacatattgttatattgctgttctagtttataagaacaggtgtcagaatccagttttgaaatgaaagcccagaactgtgagaaatgatgtttttctctattagatgttctaggaaataaggaaacatcaagaataatacagccatgcttagaacaagttaaatatatgtccctcttggctttggactttctctgtcacttccgtgctgttcttcctcttccagtctctccatactctaatctctgttctcagcttctacttgaactaccatagaaggaatagaaa

SEQ ID NO: 683711 - DNA, 221 bp, Homo sapiens
tctggatctgtagccatgggctctcgcttggaatgacccccagaccagcccgtccagctggatagagcgcacacacggcctccagctgaggcatgtctgtctcatcatcccaaggcttgacatccagcaggatggaggacttgcgccaccatgtgcaggcttcttggcgcttcttctccgcgtacttgcctgcagccgagagcggtgggggaatccaccta

SEQ ID NO: 683712 - DNA, 288 bp, Homo sapiens
ttctattagttttttggcctcgcgtcttctccttgattttaaaattccttctatagctagagctttgctttctttcattctctcttcctgcagagtttcgcatacatcagaagctaggtacataaggtaaatgattgagagttggctgcatttagatttatcactttttaatagggtgagcttgagagcttactttctttctggttttcagttttaatcttgggacaattgtagagtgctagaaaatcttaaaagggggattttttttttccgggaacctccaggccc

SEQ ID NO: 683713 - DNA, 944 bp, Homo sapiens
aatctgaacgactacaatgcatctgaaggatgctttcattctgtaagacctagaataactctactgatgggacgacttaacacacgtctcatacagagaagacaggagggctagaacccaccaagcttgcggactcaagttcagtcagtcaccttgctcgggtttacatggacgcatccctcgtctcctggtatctacacgattcacggtgcacttggtagtgcccctcatggagctggatgtgtcagtgttcatgacccaacatggacatagcctaggtcttccctgtgtcctagtggttcacgccgcactgcgggtgcctccttcttgtaacccgagcgttggtgcagatccgggtggcgacagctcctagagccttccacgtgtaaatcttccacccttgtcactgtggaacggggtgtttggactgcgtcccacgcgtgggtgcctgcccgagtgcactgcctcggggtggcggcctagtcgtgcacatttttggcgttacagtaaccacttcgcgtgcgctttcaactcgcgcttccaccagaaaaccaggtctcgggggccccctgttgcgaatgtggtccggacgtaccctcggtgggagcgccgggggccgatttccctcaacgtaggaattaccgggtgtctggggaacattgtcttgtgcgcgaagggcggacccactatatgtgtggggggcacccccatcattactttctcgttctgtggccgccaggtctattattggctcctgttgtggacctccgattagacgaagagaccactcttgagggagagtggcccctcggcctccacccagcgtgcggactcctggcggcgcgctttatatcccccccgtggggccctctcatagaacggcgcggtgcgcgcccttacgggtgtatagcgacccctctagaggggggcgcgcccctcagact

SEQ ID NO: 683714 - DNA, 724 bp, Homo sapiens
tagaaaggagaggccccagtacagtgcccaagccaaacgccaggcctacctggacacgctcgatggccaatcggaagactacgaacaagcacggcaacacctgatgaccatcgccgtcttcacctcggagcctgaattccaagtaaaagccattggctatctacaggcccaactggcgctcaatgaagcaggggtaaacgaagaactcgtcccctttacttcaaaactttcgcccgttctggaacagctcccaatccatgcaccgccacctcataccagcgatatcgcggactaccaacagatcgtcgagatgagcgacagcatgatcaagcgcctggattacgctcagtcacgcttcaccgaactacgcaaattcggcccggccggattcgacgtgatcagggagagcaaacgcaaactgccccgctatatgagcgacgatctcagggccctgcaggtgacgttggcgcgtcacttgtgcctggcccctgaatccctcgcaaccgaaccccatgcctgggagatgctcaacgacacgctcgacagtgccgacgtcgcggtacagaccctgcgtgacaccctggatgagcgaagcgaatatcgcctggacgagcgcattgatgccttgagcaatctagtggagcagtcaagttcatcgatgagcgctgaaggactttctcagagtctcgaaagaccaggcacccggacaccaggggggggacct

SEQ ID NO: 683715 - DNA, 354 bp, Homo sapiens
cggtgcgaggacagtgcccagcgcagaccttggcactcagtagacactcccacaaatgccggttcccttctacaggcccagtcgccagctcagaggacactcgatctcctgccccctgggactgacaccatcatcccaaggtgatccccagccccagccctggcaggctcagcgctggcgcagtgggccaggactgagctagaaactggcagctcccagggcacacagccaggccaacttcccacacagggctccgccccctcacttcggggcaggggtccaggcagaatcagggatgttgagtcattcttccttttatgcccagagttcctgacccacccccactctgcacaa

SEQ ID NO: 683716 - DNA, 365 bp, Homo sapiens
  misc_feature (343)..(344): n is a, c, g, or t
  misc_feature (349)..(349): n is a, c, g, or t
tctccaggatcccctgtagcacgaatgtcctggacacgctcgatggccaatcggaagactacgaacaagcacggcaacacctgatgaccatcgccgtcttcacctcggagcctgaattccaagtaaaagccattggctatctacaggcccaactggcgctcaatgaagcaggggtaaacgaagaactcgtcccctttacttcaaaactttcgcccgttctggaacagctcccaatccatgcaccgccacctcataccagcgatatcgcggactaccaacagatcgtcgagatgagcgacagcatgatcaagcgcctggattacgctcagtcacgcttcacatnnggtgntccagggtaacggact

SEQ ID NO: 683717 - DNA, 331 bp, Homo sapiens
caaacattcctagatacaggtatgatgaaagtcagtcaggcatttattgttttcgttttatagaaaaggggtcttgatatgttgcccaggcctggtctcaaactcgtgggctcaagagatcctcctgcctcagcctcactagactagctaggattgcaggtgggatccactgcactcaagacagtcagccaatggtgtgacataaatctcggacacaaactgcaggaaaaagattctcattaaatattcctaattgtcatttgcagttgtatctattctgttcaatatgaatattgcctcaatacattttttacacaagtgacagattcag

SEQ ID NO: 683718 - DNA, 213 bp, Homo sapiens
tggtgctctgaggatcccactcgatccgctgatccagcaagccctgctgcaggtcctgcaaccgatgatcgccgacgttctctgaatcgagctacggcttccggccgggccgacgtgcgcacgacgcggtgctgcaaggcgcagcgtcacgtgcaggaaggctttggcgtggtcgtggatgtcgatctggagaagttcttcgacccgggtcaa

SEQ ID NO: 683719 - DNA, 146 bp, Homo sapiens
gacgtataggacatgggacatggacgacactaaagatgcaagacctggtccataaacgtcagggcagattgaggacacgatatatggaggacaggggagatggaatacaggggaaatggacgacatgagagatagaggacagggga

SEQ ID NO: 683720 - DNA, 137 bp, Homo sapiens
  misc_feature (32)..(32): n is a, c, g, or t
gagcacgtacactaggagcagctggagatggncaacaagagtgagctcaggactactggatcacatgcccaggtgtacagcagacctcaaggcagaaggggtcactaaaccaggaggtcacagactgatgtgaactc

SEQ ID NO: 683721 - DNA, 434 bp, Homo sapiens
gatcactagcagtacttctgagattactgattctcccacagatatttgtgagtggactcagacaaatcgtgcatgttctacatagaggtgcatcaagtggcagtactctgtcacatggttagacgctggtcactagtggctcaatactttctacaatcattgcagcgtcatggccatcgatcactgggaaagctagggcctctcatgtagaatcgatatcagtggcatcagtatggcacagtgaggtagccatgatctgaatgcgaaggtcatgagcctaggagggagctacttcaacctattcaatgcagaggagcatgcctgcttctcaggcgatggttgatatgcattcaataactttgccggtggtgcccattattcattgggaaaatgtgttggaagtttctttctgagttaagaaagcttcaaactcc

SEQ ID NO: 683722 - DNA, 154 bp, Homo sapiens
agacatcgctatttaagcgcagggctggaaactcaagtaagattctcgccatctggctgttggacagctggaggagctggtctttgcctgggcccggcttccatctgtcagagacatatttggattgtgcttggatcaaacccttcctttttct

SEQ ID NO: 683723 - DNA, 638 bp, Homo sapiens
  misc_feature (498)..(498): n is a, c, g, or t
  misc_feature (516)..(516): n is a, c, g, or t
  misc_feature (536)..(536): n is a, c, g, or t
  misc_feature (595)..(595): n is a, c, g, or t
  misc_feature (621)..(621): n is a, c, g, or t
aagagcttattccacctcctgcaacatcctggataaccagaggtcctgagtctgcccatgtgacaacttcactgctagaataaccagcctctgagaaagtcagcacagtaaacctatcggccgccgaggacctccacagagtccacttcggtcccctgtcacctccaccggagcaggtgctcgcatccacagctgggagacctgaggacggatcacatcacaggactctgtgcagacattccccagcaccagcctggtagccctgctgggtggagagacccagaagaacaatagcaatcactgctgtctggtttgcaggaagctccatctctaggggaaggggcagtgcacaaatcagggaccaccccatgggactaaagaatctgaccagcagccttgagttccagattttcccactgaaataatctacacacatgagaaggaatcagacgagtaatcctggtaatatcatgaaacagggctctattccaccctcanaagaccacactagctccncagtgagagatccaaccaangagaaatcagaatgctggaaagaatcagaaggtgattattaactactcaagagatacanagacagtgattacaactttgaattanaatcataccagtagatg

SEQ ID NO: 683724 - DNA, 331 bp, Homo sapiens
  misc_feature (97)..(97): n is a, c, g, or t
  misc_feature (153)..(153): n is a, c, g, or t
  misc_feature (188)..(188): n is a, c, g, or t
  misc_feature (299)..(299): n is a, c, g, or t
cagcagctggttcacgcattaaggccctttgcaggtgaaagaaaacggcactggagggccgactgcagaagcagacgcagtgcacggtggacatctnccccttttgggggcctgccacggtgcttcctgaaaactcaggttaagctgactctnctgtcaggctgatgaggcgcctgcacccacctttnctcagcacgccagcccaaatggaagagcaggtgctatgacaaaaatcagttcttgtagcaactatttttgatactgaaactgaaaagcgagagcagcaaagctatccacgngagctcctggacagttaggcccggctttggct

SEQ ID NO: 683725 - DNA, 419 bp, Homo sapiens
  misc_feature (5)..(5): n is a, c, g, or t
  misc_feature (7)..(7): n is a, c, g, or t
ggatngncactagaaactgctgctggaaacgggcggcggctccacttagggattcctgaagcagtgtttgtggaagatgtagattctttcatgaagcagcctgggaatgagactgcagatacagtgttaaagaagctggatgaacaataccagaagtataagtttatggaactcaaccttgctcagaaaaaaaggaggctgaaaggtcagattcctgaaattaaacagactttggaaattctgaaatacatgcagaagaaaaaagagtctaccaattcaatggagacgagattcttactggcccgataacctgtactgcaaacttcagtccctcctactgataaagtatgcctatggttgggggctaatgtaatgcttgaatatgatattgatgaagctcaggccttgttgggaaaaga

SEQ ID NO: 683726 - DNA, 465 bp, Homo sapiens
  misc_feature (462)..(462): n is a, c, g, or t
ctgcatggttcccttcactcggactttgccccaatttgattacactctgggccatatatacttgcacattatgcaaaaaaatgttgatagtatctccttgccacacaatatgcagagttgacaacctgtgaaaaccaaggtaactaatatgtatgtcctagttgtgtggcgcttggtaacaaagtctgtacatattatgtataaaatgtgtattggttagcatttagtactaagaaattctgagtttaaaataagtgatttttttcaaagtagcgatatctatatctgtgtttatctaaaaatactggcttgaatagaaaacattctcagatgattcaagattgagtaaaaatgagaatcccatacattccattattaaattctgccctattcccaattgttagcatctggctgatattaaggtctttgattgtcacaatattctcaataaatgagacattntga

SEQ ID NO: 683727 - DNA, 100 bp, Homo sapiens
tcgcagactgtacaggatttggatttgtatgtcatcatctaccaaggataactgagaaattaatagaccaagattattccatgtcatagtgaacgcggga

SEQ ID NO: 683728 - DNA, 388 bp, Homo sapiens
actcccagatgcgaatggatgaattggtttaaaaccagtaagcaaattaataataaaagtagtatatgtatatatttaaaaagtcagccaggtgcagtggctcatacccagaatcccagcactttgggaggccgaggcaggtggatcacttgaggtcaggaattcgagaccaacctggccaacatgatgaaatcctgtctctactaaaaaaaacaaaaagaaaaaaaaattagctaggcatggtggcaggtgcctgtaataccagctacttgggaggctgaggcacgataatcacttgaaccaggaaggtaaaggtagcagtgagccaagattgtaccactgaattctagcctgggtgacagggtaagactccatctcaaaaaaaaaa

SEQ ID NO: 683729 - DNA, 283 bp, Homo sapiens
  misc_feature (279)..(279): n is a, c, g, or t
ttgcgaacatagaggatccctacatgtattcgggctacaagccaagtgcagtgtttgtggccctttatttaaggttgttttcttatattattctgcatataacagtgacgtttaacatgaaaaaacaacaacaacgaaaacctccattgagtggagccacactttaaatgataatttcccttttactatactcagaaaaaaaaatagaattttgaatatctttagcacttgttgtctatttttaactaacaccatatgctgccagtatcgacatacatngtta

SEQ ID NO: 683730 - DNA, 584 bp, Homo sapiens
  misc_feature (381)..(381): n is a, c, g, or t
cggctccaggacgggtcgtgctcatcccttaactttttaactttttgttgtttctatttatattttattgtgctatgtcttgaaatgttgtagctattacttttgattggatattacttagtattcctactttaaataagagtagtttgcacaccacacagctatagtgttataatattctgttttgttttgtatcctattagcagtgaggatttttttttacctttaggtgatcatttattactcattaatgtccttttcttcctgattgaagtactccctttagcattcctttaggacaggatttgtccccagtgccttatttagttcacttggtgaggtcatgttttcctggatggtgttgatgctagtagatgttcnttcaagtgtctggacattaaaatcttgggcatgcagcaccaatatgaagaagtttaaaaaataaaatttaaagagagaaaaggctctggtatcaggatgacttatttggcggcacttattttcacaatagcaaagactgggaaccaacacaaatgtccgacaatgatagactggattaagaaaaatgtgcgcacaattattaa

SEQ ID NO: 683731 - DNA, 212 bp, Homo sapiens
ttaatcgcaagcttatgatccgcaattactgggaattctctcgtgcatggggcatacttgcatccccgatccccatcatgacatggcgttcaccggggttacccgcgtcctgccggcgtaacggtttgcgtcacgctgatccagtctgtgtatcgcgcgtgctgacccggacattctccgggcattacagacctattattgctcgttctcgg

SEQ ID NO: 683732 - DNA, 173 bp, Homo sapiens
  misc_feature (17)..(17): n is a, c, g, or t
  misc_feature (25)..(25): n is a, c, g, or t
  misc_feature (110)..(110): n is a, c, g, or t
aaatagcttccattttntaatcgtngctgttgtatactagccagaggactgcagctctgagagaaaagcatattgaagatcctgccaaaataacagaaaagaaaattgtntccatttaatatatttccaaacctgcctaccttgaaagagtgtgatgccactagtaattctat

SEQ ID NO: 683733 - DNA, 1622 bp, Homo sapiens
  misc_feature (843)..(843): n is a, c, g, or t
  misc_feature (909)..(909): n is a, c, g, or t
  misc_feature (1085)..(1085): n is a, c, g, or t
  misc_feature (1410)..(1410): n is a, c, g, or t
cccccgggcctgtggaactctcctggggctgacaccgagtcccaccccgctgctccgtgcctgtcctcagcagctacgatgccctccatccagcccagcagtgctccctgcagctgtcatggcctgctggtctgtcgtgcatgactgaacatgtggcttgaacctgctggctagacctatagccgtttgtccgctcgtgccatagttcctgcatgcttgcctgtctgatgtgcctgccatgcacaccatcaccgccaatgcattgtatcttggcgctaaatgctctgccctcacatatatcctggccttgctgctattgtgacgatcgacgacgtgttacccatgaattgtgaacttgaaagatgcgaacatatgtcggcgtgcatcttgcatctctcaattgtgcccacaccgttgcaacagtgacacatgaacgtggttgcggctctacatacaaactcccattactgccacaagccacatcacacttgatagcgctgacaacgtgaggtggcgcgcacaccccttcggcggtggaatgccacctggtgtcgaacacctgtaagcgaaccgcctcttggcggccccacttctatcgctggcccacatgcgcgatcagaaccggtcccttggcgcactgtcactccccataattatccctttggctggtcggctttgcaagttttggcccaaacttttagggcgcgagggacgacgccgcagttaagcgcgaccaccggtggcactattctacgctggtcggccctttctggacctccatgggccagcttgatcgatgacgagcatctggcccagacctttgcacgcaaacaatcgccttancgcgcaactggactgtcacagggcggccaccaatgatttatatgctggccaacaccaggcggcacncgcaactcggccttaccgtttggccggcaattggactcgctccccagattctagtttaccactttggcggtgcgccttggtaagcgtaggcccgaaatgacttccatggactgcactgctgtctgggacccacgaaacgattaaagcgctaaacaacaggggggacaccttatccntggcggcgcccgctttgggccacgcctggagcctcataattactggcgagcaaatagtccccccatcttgggccgcgacaagcatttatcaccacactgcacactagatagcaacataccaagcagactggtccccgacgcttccacatgatcgccccctattattacaaccgctagcccgaattagtatctgtctagggcgcgacacaggccaactgggccacaaacgcgtcaaccagcgttcgttggggcggcttccgtacacctgactctccaccaacggtcgacaaccatctttggtaagtgacaaatcccccgcttagtngaaaccaccgcccacatttattcacgcgtagatagacgggccatacttttgccggccgccccaaaaccctataatccgcgaacatactgcttggccccattgggaccactcggaatgcgtcgcactcggcgccaatcagctcgtcatctttcccccgcgaattctcccccgcgggggcacgatccattggagacaccactatcacatgcgga

SEQ ID NO: 683734 - DNA, 413 bp, Homo sapiens
  misc_feature (11)..(11): n is a, c, g, or t
  misc_feature (23)..(23): n is a, c, g, or t
gggagggacgntgttgagctganagatgttttaaattaaaaaattgtgaaagctacatctgcgacggatatatgtaggtattatgcttcgcgtgtatgttaatggctacgtggtaatgctggcgggcattgaactgcgggttttttctgaagacgggggcgataataatctcgttgaatttattatgctgcggcttggggcgaagattggccctggaagaagtataagatgggttggaggcgtgtcctgtcccgggaccaccgcagtctatagactcttcttcgaggccgggtttcggggacgtacgaggcgccctcctgcacctctattacggtgtggtttgtcgaattcttggaaggtcgacatgttgatcgtaggggagggagggggactcgctattaggtttttgttgg

SEQ ID NO: 683735 - DNA, 238 bp, Homo sapiens
gaaaatcttagtatagtagaaagacatctgcctgtaattaaactagtttaagggtggacaaatgcccatatctgctaattatcaatgggatatgattggttcagttgagtctgacccagagttgttgtttgccaagcaaatctcgcctgggtttatttatacctggttattaatgtttcttctccaattctgacatactttgagtatggctatctatacctccctttaagtttgaact

SEQ ID NO: 683736 - DNA, 257 bp, Homo sapiens
ggtaaaagaaataattttctgtattctgccaatcttaattttatataatacgtcatccatttccctcttaaaatagtatggattgactgtttctaaaataccaatctgtggttgtggttttcttttcttcagcatttccagcatccagtaaacatagtccttatagtgctgctacttgatggtaaatttggttgctgggtctttaggttgcactcacaataaatcgtgcaagcattgtcatgcctattactccattt

SEQ ID NO: 683737 - DNA, 142 bp, Homo sapiens
gtcgtactcatggtgctctcctcttctttgctctctagccgaggtccctgatgagctggcagcaggaggctgctctggctggactctgagctggactcagtgctgtgccatctggctggtccttggtcctcacttcttcctg

SEQ ID NO: 683738 - DNA, 467 bp, Homo sapiens
  misc_feature (357)..(357): n is a, c, g, or t
  misc_feature (374)..(374): n is a, c, g, or t
ggaccagtcggttctacatctgcactctcttccttccctcagttgagctcatcccctttcacacctagcttcatcccaatgcacttctggtccttccctgtgtccgtgggactttttctactgctgtgatatgtccttgtattcttagcattctcttagaaagtatcctttattgccccaccataaaggactttttccatgtactgtatcaggtatccttccaaggttgcaagcagcgtagaaaactctggagaagttgagcaaaggggaacttagtggaaggagagtgggagctcagagaatcactaggcaggctatagcaccagtgctaaaaatgggcatggggaatgtttcccnaaaaaagtccttctgtnttagagatgcatactgaaatatttatgactaaaatgatgctttttctagaagttgctccattgtagggtgggggtagataggattataaaaga

SEQ ID NO: 683739 - DNA, 706 bp, Homo sapiens
gggctgcgggtaacaaccatgcgcaggatttcggatgtgtagcctaactaggcaccggagctttcgcacggtggagtcaaccattgagagtacctacatggagcttgagggccacgttgaactaggacaaagacatgtatccttgctggccccggggcctcacatgccgagatctcgcatgccctgagactccaaacaggaggcatcaccggaagtagcaccctccggaggaagagccacggacacgacggataatggccccgagaggaaacaaacgctaggcacacgtggctcacaccctgtgaattttcggaggactgaggacagtgtaggattcacctgaaggtcaaggatgttctgagaaccaaccttcggccacatcatgagcaaaactcatgttcttctacctaaaaataacaaaatcttagccggagtgcagtgccaagtgtctgtagtgtcccagctaactcgggagggctgaggcaggagaattgcttgaacccacggaggtggaggttgcaatgagctgagatcacaccgactgcaatccaggccggggcgacagagcaagactccgtttccaaaataaaaaaagcaaaaaaattagccaggcgtggtgacgcacacctgtagtcccagcatacttgggaggctgaggcaggaggattgcttgagcctgggaggtagaggttgcagtgagctgaga

SEQ ID NO: 683740 - DNA, 808 bp, Homo sapiens
  misc_feature (661)..(661): n is a, c, g, or t
ggaatcttttttttctgagcagtaggtctcattagtgagcttagaatactccataaaccatgctgtaaacagatgcactgtcatccaggctttgttattccatttccaacacaggcagagtggatttagcatcattcttaagggtcctagaatttttggaatgggaaatgaccattggcttcacgtcaccagctgcattcgcccctaacgagagtcagcctgtccttttcaatctttgaagccaggcattgacttctctctagctgcgaaagtcctagatgccatcttcttccaatagaaagcggttttatccacactgaaaatctttttagagtagccaccttagtcaaccatcttagctagatctggagaacttgcttcagtttctcctgtaaagcttgcagcttcaccttgcacttctatgtgtggaagtgacttctttccttaaacctcatgaaccaacctctgctggttttctgcttttcttccgcagcttccctcacccgtctcggccttcatagaattgaggacggttaggaccttgctgtggattcagctttggttgccagtcacaccagccgtcgggcaaagttgttgttttaatctctccagaccactcagacttcttccacatcagcaataaggctgcttgctatcctgncatttgtgtgttcactggagcagctcgtttaatttccttctggggcttttcctttgcattgccgctcaaccgtttgatgcaagaagcccggctttctgactggagttttagacatgccgttccttacaaagcttaatcatttctagc

SEQ ID NO: 683741 - DNA, 864 bp, Homo sapiens
gagatcctggaggctgaggtctagatcggtcgccaaggatgggatccaggagaaaacgtgcttgaacgtgcagcttgctcctaccgattacagcccagcaggatgacatagttccactgtgctctagtccattgtgggaattatggccctcatgcccggcgtctgtcacaacccaatatttggcgtataacccctgtcccacccccagacatctcagaagtgcgtaccctctcagcacatccagaaactgtgtgcttcacggtactcttgttatgcttgcagactcgaggcttcatactaagctgattagtgtaccctgagattggatcatttcccgctgctatctgtgatgcatattatccgatccacagagatggcagattctgtacctgatagtccaagatccaaggactgggtgggtacttctatttatgggctcatgatctattcttcctctcgctgtttattcaatcgggccatttgatttctccatagaacagaaagaattgaagcagagatgacacagatcaagagcccaggtttcttgatatctaatactaatatactgatggagttaacattccaaggtacgaatgtgtccagaaacagttttaaccttaccctgggtttccatcagtgaaaccaagttaacatctggcaaaagatagcgatctagcctcaggggtttcagtcaagttgcgcttaaaagaatgccttaaaatctgtagttatggtgtcaaatataataaatcttcaccagctcatgcacgtacaagtctgaaatgtttcataaaaggtttagatgacctgataacatgtttctaaaacccagagagaaagagagagactgatacaaacgtcaag

SEQ ID NO: 683742 - DNA, 358 bp, Homo sapiens
  misc_feature (18)..(18): n is a, c, g, or t
gggcccattttgggtttntgcccccccccccccccgggggtaagggattttccccccccccccccctgggggggggggggcccaggggtgccccccccccccccccttattttttggtttttttgtagaaacgggggtttcccccggtgccccgccggggttccaacccctgccctttaagggtccccccgccccggccccccaaaggggtggggtttttggggtttaccccctggggccggcccaaaaaagcccttttttttgggggggggggttgggttttccccaaaaaaatggggcccggggggtttttggtttcccccccttccctttttttttttccccgggttccttttta

SEQ ID NO: 683743 - DNA, 567 bp, Homo sapiens
attacgagatattacctaatgtaaatgacgaagttaatgggtacagcacaccaacatggcacatgtataaatatgtaacaaacctgcacgttggtgccatgtaccctaaaacttaaagtctaatacaaaataaaaaataaaaactttggctgttggccccaaatattcctgcttcatcatctctccactccagaaacttttaacatgcttacaaagggtgtccgtttctcatcgaagtatttgccccccagccccacctgcaagaaggtggaagtagggcctctgcctgggagggtaactctcaaatgtaaggcaagaacctgtctctccaccaatatctccaggactgaaggactgtgaaagtctgcatattgatcaagcttctccctcccttatccgaagggacttacttccttcaagacacttttcctcttcccaactagctccatgcccccatccagtcatcttccaactcatctctccccacctgcatgccacacaagaggaacgtgaccacagcacctggaagttccttaaaattgaatggtgtgtcaggccgtgtgtagt

SEQ ID NO: 683744 - DNA, 559 bp, Homo sapiens
  misc_feature (2)..(2): n is a, c, g, or t
  misc_feature (74)..(74): n is a, c, g, or t
  misc_feature (200)..(200): n is a, c, g, or t
  misc_feature (216)..(216): n is a, c, g, or t
  misc_feature (449)..(449): n is a, c, g, or t
  misc_feature (452)..(452): n is a, c, g, or t
  misc_feature (455)..(455): n is a, c, g, or t
  misc_feature (548)..(548): n is a, c, g, or t
gnagctccgcttcccgggttcacgccattctcctgcctcagcctccccagtagctgggaatacaggcgcccgcnaccgcgcccggctaattttttgtatttttagtagagacggggtttcaccttgttagccaggatggtctcgatctccggacctcatgatccacccgcctcggcctcccaaagtgaaaggaaaaaaanaaaaaaaaaaaaaaanaaaaaaaaaaaaaaaaaaaaaataaaaaaaaaaaaaggggccccatttcccaggatacctggacaaaaccattttttgagccttttgtgcccaaccatagtcattagtcttttaacagagccatctgttcatttatgtaacagacactgattgaatatctttcacgttctggtataaggctacaccgaggatatagtggtgtgcagtactgccatggtgcccaactgtatggnggnggnactcatagcaaacaccggttgcctcccaaagaacttttccaacacagcagaatctccttcattggtatcccataccaaaacacaggggtcatncaagatgcctc

SEQ ID NO: 683745 - DNA, 111 bp, Homo sapiens
accagctatgaaaggcaaagggccattttattcttcatagccacaatatacataacaatacagctgtttcaacatctgaagatcaattaatagtaatccatcacaccagga

SEQ ID NO: 683746 - DNA, 119 bp, Homo sapiens
ttttttttttttaattagcagagcgcgcgcttttatttaaaaaaacccgccagaataaccggtcataattagggagggcacggcttccgataattaaattctattaaaaaaacaccatt

SEQ ID NO: 683747 - DNA, 990 bp, Homo sapiens
ggaaagcggaggcagcgggggaagatggcggcggccgtccacagcggcgtgaccgtggagcagctgccgcaagtgagcagctgcccaaagaaggacattatcacgtttctgcaggaacacggttcagactcgtttctgtgcagaacaataaattattaggaacacattcaaattgtggccaagaaagttaaccaaggaccactttggttacagctataacccatcttttgggaaactaagcgtttcaagggtccttgacagttataagtacagtgtcttgagcatgtacaaacaactgtgacgctacagtgaggataacccaaaggaaacaaggtctgaagagaccctggatgagggccaccaaaaaatatactaaattcgtgtgctgaacaagggagataaaacccaattttcccaaacaagggacgactgtgtcactgtggtatacagggaaccactacaagatggggacgtgtttgggatactaatatgcaaacagtggcagggaagagaaaaagtgcaaggcttaagttatagggtcggactaggcaaaggttatccagaggatgggatgaggtctctggaaaatgagtaagggggacaggtctgactgggattggaccagattggttacggaacgaatgacagcttgtgcaaatccaccaaggcaatccttgaggactagggatatggtgaaagagggttcggctaggatttagacatggtactgggtgaaattaccacgtgtgatgtccttggaggggagccggcaatgggtaaattgtttgcaggtagaaaccttaacggtaaagtcaggaagtgagactatcagtgcaggtagagctggtgaaacacaacaggtgtctttttttttttttctctttttttttcttgtgttctctgttagacaaaggagcagagagataagagaagagagaaagaaaagaaggaagaggcgaagggaggaaaaggtcagacaaaggagaacaa

SEQ ID NO: 683748 - DNA, 700 bp, Homo sapiens
  misc_feature (16)..(16): n is a, c, g, or t
  misc_feature (18)..(18): n is a, c, g, or t
agcgggcgggagctgngnctctccagctctcaacgtctcaactgctgttcatcgccaggctctaagacagcgagccatgttccttcttctggtgcttctcactggacttggtgggatgcatgcagacctcaatcctcataaaatcttcctgcagaccacaattccagagaagatttcatcatcggatgcaaaaacagatccagaacataatatcaattttatcttcagcttctgttattaattcttatgacgaaaatgacatccgtcattccaaacctctgctagttcagatggattgcaattataatggatatgttgcgggtattccaaattctcttgtgactctcagcgtatgttcaggactcaggggaacaatgcagctgaaaaacatctcatatggaattgaaccgatggaggctgtatcaggatttatacacaagatttatgaagaaaaatatgctgacactaatattctcttagaagaaaatgacacttatacttggtttaattcagagtatcaagtcagaaaaagttcagaaaaaactgactttattaagttattccctcgatatattgaaatgcatattgttgtggacaaaaatttgggagtgtcagcagctatagtgaagtttcaagaagggggaatgctgtcgggactgagcaggcaatggcctaaaaacaataaaaagccctactaaaa

SEQ ID NO: 683749 - DNA, 633 bp, Homo sapiens
  misc_feature (16)..(16): n is a, c, g, or t
  misc_feature (18)..(18): n is a, c, g, or t
agcgggcgggagctgngnctctccagctctcaacgtctcaactgctgttcatcgccaggctctaagacagcgagccatgttccttcttctggtgcttctcactggacttggtgggatgcatgcagacctcaatcctcataaaatcttcctgcagaccacaattccagagaagatttcatcatcggatgcaaaaacagatccagaacataatatcaattttatcttcagcttctgttattaattcttatgacgaaaatgacatccgtcattccaaacctctgctagttcagatggattgcaattataatggatatgttgcgggtattccaaattctcttgtgactctcagcgtatgttcaggactcaggggaacaatgcagctgaaaaacatctcatatggaattgaaccgatggaggctgtatcaggatttatacacaagatttatgaagaaaaatatgctgacactaatattctcttagaagaaaatgacacttatacttggtttaattcagagtatcaagtcagaaaaagttcagaagagtgtcagcagctatagtgaagtttcaagaagggggaatgctgtcgggactgagcaggcaatggcctaaaaacaataaaaagccctactaaaa

SEQ ID NO: 683750 - DNA, 902 bp, Homo sapiens
agcggagtgccgagccgggactgtccagtgggagcaggcgccccggccagcgcagacctggaggcgcacgggcgccgcagcgctacgattcggcatcggggtagagcggagccgcagccccactgcgcagcgccaggacccactcgaccaaccgcctgcgttccttcagcaccctatgggggtaccagcgagactttagaacgagtttggtggatttcggagagctaggggaaatcacgggatccccgctcctgtgaccctcgtcgctcgtccacctcatatgatggagctaaccaactgtgaccgcatcacccaaccatcaactgacgagacgaagtttgcccagcagggtgaccctggtcgggtgattcgaacagagtgacgacactgctggagtctgagggttggcctaacttcttctcgtgatgatcgaggaagacgctggacgaacgacgggcagcaccgacagggttttggcgtgaaaggccccaccctgtggttggcgacctccctgtcccgggagtagccctcgagtcgcgtacgagtcaacaacgagctggctgggaccaggctaggtccatcagaactgatgagatcacgtgttccagcctcttacgggaggcccaggaagtagccatcttgttaccaagaggtagaagcgagtgtgaatcgtcatgggacgcctgaccataaaagcttcgtaactcaggtgcagaccagcaacttgccaggggctccttgctgatacccacggccgatccttggctggaagcttgcgtgtagtgcttgcgatgccccggctgccggtggcccggccggcgaccccgccccgcacctgggggccggctatcagtgggccggcgtggtcgattagtcccctctggcaccaaggggcgagatcc

SEQ ID NO: 683751 - DNA, 817 bp, Homo sapiens
gatatctgctcatctgccaggctgtggggtccccctggaggcacatgggatggcccacctgccacaaccacgatggcactagcagccccagggcccccagtgtcctccctcttgaagtgtaagcacttgagctgtaacgtgtggcagtgaaaggcgtaacgatttccctcaatgacaggagccccagaggactgtgaaggggagttataaaaatatacaaacatagatattttaattcgtggcatagttcatgtttttaagaaagtaattagtaattaattatctgacactgggtaaggacacgtggaagattgtgggagattataaatttatataaagattataatttatacagacatataaattatgatctatgtaaaatatcagtggggagaaacccctcattttccatggaaaatcgtggtacctttaagtacttcccaaaattagagacaatttcactgtttaacataatggtgggaaaatggaacaaaagaccatccataataatgacgcattaagggtggtaataaaataattgcagcttttttgggcaactcctttcttattgggttcggtgcccctttttttgcctgcataatggggggaaccaaaccgcgacctcgcatagccccacacgtgcggcgcgcaccccgcccagacagccgacgacacatcctgtgcgcgccacgtgcacgctgtcacgcaacccttcacaagcggccacgaacacgcactgaaaagggtcgagctcacgagaaccgcggcccagacgcccgacaacgacacccgacaggggacaccgcccaccgtattc

SEQ ID NO: 683752 - DNA, 902 bp, Homo sapiens
  misc_feature (16)..(16): n is a, c, g, or t
  misc_feature (18)..(18): n is a, c, g, or t
agcgggcgggagctgngnctctccagctctcaacgtctcaactgctgttcatcgccaggctctaagacagcgagccatgttccttcttctggtgcttctcactggacttggtgggatgcatgcagacctcaatcctcataaaatcttcctgcagaccacaattccagagaagatttcatcatcggatgcaaaaacagatccagaacataatatcaattttatcttcagcttctgttattaattcttatgacgaaaatgacatccgtcattccaaacctctgctagttcagatggattgcaattataatggatatgttgcgggtattccaaattctcttgtgactctcagcgtatgttcaggactcaggggaacaatgcagctgaaaaacatctcatatggaattgaaccgatggaggctgtatcaggatttatacacaagatttatgaagaaaaatatgctgacactaatattctcttagaagaaaatgacacttatacttggtttaattcagagtatcaagtcagaaaaagttcagaaaaaactgactttattaagttattccctcgatatattgaaatgcatattgttgtggacaaaaatttggtactctggtggtgtaaaggattttaacatctgtagcttggatgactttaaatatatttcttctcataatggccttacatgtcttcagacaaaccctcttgaaatgccaacctacacacacaggagaatatgtggcaatgggttgttggaaggaagtgaagaatgtgactgtggcactaaagacgttagtagaatattttttctaaaatttaaaaaatgttctagtagtaaagaagataaatgccttatctattagtaaacacagatttgaaaaatatattctttggaaaagaaaaa

SEQ ID NO: 683753 - DNA, 687 bp, Homo sapiens
  misc_feature (16)..(16): n is a, c, g, or t
  misc_feature (18)..(18): n is a, c, g, or t
agcgggcgggagctgngnctctccagctctcaacgtctcaactgctgttcatcgccaggctctaagacagcgagccatgttccttcttctggtgcttctcactggacttggtgggatgcatgcagacctcaatcctcataaaatcttcctgcagaccacaattccagagaagatttcatcatcggatgcaaaaacagatccagaacataatgttatttacatgattaccatagggaaagccatattttgtccatctcaaaaagcaatcaattttatcttcagcttctgttattaattcttatgacgaaaatgacatccgtcattccaaacctctgctagttcagatggattgcaattataatggatatgttgcgggtattccaaattctcttgtgactctcagcgtatgttcaggactcaggggaacaatgcagctgaaaaacatctcatatggaattgaaccgatggaggctgtatcaggatttatacacaagatttatgaagaaaaatatgctgacactaatattctcttagaagaaaatgacacttatacttggtttaattcagagtatcaagtcagaaaaagttcagaagagtgtcagcagctatagtgaagtttcaagaagggggaatgctgtcgggactgagcaggcaatggcctaaaaacaataaaaagccctactaaaa

SEQ ID NO: 683754 - DNA, 505 bp, Homo sapiens
  misc_feature (112)..(112): n is a, c, g, or t
aaaccaacccgggtttaaaataagcgtaccaccacgggaaggttcaaatggaaatccaaaaggtgtattttttctgaaggctgttggtagaccatttctcaagaccctaaanattatgtcttggaaaggacaatatttaagaagtataagggcccttgaaacctcttccaggcaggctttcctcccccctctagcaggccagtgggtcaggattctgggcgctcccaaattttggacactttggggcctgtccctttcttaccatagtcagtgtttctgccgattcctttggttgaagacaatttcacctcagattctaagcagcctctgtttgctgcctggaaccctcagcaaacctattcatgatctaaacccagagtcctggctctgggctgttgattgtcttccaaagttggtggtgaagctggaggaagtgaagagccctgcttgctatattctgacaacacaaaccttgggccagaaaaaataaagggactaagtagtg

SEQ ID NO: 683755 - DNA, 98 bp, Homo sapiens
ttttattggtactttattctatatgtttgaccttattgatccatttattattatgaacaaatgtattcatctgtggaggggttcaatgacttgaaatt

SEQ ID NO: 683756 - DNA, 348 bp, Homo sapiens
aactatagtcagcagcgtgaggaggcagcagaacacagtcagctcggggagggtgaagctaggaagaacaccaggtgggctccttttggtttcccagtcgttaggcgagcagaaggctagcccacatgactaccagcttctgggtttctcagtctggccgtagtctggcaaggctggtcacaggcttgcttcgggcagacgggtgcctctccttggggtggtattttcaggccgtattcatttcactctgtaagaattcagccgtgggtcagattctcccttattccttcctccatctcattttccgctaagtccctcatggcctggtttccatcttcccagatcctc

SEQ ID NO: 683757 - DNA, 124 bp, Homo sapiens
tcatgtgcctgcctcggacattcaacgcttgctgcgcgaagccccgcaggccatcggccttgcggcgcccgacatgccggtcggttcgcccggcatggattgtccggcctatggtggacgcaag

SEQ ID NO: 683758 - DNA, 211 bp, Homo sapiens
cgacgctcagcatgtgtcagcatcagcttcagagcagacattcggaagcaagcgtgatgtagagagttagggtagggtgctccagcttgtgagtcaggcaagtcatcaggcatagcgtcgacagaacgagctcgccatattgtgattccagttcttttaacgaagcatattttgaagtcccttcttggatttggtgatggtcgtgaagttg

SEQ ID NO: 683759 - DNA, 139 bp, Homo sapiens
tagatccatggagaatgtagcttgtttttgaaaagagccaggtgcagtgggtcactcctgcaatcccagtattttgggaggcgacgaggtagatcacctgaggtcaggagtttgagaactgctattgaaacttctaaaa

SEQ ID NO: 683760 - DNA, 821 bp, Homo sapiens
ctgcgactcctttgacgttgactattcgagtagtactcccgattgaagcccccattcgtataataattacatcacaagacgttcttgtactcatgagctgtcacccacattcagggcttaataaactagtatgcatattacccggtggcgtctaaaaccagagaaccagtttcaacgcatacaggaccgggggatattacctacgggtcgaagtgcgtctgcagaagtcgtgtggcagcaagaccacagattttccatgcccatcgtcctagagattaacttgcccgtaagagaatctttgacagatagggcccgatatttaccctatagcagccccctctagcccctctagagccgaagaaaatgaacccaaaaaacaagcacaaaagaacaagacctagacagagaacatagagacacaccagagaacacacaacagaagatagaaaagccgagtggacggcaactcccttcaagataggccacgcaccacccggacgaccacacgcgacgtgccggggaccaacccccgagtcctttccggtcatgagcaatcggagggaagccccgataccaataggggggtgccatataataggaatccacgagtagataccatggatcagaagcgtcgttgaccattccaccaatatatcatgcaccgacagctcgttttgaagcaaaggagcgcaaatgtaagttccccccattcacgtgaccacaaatctcgttccgaggtactaaaccaggagcatccccatacgttcgcaatcgtgaacggaagcaccaacacagagccggacggagtcaagtgaaccctc

SEQ ID NO: 683761 - DNA, 155 bp, Homo sapiens
atgttagatctcagtcagaactaactgtggctagtgtgcaggtagttgcttgctgcttagtctggagtgcatctcagttcagagagcaggcaagtcagactgtgtatgggtctttggctctgaggtccggaccactgttttggtttatcccccag

SEQ ID NO: 683762 - DNA, 295 bp, Homo sapiens
tgacaacatgaagaatgattgtatactgattgtgtatctgactgtttgctgaagtatatcagctgcacggagctttgggctgagactatgggtttatgagatatagaattaagtcatctgcaaagagacgtagtttgacttccctcttcctatttgaataccctttatttctctctcttacctgactgccctggccaggacttccagtactatgttgaataggagtggtgggagacagcattcttgtcttgtgtccgttttcaaagggaatgtttccagcttttggttatttcag

SEQ ID NO: 683763 - DNA, 151 bp, Homo sapiens
attactgctgcgatacctacgcagagatcgtggagagtggagcaggacaacaagatgacccccgggaaacctgggcatcgtgttcgggcccacgctgcttcggccacggccaccgaggccaccgtgtccctctcctccctggtggattatc

SEQ ID NO: 683764 - DNA, 140 bp, Homo sapiens
cccttcagacagccgtgacccccttcttcatgatgcctttaacaccgggtagctcaggcccatggactgcaagcctccagacttcttcttcttcttgttctagggcacgcaccatctcccgggtgtccggctagtcatga

SEQ ID NO: 683765 - DNA, 399 bp, Homo sapiens
  misc_feature (18)..(18): n is a, c, g, or t
  misc_feature (72)..(72): n is a, c, g, or t
  misc_feature (142)..(142): n is a, c, g, or t
  misc_feature (208)..(208): n is a, c, g, or t
  misc_feature (241)..(241): n is a, c, g, or t
  misc_feature (300)..(301): n is a, c, g, or t
  misc_feature (305)..(305): n is a, c, g, or t
  misc_feature (320)..(320): n is a, c, g, or t
  misc_feature (390)..(390): n is a, c, g, or t
  misc_feature (393)..(393): n is a, c, g, or t
tgttttaattacttgggnatccccaggaagctttcccagtgatctcctaccatgggcccccctccctgggancaagcccctcccaggccctgtccccagcccctcctgccccagcccacccgcttgccttggtgctcagccnctcccatcgggagcaggtcggctccacactggaggcccgggctggaggggcagtgttgctgttcanagattttgttccattggcgttgctctgttgaanttaatttcagtcttcctgattcttcccttctgtaaagtgtacattaccaagttccgtgnncctntatatatatatatanatatatatatatacaaactgtactctttttgcctttgtacattcaggcaagaagagaaaataaatctatnttntgagac

SEQ ID NO: 683766 - DNA, 172 bp, Homo sapiens
tggggagttggtggccaccgccagagagggttgattgcccggcactggctatgtctgagtccccgcggcttggtactgctggttcagcgaagcgtcacgtatttcctccattgaaggactgcagtctactcttaatggtcggtcctctcactccgggctccatgaccgccat

SEQ ID NO: 683767 - DNA, 195 bp, Homo sapiens
atttatttttttgaaatgtagtctcactctattatccaggctggaatgcactggcgtggtggcgggtgcctgtagtagcagctactcgggaggctgaggtaggagaatcacttgaaaccgggaggtggaggttgcagtgagccgagatcatgccactgcactccagcctaggtgacagagcgagactccatctca

SEQ ID NO: 683768 - DNA, 777 bp, Homo sapiens
tcgttgcccacagtctgtttgcatccctgtatcgtgttactcttatcttttctttctttgatgctatctgtccaacgagcggtacttcgtctctcttgtgtgcccagaggtgctgcgctcctcgtcttgcgtgctttgacatcactgcaacccccgtgctcctgggttcaggcgattctccgtggcccgatgcctcccaagtagctgggaggacgaggtgtgcagctgccgaacccagctctgtttctctttttccactcttcgtttttgctcatctctttctggggttgcctgtcggatttcttatctgcctgttttgcaagcaccttctcctgtgtccttgggagccctgagacttcttactctccttgcctccacccacgctccaaatggtgctgagctcacatccacaccccttgcagccgtccatgccacagccccccaaggtggccccattgccaaagcatgcctgcccaccctcgctgtgccttagtcagggtgtacgtgtgtagtgtgtgtgtagtaaaggaggagagtagaggagaagtagagagaaacatggggattggggccctctttctcccagtggaggaaggtgtgcagtgtacttcccctttaaattaaaaaacatatatatatatatagagaggtcacgaaatttccaatgggacgggaggcaattaagcaaccgacccctgggtcccataggccccagctggcactcagccttgccaagagattggatccagaaaatattgcaaggctaacagaaacacc

SEQ ID NO: 683769 - DNA, 225 bp, Homo sapiens
gaacttattgtccccattctacaaataccgaaactgaccgtccagagaggcaaagcatcattctccatatctcacaacctgtaatatgcacatatttctttcatccccacatctgtcaacctcccaatctgtaacgtccacccctacggggcttatcgcgttttctccctatgtgtggaaacgagatattgtgagatatatagacacaatactatgagattctga

SEQ ID NO: 683770 - DNA, 230 bp, Homo sapiens
cttaccttactgcttctctctctttctttcttctttctttctttctttcttccttccttccttccttccttccttccttccttcctttctctctctctctctctctctctctttctttctttctttctttctttttgatggagtctttctctgtcgcccaggctggagtgcagtggagtgcaatctcagctcgctgcaacctccgcctcctaagttgcccgccaatcgaa

SEQ ID NO: 683771 - DNA, 712 bp, Homo sapiens
  misc_feature (87)..(87): n is a, c, g, or t
  misc_feature (138)..(138): n is a, c, g, or t
  misc_feature (141)..(141): n is a, c, g, or t
  misc_feature (330)..(330): n is a, c, g, or t
ggtacccgccaacaagcgggaccgagcaggaatccgtatctgggaacagaatgaacggagaccagaattcagatgtttatgcccaangaaaaggccaaggactttcccgttcacaagcgcagccttcctcccacaggnaantcccggttaaggggggatggcgcttggaacccttggaacggggcaaccttggaacgcaacctgggggggtggccaaacacccccaaagggaacaggaaacttaaccggcggaacggcaaccttgggcgcccttacaaattcttcgcggcgccccaccccgtggtggccctttcccccaaaaacgggggncacaagggacggattcacccccatgtgtgggggcccaaggactttataagaccgaataacattgggcgccccccaaattcttgcgggggccaacgggcggcggcaaagaacgggctttcgaattctaaaaaaccgtccaggtgggaacggggtctttattcccatcaggggaaaaacaaccgggggggggagattgtgtaagggacaattttacaaaacgggccgatttttcacacggggagccccgagaaaattttgttacacacacccaggggggggacgggcaccaacaggacgcccctttgggggggccgttgggcggggaccaagggcaccaccacaaaaagaggcctcacaaaaacccacaggcggaccaattggc

SEQ ID NO: 683772 - DNA, 247 bp, Homo sapiens
ctctagaggatccaccgccgttcacaactatctgacattatattatggatctgtcgagctttctactcccattaaaatgtaagctccatgagagcaggaacctcatctggcttatccattcctctgaccctttcacctaatatagtggctggcacacaataggcattcagtaaacgtgtggaagggcgaggctcctaccagtaacatacactaagaatatttctgtgagagatagttgtaaatggcg

SEQ ID NO: 683773 - DNA, 350 bp, Homo sapiens
gttgatctagaggccccttcttatctccacccaccagaaaactttctacaatagactatggtattacttttgagtaagggaaacatagtcaaacgtcatgtttgaaggtgaagttaatataatgggagcacgggataagcaccttaaattctcaagatgggctgataacctacaactatgaaatgcaaatattggtgaaattaacaaaacagaactcactcctaactaaacctagcaatggcaagttgccgtgggagagctgatttcttctctacactaagcctaagcaatatctacaggcatcagggttgagtctgcacagtacggctcacctcctatgtcctcattac

SEQ ID NO: 683774 - DNA, 337 bp, Homo sapiens
ggaactcgtgtgccattttttccactctcatatgccacaggattgttgtggggaatttttatcttttttctccctactgtccatactgatttaattttaccaaatgtagacaaatttctttgtccacacattggtttgcccaccattggttctttcatacattttttttctggggtgaggtttgatcttagtgaagcctataccaggttatgggtcttactgtgtgatctgctgaccagaggatcagaatcgcctgagagcttgttggtgcaaggtttcaagttctaccccagacctactggattagcctctgggggtgggacacccgctttgtttt

SEQ ID NO: 683775 - DNA, 296 bp, Homo sapiens
tttggggattcccccgatgcaaaacccacaatgaaacatcctatcatggtagggtcattcctttttctaacaccaggaaaattaataattttcatgatttgagaagccttcgcttcgaagcgaaaagtcctaatagtagaagaaccccccataaacctggaggggctatatggatgcccccccccctcccccccatttgaaaaacccgtatacataaaatttaggcaaaaaaggaaggaatcgaccccccccaagctggtttcaaaccaaccccatggcccccatgactttttcca

SEQ ID NO: 683776 - DNA, 310 bp, Homo sapiens
gagcttaggagccttagccgtcgggctcatttcgtagatgagaccacctcctcaacaaaacatctacccttctcggtgtccccacagggcctgtgtcacatccctgagaagtaacatgccctccccctacaaacacagtatccacccggtcctgtctcccccctgggacttgtgggtcatcctggaagatactatccccaccctttccaggtccccaaaaacaccaccagggataactcattccgggaaggattccattcatctctaagacacaagtgtaccaggattttcgttcgtgccgccttgggct

SEQ ID NO: 683777 - DNA, 113 bp, Homo sapiens
ggcaagtcccggcgctgtgtcccttgtgctctcctcacctctcagaacgcagcaacacatgctgcccatttgcctggtgtcagcccagactctctcgtggcttttcagcactc

SEQ ID NO: 683778 - DNA, 227 bp, Homo sapiens
  misc_feature (106)..(106): n is a, c, g, or t
  misc_feature (156)..(156): n is a, c, g, or t
  misc_feature (163)..(163): n is a, c, g, or t
  misc_feature (210)..(210): n is a, c, g, or t
  misc_feature (215)..(215): n is a, c, g, or t
gtgccaaatgattttgtgtttagtaaaataatggtctaaacacatggatccattcaaacgcacaaatgtggaaagtattgaacacggaaggaaaggctttgaaagnaattactgcctcaggaagcagtgcccatggtatgcgaatttaacacagtnctacttncttacctaaggaatatcaccccaggaatgtcaaaaattaaaatcacntttantgtaaaaaaaaa

SEQ ID NO: 683779 - DNA, 263 bp, Homo sapiens
ttttaggtacctaaaacataattccagtggagaacaaagtgggaatgctgtgccacagagcatctcctaccgtaatgccctgtggaaaaaacttcatatcttcttgctctgtgccagattttctaaaatttctggctcctgtagatgaacataacacctctgagtttatgaacacaaacagtgactttgaatccacagcaaaccatcttggtgattctggtgcgactcctgtgcagacccggaggctatctggaagccgagac

SEQ ID NO: 683780 - DNA, 192 bp, Homo sapiens
ggatggtctcaggaaattaaatggaagaaggagctcggtctgtactacaggcagttcaagggaaagtgactttatcacatggttcagaacaaaagtgcattttgtatgggggagtaatcaaggatcgacataaagctaccaattcctgtctggaaatatttcattcaagtctttctggcaagcgaaggggga

SEQ ID NO: 683781 - DNA, 413 bp, Homo sapiens
  misc_feature (52)..(52): n is a, c, g, or t
  misc_feature (59)..(59): n is a, c, g, or t
gcactgaaggagtcttgttgggggtaaggattcagttcaaactcttttgtantcagttngctatctcttaagagatccctcttctccaaagttggaggcatcatgctacttgacttcaaactatactacaggctacagtacccaaaacagcttggtactggtaccaaaacagacatatagaccaatggagcagaacagagacgtcagaaataacaccacacatctgcaaccatctgatctttgacaaacctgacaaaaacaagcaatggggaaaggatctcctattcagtaaatggtgctgggaaaacaggctagccacatgcagaaaatgaaactggaccccttccttacagcttatacaaaaattaactcaaggtggattaaagacttaaaagtaaaaccctgtctctact

SEQ ID NO: 683782 - DNA, 119 bp, Homo sapiens
ataaaaactctagctacaaaaaagtcttaaataatatacagctgcaaacagaataaacaggtagaggagttaagtagtataaacacattattatccacactgatatgtatgagactatc

SEQ ID NO: 683783 - DNA, 847 bp, Homo sapiens
  misc_feature (7)..(7): n is a, c, g, or t
  misc_feature (105)..(105): n is a, c, g, or t
  misc_feature (107)..(107): n is a, c, g, or t
  misc_feature (109)..(109): n is a, c, g, or t
  misc_feature (113)..(113): n is a, c, g, or t
  misc_feature (121)..(121): n is a, c, g, or t
  misc_feature (127)..(127): n is a, c, g, or t
  misc_feature (131)..(131): n is a, c, g, or t
  misc_feature (133)..(133): n is a, c, g, or t
  misc_feature (136)..(136): n is a, c, g, or t
  misc_feature (138)..(138): n is a, c, g, or t
  misc_feature (162)..(163): n is a, c, g, or t
  misc_feature (175)..(176): n is a, c, g, or t
  misc_feature (181)..(181): n is a, c, g, or t
  misc_feature (184)..(184): n is a, c, g, or t
  misc_feature (190)..(190): n is a, c, g, or t
  misc_feature (194)..(194): n is a, c, g, or t
  misc_feature (200)..(200): n is a, c, g, or t
  misc_feature (207)..(207): n is a, c, g, or t
  misc_feature (225)..(225): n is a, c, g, or t
  misc_feature (227)..(227): n is a, c, g, or t
  misc_feature (236)..(237): n is a, c, g, or t
  misc_feature (242)..(242): n is a, c, g, or t
  misc_feature (244)..(244): n is a, c, g, or t
  misc_feature (255)..(255): n is a, c, g, or t
  misc_feature (261)..(261): n is a, c, g, or t
  misc_feature (282)..(282): n is a, c, g, or t
  misc_feature (296)..(296): n is a, c, g, or t
  misc_feature (302)..(303): n is a, c, g, or t
  misc_feature (320)..(320): n is a, c, g, or t
  misc_feature (337)..(338): n is a, c, g, or t
  misc_feature (357)..(357): n is a, c, g, or t
  misc_feature (362)..(362): n is a, c, g, or t
  misc_feature (371)..(371): n is a, c, g, or t
  misc_feature (374)..(374): n is a, c, g, or t
  misc_feature (403)..(403): n is a, c, g, or t
  misc_feature (405)..(405): n is a, c, g, or t
  misc_feature (430)..(430): n is a, c, g, or t
  misc_feature (432)..(432): n is a, c, g, or t
  misc_feature (458)..(458): n is a, c, g, or t
  misc_feature (467)..(467): n is a, c, g, or t
  misc_feature (470)..(470): n is a, c, g, or t
  misc_feature (493)..(493): n is a, c, g, or t
ggccgangcgccgcggtcggctctgggactcgtctggcgtccctcagaggcagaagaggcctggaccttggcgcacacagacccaggaacagatgagcggggatntntncatncacacctngctgtncacntnctncntggagcccaagaggcgatgggttnntggacagctgtnntttanatngctgtngctnaggttnatgactnacagcactggagagattntngtcagcttnnccctntncagcatagttnagattnagaaggaggctttacattttntttttagctccatnaccatnntggagaagggccatgcnaagcactggtttagctnnctgcggccaagttgaaatntggtntttagcatnatngagcattttttgagggagctgctgctgtntnagcctggagccgtggcagacgcatntnttccaaggacccggggcgaggagctnacgggactnatngctggttctcagaaacgcctggnggacacggcgagggtcctgcaccaccagggccagcagctggacagcgtcatgagaggcctggacaagatggagtcagacctggaggtggcggacagattgctgacagaactggaatctcctgcttggtggccctttagctccaagctttggaagacaccaccggaaacaaagcccagggaagatgtctccatgaccagttgtgaaccctttgggaaagaagggatactgataaaaattcctgctgttatttcccacagaacagagtctcacgttaaaccagggaggctcaccgtccttgtgtctgggttggaaatacatgactccagttctttgctcatgcacaggtttgaaag

SEQ ID NO: 683784 - DNA, 95 bp, Homo sapiens
ggtttgtgctaagcatgtgttagatttaaaaaattagtggattgactccacttgttgtgttgttttcattgttgaaaataaatataactttgtat

SEQ ID NO: 683785 - DNA, 692 bp, Homo sapiens
  misc_feature (3)..(3): n is a, c, g, or t
cgncttatctgcttgtcgcttgctacgagcaccgctccgtgttgcctgctttattttctcttcctgtgttggtgccgtctctttgtcttgtcttccttgtggggcgcgcgggctcgtaccgtggacggtccctcggtgaccccccgatttaccccccttgcctttccccccgtaggccgtccccgacttgtcgggacgcccccaacttgttgcccctaacgagttccctcgccgtccgcatatgccggtccccctcgccgggtgcgctaccccgtaccacttaccctgcgcgcccaaccgagtctttctgggcccgagtcgcgaccccccggccaacccagggaccctctccattggtcaacccacgaacctaaaccttcctgtacataccccccaatcagacccttcttgttgttacccagaagagtattctggagagagaactaagatccgaacggttacgagtatcccaatctgagcccggcctcacatcgtatcccgccctctgggagacgaggtgagtagatcacccgagttagagttcacagatcagccggacatgggaacccgtcgtctgatcccatcacggtatggtggacacccgtgatcccgtactggacagctaggccgagatactgacccaaggccgattcctgagccggagtcactccccgacttaccctggtaacggc

SEQ ID NO: 683786 - DNA, 167 bp, Homo sapiens
gcatttggcgaggcagctcaaactcctgacctcaggtgagcacccacctcggctcccaaagtgctgggattacaggcatgagccactgcgcccagccaacttgtgtttttttttttaaaaggtgaaattataataccaagataacagacaaatgtgcattgtagtag

SEQ ID NO: 683787 - DNA, 204 bp, Homo sapiens
agtgctactgcgtccattgtaagaggctgtatcgagtgagctctttgcttacgtccctcccactatctttaaagaattgctctccatctcctttggcaaagttcctttgcccatttgtcttatttctagtgaaacccctccaagtgtatttccaagtccattctgcatccagatctggcatctttactggagagcggtctcata

SEQ ID NO: 683788 - DNA, 392 bp, Homo sapiens
gtcttctatcagggtgatagtatggcccaaatggggtgtgaggagtcagttatatgtgagggatttcttaggtagtgggtgttgacgcttgaacgcttactaaatggggggctgcttgtaggcctactaggggtgtaaaatattttactctctactacaaggttaatacctagtgtccaaatgagctgtacctcttgggactaacagttaaatttaccaaggggattaagagggtcctgtgggcaaatttaacagttgacctatgattctatcttggacaaccagctatcaccaggctcggtaaggttttgtcgcctcttacctataaatcttcccactattttggctacatagacgggtgatgacaaattagctgttctagggtagctcgt

SEQ ID NO: 683789 - DNA, 1333 bp, Homo sapiens
  misc_feature (774)..(774): n is a, c, g, or t
cccacgcgtcgtgcccgcatgcggcacatccagcttgagccccgaggctcatgacgtggcgcgatctgcgctcaacgatcgaggtgcggctctctagacggcaccactggccatggtaagcatgcgggtatacccaccaatgacaggaagaacggtcgcagcagtctctggggctccttccgtgtgggtctgctcctgcgtggaagtgcgagcaaagcctgcgagcccggcaagccaggcatcgattcaacatgcgcttgtcatcgccctggtgccgtgccccagcgaccgaggaacctggcactagagccatctggtgcgtggcgctctatgtgaagaggctcgatgtgtgagacaggaatctcttcagcatcaacccgatcaccaatgcccagagcccagtgtggcaatgcatcgggccgacgatgcatccaacccgatgatgcatgcagccggttggtgggagatgctgtcgcaggggacgctagtgcgcctagcatcctcgaggaggctatcaccgtgatcatctctagccaggctccttccgggcaaacgaatcccctgcgacaatgcgaccaggcgacgggtgggcgacaactggccccgtagcgcacacgggcgcccactgtgggcaataaaggccgattcgggccttgcgaggactcaaacggcgtctatagtagttcgttgagggaccgaatattgcgccccgaggacagaaggtagctcctcaagcgactaacaaggggtaacctgggatcgcgaccgggaccntgcatggggcataacaggggcgacacataacggtgttcctaggcgcacattccgctccaggttaaggagcccccattaggttttatccatttggggccacacccaaaggtgagacattcaccgcaatagtaattgtgcgatctatggaatagaaacggtgagctaacataaatagacacttggttcaaaatcctagcttgctgggattcaaccatttggattggattgggttgtaaccaagttgagctatggcaaaatggggatgaggcccattgtgggcgagttggacgaccatgtgatcaaggcctttgacaagggttagtatgtacacagggctatatagcaaagtgtaaaatttcacgctgtgtaaaagtgtgacaactttaaggtatgtgagatcacaacaacatgagtggttggcccagggtaacccagtgaagagtgtgtcaatataacgtgggcgaaaatattgatacaaaagaagggattcattgacaaatttagtaagtgtcatttaacaaatacgcgagatactataactagacgaaggacatatgaa

SEQ ID NO: 683790 - DNA, 732 bp, Homo sapiens
  misc_feature (505)..(505): n is a, c, g, or t
  misc_feature (645)..(645): n is a, c, g, or t
  misc_feature (732)..(732): n is a, c, g, or t
gatgataaaacaaaattcaaatatatatacactttacaacagaaacacataacatgaaatgacaagaaaatttgaacactgaaagaagaaatgtttacatcccagatgaagaatcgcaaagaggaagtgttgctgtatggccaattaaaataagcaaccgatttttcccagaaaatacacgacttcacctatattctcaaaattgttggcaaaaagttaatcatagttgtggtaggcagaaaaatgatccctaaaaggatgctgacaccataatccccagcaaagaagcccacgacattaggactaaataaaaatgttaaccaggaagacatgagaatttaaaatgtgcattattatacagtatgttatcaaataaatgaaggaaaaaactcacagaattacaaagaggcactgacaaatacacaatcatagttgaaatacttgtctcacattgatctaaagtcaaccttttgtggtgttaattcccccagcatctctggactgnacagatgtggggccgagtaagtccaaaggcctcttctgcctcaggagcaacagggaagccagggcaggtctgggcagtatgaacagaacataaggaaggttccgtgaagttggtccaagttcctgcagataatccatctnggcggcaaggacagatgagaccaggagaatcagacactgaatctgccaggtcttgctctgaaacttcccagtctggttacacagcan

SEQ ID NO: 683791 - DNA, 398 bp, Homo sapiens
agcccccggccattgaaaacccatgcctggggtccccgggctcccccaggggggaatccccgggccaatgtcccccagggggggcagcaaatcctggggccggccggggggaggggccccagtaaaatttgtatattacccagcccggatttcagccaatttcccccttaatttttttaaaaaagaaaattttaaccaaggggtttttaacccttttcccctttaaaaagcatgggttgggggggttggggagggggggggggggtaaggaggggcccagggtttcccccccccaccccccggccctgccccttaatccagaccccgagggagggggcctttttaatttttttccccgaaaagaacttggttttaaatgggaaaaaattttgttccca

SEQ ID NO: 683792 - DNA, 195 bp, Homo sapiens
  misc_feature (177)..(177): n is a, c, g, or t
ttaccactttcgacctttctaatgtgcctttggagcagaccgtccacctctcatcctttcaactaccatatctgctggaaacaataaattttagattatatttttcaccatccatttccattccctcaaagtttgctatttgctttccatacattcacacttaagagccatttagcnttatagctgtcaccacat

SEQ ID NO: 683793 - DNA, 443 bp, Homo sapiens
ttcggacgacttgcgcaaagccttagtcaattagtgccagtactcctcagcgctacccacgctatctggctggtgaaaaccgcattataccttcagatcctgcgattttccaacggttcgatcatggactttgcgttattactgcctggccagtgccgtggtgctgtacggcgagcctaaatcggtgatcgccaccgcgagcttgctggataccgggcgtttatgcgcacggtaccgtctgcctcatttacgggcaatttcgatgtgaccctctcccactccaaggtgaacaactcggacattccgagcgagatccagggtcaagaaggtacgctgatgattgacaaaatttcggattgtcagggcgtggtactaacgccacgcggtggtcagcgccaggatctgacccatccgcaacatatcaataccatgctgtatgaagc

SEQ ID NO: 683794 - DNA, 240 bp, Homo sapiens
  misc_feature (11)..(11): n is a, c, g, or t
  misc_feature (58)..(58): n is a, c, g, or t
  misc_feature (160)..(160): n is a, c, g, or t
tagctccccanaattccccttgtgttgtggggaggggacccagtgggagataattgantcatgggggtggtttcccccatactgttctcatggtactgaataagtctcatgagatctgatggctttataagggaaaaccccttccgcctggttctttcantctttcttgtctgctgccatgtaagacgtgccttttaccttctgccatgattgtgaggcctccccagcctcgtggaactg

SEQ ID NO: 683795 - DNA, 164 bp, Homo sapiens
agtcggtccgtgttgagcggtctcggtagagcggctcacatgggccaaagaagcacggtaaaaatcctactcctctgagaccttcagaaaccagaaaatggaccatccaaacctgtgcgtgatgccgttatgtcaaattggatgcgctacgtatatgcatgaac

SEQ ID NO: 683796 - DNA, 188 bp, Homo sapiens
gcagatggatccacgcagagtagtagtttcactgaattgaagacacggaggctggagttgacaggacacataaccacaaaggaaggtatcctgcagcacaaaagtttcagaaatcttcatgcagcatctccaagactggtggtaaggatcaccagcagcccctacttgcagtcaggcatgcagcactg

SEQ ID NO: 683797 - DNA, 935 bp, Homo sapiens
tggactctctctgctgccacttcaccttcctgagagaggaccagcggccatcagcctcagtgactgccaccctggaggacaggtcacaacaaccgtattctggagatgaatggagagcgattccagaggggccatatatcggacactatggctgcaaggtagtatcagacacgactaatctctgtctgctacacctaccggcattgaggcattagtcctagtgggcaaaacagtgctgcgggtagaaagtgcactacatggagaactagccatctcttgagtccatgcaccgatgttctgagtccatagtctgagggccccatgatcaggtgacacaggagcgatgccacgtgctgcaaacaacaggacaccagtggtagatcgggagggaaagtcctggtggttgacactgccctcctatctattgagttcacaaggtccgattacctcaatgagtctgctagcaagcatatcagtcggtggatcttgtctacactgcttctctagcccctggcggcccccactggtcctgctgtctggtcgcatccagtctgtggcgctgttatctactgtctcggtgtacatcatgggtgtggcctatcagagaaccgtgaatagaggtcctttgggatcagggagccatgtagtaccatgtggttcattctctctgtcactcctatcatagacgcagtgcacttaaggggaggtccagggccttgggactcacctagtgtacgcaaaagcacgggacgaacttgcctggcctgcatcaggacctcgcggtgcgtgcgcacgtgtgtggatcagacggtacttgttggcctttcatagcaaccttggggctcttgttgcgagcgcagcctagatggccagctcctgggcgtgatctcctggctggtgcttggcgaggctggggccgggcgcgcgagggctcg

SEQ ID NO: 683798 - DNA, 198 bp, Homo sapiens
gttacgaagcatactgggaggctcaggaaacttacaatcatggcagaaggctaagaggaagcaagcagatctttacatggaggagaaggagagagagagagacagcaaagggggaagtgcacacacacacttttaaaccccatcagatcttgtgggaactcactcactgtcatgagaacggcaagggggaaatctggt

SEQ ID NO: 683799 - DNA, 128 bp, Homo sapiens
  misc_feature (99)..(99): n is a, c, g, or t
  misc_feature (119)..(119): n is a, c, g, or t
ggggcagcgcggaggccgcacgatgcctggagttactgtaaaagacgtgaaccagcaggagttcgtcagatttcttggcagcctgccgcaaagagtacngcgagctgaaaggcccccgnatggggggg

SEQ ID NO: 683800 - DNA, 347 bp, Homo sapiens
ataggtgggatggggctggagagatgctcctcaccttccagactgggcagccaggcagagtggctcctcacatcccagacgatgggcggccaggtagagacgctcctcacttcccagacggggtggcgtccgggcagaggctgcaatctcggcactttggggcgccaaggcaggcggctgggaggtggaggttgtagcgagccgagatcacgccactgcactccagctgatttttgaaaaatcttttgtagggatgggatctcgctgtgttgcccaagctggtttcaaatgcctggcctcaagcagtcctcccaccttggcctcctgagtagctgggactataagcg

SEQ ID NO: 683801 - DNA, 215 bp, Homo sapiens
ggctttttttttggggtttttttttcttttcccccggttaaatttgggggggggttcccccgtttttaaaccccttctttttcttttggggtacccttcttggtaatgggcttggggattgggtttaccccgtttggcttttcccaaagtttcccggggtattttttcctggggaaagccaatttgcccgttattaattttttttattttaatta

SEQ ID NO: 683802 - DNA, 331 bp, Homo sapiens
cgcgcgcacagatgatcaggaaacggaatacttaggcaagagaagcaggtgaactcccacgattcacctgaagcatccccacatcgattcttcaaagcaatatggtacagtaccgacttgacattgggccacaacaccacaatgaataatatacaactaggctaaggcaaagatatcttattacataacatatccttgtgaaaaacagcaaaactagttgatccatggtacaaatataacctgtttaacaaaaatcgttgcttacataacatctccttagatgagacgggcagagtggagcagaggacggagaaaacatgctaccataaaa

SEQ ID NO: 683803 - DNA, 1720 bp, Homo sapiens
  misc_feature (583)..(583): n is a, c, g, or t
  misc_feature (826)..(826): n is a, c, g, or t
  misc_feature (832)..(832): n is a, c, g, or t
cctacttttgtgtctctgttttgcgcttgtacgtcacgttctgactgtcggcgtacgttacattcgattcgcttcttggctctttgttttgttgtcctcttcctccctcctcgtccttcttgcttctcgtgtgttgtcgctgcttcggttgtgttaccattagtttcctctctgtggggggtcctcctcattgtaaaggtgcggtctcttcccacaatcatagtgtgtggcgacggcatatgtgttgcaccgcaccacccccgggagggggtgcgcgcgcgactacacatatatgatatccctcccctttttgttgatccccacctctgtggggcggtcactactttactctggggggttgttgtcacacaaaccctctcgtgggttacagtgtcccccgcgccgccactcacttgggggggccgcaccttcgcgtggactcctttcttcgtggtttgctcaccggggggttgttcctctcttcgctcccctctccccttcatatggtgctccccccctagtgatattcccccgggggggggggccaatactacctttgccgccctccccctatgttcagacnccgcgtctggtctctggtgaatttgaatattttgggtagcttcttgatagcggctcctctcctcgcggatgttgtagcgccgtggttgtgtttgtagtcgactagcggtctctccccactgacggtgagtgtcctccctcgggggatggattctccccgcccaagacgtgctattgtgttcgaaatgccctttctgcggggtaaaccccccccacagccgtgtttggtctttggcacccccgnctcatngggcctctccttttatctactaggccgcgtcgctatgcttggcgcgccttgcgcgtcccccttgagtgcctcccctagggccccctttttctgctcgtccttcgctgggccacctctctggcgcaacacctctgtggctggccccctgttctcatctggactggagagcgctcccatctgtgctacattcgagaggagactttagggggctcccgcgccccacacaccctgtctgtgctctgctctctctcctcgctcgccgtctgcgctctcgtcgccacacctctggcgcccctttctccacagccacgacaccgcccgccccgccccctccacgctttggtaagtgtcccccaccctctcccgcccctacacacctcgccacagaggagataacgccgcctctcctctggcggagacacactgtggggaggagaagaaggaaagacacagacgccggcgtatacacttatttctccgaggaaattgcccgcagaggagagtctgtctcgtttttatacgcctctctcctcgtttacacttttttggctgggagcaccggcagactgaccgggggcccaccccccgtcgcccccccgggcgtcgccggggcctctttgcccgcgagggcccggccctataaggttttgattgtgttttagtttaaagcgtgccactcttttaattttatttttaatactcttttttgtaagaatcgaaacttgaggcctcctcgtaaaccctaacaccctggaaattcgctctaggagttcgctagcggccccggccggccgaggctgccctcggcggggtgtggcccctgtcctttccaagtaattttcataattataaccaaacacccacagagaaaaaaattcttatctaaaa

SEQ ID NO: 683804 - DNA, 163 bp, Homo sapiens
tccacatagttgtagaccttggtgtagactccaggtctgttcttccaggcacagccattggccccagtgagacaactcctatggagcctgtccgtctgcatgaccacatggggccaccaagagtcacgctaggcctaacagcaacatagcctggggtaaccga

SEQ ID NO: 683805 - DNA, 454 bp, Homo sapiens
  misc_feature (190)..(190): n is a, c, g, or t
tcgggaaagacaaagcttacattatccctgtttaattgtcaaccaaacatctatcacggcatataattctgggatgaaacgaagctatggggtttgcatctgtacccccaccaaagaaatgagaaattgtctttatataaaagatatgtgtatatcattgctggttaatggtgctttagtacaatgctgngatttttggccaaacttgatgccagatacacgtatgcatttaatgtaaatgtaaatcttacataaaatgttagtatttgatataaaaattagctgggcatggtgccgcatgcctgtaatctcagttattcgggaggctgaggtaggagaatttctcgaacctgggaggcggaggttgcagtgagccgagatcacaccactgcactacagactggatgacagtgagatatgtctcctttccaaacaattggcccataatattgtt

SEQ ID NO: 683806 - DNA, 937 bp, Homo sapiens
  misc_feature (49)..(49): n is a, c, g, or t
  misc_feature (152)..(152): n is a, c, g, or t
  misc_feature (159)..(159): n is a, c, g, or t
  misc_feature (172)..(172): n is a, c, g, or t
  misc_feature (180)..(180): n is a, c, g, or t
  misc_feature (228)..(228): n is a, c, g, or t
  misc_feature (246)..(246): n is a, c, g, or t
  misc_feature (251)..(251): n is a, c, g, or t
  misc_feature (279)..(280): n is a, c, g, or t
  misc_feature (296)..(299): n is a, c, g, or t
  misc_feature (303)..(303): n is a, c, g, or t
  misc_feature (320)..(320): n is a, c, g, or t
  misc_feature (325)..(325): n is a, c, g, or t
  misc_feature (329)..(329): n is a, c, g, or t
  misc_feature (333)..(333): n is a, c, g, or t
  misc_feature (335)..(335): n is a, c, g, or t
  misc_feature (339)..(339): n is a, c, g, or t
  misc_feature (345)..(346): n is a, c, g, or t
  misc_feature (405)..(405): n is a, c, g, or t
  misc_feature (409)..(409): n is a, c, g, or t
  misc_feature (411)..(411): n is a, c, g, or t
  misc_feature (443)..(443): n is a, c, g, or t
  misc_feature (469)..(469): n is a, c, g, or t
  misc_feature (478)..(478): n is a, c, g, or t
  misc_feature (484)..(485): n is a, c, g, or t
  misc_feature (487)..(487): n is a, c, g, or t
  misc_feature (489)..(489): n is a, c, g, or t
  misc_feature (528)..(528): n is a, c, g, or t
  misc_feature (532)..(532): n is a, c, g, or t
  misc_feature (534)..(534): n is a, c, g, or t
  misc_feature (541)..(541): n is a, c, g, or t
  misc_feature (544)..(544): n is a, c, g, or t
  misc_feature (585)..(585): n is a, c, g, or t
  misc_feature (588)..(588): n is a, c, g, or t
  misc_feature (715)..(715): n is a, c, g, or t
  misc_feature (773)..(773): n is a, c, g, or t
  misc_feature (776)..(776): n is a, c, g, or t
  misc_feature (835)..(835): n is a, c, g, or t
  misc_feature (860)..(860): n is a, c, g, or t
  misc_feature (890)..(890): n is a, c, g, or t
ggagcaaggacgtcctggcctggcctccgattcgctggaattgcaaggnccctcccccagtaagggggctccctcaagggtgggaatagagtggaggcccgcacgggagttcttgtctgtgtgcaatccactttgtgggcgtgtgggtttangtctggntgggccgtttctnaacttganccctgaggactcatagtaccttaggggcggggctctccagtgggtggngcctcccgctctgagagnaaggnctcggggtctggaggacccggctttttnnggagggcgcggcctcnnnngganagggcgagccgagcggnctgtnaacngaanancttnaggaannagggctggcagtagggcttgccggcgcgctcctggaaggaccccttggtgagcgggcgnaggnanaaggtgcatgtaaagtggtccgggtggaagcngcgacccagggccgaaacgcagcggntggttatanggaggnnanangttgtgaacagcgaaccgcgtcgtgcgtggaaatggttnttgnanaaagggnggnactcgtgataaaaaaagctgcctcccgagaagggcgcgaanatntccctgcagacgaaacagtccgggtgccagagcgcgctgagcccgagatgtagttatccaggatggggccctggcagccctggcagcgcggggcgaacagctgcaggaagtcccggcggcagtaggngcggccctcgcgctcgtggaaaccctcatctccgaagggctacccgcaactgacgcancanaaatgctctgggtgccagtgagtgcccaaggcggtcaccatcttgtgtcggatgggctngttgcagaagccacatcttggcganaagcgctcaaagtagcacgcggggcagaanggggctccatccttctcgaaaagctgctgcctcccagggcggtggaa

SEQ ID NO: 683807 - DNA, 441 bp, Homo sapiens
  misc_feature (10)..(10): n is a, c, g, or t
gttctccttngcggtaaagaacttagtctgttctcccccctactccagcctgccttgctgtgcttgcctgatgcttagaatccacttttcccctggctcttcctgaggagaccttaagacacacaccaaggatttctagtctcctcttgggtgttagattcagggcacaccagacagcagatccctctctctggggaatccaaggcagagctgaggagacaggagaaagcagaagctgtcaagatgacaaagggtctatggtggaagatgtggccttcctcctccctgaggacttaataaattggattgaaataccaaccccaaatctggatagtcttaaggatcatagggggaggtagctgcacaaagaagcttatatctctggaaaacgaactggagttttaacaaaataattaaagaaagtcacctactggttttatg

SEQ ID NO: 683808 - DNA, 238 bp, Homo sapiens
agcagtttccggattctgatagcataactcagttatccagcagcttgaagaacaggtattccacctgtgcaatccacacaccaagcccagctggcggcagcagctgaaatttgatgaatgaaccagtcagctaaagcaaaacagagtcggagtgaaaagaaggcacggaaggctatgtcctaactggcgtcttcgtgcaggcttccgggagttactagagtctctatcagtatccgga

SEQ ID NO: 683809 - DNA, 125 bp, Homo sapiens
  misc_feature (1)..(1): n is a, c, g, or t
ngttctctggatctcttcgcatcccatcagccatgcagtggtggcactgtgcttgtgtcctgggtcttggcttgatgccaagtttgggaaaggagctaagaagacatcccactaggaagagagag

SEQ ID NO: 683810 - DNA, 178 bp, Homo sapiens
  misc_feature (15)..(16): n is a, c, g, or t
ggggtatgcgtgtcnnattcataagaacaggtaggttagaagtagggtctgtgtgacaaaactatgttgtgtacagttcagcgcgagagtgcgtcatatgtcgttcctagtgtagattgtagtggtgagggtgtttattatgataatgtttgtgtattcggctatacgtgtccggcca

SEQ ID NO: 683811 - DNA, 1051 bp, Homo sapiens
gttattccggcgcattttcgtttcttccgacaagcagatgtgaaaattcctccctcgggatgggagcactcaccggttactaggttttcaagtgcccgaccaacggagccccaacaactcccgaacagtagcaggcaattatggatgaaaaatgcttgctcttggaagacactttctaaacacccccctggcaattgcaacagtcggcttacccagtcgtcgccagtccaatgtacctcctatggataggacctccggccctggtgctcggatggtaaggctcatggcgtcgtcggtacgtaggtccccatcgtacgagggttatcctttgcccagcatcaccggaaggcatggactacgcgggctctgacctgacagcctacctgcatgggcctagctgaacagtccaggggaacgaattcaacccaggaccagatgggcatcgtggaggacatctaagaagaaatgctagctttccgttggccctggatcccattgaggagaagaaagtccctctcagtgatgcatacgatccgctacgtgctgccggatgggaagggagattacagctgtgcacaggaacaggttcctccgacctcggagatgttcttcaagccatctgctcatcaacgtccatgcagctgggcctccacacccaaaccagtgtccgtgccttaacaagtgagacatcgccctcaaactgggacctcatggggaacatccatgctctgctgggggcagcactgattgctcaagtggcattccgctaaccgtctgcagaaggagctaagcagcatgtgtctccaagtgacacccacgcaggtaaacgtgctgcgctgaaagagacatgtgtccgtgtggaacggtggctccatcctggcctcactctcagggtttccaacgcattgtgggtcacaccgctgttgagtacgaggaacaccggggcctttcattcctctaacagaaggtgcttctgaacggcgacgaggatggacactgcacatggcaagtgcctacccttcgacagggtgatacactccgagacacaggg

SEQ ID NO: 683812 - DNA, 782 bp, Homo sapiens
gggggtttggcaatctcactaaccaccattaaactgaggagagaacaaaaaaaaaaaaaacaaaaaacaaaaaaccacacacacttttgggtacggggtggggaggggaatggggagggggtttgggcaatcttcacttaaccaccatttaaactgaggagagaacaaaagaaaaaaaaaaaaaaaaaaacaaaaaaaaaaaaaaaaaacaaaaacaaaaaaaacaaaaaaacaaaaaaaacaaacaaaaacaaaaaacaaataataaaaaacaaacaaaagaacaacaaccacaaagaagagagagagagaggagcggggcgagtgtagtatttatctctctacctctcagcgaggcgcgcccattctaggcgtccgactcgtctactttttcgtctctcatcaacgctctaactcgcccaacataaataacacatactaatctatcaaatatacacacaaacaaaatcctaatagctcaccctactcccactctatctattatcatacatacaataaacacatcacatatcctatttctacatagtaacaactacaccaaacaacactacacccacacataaatacagaacaccatatacactataacaaacaaaaaaaaaaaccacctcctataatatcattaaaggtagtacaaacacatagataaaaacctccaaacagacagaaagacaccaaaacacacccaatctacccaaaaatacacttaaactaacataataatacaaatcacatactaatcccgacaaacacaactctaa

SEQ ID NO: 683813 - DNA, 122 bp, Homo sapiens
tctgctacactacctgcccatatcagtactgaaccacggaggctcacattcttctttaccaagtcccagcatcgtccgcagctagatgcccttctctccgataagagcccactgcaacttca

SEQ ID NO: 683814 - DNA, 287 bp, Homo sapiens
actctaagaggatccccgactgcatcaacgccgcgatgagagagtctccgtcgaaatgactgcatccaacgccgccaggaagttgagtgagaggattgcctgagcccaggagtacaagactgctgtgagctatgatcatgccactatactccagcctgcgcaacacagtgagaccctgtctggaggggtggggggagaaaaaaaacaccatagaaacatcccaaatgtccaataacaaattgtagtccattgtatggatggactacaatttgttattggagggtacc

SEQ ID NO: 683815 - DNA, 383 bp, Homo sapiens
  misc_feature (383)..(383): n is a, c, g, or t
taattttcccagatttaatcagaaaatggtttctacaataatggacacaactcacttctgggtccttcctccttctcctccttcaaaaaaaaaaaaaaaaaaaaaaaaaaaaaaaaaacctcccggcgcgccttcttcttctggggtggcggggagaagaagagagcgaagtaatagagaaggggcgcccgaggtgcgacatcagctcggtgctctcctcggccccagagttcttcttgtggaacacaagggggggagataatacttgcgcgcgcgggtccccccctattatagggggagcgcgcgattatatcttctatcgtagctaatacccgcaggaggaaacacccggcgtattatgttgtctccctcgggcaaccggn

SEQ ID NO: 683816 - DNA, 378 bp, Homo sapiens
tccactagtgtaggccttcttgggaaggaactaggaaagattgacttgggccaggcgcagtggttcacgcctgtaattcgagcactttgggaggcctaggcaagtggatcatctgagcccaggagttggagaccagcccgggcaccatggtgagatcctctctctattaaaaaaaaaaaaaaggaaccgaaatttagctgggcatggaagcgcatgcctgtagtccattgcactccagcctggacaacagagcaggaccttttttcaaaaaaaaaaaaggggaaagggtttttcgcccttcttctaaaaacctgcccctgggaaaacttaacatttgtccccaattccttcgggggggtttaaagccaacctttaaag

SEQ ID NO: 683817 - DNA, 654 bp, Homo sapiens
ggggattgatctagaattttttttgtctagtctgatgcctatataagggttatgcttccttcaataattaaccaagtagtactttattcttttaatgctcaaggaaactaactgttccttgaggatttgacaaaactcacctgtaaaaaccaccttgtgaagggacagttctttgataacttttaattccttccatggtaattggtctattcaggcttttcttcttcagtcaattttgataatttatatttgcctataaaatgatccattccatcaacatgttcaatttattagcacagaataaacccagaattaaaataaaaatgtcagcatataattatattcccatttttgcttttaaatgtgaatgtttattacctttgccagaaggttatttattttatttggctttttaaggaacccgcttatggatttaagaattctactatttctaatttaataatttctaccattatctatttactttctcttttcctaaaaggccttttgctatttggtttctaaccacctggggtggatgcgttaaacatttatttctactctatttaccaccagagggtatttatcctttttttttggggccagtttgggcctatcccataatttttgatatatgtatttggaaattttatt

SEQ ID NO: 683818 - DNA, 207 bp, Homo sapiens
ggcaggaagagagctagctggaagacacgtaccccctgaagatcaagagggaggtcgccctggtactacatagcagtcacgttaggctgggacaattcctgtttacagaggactataaaacccctgccccatcctcacttgggctgatgccattttaggcctcagcctgtctgcatgcaggcgctcattaaaacagcatgttgctcc

SEQ ID NO: 683819 - DNA, 138 bp, Homo sapiens
tctgaagttgctatatacgtctcctgtcacagaacacactgcttagacatcttgctagcccaatatccttctcaatagagaatatgagaatctgtgtcttaccatagaaagtctaagttcacgtgtataggatctcat

SEQ ID NO: 683820 - DNA, 253 bp, Homo sapiens
ctgtagtgacttggtttacccgactgtggttgaatgggacaactcttactccgacagcacgattccttttgcctgagcagcacctccacaagggttggcctatacggctgtgcccaaatagactttcttatactgtttatcatgccatttctggtctcgtcggtaacttaggagcttcctagcagtacgaagtccaatacacttgcccatcctgtacacgccacggtcctgagcaaaagaagagggtggtcgt

SEQ ID NO: 683821 - DNA, 129 bp, Homo sapiens
tcctggtacgggagttggggatgtctctgatagacttcagttcaacagatacatatttggctcacatactgaaaacctggatctttccaacctggtttcttttgataattttggtctccaggggtacct

SEQ ID NO: 683822 - DNA, 212 bp, Homo sapiens
ggtgactcttgaggatcccataaatctggaagtcggattgtcagcatcctagcatccagaggctcgcgccttctgtactgcccagagcacagttccatttagactccactgtcaatgaattgatagcagcgctcagtatccatatgcatagttcaaaacaggtttatacattgtgatttccctttatttacttatagggcatttctctttct

SEQ ID NO: 683823 - DNA, 896 bp, Homo sapiens
gagaagtggcgatcaaaatgggtatcagttagcagagcaatcaagccctttgcagaacctggccgccctccagactggttctctcaaaaacattgtgcttcccatgatacatggtggggagatacagcaaacacccaatactgttgcagcctcccctgctgcatcagtgagtcaacccgacaactgtgttcccatggaggctgtgggggatccacatactgtgactgtttccatggacagcagtgaaatatccatgatcatcaacttctatcaaagaagagtgttttcgatcaggggtagcagaggctcctgttggatcaaaggctcccagcatagatgggaacggaagaattagatctggctgacgaagactggcatactcgctgtgtcttacacaggtgaagcacgctggacttccgagcactcgtcggacgaccatcattggccatcatccgacggacaacggtacgatgatcatcctgaacgctgctggcatgtggcacgcacgcggacagcagcactgtcattctcgcgaagcacacactgctgatcctcagtccctgcctggcccctgggagcatcctatccagcaggagcgggacaagccagtacctctccctgcaccacacactggacggctccaagccaggagcacgactcggacctccgacgcgcaaccggaccacacacgggaactacatgacactggcggacctcagggagccccagatgcagagatcacccgcggcaccctgccacaaccagagccaccccactccaccgcagccggaaatagacacctggcagccgcccaagcccccaagtctgcgccccacccacactcaacgcactcggacccaccacgacgaaccggccaagccctgccgcgccccacc

SEQ ID NO: 683824 - DNA, 1131 bp, Homo sapiens
gcagagaagagaggattggacctccagggcttcctgaatgatctggagaatgctcctgagttactccatatgtacgtcctaccacgcctgtgcacacaacccaactgggattgacccaactccggagcagtaggaagcagattagctactgtcatagaagcaccggtaatctagtaaccccattctattgactcagactatcagggcttcgcatctggaaacctaggagagagatgcctagggccattacgactatatataagtagtctgaaggcttcgagttacttctagtgcccagatcctatactccaagaacttacggtgctactacaatagagagagtaagggaatactagactgtggttggaaaagaacctgagagcatacctgcaagtcctttacccagataggagaagatcgtgcggattactatggtaccaaatccccccgcccaggcagcacgaatatgaggccagcaccctctctaaccctgaagctctctatgcaggcatggcacaggtaaatagtgaagacaacaggctgaccggattactgaccatgagatcatgaactcaggggcacaaacctcaaaagccacgacaaaaaacccagagagaccggggcaaccacgcatcaactgaaacaaaaatagagcagtgtacagcacaacacaggagtacgacacgcacaaagcaaggaaagaagatatcaggacaagtgaaaaaagacacacatctagccatgatagaccacaagaagagacgcaaatcacaacggaggagatggggactcaacaccacccaagacacatacgcatacaacgtggaccaccaaccaataccatgaagaacacaaaccaaaaacccagcgacagaaaacacacccagcacagaaacaaacaacaagacagaacacaatgaacaataacggtgaaacccaaggcaggaacaaacactcacggtctcgtaaccaggaaaacaagacaacaagaagaaccagcaggcaagaccagagacaagaaccacacgacaaccaggggacccagatatagaaaacacgcagcacgaccatggtacacgagaaacacagagaccaaccaagacgaactacaaaaacagcgaggacaaccaa

SEQ ID NO: 683825 - DNA, 1677 bp, Homo sapiens
  misc_feature (213)..(213): n is a, c, g, or t
ggagagaagggcggcgtctacgtctccaaggtgaccgtgtgggagcatcgctcacctagtgctggacctcggagtatggggaatcagattagtggagttcaactggtcagtaaaaccatggcggtagacgacacatcgggagcatggagagcagcggcatcactcgatcgaggcagacgagctgttgatacgcattcagctcaatcacttggncccaggtaactaatccacgcgctatggtagcagcgcaaggcatgcaaggccagtccatccttcactcgaggtccgcgagtcgtacaacattcgcttgtgcacctcgccttgactctgagattaccacgcatattacacaacattcgttctcaaggggtaccaccggtggtcggcaaccatgtcataccccggtggcaggccatttccacgtccttgttcacactcagaacgcacaaacatgaaatgaggaaggccagagaaacgtaagagggaggcacataagacagcacgcacgcaccaggtctcgagagcccagggaggccaggacgtcccacgaggagttggccgggggacgaaatgcgcgagaacaatgacagaaccactgtggaagacccaacgcctgttggctcctctgcagtccagagacagatgttccccaagccgttggacgccattcgtgtggctatggcgaccgtatgctgatggagtaggggtaaacccttgcgaatgggcgagattggtgttcgtgggcacctggcagggttttgcgcacggagtaatggaacgcatggtgcgtcttaggtccctataacgtgtggttcccttggcaccccgtgggtctgtccgtgtggccccaagatgggggggagcgtaccacacttccctatggtgcgacgcttaattatgtgcaaaggcgctgagaggaccggtagcggagtaagggaacaacaggtacgtagggaaccgacaccaggcctacagtagcctcgtgggacgaaacctgcccgttggggattcgccccactttgtcgggacgaattgagggggtgtaaccagctccgtgggacacgggctcgcacaagctggacgcccggcgctgcggcaagagagagcggttgcgcatctgggaaacaggggctcaatccagtggggcacctggaacgtttgtgggcatcacagcaacgcgttactctaaccggacatttcaaggcaggtccaccgctcggcttcccacatgccggggattggtggccaacagagcttcccggtggtggcgacaccaatcactatgcacggcgagtcccaaccggacaacggtcggcgcacaaggttcctcgccacaacgacggtcgcattggcagccccatgacaccacctggcggggaccaaggactcggggggcccacggggctattccgctatgggggccacgcatttgccgcctgggacacacttatacccactaagataatagcaactatcgcggccggccgggcacacgagatcccccacgcagcaaagcaatacgaagtaaggggcccccacagacatctccatcagcacgacactgcccactcggtcatccgcgatactgacgaacataaaatgacgtcgcgacaaacagacgtgtctgagcagtagtgacagagccaactaacgagaagatcacctcgcatacagtcg

SEQ ID NO: 683826 - DNA, 264 bp, Homo sapiens
taggcatagcctcatggtatcctgaactccggggctcagtaatcctccggcctcagtctcccgagtagctaggactacagtcatatgccaccatacctagctaatcttttttatttttattttttggtagagatgggggcttcactatgtagtccaggcgggtctcaaactccgggcctcaaatgaccctacggcctcagcctcccaaaatgtggggaccacaccatgagccaccgtgccgggtcccaacttctttttttctgc

SEQ ID NO: 683827 - DNA, 316 bp, Homo sapiens
  misc_feature (36)..(37): n is a, c, g, or t
gcgtcgactgtgagggagtgtgagagagtgttcacnnactgcgttagatatgtgtgagggagtgtgagagagtgttcacacactgcgttagatatgagtgagagagtgttcacacactgcgtgagagacgagtgagagatgagtgagagagtgttcacacactgcgttagatatgtgtgagagagtgttcacacaccaccatcactgcgttagatatgtgtgagagatgtgtgagagagtgtgagagtgttcacacactgtgtgagagatgtgtgagagagtgtgagagagtgtgagagtgttcacacactgtgtg

SEQ ID NO: 683828 - DNA, 235 bp, Homo sapiens
gctcactgcaagctctgcagttttttttaaatgtagtacatttgtgccaggcacagcagctcgcacctgtaatcccaacactttgggaggccaaggagggaggatcccttgaggccaggagtttcagactagcgtgggcaacatagggagaccctgtctgtacaaaaaaaacaaagatttgccaggcatgctggtgtgtacctgtaaccctagctacttaggaggctgatgtgac

SEQ ID NO: 683829 - DNA, 1288 bp, Homo sapiens
  misc_feature (1288)..(1288): n is a, c, g, or t
ggctggaccaggcgtgatgcggtggtgaggctgagctgccttcccgcctataacgacttgattgcaaatgttcaggcacagcgaccaattgtggcgatctggacgtggacagcagcgtccccgtgtagcaagcacatgtgcccttacctcctggagtgaacgtaaacactcatgctaagcacccgattgtgccaggcctatcccaccgtcgctgtcgtcctgaattcctagtgctttccgggcccgatctgcgcatgttgtgccatggcccaacatgttaagtattccaactaaaccattgtggaagcaggtcttctcagtgttcctatcatggaagcagctcgtctcggacctgtacccacagttgttgggtcacagcaggttgcaagcccaatcatactcctgtcttacatggtgctctgctggccattgggttagtgagtgtccagttggcaccaatcgtacggaaggcaactttgtctagtccccgactccatgaacgaacggcacgcatcacgtttcagatttggcaatccgtggctcctcgactaggaaaggggcttttttaccccaaaggcactgtattaaggggccaattaaaaccgaaccggtcttgtccagaagtccgggggccagggtggggtggacttggctggataggatactgcttgctactcttggcgtccgcacatgagggtttgcgcttgaattcgcaagggctgggacgcacagaaaggttcgacattttccccttgtcaagctccggctttgccctcgcctatcacagaactcgtcggcatcgaccccatgtggacgattcagaacctcccgaggggtggccctgtcagcaaatcctggcttccggtgccaggggcacttgtaattcttattagctggtctcaggaggcacatcccgggccagggggatagaaaagggccaaagcgattgactcgagaggaacggtttccaaccagggaactcctacccgtttcttccacgtaacttatgcctaagagttctcccaaacgaaaccagtttccccggtttggtagattcccctggcgctggggcccgtggattccatggcggattcctacttccagtgaaccgtcatcaaccgaattcggcatcccacttgagtagtggacaacaagaacagcttgcaactccggaagaaagtcctagagagacacgagagcaaactctcaaggattagatatgcaaaccggttgtcaagaaataaagggccaaacgcgcccgcctgagacaccgctggtgatagaaccn

SEQ ID NO: 683830 - DNA, 445 bp, Homo sapiens
gatggtgaagaagaggagttgatgaagaagatgatgaagatgaagatgtagaaggggatgaggacgacgatgaagtcagtgaggaggaagaagaattggacttgatgaagaagatgaagatgaggatgaggatgaagaggaggaagcaaggtgggcaacaggtgcaacaagcaggcaagcagcagcaaaccagcatgcatgcaaggcagcaagatgcattaagaccccgagaatgacctgccagcaaacagcaactgttcagtattggttcggactgctcatggattattgtagctgtttaaaaaaaaaaaaagaggtagccggtcgatccaaaccccagtgacacccacccacccaaagaagccacacgcatcgtccccctgtgcacatcaccgcctctacctcaccatggctagctcccctcctgtggctcacatctcaccac

SEQ ID NO: 683831 - DNA, 169 bp, Homo sapiens
  misc_feature (96)..(96): n is a, c, g, or t
gtgcatccccggagttcagaaacagcagctgctgggggagcgtggcgaggagcactccccccttcagcgggacagcttgatgccctcttatgaggncagcgagagattccgccaagcctggacaggatcttcacagcgtagctcccgccacctggaggaggactatgca

SEQ ID NO: 683832 - DNA, 102 bp, Homo sapiens
ctacaggatctcggctgagcagcttggcaggaggggcaagttggaacagttatctccagaagaagaagagaaaaggagaatccggaagggaaaggaataaga

SEQ ID NO: 683833 - DNA, 142 bp, Homo sapiens
  misc_feature (5)..(5): n is a, c, g, or t
  misc_feature (57)..(57): n is a, c, g, or t
  misc_feature (138)..(138): n is a, c, g, or t
cctcnagtggtactaaattgatgccttaaatgtattgataaggtgactagttagccntcagagatacagtatcagaaatagtattattacagaagcacccaggacattttatttctctttgaataaatctattgtttnaccc

SEQ ID NO: 683834 - DNA, 782 bp, Homo sapiens
  misc_feature (1)..(1): n is a, c, g, or t
  misc_feature (105)..(105): n is a, c, g, or t
  misc_feature (128)..(128): n is a, c, g, or t
  misc_feature (131)..(131): n is a, c, g, or t
  misc_feature (135)..(135): n is a, c, g, or t
  misc_feature (180)..(180): n is a, c, g, or t
  misc_feature (184)..(184): n is a, c, g, or t
  misc_feature (191)..(192): n is a, c, g, or t
  misc_feature (314)..(314): n is a, c, g, or t
  misc_feature (434)..(434): n is a, c, g, or t
  misc_feature (567)..(567): n is a, c, g, or t
  misc_feature (569)..(569): n is a, c, g, or t
  misc_feature (756)..(756): n is a, c, g, or t
ntaagaataaggagtagatgggaataaaggtgcgaaaaaaaaggagaaggtaattttttgtatttttagtagagaaagggttttaaggtgttaggaaggatagtntggatttaatgaatttgtgagangantgantggggttaaaaaagtgatgggattaaaggaatgagggaaggtggntggnaaagttnntattttagaaatgagaggagtgaatggaaataggaaaaatgaaaattttaggaattgaaagtggaaaaaatttttttatataaaaattattgcaaataaaaaaaattgggttttagtgttgnattttaaacagaggtaaagttgtgcgattttagcaaggatttaaacaaagcaaaagaaaaacaccaatcctaataacccccctccttgccccgtctccacgctgtgggagaaggctctancccctcagtcggacttctccttctccttcatgtgcaagaagacgatgctgaagatgaagagccccagcatcatggagaaggcgctggcgtagtaggggtaggccgaggggatgaagcgctcatactgcgtgtncnggagtggccgcacggatacctgagtggaagagtacaggtgtgtgtagcctagccggttgtaatccactttaaactggaatacaccatacacgtcgggcaacttgaactgaacactgtatttgccacctttcttcttcaggaaggtcctcacaaaaggatcaatgcggacaaactccagctgaatgtnatcgccatcaaaggggacccatttgc

SEQ ID NO: 683835 - DNA, 1009 bp, Homo sapiens
tggtttcgtctgcgagccgctattttgggtgccacgcgtgtgcgcccgcgtcatgtgcgccgcccgaattgtgtcgtcctcagaagcgcgccacaatatggaacacggtcccagggaacgtttctctacatccccggacaagtgtgggtacccgtagacaacccctttggaagaccgcaacacccacgcccttggtgcgacagcccggccttccataatggtccctgccccccgccccttttcggggtgtgggtgccctcctcctctcgcgctgcccgcgccaggcctcttcacgctgggggactctccagactctgctggcccgaggacacatacaaaacaccggcacaacagcgcgccaccacaatgaggacggtcgcccagttttcgtccgccccccggatattgctgcgtgcccccctctttccccgcccgccggagttgccctacggggcaacccgttgttcccaaagcccccatttgtgggggcccttttttccctccaggccccggcggatgaggattcccgcgagagagccccgtgcggctatcccccagtgtaccatcacgacgcccttggcagaatttattgagcgccactcttgcctccagggggcgcagcgtgagccgcccccctcatttgcccccagtctggtgtacacacgcgaagagggtcgtgtgagggcgcgccccaacacaaggcgggcacacttgtggcagacggcatttctcctccccatccccacactcgggggagcccatcccgcccaaccactgcgggcacccgacaaggaggggggccagaccaccacaaaggaacccacaaaaagggacggccaaaacaggggaaggaacacccctagcccgcgagcgtcgtgaggcacaggcgccggcgccttgacgagatgagaacatggggccttcgacgacgcacgtcgtcaacccccccgacgctctcccccccccccgcttttttaaaaaatcgtttctttttccccaccacaaaaca

SEQ ID NO: 683836 - DNA, 126 bp, Homo sapiens
acgactttgaggcgaggctgacgtgaatggcgtcgactggtataggggcgaagataatcgaacattagtagctggttcctccgaatccctcagatatggctctgagaccgagcacccacccggcgt

SEQ ID NO: 683837 - DNA, 429 bp, Homo sapiens
tccatgactttttctaaaaaaaaaaaaaaaaaaaaaaaaaaaaagaaaaaaaaaaaaaaaaaaaaaaaaaaaaaaaaaaaaaaaaaaaaaaaaaaaaaaaaaaaaaaaaaaaaaaaaaaaaaaaaaaaaaaaaaaaaaaaaaaaaaaaaaaaaaaaaaaaaaaaaaaaaaaaaaaaaaaaaaaaaaaaacgcggggcgccggttgggcccatcggaatttaagcccgggaaaattttggggggggccccaaatttaggcctcttgggccaaatccccttttggggggctggataaaaagtaagggggccggttttaaaagggtttccaaggggaaacccggggggaatcccaattagaaacccttgggcggaaatctccttttgcaacgtgggggaaaatctggaggggccccccaggtgggcccttac

SEQ ID NO: 683838 - DNA, 282 bp, Homo sapiens
ctcaggatccccggaggcgttgaatggccctggaggctttgaatggcccggaggccaatggcctcttattacactacacgtctacgttttatctcatttccactagttcctatcaataggagctgtatttgccatcataggacgcttcatttcactgatttcccctattctcaggctataccctacatcatacctacgccaaaatccatttcactatcctattcactcggcgtacatctgcctttcttcccaccacactttctcggccattcaacgcctccg

SEQ ID NO: 683839 - DNA, 258 bp, Homo sapiens
gaaatggccagaaatacagtacctgcttagacgcatcggtttggctcagctgagggatcataggagtgcttttatggtgttgaatttctttgaaaatttctttagaactctagagcccagtgccaggctggagtctttgttctcccacttcctagttggctgtccttcagcaagtaacttaatttctagggcctcaatttcctcatactgcgaatatctagtgcccttattccaggtgtaccagagctaccaattacg

SEQ ID NO: 683840 - DNA, 273 bp, Homo sapiens
tgagtataaagcctaggaagcaattgatatcatagctcagaccataccttttatccaaatggttcttatttggccaggagtagtaatgtaacaagtatgggagattatcgccgaagcttggtaggatatgaatataaacttcagggtgacagaaaaatcagaataggtgtaggaatagaagggggtctcctcctccggcgtgctcaacaaaatggttggagttagaaggttcgcggtcggtaagtagtattagtgattgccagcagctaagga

SEQ ID NO: 683841 - DNA, 510 bp, Homo sapiens
  misc_feature (7)..(7): n is a, c, g, or t
agtattntgagccgaaaggaattcagcctctgaatccctcctgggcctggggtggagcagggtgaacacatacggaagcgtaaacacagcgggccgacttcagcctgcagctcagccctgcggtctcctgggcaacgcgctgcgtggggacattgtctctcacctgaaaagctgcttatgggcccccacctcgtcgtgacggcagcccccttcaggtgaaggccaaggcgcggctcttctcctcccagcctgaagcagatcctgttgtctgcaagtacccagcatccgatggcttctcacggcctccaccccggccacctggtccgagacactgctgtctccggcctggactggtgcagtagccagcagctgctgctctcgccctctatggggcagcctcacacggcccgtggtgcccctgctggtgctcagtccttgtgcgctccctcccttgagcatgtgcgggacctgtggtttatctcaaatgaatagaaaatggcaaaagcaaaa

SEQ ID NO: 683842 - DNA, 319 bp, Homo sapiens
gcgaattcactagtgattgtgagctgagatcgcacccggccattagatttctttctaaaaagctttcctatgtaaaaattacttttcatgtcaaagataggagcagctggtacatggatatggagcagctggtacatggatatagcagcacacacacacgtacaaaatagaaacagaaacacatcatgaatttaaaataaaaaaataaaattgataatggaagacatcctcatctcattttctttgatacaacatctcactgttatccaggctagagtgcagtggtgcgatctcagctcacaatcgaattcccgcggcc

SEQ ID NO: 683843 - DNA, 225 bp, Homo sapiens
cggcgcgaggttaacttacaagtcttatcttcggaagcataatcacacgaaacaacatgcaagtcagaatatgtatgtaatgtgcacaagtcttcttagggaagcaggtgatggaagtggataatgtacttggcactccatcactccactgaaccacccattctttttttttatctgtgttctcttgattttacaatttagtatacatacataagcacacacatt

SEQ ID NO: 683844 - DNA, 93 bp, Homo sapiens
tgggccccaaggttttaaaagcattccctttttttccattgaaaaaagttcgcttgtttgggcccattcaaaggatcaaaataaaatttactt

SEQ ID NO: 683845 - DNA, 239 bp, Homo sapiens
tgagcacattgtagattgcttttattgaacaggtactttaagactgttgaagcattgtttttaatcttaagaatgtgaaggttgttattagtttttctgcttttgcaattttgtttatgaaatctgcatactttcaggccatgtatgtgaataattccagcgggggacttgggagataattcatacggggaattcttaaaactgtgctcagctattaaaatgattgggctgttgaaaca

SEQ ID NO: 683846 - DNA, 206 bp, Homo sapiens
  misc_feature (5)..(5): n is a, c, g, or t
ttcanggcagcaggttgcagtgagccgagattgtaccaatgcactccagcctggataaacagagcaaaactctgtctcaaaaaaacaaaaaaaaacttattgagtttaacacaagattttccaaagagtgtttgtgtctcatttcatctttcacgtaaactgttcaattatttataacgtatcgtatttatccaccaccaccccta

SEQ ID NO: 683847 - DNA, 141 bp, Homo sapiens
aggccttgactccaggatgtggtgtgctgtcgcctcagaaaacccaaaagcagaggtctccacgatgtcaggctgtttgtattgtacaaacctcaaggagggttttgggtgggggcccaaaaacattttccgggtgggcag

SEQ ID NO: 683848 - DNA, 174 bp, Homo sapiens
  misc_feature (20)..(20): n is a, c, g, or t
gtgaaaagaaggccggaagnttatgccaaactggtgcttgggcgggttacaggagttctagagaactatccggaatttaggaatatcctttggcatcacaaaaccagatgttacaagagccctgttaagatactacatagtttttggggagccaagatggaagtttatcccagt

SEQ ID NO: 683849 - DNA, 185 bp, Homo sapiens
gtaggggcagagaatgtgctggtggtagtagcggaggtggtgctggttgtagtcgcagaggttgtgcgtggtggtagaggcagagatgtgctggttgtaggggctgaggttcttctgggtgtaaatgtgagtcatggttttagcattgtagaaggacaactgtcctccttcataatccaggtata

SEQ ID NO: 683850 - DNA, 101 bp, Homo sapiens
actttgtggaggtcctcgcctgtgctggaggatgcttaaatggcagagccaagcccagactccagacggacatgcggataaggcctgctgcggcagatgga

SEQ ID NO: 683851 - DNA, 232 bp, Homo sapiens
  misc_feature (1)..(1): n is a, c, g, or t
ncgacccagcgctgagaatacaggatgtgctggcttagactgacttgaagaagatccctgtacttttctgattcactgtctttcatatctatgttggtgcctcttcagattgcagtaagggtttgtggaattttttttttttttttttggaaatagggttttgctttgtcgcccagcctggggggcaggggaacagatctgggccttccaggaaaaagcgatactccgccgg

SEQ ID NO: 683852 - DNA, 722 bp, Homo sapiens
cccggagtggttctatcccaaccagccccatggctcagtgtagccccctcctcagctccaagtccttcggacgacccctggtattttgcgggaaatgcgccatctgatctccagatgccgaagattccgccgaactgccgacttaaccggctccctggagaggtcctgaaaagcttagccactgcgggccctttggaatacgggaagaaggtgccaacggaggttcttcagaagaggccagccggagaaagccccatatgatgaatgctattaagaaatatccagaaaggcgttctctgataaactggatttccctgagggagatccagaaacctctggcaccagcgccagaaggccggagcccaaggcccagccagatgaggaaggggccccgtgctaaacgacggtattaaaacccgaagtttggttttggtggaaagaagaaaggctccaagtggcacactcgggagagctatgatgatgtatctagcttcccgggcccagaccagctcatggccgaggcctccagaggcctggccagaaagggtccaaataagagaccctgggaaacgaaccagagagaagatgaagaaccgacaccctaaatagcatctttgaataccaagaacccagaaaaaggaatgaagactcgccatttcacgacaccctttgatcccttctttggtgtcatttgtaaacctttctttccaataaactaaaga

SEQ ID NO: 683853 - DNA, 223 bp, Homo sapiens
ttgctcgtctctgagacccccgttcctgcttctatgaaaggaagttgctgttctctatcagcctctattctataagcgatttgatattatttactgcatattcatgaacctactgcagaagaatgtgaactgaataccatatgaagatagatgagtactttcggtaggaattgaaacgaagcaggactgggaggaactgcgtttcacagaagcacggaactgg

SEQ ID NO: 683854 - DNA, 1506 bp, Homo sapiens
  misc_feature (833)..(833): n is a, c, g, or t
tccttctgataattagccccgggtgtcccttccttagcaataagagggtttatagatccccgaaaggacgcccaccccttcgtggggaggttggggcgaccgacgaacaaatttgtttccgcgcggccccaccaccgcgatgagggggggttttggggtggttttttgtgctccccccagtgataattgtaaagaaggaggattggttgtggttaaaatagtaggggccccccccgccacaccttctgtgttttgtgtgaagtactgtgttaaaacggggggatgtaatactcaacaacaaggggggtttttgtccccaccacaaaccaccgggcgccattttggcctctcatttgcccaccactttgtgtgcgcgccccagacccaaaccctcggctccgtggtgctacgggccccccacaggattcttctcccgtcgccccccttgtgtccttttgggggtgtttttatgaggaatgagaaggaggcggccccggcggtgtgccccccctcaccaaggagggcacgacaagattttggtggcggcttggtaccacatgacacagcccctgtgtggacaacccaccactccggggagagtatttttctcgtggtgtgtgtcctctgtgtggccttctggtgggagaactcgtgagcccctctatggctcttctctgggcacacagaggggggagatatctccgggtctttatagcgcgggcgcccacaacacggcccaccctctggcggtggtgagacgtcccacaccatacacacacatctggggagagtggtgtgtggaaaagaacgaccgtgttgtcaactgtcgcgcnccctggtgtgtgagacccctcctgctgagagtgattatatagagaagtgtgagacactcttctcgggagaaacgcccacacgccacacagggggacgcacatacgcaccctgctttcacacacagagagagtgttctgccgcacctctaaagtgtcttctgagagtgtgagaaggtgtctcaacagagtgttttggatatttctctcccccccctgctcactctgagagagagagaaacggctcttgtgtgagtgagtcctcggtgacacacggctctaagacacacagctggagtgtgtcctcccacacactctgacacctctccacagggctcggagagagagagagtgtggagagagacccacacgcgctcgtgttctccctctccctctgtctgaatggagaattttggctcgcaccacccataattcttccgccctgcggtggctcgggccaataatacctctaagaaacattcaccaactcttcctcgtgtatttatacctcgtggtggacaccacctcgtgccacctcttattggggggaaaaatagcctgaaaattaggggccacttccaagtagaatagacttctatttcccataatttgtcttatataccagtatttgccttttatcccaaataattcccatataaccccttttataaggtat

SEQ ID NO: 683855 - DNA, 468 bp, Homo sapiens
  misc_feature (209)..(209): n is a, c, g, or t
ggtgcttgcattttatccaataaccactactacattacacggttaatcctcccacaaactatataattgagggagacggtgaccacctttcttaaacgaacagtacacctagtttatttaaagcatttggaccaataaaataaatagcggcaacactagaagctaaaactaccagaataggaaactttctgaactcaccgtcactacgnaatccactctcgacccatcacaccccacctctccactaggaccgcaataacaacaaatcaaccacgcccctcaaccaacccaactttacacaacacacccacaactccccccccttcacccactccctcccaacacaatccccccactccctcccccaccaaccaccctcccccccctctcccacctacacccgcaccccccaacaccccacacccaccacccccctcccccacccctaccccccattacctcttacac

SEQ ID NO: 683856 - DNA, 158 bp, Homo sapiens
aattgacagtttcacctatgtctcattttatatgatttataacagtgtaagattttacaagtgggattcaggattcaaattacagggagagtatgaagacctattcagagtttcatctggggatgaaagctatggaagatgatgtacaaatgttattg

SEQ ID NO: 683857 - DNA, 230 bp, Homo sapiens
tgggttgcattttgtaacagatgtgactgtcatctatggcttgtgttccatttctagagtacaggcagaacagatttagcataatttttaagggctctaggattccaaacatggtaaatgagcaggggcttcagcttcaagtcatcagatacattagcccctaacaagagagttagcctgtccttttaagtcaggcattgacttctctctagccatgaaaggcccagata

SEQ ID NO: 683858 - DNA, 325 bp, Homo sapiens
  misc_feature (13)..(13): n is a, c, g, or t
  misc_feature (43)..(43): n is a, c, g, or t
  misc_feature (133)..(133): n is a, c, g, or t
  misc_feature (233)..(233): n is a, c, g, or t
  misc_feature (256)..(256): n is a, c, g, or t
  misc_feature (259)..(259): n is a, c, g, or t
gcctccctgctgngattacaggtgtgagccatcacacctggcnttgattatggtagttttatgtttggagtatttcattaaatttaataaatatgagtgtttcaagtattactcttcactgtcattaaatggngagtttattctggaaattcctatacttttgctcgtttaatactttgccatttgaagagtaaattactttttgcatttccttccttaatatgctttcatgnctcttcttgggcatagtttatgntgntatttcccttataatttggtactctctctctcttttttctttctctttccttcccccagacacttt

SEQ ID NO: 683859 - DNA, 551 bp, Homo sapiens
  misc_feature (459)..(459): n is a, c, g, or t
cagtgggctgggcatgacgtgggccaggtctgtgaaagagaggctttcatgtgctgaaatgctggaagtgcggtcaaagtcaattgcggaggccaggggcagtggctcaggcctggtaatcccagcactctaggatggcgagtcagttgaggtcaggaatttgaggccagcctggtgaagacgggaaaaccccatctctactaagaatacaaaaatgagctgggcgtgtgggcaggtgcctattatcccagctactcgggaggctgaggcatggagagtcgcgtcgaaccggggaggcagaggtttcagtgagccaagatcagaccactgcactcgaggctggtaatagagcgagactccgtcccctcaccccctcaaaaaaagaaaattaccacgggtataatactcttaactaaaggtggtttctttctttcttgatttttcaccaatttcccatanttgtactctttctgtcccaggatccaatccagggtcccactttgcttccagttcttattctccccgtcctcctctgggctggaacagtttgt

SEQ ID NO: 683860 - DNA, 379 bp, Homo sapiens
  misc_feature (13)..(13): n is a, c, g, or t
  misc_feature (43)..(43): n is a, c, g, or t
  misc_feature (133)..(133): n is a, c, g, or t
  misc_feature (287)..(287): n is a, c, g, or t
  misc_feature (310)..(310): n is a, c, g, or t
  misc_feature (313)..(313): n is a, c, g, or t
gcctccctgctgngattacaggtgtgagccatcacacctggcnttgattatggtagttttatgtttggagtatttcattaaatttaataaatatgagtgtttcaagtattactcttcactgtcattaaatggngagtttattctggaaattcctatacttttgctcgtttaatactttgccatttgaagagtaaattactttttgcatttccttccttaaaaaggaaatgtgtgggttacctgtgtttgaataacaaattatatgctatttacatatgctttcatgnctcttcttgggcatagtttatgntgntatttcccttataatttggtactctctctctcttttttctttctctttccttcccccagacacttt

SEQ ID NO: 683861 - DNA, 232 bp, Homo sapiens
  misc_feature (24)..(24): n is a, c, g, or t
  misc_feature (51)..(51): n is a, c, g, or t
  misc_feature (174)..(174): n is a, c, g, or t
caaggccttttgggggaacccccncccccttggggtccccccctggggttntcccccccccaaaaaatgtctctgtgtgtgcgccccccaaataaggtaaccaaagaaaagcggaggagtcggccggggaatgggatttgggttcctttggctattcccccaaaaacccccccncttagccagttttttttgcaaaacaaggaaaaaaagggtttcttttttaaaaaggcca

SEQ ID NO: 683862 - DNA, 807 bp, Homo sapiens
  misc_feature (186)..(186): n is a, c, g, or t
  misc_feature (266)..(266): n is a, c, g, or t
  misc_feature (326)..(326): n is a, c, g, or t
  misc_feature (343)..(343): n is a, c, g, or t
  misc_feature (465)..(465): n is a, c, g, or t
  misc_feature (467)..(467): n is a, c, g, or t
  misc_feature (540)..(540): n is a, c, g, or t
  misc_feature (618)..(618): n is a, c, g, or t
  misc_feature (678)..(678): n is a, c, g, or t
ggtttcaccatgttggccaggctggtctcggaactcctgacctcaagtgattcatctgcctcagcctcccaaagttctgggattacaggcgtcagccactgcacctggccttggtatatgtgttttaatttgtattcattcatttaagcctcatgacagctctgcgaggaaagttcactatacgtnttcaggctgcaggtagaggacctgaaagggacaggaggtaacagtctggccaagaccacagagccaggaatagcagaggnacatttcacctgggcattgcactccagagctgggcttctcactgttctcaacccctggcnaatgctcacttgaacanagccaggtggtgatacaaaggtatttgttatattagtctctacacttttctgtgtgcttgaaataactgcaacaaagaatatatcagtatttagagtaatgggggattgcttgtgtgtgtantnttgagatggagtctcgctctgtcgcccaggctggagtgcagtagcatgatcttggctcactgcaacctccggnttctgagttcaagcgattctcctgcctcactcctgtaatcccagcactttgggaggtgaggcgggtggatcacttganctcaggagtttgagatcagcctggcagcatggtgaaaccccgtctctacaaaaactacanaaaattagctgtgtgtagtcccagctgctctgggggccgggggagaaggattgcttgaacctgggaggtcaagactgcagtgagccatgattgtggcctgtactatacctggcacaagtagccgccctt

SEQ ID NO: 683863 - DNA, 296 bp, Homo sapiens
  misc_feature (255)..(255): n is a, c, g, or t
gctccctctgggctctattcaggttgcagtgacacgctcatggacctcgtttgtccctgggcagccctcagcaggcgcaccagtgcatggcacaccacctgcagtcccgggatggctggccttgttgtcagtgtcgcggccataggcgcggttgcgcagtgccccacaggcccggcgccgcacctcagccggtgggtggtccagcagtgccacaagcaggggaagcccctgaaatttgcgtacacgcggtttganaccctcgttctcaaagcacagatgctgcaggtagggggggg

SEQ ID NO: 683864 - DNA, 707 bp, Homo sapiens
  misc_feature (707)..(707): n is a, c, g, or t
cggcacgtggagagagagagagagagagagagagagagagagagagagagagagagagagagagagagagagagagagagagagagagagagagagagagagagatagatatagatgatgagggtatatgggagagttagaagggcgcgttgatccgtgcatgtgacagttggcctttctgctcctcctgttgctgcttgtgctggcacatgtgtgtgcacgcgtgtggtctgcttgtggacatgtatttttcttacttgttcccttgctcatcttgtccactaatttgtatgtttatttttaggtatatgtgtatacttctttatgccgcagctctctacgtgctaccagagagctctcctaggttcttcttttaacttcttgctattctaatcgctactttgattactagtgctcaggtacatctgccgcgtacaatgcctgttttgtctctgtttttgagatccgctgtatatcttggtgctatatgttggtactcttcgggataccattgtttgccgctgttatttcttatgacatttttttcccgatttgattgtccagttctcgttttcttcgtctctcgtgtatgctttacctatttgtacttgaatttcttttctcttcacagtgttttttgcgcttatctctttgctccgcttttctctatattgccttcctgttggttgtatggtcttgttgttccn

SEQ ID NO: 683865 - DNA, 1385 bp, Homo sapiens
tcaagtatcatcacgatgggcaaacatgctgaaggcagggggcaggcagccccactgtgtactccagcatgcaggcaagcaaccaaaaagcatgcagcagtgccacaggaaacaatgcattcaaagccataccagatgacaagtcatatttttataaagtcatatagaaaacacatccatattgctcaacaaggatccaacgatctgatcatattaaagacacaatagagtgcattaacacatatatcaggacaagattatcgcagcacatatgacatatacagatacatactcacattcaaccatccacatagaatgcacaacaataaataacaaaatataaacatgtcattataagcagagtgcgaatgcagtgatgctgtatgggtaggatgatcaacgagacgaatcacacagacaacagtgcacacgtatgcacaggatgcactgatcaaaatacaacgaagtggtaacaagatcacagtgataagataaacatgtcagtaatccatgatacgataacgaataacaacagagaaactagaacaagtatgcacaacacgtgactggatcgaaaaacgcatggaacgtacgaccaaaaaggacagacgaacacataagagagatcactacaaccaccacaacgacaacaacgaggtaaagacaatccgttaacaacatgatggacaagccaaaaggacaggcaacacaggaaataccaaaacatatatatcaagagatcacaatggaaactgacataccatgataaaacacggaacaaacgcaaaaatacacgcattataataagacacaccataccacaaaacggagacattaaaaccatggaaagatagacaacacaagagcataagagaagtcaataacctaccataccaagaaaaactcatggcaaaaatggagaacacgaaaagacacaatagagaacaatggaacaatcaaacaagcaaccaggcaccacgacagcaagaagaacaatgaaaaacccaacaaaaaacgagcagctaagcagcagacaaaagcaaaaggaacacaaatagaacaaaggagacaaaacagggaactgcaacaggaccgcaagaagagacgacacaccgataagaccacacccaagcaacaaccacaccaacagaaaaacagaagagaaaaaaaaaagagaaaaaacacaaagaacaacgaacaagcacagaggaagaaacagaaacaaacagacagcaagaccaaaaaacaacaacgcaacaagaaacagaaaaaaacacaaacacgacacaaaaacaaaagaaagagaagaacggaagcagaacacagaaacacacaacaaaaaaagacaacacaacaagacagaatccaaacccacgcagaacaca

SEQ ID NO: 683866 - DNA, 287 bp, Homo sapiens
tattttcacacctccaccctatataatgggtcagtctcccatgttctcatagctaggggaggtaacccattgtaatttgtatggggaggttaacgtatagccatatatgatgatcccagctccctttcactacaacccccgtctgcatcctttgctttgcagtaggatttgagagaggaaggatgaagatttagcacacaggatacatttaaacaggcacagattttgaggggtgggggggaacaaaagcaaaacaataaaactttcaccagttattatcgaaatga

SEQ ID NO: 683867 - DNA, 261 bp, Homo sapiens
tgtattggtggtgctccgtgtagtggtgctcgtgtattggtggtgctccgtgtattggtggagcacacttgtaatcccagtactttgggagcctgaggcgggtggatcaccggaggtcaggagttcaagaccagcctggcaaatattgtgaaaccccgtctgcactaaaaatacaaaaattagccagtgtgatggtgcatgcctgtggtcccagctactctggaggctgaggcaggagaatcacctgaaccccaggggcgg

SEQ ID NO: 683868 - DNA, 208 bp, Homo sapiens
  misc_feature (14)..(14): n is a, c, g, or t
  misc_feature (23)..(23): n is a, c, g, or t
  misc_feature (52)..(52): n is a, c, g, or t
  misc_feature (125)..(125): n is a, c, g, or t
  misc_feature (139)..(139): n is a, c, g, or t
tagtctcccttctnaagggaaanggtgggcgaccgaggtgcgcctggagggnccccatgtgggaagggaagacttgcggaagggcaattcttccagtgcggagacgaggaggccagcccagccgnacttcggttgccancgtccgcctggtggtccgcagcccttccaggcggcttctccgggtggggcgtgctagtccggggctaac

SEQ ID NO: 683869 - DNA, 293 bp, Homo sapiens
gcttgtggtcgatctctagcaggatcccccattggtccgagagaaattaggcctacccgccgcagatactgatcattctatttccccctctatggtccccacctccaaatatctcatcaacaaccgactaatcacctaccctactattactaatcgaactaacctcaaatacaaatgataaccattcacaacacttacaggacgaacctgatctcttatactattatccttaatcatttttattgccacaacttatttctctcggaccaatgctaatttctctcggaccaatg

SEQ ID NO: 683870 - DNA, 1276 bp, Homo sapiens
  misc_feature (467)..(467): n is a, c, g, or t
ttttagaaccgccgccaccattcagtctgttgcctttttttccctcttattctcgcttccctctagctctgtgttgtcttctctcattctctttatatctttgccatcatgctgtacgtctcggtccacttctcttagtgtttttctcatgtcctctattgtaggtcttccccgtattctcttgcgtgcagcacctatctgtctagttttttttccgccggtcccattagttcccccgctgcctcgttgcaccccttccttgctttcttgtgcccaaccagctttcgaaggcccgtgccagtatctcgctgcaatcttccccaccacggtcagcgtccgtccccacgtctttcaagaaggcctaccctttccccgaggttcatgctggactgcctcaccgtaccctgccaggacgtcgagcaagagtattggggctgatgaacatcctggcagtgtacgctctctgngactacagccccgagttcgggacgagctgtccttccgcgagggcgagtcggtcaccgtgcttcgcagcgacgggccggaggagaccgactgctgctgttccgcgctgcacggccaggagggctacgtgccgcaggaactacttcggtgctgttcccacagggtgaagcctcaagaggagtaaacgtgctacgcaggatagaaggagtgtttctcgaggcttgacagataccaagcattgcctgccggtccctctcagaccgtctgccctctgtgttttgtgactgcctgtgtatcctgcacccctcacgcctgtctgagtgtgtggtccgttgccaccggttcttctgttctcctgcgcaagctccacgggaacgaagagagcggcccccagaccttctagaactcttcagtcaatctcgcacgttagcctgtggcgagtgtcatgggaacggtgctcgcgacaatcccatgtgcgctacatggcaataccactttccgtatttgaccaaattcagatgccccatgccaaagtgccgtcccaatgccctaccaaccactcagtcacactcccccagcaacgccacgccacctgcccagcccgggcatgggatgggccatccagcaccagctggatagttcctgggagtcactgctgacaccatgctctcccagcagtctctggggtctgcggtgggaaacagttggtctctaccaggatgcctgccccacctctccccaattgaagtgccttcaccacagcactggtttaatgtttatatactaaatcgaggacttcctaatatttttt

SEQ ID NO: 683871 - DNA, 202 bp, Homo sapiens
gactgattcttaggctgtctgtgctattgtaacaaaacacctcagactggatgatatgtattggctgcagccccacccaaatctcatcctgaattgtagctccctcaattcccacattttgtggcaaggacccagtgggaggtcattgaatcacgggggcggctctttcccgtgctgttcttgtgatagcgaataagtctca

SEQ ID NO: 683872 - DNA, 80 bp, Homo sapiens
agttcaacatcacagatgaaatcatgtctcagttcccatctagcaaggtggcttcaggagagcagaaggaggaccagtct

SEQ ID NO: 683873 - DNA, 931 bp, Homo sapiens
ggctcagaccgttcggctggctcgctcccgatctggtgtatgtgtctggtttgagatgtgtcgagacacattgtgttgttgctgcacagcttggatgttctcgaataagcaaggcgcggctttgcctgagacgtcttggacaaactctggatgaagtacatgtcggtacagtaatgtgtatctatcacccgtgatcatgtcgatgtgccactgtccaatgtattctcaccctgcgtgaaaggggaaacacccgttgcacaaggatggcccagatactttctttcactaaacagtggcggtggtggacgacatccaccaagggcttccagtctcttctcaccgaagtgaaaccaagactggcaccgcaggtactttggttaagggtggccaaccagggatcttttggggaaaagttctgtgattcctctaaatctttatagagattcctgccaagaaaattctacccaagcaagaagaatggaggagctttgacttttactcagggccgtagagaaggttccagaaaacacattaaacacctgggttggtgaaaagaacgaagggtaaaatttggggagatggcttctctcggggctcaagtgcattccattgacaaaggctggttctggtgaatggtgtctattcagaggaactggatgaagtttggcagggtaaccggagagagctggtaaagtcagaagattggggaaccgtgaatgatgtagaactactttaagagacaattggagaatttaccaattggggtcattttggcagactgcatgcatagtcgcagaactgttagacgtggagatcttacaattgaatgaagtgatgagaagggaggccgggaaagagagatgagttgcgagtgttagaggtggcaactgtagttgggaacgattgtttttttcttttattgacttttggg

SEQ ID NO: 683874 - DNA, 169 bp, Homo sapiens
agaggatcgcccggaaaaccagcggcatctgaaactctatcctcagatatggtttttgaaggtaatttaccatatgatcaccttctcaaatttcttagacctactaaaaatcagaacatgtactataaacattgcattgcttagatgtatatagtttaagcagtctatt

SEQ ID NO: 683875 - DNA, 286 bp, Homo sapiens
  misc_feature (135)..(135): n is a, c, g, or t
  misc_feature (184)..(184): n is a, c, g, or t
  misc_feature (207)..(207): n is a, c, g, or t
atgagctgtgaaaacagaacccagtgagtgcgaaccgcagtgacccagtcaccttgaatgtcacctattggccggacactcccccaccatttccccttcagacacctattaccgtccaggggcaaacctcagccntctcctgtctatgcagctctactaacccactctgcacagatactcctgngcttatcaagtggaacattccangcagagcacacaagaagctctttatcccgtaacatcactgctgaataaatagtggatcctataccgtgccacggccaat

SEQ ID NO: 683876 - DNA, 624 bp, Homo sapiens
  misc_feature (3)..(3): n is a, c, g, or t
  misc_feature (180)..(180): n is a, c, g, or t
  misc_feature (210)..(210): n is a, c, g, or t
  misc_feature (223)..(223): n is a, c, g, or t
  misc_feature (254)..(254): n is a, c, g, or t
  misc_feature (258)..(258): n is a, c, g, or t
  misc_feature (270)..(270): n is a, c, g, or t
  misc_feature (276)..(276): n is a, c, g, or t
  misc_feature (285)..(285): n is a, c, g, or t
  misc_feature (287)..(287): n is a, c, g, or t
  misc_feature (310)..(310): n is a, c, g, or t
  misc_feature (315)..(315): n is a, c, g, or t
  misc_feature (318)..(318): n is a, c, g, or t
  misc_feature (320)..(320): n is a, c, g, or t
  misc_feature (327)..(327): n is a, c, g, or t
  misc_feature (331)..(331): n is a, c, g, or t
  misc_feature (334)..(334): n is a, c, g, or t
  misc_feature (344)..(344): n is a, c, g, or t
  misc_feature (349)..(349): n is a, c, g, or t
  misc_feature (355)..(355): n is a, c, g, or t
  misc_feature (358)..(358): n is a, c, g, or t
  misc_feature (365)..(365): n is a, c, g, or t
  misc_feature (379)..(379): n is a, c, g, or t
  misc_feature (385)..(386): n is a, c, g, or t
  misc_feature (400)..(400): n is a, c, g, or t
  misc_feature (402)..(402): n is a, c, g, or t
  misc_feature (414)..(414): n is a, c, g, or t
  misc_feature (416)..(416): n is a, c, g, or t
  misc_feature (427)..(427): n is a, c, g, or t
  misc_feature (437)..(437): n is a, c, g, or t
  misc_feature (473)..(473): n is a, c, g, or t
  misc_feature (478)..(478): n is a, c, g, or t
  misc_feature (509)..(509): n is a, c, g, or t
  misc_feature (552)..(552): n is a, c, g, or t
  misc_feature (554)..(554): n is a, c, g, or t
ggngcttgctgggctggagcgttttgacccttctgagcttttggagcaggcgctgctttctggcctgttgctttctgggcaggaaccttctgggctggagcctttttactcgcggcggtgatcttttttgctggaactttagcagcagcagcagcagcagcagcagcagcagcagcagtncccttagtaccaggtgcttttttgggagangcttttaggaganctgccttttgaagcttctcaacttcattctngcantatcctgtcccncatttnctttgcctncntaactttaaaacgatcaaaatcngtcanctngnctttccnttcnctngcttcaatcncctcngcccancgngtggctncccatctcgtattnatgtcnncctccccccaggcntntcggacatactncncgtgggcactntccggaaacntgacgatgacatcagtcacccgcatgcccttcacangcatngcctgtctcctcacttgactcccaggcccancgaccaaagccctgtcctcatcaataacacctacaatcgcgancnattttccggcatgaggtccaaaggagaaataggccacccggccaacctccacgaagcgccttaacaccat

SEQ ID NO: 683877 - DNA, 111 bp, Homo sapiens
tcagtatcttccctggaagaaatgtctattcagactcttttgcctgtctattagtcagagttatttggcgtaaacatgttgtgaatatagacaatggatgccatttcctca

SEQ ID NO: 683878 - DNA, 2737 bp, Homo sapiens
gctcatgaaagtgtaggggccccccatgggatccccagaatattttctctctcaagctagtctacactcaagtcttcagtagttagctagttgtcttttaagttgctggcttcagtggcattttctgctcccagtaggttgtgattctctgttttcaacttgtctccaatttccaaggtaggtgtttgttctccttaaatagaggaagaactgttttatgagttaatgtgagattattttattgtgcatatattcactttgagatggctgttagactagagctatctagtagtcaattattcacatgagtatgtgaacctgagaatttgagacaggtctcagttaatttagaaagtttattgtgccaaggttcaggatgtgtacccgtgatacagccccaggaagtactggcaacatgtgcctaaggtggtcagggcatgtctttgttttatacattttagggaggcatgagacatcaatcaatatatgtaagaagtacattggttccatccagaaaggcagggacaacttgaagccccatccatccgcctgcagccgggagactcagagcctgggaggggcctgaggcccgggccgcccgcctccttcttccaggtcacaggtaggtgagagacaaatggttgcattcttttgagtttctgataagcctttccaaaggaagccatcagaatatgcatctatatcagtgagcagagggatgacatttaatagaatgggaggcaggtttgtcttgagcagttcccagcttgaattctcccttagcttagtaattttggggcccaaaatattttccttttacatttcccccatttctttttaaaaaaatcttttggagaaaacattttagaagaaaatgagtctctggtctcaggttttatctgatctctcatggctaggacagtttgttcctagatgggttaggtcccaaagctcatttttagcagattgtgaagtctcatgtcctatgaagaggaaacgggaggaagggagaaaaacaacaaaagaacaaccctggaaaaattgatataggctatattactctgaagtccatacatcagtaagtaggtatgaaagtggcttatgtatgtaaataggttgctgtttattttcttctgaagtttaagttgtctggcttcagttcacagggctttaagaaagcacagcttagttttcagtgactccaacttaggaaaaatggggcaaaaaagaaggaagaaaattgaaaacattattttgaagacttgtggccaagaaaaattagaatttggtccaaactgtagaaaataataaacattgagaaaacattaggaaagactagaatctaacaacaggtctactatagttttgaaacataatttttctctccagtttcccatttttactaaagacaaatcatggtatgactggtttgctttattatacttggcctaattatttctatacaatgcaacaagaaaatttttacataggcttttaaactggcttttttggactttcataggagaaatctcaaataagactcttttaaagccaagcccagccatggatttatgcaatcaaatacctatgagttgggtgaatttcctctcctcttgaggttccaagataaacctgaggcttctgggcctgtcagaaagtgacattcttcacttaacacaggtcagaaaccctgtacagggactatgtacacaaaatatgaggccagtttttccaagggctttattggttccataagtcacgtttgattccttaaaggaaagcacactatttcagtcaaagccttggtaaaataaccaatttctccaattgtatcctgttacgaattaaaacagattcttattgcacttgtgcaaatgactgtattaccataagttaagaatactcataaatatttccaaattctggagaaatcaggtagtgaaaaacaaatatgctcaaaattttgttcataggagtatactaaactcttaaaagctgtcaatagctcaaaagaaaagtttgaagactaaaaaacaaaggataagcaacatttaaagcaagagttaaaaagattgctttagtctcttgtcagttcagtttatggagttaactcctgttctgcttgatagtcatgaacacttcagctctccatgagaatcctgcaagttttttttccccctctattctaatgtcacaatctgcaaagttatcagaaacttgcatttaagaacacctgtttgagttccatagttgattatagaaccacctaaaaaggaccaaaacaagacaacaattgtccatggatgacaaaaattttagggcagccataatcaaagacacaattgacaaatgtgttacctctgtggcacacaataatttaacaacaattacaattactgataacgttcactaagttaaatcagaattacaggagtttcccatcattttggaacacataccaataacatttatacaaatatagcccaaagaaaaccaaacatcatttcatatttgacaatgctccctgtctaatttttataccaaataagccaaattatgtcatttttggactttaggggacctaatatcttaaaggattaattaggtcaggaaaagacaatttataaattgattttggaaagtttgtaaaatatcaaaggtttaaaagacttgataccatgaaataggatcataggtcattgtaaaataagtcattcatttaaccaaagtgataagg

SEQ ID NO: 683879 - DNA, 93 bp, Homo sapiens
gtacgagtattgctcttgatggcaaatcaaaatatgctttagaaataaaggtaatttactggaaaataggagtttttgtaccaaaccataaaa

SEQ ID NO: 683880 - DNA, 678 bp, Homo sapiens
  misc_feature (9)..(9): n is a, c, g, or t
  misc_feature (196)..(196): n is a, c, g, or t
  misc_feature (273)..(273): n is a, c, g, or t
  misc_feature (278)..(278): n is a, c, g, or t
  misc_feature (290)..(290): n is a, c, g, or t
  misc_feature (292)..(293): n is a, c, g, or t
  misc_feature (299)..(299): n is a, c, g, or t
  misc_feature (320)..(320): n is a, c, g, or t
  misc_feature (328)..(328): n is a, c, g, or t
  misc_feature (330)..(330): n is a, c, g, or t
  misc_feature (336)..(336): n is a, c, g, or t
  misc_feature (350)..(351): n is a, c, g, or t
  misc_feature (353)..(353): n is a, c, g, or t
  misc_feature (369)..(369): n is a, c, g, or t
  misc_feature (387)..(387): n is a, c, g, or t
  misc_feature (394)..(394): n is a, c, g, or t
  misc_feature (396)..(397): n is a, c, g, or t
  misc_feature (401)..(401): n is a, c, g, or t
  misc_feature (406)..(408): n is a, c, g, or t
  misc_feature (411)..(411): n is a, c, g, or t
  misc_feature (415)..(415): n is a, c, g, or t
  misc_feature (421)..(423): n is a, c, g, or t
  misc_feature (425)..(426): n is a, c, g, or t
  misc_feature (428)..(429): n is a, c, g, or t
  misc_feature (433)..(433): n is a, c, g, or t
  misc_feature (438)..(438): n is a, c, g, or t
  misc_feature (440)..(441): n is a, c, g, or t
  misc_feature (443)..(445): n is a, c, g, or t
  misc_feature (447)..(447): n is a, c, g, or t
  misc_feature (461)..(462): n is a, c, g, or t
  misc_feature (468)..(468): n is a, c, g, or t
  misc_feature (473)..(473): n is a, c, g, or t
  misc_feature (479)..(479): n is a, c, g, or t
  misc_feature (488)..(488): n is a, c, g, or t
  misc_feature (490)..(490): n is a, c, g, or t
  misc_feature (497)..(497): n is a, c, g, or t
  misc_feature (503)..(503): n is a, c, g, or t
  misc_feature (514)..(514): n is a, c, g, or t
  misc_feature (517)..(517): n is a, c, g, or t
  misc_feature (524)..(524): n is a, c, g, or t
  misc_feature (527)..(527): n is a, c, g, or t
  misc_feature (549)..(549): n is a, c, g, or t
  misc_feature (584)..(584): n is a, c, g, or t
  misc_feature (610)..(610): n is a, c, g, or t
  misc_feature (613)..(613): n is a, c, g, or t
  misc_feature (659)..(659): n is a, c, g, or t
tttaacatnggcacctctcaaatctgatatatcttgtggggcttacaatttgccttacactttcatttaaagttaccctgttctccactcaccacatgtataaaatatcctattttttctcttaatgttttacaaaccggtaattttcactatcagtagcggatctttttataactcaccctatgttgcccaaaanacaccaataatataatgattagattaaaaaacttggcatcttttttaaaaaaatgtgctttcttttccgtgtataanaatcnactataccattngnnaatganaccctagttacacaacacccncacacccncncctgtnagaattcaccctanncntccaagaccccacctncaacagtaagataagtcnacccccngnntccnaagannngtnttcncttttnnngnncnnattnttttntnntnnntnttgtgaatatgggnnaagaanaagangggganaagagattnantatcccntttttntttttttattnacnattttanctnatcacaattctttaaagtctanactagttttccgtatgttttccacattttattctnacatcatatcttttaaaaacaaaagnatncgaacatttgcacttctcaatgtttttttttttcccatagatgtantttcacttatttccttcag

SEQ ID NO: 683881 - DNA, 106 bp, Homo sapiens
cattccccattcctccaacccattttttccctaatccctagaaacccccaatttggtgggtatttcatttattgccaacatttcatataaagggcttcatccaata

SEQ ID NO: 683882 - DNA, 136 bp, Homo sapiens
atactggactttaattaccatgcagcaatgctacgcatctgctgagtccgttagaagcatttgcggtggacgatggaggggcccgactcgtcgtactcctgcttgctaatccacatctactctgcaatggaattgt

SEQ ID NO: 683883 - DNA, 225 bp, Homo sapiens
agatgacttgactaagatattatacaagtgtatatacaaatgtacctgtgctaggggaccagacatagcccaaagaatccgtgttcttcctagacctaggatagctcctactgacagtaatgacttcccattcatggtatattgcagacctgatgaggatctattgtacggataacgtgagaatgaaccttataccacgtagtatggtccgctgacagtggttgg

SEQ ID NO: 683884 - DNA, 231 bp, Homo sapiens
agtgtggataaaaattcataaagtgaaagggtgtggattcgatcaatctgatgctgcccatcgcttgcactgggggtcttggtggatcgggcaggagttttcagtgtgtggggtgtggctccttcctatgtgtctttggaatctgaggctgacattggctgggaaggccagacccttgctccatcagagagggcaggggcaaaggccagtgaggcagctgtgagtgggaca

SEQ ID NO: 683885 - DNA, 1003 bp, Homo sapiens
  misc_feature (6)..(6): n is a, c, g, or t
  misc_feature (92)..(92): n is a, c, g, or t
  misc_feature (99)..(100): n is a, c, g, or t
  misc_feature (111)..(112): n is a, c, g, or t
  misc_feature (128)..(128): n is a, c, g, or t
  misc_feature (150)..(151): n is a, c, g, or t
  misc_feature (153)..(153): n is a, c, g, or t
  misc_feature (156)..(156): n is a, c, g, or t
  misc_feature (159)..(159): n is a, c, g, or t
  misc_feature (171)..(171): n is a, c, g, or t
  misc_feature (173)..(173): n is a, c, g, or t
  misc_feature (177)..(177): n is a, c, g, or t
  misc_feature (179)..(179): n is a, c, g, or t
  misc_feature (182)..(182): n is a, c, g, or t
  misc_feature (189)..(191): n is a, c, g, or t
  misc_feature (196)..(196): n is a, c, g, or t
  misc_feature (200)..(200): n is a, c, g, or t
  misc_feature (202)..(202): n is a, c, g, or t
  misc_feature (204)..(204): n is a, c, g, or t
  misc_feature (211)..(212): n is a, c, g, or t
  misc_feature (222)..(222): n is a, c, g, or t
  misc_feature (228)..(228): n is a, c, g, or t
  misc_feature (237)..(237): n is a, c, g, or t
  misc_feature (242)..(242): n is a, c, g, or t
  misc_feature (248)..(248): n is a, c, g, or t
  misc_feature (250)..(250): n is a, c, g, or t
  misc_feature (265)..(265): n is a, c, g, or t
  misc_feature (276)..(276): n is a, c, g, or t
  misc_feature (279)..(280): n is a, c, g, or t
  misc_feature (284)..(284): n is a, c, g, or t
  misc_feature (286)..(287): n is a, c, g, or t
  misc_feature (289)..(290): n is a, c, g, or t
  misc_feature (292)..(295): n is a, c, g, or t
  misc_feature (298)..(298): n is a, c, g, or t
  misc_feature (300)..(300): n is a, c, g, or t
  misc_feature (303)..(303): n is a, c, g, or t
  misc_feature (305)..(306): n is a, c, g, or t
  misc_feature (310)..(310): n is a, c, g, or t
  misc_feature (319)..(321): n is a, c, g, or t
  misc_feature (331)..(333): n is a, c, g, or t
  misc_feature (339)..(339): n is a, c, g, or t
  misc_feature (348)..(348): n is a, c, g, or t
  misc_feature (355)..(355): n is a, c, g, or t
  misc_feature (359)..(359): n is a, c, g, or t
  misc_feature (364)..(364): n is a, c, g, or t
  misc_feature (368)..(368): n is a, c, g, or t
  misc_feature (370)..(370): n is a, c, g, or t
  misc_feature (380)..(380): n is a, c, g, or t
  misc_feature (382)..(382): n is a, c, g, or t
  misc_feature (385)..(385): n is a, c, g, or t
  misc_feature (388)..(388): n is a, c, g, or t
  misc_feature (392)..(393): n is a, c, g, or t
  misc_feature (398)..(398): n is a, c, g, or t
  misc_feature (414)..(414): n is a, c, g, or t
  misc_feature (419)..(421): n is a, c, g, or t
  misc_feature (426)..(426): n is a, c, g, or t
  misc_feature (429)..(429): n is a, c, g, or t
  misc_feature (434)..(436): n is a, c, g, or t
  misc_feature (442)..(442): n is a, c, g, or t
  misc_feature (448)..(448): n is a, c, g, or t
  misc_feature (450)..(450): n is a, c, g, or t
  misc_feature (453)..(453): n is a, c, g, or t
  misc_feature (457)..(457): n is a, c, g, or t
  misc_feature (459)..(459): n is a, c, g, or t
  misc_feature (469)..(469): n is a, c, g, or t
  misc_feature (473)..(474): n is a, c, g, or t
  misc_feature (476)..(478): n is a, c, g, or t
  misc_feature (483)..(485): n is a, c, g, or t
  misc_feature (494)..(494): n is a, c, g, or t
  misc_feature (498)..(499): n is a, c, g, or t
  misc_feature (512)..(513): n is a, c, g, or t
  misc_feature (517)..(517): n is a, c, g, or t
  misc_feature (523)..(523): n is a, c, g, or t
  misc_feature (532)..(532): n is a, c, g, or t
  misc_feature (540)..(540): n is a, c, g, or t
  misc_feature (554)..(554): n is a, c, g, or t
  misc_feature (580)..(580): n is a, c, g, or t
  misc_feature (598)..(598): n is a, c, g, or t
  misc_feature (963)..(963): n is a, c, g, or t
ggcggnaccgtccggaattcccgggatctgcgtccatggcgcggcgcttgtggcctttgcagacacgtcgggggttccggccccggggaggntgcatcnncaacgaaagtnnaaggagaagtttcacnaaagaaaaacgaaaccggaacnncntgnacnagtatgcgcgcnanggcnanagngcactcnnncagcngganananagcggtnnagcgcatgcncagaanaggccgcanacgcnctggancnccgcaagggggagcngcgctcggcgnaanngcanannannannnngananggnannagcngaggcagcnnnaggagcaaannnggagcntggaagaanaaaaggnagcngtaantaangnagtgcgggcncnacnggnaaannaaganagtggtgaagtgcagnaggannncaagnacnagggnnnacgggnacatananggnaaancnggaaagagcntgtnnannngtacnnnagggaggcncaanntaaagagcaattnnacangaaggnactaaaacngcccaacnaaaaacacccagangtgcacgtaaggataagagccaggcncgaatacaccacataagncggagacaagccagtttttctccttccaacctcggggccacctggaaattggcgagatactcgacatcatccgtcagaagcgcctgtcccacgtgtctaggccaccggtcctattacctgcgcggggctggagccctcctgcagcacggcctggtcaacttcacattcaacaagcttctccgccggggcttcacccccatgacggtgccagaccttctccgcggacagtgttttgaaggctgtgggatgacaccaaatgcaacccatcccaaatttacaacatcgaccctgcccgcttcaaagatctcaacctggctggaacacgggaggtggggcttgcaggctacttcatggacacaccgtgncattcaaggacctgcaatcaagattgttttctcacacctt

SEQ ID NO: 683886 - DNA, 174 bp, Homo sapiens
  misc_feature (55)..(55): n is a, c, g, or t
  misc_feature (108)..(108): n is a, c, g, or t
  misc_feature (146)..(146): n is a, c, g, or t
  misc_feature (149)..(149): n is a, c, g, or t
acaagttgaatagagaagaacactgattgataataggcattttagtggtcttttnaatgttttctgctgtgaaacatttcaagatttattgatttttttttttcactntccccatcacactcacacgcacgctcacacttagtatncgngcaatcctcccacaccaccagcccc

SEQ ID NO: 683887 - DNA, 139 bp, Homo sapiens
agtgatatcggtccgtgttcttgtgatcccagttttaaagtcccatctgtgtttagttctttctggcaaatatcttctttttgcctgggaatgcttaaccaatgccagtacagtcattgtaccttgagaagtagttact

SEQ ID NO: 683888 - DNA, 941 bp, Homo sapiens
gctgcgggcgctcgtattggtccatctgggtcgtctcggggtgagttaactacgattataagcctgtagtcgacattaagctgtcgcgaacccatggctaggtgataatttgttccttcatattccaggaccggtatgtcgtcattcactgtgttctgcctgtgtcgttgtgcctcggggcccgcttcggcggggtcctctgtctcggatcgtacgtagctcttctctgatcagcactccgtgcgtccgtgtccgcggggtgtctcgctgggacttatgttgccgccaatgtgcggcgtagcctgggttcgttgatatgatcaagcgtgctttcctgttgggagagccgagggtcgtgggtggcgcgggtgtttgatagtgcgtcgaggccacagtagtctagtttaaggttaataggaatcctgaggctctagtatatgtcatcgcggttgccaactgagggctgccaggcaacattccgttggcttaacccgatgggtggtgaccgcggagagaacggattaaacggatgagaagagtccgggagaagggcccccatatggaacaaacaaatggtttggggggttcaaaaaaaaaggactagacagcgtggggtgggccccccacatgaaaaaggcctggagcagcgggctgtatgtcgtaacacaccaacggcgtctgagggaggtttgttttccccagtagcgccgcgggcggcgaatctagttgcccaacacagcgaagtgtgtcgcgaccaacggctacaacaggaggccgagtgaggataaatagccccgtggtaaaaagacgacaaaaacacaagcacagaaccacacgaaaaacacgaacaagacaatcaacaaaacagacgcgaacacagacagaacaaaaaagaagagacagaacacaagaagagcacagctacaaaacaaagacaaaca

SEQ ID NO: 683889 - DNA, 130 bp, Homo sapiens
caccccaaattaactcccaaattaaaacacagttgtgctgtcaatacctcatactgctttacctttttttcctggaaatcggggaatttccaaaggttctaattttttaagcaggaaatatacccaaaaa

SEQ ID NO: 683890 - DNA, 350 bp, Homo sapiens
tccaggattcggtgggctcatcttcttgggccttttgattgtgatctgtgtagcaggatcttgagagtccttgtccttacataggcattgctctagtttgtctttgtgcaaaaaaaaaaaaaaaataaaatgtaattttccgggaacccttgcccagcatattatggtgggtggcttaagaaattcaagccttctccaagagatactttcatacccagatttgtctggtgggctagcagttgtcacagatgggcgggccattgggaatatgaccttttctgtccgggtgatccacagacaaaactttttttatcctcatccaagagtatggattggggactcaagttgtc

SEQ ID NO: 683891 - DNA, 878 bp, Homo sapiens
ccggtcttctggcgacgacgtaccgggaataagtggtgcagtcaaggactgcggactataagcgtcgacgtgcagggcgagtgttgatcgacttgcatagcagccaccccctgtgaagcagcgaatgatatgacctttctggatatggccgcaatggcgagactcgtgactggccccagagaaacctagactcgttggaccgggacttgagatgtgtaccgtccgtccggacttccagtcggtctgcatgctacgcgagggaccgttcgcacggttcctccgaagaagagtcgccctggacgcgcggtgagttgctcgtccgtgtcagtgggggcctggctgtgcgtgagagcgtgtcgtcccctggatccccggtgcttgggagatcctgggtgctggtgcccaggactgtgtgtgcctctccaggcatgaccggaggagtcgcgagcggctcgtggggtgttggcggcctggctccgagtggttacgcgaagagccacgttgccatgcagcgcatgggccccgaatggcttcccataacggtgcggaaaaccgcgaagcatggccatggggatcgaaccccccatggctttgcgaacctttgctatcgcgggccctcggcaatacgacataggatcgcgattggtacctagtagacgcccatgggaggcgttgttgtccgcttgtgtcaacgcccaggaaatagataccaccaaaaaacccacgtaggggtaattgcctgcgattgcttgaacggtaacgcggcttggaggcgcgcccgtggagtttatccagtcccacacgaggccccccgctgggacgttgtggacgggagtccatggtcacgggtactacaaccttggtagttagtttgaccc

SEQ ID NO: 683892 - DNA, 285 bp, Homo sapiens
cctagccactcgggaggctgaagcacaagaattgtgtgaacccaggaggcggaggttgcagtgagttgagattgggccactccattccagcctgagaggcagaacaagactctgtctcaataaacaaacaagcaaacaaactgtccaggtgtggtggcacagccctgtagtcggagctaataaagaagctgaggtgggaggatcgcttgagcccaggatatggaggctgcggtgagctatggatctcaccactggcactccagcttggggggacaggggcaagtc

SEQ ID NO: 683893 - DNA, 357 bp, Homo sapiens
cggtgttgccaatcgtgcagccgttgaagagcatgtacagccattagatcaagataatcgcgaagagattggacaaatcttagatggtatcgaacaaggggagtatacggagccttttacaactgaaacactcaagtcagtccgtaagcgatccgcactggcaacaagacttaaaaatttacaagtgggcagccgaccatgattacaatggcaacgatattctagccgcttacgagctataccgtcccgtatttcattagttgataacacggtgctgaatcaatatttacaagacttagagagtcgcttggacattggcttctttgagctagcggactttgaagagtcactactgaa

SEQ ID NO: 683894 - DNA, 233 bp, Homo sapiens
cattcgagctcggcacccaatcctcagccctggatgtccgggttcggcatctgggtaggcggctgctgacccttgtcactgctgagctggttctgcaactggccctgtgccaggagagcggacatttgggcctgctggatggtcgcgaaattctgggcctggttcatcgactcacggtgcatgagaagggcctgatcggcgtacagacgctgctcgacctcctgcttaaagct

SEQ ID NO: 683895 - DNA, 275 bp, Homo sapiens
  misc_feature (66)..(66): n is a, c, g, or t
ggggggggccccccccccctttttttttcccccttaaaaaaaccgggggggggctccccccccggntttttttatggggggggggggggggaaaattttttccccggggaacccttttcccctttggcctttttttggggccccaaaaaaaaagttttttcaaaaaaaaggggggggggggggggggttttttcgggggtttttgcccccccggggggtttttttccccccccccccggggtttttttggggaacccggttttggggggttttta

SEQ ID NO: 683896 - DNA, 113 bp, Homo sapiens
ctgttgtctatcctatggggtctgattgtgtcacgtgtagtgttatacgcaggtgtatggtctaccttatagataatgctgcttacagcttctatatattctcttattattct

SEQ ID NO: 683897 - DNA, 351 bp, Homo sapiens
tctgagcaagctgggaaggatagatgactagttgatgagtgcagcaaaccaccacggcacatgtatacttgtgtaacaaacctacacattctccacatgtatcccagaacttaaagtataattaaaaaaaaaaaaaaagagggagccattttgcagttttgactgagctttgttctgcttattgaaaaggtaagaaacccaaacggaaagaaggggtgagcaatgcaggaagggctcaagccttgtgtaaaacaggaaaacttctgtttaatggtttgggttgcacagcgccccttggccaaagaggaaagagctaattttgagataagaaaccattgcttttaatttttt

SEQ ID NO: 683898 - DNA, 867 bp, Homo sapiens
ggccacccccagggggggcccccatcaggaggagtttccccttcctccgggcaagtattgccgcatagatggatgctcatggaatcgacacgtgttcctattcttgtggcgccccccagtggtgcgggttccccgcggcccttttgttgccgccgcgcttgtggtgaccaacactcgagccacaagtgcggcggtttcccgataaatccaccaccggctgaaacacattgttggcgccgcccaatacgtagcgatttggcacctttcgttatcggcgaaggccatctgtgcggcgtacctgcgcaaactccccttagtgtcctcccatggtgggccgccccccctttcgcgccacacacaggggtcctaccccggactacgcggtatccgtggcgacaaacataacggtggcctttttttattccttagtgcggcggctttctttccaaacaggccctctttatatctggcggccgacaccacgaacgtctcttttctgtgtgtgccccttgcacgcgagaccgtcggtcgtcaatcggggtgataccagatacacaaggtgcggtcccccggctgtagaacgcgtaggaactcaccacgcgggctcctttgcagtcatcgtcaatacaaaacacttcccaatcaccacccctctctaaccatcctcctctctttcttccactcccccctgctcactcccactgtaatgatatctccttctgtagagaatgccgcactaccacgtggaccgttcaagaacaattgtatctaccacgcatctatgttgcacggcgcgctaaccacagttttcacaacaaataaaaaacaaacttgtgtagctctcttcgccccaaaaaacataacaaa

SEQ ID NO: 683899 - DNA, 99 bp, Homo sapiens
cagaattctatcttttctgtatgtttccatgtgtcaggtagttgtaaatgaatgtatttacctatgcaaaagatttattaaagcctagagaatatgaat

SEQ ID NO: 683900 - DNA, 321 bp, Homo sapiens
ggttaagggctaccataaaatgagacaaaatattgccaatcatatacctgataaggggaataatatccagcatatataaagaactcctacaactgaataacaacaaaccaaccatccaatttaaaaacggacaaagaactcatacagacattttcccaaagaagacacacacatggacaataagcgcatgaacagatgtgtcacaaatgcaaatcaaaactacaatgagatgtcacctcacacccgctagcctggctactatgaagaaaacagaaaataaaaagtgttggtgaggatgtggagagggtagcccttaaactg

SEQ ID NO: 683901 - DNA, 219 bp, Homo sapiens
  misc_feature (18)..(18): n is a, c, g, or t
  misc_feature (34)..(34): n is a, c, g, or t
  misc_feature (156)..(156): n is a, c, g, or t
  misc_feature (171)..(171): n is a, c, g, or t
  misc_feature (192)..(192): n is a, c, g, or t
  misc_feature (214)..(214): n is a, c, g, or t
cgagggataggagtatgngctggactagtatgtngagtcctgtaagtaggagagtgatattgatcaggagacgtgttctagcacagagagtctcccagtagttatagtgggggtaaggcgagttagcgagcttgctagaagtcatcaaaagctatnagtgggagtagagtntgaagtccttgagagaggatnatgatgcgactgtgagtgcgtncgtag

SEQ ID NO: 683902 - DNA, 210 bp, Homo sapiens
  misc_feature (129)..(129): n is a, c, g, or t
gcgggcctcggcctcctgctcgcactggcgtgagtacctcttctatccggccctgtggcccagctccgcatctgcctccgcgtctcgcccgcggagaagtcctcggctggaattcctcatgcgcaagtncggctagttcgtgcgaaactgcgttttgaattcgccgccgagaactatcttagccgcggatggccaagggacggacgtatg

SEQ ID NO: 683903 - DNA, 1470 bp, Homo sapiens
  misc_feature (11)..(11): n is a, c, g, or t
  misc_feature (75)..(75): n is a, c, g, or t
  misc_feature (84)..(84): n is a, c, g, or t
  misc_feature (138)..(138): n is a, c, g, or t
  misc_feature (140)..(140): n is a, c, g, or t
  misc_feature (157)..(157): n is a, c, g, or t
gagagagagcncgagagatggagatgggcagacggattcatttagagctgcggaacaggacgccctctgatgtgnaagaacttntcctggacaacagtcggtcgaatgacggcaaactcgaaggcctcacagatgatntncaagaactggaattttnaagtacaatcaacgtaggcctcacctcaatcgcaaacttaccaaagttaaacaaacttaagaggctttaactaagcgataacagagtctcagggggcctggaagttttttgcagaaaagttttccgaaccttacgctatctaaaattttaagtggcaacacacacttacagacacatcagccaccaatcacgagccactgaccaacaagttacgaaatacctcacagcagctctcagaaccttcaccaactatggcgacgggctaacccaaccctgcaaacgaacgttaacgacgcacgacatgtctgtcaaagactgccatcccggcgaactcacatattctcgaccgggactatgaccagggcgaacaggaccacaagtgcaggaaccacctgaacactccgcgaactgcacgaagggagcatcacgatgagaagagggaccctgagcacgacatgacgagaaggaagcaccgaacacaacaaaagccaagcagataacaacagacaaaaaggcacaagaaaacaagagacaaagaagcagaagaagagagaccccacggacagcaagggacagcacaaacaacgttgaacacaaaccgaagacgcagaacgaacgaccagaagacgcaacagcgacgagaagaccacgagaacaccgcgaaacggacccgcacactgaacaccagagaccgaagcaagacgacagagaacagacgggagacacaagaaggaagccacagcgacaaacgagcaccaagcacacagcacagcagcaccccaaaacgaggggcgatccggacgacgacaccgaccacagaggacgagaggaacagccaaagacggaaccaacgagaggaagacacgcaaaaacaggaaatacgcagaagaccaaagcaaacgagaaaaagcgacagaacgctacagaccacgcgacgacgcaacgcacagagagcgcgacacgaaacaacaagacacagagacagaaagagacggacggaggaaacagcgaagcaagagagagcgagacacgagcagagcgaagacgagaaaacaacaaggacaccggacggaacgaacaagaaaaagggagaaacggcgagagacacaccgacaggaatacgacgagaaagcagagaacaccacagaagcgacagcacagagaaagggagcaacgacgcgcgcgaacgagacgagacgagagagcagctaagcgacagaacagacaagccagaacggaagcagcagaacgaaagaagaagcaggaagctgacagcgagaaaagcacgcgaagggaagagcaagaggacagac

SEQ ID NO: 683904 - DNA, 677 bp, Homo sapiens
acttcgaagtgaacttgacattttgtttttactctcctttcaggtcctgtctttcttttagattaggtcaaactgagcctgagttccttgccaagttccagcctcagggtttttttctctatctctaggtatctcttttctactgcttcaggaaatgagcccagggttttcagagaaacttgggaattatttcttagtcatttttatctggacaatattgagttcaaatactccaatattcgcctgtgcacagtagcactgcatcttgcctaaactattttattccatctactgatgtttctgttgttccttccaggttagcatttttcttcttcttgtagttattaagtggtagatgtagggtagtagtggtcttggaggaaataaggtaaggtaggatgggaggggaatggagagaaaagagactcagagtagaggggcctttaataatcaggaggccagaggttctggtcaggcttttcttgcatggtcaaccccagcaagttatgtgcctcagtttctctatctgaaaataggggtgacagtattttttatggcacacaattctccattgctggtcccaggttcaatgacattttgacaattttattcttaacaacctgtggataattggtaaggggtaatatttaatagatgctgctttcctgcttctttgg

SEQ ID NO: 683905 - DNA, 342 bp, Homo sapiens
aagaggtggtgtctcccatttgctatgcaggggacacgccttgttaccttgatgccacaacacctgccttggatttgatacttgggggaagggacgccatcatccgcttctggtagagtgtctcatagaagaggatgacaccccaatgcaggggttcacgcggtcgtcagcttgtcagcagcagctgggggtaagaaagcgccggttcttctcggtgttctcggtgccaatggactgcagccgcttggcaaatgctcccagtggactcatccttgcagcccggatgcccttgccaggtgccacgatgcggtgagcgatgtcagacagttccttcttctggtc

SEQ ID NO: 683906 - DNA, 363 bp, Homo sapiens
  misc_feature (39)..(39): n is a, c, g, or t
  misc_feature (45)..(45): n is a, c, g, or t
  misc_feature (82)..(83): n is a, c, g, or t
  misc_feature (102)..(102): n is a, c, g, or t
  misc_feature (116)..(116): n is a, c, g, or t
  misc_feature (130)..(130): n is a, c, g, or t
  misc_feature (167)..(167): n is a, c, g, or t
  misc_feature (354)..(354): n is a, c, g, or t
gtccatatgcaaaccctgtcaacaaaacaggtgggccanggtggnctcaggtcctgtaatcctttgggtctttgggaggccnnggtgggaggatcacttganctcaggagtttganaccagccctagacnacatactacgaccctgtcctatacaaaaaaaaacttnctctaaattagcccggatgtggtggtgcatgcctgtagtcccagctactcgggaggctgagtgaggcaggaggatcacttgagaccaggaggttgtggctgtagtgagtgatgatcatgccactgcacttcagcctggaccacagagcaagaccctgtgtaaaaaaataaaataaaaaacagattgnatgtcttta

SEQ ID NO: 683907 - DNA, 360 bp, Homo sapiens
  misc_feature (34)..(34): n is a, c, g, or t
  misc_feature (95)..(95): n is a, c, g, or t
tcacgataccgatcgcccatcacctgcccaaacnggcgtacatggatggctgggtggggcctttggttcgcttggtgaagggtcatgggcagaancaggagggcttgattccctacctcccacacttttcatcaatagggtagaccccaactcaggttgtctgcccctagggtttgtacagcggatctgtcacagggggatgagctctcggggtgatgaccacctgtacaggctgggaggctcattcccactccaccaagtcaggcactcccactccggtggctggtcttgggctgtgcacttatccggtgacgcctgaatttcggcgtatgcggctgataagggagaggggatccgtgc

SEQ ID NO: 683908 - DNA, 611 bp, Homo sapiens
gcatacttccgaggtgcactgtgattactagatgtggggacagggatccgagcgtgaattgctgtccaagaacatgggctcaagctcagtacgtgatagtgcaacgatagctgggactgttcgtcactgtggtagataggagacactgtggctattacgggggccccctatctccattgaaattagaccattgaacctgaggcgttgttcccgaactctcctagggaattcaccctttgtcctgactgcggtgcctggacacatagcctctataccgggaagccatagcatacgctccaccccgaattttcaacctagggtgtacgcaatgatcacggcttgttgatcttagagaagcagatgaccgtaagagttcagcccacgttgtggcctctgccctaagtacccaagtatcctcggccgctacatcctcatctgtaacgctggcgcgggtagaccgtacataacgtagggtagactcataatcgtgctgccctctaataccttggccctcaggttcccccacaaaacgttcgcactccctatccacacacattatcgagaatgccattaccgccgattttgtgcggcacacattgggttccaaacga

SEQ ID NO: 683909 - DNA, 290 bp, Homo sapiens
  misc_feature (27)..(27): n is a, c, g, or t
  misc_feature (48)..(48): n is a, c, g, or t
  misc_feature (67)..(67): n is a, c, g, or t
  misc_feature (247)..(247): n is a, c, g, or t
aaaattagccaggtgtagtggcatgtnactgtaatcccagctaatttnagaggccgaggtgggaggntcgcttgatcctggaggttgaggctgcggtgagccatgagcttgctactgcactacagtctgggtgacagagtgagaccctgtctggaaacaaacaaaccacaacaacaacaagatgatgctattctagtaatctggaaggaaattacacaacagccaatgttctgccttcctgattttnaaatgggttaaacatgtcatttcttatgtgtgtagacccttgt

SEQ ID NO: 683910 - DNA, 946 bp, Homo sapiens
gttatattaaagaattatccaggccacatccacagccaaatgtcctttggagaactaaattttaatggtaaaccccttctaactttacaacactgtaatatatagcgcccatatacactgccgtaatattcttatatcagaccccctgcggtgataaagctgggaggtgtgcccccaatgtagctacaccttcccccgggagcgttttttatactttgggtgggaaaaagggaattttgcgttggggcccacgcctggcttaaagtgaatattggggcgcagcccaaagtgggaactttctgtctccccccctatatttccccttggctttgaaatggttgatttcaaagggtcacgggaaactagaattttaatggctcttatattcacccgtgattggaccactgttaataacctggcctaatgtgctggccccaccctgaaacaatatactggtgcctatatccgcagttaatttgcgcacttgagctaaaataatttagtttctcttttcttcaaaatttaataaagcttgattctggcactccctccacagggctgcacgcctttatttatgcttataacctctaactcacttctctaatactttaaccacaccacggccttctgtaattgttagaaaatattgccgacttgtgtttgcttttccccaatggtggaacttggaaataaatatgagtttgtttgaagatacaataaagagagcccgtttgcttatttggtggaagaataagatagttcattattgaaccccagtccaccatatgtgtacccgttagttccaataaaaggaaaatgaagtattctgtagcccatatttttcatagagctcatgagcctttactgtacctgctgggttttccccagatcatttattcccctgcattgcccaagggtcttcatacccaaaataaagggggtttta

SEQ ID NO: 683911 - DNA, 239 bp, Homo sapiens
tcctgagcgatgggatctgatgccttttgatggctgcttttttaagctaccttgtcagcataagcgttgtcctgagcgatgggatctgatgccttttgatggtctttgcagtgaatgactccagcttcctttggaagtaaagcagctttgagaagagtttttattaaagaggcattgatgatggaggacccctggctagtgaggaaacctctttctgcccatataacatcatggtggta

SEQ ID NO: 683912 - DNA, 419 bp, Homo sapiens
ggcaggagaatcccttgaacctagcaggcagaggttgcagtgagctgagagcgtgccactgcactccagcctgagcaacagagtgagactccatcttaaaatataaaaataaaaaactatagccaggtccagtggctcacgcctataatcctagacttcggggggccgaggtgggcaggtctcgaactcttgaccttgtgatccgcctgccttggcctcccaaagtgctgggattgcaggcgtgagccaccgcacctggccagattagctggggcatggtggcgggtgcctgtggtcccagctacttgggaggctgaggcaggagaatcgcttgaacccgggaggaagagattgcagtgagccaagattgcgcaactgcgctactggccgggtgacagagtaagactctgtcccaggaa

SEQ ID NO: 683913 - DNA, 1120 bp, Homo sapiens
ggttaccaggtaccagcggtccaagtcggggcagagactcccatactctacagagtgtccccagagagttcgcgctcatcctctggcatccttatgcgcgtcactactacttctgcatgatgacagaagaccgaagcgaggcacaatggtgcgcagagcgtgtgctagcgaaggacgtgcgagtccgggcacgtgcagacaaatgggaatcacctgaggcactccacacggtgagacgggcccgtgcgtatcacaggatgccatcgccgcatgtgaccgagccagtccaaggagctgtactggcacctgggagatgctgtgtgggaacgacggtgacagactccgtgaggcaactcgtgggtgatggaggagctggggccctgagtctgaaggcattagcatcggaccgcgggtgaaaggggaaacgcgcaaggacgcggaaaggcggccagctgggatctcagagtctccggaccgccgtgttaaccataagtgggttgtatcagacgacaaggccaaggtgcgtcgctccggaggagacgcgtggcttgtgccaaaggttgcaggctaggggtggctaggaccggggcatttgctagggggcccgtccactccgacacttggacctattggatcctaacattgattctacccttgctccagaggaaggcaacgcgtttggacgcaggaccaaaggaatccatgaggatccctttccattcgccttcccgctaatgggacacgaagagtagttgcggtggctgggaaagccagtggtaccccacgagcgcactaataataccaacaattgcccacgtccttgagaatagggacccctggaggtgggtccccccagcacgagccacgggctttcaaactttgacggtgaccgagaattggctcgtctcattccaaggggagggtacaacgggaaaccactggaaacactgggaaacgggtcccttccaaacgacaggggccggccaattggcacacacaggccgtgcgcgcggacgctaacaatggggaaacgaacaggctggtcccggggctgcgagagtaacaagcccccgcggtcaaggaatgccagaggctgcgacgaatcgacggaacgcatggc

SEQ ID NO: 683914 - DNA, 526 bp, Homo sapiens
cgtaccagtgcgcatcaaaacttcaaaattacatattatatgtcgactaaactggtcaaacttcaagctttaggatgttttaaatgtacaaaacgattctcaagtctactagacaatcgtgcttcttctgaggcaagctggaacaaagacagatctgtggccaacgcgcgctcttgcccccatgtattttctcgcgacatccactctttcgccttgcaaagggtcaaagcttgtgggatttgcacaattaaacgctgtactgaatgaggacatcgagtggaagacatagaaagtatctccagatccatagctggtcgggaagggtgggggcgatgacgtcaaagttgccccaacttttagtactccaaaaatagttggggagatcgcctgccctgtgagttctgctaaacttacagacataattcaaacagttttagaagctttagagtgttttctatccatatattagcaattttggacagatttcttttccagtttactatgggcacgcaactggtacggcggg

SEQ ID NO: 683915 - DNA, 244 bp, Homo sapiens
tgatggcgctgatgacaccttgtgtcattttcaagctttgcgtgacacctccgcgtgacagctttgcaacctcatgctcgcaagcttgctgccctcataaccatgaaccggtcgtggcaggcgagtaccatgagcagatccaaccctcgatacggtctaagcatgtttctggatttacacgtgcggctcgcttgcgaagccgacctcgatgcactctttgcgttgggtgtcatcagcgccatca

SEQ ID NO: 683916 - DNA, 684 bp, Homo sapiens
ggagagtgccaagacgtggtcaaaaaccttagaacgcactgctgcagttggggtgacataccgggaggactattcggagagtacatcattcagcaaggtggctgggtatgagctgttatatattaaaaatattttcttgaaaaaacatcaggtacgtgtacccactctaagagatgggttcttgctgtgttacccgggctggagtgcagtgtctaattgctggcactatcatggcaggctccggtctcaaactcctgggctcaagtgatcctgcctcaggtcctgaatagccaagagcacaggctgcgactataggtgcccaccactgtgccgctgctctatcccgtacttccttgatatgtcactcccataatcaattattcagtcggctcagtggtccagtaaatttccttatatgttctttgacccttgaattacttagaaatgtctgattcaattgctacaatacttacaggtcccacaaatccgtgcctccaatttacgaaattcaatcctgttcatcagagaagcaacgacaatcgtgcattggacactttgagttataagcctactatcatgcatcaacttcccaaccatctctcatcacggcgccgggtgcagtgctgcccctctgcactccccaagctcgcgcaggctgcagcgcccaaccactggaggcaggag

SEQ ID NO: 683917 - DNA, 794 bp, Homo sapiens
  misc_feature (54)..(54): n is a, c, g, or t
  misc_feature (68)..(68): n is a, c, g, or t
  misc_feature (96)..(96): n is a, c, g, or t
  misc_feature (98)..(98): n is a, c, g, or t
  misc_feature (100)..(100): n is a, c, g, or t
acatggcggacgaagataaacccaggtagacatagactaccataccatatgtanaggagcccctggtncttatcaggctcagcctagatgagcgantntntgtgaaaatgagaaatgaccgagagcttcgaggcagattacatgcttatgatcaacattgatagattatgatgctttgggagatgtgtgacatgacttactgtgtagctgactatagaaagtgatagaagaaaaaatatgaagagatatataagagtcaaacgaaagggaatattctccgttgctctgtggtccggggggagtggccgtgtcctggttgccgcgtccagtgagagtggctgcaatgagaggaatcgtgcccatgtagtggaaatacgggaggcacttagtactaggggcctctctcataagtgacgaagagcattcgatgaagagaaaccgtgcatacatgtttgatctcaagaattaatgcccggggattccttcctacatcctgtcccatgcagtgatttgctcgattattcacaactgctaagggtagatggtatatcattgggctcatgctctccaataattaggaccaccacgatgcttgtacaaaataggagtggcaatcatgatcggtgcgcgtgtgactccagaagtgttggttgtaacagactgtggggggggcccctgttttgcaaaagggcataagggctaggcagcccggtgatggagtaggttccccttaaaggcgggggaggggtggcaccgggggggcgagccttcggaagccacgggccgcgattgat

SEQ ID NO: 683918 - DNA, 384 bp, Homo sapiens
actatgtatagttatagatattacatatgtgactatgtatggttatagatgttacgtatatgactatgtatagttatagatattacatatgtgactatgtatggttatatatgttgcgtatgtgactatgtatagtcatatatgttacatatatgactatgtatggtcatatagttatatattacatatatgactatgtatagttatatagttatatatattacatattatgtaattttttcactaaactcaaactgaaaattagcatttcttccatcatgaatgtaggcagcaaaccacaggaatattagcaatacctgtgacttttcctcaataggaatcacacatattttctaccccattaaagttgttgtagatatctca

SEQ ID NO: 683919 - DNA, 254 bp, Homo sapiens
tgtgtgtggggcccagtgcgctctcatgttcttttctcgcattgggtgcacgtcggacggattgtccgagatgcccctggagaggggagctgcggatgtcaagaggtagagacatgtgagcggtgctgatcatgtctgctatcagggtgttcatgactctcttatttagccaggcgcttaagtggacagatacatcgcatcctaagtttgggaaaggcctttgacccatgtcatctgatcgtctcctccagtag

SEQ ID NO: 683920 - DNA, 201 bp, Homo sapiens
tagaggtaagagaatctacgagaagagataagactatatatagaattggggtatgtcaggagctgagatcggaggagggagcacttttatttgtactgctcttattgaagtgttgttgttgttttcctttgggtgcattattttggggagaggagctggagggctatatatatgccagccagggaatttgtgagacaggta

SEQ ID NO: 683921 - DNA, 107 bp, Homo sapiens
ccgcaggcatagcaactatggcgttagcaaggcataggcaagcacccagcttttgttcccctcttcgttctgcatcgtgtcgatacttcctatccgatacttcctat

SEQ ID NO: 683922 - DNA, 388 bp, Homo sapiens
tgggagacagaggctcggtcggtgggccaggctggagtggcaggggaggatctcgggtcacggcgaggtctgcctcccgggctcacgccgtgctcctgccgcagcgtcgcaggcagccgggaccacaggtgcctgcgcaccatgcctggctaatgttgtttgtattttgtagtagagatggggtttcaccgtgttagccaggatggtctcgatctcctgacctcctgatccgcccgccttggcctcccaaagcgctgggactacaggcgtgacagccgcgcccggcctactgattcttaattctatcagattgtgtccctaatattctgtaagttacaggcccctcttcagaaaaattaaagagttttaatgactttaaacactttcc

SEQ ID NO: 683923 - DNA, 702 bp, Homo sapiens
tttggcaacaccctcacagacacacccttaatctgggtgggcactatctaatcagctgccagtgtcgctagaatataaagcagccagagaaacatgaaaaggtcagactggcttagcctcccagcttacatctatctccagtgctggatgcttcctgccctaaaacattggacttcaagttcttcagctttgggacttggactggcttccttgctcctcatcttgcagatgacctgttgtgggaccttgtgattgagtgagttaatactattgaataaactccattttctattcaggcacactcctagtttcttagaagcatggacaagtggttggtctgagtctgtctagcttgcccaggttgagatggctgatctgatgggtatccttgccatccatcattgctccatgtaattctcccccaaagctatgacgttcagctgaagaaggttgaactcgctgtcttagtttggcttcccccaaaagcagaacccgagacaaggacttgagtgcaggtggtttatttgagaggtgaatccaggaagcacaaaccaggatgtagggaaagagagacagggaagacagaaaagccaacatggtgtgctggtgtctgctctactcactacacttactctcccagatttcacctttgctcacatcagtcctcatgccatggaatgaacctaacctttctgtctctca

SEQ ID NO: 683924 - DNA, 359 bp, Homo sapiens
  misc_feature (11)..(11): n is a, c, g, or t
  misc_feature (26)..(26): n is a, c, g, or t
  misc_feature (351)..(351): n is a, c, g, or t
  misc_feature (354)..(354): n is a, c, g, or t
  misc_feature (357)..(357): n is a, c, g, or t
acccctgtggncccattgtaaaatcnccctttgaagaaatgtcctattcggggctggcctgcaggggcctcatgccctgtaattgtagtgctttgagagtgcaaggaaggaggatcgtttgagccccaggagttccaagacccagcccgggcaacaaagcaagatcctgtctcctacaacaattttttttttttaaaaccaactagctgggtgtggtggcacgtacctgttgtcccagctacttgagaggctaaggtgggaggattgcttgagactgggaggctgctgtgagccttgattgtaccaccgcatccaccctgagtgacagagtgagaccttgtctccaaaaanaanatnaa

SEQ ID NO: 683925 - DNA, 240 bp, Homo sapiens
gtcttcgatcgagctcggtaccagcggaacagcactcacccacctcaggcttcccagacgtaggactacaggcatgagcaccatgcctggctgaactgtatttttattccaactggctccacagtttaattttacccatgcactggcagaattggcagattccttctgattctgtacagattaattggtctaatgtgcccagaaccacggagacttagttttggttggctggttccgctg

SEQ ID NO: 683926 - DNA, 638 bp, Homo sapiens
tggaaaaagtcatggaggccagggggtgggcttgaacccagcttgggggggtccagatccctatcctttttggtctaaatttaatgtatacgggttcttcgaatgtgtggtagggtggggggcatccatatagtcacctcaaggttaatggagggtcttctactattaggactttctcgcttcgaagcgaaggctctctcaaatcgatgacaaatttatcaatataactgctgtaaagagacaagtgcaagtgacgccttcacgagaatgactgaggagtgtatcacagtggtggcgggatagtgcaactagaggggatagcaccggaaagaataaccgtcggggagcaatccacgggaaatagagcccgacaaaacagacgacttcgggggcgacaccacagcgctcaagcataacagccgcagcaatacaacactactgatgcgcgagccaagacgcggcatataatgagagagacaagaggtatggcgatccaaacgacgtgtgcataaccacgtgcagaaacacacagagtgaagcaaaaccaccgcagcaaagtagaaaccccctcaccaacctgacaagggacgaaacaaaccacgccgtaccaaaatcggacgggagaacacaaagaagaa

SEQ ID NO: 683927 - DNA, 264 bp, Homo sapiens
ccccccaaaaaaaaaaaagggggaattcccggggtggatttttttgggggccccccttaaaactgcccccacccccggaaaaaaataggggaaaacccccccttagggtattggggggaggggccaaaaaaaaacccccccggggaacccccccttcaaaggagggggccaatcaggatttttaaagacccccggcaacgggttttttccccccccagggggggggttaatttaaaaaccaaaaaaaaggaattttggggttta

SEQ ID NO: 683928 - DNA, 114 bp, Homo sapiens
  misc_feature (33)..(33): n is a, c, g, or t
cgtctagaggatcttgctgagcactagtgaggnccaactctacaaaaataaaaatacttagctgggcatggtggtgcatacctgtagtcccagctacttggaaggctcatggag

SEQ ID NO: 683929 - DNA, 204 bp, Homo sapiens
tagaaaccaggcaggacagtatatccctatggttggatcatcagctggaagttctgtttggagcccatttctgtaagaccctgtatttcaaatttgcagctaaaaggtgctatgtacctctaattatcaccccagagttgggagatctgctcgaggaacgtgtgctctgtgtacatctgtgtccataatgctatcatgttggta

SEQ ID NO: 683930 - DNA, 1260 bp, Homo sapiens
tggaaatggagtcttgatctggtcactgaggctgaaaggagtgcaggggtgcagaacctcggcctcacgtgataatctccgccctctcccaggtgttcaagcgatttcttccagcctcagctttcccgagttaacgtgggatttacaggcgttgactccaccattgcccagattcgggatctctttcgtgctacaaggcaagtagaatagaggcataaggagggatagacaaagagagccccctgtgagccccaggcagtggggggcctggtggacccaaccacacagctttccgtgccctcacgtgaggcaccaggggcaaaaacccgtgattactcacagttactataggacaaccccaacagcacagataaaatatgtccagtttcccctggccctttctccaatgtgcccaacaggaaacttctgtgggatcacttcaaaaagcctcggtgggccacacccagagccaaacctctgaagccctatccgacactgagggatacctaggggggaaccatgtgggacgatcacagcccggtaggcccccccgggacgactcccaaaagccacctctggtgcctaagatgaccgcacaaaaaagcacaattacaagctctacacttataggctagtaaaacagattcctcccacaagaaacatcataaagaggcccaaggacagactccgaaaagtcacatccatacatccagagattttgcggcacattatgccccaaagagagcggacaaacacccactatcataacacgggagcacacaacaaccgatgaccacccacaccacacgagccatgcacttccgaaggaaaaaaagcgaaacaagccaccggccatgtagagccccacggaccacaagcggcccacaatgagcgaactcccggaccaccactacagacacacggggcaacaagaagcaacacacacgacgtcgggaccccatccccatcagccggggcactttccccaaaccgtcgaacaggacccccaagggcaaagaaaatagggcataagcccccaaggtgaccccccccttcgacaccgacacggcagagatcacagtgccgcacacaaggcgcaccacagcaaacaaagaggaacaacacaggagcaaaaactcacgctatatatacagagcaccgagaaatgtaccagaagcagggagaccgaagtcaactcacaccaaacagaagagacgaggacgacgctacgccgcaccacacgtagagaaccacaccaga

SEQ ID NO: 683931 - DNA, 736 bp, Homo sapiens
  misc_feature (466)..(466): n is a, c, g, or t
gggactggagttgtttgccccacccacttagctgcatggtgccctgggggctcaagcagaactttgtcccagccactgctttgggaagcacaaaagctgaatgcttccaaccattctggtgacatttctaatatgattgaatggcgatatcttgggaatgtgtctctacactttcaaatctgcagggccccagtcaccatctgttgaaatacttcatctagaattgaactttatcccttaaaaggcagttgagtgacatgtttagcctctccaagcttatccttggtccagattctatttatgacgagtaatttggggctgccttcattatgtccaaagcataatttaggacattgtgatttaatgatgtgtattggtagtttgagtcatttatgtgaattaaggtagtttcatgctgtcatgagaattcttatgtaatataatgaatgaaatagcagccctcttngtgagtttcagcatccaagactcaagtcatagatatactctaaaataagatggaagcttttctctgtggcaaaatgcaaagcctaaaataatctagacaagggtagatgggtatacgcaaggggtatcctttgttactttattttttccaaaaattaaaccggtattatttttaagctttcagtaattgcataatcctctgttaggtaagtaaaagctacctaagaaccctcccaagccttttattggaccccgccctccgggtggattg

SEQ ID NO: 683932 - DNA, 161 bp, Homo sapiens
gggatactaccctagtagagctgtgagaaaagggcccccactcctccagactccagaatggtggaatcatcagcagcttcccccatgcccctggaaaaactgcaagtaacagacctgcacatgtatcccctacatttaaaataaaagttggaaaaaatgga

SEQ ID NO: 683933 - DNA, 149 bp, Homo sapiens
aacatccggatcgccaccggcaaagaggtgttgcagaacctcagcaccaaggacacgagtgacctgtctccttatcaagggaggcagaatcgtcaaatgatgatcagtccatttatatgcttgatatttacacggatagtatgtagtca

SEQ ID NO: 683934 - DNA, 885 bp, Homo sapiens
  misc_feature (32)..(32): n is a, c, g, or t
  misc_feature (55)..(55): n is a, c, g, or t
  misc_feature (74)..(74): n is a, c, g, or t
  misc_feature (181)..(181): n is a, c, g, or t
  misc_feature (301)..(301): n is a, c, g, or t
  misc_feature (350)..(350): n is a, c, g, or t
  misc_feature (609)..(609): n is a, c, g, or t
  misc_feature (676)..(676): n is a, c, g, or t
  misc_feature (681)..(681): n is a, c, g, or t
  misc_feature (696)..(696): n is a, c, g, or t
  misc_feature (698)..(698): n is a, c, g, or t
  misc_feature (714)..(714): n is a, c, g, or t
  misc_feature (734)..(734): n is a, c, g, or t
  misc_feature (741)..(741): n is a, c, g, or t
  misc_feature (755)..(755): n is a, c, g, or t
  misc_feature (759)..(759): n is a, c, g, or t
  misc_feature (762)..(762): n is a, c, g, or t
  misc_feature (769)..(769): n is a, c, g, or t
  misc_feature (776)..(776): n is a, c, g, or t
  misc_feature (778)..(778): n is a, c, g, or t
  misc_feature (783)..(783): n is a, c, g, or t
  misc_feature (791)..(791): n is a, c, g, or t
  misc_feature (798)..(798): n is a, c, g, or t
  misc_feature (808)..(808): n is a, c, g, or t
  misc_feature (816)..(816): n is a, c, g, or t
  misc_feature (818)..(821): n is a, c, g, or t
  misc_feature (826)..(826): n is a, c, g, or t
  misc_feature (831)..(831): n is a, c, g, or t
  misc_feature (835)..(835): n is a, c, g, or t
  misc_feature (838)..(838): n is a, c, g, or t
  misc_feature (843)..(843): n is a, c, g, or t
  misc_feature (847)..(847): n is a, c, g, or t
gatgcctagcgtagctgaagcgtgttgggganggagctgtaaagagagtctttcngtctgagtggaaggagcanaaagttgcactctcacagctcaccagcctggagatgaaagatgatttcctccatggactgcagatgctgaaatctctccaaggcacacatgttgtcacgctgcttgnctattgtgaggatgacaacactatgcttactgaatatcaccctctaggttccttgagtaacctggaagaaacactaaacctttcaaagtaccaaaatgtgaacacgtggcagcacaggcnggagctggccatggactatgtcagcatcattaattacctgcaccacagnccctagtgggcacacgggtcatgtgcgactccaacgacctgccgaagacactgtcccagtatctgctaacaagcaacttcagcattttggcaaatgacttggacgccttacccctggtgaaccacagctccgggatgctggtgaagtgcggccacagggagctgcatggggatttcgtggctccagagcaactgtggccctatggagaggacgtgcctttccacgatgatctcatgccctcatatgatgagaagattgncatttggaagatcccagacatctccagtttccttctggggcccattgaagggagtgatatggtccgnttccntttgtttgatattcncnaagcatgcaagagccngactccctcagaaagacccnctgcccnggacgttctggagncctnccngaaggtnttggatncncttanagatgccntgatgtntcaggcaagngagatgcngnnnnaaccngtccngccnatnaaggngggnttgacggggtgtttggaagttacagcattttactttga

SEQ ID NO: 683935 - DNA, 231 bp, Homo sapiens
ggaaatatagactcgtttcgtcattttaagggtgctgatggtaagcaggagtcaagaagaggcgggtaaaaaagaaggctgccccacctcccggttgccaagtctagttctgggagatactgagtacggaactactgcatggacactgctttcttcaagacacagaatttgcagggctcttccccgcccttggacagccatctaagtgctgtaaccttggcgcaaagaaat

SEQ ID NO: 683936 - DNA, 342 bp, Homo sapiens
atccggcgttctggcctagagctgtatgcggaatggaagcacgttaatgaggactctcaggagaagaagatcctgctgagtccagagcgagtgcatgagatcttcaaacgcatctcagatgaggagtgttttgtgctgggcatcgagccccgctatgcacggccagagtcgatgattgtcacagtgctgcccgtgcccccgctgtccgtgcggcctgctgttgtgatgcagggctctgcccgtaaccaggtcagtggctccagggctctgcctcttagctggagggcgaggtgtctaaagggaggaagacctgtaggtcgggatggtgatgacctggtttga

SEQ ID NO: 683937 - DNA, 228 bp, Homo sapiens
tgtcacccaggcgagaatgcaggggggcaatctgggttcactacaacctcggcctccggggttcaagcagttctcctgtctcgggcttcagagaagcggggattacagggtggtgaccaccaggcccgactaatttttggcattttaactagagacggggtatcacctttagttggccaggcgggctttcaactctccgtgaccctcaggtgagccttcccaacctgg

SEQ ID NO: 683938 - DNA, 1654 bp, Homo sapiens
attctgatctcaaaatgtatgtcacagactcaatcaacttacctgaagataaaaagtttgataaattagaaattgtttcagttggtgaactgattggtgaagccattcgccggattaataacaacgaagccatttcatcactatttaaaaatcgtttccatcgtcgttcacactaaaccaggacttgacgttgaacggtacggtaaaaagtcgatgattcggctttttttgtgcaatatattacaaaatggcataaaaatgatatacttaaagataaataaactagcaaagacgcgtgaggagcatatccatgagtaaaattttggttgtggatgatgagaagccaatctcagatatcataaagtttaatttaacaaaagaaggctatgatgttgtcacggcagcggatggtcgagaagccttaaccatgttcagtgacgaaaagccagatcttgttttattagatcaaatgttacccgaaattgatggcgttgaagtattgcgtcaaattcgttcaaagtcagaaattccggtcattatggtgacagccaaggattctgaaattgataaagtcttgggtctagaaatgggtgcagatgattatgtgacgaagcctttttctaaccgagaattagtcgcacgtgtcaaagctaacttgcgtagtcgtaaggcagttgcgcaacattcagatgatgcagtcgtcaatacagaagatattgaactcggtgatttaacgatccatccccaagcctatatggtatcaaaagcggggcaggatattgaattaacacaccgtgaatttgaactgttgtattatcttgctcaacacattgggcaagtgatgacccgtgagcacttgttgcaacatggtatgggggttaccgactattttggtgatgtccgcacagtcgatgttacctgtccgtcgcttacgcgaaaagattgaagacaacccaagtcacccaaactggctcgcaagcggaaggtaaccggctggattcagtgctcacgcacatggtggatggtgttttacagctaaccgacgggggaagtgacgattattaaccaggcacggcagattttgtcggcgtcgatcgcgaagaagcgattggacaacatgtggtggatttgctacatcttgcgtggtaagcgcacgttgcgtgatatgttggaaaatctggacgatttccaggttgatttgtcagatgctggcaaggaagtagtcgttcaagcctatgtttccttaattaaacggcaatcgggctttatttctggtcttgttgtggtcctacatgatattacggaacaacaacggattgattccgaacgccgcatgtttgtttctaatgtgtcacatgaattacggacaccgttgacctctgtgcgttcttatgttgatgcgttggctgaaggggcgattaatgacccagaaatggcgcaaaactttttgggcgtggttcaggatgaaacgcaacgtatgattcggatgattaacgacctgttggagttatcccgtttggatcaagggacggatggatgtgaaacttgaggtggtgaacctcaatagtctgttcaattttgtcttaaatcgtttcgatatgattattgaaaacgatgctaaaaatgctgacacgccaaacaaaagctataacac

SEQ ID NO: 683939 - DNA, 224 bp, Homo sapiens
ttatgttctgacccacctctgagacggagcacaggtgctgggtagactcatactggatgtagtagtctagacagggtgcgcacatctaccagcttgttagccagcaaatgatcagactctgctggtcaggagggatgccgttgcttatcttggatcattgcctgaacattctcgatggtgtcactgggctcagcctcgagggggggtgggtcagaacgatagtg

SEQ ID NO: 683940 - DNA, 459 bp, Homo sapiens
aatgacttaaccacagatggagtgaagacaggggtaactgcttggtctggtccccagtagagcattgctcactataaaccacaagctgcttctaatttatttgagatgttattatcgtggcctttatattctggtctctcttgctgcaaatgagtccggcagcaagcacaactcagaaagcaaattcaccttctttgtagcccttgatgggtcggtccccctgttgtctctttctcattccataggcatttcccccactcaccctcttgccctgagaccgcctccccagattttctcctgaagcattgtcttgtgactgcaccaacctacactgggcagatagaaatgtaataggatccatggaatggggagccatgcaggcaattttcatattttattaggcagggcgcggtttaaaaaagttaaaaggggaacagggtggacatcatttttattatt

SEQ ID NO: 683941 - DNA, 116 bp, Homo sapiens
cggatctccttcatccctctcagaagaggagaacgaggaaacacaagcaagaaacgcctggtgcagagccccaacttcctacttcactggactgtgaacatgcccagagactgcct

SEQ ID NO: 683942 - DNA, 327 bp, Homo sapiens
  misc_feature (303)..(303): n is a, c, g, or t
ggagtttgagaccagcctgggcaacatagcaaatgttatgttgccacctctacaaataattagccaagtgtggtggcatgcacctgtagtcccagatactcaggaggctgaggcaggagaatcacaggtcgaggttgtagtgagctgtgatggcactgcactccagccttggcaacacagtaagacctcgtctctaaaaaagcaaaaagggctgggtgcactggctcacacctataatcccagcactttgggaggccaagacgggtggatcacctgaggtcaggagtccaagataagcctggncaacatggtgataccctgtcttta

SEQ ID NO: 683943 - DNA, 923 bp, Homo sapiens
ctaaaattttataactaactgcattcaacatagacaaacttaaaaaactatggatcatgctcaagcacattacaaggccaggcacggtggctcatgcttgtagtcccagcattttgggaggccgaggtgggcgaatcacctgagttcaggagttcgagaccagcctggccaacatggtgaaaccccgtctctactacaaaacaagcaaaaaaaaattacccaggctgctggtggtgcatgcctgctaatcccagctactcgcgacaggctgcggcaggctacactcacctgcacctgcgacgtgcagcggtgcaccgagccaacactcgccccactgcactccaccctgcccccccccacccacaccccgcctcccccaaaccccccacaccgcccacacacccccccactacgccacctcacacactactcctcactgctcccacctccgccctccccctctccaccctcatcactccacctcccctctcccaacccccccaccccacccacaccccccaaccccccaccttgccctccccccctgcctccctccctctctccccccccctccctcccctctcctcactgctccccccctcacgccccccccgcccccccccccctgccccgccccctcacccccccccacccccgctctccctcccacaccacatcctatccccacccactcccacccctacacccacccccacccccccacactccccctcccaccccccccccccaccactcaccaccaacactccccactccccaaccacccctctccaccaccccctcctcgacacaacaccaaacacaacacaccaaatatacacccacacaccccaaaatccacccactagccaacccatacaccctccaccccccccccccatctcacacccccacaaaccaca

SEQ ID NO: 683944 - DNA, 371 bp, Homo sapiens
tttggggtctttgctattgtgtgttcagatatgttaaagccactttcgtagtatagtttgaagtcaggtagtgtgatgcctccagctttgttcttttggcttaggattgacttggcgatgcgggctcttttttggttccatatgaactttaaagtcgttttttccaattctgtgaagaaagtcattggtagcttgatggggatggcattgaatctgtaaattaccttgggcagtatgaccattttcacgatattgattcttcctacccatgagcatggaatgttcttccatttgacccagccatctcattactgggtatatacccaaaggactatagatcatgctgctataaagacaaatgcacacgtatg

SEQ ID NO: 683945 - DNA, 157 bp, Homo sapiens
  misc_feature (107)..(107): n is a, c, g, or t
  misc_feature (157)..(157): n is a, c, g, or t
agttttttttttttatcaatttcagtaagacaaaatatactaaaatgtttaaatagcctcattcaatcttacaatttgcctcctcagcagtcattctggcttacagnaattagatcccctgttacgacacatgccctttgttcttaataactacccn

SEQ ID NO: 683946 - DNA, 139 bp, Homo sapiens
ggtgctacgtccacaggcagccattggccgagttgatcagtgagccacgtagcaccgcggtccttgtgggcggtgacgatccccggaatcggaccgtggtagcccatgcaggcgatgatcgggggcggtccgtcaagga

SEQ ID NO: 683947 - DNA, 2575 bp, Homo sapiens
ggggacccaggatttataaggcgaggccgggaccgtgcgcgcgctctcgtcgcccccgctgtcccggcggcgccaaccgaagcgccccgcctgatccgtgtccgacatgctgcgccgcgctctgctgtgcctggccgtggccgccctggtgctgctgccgacgcccccgaggaggaggaccacgtcctggtgctgcggaaaagcaacttcgcggaggctgctggcggcgccacaagtacctgctggtggagttctatgccccttggtgtggccactgcaaggctctggcccctgagtatgccaaagccgctgggaagctgaaggcagaaggttccgagatcaggttggccaaggtggacgccacggaggagtctgacctgggccagcagtacggcgttgcgcggctatcccaccatcaagttcttcaggaattggagacacggcttcccccaaggaatatacagctggcagagaggctgatgacatcgtgaactggctgaagaagcgcacgggcccggctgccaccaccctccgtgacggcgcagctgcagagtccttggtggagtccagcgaggtggctgtcatcggcttcttcaaggacgtggagtcggactctgccaagcagtttttgcaggcagcagaggccatcgatgacataccatttgggatcacttccaacagtgacgtgttctccaaataccagctcgacaaagatggggttgtcctctttaagaagtttgatgaaggccggaacaactttgaaggggaggtcaccaaggagaacctgctggactttatcaaacacaaccagctgccccttgtcatcgagttcaccgagcagacagccccgaagatttttggaggtgaaatcaagactcacatcctgctgttcttgcccaagagtgtgtctgactatgacggcaaactgagcaacttcaaaacagcagccgagagcttcaagggcaagatcctgttcatcttcatcgacagcgaccacaccgacaaccagcgcatcctcgagttctttggcctgaagaaggaagagtgcccggccgtgcgcctcatcaccctggaggaggagatgaccaagtacaagcccgaatcggaggagctgacggcagagaggatcacagagttctgccaccgcttcctggagggcaaaatcaagccccacctgatgagccaggagcgtgccggagactgggacaagcagcctgtcaaggtgcttgttgggaagaactttgaagacgtggcttttgatgagaaaaaaaacgtctttgtggagtctatgccccatggtgtggtcactgcaaacagttggctcccatttgggataaactgggagagacgtacaaggaccatgagaacatcgtcatcgccaagatggactcgactgccaacgaggtggaggccgtcaaagtgcacagcttccccacactcaagttctttcctgccagtgccgacaggacggtcattgattacaacggggaacgcacgctggatggttttaagaaattcctggagagcggtggccaggatggggcaggggatgatgacgatctcgaggacctggaagaagcagaggagccagacatggaggaagacgatgatcagaaagctgtgaaagatgaactgtaatacgcaaagccagacccgggcgctgccgagacccctcgggggctgcacacccagcagcagcgcacgcctccgaagcctgcggcctcgcttgaaggagggcgtcgccggaaacccagggaacctctctgaagtgacacctcacccctacacaccgtccgttcacccccgtctcttccttctgcttttcggtttttggaaagggatccatctccaggcagcccaccctggtggggcttgtttcctgaaaccatgatgtactttttcatacatgagtctgtccagagtgcttgctaccgtgttcggagtctcgctgcctccctcccgcgggaggtttctcctctttttgaaaattccgtctgtgggatttttagacatttttcgacatcagggtatttgttccaccttggccaggcctcctcggagaagcttgtcccccgtgtgggagggacggagccggactggacatggtcactcagtaccgcctgcagtgtcgccatgactgatcatggctcttgcatttttgggtaaatggagacttccggatcctgtcagggtgtcccccatgcctggaagaggagctggtggctgccagccctggggcccggcacaggcctgggccttccccttccctcaagccagggctcctcctcctgtcgtgggctcatttgccaggctcaggccaggtctggacagctgtgactctcctcaagccaggactaccgaccagccggctatgggcacattacgtgaccactggcctctctacagcacggcctgtggcctgttcaaggcagaaccacgacccttgactcccgggtggggaggtggcccaaggatgctggagctgaatcagacgctgacagttcttcaggcatttctatttcacaatcgaattgaaccacattggcccaaataaagttgaaattttaccacctga

SEQ ID NO: 683948 - DNA, 220 bp, Homo sapiens
tattgtattgcttatgctccatagttgctgcatgagcgtcgctcttatgcaccgtaacccgggcgccaatttcggttcgtaatgaagctgggcttgttgtcgagccatcactgacctggacagatgcagacgtctgtcggaccaaaccaaggaagtgctgccatcaggagagatgtccgagatatccccattaatatgataaccgcctgtgcggacatga

SEQ ID NO: 683949 - DNA, 2495 bp, Homo sapiens
ggggacccaggatttataaggcgaggccgggaccgtgcgcgcgctctcgtcgcccccgctgtcccggcggcgccaaccgaagcgccccgcctgatccgtgtccgacatgctgcgccgcgctctgctgtgcctggccgtggccgccctggtgctgctgccgacgcccccgaggaggaggaccacgtcctggtgctgcggaaaagcaacttcgcggaggctgctggcggcgccacaagtacctgctggtggagttctatgccccttggtgtggccactgcaaggctctggcccctgagtatgccaaagccgctgggaagctgaaggcagaaggttccgagatcaggttggccaaggtggacgccacggaggagtctgacctgggccagcagtacggcgttgcgcggctatcccaccatcaagttcttcaggaattggagacacggcttcccccaaggaatatacagctggcagagaggctgatgacatcgtgaactggctgaagaagcgcacgggcccggctgccaccaccctccgtgacggcgcagctgcagagtccttggtggagtccagcgaggtggctgtcatcggcttcttcaaggacgtggagtcggactctgccaagcagtttttgcaggcagcagaggccatcgatgacataccatttgggatcacttccaacagtgacgtgttctccaaataccagctcgacaaagatggggttgtcctctttaagaagtttgatgaaggccggaacaactttgaaggggaggtcaccaaggagaacctgctggactttatcaaacacaaccagctgccccttgtcatcgagttcaccgagcagacagccccgaagatttttggaggtgaaatcaagactcacatcctgctgttcttgcccaagagtgtgtctgactatgacggcaaactgagcaacttcaaaacagcagccgagagcttcaagggcaagatcctgttcatcttcatcgacagcgaccacaccgacaaccagcgcatcctcgagttctttggcctgaagaaggaagagtgcccggccgtgcgcctcatcaccctggaggaggagatgaccaagtacaagcccgaatcggaggagctgacggcagagaggatcacagagttctgccaccgcttcctggagggcaaaatcaagccccacctgatgagccaggagcgtgccggagactgggacaagcagcctgtcaaggtgcttgttgggaagaactttgaagacgtggcttttgatgagaaaaaaaacgtctttgtggagtctatgccccatggtgtggtcactgcaaacagttggctcccatttgggataaactgggagagacgtacaaggaccatgagaacatcgtcatcgccaagatggactcgactgccaacgaggtggaggccgtcaaagtgcacagcttccccacactcaagttctttcctgccagtgccgacaggacggtcattgattacaacggggaacgcacgctggatggttttaagaaattcctggagagcggtggccaggatggggcaggggatgatgacgatctcgaggacctggaagaagcagaggagccagacatggaggaagacgatgatcagaaagctgtgaaagatgaactgtaatacgcaaagccagacccgggcgctgccgagacccctcgggggctgcacacccagcagcagcgcacgcctccgaagcctgcggcctcgcttgaaggagggcgtcgccggaaacccagggaacctctctgaagtgacacctcacccctacacaccgtccgttcacccccgtctcttccttctgcttttcggtttttggaaagggatccatctccaggcagcccaccctggtggggcttgtttcctgaaaccatgatgtactttttcatacatgagtctgtccagagtgcttgctaccgtgttcggagtctcgctgcctccctcccgcgggaggtttctcctctttttgaaaattccgtctgtgggatttttagacatttttcgacatcagggtatttgttccaccttggccaggcctcctcggagaagcttgtcccccgtgtgggagggacggagccggactggacatggtcactcagtaccgcctgcagtgtcgccatgactgatcatggctcttgcatttttgggtaaatggagacttccggatcctgtcagggtgtcccccatgcctggaagaggagctggtggctgccagccctggggcccggcacaggcctgggccttccccttccctcaagccagggctcctcctcctgtcgtgggctcattgtgaccactggcctctctacagcacggcctgtggcctgttcaaggcagaaccacgacccttgactcccgggtggggaggtggcccaaggatgctggagctgaatcagacgctgacagttcttcaggcatttctatttcacaatcgaattgaaccacattggcccaaataaagttgaaattttaccacctga

SEQ ID NO: 683950 - DNA, 1096 bp, Homo sapiens
  misc_feature (31)..(31): n is a, c, g, or t
cggtgtactctagagtgatccccaagcagtnatacagactcaagttctttcctgccagtgccgacaggacggtcattgattacaacggggaacgcacgctggatggttttaagaaattcctggagagcggtggccaggatggggcaggggatgatgacgatctcgaggacctggaagaagcagaggagccagacatggaggaagacgatgatcagaaagctgtgaaagatgaactgtaatacgcaaagccagacccgggcgctgccgagacccctcgggggctgcacacccagcagcagcgcacgcctccgaagcctgcggcctcgcttgaaggagggcgtcgccggaaacccagggaacctctctgaagtgacacctcacccctacacaccgtccgttcacccccgtctcttccttctgcttttcggtttttggaaagggatccatctccaggcagcccaccctggtggggcttgtttcctgaaaccatgatgtactttttcatacatgagtctgtccagagtgcttgctaccgtgttcggagtctcgctgcctccctcccgcgggaggtttctcctctttttgaaaattccgtctgtgggatttttagacatttttcgacatcagggtatttgttccaccttggccaggcctcctcggagaagcttgtcccccgtgtgggagggacggagccggactggacatggtcactcagtaccgcctgcagtgtcgccatgactgatcatggctcttgcatttttgggtaaatggagacttccggatcctgtcagggtgtcccccatgcctggaagaggagctggtggctgccagccctggggcccggcacaggcctgggccttccccttccctcaagccagggctcctcctcctgtcgtgggctcattgtgaccactggcctctctacagcacggcctgtggcctgttcaaggcagaaccacgacccttgactcccgggtggggaggtggcccaaggatgctggagctgaatcagacgctgacagttcttcaggcatttctatttcacaatcgaattgaaccacattggcccaaataaagttgaaattttaccacctga

SEQ ID NO: 683951 - DNA, 2300 bp, Homo sapiens
ggggacccaggatttataaggcgaggccgggaccgtgcgcgcgctctcgtcgcccccgctgtcccggcggcgccaaccgaagcgccccgcctgatccgtgtccgacatgctgcgccgcgctctgctgtgcctggccgtggccgccctggtgctgctgccgacgcccccgaggaggaggaccacgtcctggtgctgcggaaaagcaacttcgcggaggctgctggcggcgccacaagtacctgctggtggagttctatgccccttggtgtggccactgcaaggctctggcccctgagtatgccaaagccgctgggaagctgaaggcagaaggttccgagatcaggttggccaaggtggacgccacggaggagtctgacctgggccagcagtacggcgttgcgcggctatcccaccatcaagttcttcaggaattggagacacggcttcccccaaggaatatacagctggcagagaggctgatgacatcgtgaactggctgaagaagcgcacgggcccggctgccaccaccctccgtgacggcgcagctgcagagtccttggtggagtccagcgaggtggctgtcatcggcttcttcaaggacgtggagtcggactctgccaagcagtttttgcaggcagcagaggccatcgatgacataccatttgggatcacttccaacagtgacgtgttctccaaataccagctcgacaaagatggggttgtcctctttaagaagtttgatgaaggccggaacaactttgaaggggaggtcaccaaggagaacctgctggactttatcaaacacaaccagctgccccttgtcatcgagttcaccgagcagacagccccgaagatttttggaggtgaaatcaagactcacatcctgctgttcttgcccaagagtgtgtctgactatgacggcaaactgagcaacttcaaaacagcagccgagagcttcaagggcaagatcctgttcatcttcatcgacagcgaccacaccgacaaccagcgcatcctcgagttctttggcctgaagaaggaagagtgcccggccgtgcgcctcatcaccctggaggaggagatgaccaagtacaagcccgaatcggaggagctgacggcagagaggatcacagagttctgccaccgcttcctggagggcaaaatcaagccccacctgatgagccaggagcgtgccggagactgggacaagcagcctgtcaaggtgcttgttgggaagaactttgaagacgtggcttttgatgagaaaaaaaacgtctttgtggagtctatgccccatggtgtggtcactgcaaacagttggctcccatttgggataaactgggagagacgtacaaggacgacgatctcgaggacctggaagaagcagaggagccagacatggaggaagacgatgatcagaaagctgtgaaagatgaactgtaatacgcaaagccagacccgggcgctgccgagacccctcgggggctgcacacccagcagcagcgcacgcctccgaagcctgcggcctcgcttgaaggagggcgtcgccggaaacccagggaacctctctgaagtgacacctcacccctacacaccgtccgttcacccccgtctcttccttctgcttttcggtttttggaaagggatccatctccaggcagcccaccctggtggggcttgtttcctgaaaccatgatgtactttttcatacatgagtctgtccagagtgcttgctaccgtgttcggagtctcgctgcctccctcccgcgggaggtttctcctctttttgaaaattccgtctgtgggatttttagacatttttcgacatcagggtatttgttccaccttggccaggcctcctcggagaagcttgtcccccgtgtgggagggacggagccggactggacatggtcactcagtaccgcctgcagtgtcgccatgactgatcatggctcttgcatttttgggtaaatggagacttccggatcctgtcagggtgtcccccatgcctggaagaggagctggtggctgccagccctggggcccggcacaggcctgggccttccccttccctcaagccagggctcctcctcctgtcgtgggctcattgtgaccactggcctctctacagcacggcctgtggcctgttcaaggcagaaccacgacccttgactcccgggtggggaggtggcccaaggatgctggagctgaatcagacgctgacagttcttcaggcatttctatttcacaatcgaattgaaccacattggcccaaataaagttgaaattttaccacctga

SEQ ID NO: 683952 - DNA, 2439 bp, Homo sapiens
ggggacccaggatttataaggcgaggccgggaccgtgcgcgcgctctcgtcgcccccgctgtcccggcggcgccaaccgaagcgccccgcctgatccgtgtccgacatgctgcgccgcgctctgctgtgcctggccgtggccgccctggtgctgctgccgacgcccccgaggaggaggaccacgtcctggtgctgcggaaaagcaacttcgcggaggctgctggcggcgccacaagtacctgctggtggagttctatgccccttggtgtggccactgcaaggctctggcccctgagtatgccaaagccgctgggaagctgaaggcagaaggttccgagatcaggttggccaaggtggacgccacggaggagtctgacctgggccagcagtacggcgttgcgcggctatcccaccatcaagttcttcaggaattggagacacggcttcccccaaggaatatacagctggcagagaggctgatgacatcgtgaactggctgaagaagcgcacgggcccggctgccaccaccctccgtgacggcgcagctgcagagtccttggtggagtccagcgaggtggctgtcatcggcttcttcaaggacgtggagtcggactctgccaagcagtttttgcaggcagcagaggccatcgatgacataccatttgggatcacttccaacagtgacgtgttctccaaataccagctcgacaaagatggggttgtcctctttaagaagtttgatgaaggccggaacaactttgaaggggaggtcaccaaggagaacctgctggactttatcaaacacaaccagctgccccttgtcatcgagttcaccgagcagacagccccgaagatttttggaggtgaaatcaagactcacatcctgctgttcttgcccaagagtgtgtctgactatgacggcaaactgagcaacttcaaaacagcagccgagagcttcaagggcaagatcctgttcatcttcatcgacagcgaccacaccgacaaccagcgcatcctcgagttctttggcctgaagaaggaagagtgcccggccgtgcgcctcatcaccctggaggaggagatgaccaagtacaagcccgaatcggaggagctgacggcagagaggatcacagagttctgccaccgcttcctggagggcaaaatcaagccccacctgatgagccaggagcgtgccggagactgggacaagcagcctgtcaaggtgcttgttgggaagaactttgaagacgtggcttttgatgagaaaaaaaacgtctttgtggagtctatgccccatggtgtggtcactgcaaacagttggctcccatttgggataaactgggagagacgtacaaggaccatgagaacatcgtcatcgccaagatggactcgactgccaacgaggtggaggccgtcaaagtgcacagcttccccacactcaagttctttcctgccagtgccgacaggacggtcattgattacaacggggaacgcacgctggatggttttaagaaattcctggagagcggtggccaggatggggcaggggatgatgacgatctcgaggacctggaagaagcagaggagccagacatggaggaagacgatgatcagaaagctgtgaaagatgaactgtaatacgcaaagccagacccgggcgctgccgagacccctcgggggctgcacacccagcagcagcgcacgcctccgaagcctgcggcctcgcttgaaggagggcgtcgccggaaacccagggaacctctctgaagtgacacctcacccctacacaccgtccgttcacccccgtctcttccttctgcttttcggtttttggaaagggatccatctccaggcagcccaccctggtggggcttgtttcctgaaaccatgatgtactttttcatacatgagtctgtccagagtgcttgctaccgtgttcggagtctcgctgcctccctcccgcgggaggtttctcctcttttaccttggccaggcctcctcggagaagcttgtcccccgtgtgggagggacggagccggactggacatggtcactcagtaccgcctgcagtgtcgccatgactgatcatggctcttgcatttttgggtaaatggagacttccggatcctgtcagggtgtcccccatgcctggaagaggagctggtggctgccagccctggggcccggcacaggcctgggccttccccttccctcaagccagggctcctcctcctgtcgtgggctcattgtgaccactggcctctctacagcacggcctgtggcctgttcaaggcagaaccacgacccttgactcccgggtggggaggtggcccaaggatgctggagctgaatcagacgctgacagttcttcaggcatttctatttcacaatcgaattgaaccacattggcccaaataaagttgaaattttaccacctga

SEQ ID NO: 683953 - DNA, 399 bp, Homo sapiens
ccaatgaaatatgtgctccacaagtggtaagtgtcagcagatggtgtggggtgaggagagtgaggtaccacttcatatcctacctgtctgatgaaactgcactattgcgcaggtatgctggcaacaaggctacctgatgtgtgctctagtcctgacacgggtgccatgggtccaatacggtgaaggaaagaacagtatcttcaacaaatggtgctggtaaggactggatatacttatgaaaagtataaagctagacccctacctcacaccatatacaaaaattaactcaagatggatcaaagacctaatgtaagagctaaaattataaaactcttagaataaaacagaggtgtaaatctttgtgaccttggattatcccatgatggtagaaccgactga

SEQ ID NO: 683954 - DNA, 2510 bp, Homo sapiens
ggggacccaggatttataaggcgaggccgggaccgtgcgcgcgctctcgtcgcccccgctgtcccggcggcgccaaccgaagcgccccgcctgatccgtgtccgacatgctgcgccgcgctctgctgtgcctggccgtggccgccctggtgctgctgccgacgcccccgaggaggaggaccacgtcctggtgctgcggaaaagcaacttcgcggaggctgctggcggcgccacaagtacctgctggtggagttctatgccccttggtgtggccactgcaaggctctggcccctgagtatgccaaagccgctgggaagctgaaggcagaaggttccgagatcaggttggccaaggtggacgccacggaggagtctgacctgggccagcagtacggcgttgcgcggctatcccaccatcaagttcttcaggaattggagacacggcttcccccaaggaatatacagctggcagagaggctgatgacatcgtgaactggctgaagaagcgcacgggcccggctgccaccaccctccgtgacggcgcagctgcagagtccttggtggagtccagcgaggtggctgtcatcggcttcttcaaggacgtggagtcggactctgccaagcagtttttgcaggcagcagaggccatcgatgacataccatttgggatcacttccaacagtgacgtgttctccaaataccagctcgacaaagatggggttgtcctctttaagaagtttgatgaaggccggaacaactttgaaggggaggtcaccaaggagaacctgctggactttatcaaacacaaccagctgccccttgtcatcgagttcaccgagcagacagccccgaagatttttggaggtgaaatcaagactcacatcctgctgttcttgcccaagagtgtgtctgactatgacggcaaactgagcaacttcaaaacagcagccgagagcttcaagggcaagatcctgttcatcttcatcgacagcgaccacaccgacaaccagcgcatcctcgagttctttggcctgaagaaggaagagtgcccggccgtgcgcctcatcaccctggaggaggagatgaccaagtacaagcccgaatcggaggagctgacggcagagaggatcacagagttctgccaccgcttcctggagggcaaaatcaagccccacctgatgagccaggagcgtgccggagactgggacaagcagcctgtcaaggtgcttgttgggaagaactttgaagacgtggcttttgatgagaaaaaaaacgtctttgtggagtctatgccccatggtgtggtcactgcaaacagttggctcccatttgggataaactgggagagacgtacaaggaccatgagaacatcgtcatcgccaagatggactcgactgccaacgaggtggaggccgtcaaagtgcacagcttccccacactcaagttctttcctgccagtgccgacaggacggtcattgattacaacggggaacgcacgctggatggttttaagaaattcctggagagcggtggccaggatggggcaggggatgatgacgatctcgaggacctggaagaagcagaggagccagacatggaggaagacgatgatcagaaagctgtgaaagatgaactgtaatacgcaaagccagacccgggcgctgccgagacccctcgggggctgcacacccagcagcagcgcacgcctccgaagcctgcggcctcgcttgaaggagggcgtcgccggaaacccagggaacctctctgaagtgacacctcacccctacacaccgtccgttcacccccgtctcttccttctgcttttcggtttttggaaagggatccatctccaggcagcccaccctggtggggcttgtttcctgaaaccatgatgtactttttcatacatgagtctgtccagagtgcttgctaccgtgttcggagtctcgctgcctccctcccgcgggaggtttctcctctttttgaaaacttccggtctgtagggatgtgtgttagacattctcttcgacatcaggggctactcttgggtcacaaccttggccaggcctcctcggagaagcttgtcccccgtgtgggagggacggagccggactggacatggtcactcagtaccgcctgcagtgtcgccatgactgatcatggctcttgcatttttgggtaaatggagacttccggatcctgtcagggtgtcccccatgcctggaagaggagctggtggctgccagccctggggcccggcacaggcctgggccttccccttccctcaagccagggctcctcctcctgtcgtgggctcattgtgaccactggcctctctacagcacggcctgtggcctgttcaaggcagaaccacgacccttgactcccgggtggggaggtggcccaaggatgctggagctgaatcagacgctgacagttcttcaggcatttctatttcacaatcgaattgaaccacattggcccaaataaagttgaaattttaccacctga

SEQ ID NO: 683955 - DNA, 986 bp, Homo sapiens
gaaccacgattaacgaatatcgagcgtcggtactcccggaaggccttgaaatggcccggagtgcgttgaatggcaccggaggctgttgaaatggccccccacaatgcagtcatgctggccagactgtaatacgcaaagccagacccgggcgctgccgagacccctcgggggctgcacacccagcagcagcgcacgcctccgaagcctgcggcctcgcttgaaggagggcgtcgccggaaacccagggaacctctctgaagtgacacctcacccctacacaccgtccgttcacccccgtctcttccttctgcttttcggtttttggaaagggatccatctccaggcagcccaccctggtggggcttgtttcctgaaaccatgatgtactttttcatacatgagtctgtccagagtgcttgctaccgtgttcggagtctcgctgcctccctcccgcgggaggtttctcctctttttgaaaattccgtctgtgggatttttagacatttttcgacatcagggtatttgttccaccttggccaggcctcctcggagaagcttgtcccccgtgtgggagggacggagccggactggacatggtcactcagtaccgcctgcagtgtcgccatgactgatcatggctcttgcatttttgggtaaatggagacttccggatcctgtcagggtgtcccccatgcctggaagaggagctggtggctgccagccctggggcccggcacaggcctgggccttccccttccctcaagccagggctcctcctcctgtcgtgggctcattgtgaccactggcctctctacagcacggcctgtggcctgttcaaggcagaaccacgacccttgactcccgggtggggaggtggcccaaggatgctggagctgaatcagacgctgacagttcttcaggcatttctatttcacaatcgaattgaaccacattggcccaaataaagttgaaattttaccacctga

SEQ ID NO: 683956 - DNA, 542 bp, Homo sapiens
  misc_feature (45)..(45): n is a, c, g, or t
  misc_feature (61)..(61): n is a, c, g, or t
  misc_feature (69)..(69): n is a, c, g, or t
  misc_feature (73)..(74): n is a, c, g, or t
  misc_feature (83)..(83): n is a, c, g, or t
  misc_feature (88)..(88): n is a, c, g, or t
  misc_feature (105)..(105): n is a, c, g, or t
  misc_feature (139)..(139): n is a, c, g, or t
  misc_feature (157)..(157): n is a, c, g, or t
  misc_feature (164)..(165): n is a, c, g, or t
  misc_feature (169)..(169): n is a, c, g, or t
  misc_feature (178)..(178): n is a, c, g, or t
  misc_feature (196)..(196): n is a, c, g, or t
  misc_feature (198)..(198): n is a, c, g, or t
gtggagggggggccgcgggtgggaaaaggccggcggggggagggngatatagggggcgacngcaggggntgtnngccactggngttgnggcctgttggcggagangctgtgtggctccccgggggggtagggacggagncggatgggacaggttttngctgtanngtcngcagggttnttaggttggagcaggggncnggcatttttgggtaaatggagacttccggatcctgtcagggtgtcccccatgcctggaagaggagctggtggctgccagccctggggcccggcacaggcctgggccttccccttccctcaagccagggctcctcctcctgtcgtgggctcattgtgaccactggcctctctacagcacggcctgtggcctgttcaaggcagaaccacgacccttgactcccgggtggggaggtggcccaaggatgctggagctgaatcagacgctgacagttcttcaggcatttctatttcacaatcgaattgaaccacattggcccaaataaagttgaaattttaccacctga

SEQ ID NO: 683957 - DNA, 143 bp, Homo sapiens
acgctaggctatcattctccaccccatcagacgccaaagctgccatttacataagtgcttgcagttgcgcccatttatgctcctgaaatgaaatttatggctaatatgccagcctttacatctaattaaaaatcatccaatgg

SEQ ID NO: 683958 - DNA, 277 bp, Homo sapiens
tcccgcgggtctcgtataatcgaccttccatcccgttgtgtgtggttatcatttgttttgaggttagtttgataagtcattgttgggtggtgataagtcggtagtagataaagatatttggaggtggggcatcaatcagagggggaaatcagaatgatcaagccacgtgcggcggggtaggcctaggattgtgggggcaatgaatgaagcgaacaggatttccgtccattatgggtcctcagggttggtcataaatttttcatcttcaatggggctt

SEQ ID NO: 683959 - DNA, 130 bp, Homo sapiens
ccgtgctgtgttcatagcccggagtgatggtcatggctctctgtgggggtcatgtcttcaagcagggaggcggatcagctggtatgggatcctcaggagtagttctgatcagacagtgtattggcgaaca

SEQ ID NO: 683960 - DNA, 263 bp, Homo sapiens
tcaatcactatccttctgaaagctcgcagtactcattcgtttgtctaactggcttaatcaaattgagtgaaaaggtgtgtgtgcaaaaaaatttataattggatttcacgatgttatgtaaaagatgagtgtagttgtgaaattggatggcctcttgcaaatacataacgcgttgaatcctgactgtccattatacagatcggtcacatgtgcccataacattttaaaagttaagggaagcgattgatgttgtattgggaaca

SEQ ID NO: 683961 - DNA, 100 bp, Homo sapiens
cagaactaacctcgtccaaaaaatactgggactatagaaagaaagactattttgggccgggcacagtggctcacactataatcccagcactctgggaggc

SEQ ID NO: 683962 - DNA, 464 bp, Homo sapiens
  misc_feature (464)..(464): n is a, c, g, or t
ttttattgatgttttgtaaaaaggcccatgcgcgttttattaataaaaactaacagggccggggtaaacaaggcaaacaattaaagggtttttatttcccataaaatattgcagaaaagtttttttgggtttcaataaaaagactatcgttttagaacagggggttagtagcaacggggcagttaaggggtttggggaataaattttaaaagagactactgcctggccttaaatcacttctttttttatgaaaaaacgacctttcaaaaatgagggacaaattttggggtaaaaaatgtggaaagcgtgtggtatatttaagtgcagttttgtaatagattacaggagggtgcttatgaaacaaatacatttgtttaaatacatgtctttaaatgatagacttataggtgtgtaaacaactatataataaagggtttccaaacgctgcctgtaaaaaatcaggn

SEQ ID NO: 683963 - DNA, 142 bp, Homo sapiens
gggtcaccgactatgcagaggagaaggagatccagagttccaatctggagacggccatgtctgtgattggagacagaaggtcccgggggcagaaagctttttaggagcgggagaaagaactggcaaaagtcactatcaagaa

SEQ ID NO: 683964 - DNA, 258 bp, Homo sapiens
gtagagcatccctgtattaccgtcccttcgtggatatgccatctgacgatcagtgttgccccttagtgcaacttggactcagttgtgtctcacgcatactctatctatcaatagttccaaccccctatttagcatgcgcccacgagatgtacaaagtctggggcacgctcaccgccctacttgccgtggttgtgtgctgccacaagagggctggtcaggcggtaacgcacgcgagacctggtcaggtcagcgcgcacc

SEQ ID NO: 683965 - DNA, 156 bp, Homo sapiens
ttttttttttttgtgggggggttttaaaattttaattccaaaagctgggatagcttcaatatccgggtgggggcaaaactcaggacgggtgtaaaatcaccttacaatactttagatccccaaaaccctcgtgcggttcccgacctcgaatccgta

SEQ ID NO: 683966 - DNA, 277 bp, Homo sapiens
ctagaacctgttttgcagtgaaattattaagatcatgctagttttataaaataggttggaataggaaaagtaaggccatgcaatttaaaactgttctctataaaagtacaactaatttcaaatgtttgttacttttatttttttttttatactaaccgtgtgtggagtgactataatatacctgctcaaagggcttaaaaaggaaatagatgaaacttaagctaccttttgggcctttatttatgaacatcaagttattgcggtcacattccatgtc

SEQ ID NO: 683967 - DNA, 246 bp, Homo sapiens
aatgcgaatgttaagtttttaaagtatctgataattatgcagaggaaaaaatataattttgctttaatttgtgtttatttgctgtcagcgaggttgttttcctccaaaagtttattaaccatttggttttcttttcagtagggttttaggttctttaacccatttctgaatcaatgtttaatgtgtttgtgtatgtgtctgtgtgtgtattcattttatacaaatagaaaaatattcttactgtaa

SEQ ID NO: 683968 - DNA, 509 bp, Homo sapiens
gctcggtacccccaagatctttgagcatcacctgggtattgaaaccagctatacttcacaatagcctaagtagacagggcacaggtggtagagctccatcacctgggtgctgagcccaaggatatgtcacaatgttcttgtgggcaaggctcaggcaggagagaaacattttctaattgctgggtccagtgatgtcacaatcttctctgtgggaagaatgcaggcagaagaggaaagtcacatatttctaggtaataaaaccagaagacaggccacaaagcatcctgtgggcagggcccaggcaggagtctctcatcccctaggtgtcaggccaagagatttgtcacaatactcataatataccatgccctggcaataaaggtgagttacatcacctaagtgccaagtccagggatatgtcacaatttctgtttcatcaaggcccaggcataagtggagagtcataccacctgggtgatgctcaaagatcttgggggatcctctaggaa

SEQ ID NO: 683969 - DNA, 191 bp, Homo sapiens
tcacggcagagctagcatggatctctgaattgcagaagttgcgttgcaggccatacagtgaagtagtagcttggtacggactgccaaatgttgagatgggctcaactttgggcaaactgcagaagtaacttgaggcctatgttgacactagcaatggcatggaaccatatgacgacaaatccacatggtgt

SEQ ID NO: 683970 - DNA, 342 bp, Homo sapiens
gaagatctgtactagaggccaggacaggccagggaatctgtgagtctggctcaagagcgacattgccttggttagttacagtgactatcgtgatggggaaactggctggaaaatagtactcacacctctctgtaaagagtaagagtctaatgaaactctcatctagttctgtgatgtgtttacctctattttacaggcctcaggacctcttctatttccttccctaataccccaacacccaacctgtcgtaaatttctggagacctccaggtacgtgttttcagaggtgtaggccacataaatccctgtgtttcacatatctccccctctctaccctcctag

SEQ ID NO: 683971 - DNA, 658 bp, Homo sapiens
ggccccacaactcaattaaggggatccccaatgcgccggcaggtacacctggttgatccagactgcctaccagcagtgtatgagacttcaagctgctccatatctttgtcaacactgactgttgcgctatttttaagcttttagctactatagtgagtggggtagtatctggtcctcatatcctcatcacggtcacggagcatctgtgccatctggtactgaagcaagccactgaggtcgtggtagcggcagaggtaagccacggcagtggccacatcctggtaatctgtgtacagcgtaccatagcggagcacagacatcacgaagtccatactggatgcccacatcacatgggtcctctgggggtcagggagcctttgcaggcttaggacactgtggtactcaacaggcttctcaaacacgtacagcatgtagacctcatccacaatcacatgcagcctgtgcctggacttaggcaggggtgtgtaggacagacttagtgtgtaggtcagatgcgtcccacagggtcggcaggtaatacatcagaaatccagaggggccggggtctagcccggggttaccaaactcgtttttccaagaacaccattctttattctgtttttttcaagcagaaagccacacatacagagcaggtgac

SEQ ID NO: 683972 - DNA, 954 bp, Homo sapiens
  misc_feature (233)..(233): n is a, c, g, or t
ccagtgtggggatccccaatatggtgcccacgggacatggactgggtgggaataccacgtggccaaggggcgtccccgtttggaccttttccggatgggacttttggaacccaggcgcgaacactgggcctttaaggtttgagcccatcccgcctggctttaaggggcccaggggtctacctaggtatcgctggttgcctcgccttgtatgacgaccccctttgccggggatntcatcagggccttttggtttggaggccccccacggcccttcttgaagcacggggcacagataaccttctcaagtgtgaaggagactcagaagaagtgggccgagccatacctcgaagattcatggggaagattcttagaacccaaggggaggactttccccgcatccacgagatgaccccggtattcccccggcttgatttgagaagaacaccaagattagttgaccgggaagaaggaggaggctcccacgaagagcgcttataaccatctcctcgactgccctcttccacgaaagaaagggggccgcaagaataagaaggaggctcgtataaaaagcgctcgttctcgtgaatttgtcccacgcggtttgtgtgggggtataggagaggggagaagattaacctcgctggctcgtgagtcccctctgtggaataataaagaggggttagatggggaaaagatggtacataacccccgatttctggagcccctcggagttatagccctcggaccttgatagctaacatgacccatagcttgggatagtctcttagctggtctggggtattagctggagccacttactccaggtggctggtgaaatgcaccacctccagaaggaatagagtgcttatatagagaggagagaggagtgtactgccccggtctttgaccagatagtaattctcattccaattaaagtttcagtgttttggttta

SEQ ID NO: 683973 - DNA, 532 bp, Homo sapiens
  misc_feature (222)..(222): n is a, c, g, or t
  misc_feature (280)..(280): n is a, c, g, or t
ggaccacggtcatgtatacggaagtcgctaactacaaacatgtccatttgagttttagacatctctgtatcatagaagcaacaacagcatcagtcctcagtctctgtgtgactgattattaacaactgtagacttgggcttgttaccttagataaagccggccggtctagagttgtccccctaatcaagatgtctaaatggccccagtcaaaagagtgccanagcttacatcagtaagagagaaaaataaaaattttttattcgtttataagtatctttngtgctgaaagtcaactttatgactggatataaaaagtcaggagttaagagtgtcatgcagcagcactgatttaatgactggagatagaacaaacagatgtttgaacaaagactgacattcttaacaggttttattatattgggtggaatgctctaaattcatgaacgcttttggaaaatcttcaattctcaaccccttaaaaaagtaccctgaaccaggaagaaaaaacaagagacagaaataatgatctgg

SEQ ID NO: 683974 - DNA, 331 bp, Homo sapiens
  misc_feature (108)..(109): n is a, c, g, or t
atcatcacaccactgtactcctgtactctagcctgggcagcctcgttctttaagtaagacactgtctctttaaaaaaaaaaaaaaaaaaaaaaaaaaaaaaaaaaggnntttagtggaattttttttaaggggaaccaggtgtatttttaataattggctttaattggattctattaaatcacctcaaaagctgaatctcgattccggatttggatggaaattattttaatttaagggaggagggatagattaattgacacgaattaggggaaaagacttctggtaataagggccggggttttttaaattgatttttggaatagtaagatg

SEQ ID NO: 683975 - DNA, 427 bp, Homo sapiens
  misc_feature (19)..(19): n is a, c, g, or t
  misc_feature (233)..(233): n is a, c, g, or t
tttaaaggtattaagttanagatgtatgtagagtatagactctagtttaaaagagtagaaactgaacttcatgccatatggattgtaattatatgtaaatgtcacttgtatttactcagatgaaggaaagagatgaaagtcataccctaaccttaccaatatatggcttgggctgagcccagagtgtttccttcttactatccctaggcctaggcctagaggcttctagcccntgtacaatctaatcttcaacaagtatataccttgaaggcttcagctcctagcctccatctgctaacctaggtctagaatgttttaggctctgagacttactgctgaataaactcactctttctagaacattctgaactctggctgactggttaaatccgcagtcctggcccaaagtcagattctcagtcgacgc

SEQ ID NO: 683976 - DNA, 932 bp, Homo sapiens
  misc_feature (21)..(21): n is a, c, g, or t
  misc_feature (161)..(161): n is a, c, g, or t
  misc_feature (280)..(280): n is a, c, g, or t
  misc_feature (338)..(338): n is a, c, g, or t
  misc_feature (404)..(404): n is a, c, g, or t
  misc_feature (480)..(480): n is a, c, g, or t
  misc_feature (524)..(524): n is a, c, g, or t
  misc_feature (644)..(644): n is a, c, g, or t
  misc_feature (650)..(650): n is a, c, g, or t
  misc_feature (655)..(655): n is a, c, g, or t
  misc_feature (662)..(662): n is a, c, g, or t
  misc_feature (690)..(690): n is a, c, g, or t
  misc_feature (692)..(692): n is a, c, g, or t
  misc_feature (699)..(699): n is a, c, g, or t
  misc_feature (714)..(714): n is a, c, g, or t
  misc_feature (788)..(788): n is a, c, g, or t
  misc_feature (819)..(819): n is a, c, g, or t
  misc_feature (822)..(822): n is a, c, g, or t
  misc_feature (828)..(828): n is a, c, g, or t
  misc_feature (837)..(837): n is a, c, g, or t
  misc_feature (850)..(850): n is a, c, g, or t
  misc_feature (862)..(862): n is a, c, g, or t
  misc_feature (866)..(866): n is a, c, g, or t
  misc_feature (868)..(868): n is a, c, g, or t
  misc_feature (906)..(906): n is a, c, g, or t
tcagtaaagtcatggcaagtngcatagccacccatgtcagaggttcgaacctgtgggggagaatcatcatcatccatgtggcctgggccccatcctaacaatccccatcaccacccaacagtctgtccccaaaggaagccggcccaaggacaacctaggcnctacccagcaaggggaccatggtccactgcttagaggcacaagggctctcccctggaacactgcactgaagggtatggggagtgtggcccttgcaaggttggaagaaataaagggctcnagccccctttagtctgcaggggaccgaggacagacttgatgaagtgggttgtggtgcngtagccgcccatgtctcgagtccgcacctggccaactttgatcaccttcttcaccgcatctgcgancatgccggagtaaaacccaagattaagaggccgcagcatgtgggaagccgacagcagcatggccgtgggaatggcnaaattcctgcccactgcctgggcaaatgggtgccgggcaccgtnctcaaagactgcgtatcccgcactatagccctcaccagggaccacaccagcccccccaaccaggccagcagccagaatgtcaataatgtccccatagagattgggcatcacaagcacatnaaactngtaangattctncaccagctgcatgcagcagttgtttatnancattgtntcaaatttgattttngggtacagttcagcaacttcctcacagcacttcaggaacaacccatccccaagtttcatgatgttggccttgtngacagcagttaccttgccccgccccttcttngtngcatantcaaatgcnaactttgcaatcngctgagactttncttntntgaaaattttcaaacactcaatcacaccccttgcactntcatgtgccagagagctgtactccct

SEQ ID NO: 683977 - DNA, 578 bp, Homo sapiens
gttatgtgccattggcttgatgtgcatcccggtattcttaattgatatttgattaatcccataccttgattaaaacatgctagttcaaaataagactgctcagtttccaagggtttcaaagcctacttacctttataaagggtctctagtctctgattagccatgactgtattggactttgaacattttctgaactaaaaacctctattctaaactaatctcatttggatgtgtaagtcttttgtaaaggcaagaataaataatatccaggacaatttttagttttctcagtattttcccaaagattgaatattacttcatttttggtggcggcctttgcgctcgatggtggcgtggggggagtagtggcggtatctgggatataatacatagtctccaaataggtaatacttcgcaattgattagattttcagagtagatttagagttatctgtttttctggtgagggtcaaatatttttgttaattaagctcacaaatttgataaattaagaattatctgcatttgtctcgtaacataataatgtgtaataaagtctatagaaaattaaaaaaaaa

SEQ ID NO: 683978 - DNA, 398 bp, Homo sapiens
tgactgactatcactaatgactagggcccgcttggagcaatggaatacattgaacgtatggcccaggcagctgatatctacacagctgaagatgagaagcagcagggacacggtgtcatccaaaaattcacttcattcctattccttcagcatgtaaagcaacctgattgaacgatgagatacatcttcaaggcacgattaccgatgaggacaaacataagattctggacaagtgtaatgaatattatcaagctggcctgataagcaatctcgaatgctgagaaggaagaatctgaacatcaacagagagacctggataaagtaggcaaccccatcatcaccaatctgtaccagagtgcgtgaggcatgccacggaggcaatgcccgcgggtaggagg

SEQ ID NO: 683979 - DNA, 429 bp, Homo sapiens
  misc_feature (41)..(41): n is a, c, g, or t
  misc_feature (43)..(43): n is a, c, g, or t
  misc_feature (48)..(48): n is a, c, g, or t
  misc_feature (61)..(61): n is a, c, g, or t
  misc_feature (65)..(65): n is a, c, g, or t
  misc_feature (76)..(76): n is a, c, g, or t
  misc_feature (84)..(84): n is a, c, g, or t
  misc_feature (90)..(90): n is a, c, g, or t
ccgcggttatgtcttacgaccccacttggtgattttttttnanctctngattacaaagtanattnatttaattttntattatanttgatntacaatgttctgtcaatttctgctgcacagcaaagtgacccaattatacatacatatacattctttttctcacatcatcctccatcatgttccgtaagacataaccgcggccgcggttatgtcttacgcttccttgtgggctaagcaggataggatgtttctttcacattatacaagtgatggggacaaaccaccatagttatctttgactccggaggtgggcatggccttccagcactaggggtccatgaacaggcaccacttgtggccccaatcacctcagaaggcaaaacagaggatggcattgtgagcaagcaacacctgttgttgctcgcaagg

SEQ ID NO: 683980 - DNA, 396 bp, Homo sapiens
tccgtacagcgactcctaacgtcctaacacgcccagactgctacaagctgggcgctcgttacggaggcgctcgttaggcgctcgttacggaggcgctcgttacggaggcgctcgttaggcgctcgttacggacgttacggaggcgctcgttacggaagcgctgttacggaggcgctgttacggaggcgctgttacggaagcgctgttacggaagcgctgttacggaggcgctgttacggaggtgttaggacgttacggaggcgctcgttacggaagggtgtaacggaggcgctcgttacgggtgtacggaggcgctcgttacggagggttacggagggtccgttaggaggcgctcgttacggaagcgctgttacggaagcgctgttacggaggtcg

SEQ ID NO: 683981 - DNA, 421 bp, Homo sapiens
actctgggacaatcagatttcacatattctgtgagcttgcataagccattaaaagcttggagattactgtatttggcattaaaaaaaaaatgtcacttaggtcagcactccgagacgtagcgcagaaagaccctttgagacaaaccaggtgttctggtttttgtgtcagaagagagtgaaactgtgagttgtgtttttgttgacaactggggagaaacagaaacagaaaactatagttagaaagatggaagttccgtagggtctatttcttactctatgtatggctttgtgttcagtctatttctaggagcttgctctgaatcgctaattgtccttgcagttgaaatctaatttatacaatcagtctatactgaaaggttgaatacatcttaattagttttttcttaaagtcaaaaaaaaa

SEQ ID NO: 683982 - DNA, 395 bp, Homo sapiens
  misc_feature (76)..(76): n is a, c, g, or t
tatcgcccaacactaggaacacccaaattctgtaatggtgaatggttaaagaacctatgtgacatccataccatgnaatacgatccagccataaaatggaaccaaacctttcacacaggcaacaacttggaagaacctcaaggaaattatgctgagtgaaaaaaaaaaaaagcccggtctcaaaatggggccatacgacatagtcctttttttgtaccatccaaaaaattaccatattaacagagatgaagaacagataagggatggtcaggagttaagagatatgggagagagaataattgtcgctggaagaggaatagctctaaggaagtctaggggtagatggtaagtaatagtctctgagatggtggtggtggtggggaataacttcaagg

SEQ ID NO: 683983 - DNA, 886 bp, Homo sapiens
tacgacaatgggccgtttaacatttaagctgcttaaaaagtcacgcagttgaatgatgcatttagaacatcttttttagcttactagctctcagaatggatatggaatctgttaaatatagaggccattctttaacataaggccgacagttaacattgggaagccagagaattaggattggaactgatttacgatgagtctacaggacattaacgacaaacactaaacgttagcaccacggaaatccactggctgcattggctatattacagcagagaatttttactttttcatccctttttgaaattggctggactactactgggtaatgcatagaaacagaccttttcgggacaaaaaattgacaggaacttttcttctctacatatattgttctgggcatcggtttggtattggcatcgtaaagcctctgactataaccaagtcagatttcttgtattatgacacgatacccacaccttttattttcacattaacatgagaacaacccatttccccttaacaaagcacttaagaacgttgacattcactaggaagcttggcatatgagcaactacttttgttgggtgttcattgcccgcatttgaccacattgggatccctataattaaaatacccatttttggcacgaattgacaccattgggcttgttgcgtataatagggaggctatatactatacttggtggtaaatccatccaacacaattggccttatattccgcttttcataagcaacttggatacatgccatttccgatacatatcgcaccagcacataacgtttgtctaaccatttttattgggagaacacaaaagcaactgttaactctcacctaaacacgtgttatctacacatatatacac

SEQ ID NO: 683984 - DNA, 703 bp, Homo sapiens
acatacaagcttaaaaacagaaagggtccgactcgatggggtgcgaccagtaccggttggcggctcataatccctaggacagaggggtagtaaagtgtaatatgagtcaccatataccacagatagttgcggactcgacccaagaatgcattaagtcacaagtaacggcaagaacacaaacgttgatctataaacaagttgaagttgtcacgtatactgtactcctctataccgatcggtaagctgtaagcccttcgcagggcactcgtaacacgcacagcatagggtcaatgttgaccatagatcttcacccgatactggccagatacgctcctatatgtgtaggtacagcacttagagtctgtccctaaccagtgcactgtgtgttcccatgactccagaaacaatgtgtcgcccagtgcagtattaagtccacagccaagtttatgctctaactatccacagcaccggcaaagacaaatgacgcgacaatttgttagataatcaacaggattacttagaatgcgaccacttcaagtcaaatttcagtggccgccaggtcacagcaccttcacagtgtcgtgcatgtcatcatgtggatcttgcaaaactgaaggatctgcgatggacatgtcctataagaaacatagtgtgtccctcgtcgtagctagcccgaagttccttgtgactttgtaagttgtac

SEQ ID NO: 683985 - DNA, 117 bp, Homo sapiens
gagccggaccgggatatccaccgcaaggtgatggtttatgaggattctgggttcattgctcctagtttcatctgcttcatctgtgtaaactcttcttcctctttgaaaagaaacagg

SEQ ID NO: 683986 - DNA, 494 bp, Homo sapiens
  misc_feature (103)..(103): n is a, c, g, or t
gggtccatgcacgaacagagagaacatgctatgacttgaatgtaacagtacactggtgctgtgtggaaatagacggatggggcaacatgaggtcattgtgctnaatctagataagatgtgtatccagttgttgcatagaaggtgagagtggttggatctagaaatatttgacagaaagagctgtcgaattgttgatgatttacatgcagggataagagaaagggagatgtcaggtgattccactgtttgtgacctgaataattggaaacatgcaatacaattggctgaagaaatctgggagagagaagaaaggggatttgtgggggatgtgttaaatttgagacaatcaagtgtgatatggagaagacagttggatatacaagactggagctcagagaagtctgggtttgaagatatacatttgggagttggtatttatcaccacaggagtggattagtttccctagaaagtgaaggagacaagaattccaagt

SEQ ID NO: 683987 - DNA, 518 bp, Homo sapiens
  misc_feature (3)..(3): n is a, c, g, or t
  misc_feature (59)..(59): n is a, c, g, or t
  misc_feature (137)..(137): n is a, c, g, or t
ccntagtaactgtcaggttcagctctattctggtagaagcacaactttcagactgaggnatgattaatttgtctcccgtttggaccttttcacatgcttctagactgatgtgtctaatacttcctgctgggcaaatntccacaagtacagaccatgataactccaccctgagctcaccaaaaggaagaagagcagaatacaacgctgtggctagggtacgcctctctgatttcacttttcctgaagagccataaaggttacctgatggccaggcgcagtggctcacgcctgtaatcccaacactttggaaggccaaggcgggcagatcacaggtcaggagatcaagacctcctggctaacacagtgaaaccccatttctactaaaaatacaaaaattagccaggcatggtggtgcgtgcctatagtcccagctacttggaggctgaggcaggagaactgcttgaacccgggaggtgtccctgcactccagcctgggcaacagagcaagattctgtctc

SEQ ID NO: 683988 - DNA, 225 bp, Homo sapiens
ataaagtggaggggagaagcggcctccttccacttaggacagtggtccaagccagagcggaaaggcaggggagtaggatgaatgggacagaaagtgaaatgaccagagcagagtctcaaagcgcgtgccctcaaccaggtgcaagtcctgcaagcccccgagggaaggaaagggggcagctatcagggcacaccccaccccaaaccgcctaacaggaatttctgc

SEQ ID NO: 683989 - DNA, 114 bp, Homo sapiens
ctctgcagtgtctaggtctacttggcagtgtgaggaaggcaagcttctatgtgctcactgctaagcacagacacagcttggtcccctggcagtgatatacagcaaacgtcaata

SEQ ID NO: 683990 - DNA, 276 bp, Homo sapiens
ttcatttgtcttattcatcatgtcttgcccctacatattggaagaatatttgatagactcattttaatttcacaaaattttaaacagtatattttgtacatagagcttcttttttgctttgggtacagggtctcattttgtcacccaggctggagtgcagtgacatgatcatggctcacagtagcctcaacctactgagctcaagcaatcctcctgccttggcctccctagtagctaggaatacaggcatgtgccaccatgcccagccaatttttt

SEQ ID NO: 683991 - DNA, 192 bp, Homo sapiens
tgagctggtacctacttttcacaggttatccactgcattccagtctggcaacaagagtgaaactccaggccgagcacggtggctcatgcctgtaatgccagcactttgggaggccacaggcgggtggatcacctgaggtcaggagttcgagaccagcctggccaacatggtgaaaccccgtctctactaaaa

SEQ ID NO: 683992 - DNA, 217 bp, Homo sapiens
ctaattggttcttcgatgacggatgccatattgctgtgcctatggcgtataccaacgattacagatacgactggacccctagccgggaaacctcgatatgctgcgggagtgtccctagaaaaggctaaaagacagacatacacacacacacaacacctcacaaaagctgtatttcagtgcaaaataccaagagcaacgcgatcgaagaaccaattag

SEQ ID NO: 683993 - DNA, 234 bp, Homo sapiens
ccccccatttggggggggtaaaaaaggggggggggtttttgggcccccaaattttgccaaaccccgggggcccccgccccttaaaaggggtttttttgataaggattgggcccccccccccgggggactttttttgggatttttttccccccagggccgggggggttttttttttttttttgccgggtttgttttttttggcccccccccaatttacccccccccgggggccca

SEQ ID NO: 683994 - DNA, 125 bp, Homo sapiens
ctgacgtcaacccaatcaactctttatcatttatgtttaaaagatcagtgccgggtgctgtggctcatgcctgtaatcccagctacttgggatgctgaggcaggagaatggcgtggacccgggag

SEQ ID NO: 683995 - DNA, 216 bp, Homo sapiens
gctcgggctgatttgtattttttgctagtagaggcggcagtcaccatgtggccaggctggtcttgaactcctgacctcaaatgatccagccatttcggcctcccaaaaggctgggattacaggcatgagccactgcacccagccaagtttctaaggctacgcttatgtatctggaagcagtcccagagctcgagggtcgtgctgtgaggagcggtg

SEQ ID NO: 683996 - DNA, 157 bp, Homo sapiens
  misc_feature (92)..(92): n is a, c, g, or t
ctcataaaggtggtctgcacatcatagcagagcaagctggggctgtcgggctagtcgggggctgtcgggctagtcgtgggactggtcaggcntagtcgagggactagtcgggctagtctgtggacttgtcgggctatgtcggggagcggtcgcggct

SEQ ID NO: 683997 - DNA, 897 bp, Homo sapiens
ggacgcgtgggtcgacccacgtcgtcgcacaggccccagccagtagcggttagggttggaggcagaatgagagaataagatagtaatgagttagaagctaagtaacgattgtcacgaaaagttgtaaaagaggaaggaagaagattgacctaagtataattatataatgagctctaggtattaggagtgatgagcttggatatcataggtaaaggatggggtacagccggtacagacccatgggggtgccgaatgctgatgaggaattgagcatgcatacgaatgcgaggcacccgaccagcctaaacgacaggcataaaactaggacaagcaagacagatgtgaacagagaagaaaaaaagaaacaataacgcgagagagcgacgcacacacgagagaaagagagaatacgacacaaacagacacagcagtgagcaccacaacacaccgcagacattagacgcacgcggattgaacacacacgagcaaacaaaaagaacaaaagagaagaaaaacaaatggacgacagaaacacaaccgaccatacagataaagagcgagaaaagaagccaacgcaagagcgtaaacgaaagaagcaccagacaagcgacacagagtgagcaaacaacgagaacgaggccagttgagaaccaacagacgcggcgccacacaaggagaaaataggaggacaaaaaaaacaagacgacgatacaaaaagagataagcgacaaacaataacaaaccaacgaagagaacacaatgagcacaccgccaataagaaacaaagcctgacacgacaagagaaagcataagaacgaagagaagcaattagagaagcgaccaaaaaagagagaagacgagaccacaaacacaaacaaacgaactaccagaagaaaa

SEQ ID NO: 683998 - DNA, 435 bp, Homo sapiens
aaaaaaaattaaaaaaaaaaaaaaaaaaaaaaaaaaaaaaaaaaaaaaaaaaaaaaaaaaaaaaaaaaaaaaaaaaaaaaaaaaaaaaaaaaaaaaaaaaaaaaaaaaaaaaaaaaacctgggggggggccccggacccaaattgccccaaaggggggcggaataaaaataaaggggccggggtttaaaaacgtgggaacgggaaaaacccgggggtacccaaactaaatcgcttggaaaaaaatccccttttggcaagtgggggaaaaagcaaaaaggcccgaaccgatggcctttccaaaaagtggccaaccctaaagggcaaagggaaaatggaaagcgtaaaaatttggtaaaaatccgggtaaaattttggtaaaacaagctaatttttaaaccaataggccaaaatgggaaaaacccttaaaaaattta

SEQ ID NO: 683999 - DNA, 304 bp, Homo sapiens
  misc_feature (282)..(282): n is a, c, g, or t
aaaaaaaaaaaattagtcgggcatggtggtgcacacctgtaatcccagcttgtcaggaggctgaagtgggaggatcacctgggcccagggaggtcagggatgcagtgagccatggtctcaccactgcactctagcctggggtgacagaatgagaccccgtctcaaaaaaaaagaagaattagataatcttgaatagccctatatcttttaggaaactttaatagtgctggggagatattaggtattatttatcctccattttttacagatgttgaaaatttnaggctcagagaagtaaagtcta

SEQ ID NO: 684000 - DNA, 237 bp, Homo sapiens
tccacactgggtatgatttttaaaaaagaagctggggagatgacggcccaaagctaatagtggttatctctgatgggggcggggggtggtgaatgtggcttgaatagactttcccattaaaaaaaaaaagaacatatattcatatattactttggtttggtttggtttggttttggagacaggtctcactcccgttgcccaggctgaaggggagtggcataatcccggctcacccag

SEQ ID NO: 684001 - DNA, 557 bp, Homo sapiens
ggcacccgggtgctatagccacttattgagtattcttgctttgatcgtctacgtaagcatgtaagactacaacattacgacccacctcttcaagaggaaggcaaggcattatggaaaaacattatgtcatgcatatgtgtttctcatacagcatgcccatcacgcaccaatcagctggcaaggtattgggtgctactcaatccagtgaagtcttgagggtcccttccctctgtgaagcatataatctagtggggtagactgctagctactaactatgaaaacaacatagtctgacttgagagtggggaaagtggaacaagggagtaattcttatatttatgttcacatttaaaaatatttcctaaacaatccaatataatcttttctataatttccaatacaatcaacatgtattacttgtaaaataatagcatacatatatcgacagactgaagaaggtatactattagagaacatttgcagaaaagaattgcacatcttttttttgagacagagttccgctgtcacccaggctggagtgcagtggcagcaatcta

SEQ ID NO: 684002 - DNA, 392 bp, Homo sapiens
tgtcgctacacaagaccaaatttattattagacatgttctgactaaccagagaactctaattacacctttatcaacagattactgaggtaagccaatgttttactttctcatgtactagacacaggcaaatgagcaccaaaaggcacccaatatattttttctagcttcaaagtggttattttttttttagaaataaagcagcacatctgaaaacatataaataaataaatactgcaattatatacactgaaggtgcaaacatgtactatcctatgagctgtctatctcgataatctaacagaagtctgcagaaaagtcagcttggctctaaaattttgggtcataacctggcaattgcatttattcaataaagaaaattaatgtccaccac

SEQ ID NO: 684003 - DNA, 222 bp, Homo sapiens
ccctcccttggctggaacgaccctgtggaatataagacggacttagatatttcatacaaattttgaaaaacctgtggttagctgttaaggctattagtcctcctaaggaccagtattatacttaggaggttcttgttggctctggagtattattttaggatattcagaacttgggccttcagaacctaagggaggtctggaaagcagcacggctttcccctc

SEQ ID NO: 684004 - DNA, 127 bp, Homo sapiens
gtgtgctgcggttgttctaaggatccgaagggtgatgcggtggactagaaagtagtgggggacccagcgagtggacgccgctcgggattcctgagtctgtaaatagtgtgcccagcagctgtgaact

SEQ ID NO: 684005 - DNA, 363 bp, Homo sapiens
ttctaaaatagggacgtggccgggcacggtggctcatgcctgtaatcccagcactttgggaggccgaggcaggcggctcacgaggtcaggagatcgagactatcctggctaacacggtgaaaccctgtctctactaagagtacaaaaaattagctgggcgtggtggtgggcacctgtagtcccagctactcgggaggctgaggcaggagaagggcatgaatccgggaggcagagcttgcagtgagctgaggtcacgccattgcactccagcctgggcaacagtgttaagactctgtctcaaatataaataaataaataaataaataaaaataaagcgagatgttgccctcaaacttcaaaaaa

SEQ ID NO: 684006 - DNA, 149 bp, Homo sapiens
ctagcagttaccttatctgctcgagtgctgacagctaaccctggtcccttccttgtctcagaggggaaaaaggaattggatttcctcagggctctggggcctgggctgtggcttgaggttccgagactgatgaatccaatgcatgcttg

SEQ ID NO: 684007 - DNA, 109 bp, Homo sapiens
tacaacgtcaaagctaattaaagtcacaaacttcggtgaaaccttaaaagtccaaatcctcttgatattgtgaaccgtaccccttagcaccagacgaatccagacacca

SEQ ID NO: 684008 - DNA, 509 bp, Homo sapiens
  misc_feature (16)..(16): n is a, c, g, or t
  misc_feature (62)..(64): n is a, c, g, or t
  misc_feature (72)..(73): n is a, c, g, or t
  misc_feature (79)..(80): n is a, c, g, or t
  misc_feature (89)..(89): n is a, c, g, or t
  misc_feature (101)..(101): n is a, c, g, or t
  misc_feature (110)..(110): n is a, c, g, or t
  misc_feature (117)..(117): n is a, c, g, or t
  misc_feature (128)..(128): n is a, c, g, or t
  misc_feature (137)..(137): n is a, c, g, or t
  misc_feature (140)..(140): n is a, c, g, or t
  misc_feature (190)..(190): n is a, c, g, or t
  misc_feature (192)..(192): n is a, c, g, or t
  misc_feature (196)..(196): n is a, c, g, or t
  misc_feature (199)..(200): n is a, c, g, or t
  misc_feature (206)..(208): n is a, c, g, or t
  misc_feature (214)..(214): n is a, c, g, or t
  misc_feature (266)..(266): n is a, c, g, or t
  misc_feature (440)..(441): n is a, c, g, or t
  misc_feature (494)..(494): n is a, c, g, or t
ccttttcctacagttngtaatattctgtttccagatggccatctccaccactgaatgattcnnngcttcagnnctcatnngtgttctgnactcacaaattngcataattngtccaangcttgattttnttgtttgangtncagcaaacatcaaattatttttttcctaattgtttttttttgtctctttntngttnttnnttttcnnntttttnctcctttttctgtttttttctgttctttgtttctttttgttcaacaccttcnttctttatgcttctttgggcatcacaggtttttgaaatttttgttttttttgcattccacagtaatgatcactttcaacaactgcaatatacatctgcatgttacactgacatacaacacataagtattttgtcacacatcaacttttagcctcaaataatagaatacaaaaannaacactggacataacaccacagaacttttgaatatccccttttcccaattgtnaacaggtagtacttt

SEQ ID NO: 684009 - DNA, 164 bp, Homo sapiens
gcggccgcctactactactactgctcgaattcaagcttctaacgatgtacggggacatggcataggctgcaacccagcagagggcagctagatggacatttcccctgctcggaagggttggcctgcctggctggggaggtcagtaaactttgaatagtaagcca

SEQ ID NO: 684010 - DNA, 1032 bp, Homo sapiens
  misc_feature (1010)..(1010): n is a, c, g, or t
aaggctaggtagaggctggggtaaatcggccgaggaagtgccttccagccgcaggcgcccttcttcttctgtgcgctcgggctcctggtcccggctccccggttaccggggcgcgagtatgaccacaatggcggccgccaccctgctgcgcgcgacgccccacttcagcggtctcgccgccggccggaccttcctgctgcagggtctgttgcggctgctgaaagccccggcattgcctctcttgtgccgcggcctggccgtggaggccaagaagacttacgtgcgcgacaagccacatgtgaatgtgggtaccatcggccatgtggaccacgggaagaccacgctgactgcagccatcacgaagattctagctgagggaggtggggctaagttcaagaagtacgaggagattgacaatgccccggaggagcgagctcggggtatcaccatcaatgcggctcatgtggagtatagcactgccgcccgccactacgcccacacagactgcccgggtcatgcagattatgttaagaatatgatcacaggcactgcacccctcgacggctgcatcctggtggtagcagccaatgacggccccatgccccagacccgagagcacttattactggccagacagattggggtggagcatgtggtggtgtatgtgaacaaggctgacgctgtccaggactctgagatggtggaactggtggaactggagatccgggagctgctcaccgagtttggtataaggggaggagacccagtcatcgaggcccgtccctggccttgaggtcggacctgaagttagccgaagtcggcaaaagctacggatgcggggacctattcatgccccgaccggaaaacttcggggcagtggagcgcgtacccgccggcgggccggggaggcactaaggggctaaacggacggggcccgaataaaaccctgggctatcaaaggggcacggacacgggcacaaaagctaagagagagcaggcgtcatacgggngtctgcgaagggccgcggcgat

SEQ ID NO: 684011 - DNA, 912 bp, Homo sapiens
tcctggccgcggcgcagctcgcgttcgccatgccgttcctccgggcccggatcccacgctccgggctttagctgcgaccgagtaggcagtcggggcgaaggaaacgggaactgaaagcgatgaaaagcgttccacacgccacgagcccgcgggatcctcggagagtatggaacccttcccctccgctctcagccggaggccagctgcgtccagccgggctcggtcttctgaacaccgatttcaaatcaggtccccggggcccagcgtcacttagggaagtggtggcattttgtggttgctgctaaatcacggagagcagccttggcgctgccggtcccaacttgatccaaggagccttgagaaggagatgagattcagtaccaggggccggccgtggctcccatcctccggaatctgcaaaatggctacttcttcagaaataatggggagagggatggcaagaggccagagatcaaggccctcgagtattaacttgagcatttgggcacaaaatagacacttttggattttcccgtcttttccaacaccaaggatgagattatcaaaagatgtgttaaattaatttgtaccggccgggcgcggtggcttacgcctgtaatcccaacactttgggaggccgaggcgggcgaatcacaaggtcatgagttcgaaaccagcctggccaatatggtgaaacccccgtctctactaaaaatacagaaattagccgggagtggtggcgtacgcctgtagtcccagctactctggaggctaaggcaggagaatcgcttgaatccgggaggtggaggtcgcagtgagccgagaccgggccactgcactccagcctgggagacagagcgagactctgtcttcaaggaaaaaaaaaattcattggccaattccttgcccaac

SEQ ID NO: 684012 - DNA, 295 bp, Homo sapiens
  misc_feature (202)..(202): n is a, c, g, or t
actctagagatccccgactctgctctcattcctgaaaatctttccaggaagagtgtccagataaacccactcttcacgcagcactggggctccagaagcacagtttcccagtgctcctgaactgagtgtgtctctgcatcagaagagcttccccgaccctccaaagaacaggacttcagttacctgaacattccctttctgngccctgagcctttcttctccaaggcagaacctaaagcaagggatcttggtggtgccactccaacctttaacaacgcccccaatcaaggccaag

SEQ ID NO: 684013 - DNA, 202 bp, Homo sapiens
gcactccagcggtgaaacaagagtgaaactccatctcaaaaaaataataaaagtataaaaaggcagattcaatatgtgcacggtcctctttatcaggcaaaaacacgtttatggagacttgaaatgaaattcaggctgaaggaatcttgcagctgaaagatgattatttccatagaattgaagagatgacttttccaaagaa

SEQ ID NO: 684014 - DNA, 548 bp, Homo sapiens
cggccgctgctaaggatttttgcatacccctgaccccacctgagaatcccggcctcccatcttccggtctctctgactctaggttgctgctaaatcacggagagcagccttggcgctgccggtcccaacttgatccaaggagccttgagaaggagatgagattcagtaccaggggccggccgtggctcccatcctccggaatctgcaaaatggctacttcttcagaaataatggggagagggatggcaagaggccagagatcaaggccctcgagtattaacttgagcatttgggcacaaaatagacacttttggattttcccgtcttttccaacaccaaggatgagattatcaaaagatgtgttaaattaatttgtaccggccgggcgcggtggcttacgcctgtaatcccaaagtgctgggattacaggcatgagccaccatgcttggccaacctgagatgactttggtggtggctgatcacacttttgggaacactgatatgaggacatgcagacatatggtccatgggtgagggtcttaatctgt

SEQ ID NO: 684015 - DNA, 354 bp, Homo sapiens
tggagctgcgcgccctcaggacgacacctggtgaatcaaagaaattggcacgagagattgcggacatttagacttagcggtccaccaaaagcagccgaccactttttaaaacaagaagaggggccctctggagaacttgcaaggagaagcccccgcggaactttaagaccactggccttggcttaaggacaccaaggaggcttttagggcacccccaattacacgagatctccccttacggtcatgtgtccacctgagggcggatctctctttcgcgtaccagagagagcttaggacactgtaatctcgagacaatttacaatccgtaggacatccgcccgtgagcgcacagac

SEQ ID NO: 684016 - DNA, 988 bp, Homo sapiens
  misc_feature (36)..(36): n is a, c, g, or t
  misc_feature (813)..(813): n is a, c, g, or t
  misc_feature (817)..(817): n is a, c, g, or t
  misc_feature (819)..(820): n is a, c, g, or t
  misc_feature (838)..(839): n is a, c, g, or t
  misc_feature (843)..(843): n is a, c, g, or t
  misc_feature (845)..(845): n is a, c, g, or t
  misc_feature (849)..(849): n is a, c, g, or t
  misc_feature (855)..(855): n is a, c, g, or t
  misc_feature (859)..(859): n is a, c, g, or t
  misc_feature (868)..(868): n is a, c, g, or t
  misc_feature (871)..(871): n is a, c, g, or t
  misc_feature (873)..(873): n is a, c, g, or t
  misc_feature (884)..(885): n is a, c, g, or t
  misc_feature (898)..(898): n is a, c, g, or t
  misc_feature (904)..(904): n is a, c, g, or t
  misc_feature (907)..(907): n is a, c, g, or t
tctaggagaggccggtgttaattggacgaggcttcntcttctgtgcgctcgggctcctggtcccggctccccggttaccggggcgcgagtatgaccacaatggcggccgccaccctgctgcgcgcgacgccccacttcagcggtctcgccgccggccggaccttcctgctgcagggtctgttgcggctgctgaaagccccggcattgcctctcttgtgccgcggcctggccgtggaggccaagaagacttacgtgcgcgacaagccacatgtgaatgtgggtaccatcggccatgtggaccacgggaagaccacgctgactgcagccatcacgaagattctagctgagggaggtggggctaagttcaagaagtacgaggagattgacaatgccccggaggagcgagctcggggtatcaccatcaatgcggctcatgtggagtatagcactgccgcccgccactacgcccacacagactgcccgggtcatgcagattatgttaagaatatgatcacaggcactgcacccctcgacggctgcatcctggtggtagcagccaatgacggccccatgccccagacccgagagcacttattactggccagacagattggggtggagcatgtggtggtgtatgtgaacaaggctgacgctgtccaggactctgagatggtggaactggtggaactggagatccgggagctgctcaccgagtttggtataaggggaggagacccagtcatcggaggctctggtcctgtgccctgaaggtcgggacctgagttaggcctgaatctgtgagaagctaggtgngggncnncatccaggcgccggacgnnaacncnggcngggggnggancccggcggncgngnaggccaacggnnaaaggaaggggcnaaaaanacnggggccgagccaacgacaggcgacaccgcaagaaggcgcgtccaagcgccgccccgcccggccgcacagcaatgcaagggg

SEQ ID NO: 684017 - DNA, 751 bp, Homo sapiens
gttttggctttggaccggaggtgtggttattgcttgttatggaccgtagatagggagttggtaattgtgaatttaggggaagggaaaaaggagacattggtggatctagggaaggagcacactatagttgttaacttgttttacaatttgagcaggacaccaccgctgtgttatttgttttaattgtgccgtagctagggttgcagaggctaggattagtggttttttatttttttgtggattattatagttttttataattagaatgaaaagattataataattaaaagagaataaatatataaacttgaaaataagtacttcttaaacgcagagagctggcacgggagcggaagaaagagaggagcgaaattggccttcttctgggtggacgccaaattttttgtcttgttatttttaaaatcacatagataacctacgaaggaatgaagaaacttgtctgtcggtcgcaggggaagcacgtcaagaatgcattggtttttgtttgagggttcgtttcagctctgctagtctgtttctaaggtaggttacctcgggtattggtgtctggtgaagtttgattatattgggtatgtgtcttgtccgtgtttgggtaggccgtgggctagggaggttgaaaggagtggtgatgttcgagagtaggtcttctggctgagagggtgggtagtacgtcagaacgacgcatgcacacagttaaacacgtgattaaaagaaaacctgaaaaaaacat

SEQ ID NO: 684018 - DNA, 2009 bp, Homo sapiens
gagcagtcggagccgcagctgcctcccggagcccgagcccctccctccgggtccggcctagcccgcctgactcccactctgatcacctccacagcccgccgacctgagaactactacgcccatgagccttcgcggcgccggtgatttaggggacgctcctcagtgccccctgcgaccgccagagagaactacgttgcccctcagcccgagaggcgcgagtggtggaaaacctctccatcatactccgccctcgagacaccagccccctccatgacgtcttcagccgcgcgcccgacgtcggctgagacggccatagacactggcggctagaggggcccggacttgccctcccagctctaacttccgccggaagtgccttccagccgcaggcgcccttcttcttctgtgcgctcgggctcctggtcccggctccccggttaccggggcgcgagtatgaccacaatggcggccgccaccctgctgcgcgcgacgccccacttcagcggtctcgccgccggccggaccttcctgctgcagggtctgttgcggctgctgaaagccccggcattgcctctcttgtgccgcggcctggccgtggaggccaagaagacttacgtgcgcgacaagccacatgtgaatgtgggtaccatcggccatgtggaccacgggaagaccacgctgactgcagccatcacgaagattctagctgagggaggtggggctaagttcaagaagtacgaggagattgacaatgccccggaggagcgagctcggggtatcaccatcaatgcggctcatgtggagtatagcactgccgcccgccactacgcccacacagactgcccgggtcatgcagattatgttaagaatatgatcacaggcactgcacccctcgacggctgcatcctggtggtagcagccaatgacggccccatgccccagacccgagagcacttattactggccagacagattggggtggagcatgtggtggtgtatgtgaacaaggctgacgctgtccaggactctgagatggtggaactggtggaactggagatccgggagctgctcaccgagtttggctataaaggggaggagaccccagtcatcgtaggctctgctctctgtgcccttgagggtcgggaccctgagttaggcctgaagtctgtgcagaagctactggatgctgtggacacttacatcccagtgcccgcccgggacctggagaagcctttcctgctgcctgtggaggcggtgtactccgtccctggccgtggcaccgtggtgacaggtacactagagcgtggcattttaaagaagggagacgagtgtgagctcctaggacatagcaagaacatccgcactgtggtgacaggcattgagatgttccacaagagcctggagagggccgaggccggagataacctcggggccctggtccgaggcttgaagcgggaggacttgcggcggggcctggtcatggtcaagccaggttccatcaagccccaccagaaggtggaggcccaggtttacatcctcagcaaggaggaaggtggccgccacaagccctttgtgtcccacttcatgcctgtcatgttctccctgacttgggacatggcctgtcggattatcctgcccccagagaaggagcttgccatgcccggggaggacctgaagttcaacctaatcttgcggcagccaatgatcttagagaaaggccagcgtttcaccctgcgagatggcaaccggactattggcaccggtctagtcaccaacacgctggccatgactgaggaggagaagaatatcaaatggggttgagtgtgcagatctctgctcagcttcccttgcgtttaaggcctgccctagccagggctccctcctgcttccagtaccctctcatggcataggctgcaacccagcagagggcagctagatggacatttcccctgctcggaagggttggcctgcctggctggggaggtcagtaaactttgaatagtaagcca

SEQ ID NO: 684019 - DNA, 428 bp, Homo sapiens
  misc_feature (241)..(241): n is a, c, g, or t
  misc_feature (294)..(295): n is a, c, g, or t
  misc_feature (311)..(311): n is a, c, g, or t
  misc_feature (339)..(339): n is a, c, g, or t
  misc_feature (401)..(401): n is a, c, g, or t
gttagaaactatgggaggtggagacggctccttcacatggcaagagaggattagaaatggctaccatcagacaaaagagcccctatggtctccgtcgagggcaaagccctctctgtcttctctgcagtgggagcagctctcctgccacagctcctcaccccctgtgttcgcctgctccaagtttgtctccactccctccttggtcgagcacctcacagctgctgagccgtccgctatctgnagtggtgctgcgaccggagatactgacagatgagagcctcagcagcttggcanntctcatgtccccttanctcacttgtctctagccgcagcttccanaccagcgccatttcaagggactcgacacagcagccgtttcattggagctggggctgccacanttggggtggctggttactggggctggg

SEQ ID NO: 684020 - DNA, 1631 bp, Homo sapiens
aaggctaggtagaggctggggtaaatcggccgagggggctcctggtcccggctccccggttaccggggcgcgagtatgaccacaatggcggccgccaccctgctgcgcgcgacgccccacttcagcggtctcgccgccggccggaccttcctgctgcagggtctgttgcggctgctgaaagccccggcattgcctctcttgtgccgcggcctggccgtggaggccaagaagacttacgtgcgcgacaagccacatgtgaatgtgggtaccatcggccatgtggaccacgggaagaccacgctgactgcagccatcacgaagattctagctgagggaggtggggctaagttcaagaagtacgaggagattgacaatgccccggaggagcgagctcggggtatcaccatcaatgcggctcatgtggagtatagcactgccgcccgccactacgcccacacagactgcccgggtcatgcagattatgttaagaatatgatcacaggcactgcacccctcgacggctgcatcctggtggtagcagccaatgacggccccatgccccagacccgagagcacttattactggccagacagattggggtggagcatgtggtggtgtatgtgaacaaggctgacgctgtccaggactctgagatggtggaactggtggaactggagatccgggagctgctcaccgagtttggctataaaggggaggagaccccagtcatcgtaggctctgctctctgtgcccttgagggtcgggaccctgagttaggcctgaagtctgtgcagaagctactggatgctgtggacacttacatcccagtgcccgcccgggacctggagaagcctttcctgctgcctgtggaggcggtgtactccgtccctggccgtggcaccgtggtgacaggtacactagagcgtggcattttaaagaagggagacgagtgtgagctcctaggacatagcaagaacatccgcactgtggtgacaggcattgagatgttccacaagagcctggagagggccgaggccggagataacctcggggccctggtccgaggcttgaagcgggaggacttgcggcggggcctggtcatggtcaagccaggttccatcaagccccaccagaaggtggaggcccaggtttacatcctcagcaaggaggaaggtggccgccacaagccctttgtgtcccacttcatgcctgtcatgttctccctgacttgggacatggcctgtcggattatcctgcccccagagaaggagcttgccatgcccggggaggacctgaagttcaacctaatcttgcggcagccaatgatcttagagaaaggccagcgtttcaccctgcgagatggcaaccggactattggcaccggtctagtcaccaacacgctggccatgactgaggaggagaagaatatcaaatggggttgagtgtgcagatctctgctcagcttcccttgcgtttaaggcctgccctagccagggctccctcctgcttccagtaccctctcatggcataggctgcaacccagcagagggcagctagatggacatttcccctgctcggaagggttggcctgcctggctggggaggtcagtaaactttgaatagtaagcca

SEQ ID NO: 684021 - DNA, 1639 bp, Homo sapiens
  misc_feature (30)..(30): n is a, c, g, or t
aggctagtacgaggccgggtgttaatcggncgagggtgcgctcgggctcctggtcccggctccccggttaccggggcgcgagtatgaccacaatggcggccgccaccctgctgcgcgcgacgccccacttcagcggtctcgccgccggccggaccttcctgctgcagggtctgttgcggctgctgaaagccccggcattgcctctcttgtgccgcggcctggccgtggaggccaagaagacttacgtgcgcgacaagccacatgtgaatgtgggtaccatcggccatgtggaccacgggaagaccacgctgactgcagccatcacgaagattctagctgagggaggtggggctaagttcaagaagtacgaggagattgacaatgccccggaggagcgagctcggggtatcaccatcaatgcggctcatgtggagtatagcactgccgcccgccactacgcccacacagactgcccgggtcatgcagattatgttaagaatatgatcacaggcactgcacccctcgacggctgcatcctggtggtagcagccaatgacggccccatgccccagacccgagagcacttattactggccagacagattggggtggagcatgtggtggtgtatgtgaacaaggctgacgctgtccaggactctgagatggtggaactggtggaactggagatccgggagctgctcaccgagtttggctataaaggggaggagaccccagtcatcgtaggctctgctctctgtgcccttgagggtcgggaccctgagttaggcctgaagtctgtgcagaagctactggatgctgtggacacttacatcccagtgcccgcccgggacctggagaagcctttcctgctgcctgtggaggcggtgtactccgtccctggccgtggcaccgtggtgacaggtacactagagcgtggcattttaaagaagggagacgagtgtgagctcctaggacatagcaagaacatccgcactgtggtgacaggcattgagatgttccacaagagcctggagagggccgaggccggagataacctcggggccctggtccgaggcttgaagcgggaggacttgcggcggggcctggtcatggtcaagccaggttccatcaagccccaccagaaggtggaggcccaggtttacatcctcagcaaggaggaaggtggccgccacaagccctttgtgtcccacttcatgcctgtcatgttctccctgacttgggacatggcctgtcggattatcctgcccccagagaaggagcttgccatgcccggggaggacctgaagttcaacctaatcttgcggcagccaatgatcttagagaaaggccagcgtttcaccctgcgagatggcaaccggactattggcaccggtctagtcaccaacacgctggccatgactgaggaggagaagaatatcaaatggggttgagtgtgcagatctctgctcagcttcccttgcgtttaaggcctgccctagccagggctccctcctgcttccagtaccctctcatggcataggctgcaacccagcagagggcagctagatggacatttcccctgctcggaagggttggcctgcctggctggggaggtcagtaaactttgaatagtaagcca

SEQ ID NO: 684022 - DNA, 3186 bp, Homo sapiens
  misc_feature (2064)..(2064): n is a, c, g, or t
  misc_feature (2068)..(2068): n is a, c, g, or t
gagcagtcggagccgcagctgcctcccggagcccgagcccctccctccgggtccggcctagcccgcctgactcccactctgatcacctccacagcccgccgacctgagaactactacgcccatgagccttcgcggcgccggtgatttaggggacgctcctcagtgccccctgcgaccgccagagagaactacgttgcccctcagcccgagaggcgcgagtggtggaaaacctctccatcatactccgccctcgagacaccagccccctccatgacgtcttcagccgcgcgcccgacgtcggctgagacggccatagacactggcggctagaggggcccggacttgccctcccagctctaacttccgccggaagtgccttccagccgcaggcgcccttcttcttctgtgcgctcgggctcctggtcccggctccccggttaccggggcgcgagtatgaccacaatggcggccgccaccctgctgcgcgcgacgccccacttcagcggtctcgccgccggccggaccttcctgctgcagggtctgttgcggctgctgaaagccccggcattgcctctcttgtgccgcggcctggccgtggaggccaagaagacttacgtgcgcgacaagccacatgtgaatgtgggtaccatcggccatgtggaccacgggaagaccacgctgactgcagccatcacgaagattctagctgagggaggtggggctaagttcaagaagtacgaggagattgacaatgccccggaggagcgagctcggggtatcaccatcaatgcggctcatgtggagtatagcactgccgcccgccactacgcccacacagactgcccgggtcatgcagattatgttaagaatatgatcacaggcactgcacccctcgacggctgcatcctggtggtagcagccaatgacggccccatgccccagacccgagagcacttattactggccagacagattggggtggagcatgtggtggtgtatgtgaacaaggctgacgctgtccaggactctgagatggtggaactggtggaactggagatccgggagctgctcaccgagtttggctataaaggggaggagaccccagtcatcgtaggctctgctctctgtgcccttgagggtcgggaccctgagttaggcctgaagtctgtgcagaagctactggatgctgtggacacttacatcccagtgcccgcccgggacctggagaagcctttcctgctgcctgtggaggcggtgtactccgtccctggccgtggcaccgtggtgacaggtacactagagcgtggcattttaaagaagggagacgagtgtgagctcctaggacatagcaagaacatccgcactgtggtgacaggcattgagatgttccacaagagcctggagagggccgaggccggagataacctcggggccctggtccgaggcttgaagcgggaggacttgcggcggggcctggtcatggtcaagccaggttccatcaagccccaccagaaggtggaggcccaggtttacatcctcagcaaggaggaaggtggccgccacaagccctttgtgtcccacttcatgcctgtcatgttctccctgacttgggacatggcctgtcggattatcctgcccccagagaaggagcttgccatgcccggggaggacctgaagttcaacctaatcttgcggcagccaatgatcttagagaaaggccagcgtttcaccctgcgagatggcaaccggactattggcaccggtctagtcaccaacacgctggccatgactgaggaggagaagaatatcaaatggggttgagtgtgcagatctctgctcagcttcccttgcgtttaaggcctgccctagccagggctccctcctgcttccagtaccctctcatggcataggctgcaacccagcagagggcagctagatggacatttcccctgctcggaagggttggcctgcctggctggggaggtcagtaaactttgaatagtaagccaaaaaaaaaacaacaacaaaaaaaaaaaaaaaaaaaacacaaaaaaaaaaaaaaanaaanaaaaaaaagggggggcgcgcgcgcgacgaggatcagactccccgcagagagaggcgcgccacacatacgcgcacgcagcgaaccgcacgtacactctggagaaaaaagggcgcgcccacctaaggaggcgggcgacctatactaagccagcgacgcacgcagaggcgagcacgagacacaagagccgcgcagcagagagggaaacagaggcgcgaaacccggaggaggcaacactgcgggacaggaagaccgaacacactaaaggcccgcgtggggagacgacagcccaaagagggcggccgaccacaccccaccacccagagagaacagtattaagagcacgccccacgagggaggcgcaaatcaaacagacctgagcgcaggactccacaggagcggcagacaccgcagacaccgccgcgccgataagagtagccagcaagagacacaagacaaaatgtccagcgcacacccagccgaggaaggacgacaaacacacaacaaagaagaaaaacagaacgacgccgaaggagcgcccagaagcggaagacacacaaaacccagcacaacggcaacacagcgaggcggagcgacgcacacacaaacaccacacaccgagaccacagactacacacgcccgggaccggatgcgcgagcagagcgagagagcgcgccaggaaacagagcgcagacacacacagaccggaagaccagcgagaagagcgcgacacgccggcgaccagcaggagaagccacgaacaagcacagtgagcaccgagcaagcaaacggaagaaagagcgagcagagcagagacacaaccgacgcgagggagaggaaggaaggggagcatagcagcgagcgagagagcccacaaccgacgccaagaagcgacgcacggcagagacggaagaggagcagacgccgaggaagaacaggacagcaccaggaccgagacgacagagaagagagcaagacaaacgagccagccgaagaagagcgcacgacacgggagggaacaggcgacgcaagagcaacagcagacgcggacgcagcacaagacacgcgcgaacgaaccacgaaagcgagcgacagcacagccaacgagcgacgacacgca

SEQ ID NO: 684023 - DNA, 2629 bp, Homo sapiens
  misc_feature (2064)..(2064): n is a, c, g, or t
  misc_feature (2068)..(2068): n is a, c, g, or t
gagcagtcggagccgcagctgcctcccggagcccgagcccctccctccgggtccggcctagcccgcctgactcccactctgatcacctccacagcccgccgacctgagaactactacgcccatgagccttcgcggcgccggtgatttaggggacgctcctcagtgccccctgcgaccgccagagagaactacgttgcccctcagcccgagaggcgcgagtggtggaaaacctctccatcatactccgccctcgagacaccagccccctccatgacgtcttcagccgcgcgcccgacgtcggctgagacggccatagacactggcggctagaggggcccggacttgccctcccagctctaacttccgccggaagtgccttccagccgcaggcgcccttcttcttctgtgcgctcgggctcctggtcccggctccccggttaccggggcgcgagtatgaccacaatggcggccgccaccctgctgcgcgcgacgccccacttcagcggtctcgccgccggccggaccttcctgctgcagggtctgttgcggctgctgaaagccccggcattgcctctcttgtgccgcggcctggccgtggaggccaagaagacttacgtgcgcgacaagccacatgtgaatgtgggtaccatcggccatgtggaccacgggaagaccacgctgactgcagccatcacgaagattctagctgagggaggtggggctaagttcaagaagtacgaggagattgacaatgccccggaggagcgagctcggggtatcaccatcaatgcggctcatgtggagtatagcactgccgcccgccactacgcccacacagactgcccgggtcatgcagattatgttaagaatatgatcacaggcactgcacccctcgacggctgcatcctggtggtagcagccaatgacggccccatgccccagacccgagagcacttattactggccagacagattggggtggagcatgtggtggtgtatgtgaacaaggctgacgctgtccaggactctgagatggtggaactggtggaactggagatccgggagctgctcaccgagtttggctataaaggggaggagaccccagtcatcgtaggctctgctctctgtgcccttgagggtcgggaccctgagttaggcctgaagtctgtgcagaagctactggatgctgtggacacttacatcccagtgcccgcccgggacctggagaagcctttcctgctgcctgtggaggcggtgtactccgtccctggccgtggcaccgtggtgacaggtacactagagcgtggcattttaaagaagggagacgagtgtgagctcctaggacatagcaagaacatccgcactgtggtgacaggcattgagatgttccacaagagcctggagagggccgaggccggagataacctcggggccctggtccgaggcttgaagcgggaggacttgcggcggggcctggtcatggtcaagccaggttccatcaagccccaccagaaggtggaggcccaggtttacatcctcagcaaggaggaaggtggccgccacaagccctttgtgtcccacttcatgcctgtcatgttctccctgacttgggacatggcctgtcggattatcctgcccccagagaaggagcttgccatgcccggggaggacctgaagttcaacctaatcttgcggcagccaatgatcttagagaaaggccagcgtttcaccctgcgagatggcaaccggactattggcaccggtctagtcaccaacacgctggccatgactgaggaggagaagaatatcaaatggggttgagtgtgcagatctctgctcagcttcccttgcgtttaaggcctgccctagccagggctccctcctgcttccagtaccctctcatggcataggctgcaacccagcagagggcagctagatggacatttcccctgctcggaagggttggcctgcctggctggggaggtcagtaaactttgaatagtaagccaaaaaaaaaacaacaacaaaaaaaaaaaaaaaaaaaacacaaaaaaaaaaaaaaanaaanaaaaaaaacaaaaaaaaaaaaacacaaaaaaaaaaaaaaaaaaaaaaaacaaaaaacaaagaaaaaaaagggggggggagaggagcaaaaaggagggggggggagagccacacggcgcgcccgcgcgggagacaggagaacaaaagagagagagacagaacaaaagaacaggggaggggaggagaaccagagagagggaggagagtgagagaggaagagaaagaaaaagcgagagcgaagaaaagagagggggaaacaagaaacggagagagacacaaggaaggaggagcggggagcagaaaagacagcaaagaagaagagaaaaaagagaaagcgagagagagaggaaaaaagagaacaaaaaggagagacgcacagagggacaggcagaaagagaaacaaacaagaaaccacaaaagcaaaccagaaagaaacaggggaagagagaggaaaagggagggacgagaggaggaaggagagggaaagaccgaaagaaagaggaaggcaaaaggaagcaaggaggaagcaggaaaggagacggagggggaaaggcagcacaag

SEQ ID NO: 684024 - DNA, 2392 bp, Homo sapiens
gagcagtcggagccgcagctgcctcccggagcccgagcccctccctccgggtccggcctagcccgcctgactcccactctgatcacctccacagcccgccgacctgagaactactacgcccatgagccttcgcggcgccggtgatttaggggacgctcctcagtgccccctgcgaccgccagagagaactacgttgcccctcagcccgagaggcgcgagtggtggaaaacctctccatcatactccgccctcgagacaccagccccctccatgacgtcttcagccgcgcgcccgacgtcggctgagacggccatagacactggcggctagaggggcccggacttgccctcccagctctaacttccgccggaagtgccttccagccgcaggcgcccttcttcttctgtgcgctcgggctcctggtcccggctccccggttaccggggcgcgagtatgaccacaatggcggccgccaccctgctgcgcgcgacgccccacttcagcggtctcgccgccggccggaccttcctgctgcagggtctgttgcggctgctgaaagccccggcattgcctctcttgtgccgcggcctggccgtggaggccaagaagacttacgtgcgcgacaagccacatgtgaatgtgggtaccatcggccatgtggaccacgggaagaccacgctgactgcagccatcacgaagattctagctgagggaggtggggctaagttcaagaagtacgaggagattgacaatgccccggaggagcgagctcggggtatcaccatcaatgcggctcatgtggagtatagcactgccgcccgccactacgcccacacagactgcccgggtcatgcagattatgttaagaatatgatcacaggcactgcacccctcgacggctgcatcctggtggtagcagccaatgacggccccatgccccagacccgagagcacttattactggccagacagattggggtggagcatgtggtggtgtatgtgaacaaggctgacgctgtccaggactctgagatggtggaactggtggaactggagatccgggagctgctcaccgagtttggctataaaggggaggagaccccagtcatcgtaggctctgctctctgtgcccttgagggtcgggaccctgagttaggcctgaagtctgtgcagaagctactggatgctgtggacacttacatcccagtgcccgcccgggacctggagaagcctttcctgctgcctgtggaggcggtgtactccgtccctggccgtggcaccgtggtgacaggtacactagagcgtggcattttaaagaagggagacgagtgtgagctcctaggacatagcaagaacatccgcactgtggtgacaggcattgagatgttccacaagagcctggagagggccgaggccggagataacctcggggccctggtccgaggcttgaagcgggaggacttgcggcggggcctggtcatggtcaagccaggttccatcaagccccaccagaaggtggaggcccaggtttacatcctcagcaaggaggaaggtggccgccacaagccctttgtgtcccacttcatgcctgtcatgttctccctgacttgggacatggcctgtcggattatcctgcccccagagaaggagcttgccatgcccggggaggacctgaagttcaacctaatcttgcggcagccaatgatcttagagaaaggccagcgtttcaccctgcgagatggcaaccggactattggcaccggtctagtcaccaacacgctggccatgactgaggaggagaagaatatcaaatggggttgagtgtgcagatctctgctcagcttcccttgcgtttaaggcctgccctagccagggctccctcctgcttccagtaccctctcatggcataggctgcaacccagcagagggcagctagatggacatttcccctgctcggaagggttggcctgcctggctggggaggtcagtaaactttgaatagtaagccagcctgtgtcctgtgtcctttgtgcaaattggagaggataggggaggacaaaaagggtgttgaaccccagacagatggggagcttgtgagatcccagagcagttttaacggataaatcaagtccagtgagcttagtgattgcctagacacagtaggatgccgttattcagcctcctgggagatagtgggaaagaatgttctatcgctctggagccagcatggcttcagctcaggtgccaaacccatcttgtttcctcggaatactaagtgaatgtctagcatccattcacattctgtgggaacagggactggacaggcatacctcagatgctgtaggtttgcttccagactaccacaataaagcaggtcacaaattaaaaaaaa

SEQ ID NO: 684025 - DNA, 154 bp, Homo sapiens
agcgagagattggacggcgtggcggtttcagggcctggttaacgcgcgaaggcggctctagtggggccgcctttttcacactcgaggcgtgttgatgcacgccagcagctgggtgaaggccgcggacatctgctcttccggtacgcaggcaaat

SEQ ID NO: 684026 - DNA, 173 bp, Homo sapiens
gtcggttcaggtaccagtctgctggaaggttctgttcggatagctggtgctacctagctctgagcctgcttcaagaacacctgtagtcatcctctgattctctgtgtgtacctcttgtggcgttacctctcccgggtgtgaacatcctaccgttattgtgctaacccaagaac

SEQ ID NO: 684027 - DNA, 1983 bp, Homo sapiens
gagcagtcggagccgcagctgcctcccggagcccgagcccctccctccgggtccggcctagcccgcctgactcccactctgatcacctccacagcccgccgacctgagaactactacgcccatgagccttcgcggcgccggtgatttaggggacgctcctcagtgccccctgcgaccgccagagagaactacgttgcccctcagcccgagaggcgcgagtggtggaaaacctctccatcatactccgccctcgagacaccagccccctccatgacgtcttcagccgcgcgcccgacgtcggctgagacggccatagacactggcggctagaggggcccggacttgccctcccagctctaacttccgccggaagtgccttccagccgcaggcgcccttcttcttctgtgcgctcgggctcctggtcccggctccccggttaccggggcgcgagtatgaccacaatggcggccgccaccctgctgcgcgcgacgccccacttcagcggtctcgccgccggccggaccttcctgctgcagggtctgttgcggctgctgaaagccccggcattgcctctcttgtgccgcggcctggccgtggaggccaagaagacttacgtgcgcgacaagccacatgtgaatgtgggtaccatcggccatgtggaccacgggaagaccacgctgactgcagccatcacgaagattctagctgagggaggtggggctaagttcaagaagtacgaggagattgacaatgccccggaggagcgagctcggggtatcaccatcaatgcggctcatgtggagtatagcactgccgcccgccactacgcccacacagactgcccgggtcatgcagattatgttaagaatatgatcacaggcactgcacccctcgacggctgcatcctggtggtagcagccaatgacggccccatgccccagacccgagagcacttattactggccagacagattggggtggagcatgtggtggtgtatgtgaacaaggctgacgctgtccaggactctgagatggtggaactggtggaactggagatccgggagctgctcaccgagtttggctataaaggggaggagaccccagtcatcgtaggctctgctctctgtgcccttgagggtcgggaccctgagttaggcctgaagtctgtgcagaagctactggatgctgtggacacttacatcccagtgcccgcccgggacctggagaagcctttcctgctgcctgtggaggcggtgtactccgtccctggccgtggcaccgtggtgacaggtacactagagcgtggcattttaaagaagggagacgagtgtgagctcctaggacatagcaagaacatccgcactgtggtgacaggcattgagatgttccacaagagcctggagagggccgaggccggagataacctcggggccctggtccgaggcttgaagcgggaggacttgcggcggggcctggtcatggtcaagccaggttccatcaagccccaccagaaggtggaggcccaggtttacatcctcagcaaggaggaaggtggccgccacaagccctttgtgtcccacttcatgcctgtcatgttctccctgacttgggacatggcctgtcggattatcctgcccccagagaaggagcttgccatgcccggggaggacctgaagttcaacctaatcttgcggcagccaatgatcttagagaaaggccagcgtttcaccctgcgagatggcaaccggactattggcaccggtctagtcaccaacacgctggccatgactgaggaggagaagaatatcaaatggggttgagtgtgcagatctctgctcagcttcccttgcgtttaaggcctgccctagccagggctccctcctgcttccagtaccctctcatggcataggctgcaacccagcagagggcagctagatggacatttcccctgctcggaaggaagcctgcgtgctgggatcata

SEQ ID NO: 684028 - DNA, 261 bp, Homo sapiens
cagaggagttaccagactgcgagtcgcagcgaactgcttgatttcaccagactcgcccgtttactgtctcaccgccgcctgtaatgagattctcgggaccatctacatcagtgggaactgccctggtcatgttaatgatctcaaacaatattcaagtaattctatgtatatgaattataatccaaaaagcaataaaatacaatttctagcacaagtttactgtatattagcactgatttgaaatgtcaattggcataataa

SEQ ID NO: 684029 - DNA, 140 bp, Homo sapiens
gcccagcaaacacattcacattttagagccgacaagcacacttgattcatttggtggactaatccttcgatagttaatcagtcccgagctacaaccaatgtggtggtgagttgaactaaactaaaatagttgtgaggatg

SEQ ID NO: 684030 - DNA, 939 bp, Homo sapiens
tctccagagactcgactgagcctgtgtggccgacatgcgtttgacaaaagcacttttcccccgccgcgaatagtgtcgtggttgcaattgtgggtggacgcagcgcctcttttattaaaatgtggttccgcgcgccacaattctgtcgggaaggactcgtacctgggtgcccacggttgtttgaactgggcacccaaatgtaggaagcggggttgagccactccccgcggatggtcaaaaattctggggaaaaagatgtgtgaaaggccacgatgctgtttcttaccagacgaagatgtgtataggcgcgcccccctcttgtctacgctcacggcccctcctccttttaccccgcttggtcccttccccctgcccaagctagttttagtaggaaagcataagggggtgttattcatatggattgtaacttgcgctcacacaagaggggtgcccaaccacgcctctgatgccgcggtggccacgagtgcagagttcaccacctcacgccttttgtatacattccgccagtacaagtataatgctctcctgcaaaagtttgggtgagatgacaaaaaaattaaggtggagttaccacctctccgcgcccccccaggtaagcctccttgagaacaaacacgctcaagatctatcatgggtacaaaacaacggggggaaaaaattgagggccccacgacaattcctcgcaaaacactgtggtgtctatagagcctcgcctcaataaaagttattattttggaaaaatcataattcagcaaagatacttcgcccatcgtgaacctttctaatgagattaggtctgtccacgacgtagataggacagcgatacagtaggacttcatttggatgtctttgccggggtgatgtcccggtaacaagttcccccccattaaaaattccaaaggcccccccaaacataac

SEQ ID NO: 684031 - DNA, 442 bp, Homo sapiens
ctgatggcgctagaggccgcgttgccaatgcttgcagcgagctgagatgatgcgcctgtactcaagcctgggtgacagagcaggacctcatcgcaataaataaacaatgtaaccaaaatgcactggcataaggcacgactcgaccctgcctaagtgcttctaaaatcaaactgaaaagcacttcttgcattaaagcagatagcatgtgatgggagcgtcagaattacctgcaggacttttgcacatagaaaaagcagttgggaatgtgaatcaatagggctctttaccactgtattgcaacttggcttatattggctgtttcccaaaggtgtttataatatgcgtccatgagtaagtatattgcatgctgtaaatctaaagaacactgaagtcatgatctacattctgggcatggctcagccccttactaagagtacaggtt

SEQ ID NO: 684032 - DNA, 902 bp, Homo sapiens
  misc_feature (52)..(52): n is a, c, g, or t
  misc_feature (118)..(118): n is a, c, g, or t
  misc_feature (160)..(160): n is a, c, g, or t
  misc_feature (242)..(242): n is a, c, g, or t
  misc_feature (249)..(249): n is a, c, g, or t
  misc_feature (260)..(260): n is a, c, g, or t
  misc_feature (318)..(318): n is a, c, g, or t
  misc_feature (333)..(333): n is a, c, g, or t
  misc_feature (335)..(335): n is a, c, g, or t
  misc_feature (345)..(345): n is a, c, g, or t
  misc_feature (347)..(347): n is a, c, g, or t
  misc_feature (351)..(351): n is a, c, g, or t
  misc_feature (373)..(373): n is a, c, g, or t
  misc_feature (378)..(378): n is a, c, g, or t
  misc_feature (391)..(391): n is a, c, g, or t
  misc_feature (404)..(404): n is a, c, g, or t
  misc_feature (501)..(501): n is a, c, g, or t
  misc_feature (512)..(512): n is a, c, g, or t
  misc_feature (529)..(529): n is a, c, g, or t
  misc_feature (559)..(559): n is a, c, g, or t
  misc_feature (563)..(563): n is a, c, g, or t
  misc_feature (575)..(575): n is a, c, g, or t
  misc_feature (599)..(599): n is a, c, g, or t
  misc_feature (603)..(603): n is a, c, g, or t
  misc_feature (613)..(613): n is a, c, g, or t
  misc_feature (617)..(617): n is a, c, g, or t
  misc_feature (635)..(635): n is a, c, g, or t
  misc_feature (658)..(658): n is a, c, g, or t
  misc_feature (673)..(673): n is a, c, g, or t
  misc_feature (689)..(689): n is a, c, g, or t
  misc_feature (701)..(701): n is a, c, g, or t
  misc_feature (703)..(703): n is a, c, g, or t
  misc_feature (714)..(715): n is a, c, g, or t
  misc_feature (732)..(733): n is a, c, g, or t
  misc_feature (807)..(807): n is a, c, g, or t
  misc_feature (809)..(809): n is a, c, g, or t
  misc_feature (811)..(811): n is a, c, g, or t
  misc_feature (818)..(819): n is a, c, g, or t
  misc_feature (849)..(849): n is a, c, g, or t
agacctcaaattacaaaacatggtggcaggtgatacttacaaaaataaagcnaaggtctattttttacagattttttcatgtttccttcaaatctcagtctgtcctgtcattaaaaanatcatggaatctatgttgttcctcatgatggaatagtaaaanaactgcattccactgacaaaaaaaataactttgcttccaaatagcacaagtctttaaagtgacttttcccaacaataaatanaaaaaanagcctattaanaagcgtcttttagcttaaatcaaggttaaaaaaaaataaaaaaaaaaaatacatccanatcccactgcagatnanaaaaccccananagcntattccagattctcccgaagtntttgngtgcgcacagctnccaggcggggaantctcactggacggcagaaccactaagtccctcctgacgggatccacaggaatcttctcgatgtaccaggagcctctgcccatcacaggagggcaggnccatgtagaanagactctaacaaacctncagctggaaactggatcccttttaaaccanccgncaccacagctcngctcacccaccaacgccgtccgtnaagnctctctctgncccncacggtcagccaggttgncggtcacaccgaaggggtctttngcgggtgaacctacngcatgaactgcgggcncttcaccctagncntcctccgaaannaacctgctcttggcctnnttggatttgttcctacaaagaaggccagggccaaccattggctcccaggaaggcaaagacagggataggtctgncncncctcctnnttgtagcggccaggcatgatccctccaagnatatcccaggcgccgctctctccaggggacaagggcctcacttaagggcgatt

SEQ ID NO: 684033 - DNA, 1487 bp, Homo sapiens
  misc_feature (365)..(365): n is a, c, g, or t
  misc_feature (496)..(496): n is a, c, g, or t
caccatagctccgtcattgtacccatttctaccctccgctgggggtagtgccttaactgacttgacctgatccgagtactcctagagctagtagtacgaacctacgcacaaggcctcgctacacgtttgtcgtgcctcgcttatcgggcgtacttactaatcccgttcgacagtactgcgctagataacatatcgctttcacccacaagatgtgccgctaaaaaccacagcacgacaatctcaccatcatgccctcgtagcaatcaaccgagcgtgatcattacgcatctgcaccagtcgtttgcggttcgttacctgtcgaaaacgcctcgcttggctcaagaaatctccacacgacgcttcgngacgagtgcgtcgagagactcaacgccgtctcctagtgctcatgggcgtagcgctctatctcgtgcataaccacttgttgtacgtgtaacgtcgcagacacttgttgagtcaccgagaactcgaaagacantcatgagctgcccgtttgagcaactccgtaagatcggttgaaagcacatagcccaaacagagatccgacctaccagcacaatcttggctactatgcgcaactgtcgctcgcctatcacgactcatataccatagcaaactgaggtccatgtatctaaatagagtcagatccgctcattttgaggcgccaacggttctccttgcaaatctattcccctatatggctaaggtaagcaaagccatcaatgagtttagcaacgcggtgtcacaaaacggaagaaccccaatgggacaccgcctggatttatttgcgtccctttttaacgcaacaacctttagacaggcctgggccaaattgcagtaatcccccaccaatgggtctcagtggcgcttcgatcaaaggggggaaacgttgcaggaacgctgggctcacatcacggggcgccaaatacttggaggatacagagcctgttcccggccccgcttaattgcccacgccgtccaagaggggcccaccgggttggtcaattcaaatctcaataattagaacgcggcatccactctggttgacttctcccactcccagaggggcgcctctttttagagacaaactattcccccttggtgaacctttacgccaagggttcaaatgtgtctcgcacaagccttggacaccggttatattgagcaaaccctggggcgtcacctggtgtggggccccttagtgtggcaccggtattttctggacaataagccggcagttgccacacagttgcaattccgcgggaagagtgataaccacctaaagttacacggggcacagttgacagtatataagccgccctacccctcatagaaagaagctcaacatcctttcccctactgacaaagcagtatataacaagcactttagcgccactactaatgcacccagcaacatccattaacacttatacacaccacacagcaatacccatactagaaatataaca

SEQ ID NO: 684034 - DNA, 889 bp, Homo sapiens
cgtgacgcgtgggacaggttccaactactggagaaacagggtaatgatggaggcaacagtaaattcctggtatgctggagcacaaactcaactttgctgtagctagccgcaaaacctttagccatgaactttctgattttggcttggagcagcactgctggagagattcctgttgttgctatcagaactgctaaaggagagaagctttgtcatgcaggcacggagctcctcgccgctgatgggaaggctctggagcacggttcctgcacggattactttgcatggcaatcatgaagagatacctgaagtctgaacctactcccagagagcaaccgatgggccatgtgaaggtagctggctagcagacgaactctcgatgacaatagtgaactaatgaaaactaaagatgtgctgactcgaattaatatgcccctaggctgtggtcactgctaacgaacctggagcccacagctactacaccgcaacttgcgcgaaaagctcagcaacagacccaaatatcgtcatagccacgatggatgccacagccaatcgatgtgccttctccatatgacgtcacgagcgtatctcctaccatatacttctctccagccaacacaccaacagctaaatccaacgcaaatatgaaacgtgaccgcgacattaactgatacataacctatctaacaaagagacactacaaccacccatgtaattacacaagaacaaaccaacaaacaccaaaaacgcactacaaaacatctaagcgaaccaccaaaaaaccacgtggataaaggacatctacaacagagattgcacaaaccagcagacaacaccacacactgcaactcacaacaacaaagacaagggaacaaggacaaaactgaaaccc

SEQ ID NO: 684035 - DNA, 1498 bp, Homo sapiens
ctcgtgggcttgcggatcggtcatataaagggctatgtctcacctgggtggtgtgtttatctcacatagtatggtgcattaagtggctcctatcatatacggtgtacatctgttggcttcaaaccggcgtattatcttcggttatagtggtttatatggtacacgagttatacagaaatgtgtaactcttgcggctctcttctatctcatcggaatgtacctgtggctttcccatgtaatgatctgcgcctatatagttttatcgcgttttcttgactactcgtcgtagttaatatcatcgtcccctatggagcgtggtcaatagtcataggtccgaggttctccccatctttggcaagaggttacagacttttcggggcgataattaagttgaggctacctgtggtatttgctatcaggatattcgtttcaccccacaccggttgccaacctaacttcccacacttagtgaacctccccactttagaatagaggctgtgctctactcctacctcggtgtttctagctgatacccgtgagagggtcgcggggtgatatcatttgccatggggaactatgcttccatggagtacagtacgtttggaacagaagcttgttttccgcttgagactaccactggtagcactgtagcacccaatttgtgctttcttctttggggctgtcagcgctcatttgtttcggctctgcatgcttgggttattgacccttcggccgtcatcgcgtcttttccaatccgccttttttaaagcgtctaggtagcttatgtttctttgtgtaaggcaacctataggcttattattaattcactacggtaggcctaccctcgggcgtttagtcatgaaaggtaatttgtaagcgggcctggggtggtgttctgggggggcgttaagtaccccctagcctcgctatgtgttcatctggtgctcaataattcgccaggtaaggctctggaggtgtgaaagcactttttagggggctctggatagcatatcgctctatacacaggatatatgcacttttcggcaaactaatgttgattgtatagatgattagagtttgttatattctacattattatcttacattttctctctgcgattagtcataacctaggccacgatcactgcataacagtgatggtaacggtcaggacagtgcacattctgcgtagatagcttagggctagacgtagtaggttgctattttagcgagcaatttggatgggcccacggcttcactctaggatcctgcgtgggcttgtgtacctcgcaggagcccttcttaagtatcttttgtacgcttttcaccccacccccaagtcctgggagtaatgccaggcttaccactgagacatgggagaggccatagatatgcttgacagataagggtgattttgaggctctagttaatcatctccaagaattgttaccgtagtcaaattaactcgtatttagagtatttatctccggtggtgcga

SEQ ID NO: 684036 - DNA, 192 bp, Homo sapiens
accctagtccaatctaagtaagtcatctctccctgtctgtcccctgaagccctgagctagccagtgatcaggggaacaccggatggttcctctctcggggatggggggccagaatggaacctcgggggtgacctgggcctggggtcccctgcccaatagagtctgcctccgggcaggtactggggaaactgg

SEQ ID NO: 684037 - DNA, 665 bp, Homo sapiens
  misc_feature (7)..(8): n is a, c, g, or t
  misc_feature (38)..(38): n is a, c, g, or t
  misc_feature (40)..(40): n is a, c, g, or t
  misc_feature (49)..(49): n is a, c, g, or t
  misc_feature (56)..(56): n is a, c, g, or t
  misc_feature (58)..(58): n is a, c, g, or t
  misc_feature (251)..(251): n is a, c, g, or t
  misc_feature (257)..(257): n is a, c, g, or t
  misc_feature (261)..(264): n is a, c, g, or t
  misc_feature (269)..(269): n is a, c, g, or t
  misc_feature (274)..(275): n is a, c, g, or t
  misc_feature (280)..(280): n is a, c, g, or t
  misc_feature (283)..(286): n is a, c, g, or t
  misc_feature (338)..(338): n is a, c, g, or t
  misc_feature (343)..(343): n is a, c, g, or t
  misc_feature (345)..(345): n is a, c, g, or t
  misc_feature (452)..(452): n is a, c, g, or t
  misc_feature (455)..(455): n is a, c, g, or t
  misc_feature (486)..(486): n is a, c, g, or t
  misc_feature (634)..(638): n is a, c, g, or t
  misc_feature (640)..(642): n is a, c, g, or t
aagaaanntaatatttattaataactgaaactgtttgncnccctttggnatatagncncgcatattatattatagcaggccaagataaaattttgacagctctttaagcccacatgcagcagtgggtcagataaccctgtggcagtgacacgggcaaattggcatttgaataaagccctgggaccacctcaacatgcgtagcctcttgtcttaaatgtactccccatggcagcatggaggaggcaagaccngtgggncaannnngaacnggccnnacttngannnntaaaacaagagactcagggaaagtactaaaccaaaatctctgattttacttngcgtntnctgtagtttttgttttactgagatgcttttgtaaaggaaaataatactgtgacagtttagtaattctacagattcttaatatttctccatcatggccttttacttcncanttttctgaagtctgaattcaattacaatttnttttttaccaatttaatctcaaatgttgtttaactgctttaaattcatatacgtagagtattataaactgcagagatgaaaaatgtgttttcacgggatttatattgtgaactaaactaagccactttttggacttatttgtgatgcnnnnnannnatatgtgtataagttgtttaaaa

SEQ ID NO: 684038 - DNA, 475 bp, Homo sapiens
cagaaagagtctcgctctgacgcccaggctggagtgcagtggcgtgatcttggctcactgcaagctccgcctcctgggttcatgccatttaggctgaacttatgtgaggaggcagctttaggctaagcttatcactctgaattctcagtggcatgtcggagtttgcaagaaaggtggatttcccattcatgccaactcctccagcatggctacagatcgcggctcatcaacaactcacacgttcctcccaggtgttagggcaggactcagaactggaggtccgtgcactggctcgtctatgctccagcctagaaatgtccccgaggcatggccagagtcctccaggctggggagcagcggaggccaggccatgccagatctgtcgtctgggtttagcttcgttgcagtgagtgtttacagctgagtggtgctctggtgaccgttgctctacaatgatccctctggcagctccacg

SEQ ID NO: 684039 - DNA, 383 bp, Homo sapiens
tgtagccttatacttcgtttctggtaacagcctctgacgataattctgaggggtctgctactcgtgggaatcgtggtgtctctggggtttcagttggccctattgtttggtgagggaaaccatagtgaacctcagagaggattcaatagtaataaaaacaacagaaacaagattcatatttccacagctgttttcttatttggagtctcataacaaccctatgaagcagacattgtgatcatgttttacagaggaggaaacgaggcctcaaagaggttaagtatccccaaagtcgtatagctagaaggtggagtaaaattcctggcataagataatcagattgcacaaggaacctctaaatctaacttctaattcccactggg

SEQ ID NO: 684040 - DNA, 133 bp, Homo sapiens
cacacgcacgttaaaggtctgacttttattccatcatttacttgaccctcctgcctcctcttaaaatgaccttgtgattacattgatcccacatagttaatcctggttcaactcccttctccggtggcgtggt

SEQ ID NO: 684041 - DNA, 428 bp, Homo sapiens
taagtgtgacagctcctagtctggaccacccttaagaggagcttaaagaagggtggcaacaggccagacgcggtgctcacacctgtaatcccagcattttgggaggccaagcgaggcggatcacgaggtcaggagatcgagaccatcctggccaacatggggaaaccccgtctctactaaaaataccaaaattaattggccaaagttgggggtgcctgtgatcccagctacttgggaggttgaggcaggagaatcgcttgaatccaggaggcggaggtttgcagtgagccgagatgatgccactgcacaccagcctgggtgacagagcaagactccgtccggggaaaaacaacacaggcaaggttcgcaagtttccgggaggtgttaaaataacctaggatagcaccaacattgagactcgttggcaa

SEQ ID NO: 684042 - DNA, 1159 bp, Homo sapiens
ggtggctcacgcctgtaatcccagcactttgggaggcccaggcaggcagatcacaaggtcaggagatcgagaccatcctggctaacacagtgaaaccccgtctctactaaaaatacaaaaaaatgtggcgggtgcctgtagtctcagcctcccgagtagctgggattacaggtgcccaccaccgcgcccagctaattttttaatttttagtagagacagggttttaccatgttggccaggctggtcttgaactcctgaccctcaagtgatctgcccaccttggcctccctaagtgctgggattataggcgtgagccaccatgctcagccattaaggtatttatgttaagaactttaagtttacgggtaacgacgacatgacacgatgatccagaaaaaatgcacgcaacgtccacatggccgattcgccggacactggttaccgacctccacttccttaggtataggtatactatgtcactgaatgcaacatactacaacaatatgcggcataaaaaaactcgatgacactcatctgaggcaatcaccaagggacgaagagagcccataagcgcagactactaacatctacaagcttgggacatatcatctcttcccccaagttgcaacacaacaaccacaccacacacccgccgcctactcctcccacgcgtgcgcaaacacgaggaaatgacaatgcaaccagaaaccacacgactccgccccacaccccactgcacaaaacggcaaacacgccgaaccccaaaaaaagcacagaaaaaccatagcaacaacccaagacaacccgcgcaaagcaacacgcgcacaccacagcagaaaacaacacaacaaacacacaacaaacacaaagacaccacaaaaccgacaacccaacacaaaagcaaggcaccacaccaggcgacgaccgagcggcggaaacgaagcggagaggcaccagcacacggaagaggggagacgagaccacaagcaacgccgctcgaacgccggacacccgtcgcctcgccacggcgccgagacggccgccagacgatccgggacacgcgcaacagccaccgcggggagaagaaaggtagaggcggcgcacgacgcccagcagacgagagggagaaaaggaagcagaacgacagagagtgagcaca

SEQ ID NO: 684043 - DNA, 1324 bp, Homo sapiens
  misc_feature (188)..(188): n is a, c, g, or t
cgacaaaattagcgcctcctctaataaaagttaatttaagctcactacattactagtcgtacctcccgcatcccctagtccacagcgatcagtccgacactgactgaaaacttcgggcgtcacgtccattgaggcgtcctgcctctgagtctcgtccacagattcaccaccagggacctattcctagnccattgcatgctactcaccagactgccatcaaccgacatttgtcatcaaatcgctccacaatcactcgagacgtagaagttatgagcatgagatcatccggcgtacgcttgcagcagccaatgggcgccatcaactaattctttaatgcgtgcgctctttccttagcagcagtcggggcggaggggcctactaattaacgggattcactgtgtcttccttaactcaagatagaccttgaagacaacgatccgggcatttagttcgcttccattggcgttagcaaagcgtaattaaggccaaataagccctttcagtacgggctaattcgttccttcccccagatgagggggccaaaactatttcaattccgtggaaggagagctcgcgcaagtgaatttcacagatatgcttaactaaatgccagcctagtcccaatagcatttggggacagacccgaagttcaaatcgagctcatgacggacgcgctaactccacgtgagcaccatgtccccaaactcgttcgcacatggattcttttaggccgtttttgcactttcagtccttaacccgttctagttacattggccaggccataaagcgagggacatccggggcgtcctgaataccttggcgacgaagaacggcgattccaaacggaatccgccctaaggaattcaccttccaaattccgggtgtgaagtcgccctgttcagccctttctcacacagattcacaggaggagccccccgggggggaaaaggtactctatctcactgttgttcccctaatgtaggggtttaaccccattattctcccgagcaccctttgatggcgcagcaaagataaacccctgcagaacgcgctgagtaaccccctccctagacccgacgtgaatgtacactgatgccaacaactttgcgcgaccctctaacaacaacagatcattcaacaacctaaatcactcacatccaaaagtcatacctcatcctctaaaaacaatctccctaccccacctattccttccgcccacacattcatccacaacgccacctaacacactcatatcactaacaacaccacaaaaatctttctcgatatgctctcagcaacactcccatcacaccacacaagagaa

SEQ ID NO: 684044 - DNA, 105 bp, Homo sapiens
tgttaacttttaacaattagaaaaaaatgactgctttataataaactcttctgagttaattattcattcggaaatgtacagttttaactccttaagtttactatc

SEQ ID NO: 684045 - DNA, 114 bp, Homo sapiens
atgccacctcctctgtgctgtccagtgctgtcacctccatctgtgctgtccacctcctctgtgctgtccacctcctctgtgctgtccagctgtccacctcctctgtgctgtcca

SEQ ID NO: 684046 - DNA, 1424 bp, Homo sapiens
gtatattctttttatttttacattgaaatcaccttggcaaatctgacaacatgattatcagaattcagcagagaatgatgtgtcaatcaatcacacatctactttcttgttttttattgttattgttgttgttgttgttggcggtggtggtggtggtggtggtggtggtggtggtggtggtggtggtgtttgagacagagtcctgtgtcatttgagacagagtcctgtgtcatttaggatgaccttgaatgtgtgactcactcatcctgcacctcccaaatgctaggatggcaggtaggcacaatcatgcctagcttcatagggtgcttagggctgagctagggccttgtgcttgttctgcaaacactccgccaactgaaccacatcctcaaccccataaggacattatggagaagagaacctgccacagaacaagatgctgctggttttctggtgccagatgaagaaaaggaatgggcggtcacgacagaaccttggctctattctgcagctccgggtattcctgatcactgcagtggtcgcagctgcttcggtgccttcctcattaacctccacaaagcacttgtgggcaaccttggacacaggcacattcttcttacttgtcatcccagagaagtcagcctttgtttcctcaaaggcatctgtcattcccaaactctgaagaacagtttccaggtcataactttcctccagctttaatctggggaaaaagacttgcactttactttctgtcagggtttctgggtttgtccaagctctaagcttctcatatgtaagtgctttctccaccacagtgagatcagagctctcatcaggaaggagaacgaccatgctcagctcgtcctcagcatagggcagagccagaacctgcgcgttcacctcatccacatgtgccatcttaaatttagcatgcttgaacatcatctggactgtcttcttctcctcctggttagttttaaagggcatgcccctcgtgtacttcctgtcaaactgagccttccacttccctttgaaatacatggcattaacaagaaccagcttagtcagtgggcaaactgttccaggactcagaacttcggaaattttaccttcagttttttccaacacccagtcattgatgcgtttcctgcacccttcagtgtctttaacaaaggacatctcttctatcccagcctggtagaacttctggcaggattccttgaaggtcgaaaggaaatcacatgattcctctccactggagcccccagctttgtaatcatgtgatcagtctgaatcattgtttctgtcacctgacttttcagctagtgtctggagccctctgaactccagcgtaatctctagggtgcccacaccatcaagactccccccagtggtttacttgcaaaaataaaagctgcagaagc

SEQ ID NO: 684047 - DNA, 343 bp, Homo sapiens
gaatttgaacttggttgctctagatatcttctaaccgaactcagctcattaaggatacagattcctcagggtgaattagtcccctctgcaggtcaaccttaaggttccgggccacgtgaaccggttccatagcttgaacctctctctccagaatggatacacacaaagtagtcttttccctatggtcctcgttaacgcagggagaagacgcggcccaaggcgcagttccgccgcttgctggcaaagctcgttgagcgcgcacgtgcttacagcacaatgtagagcgcgcgtagctcctacagcggcgcttacagcctcgctacctctctcaacagcgccagag

SEQ ID NO: 684048 - DNA, 95 bp, Homo sapiens
cgggaagcttatttttggctccaaacattctagctactgctcattttaattgtctgaattccaggaacatgtaaattttaacctataatcagtct

SEQ ID NO: 684049 - DNA, 756 bp, Homo sapiens
cgctgcagcgggcctctgcgtgggcggcgggaatccgcggacgatcgggtcgggtctatggctcccgatgtccgcgctcctgggcgggagcccttgtctgggtctcgcggggtggctgccagatgcgtaggccacactgacctagttccttcttgtcgccttttccgcagcaaactggcgtgatgactggcctggtgcagctggggcggtgcccggcgggccctgggtggccctggcgatggggaaccgtggtggcttcgcgtggagcgtttctggccagtggcatcctggggtcgtgggctctgccgtggcgtgggacgagggtccgggggaccggacggtccgcgggaagtctcgccgagatgcgcaaggctcgaggtataacggtatgtggatgtcccgttcacacacagtatggtgccgtgttgggtcaatggacatgaaagcatcacaggtccctggagggtagatctatctctatactccgcgtgcccattagaggaatcacggagatcattgattctcttgcctgggggttctctctcgaaggatgaggttattgaagattgatgccagtgcataatgcagatccgtgccggccagcgcatcaggttcactggcgttatgtgtgctatcgggggactacaatggccacgtcggtctgggtgtgaagtgtgccaaggagtgtggccacgccatccgtggggcatccttctggccagctctccatgtccccgtgggcaagggtatggggga

SEQ ID NO: 684050 - DNA, 217 bp, Homo sapiens
gggaagtcccagctacagtaagctgtgatcacaccactgcaatccagcctgggtgacagagtgagatggatcaataccagagtgataaataccatcacaataatacaggaccgcatagaactttaaaggaagttctgagtaagaaaagcctttctatgtactgattcaaaacccaaataaatataaaaagaatagaacaataaatacaagctcaata

SEQ ID NO: 684051 - DNA, 761 bp, Homo sapiens
  misc_feature (24)..(24): n is a, c, g, or t
  misc_feature (431)..(431): n is a, c, g, or t
  misc_feature (443)..(444): n is a, c, g, or t
  misc_feature (457)..(457): n is a, c, g, or t
  misc_feature (459)..(459): n is a, c, g, or t
  misc_feature (468)..(468): n is a, c, g, or t
  misc_feature (474)..(474): n is a, c, g, or t
  misc_feature (481)..(481): n is a, c, g, or t
  misc_feature (488)..(488): n is a, c, g, or t
  misc_feature (507)..(507): n is a, c, g, or t
  misc_feature (520)..(520): n is a, c, g, or t
  misc_feature (523)..(524): n is a, c, g, or t
  misc_feature (526)..(526): n is a, c, g, or t
  misc_feature (528)..(528): n is a, c, g, or t
  misc_feature (531)..(531): n is a, c, g, or t
  misc_feature (539)..(539): n is a, c, g, or t
  misc_feature (546)..(546): n is a, c, g, or t
  misc_feature (567)..(567): n is a, c, g, or t
  misc_feature (571)..(571): n is a, c, g, or t
  misc_feature (573)..(573): n is a, c, g, or t
  misc_feature (575)..(575): n is a, c, g, or t
  misc_feature (582)..(582): n is a, c, g, or t
  misc_feature (584)..(584): n is a, c, g, or t
  misc_feature (588)..(590): n is a, c, g, or t
  misc_feature (592)..(592): n is a, c, g, or t
  misc_feature (607)..(607): n is a, c, g, or t
  misc_feature (612)..(612): n is a, c, g, or t
  misc_feature (649)..(649): n is a, c, g, or t
gggcaagatatgcaggtcgaggcntgtttaattggacgaggcgaggccagcgttccccgggactcgctgctcaagttgtctattgcctgccgcacatcatcctagcagggccccgtgcccaccaggcggacaaaagcggtccgtgaacaccatgcggccgctcgggtgccgccaggctctgtggtgagcgccgccaccccgcgccaggtcccgcgagcccgctgccggcacctcgccctgtcccagctctactccaggccccgtccgcccgggggcgccgcccacctggccttcgctcgggccgttggccgtctgcacccagaccctgagccgggcgccgccggccatggaggtggcgccggagcagccgccgctgatggcgcacccggccgtgctgaaatgcgcagcaccccgattcacaccacccgggncctggcgcacanntacttggaacccngngcagttgtngcctcngagacgnaggtggnccgtcttcttcaatcaccntcgactcgcaggnganncncntanttatgccnaccccgnttcacgcgcggggcgcgggtntcanangncccgggncngccnnncntgacgggaggccganttgtncgcccacatttgtggccagccgtgtttgccctgctgnacgggggaaagagccctttgccgtgggcccacaacaaacgctggcggggccgtttcaagggagtgacctagtggggcctggccctttgtccgggtgggtaggggcgccggca

SEQ ID NO: 684052 - DNA, 601 bp, Homo sapiens
  misc_feature (547)..(547): n is a, c, g, or t
  misc_feature (549)..(549): n is a, c, g, or t
  misc_feature (551)..(551): n is a, c, g, or t
ctttcctttcttttttgttcctgttctcttttgcttctttttttctttcctctgttctttctcttattcttctgtgttcctctttccttttttttctttctctcctctttttttctttttcctctttcctttttttctcctctttccttttgctctccttcttctgtttttcctttgttttcctcttttttttcttctccttttttctcttttttttctctcttcttttcttcttttctttttctttttttttttttctttcttcttcttccctttttgttttcttgctttttttttcctcctcctctcttctttctttcttctctttccttatccctttctctttctttgtttctttttcctcctgctttttccttctttctcttattttcctttctttttccctggtttctctgtccctttttgtttcttcttttctcgtctgtcttcccttctttctcttgccctctttgcttttccctcctttcaaatttttttcctccttgtctcaaaattttttcctctatttgtgtccctgtcccagttntngntagtctttcattgggggggttttggtgcgcttttcaatgtttttcttttt

SEQ ID NO: 684053 - DNA, 325 bp, Homo sapiens
ggtaggacagtcagcatgcgagagcacctaggcggtgagaggagggggccaaggccttattctgatgtggcccagctccatctttcactcgggggatgtccagggtcacaaattcccccaaaccttggaccacgaacagattcaagcaggaaaaccagggcatgggaatgttgaaataagcctgaaatacactggatgcaggggcttagatgatggcaaagaggggcactcaaaaacggttggtcagtaccggggttccttctctttttcctcatcctcctttcggctcagacatgccacaaccagatatggtccccagcaggaa

SEQ ID NO: 684054 - DNA, 132 bp, Homo sapiens
taagcgaacatgcggcgcccagaggtacggcggaggaggaggacctgatcgagtccaccgctcctaccgagagctcttcgagttcttctgcaacaacaccaccatccacggcgccataccgcctgtgtgtgc

SEQ ID NO: 684055 - DNA, 170 bp, Homo sapiens
gatgcgcgatggccaaggattgggtgcaaggggaatgactgacgaatcttcgaaggaccctttgaagaatgcatgaggatgccagacaattggagggaatgactgattgattcaagaaaggctgttgaaagattgaacttgttaattacggaaaagccaagacccctggg

SEQ ID NO: 684056 - DNA, 162 bp, Homo sapiens
cgtgacaattgaagacatggaattaaattggtatgtctctaactgcctcttagtaatcaagagttcctgcttggcaaaacctcatgaaaacagatttaggatttaagacagtgtcagtaaattagtacaagcccatacacaagtcctcaaagtgatggacaa

SEQ ID NO: 684057 - DNA, 804 bp, Homo sapiens
tacctgactttctggcccaacacggcatcgccatgtctccgctcagcaacaacagcctcttcctcagctatcaccggaatccgctaccggagtacctgtcccgcggactaatggtctacctgtccactgatgatcccttgcagttccacttcaccaaggtaaagagccactgactgggacccaactataccaaggaaggccctgaggggaatgactttctccggaccaatgtgccagacatccgcgtgggctaccgctacgagaccctgtgccaggagctggcgctcatcacgcaagcagtccaaagtgagatgctggataccatttcagaggaggcgggtatcaaccatgagcccaaggccttaatgagcctgattcatgaaatgcccaccacattacaacacttttaccacgttttgtcctcagactccgcccatgctgtgtggactatgactgattcaatcttccatgactctgattgcatgttttctaccaatgtactgttcctgggcctacatgagaagacaagcctgggaatctgctattagggatatggctttggttttgagcttggtggcctagctttgaaggtcctcactgttaatgtcttgatccgtgatccttaaaactaattgtcttctgactattttgtgtcatatgtgctttgtagtgtttcgggttactgttacaattactattaagttctaattgggaattattaagttgaccagaggcgaagtaatgaccatattttttctatgatccaggttagtggggaattttcatttttcgatggcatggctg

SEQ ID NO: 684058 - DNA, 268 bp, Homo sapiens
ataacatccaaactgttcccattttgcatcattgtcattctttggcacaaagattctacatagccatgggttaggaaacaactgttcactcatggtcttcattttttttttttttttggcaaaatccatgtgtttggtaaaagaaatactgcactgggctgggtatatactacccactaattataagtaacgacaaatagtatgaccttctctttggacctaatcctactcctaaagcccttgaagtggccgtaacaatcttcttaca

SEQ ID NO: 684059 - DNA, 151 bp, Homo sapiens
ctgcgatcttaaacattggtccagacaccatgcgtgtacactgggctccaccccatcgcattgatttaagccaatcgttcactggtgcgtgtactcagcctgtgaaaaatgacggaagatgtcgcagatgttgtcaagtttctcctgtcag

SEQ ID NO: 684060 - DNA, 228 bp, Homo sapiens
ctctagagtatcccctgtctatggctgcaccctttatccctgctactccgaatgctgaggcaggagaatttgctcatgtccggtgagttcaatggtctgttgtgagctatgattgcatccactgcactccagcctgagctgacagagcatgaccctgtctctaaaaaataaaataaaagatatgtacatctatgtctgaagactgtttgatacattataagagtaagt

SEQ ID NO: 684061 - DNA, 1868 bp, Homo sapiens
  misc_feature (176)..(176): n is a, c, g, or t
  misc_feature (510)..(510): n is a, c, g, or t
gtgtaagtgcggtggggatggaggctgggagtcgtgagtcggggacgactctgtcggagctgcgcggtggagcgctcgcttggtcgtggacgtggcttggcgtgtcgtctccggcatgcagctgtcggtcgtgctgctcgcggtgcgcgcttcaccggcctgtgtcacctgggagnatagggaggtgtgtcgcaggacgtgcagccaccagtgagtcatcctgcgctgtcacctccggtcacgaggaacgcccagacaacaagacatagcattcatacacatctccttgcacatagtcatgcatttgttttgtctcgtcactattgcgctcgtagtcccacattcacactcgcgaggggcacactcgactcttggattgcacgttgttgggcattgaaatgcagatcctcgtagtggtacccaattcttcaggtgacacacttctctatatgtcgctcgtgtgttgagctggaagccacaggtgacacggtgatacgccaaaatgccccncccccttaagggttggcataccctccggttcaaattcgatggctaattctacaatttctggttccccctcttggagacggcatacaatccctattccaggacaaggtggcaacctcttgcgcccgttcgcctcggataccttttcccccgggtaacgagccgtttctggcaacggtgacacattctatctactaataatggccttagtgttaccccgtgggaggacgagggttaacgaccatttcctaaaggttccttttcctcccaaaaagacggcagatctccttccacattttgtgtgccacagttgaaaacctccattacggggttaataaaacttctggaaataccttatttccggcatttgccggaagcgaaaacactgggccatttcgaaccaccttggctttctgtggggcctttatttttgcgctgacgagcacaacacgccctttttaagaggccgaaaaatttctggttccacccaaccacggggaaaaaacccggctttgggggcatgtgggcacgagatatcaccacccgcgttgtggacaggggggatttacttattacccccctctcctgccgcggagggggggtgtgggcccacttacatggggaaagaagtttccgcaaatagggtgttgtgccccacaaggaaggatatatatcccgaaagagaagcacagacggggcaaagggggaagagagcaagcacagtggaggcacccgcccctcttttactacgtgtgtggacactcttcgtaagcgccggaatgaggaggggtgcaaatctgcgcgggacgaagtttgtggtcgtttcactttttggaaacccgagtttgtgaccaacagcacgcacactctcttggcaaactcgaggtttcctccccccgtagtgtgacctaagcatttggcttttggctgatgcgagaccacgcgaacacgtttagggacgcaattgttggtgggaaatggctcccattaataaccccacattctcacagggacagccggtccgatatcgcgttgaggagagaactatggggtggtttgaacaaaggcatttggagttggttgcccctttgtggacatccaagctggctgtgtgcaacgtgtgcaacttgcccgcccccacggtttgtgctaaagcggtacccagatgacagtgttaacaacatgtggctagtgttggtggcaacaccacgcggtaggagggttattatcccaatcatcgttattggttgacgacccaacaatctggctgcacagcggcttgtgtgcacaccaccctcttttggggcacagtttgtctgacacccacggtggtggttatataccattctcatatagagcag

SEQ ID NO: 684062 - DNA, 572 bp, Homo sapiens
  misc_feature (169)..(169): n is a, c, g, or t
  misc_feature (222)..(222): n is a, c, g, or t
  misc_feature (300)..(300): n is a, c, g, or t
  misc_feature (372)..(372): n is a, c, g, or t
  misc_feature (405)..(405): n is a, c, g, or t
  misc_feature (525)..(525): n is a, c, g, or t
  misc_feature (527)..(527): n is a, c, g, or t
tctagcaagtaaaaagttcttgttacacatcacagcaactctgtcaatattttcttgtgccagaattgttattatgcagccttcatttgggctggtttcatcattttgcgctgtaaaatagctttacagtgcattgctacagcccgaagaacatatatatatatatttnaaaatatatcggatagtcatatacaaatgagcgaggcatttgttgcaacttantacatagcatataccccaagtcactgaagaaaatcgccggcattagtgtgcagcaaatttgttcttttggtttcatcncaaacagaagtgcctcatcataaaaatacatttggttttcaaggtgccctattgttaaaattagataacttncgttgaataaatgaatgtgttttatcggtaacnaatttcattacatttaccagttttaacacaggtggatacagaacttcaattctttagtcattccaggtggatctgagttttatattcaaacttttgatacagtttttgagttttgcgtgncntgaatttttaatctttctgcaaaatacataacttaaatgaacata

SEQ ID NO: 684063 - DNA, 90 bp, Homo sapiens
tcgttttgcacggctcagtagaaacgcagtcccattcatattagacagtgtacaaaactgtcaataaatgtgtacagtgaattgtctttt

SEQ ID NO: 684064 - DNA, 447 bp, Homo sapiens
  misc_feature (43)..(43): n is a, c, g, or t
gtttgtgtaatataatcctttatttgcttacctgaccactttnttataagctgttttgtttaaaagcttttggttatagggcatgaatattgttttgatggttaacttcacatgacttatctgtaagtgtcattttatagtactttacagttgtcaaaaaaaatcttacatatattgatctagttgatcggtagaggaagcttgtgaagtaggtaggacaggttatgatgtcttctctgtatggacgtgaacccagggttttaataggttggcttgcccaaggtcccctcccagcttgtcaggtagtaataaggctcaaagtattacttttggttcaagcgtctcactcatcaattatagtatatattcccgaaaatgttagtattgacaactcagtttatctcttacatatcattatgcttattagtttccctccaaaaaaaaaaa

SEQ ID NO: 684065 - DNA, 484 bp, Homo sapiens
  misc_feature (284)..(284): n is a, c, g, or t
ccgagggtttccccatcctttatttattttcgtaaaatttaactcagccttcctcacttagtggggagggatccttcaaaaggaaaaaaaaaggcaagtcccccaacccacggcccggggttcaggctaaagctgtggggaggggctcccgttttctcacccaaaagttttcgcctccccattcttgggggccctcctccaggttagatgtaagctgtccatacctctcccccccctttttcatttgggcttttttctctcgtaataaaaaagtggggagccgntggggcaccaatttttaatcccgggtatttccccctctaataaatttcccccatcccaggaggagttttcaggcctggggtggggccccgggtgggtgcgggggcgattcaacctgtgtgctgcgaaggacgagacttcctcttgaacagtgtgctgttgtaaacatatttgaaaactattaccaataaagttttgttta

SEQ ID NO: 684066 - DNA, 223 bp, Homo sapiens
gagggggggtttgttaaaagtccataggtttagtcaaaaagtctcgcttttgaattaaaaaaggggaaaaataaacccaccctcagagaggtcagaccagggagatgccaaaaaatcaggcttttggggaccctgtcaaacagcttaatcaagtttcttttgaggccagccccccctttgccctttttagtcccccgaaccaaaaaattttttttttttttta

SEQ ID NO: 684067 - DNA, 239 bp, Homo sapiens
ctttttattattacaataaacattcctgtgtatatgtttgtcaccatgatggttttacgtctgcggaatagattccctggagtaggattgctgcattgaggagtatgtatatttaactccctaaataactattgacagattgtgtcaaaagtggccgttacagtcttatttccatcagtaactgtataaacacactgttccctgaatactcatggcaataactattgtcacattaagag

SEQ ID NO: 684068 - DNA, 226 bp, Homo sapiens
ccattgaagagcttcctcagcggtcgggctctttgggagacgctgacttagacatgagggcaaggtgaagagagactttaacgatgcttcttcaggggcgtccaggggcagaaaaagtccaccagagatcttagatatgaagcggcttcattattaattggggaactctcagtttcccctctttggtccccgggatcagtccttcaatctcattcggggtacggag

SEQ ID NO: 684069 - DNA, 198 bp, Homo sapiens
  misc_feature (86)..(86): n is a, c, g, or t
ggtattgagtggcatgtgaggatctctttcccccttgcttcacatgattgtaagttctgaggttccccagcatgcttctatgcagnctaagaactgtatgtcaatcaactcttctttataaaattacccagtctcaggtatttcctacaggcagtgttgagaacagactaatacacctgttaaattatgactgcctta

SEQ ID NO: 684070 - DNA, 725 bp, Homo sapiens
  misc_feature (47)..(47): n is a, c, g, or t
  misc_feature (68)..(68): n is a, c, g, or t
  misc_feature (95)..(95): n is a, c, g, or t
  misc_feature (171)..(171): n is a, c, g, or t
  misc_feature (175)..(175): n is a, c, g, or t
  misc_feature (194)..(194): n is a, c, g, or t
  misc_feature (258)..(259): n is a, c, g, or t
  misc_feature (265)..(265): n is a, c, g, or t
  misc_feature (293)..(293): n is a, c, g, or t
  misc_feature (308)..(308): n is a, c, g, or t
  misc_feature (323)..(323): n is a, c, g, or t
  misc_feature (338)..(339): n is a, c, g, or t
  misc_feature (341)..(341): n is a, c, g, or t
  misc_feature (348)..(349): n is a, c, g, or t
  misc_feature (360)..(360): n is a, c, g, or t
  misc_feature (365)..(365): n is a, c, g, or t
  misc_feature (382)..(382): n is a, c, g, or t
  misc_feature (400)..(400): n is a, c, g, or t
  misc_feature (405)..(405): n is a, c, g, or t
  misc_feature (447)..(447): n is a, c, g, or t
  misc_feature (456)..(456): n is a, c, g, or t
  misc_feature (470)..(470): n is a, c, g, or t
  misc_feature (474)..(475): n is a, c, g, or t
  misc_feature (495)..(495): n is a, c, g, or t
  misc_feature (504)..(504): n is a, c, g, or t
  misc_feature (510)..(510): n is a, c, g, or t
  misc_feature (519)..(519): n is a, c, g, or t
  misc_feature (550)..(550): n is a, c, g, or t
  misc_feature (558)..(558): n is a, c, g, or t
  misc_feature (675)..(675): n is a, c, g, or t
gttggcaatttctgagttcaagacataagaacatctcccattaagcnttatgttaaatattacaaagnttatacagtggattggctcatgggggntgtggagctgatgtcttgagtaactcacccctgatatgggtgcaggttttttaaaggctatcctataatctttttnctcntaaaataactgctcccttnttttcagtgttcccattcttgcgactggggactctgggctggcttaacagttttgctagtgagnncggacnattcttcttaacaaaccaaggatataangggggacccggtaangggcgtgcttttcanggttgacaataaatnngngtgcggnnggtgttcgggnggggnatgtggtgtgggggctncacttgggtgtttggcgngggtngtcttttgggggctcgccgggggtccctgccgttgcgtggtngtggtgctncactgtttggtttngagnngttctcttggagttgtgggnttgtgagtncccggncattgcttntgccagcatgtgaaaactggtgttcccttgnttcagggncagtgtgaacaccatttcctgtacccatattactattcatggaattattcttctgttcactctgtgcccctttgttctgctgtcctcgataatctgggttgggttcactgaaatttngcacttctgaatataccatacaaaattccccatttttttgtagttcacca

SEQ ID NO: 684071 - DNA, 686 bp, Homo sapiens
  misc_feature (471)..(471): n is a, c, g, or t
atcaacaggaccacctttgatcacgattacaaataaaacacatcccgccgtgcataggtgctgcaacccaaaaggtgcttaaacaccaaccttccccccatcctcctccgccgttatcacagcctcgcattgcccaccccccacccccccggtccatatcattggtacatttgtcactataatagacccgggtgttttcaccactacattcttgccacacgaccaggtctgttccaagcatttccttacacctcctcaattcgaacgccatactcacccagtgggcgctccccccccacacagactggagagatcattcacctacggctctagcccaccaccacaaactcgcgccgccatctattctcttctacccactctatacactacacacgctgttttgttttcataccgcccaccacactatctgtttgttgtacacacaccgctctgacactcccttcttatcanttcctcttgcacatgctgcacaaacacctctgttgttcacccaccgtcttttgaaatgcgcccacttctttcccaccaattcggttttaagagagcgccctactatcatcttcgtccccattgttctttttttgttttcccccgaaaaacaccactgacttccagtttttataaaaaaagaaaaacacactcgccccatcaataaaccagaaaat

SEQ ID NO: 684072 - DNA, 153 bp, Homo sapiens
  misc_feature (109)..(109): n is a, c, g, or t
  misc_feature (113)..(113): n is a, c, g, or t
agacgcataagacaccataggagcctacactatagatatgccaccagcgaactctgagaaagagatcacagatgcatatagacacacatagcataatggtactaccaantctnacaattcatacctattctgaaaaagacataaaacagaatt

SEQ ID NO: 684073 - DNA, 1330 bp, Homo sapiens
taaaaaatttaaattttttcatctctttttattacttgaaaaaaaaaaaaaaaaaaaaaaaaaaaaaaaaaaaaaaagagggggcgcgcgcgccgcacaagaataatccccccgcgagggggccccatcgtacgcgcgcgccacccgcgatttttgtggacaagagggggccccataaggagggagagccttgttttatataaagaagcgaggcgagagggggcgcgggttttataacaaagggtggagagaggtgggaacaaaaggtgtaaaacgaggggaaaattttggggaaagagagaaacattattatgaggggggagggagaaaaatatgtggggaaacaaaatatcactcacatcaagagagagagatatttaagaggtcttctagaggggaaatatatataaaatattttaaagggtgtattatatgatggtgggtataaaaaaaaggggaataattgggaggggggaggaggagaaaaagttgtgtggtcataatagagagggagatatagatgtatatatatgagaagaaaaaattattatatacagaggggggagctttattgttttatatataattatagagagaaggaatcaaaggagagaaagaagagagagaaaagagaagaagagagagaaaaagaaaaggaagagaaacagacaagcagagagcgaaacacgaggagcgaccgagggaaagaagaagcagaagacgaagaaaagacgcgaagcggacgcagagagagagcgagagagagagggagaaggagaagaggcagcgagcaaagaaagaaagacacaacaacaaagcaacaaagccagaggagggcgaaaaaaacagaagaaacgcagaaagcgggaacagaagaaacagaggggagagagaacgacagggcaggcacagaacgagaggggaaaggaaaggaaagaggaggaaaagcaaaaaaagcaaaaaaccaagaaaaaaaacacaaagaagagaaaggcaaatgagcgaaaaaagaaaaggaggacagaagagagagaaaaagaaaaaggagggagggaagaaaagggagcgaggagagagagaagaagaacaaagggagggaaaggaaaggaggaagagaagccgagcgagcgagacgaggagaaacgcaaaggcgagaaaaaaagaaaaaagagagaaaaaaacgagaaacgagaaaaaacaaaagaaaaggagagcagaaaggaaagagaaagagagagagaagcgagcacaagagaggacgaagagagagacgagggagaaaaagcgcggacgggcagaaaagaggcaagaaaagaagaccagacgagcc

SEQ ID NO: 684074 - DNA, 845 bp, Homo sapiens
gtagcccgggccgcgagccgggccgggcagcgccgtctccgcctcgggccgccgggggcgccttgttgagcgctaccagtgcgtccgcgccactcgcggcgaccccgggccaaggccccggggaaggcgactcccgggcgcccgaattagccccaagttgggtgccgactgttgctgcgctgtctcccgaccctcatgcgacggcgccgggcctcgccgtacgggtagcgccccccggggatccccttcccgggtgtccccttgggccccctgagttagtgatagttatgaccgatggtcgggccgatgtggaaactgttccgcgtccgaactgagctccgcaaacggtgtcggaactccagtttcccgaggaaaccctgtaggggaaaagagacggacacattaccctgagtgccaacaccatgaagccaccttcgtgcctaaacaggggtcttaaagaaggtttaaagtccgcggaccaaatgggacaaatgaagaggcaagtaacgcaaggccctctttgggcaccgttgaagaaatgaaatacccaggtagtgagagacccaggaacaacacccggaggcagagaaatgctcgtaaagaaaacgaagtgatgcgttaacacaccgggcctgaagcccataacaagggtcgaccgggataaaaccccgaaagtcgcttgagacagtgaatctgtacgctccagccaaagggccctaaggggacggaccttaatagagcgagacggtatacgacccaattgcggaaatactccagttgcataggtgtcccgcgtctcctcaagcactttcttatgtcaaagaagagacaataagaaaagaaaa

SEQ ID NO: 684075 - DNA, 331 bp, Homo sapiens
ggatctgatagtgaaggatataaagatgtaaccatcagtttaaacctctcctgtcattcctagtcatccttggcttcataattgaaatggaagtgggggtgtccgctactctgtagaatctgggactggccacctgtttgaatggcctccttaaactagctgttatgtaatgattttattctttgtgagttacttacgaataaagtcacttttcttccaaggtacaaaacacacaaaaacaacaaaaaaacacaacacaacaacacacacaacaaccacacaaaacaaaaaaaaacaacaccaacacaaaacaacaacaacaacaccaccc

SEQ ID NO: 684076 - DNA, 419 bp, Homo sapiens
tttcgagcaccgccatccccgttagatgtgcataatggcttagatatatccaaagtaggccacatgctacatgttacttgatcaattttctaaaataaggttttatgacaatgacagtaagataagggaagcaaaacatgggaggagtgacgtcctaattactatacatgcatatactgtctgacagtaaggagaaacctttaacagataagtcacacaccacatataaggcaacataaactaatttcgtacaagaaatttaacacattctgtacaaggatctgacacatttgctcatcatcatatgtacaaactcttcatagtttacttgaccatcagcatcaatatctgcttccctgatcattccatcaacttctacatctgttaacttctctccaaggtgtgtcatcacatggcga

SEQ ID NO: 684077 - DNA, 248 bp, Homo sapiens
ggcccccccccccccggccccctttttaaaaggttttttaaaaagggaaaaaaaaagccttccccccgggaaaattcccggaactttttaaggcaagtttttcctccaaaaaaccccatttttccccaggggaacggttctttttcagggggtcatttgggttttttttattcagggaaacaaagttcccgttgtttttttagtccccaaagttttccaaagcccctaaaaaaaaggggtttccccca

SEQ ID NO: 684078 - DNA, 231 bp, Homo sapiens
aaaatgaataagacgttcatccgagttttgagatgaagattggaggtttagaatgtaaaggctgtgtacaagtaatacgtattctaatacaccagttcatttcgactataaattatggcacagattgatgcgcaccagtctagaggaaacgatctccctattcccttaccctgtaactcagcgcacgccgtggtgtaggctgtaccctcaggtggcagagtgtggagaaaa

SEQ ID NO: 684079 - DNA, 117 bp, Homo sapiens
cattctgcttctgcgcttctgcttcctgcttctgcccccccctcaccaagacccttggcgttggggggggcagaagcaggaagcagcagaagcagtgaagtggcagaagcagtgaag

SEQ ID NO: 684080 - DNA, 203 bp, Homo sapiens
cccgatatgctaatcataacataactcatatacacagaaccaaaggccttttctgcatctatgagataatcatgtggttttagtctttggttctgtttatatgctggattacatttattgatttgcatatgttgaaccagccttgcatcccagggatgaagcccacttgatcatggtggataagctttatgaagtgctgctga

SEQ ID NO: 684081 - DNA, 966 bp, Homo sapiens
gcggatagcagtcaggcggtaggagcaccaacgatggatgaaaaaaggcggacacgacctggtcgattcgggagataccacatgggggtctacaacacaaagggggatcgcacaataccagcagtgcgcacaatttcgcggcgacccgcgggtgtaaattcggggatgccccctcccttgagaaaggggcgcctcccgccgccgccccgacgcgactggtcgaccacaaaagagcggtgtgggcgtcgataacgcccgataaacgggggttgcccaggacgcggcaaacgtccagcgggttctgacgaacgagcacacttacgtggccgcgccccggcagtgtcgccgactggaggtcagcacacggggcggtggggagggaggtggcaaccccccgcggagggggcactccaagggcccgacccccgcggacccagagcttgccgcgtaggacacacagaagagtctcgtggatgttccctaggagaaacccacagcactgctggaccagaattcgctgtccgcacaaaagaaagaggtggtgcgaccccacggcccaccgacgacaatggtggacaaggtggcccgccaaaacgccgctgtcgtagggaaaaggtggcagaaccacacgaagcagtcacttatcatcttgtagagatccatcaccaccaaaggggccagaaatatgttgcgaggactcgatgaaacgcacaaagtccacactcttggtggcgatttcctgggggtacaatttagatcgcactcctgcccactggactgaaagtgttcttcctcagcttcttcgggaataaatatgcagtgggaagagcacccaccactagcttgtctattccaagggtgatactattcgaggtatctcgtgcccaccccaagaagacgttctgtggccaaaaaaatttacacccccaaaaaaaagggcgatttttggcttgtcaaaaaaaacga

SEQ ID NO: 684082 - DNA, 307 bp, Homo sapiens
ttcccgggtcggaactactacaactaaattcggcggccgcgtcggacatttcataatcaaatatgttatgtattaattcggaacaaaatacatgaaatcaagtacaaaacatacaaaacatactcccaagaaaattcaaaatagaaacatcacacaaataagtgtcttcctatataattaagacatataatataaacccagtcaataaaatatgtatatgttagaatatctaagactcagagaaacaagatcaagatataatcaactagaaaactgaactgtgtgttaagcaattattcgaaggcca

SEQ ID NO: 684083 - DNA, 916 bp, Homo sapiens
gcacaaagtttggccgtggggactctgcatcccctgcacccgctaccacaccagctcagccacagcagagccaatcacagacccaccacacagcccagcagcccttcgtgaatcctgcactgccacctggctatagctacactggtcttccctactacacaggcatgcccagtgccttccagtatggccccaccatgtttgtccctccagcctcagccaagcaacatggggtgaacctcagcactcccacacctcccttccagcaggccagtgggttaatggccaagacagggttcacggacaacgagtgtatagtagagagatcgtgacccagggacgacagcaagcgaggaagactactccaggaggttggctatgcttggatcatcagacaggcaccaaacaagtctgcaggttctgggcctggcaaaggagtatcagtgtcttcaagcaccactggtctacctgatatgactggttctgtctacaataagacacagacttttgacaaagcagggatttcatgcagggacgcctccacctttcagcctgacctcggtcttgggctccactgggaccctggctcgggagcggccctggctatgagccaccaacatttctacacatcttgccagccaccagcagccccactcacagctgctgaacaacacttccgcaggatgcacaagcgtggctcgggtcaagcgcagccagccagatccatgcagcacaagtctcaaagcctgcaaacctgctacgggaaatctcccatactggacaacctaaaccccagaagagaccgggtgggctggggccaggttactctgggcaggagagacacccgagcaccgtttgggagccagtgcccattcctagaatcccgccatgtgtcagcaatccactgagaagagtatga

SEQ ID NO: 684084 - DNA, 128 bp, Homo sapiens
ttgctgagtaacgtccactgtgtaacattctgtgggtttttagtcattctcttgttgaaggacccctggctgtttccatctagaggctcttatgagtaaacctgttacgctggcctacagcacatagc

SEQ ID NO: 684085 - DNA, 249 bp, Homo sapiens
cctacaaaaacctggaaaatagatcattcttagttttccttccattttttcttctttttataaatggtccattcaacttgtcctccttgtcgacatggttgtaaaaataagttcagcacttaaacagattccgtgaatttagttgttgttagttgttgtgccacagaactaaaagaaatcatagaacaccgtcttattcagcacacacagaagctttagctgtcatttgacatttatctcacgaatggc

SEQ ID NO: 684086 - DNA, 985 bp, Homo sapiens
gctctgattacccctattctcaggctacaccgatgcatacaacacatgaaacatcctatcatctgtaggcctcattcatttctctaacagcagtaatataaataattattcatgattggagaagccttcgcttcgaacgccgaaaagtcctaatagctagaagaaccctccataagagccctggcagtgactatatggatgccccccaccctaccatcacatgtcgaaccaatcccgtatacagtaaagatctagcatcagaagaaaaggaaggaatctgcaatcgccccaaagactggtttcaagccaaccccatggtctccatgactttatcaacaaaaagagaaagtagcactacacaagaaattgcaatgatgtcctgaaagaacaatgaagcctggggccaaaattgattggccggtggagaccacacagggttggcaaaaagacgctacacgcggctctcacgggggaaccatcggaagccttcgtcgaagactcgcgaggcacaaggagccatccagcgacccctactgggagacggaccttccccgtcacatcaggcgatgactagtggccagataacgccccaggcaaaatcactgccctatgaaccaactggaatgccctgcctgtgtggtcgagccctgacctctgactctacgacacccaataggagtggtggcgcgctgggcccggcaggggagaccggactgtgactcaggcccccagggagctatgcatggaccagccccgaaaggctcagactgaggtcagaaccgaagaagctgcacgccaaggctaagaacagaacagctcacaggggctggacgccccctaggagtggcctggggccccactgccttcccagaaagggccacaataaccccgaaacggatcaacaacacacggggacccaacagcaaagcccacccaagacaaacccgggaaaaaaacggccgagcaagaacaagccacaaaaacc

SEQ ID NO: 684087 - DNA, 180 bp, Homo sapiens
  misc_feature (88)..(88): n is a, c, g, or t
gcctgacgctccttgttaatgccggttgctgttacagacttgcaattgtgcaactctgtgatgtaaacaggcaggctttgtatttttncagtgcccctggagagtggagagggtggttctcttggctgtctctggaacaaatttggaggaaaggtcctgtgagggtacagtgagaagatg

SEQ ID NO: 684088 - DNA, 181 bp, Homo sapiens
acctacactatgtcacacagtaactactactaatccacgcccataatcatacaaagacccccgcaccaataggctcctcccgaatcaaccctgacccctctccttcataaattacttcagcttcctacactacttaaacgttggtcgtaatagtttactgctgtaatacgtttacgggctg

SEQ ID NO: 684089 - DNA, 454 bp, Homo sapiens
  misc_feature (9)..(9): n is a, c, g, or t
  misc_feature (381)..(381): n is a, c, g, or t
  misc_feature (397)..(397): n is a, c, g, or t
gatcaggtncgagctcatcgaccctggcgcagacggccttggtcgccgcgccacgaaggtctgggtcgatggcgtcctagcgttcgacggcagcgcgagccccgagagcacgccagcgttctgggcgtcgggtgcaacgttcgaagagagcctggactcgctacacctctgcctcgcccccgcttcgccctttgcgagccaggccgtggtgacggtgcgcgtcgtttcgcggatcaagggcggcggggccgtgctcgacgagacctatcggttcaccgcggaggaccgtacggcgccgaagctcgtcgcgagcgttgcggtgtcgccgcgtgcaatacgactcgcgttcgatgaaccggtgaccgcgccggaaacgaactngattaccatcacgccnctcggcgcgcccgtggtcccggtcgtcgtgatgagcgtgaacgtcacagccagcgtc

SEQ ID NO: 684090 - DNA, 114 bp, Homo sapiens
catcctcctaactcagactcccaaatagcttgagagcacaggcgtccaccatcataccaggccaaattcttgagtacttagtagagacacagtttcagccatgaccgggaccat

SEQ ID NO: 684091 - DNA, 195 bp, Homo sapiens
cacgagggtgatggaatttctgccgtctcaggaacacgcgcgatctcgggcgcaatcaattgggatcgggagacagcgaaaaacccgccatttccttctaaggaattaattacagattgaagctgccgacaggcgtgcgggacgtgtgtaatgccgagggagatcgggaggtttcgcacgttgcaaccgggaacc

SEQ ID NO: 684092 - DNA, 892 bp, Homo sapiens
  misc_feature (7)..(7): n is a, c, g, or t
  misc_feature (22)..(22): n is a, c, g, or t
  misc_feature (25)..(25): n is a, c, g, or t
  misc_feature (39)..(39): n is a, c, g, or t
  misc_feature (50)..(50): n is a, c, g, or t
  misc_feature (60)..(60): n is a, c, g, or t
  misc_feature (69)..(69): n is a, c, g, or t
  misc_feature (75)..(75): n is a, c, g, or t
  misc_feature (78)..(78): n is a, c, g, or t
  misc_feature (82)..(82): n is a, c, g, or t
  misc_feature (87)..(87): n is a, c, g, or t
  misc_feature (92)..(92): n is a, c, g, or t
  misc_feature (99)..(99): n is a, c, g, or t
  misc_feature (106)..(106): n is a, c, g, or t
  misc_feature (113)..(113): n is a, c, g, or t
  misc_feature (120)..(120): n is a, c, g, or t
  misc_feature (126)..(126): n is a, c, g, or t
  misc_feature (131)..(131): n is a, c, g, or t
  misc_feature (133)..(133): n is a, c, g, or t
  misc_feature (148)..(148): n is a, c, g, or t
  misc_feature (166)..(166): n is a, c, g, or t
  misc_feature (174)..(174): n is a, c, g, or t
  misc_feature (204)..(205): n is a, c, g, or t
  misc_feature (214)..(214): n is a, c, g, or t
  misc_feature (216)..(216): n is a, c, g, or t
  misc_feature (221)..(221): n is a, c, g, or t
  misc_feature (245)..(245): n is a, c, g, or t
  misc_feature (265)..(265): n is a, c, g, or t
  misc_feature (267)..(267): n is a, c, g, or t
  misc_feature (279)..(279): n is a, c, g, or t
  misc_feature (287)..(287): n is a, c, g, or t
  misc_feature (295)..(295): n is a, c, g, or t
  misc_feature (303)..(303): n is a, c, g, or t
  misc_feature (316)..(316): n is a, c, g, or t
  misc_feature (329)..(330): n is a, c, g, or t
  misc_feature (342)..(342): n is a, c, g, or t
  misc_feature (364)..(364): n is a, c, g, or t
  misc_feature (366)..(366): n is a, c, g, or t
  misc_feature (389)..(389): n is a, c, g, or t
  misc_feature (424)..(424): n is a, c, g, or t
  misc_feature (435)..(435): n is a, c, g, or t
  misc_feature (519)..(519): n is a, c, g, or t
  misc_feature (536)..(536): n is a, c, g, or t
  misc_feature (568)..(568): n is a, c, g, or t
  misc_feature (583)..(583): n is a, c, g, or t
  misc_feature (643)..(643): n is a, c, g, or t
  misc_feature (646)..(646): n is a, c, g, or t
  misc_feature (671)..(671): n is a, c, g, or t
  misc_feature (674)..(674): n is a, c, g, or t
  misc_feature (709)..(709): n is a, c, g, or t
  misc_feature (743)..(743): n is a, c, g, or t
  misc_feature (745)..(745): n is a, c, g, or t
  misc_feature (747)..(747): n is a, c, g, or t
  misc_feature (782)..(782): n is a, c, g, or t
  misc_feature (785)..(785): n is a, c, g, or t
  misc_feature (873)..(873): n is a, c, g, or t
tgtattnactttgtatttgaanaanaaagtgaaaaaagnggccaaattcnattttctttnaattgcaanaaaaanggntganctgantggcncttcgangaatttnaaccaanaagttcnccagtngttcnanaagcattcgtttttnaaaccttgatgcttcttnaaagaaantttgaaaaaaaaaaagtcttgtttgtaaanngccttgcanangcttnagaaaagggaagaatctttcaaantttcttcctggctttcggancnctttcaaaaatngggctttnagttcagnattgaccncttcaaggcttcngcaaagcaacaanntctttcctttgnggagggaagaagcggggaagtncncttcagcacaatgttcttaaacnctgggccccccaagaatttcaaaaaaaccaccaanagggagggcantgggtccaaaaagggcaagaccaagagcctccaaaagaatgggtggccgttccagtaaacgggcgggagaagaagcggaaaaanccgtaaccaaagcattnggggtaaagtctgaagaaagttggtctgcaanatgattttcaaccanatcatgtattatcgaatcattagtggtttctgaaattttatgaagaggaagaggtttaanaanatctggctgtgcttgagttgtaggngcngggggtccttttcccccaatatgattgtttacaanaggattctgctgtctgcctcttagtagtggaganananaccgacgtcttttagggatcccttgcatatttggntcnccgggtcgtttatgtttattttgaggtccagccacaaattcatctgcttcatctatcatcatacccttcttatccagcttaaaggggntgccaaatgtatgcaacct

SEQ ID NO: 684093 - DNA, 753 bp, Homo sapiens
ataaccaatgctaccaatcaatactcatcattaataatcataatggctatcagccaataaataactaggaatagcccccttatcacttctgagtcccagatgttacccgagaggactaccccgtcgtttatcgatcctggctctgcttcttctcactatgcaccaaacaactgagcccccatctcaatcatataccagatctctccctcactagtacgtaagccttctcgcatcactctctcaatcttatcgcatcatagctatggctagttgcatgagtggattaaaatcgcgaaacaccatgattactgcgaaagagtcttagcatcactcctcacattaccccacaaatgggatgaataatatgcaagtttactacctgtaccaagacctaactagtaaccaattcttcactttaacttatttatattctatcctacacttactaccgcgattccgttacgtacgtccaacattagaacttccagcactcgacataaccttactttacctcagacttcgtccaccatgtagaacgaaagctatactagtgtagcttgaacagcacgctgtacaatttccattcacaaccccttccacttcgtcctctatggaggtccgttgtccctgcgtcttaagccggctttaatgccgcatagaagcggcctattaaatcgatatagattacggtaggaaaaaacaaattggcctacgatacatacgcccaaccaatcataagttcagtcaataaac

SEQ ID NO: 684094 - DNA, 470 bp, Homo sapiens
actgtgcctccagatgtgtgtgtttcacatgtatagtggagtttagatattgaaagacgcatatgcatatgggtggtcctcgagggagagggatatcgaggctgagagtgggtcatacacctggtgtcactggctgaggggcgtgattccatgcagggtgtgagatgagcaggatgccctcagtgtcctcccgcggccagctgagcctgctgctcttcactctcctctgtgcacgggtccacactggggtgggcggggctggtctgcgtctgagatgctgctgcgtcaggggatggctggtttctagatgggtcagagtgagtctcacatgggacaggctgggctctaccagcaggagaattttccctattctcattggtcccctgtacaggctgtatctcagaagcacggttgtctcttgtgagttgcatcatctctttaatttggtagagtgcatagacaaagggaaa

SEQ ID NO: 684095 - DNA, 1205 bp, Homo sapiens
  misc_feature (658)..(658): n is a, c, g, or t
  misc_feature (760)..(760): n is a, c, g, or t
tggaacataaactcaaaattttatggtcttcatataatataaaagatgtgacacttataaaacgtggatctcacttgggcccttttctcttctctttattcctccctcccagttacaaaagtgcgtgggatctcttttaaatagccagcatttctctataaactcgtgcagtgtggggctctccacacgccactctcaacgcctttagccacaaactcttctcttgtgggtgagttatatacgcctatatttctccgggaaaacactccggcttatagttgtgtgcccaaccaattagccaactctctgtgcttctccggtggacttaaccggcccgttttccctctagtggcgtgtaccagagaaagaaatcctcttggcctcttctctgggtacccctggggtacatcttatattggggtgttgggtggtcttggcacaacactctcttcctatacacaagaaaagtgtcccgcggcgcgggttttaaggagagacgctgtataaccacaatgtgtcttggcgcgttagaggccatttacacacccaaacacactctaaaaggggaccagaaccctctgagatttctctctattatacccataagatattcctctataaaatcacatttttatatttgggccccaacaatctaaanctctccctctcgcgggaatctcccgcgtggctcttacatctcactatatttaaacaccacaaaacgcagcccacaaattaatttctaattaaacctcttagnccgagtgggcccaatcccctctttattgaagcgcgggggcgccaggtgataaaatagggggcttacgggcctcttaaggatatacacaaagggcgcctaagcccatctttctttaccacagagggcaaccacctttaacacgccctttattccccaattaataagctttatttatcggaaaacccatagagacctaacttccattttcaacgcaaataagcccctggggccggttaaggccttaaaacgcgggtaacacatctttccgctgtcggggggggccaccctttacattcatgtgccccctattggggggagcgggccccccttaaaactttctacaccccattaaaacttcccctcttaaggtttaattatcttcgacaaacctcaatctgacggagagtatccagaaaaaccgggtgcgccttacacacagcgccac

SEQ ID NO: 684096 - DNA, 413 bp, Homo sapiens
aataatgagcatattgtgtgacaggcttttagaatcttctgtatatctagttcacgcttgagacctttcctatggcaaataaaataaaatatgaaattgtttcttttgtctgattatacaaacagtcaggtatatgtagactttgagctccatgctttgatgacctggacaaagtacagaatctgccagctcagggcacataaggaagtgacttatggacggattgcaggaaggaagcaggtggctttatcagctggtacattacacaacatattttctcccccaccagacccaatatttttcctttttaaagtaaagtcaggttaaaatgaactgtaggtcaggcttgaaaaagaaacaaaataggccagagagaatcacactctgtctgggcaaggatggctgggaggtgt

SEQ ID NO: 684097 - DNA, 293 bp, Homo sapiens
  misc_feature (150)..(150): n is a, c, g, or t
gggggggcccccccccccccccccgggttttttttggggttgtggggaaaaccctttaggggcgttttccccggggggttgggccccccccccggggccccctggggggggggggacccgtttttttcccccccgggttttcaccccccntttgggggtttttcccctttccccccaaggggaaaaaaaattttaaaaaggggggggtttttaggggccctttttacccggggggtgggccctttttttttatttccccccccccccccaaaaagcccttttttcccccccca

SEQ ID NO: 684098 - DNA, 942 bp, Homo sapiens
tatatggccttgggtaaggaaggtaggtggctacgttggtgttaaatattttacagttgggtgatgaggaatagtgtaaggagtatgggggtaattatggtgggcaatgaatgaagcgaacagattttcgtccatttgggtccccagggttggtataatttttaattttaatgggcttgggtgagggaggtaggtaggtagttggtgttaacatattttaagtgggcgtagatgagagacatacgtgtaaggagtatgggggtaaataatggggggggggccgctcccaattaggtcgcatgagtaggtgcgcctgcagtaatgttagcggttaggcgtacggccaggctatgggttcgaatagaggtaggctgatggtctccgataataactagctatgggagataaggggtgtaggtgtcgcccttggtggtaagaaggggcgcataggcgcattttgaaatcttaaagcgaaaagccttataatcactgtggccccgcacataaggggaatgcgccatggctaggttatataagatagctgcgagggtaagattcgataaaggcccattgtacggacggaggagaataaaagcccgggctgttcgatgcagattattcgggagaggggggagaccccaacagagcggggggacattacgaatgggtcccccgtaatcaccgagaggaggttaaggccactgaaggggaaactaagagttttacagaagaaaccaggtgtccggccctcaaaggtgggtgagcggacagggggaacaacccatcgtggttcgagaggtgaagaggtccaaatcaaaactaagacaggaatccacacaacgggtaatattgggggccacaaaaacagtatctataagtccctcacagaccaccaaaatcttggacctaacaccataataggggcaaagagaggacacacaa

SEQ ID NO: 684099 - DNA, 82 bp, Homo sapiens
ggccggggcccggggccttttaaaaagggtttttggtttcccttttgggtttctccccggaaaaatttttttttggccccca

SEQ ID NO: 684100 - DNA, 232 bp, Homo sapiens
  misc_feature (101)..(101): n is a, c, g, or t
ggcacgggggagcagcagcctcaaccgccggcggacgcagcagcaacagccccaacagcagcgcggggccgccaaggaggccgcgggggaagagcagcggncccacctcgctgttcgcggtgacggtggcgccgcccggggcgaggcagggccagcagcaggcgggaggggacggcaaaacagaacagaaaggcggaggataaaaagaggggtgttaaaagtaccacgagaa

SEQ ID NO: 684101 - DNA, 828 bp, Homo sapiens
  misc_feature (214)..(214): n is a, c, g, or t
  misc_feature (412)..(412): n is a, c, g, or t
  misc_feature (513)..(514): n is a, c, g, or t
  misc_feature (521)..(521): n is a, c, g, or t
  misc_feature (528)..(528): n is a, c, g, or t
  misc_feature (616)..(616): n is a, c, g, or t
  misc_feature (643)..(643): n is a, c, g, or t
  misc_feature (669)..(669): n is a, c, g, or t
  misc_feature (677)..(677): n is a, c, g, or t
  misc_feature (680)..(680): n is a, c, g, or t
  misc_feature (702)..(702): n is a, c, g, or t
gctccccagccatggcgttcacgtccgcgagcttctgctacatgctggcgtcgtgtgctcactgacgcgtgcatcattcttcgccatttgtctcattatacgcatttcgacttgacgcttggaaggacggatctacaaagaatcctatatgaccaaggtggaatacgcctgaatcccctggtatctcctcagaggtggtctcatctcacgcctngactatcttgttggcagtgataacgtatttgatgcaagcgacgacgttgagcattactacttgagtgttcttcaaatattggcctccattctatgtgtataatctatattagtcaaggtaagtgtataatgtatgtatgaaccgatgatggtaatgacgttggactcccaaggcacttctaattgtaccgctgagagntcaatctatgataatgcgagagtatttctaagagcagtattgtgctcatgtaacggcataggcattggatgcagataatatagcttttcttttatactttnncttgagncggattnttattttttgaacgttagcgatagtatggtggcatgtgattcgtagttgcttaatgggtgtgacgctttctttatgacaacacagtgngcacaagcacaggatattgtgcgtacnccagatctacatgtggacatttgcanagaaaganggnccaatcctaatagtcgcacagngcgagtatcttaatcgcaacgcacaacaggcattctctggtccactaattgacggtgagtcctggtcgtgacattcggtgcatcaaggttcactttttaccataagaatgtacttccttttaatta

SEQ ID NO: 684102 - DNA, 351 bp, Homo sapiens
  misc_feature (32)..(32): n is a, c, g, or t
tgcaacgcggtcatactgaacaagcggatttnttttacggtgtgttgagagacagggaaacgggaggggagtctatgatgacgctggcgcagtggtttgaagagaaagggattgagaaggggattcagcagggaagacaggaagtaagtcaggaattcgcccagcgtcttctgagtaaaggaatgtctcgggaagacgttgcagagatggcaaatttacctcttgctgagattgataaggtaattaaccttatttaagttacctgtgttatgacagatgacgtggggtaaattaataactggcgccatcagccgtagcgccatttaagtattacgccactcgacccttttt

SEQ ID NO: 684103 - DNA, 357 bp, Homo sapiens
  misc_feature (67)..(67): n is a, c, g, or t
tactccacaaacagcaataagttagaaaagaaatgtcctgaagctgtatctgatatcagcactggantgtagaacttgttgctgattttgaccttgtattgcagttaactgtgccccttggtattaacgtgtcagggctgagtgttctgggatttctctagaggctggcaagaaccagtagtttcgtcttgcgggtctgtcagggttggaaagtccaagccgtaggacccagtttcctttcttagctgatgtcttgggccagaacaccgtgggctgttacttgctttgagtcggaagcggttcgcatctacgcctgtaaatgctatcatactcaactaatgtaagcgttcccccgca

SEQ ID NO: 684104 - DNA, 80 bp, Homo sapiens
ggacgattggattcactagccgaagagtaaaggtgctgcatgatgatagctgtgtgcgctgtggatttgcgcaagacatt

SEQ ID NO: 684105 - DNA, 188 bp, Homo sapiens
ctagcagacatgtagtatttttcttttttagagacgaagtctaaccgctcgcacaggcgtggagtgcattggcgcgaactcgggtcaccgcaaccgccgcctcctgggcttcaagccattctccgtgcctcagtcttcccgaggattgctgggaattatacgcctgtgagcccacccgacgccccggt

SEQ ID NO: 684106 - DNA, 265 bp, Homo sapiens
  misc_feature (84)..(84): n is a, c, g, or t
  misc_feature (150)..(150): n is a, c, g, or t
  misc_feature (222)..(222): n is a, c, g, or t
ggttttgttttgacacatagtcttactgttaccgaggctggagtatagtgtcatgatcttggctcactgcaacctccacctctnaggttcaagtgattcttgtgtctcagtctcccgagtagctgggactacagacatgcaccaccacgnccagctaacccttccatttctagtagaggcagggctccgccatgttggccaggccggtctcaaactcctctngtgccgaattcggcaagaattcatggacaccagccgtgtgcag

SEQ ID NO: 684107 - DNA, 181 bp, Homo sapiens
gttagagttgtttctggcttacagaagggccaaggcatcactcagtgacagcgactggtccacggtgccctcttctataggactgattcactgtgccaatgtgtgtctgtttttttgtttctactttttattaaaaaatataaatcacatggcgctgcaggcctaggctggaaggactctg

SEQ ID NO: 684108 - DNA, 534 bp, Homo sapiens
  misc_feature (521)..(521): n is a, c, g, or t
gacatcatttcttcaatgaacttagtatttagaaagatatcttcactccaagcatcaagtcttttctgtcctgcaaaagtcttaagtcaaaccagaatccactagtagagggcacctttggattcaacagtaaaaggagaatctacaaaaccagctcatcaaaaggggcagtgatgggtatagaagcctgaccttactctaagttcaagcaatgattaatctagcttccctcctggtggatgactgaggcctttgcctgaggacaactttaaagagatattgaatgaagctatgatacctgtagcagttactgccattttggacccataaactgacaatccttaaacattaccaggagggcagagcggaaagaacattgatgtcatcactgagttgctggattaccttactctagaaatagccaactctgcatgtttggttatttttttaaaaagtcttctttattatttacatcattttgaatgggctctaactctagctcttatagtaaaaagcatttnaactgatacaaaa

SEQ ID NO: 684109 - DNA, 304 bp, Homo sapiens
cgtttcctttgtctaattgaatcagttttttacccaatcccccgatttgtaggataatctcccttatctaaagtcaactgattatggactttaatcacatctatacatgtattgacccttcctgtcattagaaaatgaggtctagccaggtgcgatggctcacacctgtaatcccaacactttgggaggccgaggcaggcagatcacctgaagttgagagttcgagaccagcctggccaacatggtgaaaccccatctctaccagaaatacaaaaattagctgggtatggtagcatgcacctgt

SEQ ID NO: 684110 - DNA, 261 bp, Homo sapiens
  misc_feature (23)..(23): n is a, c, g, or t
  misc_feature (45)..(45): n is a, c, g, or t
  misc_feature (72)..(72): n is a, c, g, or t
  misc_feature (200)..(200): n is a, c, g, or t
caagagggtagcccactcccctnaagagtaagtcccaggcctggnagcattcaccacaaactgactggagantccttgggccttagctgaacatcagcagtagcctggcggcactctccatgggcctgtggtagtagtggccatgagcagcggctcctccgcatgtggaaagcagatggaagaggaggaaggactttttnttgtggcttgaaggccagctttagctgcaggagtttagagcataaggtagacttctaaggt

SEQ ID NO: 684111 - DNA, 158 bp, Homo sapiens
gccggccggccgcaataacagcgcgaggcgtcaataccccgcggccagtccagttcactcccaggccatcggtatgctgttttcgttcacatttgaagggggccatatcggatccggactgtgtcgcgtaataagtcggataattggcccatacacca

SEQ ID NO: 684112 - DNA, 184 bp, Homo sapiens
gaggttgagctggcatgaactctggagatgtgtcaactgacaacaccagactgaccttgtctttgacgaagcctgaatagaattggttccaaatgcccactgcctccgtctcctgtggggtgtcgcagtacgtctcacagtgagcacacgccatttgggagctcatggtatgtggtcgctttgg

SEQ ID NO: 684113 - DNA, 808 bp, Homo sapiens
gattcatgaatgcttcactcattgctatgactctagatacagtctgtcctggctcaagcctgatacctagacactgtaatgcgtgagtacatacatgagtgcacatgtcaggcttcatgtcttactccttgtctcctgactcctaccgattgcgacatacactaggaactacagctcactattccttacccctactacacgtcagggactagccgcagactaatagcttacacaggcgaccgagggtggctctgtccaggggcagaagccagttatcggaacagtgctattgtacgcagccatggtagcgagaggcccacaggttgctctgcgaaggcattgcagacagcggcgcaaccccaacctggtccttgtagagatcagcggcgcgcagttcaataggcataaagccatggcgcgcctgaatgtacgttctgaagggaagctgttgatacccttccatgtactggccctctgcctgctgtctcacatgtcccttctggtggtcactatgggctctaggagtatacgtcacctcagaccatctggcagaaatactccaggctcctaccccaaagtcacatgtcagccttgctgctggagcacgaagacaatgtcacatgatacatgaacatggagcgagttgtgagaccctgaccctgagtccttacttgaaagctgctgctggtgtactgagtgtcttttggactcttatttcttgcccttttccttatttaggcaagcagtaacttaggaagtaggtaagagcaataaatgtgaccatgtatgtcatcatagtaggagctca

SEQ ID NO: 684114 - DNA, 112 bp, Homo sapiens
gtatatggctgatgcatctcatgtagtccactttcccgtggccgccttcaccccagggaggagctccctccctgccattttagcggtcaggagtttagcacacaagccctgg

SEQ ID NO: 684115 - DNA, 382 bp, Homo sapiens
cccactactggtattatgtcactagttacctgatacggctctttcccttcatcactccaatcagtaccttcacacaacagtctacactctgtagcagttggtgcactattttcgggcacactattagcaaacatgcatgtagtcacagacatcttatgaaaactgtcttcctggaatttgatttagcatgctccgttgccagttccccttatcgatactctttctttgcagaataccttagaaccgttcattccctcagtgtagattgctcttaaaatgtattcagttatttagtgggccccacaggagtggagtcttgaaatctaatactaaatgccaatagtgggtcccagcaatgggtcgggcaatcgtggggtaacga

SEQ ID NO: 684116 - DNA, 388 bp, Homo sapiens
  misc_feature (42)..(42): n is a, c, g, or t
  misc_feature (69)..(69): n is a, c, g, or t
  misc_feature (85)..(86): n is a, c, g, or t
  misc_feature (150)..(152): n is a, c, g, or t
  misc_feature (193)..(193): n is a, c, g, or t
  misc_feature (235)..(235): n is a, c, g, or t
  misc_feature (264)..(264): n is a, c, g, or t
  misc_feature (268)..(268): n is a, c, g, or t
  misc_feature (288)..(288): n is a, c, g, or t
  misc_feature (302)..(302): n is a, c, g, or t
  misc_feature (331)..(332): n is a, c, g, or t
  misc_feature (380)..(380): n is a, c, g, or t
  misc_feature (388)..(388): n is a, c, g, or t
ggcgctgacacaggaaatgatgggaaccacagcaggggtggnggaggggacgatgcaaagggcactggnggaagggctgctttgnnggctggggtggagaaggagccccagatggcctccctggcaggtgctagtaaacctgatccacannnccccccatccctgctcatttcccagaccctcagccaagctncccaggtcccccttccctgttcctcccctccccgttgcctgnttgccacacacacttccacataaacctgnagtnaggaaaggggaagaagggcntggtcagctgttangggcttgaacagggaggtctctgtactanntttaccatcctaaatccttccctccttctcttctcttccctcccagtncttccttn

SEQ ID NO: 684117 - DNA, 139 bp, Homo sapiens
cgagacctcactgctgcattaatcaaggagtgaatgagaactccctttctgatcatcagactcgatattcgacccgagcaaaacccataaagtacagtctaatcgttcattataagcctgtgtatgggatataaaaatc

SEQ ID NO: 684118 - DNA, 496 bp, Homo sapiens
  misc_feature (189)..(189): n is a, c, g, or t
  misc_feature (241)..(241): n is a, c, g, or t
acccagattaccacagcctggggaccagcagtgagagagagctgaggagtgctattaattgctcgctgtcactataacagatggctctgtcctactacgatgcatctgagttaagaatcctccgtccgatcctaacgtgtatgcaccctaacagcagcagtattactcattagccacagaatacctgtnctgtactcctaatgttgcattggaaaatgggtatataagtacatgttctatntaacagcaccgattccaaagggaagaatattgtgtatcactgttgaaaagacttgttgagaaatccactgaattctattttgagagattgtatttatgagtgcaagtttaccaatcaaagaagcattttgttctcgagttttacaggtaacactcagctgttgtctccactcctcccccatcatgtccttccaaggaggctgggacctctctcttctgcaatctgggtagttctttcagatgcctcatgctgagc

SEQ ID NO: 684119 - DNA, 666 bp, Homo sapiens
cacctcttaatactatgcatgcagattaagtttcaacatgaatttggagggatacaaatattcacaccatagaatatagtaatatagtatagtatatatttgttggtgtctgtctgctttgctcaggtaatgttttgaggttcatctatgttgttgcatgtattagtaggttgtatctattggtgcatagttattccattgtatgtatgtaccacactcttcatttacctgctgatggatattgcattgtttccagatttgggttattatgaataaaactgctgttaaccttaaaatataagtcttgtgtgtagacatatgttttcatttgtcttgagcaaatacctgattggtcagatggtcatatgtcagtatatgtttaatatcatgtacttccaactgtttaccaaagtagttgtgccattttattttcccactagcgatgtatgagttccatttgatccacatcttgtgccaacacttgttattgattttagcccattacattttagctgtataagatgggtgtgattagatgtctcaatgtaggggttataggtagagtggactgtagggattggctttctctatggcgccaggctgaagttgcaggggcacaaatcaataggttcatggagcttcaaattcctagaagtcaagggaatc

SEQ ID NO: 684120 - DNA, 422 bp, Homo sapiens
  misc_feature (13)..(13): n is a, c, g, or t
  misc_feature (138)..(138): n is a, c, g, or t
  misc_feature (163)..(163): n is a, c, g, or t
  misc_feature (297)..(297): n is a, c, g, or t
  misc_feature (326)..(326): n is a, c, g, or t
  misc_feature (361)..(361): n is a, c, g, or t
ttggctggggganataaatcatccctttgctcggaaaatcccaaaagctcccccgcaagtctccctttccttcttgggggggtctggtttaaacttcacggcccatgattacgtcatccagattacttcgaaaattgngtccgcctctgcttgtccggtttcnaggccctggatgtccctccgcctgcagggcccttctggatcctcggtgacgtcttcttggggacgtatgtggcctcttcgaccgcggggacatgaagagcagccccgggtgggcctggcgcgcgctcgcaactncggagcggacctcggatggggagtatgangcaggcgcagttccccgggtgacgcccaagtgaancatgcgcagcgggtggtcgcggaggtcctgctacccagtaaaaatccactatttccattga

SEQ ID NO: 684121 - DNA, 805 bp, Homo sapiens
gatttctgctaagacagtagattttaggagctcttgccatattgaaaaaaaaaaaaaaaaaaagggtaattgacggggtgcgggggctcttccccataatcccagcattttgttggaggccaaggaagggggaaaatcacttgtgagcccctccccaggggtcgtgggaatttacgggcggtgattccaccagcggccaagaccccttattcttctttctccccagaagaaaattcctttaccttaacccctttagtagaagtctcagaaaagaatttcacccagaaagagtgtggggtttcgtgggcacttggaaaccaatccgttttctaaggttggggtttggggttaaacatttccctctcagggagtgccaccagacaggaggggtgggtttcaactttctcttcagtttaagaaacccttccctggattgaaagtgagttaagggacaggtgtgttgagagacaggacaggcggaggaaaagggaggagcagcagagacgagagcagaggagcagagagagagagaaaactattgaattatttgtttttccagcctttaaaaaaggagcagagaacccgtgccctgtgcgtggccacaattggcggtatgaaccccggggggaggaacgtttatcgctagggtgagaagaacccgcagaacgcgagaaaagaccaaccctgtgtgatgaccctggggtggtagtgggaacccacctaagaagggggagacacaatctcttcacgtcggaaacacctttgcaatataaacgcgggggtccccaggaagcaggggtggcgg

SEQ ID NO: 684122 - DNA, 164 bp, Homo sapiens
  misc_feature (66)..(66): n is a, c, g, or t
ggcacgagaagatggcgggtgaaaaagttgagaagccagatactaaaagagaagaaaacccgaagnccaaggaaggttgatgtgggtggcaggtgaaaaagggtaacctcaaagctaaaaagcccaagaagggggaagccccattgcagcgcaacacctgtcct

SEQ ID NO: 684123 - DNA, 112 bp, Homo sapiens
tagtaaacagagagacggagtgtagagagagagagaacccgagaagcgagaagggttgtaatatgggaggggtataaacaaaggcctcaagatttctttatgtgccagaaag

SEQ ID NO: 684124 - DNA, 235 bp, Homo sapiens
ctgggaggctgaggcaggagagtcgcctgaacctgggagctggaggttgcagcaagctgagatcacgcaactacactccagcctgggcgacaagcgagactccatctcaaaaaataataataacatatttaatcatagggaccatttaaatgctctttcatttgtattaattgagtgctccacctctgacagtttgagcatggttggcccactatcctgatgctcctcctgctat

SEQ ID NO: 684125 - DNA, 93 bp, Homo sapiens
cccgaaaaaaaaaatttttttttttaaaaaaaccttttgttacataaggaagacttttttaaccaatggaataaattatggcctttttattga

SEQ ID NO: 684126 - DNA, 609 bp, Homo sapiens
  misc_feature (19)..(19): n is a, c, g, or t
  misc_feature (63)..(64): n is a, c, g, or t
  misc_feature (68)..(68): n is a, c, g, or t
  misc_feature (81)..(81): n is a, c, g, or t
  misc_feature (83)..(83): n is a, c, g, or t
  misc_feature (87)..(89): n is a, c, g, or t
  misc_feature (92)..(92): n is a, c, g, or t
  misc_feature (94)..(96): n is a, c, g, or t
  misc_feature (98)..(101): n is a, c, g, or t
  misc_feature (103)..(103): n is a, c, g, or t
  misc_feature (114)..(115): n is a, c, g, or t
  misc_feature (117)..(119): n is a, c, g, or t
  misc_feature (128)..(130): n is a, c, g, or t
  misc_feature (132)..(133): n is a, c, g, or t
  misc_feature (135)..(135): n is a, c, g, or t
  misc_feature (137)..(137): n is a, c, g, or t
  misc_feature (140)..(145): n is a, c, g, or t
  misc_feature (149)..(149): n is a, c, g, or t
  misc_feature (154)..(154): n is a, c, g, or t
  misc_feature (157)..(157): n is a, c, g, or t
  misc_feature (165)..(166): n is a, c, g, or t
  misc_feature (171)..(171): n is a, c, g, or t
  misc_feature (184)..(184): n is a, c, g, or t
  misc_feature (199)..(199): n is a, c, g, or t
  misc_feature (219)..(219): n is a, c, g, or t
  misc_feature (253)..(253): n is a, c, g, or t
  misc_feature (258)..(258): n is a, c, g, or t
  misc_feature (266)..(266): n is a, c, g, or t
  misc_feature (288)..(289): n is a, c, g, or t
  misc_feature (308)..(308): n is a, c, g, or t
  misc_feature (311)..(311): n is a, c, g, or t
  misc_feature (317)..(317): n is a, c, g, or t
  misc_feature (319)..(319): n is a, c, g, or t
  misc_feature (326)..(326): n is a, c, g, or t
  misc_feature (328)..(328): n is a, c, g, or t
  misc_feature (334)..(336): n is a, c, g, or t
  misc_feature (345)..(346): n is a, c, g, or t
  misc_feature (353)..(353): n is a, c, g, or t
  misc_feature (359)..(359): n is a, c, g, or t
  misc_feature (364)..(364): n is a, c, g, or t
  misc_feature (383)..(383): n is a, c, g, or t
  misc_feature (385)..(387): n is a, c, g, or t
  misc_feature (389)..(389): n is a, c, g, or t
  misc_feature (401)..(401): n is a, c, g, or t
  misc_feature (405)..(406): n is a, c, g, or t
  misc_feature (409)..(409): n is a, c, g, or t
  misc_feature (411)..(411): n is a, c, g, or t
  misc_feature (414)..(414): n is a, c, g, or t
  misc_feature (426)..(426): n is a, c, g, or t
  misc_feature (436)..(437): n is a, c, g, or t
  misc_feature (445)..(445): n is a, c, g, or t
  misc_feature (449)..(450): n is a, c, g, or t
  misc_feature (453)..(453): n is a, c, g, or t
  misc_feature (456)..(459): n is a, c, g, or t
  misc_feature (462)..(465): n is a, c, g, or t
  misc_feature (468)..(468): n is a, c, g, or t
  misc_feature (470)..(470): n is a, c, g, or t
  misc_feature (498)..(498): n is a, c, g, or t
  misc_feature (507)..(507): n is a, c, g, or t
  misc_feature (512)..(512): n is a, c, g, or t
  misc_feature (524)..(526): n is a, c, g, or t
  misc_feature (533)..(534): n is a, c, g, or t
  misc_feature (593)..(593): n is a, c, g, or t
gtttcttagtaatggaatngtggggaagaacaaaagcgggctctgggactcacattgctttgnnggangctcaagcttccnanaatnnnttntnnntnnnnanatttttgagtnntnnntttttgtannntnntnanagnnnnnnttgntttgnttnattaatanntgaangtatgctcgctcnttgcgtttatttttnagacaagtgatttggtattnctcattctttgtttttgagcttggggatttaacncggantttgtggntttgatggcttgttttgttgtnntggtatgggttgggttagnttngtttanangaataantncctctnnntcggctatnntgattanttgttnggganttgctcagtggttagaggngnnngngggtttgcatgntttnnttntnctnttgttgggggtntttttttggnntgatgatngtgnnacngcnnnnctnnnngcngncattttctttttcgcttttagaaggggnagttggtcnttggngtttttctgctnnncggttgnnttatggaatagtattagttttgcagatgctgggtattgatggtgaaggtggtgcagttnaaatgtttgctcttgc

SEQ ID NO: 684127 - DNA, 698 bp, Homo sapiens
  misc_feature (16)..(16): n is a, c, g, or t
ttcagcttgggctccntgctttgtcatgagctcaaatcagccttccagcgccataagtatgatcggatcagctatcagaaaatgtcatcgtccatcgaggtcttttgcaaaggctatccctccaattctcaacatacttgaacatgtgcggttactgcgagtttgtcgtctagtctggctactcttacatacgtcagctcttcagcaacctcttccgccggcagggcttctcctatgactacgtctttgactggtacatgctgaaattcggtgcagcccggaatcccgagtatgtgcaccgggatcggttagaacccgaactcgaggataggatggggcattatcaggggtccgcgactcgagccttgctccctggcccaccctcggtggccaatgccaaccggctcagcagtgccgcagagcctgtggcttgcactccagcctcctgcatccagccggctggcaatacttctcccagagcgatcttgcgggtcgcccgggacagcaaggtgagtatgagtctgcacaggggtgcgcccgccaacgtatcctcgtcagacctcactggtcgtcaaaaggtctcccggatcccagcctcacagacaagtgtgccatttggccatctcggtaagtgagtagagcccccattggaccagtgtttgcttagtgtcttcactgtattttcgttacaaaaaaaa

SEQ ID NO: 684128 - DNA, 108 bp, Homo sapiens
gctccgcggtgttgcgctcccgcgtgttgctctcgtcactctcgactgcggcgacggcgttatgggccgagctccacgcatcatttcaggctagttgattcggcaggt

SEQ ID NO: 684129 - DNA, 194 bp, Homo sapiens
atcccatacgcggtctgactggaggtacgatcggtatgcactgaagcagagccagtaaacctgagcgggatacagcccctactacaagacattgaagagctcggggacagatctagacgcacatatgaaaacaaccgggtcatactggagattgacaatgccaggctgcttgtggacgacttcaggctcaagta

SEQ ID NO: 684130 - DNA, 132 bp, Homo sapiens
ggcacgagcgagtgtgtggaactgtgaccttcatctttcagatggtgatctacatgggagttgtgctctatgctccgtcattggctctcaatgcagtgactggctttgatctgtggctgtccgtgctggccc

SEQ ID NO: 684131 - DNA, 872 bp, Homo sapiens
cgccgggggcctggtgcggtgttgtgcctgcccccggcctcgccgagtgcagtgcgcccgaaggccagtgcctgcgctcctgtccgcggcccggcgcccagggtgggctggggatgtgcctgcgcgcagtcgccgcactgctacacctgccggctgcctgtcgtttcgctgtcgccctgcttcctgtgccacctgctggcctgccattttttgttctgcgctggaatgcgccgctggtaggtgtgggaacccaagctgggatgagcctgctgggatttgctgtgccgcctgccatgccgtctgtccccgctgcgggtggccgtgtggtgttgctctgagcaaccatgaacctgtgagcatggatgtgcgcacaacattccctcagcaaactggggattcagctgtccgatcctttggaacaggggactcactgtgaagcttccaaggagccagcttcccgacaagcccaatgtttatgatttcaaaaccagcatatgaccagatgtacaatgatcttcttaggaaaggacaaagaactctatacacagaatgggattttacatatgctggacagaaataagagaatcaagccccggccatgaaagattccagaactgcaaagacctgtttgatctgatcctcacttgcgaagagagagtgtatgaccaggtggtggaagatctgaattccagagaacaggagacctgccagccttttgcacgttggtcaatgttggacatacagggacaagcacggagtgaggcccacccttgtgtggccgtttctcattctgtgagctctgccagttgtatccaggaccccggaccaccttgcgaacgagattcgcgagctgtttcgcgagtcgaggggac

SEQ ID NO: 684132 - DNA, 605 bp, Homo sapiens
atgacccctcatggggtcagacatggctcctgggtgtccacgcacactgtccactgggccagtgccaccaggatctgtccgtggccatgcgtgcacagagaggcgaagccatttgcctgaggagtcccagcagcggggatgagatcctgatgcaggactcacaggccacactccatcttgcccgctccctggggcagctgccgttgggctaaaaatgcagagagccctgagttcagatctgacctctgccgcatagcagccgtgtgaccttggacaagtcacttgtcccctctgtggagggggaggaccagggtccccgttccctggggctgcggtgaggtgcaagtctggagtgagtaaggggagccccgccaccccaagtcatgtattctggagctgtggtgagggttagatgtctcagaaaaggaagagatgagggggccttcgtgaggggcacacaggcttcggaagtgaggggtgagttcacatgcccgtgtcggttttgcaggagcaggctcacctccaaactcacccagttgtccacattcaatatctgaaggcttctgtatatcaatcagacctcaataaagtggttcaaaaacaga

SEQ ID NO: 684133 - DNA, 102 bp, Homo sapiens
cagagtcggtatttgggccctgacggcactggccccaacatcctcaccgacatcaccaacgggttgcagatacctcaagcgagaatcaatggacagctgtgt

SEQ ID NO: 684134 - DNA, 350 bp, Homo sapiens
ctgagttcagtatgctgttcccgtgtcctcaaccgatctcacgttgaatttaattcttaatgtttggggagggacctgatgggaggtgattggatcatgggggcacatttcccccatactgttgttgtgataatgagtgagctctcaggagatatgatggtttaaaagtggtggcacttcccctctcactctctctctctctctctgctgctctgccctggtaagacgtgcttgcttcccatttgccttccaccatgattgtaagtttcctgggacctcctagctatgcttcctgttaagcctgcagaactgtgagtcagttaaagttcttttcttcataaattacccag

SEQ ID NO: 684135 - DNA, 692 bp, Homo sapiens
atgacccctcatggggtcagacatggctcctgggtgtccacgcacactgtccactgggccagtgccaccaggatctgtccgtggccatgcgtgcacagagaggcgaagccatttgcctgaggagtcccagcagcggggatgagatcctgatgcaggactcacaggccacactccatcttgcccgctccctggggcagctgccgttgggctaaaaatgcagagagccctgagttcagatctgacctctgccgcatagcagccgtgtgaccttggacaagtcacttgtcccctctgtggagggggaggaccagggtccccgttccctggggctgcggtgaggtgcaagtctggagtgagtaaggggagccccgccaccccaagtcatgtattctggagctgtggtgagggttagatgtctcagaaaaggaagagatgagggggccttcgtgaggggcacacaggcttcggaagtgaggggtgagttcacatgcccgtgtcggttttgcaggagcaggctcacctccaaactcacccagttgtccacattcaatatctgaaggcttctgtatatcaatcagacctcaataaagtggttcaaaaacagaaaaagaaatgttacataaccttttttaaaaaatggaagagcaggccaaatccctactcccctggcagctgtgggtgcagaataagtg

SEQ ID NO: 684136 - DNA, 150 bp, Homo sapiens
catccatacggaaagtcagtagaaaggggtggtgagacgggagaacccaaggcgtctccggtctgactaccaaatgaaacctttagtgtaccaggtcaatgtttccacgcccttggtaatcgcccatgacaaacggtccttccccatctc

SEQ ID NO: 684137 - DNA, 291 bp, Homo sapiens
agattgcagtgagccgagatcgcaccgttgcactccagcctgggcaacaaagtgagactccatctcaaaaaaaaaaaaaaaaaaaaaaagaaagaaaacaaaagtgctagaaaagtagattttaagtgttcttaccacacacacacacaacaggataaataggctgggcacagtggctcttgcctgtagacccagcacactgggaggctgaggtgggaggattgtttgagatcaggaattcaagaccagcagggcaacatagtgagacactgtctcgcggaaaaaaaaaaa

SEQ ID NO: 684138 - DNA, 100 bp, Homo sapiens
gctgacttagaggatcccattgatttaacgtggtaggtatctggggctccgggtgaagaacctgtctggaagagctcgtctatgatgctggacgcgcggt

SEQ ID NO: 684139 - DNA, 965 bp, Homo sapiens
  misc_feature (1)..(1): n is a, c, g, or t
ntcctatagctggggttttctcccgggcgtcaacaagttttatccaggccggagactttcctgcgcttactacccgggatagctgtgcctcttgtgttaccccgccccttctcggtgtggttggcgccaggacacccgcccccagttatagatgggtaacccacgccccgttttatccccgcgggtctcgtgtggtcgctccagttctcaccacccccccacgtgtgtggagtcgctcccggacgccgtccgagtttgagagatctgtcttaaccccactgtcccctctgtacgccctccggcgataaatccctggctgttggctaacaggtctacactttggggaaaaacaccgagctgccggcccccccaaccttccggggcccacagtgggtaccgccccccccccccggcagccaccgcctggggggaacaacaggagcaacgccccgcttccacacataaagaggaccgcgggggtgcccaccacgaagacaaacaataacccacatctgtgtggtgggcccgcacccacacaaagaagagtcgttgtccccaacaaacagacacatgagaaaaaaacaaggatggagggtcatgttgacccacaacggcgagagtcccactatgcacatcagcggtggggcccgcccacctctcctctcttaattaatcctctccctaaatggtgataaaacaatcttcctcacaatgcgccaccctttcaataaccggtgggtcttccccgcgaacccccataacatccatacgacatcagttctttttcaagaacaccactatgagcgccacaaactatccaacttacaaagtgctcgtggtgtattctcgcctatgtgaattttgcgacttgtgttgtaatttttctacacatgaatcccccctggcccccctcagacccaaaaaaaaaaacccgcccacaaaacaaaaaaaacaaaacataaaaa

SEQ ID NO: 684140 - DNA, 311 bp, Homo sapiens
  misc_feature (41)..(41): n is a, c, g, or t
  misc_feature (68)..(68): n is a, c, g, or t
acattgatttcaataagtagagatgacgccagtgaggcagntcacgcctgtaatcccagcactttggnaagccaaggcagaattgcttgagcccaggagtttgagaccagcctggggaacatagtgagacccccatctctacaaaaatatatattttttaaattagatggacatggtggtgtgtgactgtagtcctagccacttgggaggctaaggcaggaggatcccttcagcccaggaattcaaggatgcagtgagatatgattgtgccactgcattccagcctgggcaacagagcaagaccctgtctt

SEQ ID NO: 684141 - DNA, 115 bp, Homo sapiens
aataaccccttttaatgccttggtgtaagtatacctctgaattttggttgatttaaatttcttttctgcttattttgtattttcatatgacatgaggaatgttaatatgcataac

SEQ ID NO: 684142 - DNA, 211 bp, Homo sapiens
tctttctttcgcacaggctggggtacagtggtacgatctcagctcacgtgcaacctctacgtccagagttcaagcggttctcctgctttagccttgccaggagctgggattgctggtgtgaaccaccacacctggctaatttggtgttgtaggtagagatgagagcttcttcatgttgggcaggctggtatggaactcacaacctgggctg

SEQ ID NO: 684143 - DNA, 223 bp, Homo sapiens
tctccccccccccccctttttttaggcccccccccccaggggccggttttggttttttttttgggggggtccaaaaaaagggggggggggggggggaaaaagggggtttttttttttttttcccccctcccggggggccggggggggggggggggggggggggggccccccccccccctttttgtttttttttttttttttatgggggggttttggtttttta

SEQ ID NO: 684144 - DNA, 155 bp, Homo sapiens
aggctgttggagtagcaagagaacagttgcccagactcagaattttaaaaaaaaaaatggagcatgtagtattatagtggccgatgtcttcactctaacttggttatcgagactaaaaccattccctcactagctcaaccatgctgaaagaaaat

SEQ ID NO: 684145 - DNA, 306 bp, Homo sapiens
  misc_feature (179)..(179): n is a, c, g, or t
atgcccttgtaatcctagcactttgggaacaaataattgttattgctaataatagcacttagggaggctgaggttggaggatcatttgaggtcacgagttcaagaccagcctggccaacatggtgaaaccccatctctactggaaatacaagaaaattagctgggcatggtggtacacncgtgtgatcccggctgctcgggaggctgaggcgggagaatcacttgggcctgggagacagaggttgcagtgagctgagatcgtgccactgcactccagcctgggcgacagagtgaggctctgtcttt

SEQ ID NO: 684146 - DNA, 450 bp, Homo sapiens
  misc_feature (8)..(8): n is a, c, g, or t
  misc_feature (10)..(10): n is a, c, g, or t
tgaaactncnttactattggtcactgggcttcaggaaagtaaccaaatagaagagaggaaatggaggcaagcacaatgttaggttaaaaccctgttctgggaatcccacctgttcccagaagccacaggtgcctacctagaacatcctaaaaacaaccattcaaaaacactggggcgcaaggcaccctaagccccacagtccatttttgtaataatgatgtgcaggagtggatgtgcatgtgcgatgcatgcaccttcccacaagcaataatattcatagaaaaaaataggaaggctatgcatcgggtcactattggttttcatcaaaagccagcaatgctgtcacaatgagaatcgtgtaatatatttctctgtacctcctgaatgcttgacaatgcatatctgttaactttataatcagcaaaaaatatatgtattcttcaaagtgga

SEQ ID NO: 684147 - DNA, 155 bp, Homo sapiens
ccgggtgtatcaaggtgcagtcacactaatcataacttatttgatacggtacgagcgctcatcagtatcactaggccgtagtctgtcacctcgatgtgaaacattcctgcacatctgtacccacgccttcttcaaagccatactatttatgtgct

SEQ ID NO: 684148 - DNA, 960 bp, Homo sapiens
  misc_feature (825)..(825): n is a, c, g, or t
ccacattgtccggctccctttccttggcccgccgaccgggctcgctatgatgcattcttttctgggcccgcgcctcatgatccggccgtctgcattgtccctctatttttggggtcccctcccgattccgcggtcactacgggaatctctggatttcaagtggacgcgctacatctctgccccggttgcaaccgtgcactgctctcctgtcagcgtctgtgcctcacacaccttcttgggccccccctttggagacccgcgcgccccagggtcccccttgtgccttgttcgcgtttctgtagctctctgtgtgctccttcttgtcccccccggttatgtcctcctgtgtcaccttccgtgacctctgggaccgtgcaactcccctggcctgaagctgcctttctgcgcgctttttaactggggtcgtctctttccggagcccccgcgtttcctgccccaatttccccctggaagggcccccgggccgaggttcgaccgcggctttggcagcggcagaccttttggccctttttcacaggtccggtgcgctctgctttccgcgtttcccgcgcccgatttcccgttcacgtgccctggcttagacgcgccggacacggacttgattggcgggacccgcgctgcccgagaaatgggtcggagcccattacgtgtggttttgcttccggcgagacccttcttgagagctgttgcagaagcccgctttccccggggccccctaggcggggcgcggggttgggacccacacgggaagccggggcacacctggctatccaccggcctcgtcaactcggtttaaccaccccngggcgggtcccgcgaagggaaggctgcgttttcctcccgctatcaagttcccgttcgctttcgcacctccgggccccggcggctggctaatgttttgtttgaaagatcggtggaactttttaagagagtatttta

SEQ ID NO: 684149 - DNA, 297 bp, Homo sapiens
aagtgtcttttatgcaatacacaatacaaagtcaattttgatggctgctatacaatacttaggaatctctgcaatactttactacaaataacactgcccaagaggtcagggaaatcagcctgaagaactgggtaccggttctatactttgtggaaattacagcctaggaatgttatacccggtacagatgtacacagtcacaacggcttatcgagctgtttgccgcgcttcttgaagtgtactggaatcagtgctctgcctgttaactttagtatcatgctgaaagacaagctcttc

SEQ ID NO: 684150 - DNA, 298 bp, Homo sapiens
gaggggtttctcaagcttccactcttaacaccgccatcttctacctctgcccttctccgacatcccactttctattgacgttctctctgagctacctaagtagtaagtgggatgtcggagagaacgtcaatagaaatccgacgttcacatctgccctgcagtcctgctggaatccctgaggccacagtggagtcctgcctgtgtcttcacctacagcacttgcccaagagctttgatcactttttctgtaatgagaatttgctaaatgttctgggaaactaatctagttaataaaatt

SEQ ID NO: 684151 - DNA, 964 bp, Homo sapiens
aaacgccatcttccaataattcgactaaatgactgaaccctaaggcaaagaagagaggcacccgatttatgttctctaggccttcagaagacatgcaccttgttctttgtgaccagatatattggcgagatctccattcaaagagaagcgtgatattgtccacatcacgggaatagcgcatactgtacaaaaaggaattgcccttaggatggtgttaccatgggaacagctggatccagtctacaatgttaccagtttatgcagtttggatcgtagacagtaagactaatacaaggtttgagaagcgtgcctgcggactttcctttggtccaaaggtaaggaagtaaaacacttgtcgcgcgttagtttgcacgtgatctactttcacatgtcgaccgtgccattacagtagtcccgtaatgattaaggactttcccttgggagacaacgttcgtttgtaccatgggcccaattttggagtcagacaccataaaaaacaagttcttgaacaggtggcggctccagaaaagcgtatcgtgtgtcggtgggggggaaacccaacaattgcgttgatgaaaccgttacttgtcgtgaccattaacggccattgggagggtagcttgagggagggcgccctccgtaggagaccgtatcgcaacgtttgacattgtggaaccgactaatattgagtgggcaccgtaccggggaacgactcacttgccccgtataaaagggcgtgggtgtaggcatcaaagggaagcttctgcacccaggaaaggtatgcaaagggtacaccggttgtcgttaaacactgacgcagttgcatgtaacaacgaattattcacttggtcggtttagttgtaaggggttgacattcagtaggtgaatgctcaagcgcattgtagagcttgcccatttgaaaatttcgtgacgaaactttggagaactactacggcggcctatt

SEQ ID NO: 684152 - DNA, 208 bp, Homo sapiens
tgatatggcaggtggtacagcggtggtcacgtgcgtgcccgaccaccgcattgcctcaatcatgtgagggccgcgcgtttagtgcgttgccttcgctggttgaatccgcacgcaaagcaagtcaacgctcaatctgcacccgcatcgaccgcgcatctggcaagcccaaagcttccgccgcggcgtaagagagatcgataattcggcc

SEQ ID NO: 684153 - DNA, 481 bp, Homo sapiens
ttatctgcttctgaaattgtagaatcttttctttgtcctctgtgtactgaaaatttacaatgatgtgcatggcatgggcctattttccttctttttttttttgggggtgaggggggcatcccctagggggctataattcaaaaacttctgttcttcaattcgggaattatggcttcagctatatcattaataagtttctgtacttccctgggagatcgtttggtcccaaatgtgaggcatccggcatggtactcttttttaaatcccgaatctgtgtcactttcaaaaccttcaggcccccctctcaaggtgatatcagaggagcagctggtcaatgacctcgagcccaaagagtccaagcttccaagggaatcttctctcttatggtgcctgggaggagcaagaaattctccaggttcaggacaccagatgtcaccgtagccatggtccctccagtaccggctctggaaagcttggaaca

SEQ ID NO: 684154 - DNA, 176 bp, Homo sapiens
aacaacggataattctttatatccagaactacttttatcttctgatatcatagaaacactgtcattgtaaacttcttgattgcatccattgcccagataaaggtcaagtgattgtcaaaaggaatctccttgtggtaacatacgattggggagttttggaagcaaaaggccaacat

SEQ ID NO: 684155 - DNA, 605 bp, Homo sapiens
ggattctgagctcgttatgtattctccctgtgacaaattcctgtatcctgctttctatcacattatgcttcatctcactgcagcatgctatgtttacccagtttattgaacacagtcctgaacaagcaatggagagatactagttctgacaaggtagccatttcatatattggcttctcaattgctcacttcttaggataagagttgggctaactcatcgattcccaggcttgtgcgcacattggaatcacctggagagctttaaaaaatgtggatagagcatccctcccctagagagtctatggtaattagcttggggtgtgtgggggtttaaagttctcttggtgattcaaacgtgcaggcaaggttgcgatcctctagactgaatctacttaacgctaggagtttaatagaccaggttcaatctccagccagcaatgacacctcaggcataatcacttcaccgttgtgagccaaattccattatgaaattaatgaagattaataatatctaccttgcgaatataaggatcatacaagatcatagcacaggacaggcactcaagcaaaggtaactattattatttctcctaaaacaacagttc

SEQ ID NO: 684156 - DNA, 462 bp, Homo sapiens
  misc_feature (16)..(16): n is a, c, g, or t
  misc_feature (32)..(32): n is a, c, g, or t
  misc_feature (59)..(59): n is a, c, g, or t
  misc_feature (69)..(69): n is a, c, g, or t
  misc_feature (327)..(327): n is a, c, g, or t
acttgaaaatttatcnggtattttttaaaaanccgttcctaaaatttttttgcattaancctttaaacncccttaaaaataactttgaaacccctaggagattaaccccaaacacatttaaagtttttgaaaatagtcaaagaaaatagaagataagctcagttttcggagaatgagattaacaaggagcgaaaaacttgaaacggaatccagcgcaaggccaagtttagcaaagtgagcgctgaaggactccagactcttcggaaaccttgggtgctccctggccaccgcaacttcctgccccgggcggctccaggctccgggtgncgctggcttacataccaatggagtatgcagggactgtacacgaaacgcagagggggagggaaaaggctggagttgctctgcctccctcctgaccgctgtccacacccgggcaagaaggtatgcagatcgcacccc

SEQ ID NO: 684157 - DNA, 170 bp, Homo sapiens
tgatctaagatccgagtatgctgacagcatttagaggcgagggagtggatcaccaagtcggagtccagagcagcctgaccaatatggagaaacccacctctactgaaaatacaaaattagctgggcatggtggtgcatgcctgtagtcccagctatttgggaggctgagg

SEQ ID NO: 684158 - DNA, 406 bp, Homo sapiens
  misc_feature (14)..(14): n is a, c, g, or t
  misc_feature (129)..(129): n is a, c, g, or t
  misc_feature (144)..(144): n is a, c, g, or t
  misc_feature (261)..(261): n is a, c, g, or t
  misc_feature (323)..(323): n is a, c, g, or t
  misc_feature (366)..(366): n is a, c, g, or t
  misc_feature (378)..(378): n is a, c, g, or t
cgcggcggggttanggggagcctggagcccgggagcgcgaccgcggaaggaggacggcggcgacaagatggcgtcgctcccgggacgacaggcggcttcacggcctggtgtcgggacccggctgagganactccccgagatgcnaagcctccccggcgtgcgcgccctccggagacgagcggacgtgcgctgcctccaggggctcgggctgcgagggtccggctaaacccaaggcgccgacgacaagccgctgctggagcnggggtgcactggacacaggaagtgacccatccatcgcacagaacaccaagtttcatgcagantcaaaaggcccccaatcagaattcttcgagaaatagggcaaantgaattttctanaattttctttaaaattttttttttcctt

SEQ ID NO: 684159 - DNA, 217 bp, Homo sapiens
gcgggcctttgaccaaattcgcatggccgccatttccgaaagcaacatcaacctttgcgggtcccactggggggtttccatcggggaaaacgggccctcccaaatggccctaaaaaaactggctttgtttcggtcagtccccacatcaactgtcttttacccaagtgatggcgttgctacaaaaaaggcagtggaactagcccccaatacaaagggt

SEQ ID NO: 684160 - DNA, 724 bp, Homo sapiens
tagggtagccaacagcctgcaagtcatctactagaatgttaaaatgttcccaaacaagcaaggtgtcatcgggtatcaagtgtggctgtgagtgcagcagccagaggtagcagcatcacctatttccacgccagtaacagctcccggggtgcctcaataccggcacccggcagaggctatgtagacaaaacagaatctgactcggtccctggaagctgcttctctgggggttgtcatggccatagctgccaaggagagcaggtgctgctgtgacgctggtagcgactagggcagcgctgtgttctggagcatctggcgacgagaaaccatggctggccctcggacacagaagcacatgggggtattgccagtctcagaccagggcacccctgggcactcttctactgggctggcctctaggtccatggaagcacagaacaatgggtcctttagaaatggtgttttggtttaacaccaggaagaggccgaccactgtggcggggccattctcatacctgggtgtcggggtgaaagaacgcccattgaaggaggggttaatcagagcaagaggaccagggttacccgggcacataacaaggcttaagaaatgacgccccaaagtccacgatgtttacctttaacctagaaccgtgttggcttcaaaaagggcactcctaggttcgggtgcacgatcttcgtgctaattaacccctctaatggggag

SEQ ID NO: 684161 - DNA, 632 bp, Homo sapiens
gcggaggtggcagccatctccttgctcggacatcagtggacggcctcagaccccttgtgaagtcccaagatcgtgccgtaaagagaaccgaaagaagttgcatccgggcaccagatcagaccgatatgtcaaaatgaagcgtaactaggcggaaagcctcaggaggcatagagcggacagggttcgttagaatgatctcaagggccacgatcatgtgatgcccagcagttggttatggaacgcgcatcacaaggacatccaagagtcgatcagtgcttgcccatgctggacattacctggtatagttcctggatccaacgaaccgtcaagtgagctagtgaagtgcctgcatgatgtgcacacaagatcgttacgtgtggccgaaggatacgtcgtcatcgaaatgtatttcgcgtacctaagttaatcgcgtcgacataggtccgatacgttggtagagaggacgctgacgcaacctaggaccatcgaagagtgcaccaagccctcaattgccgaaggctgcagacagtgaaaggaacacatgagtagggcaggctgcatgtggcatcgtttgtcgtgtttaaagtaacatgtaatagaactggcaaagacaaaaagtaacaaaaggaaac

SEQ ID NO: 684162 - DNA, 329 bp, Homo sapiens
ggggagggggggggcccccctcccctggttttcccaacccccttttaaagaaggttttcaaccaagggggggggggggccatttccccccctttttttccgggccccccccccaaggcccccccccccttaaaacccgggaggcccccctttttggggggtttttttgggggggggggaaacaaaccccccttttgcaaggggaagaaggcccccccggggttttattttttcccctccaaaaaggcccccgggggtttccgggataaaaaaggggaaaaaaaaccccccccccccccccccggaaatttgtttttttagggcaaccca

SEQ ID NO: 684163 - DNA, 356 bp, Homo sapiens
attttacctttatttgaaattctccacaacaaaaagtaaaataaataaataaaagatgtatgtctcttaaatattttataatgaacataagagctgtgagaagttctgggtagaagacccatttgtttgtatgagctcttccaaacttacagatcactgaactattcttttcaaggaacatctgtaaatttctctcctggacgctttgggaatggctatacattggtagaaccaatgtttttccatgtataattgtccatgataatttctgtcttatagcacataaaaaatccatctacatattgaaaaacatgaaggtaaaatgtggaaaatgtttaaaatataaatgtttaaat

SEQ ID NO: 684164 - DNA, 153 bp, Homo sapiens
ggtgatctagatgatcccggtgttcctttgtctacaaaaatacaaaaatagccgggcatgatggcggttgcctgtaataccagctacttgggaggctcaggcaggagaattgcttgaacccgggatgcggaggttgcagtgaggttgagacca

SEQ ID NO: 684165 - DNA, 292 bp, Homo sapiens
  misc_feature (30)..(30): n is a, c, g, or t
  misc_feature (84)..(85): n is a, c, g, or t
  misc_feature (116)..(116): n is a, c, g, or t
  misc_feature (146)..(146): n is a, c, g, or t
  misc_feature (180)..(180): n is a, c, g, or t
  misc_feature (235)..(235): n is a, c, g, or t
  misc_feature (242)..(242): n is a, c, g, or t
ccgggggttacaaaacccccttaatagagnctcccctatgaagttacaagaagtaaaccaaccatagggaagaatttgatgtgnnctttgaagccactgcttgtaagagaagacancgtgtaatttttgagttactgtatgacccncgttggaaatgtttaaagccttctgtaggcatgntgtggtggctcacacctgtaataccagcactttgggaggccgaggcgggaggatnacttgcncttaggagtttgagaccagcctgggcaacatggtgagactttgtctctac

SEQ ID NO: 684166 - DNA, 106 bp, Homo sapiens
cgaagcttgttgctgctttattgaaacttcctccctgtcgcacacaaagcaattacacaagggggaattgcctggtagctcttggtttgccttctccctctgtacc

SEQ ID NO: 684167 - DNA, 395 bp, Homo sapiens
cagcgctcgactgacaggaacgtagaatctattggtgagtattatgatgtggggcagcacatggaagcccatcatgcgtgcagggcctcgccatgtatgttctcacagggccacgcactgggcgatgtacttgaccccgatagccatctgggatgagctgcttttcagccaccatgtcttcaaattcatcagcattgaacttggtgaagccccacttctttgaggtgtggatcttctggcggccaggaaacttgaacttggccctgcgcagggcctcaatcacatgctccttgttctgcagcttggtgcggatggacatgataacttggccaatgtgaaccctggccacagtgccctggggctttccaaaggcacctcgcatgcctgtttggagc

SEQ ID NO: 684168 - DNA, 346 bp, Homo sapiens
gggatatcgtcgacccacgcgtccgtttttaaagaggaagtggggggtggatcacgaggtcaggagatcgagaccatcctggctaacatggtgaaaacccatctctactaaaaatagaaaaaaattagccaggtgtggtgatgggcacctgtagtcccagctacttgggaggctgaggcaggagaatggcaggaacctgggaggtggagcttgcagtgagccgagatcacgccactgcactccaacctgggcgtcagagcgagattccatctcaaaaaaagaaaaaaagagttaaagtgatgacggtcagaattcacagtgggtttctagttttctggagctatgt

SEQ ID NO: 684169 - DNA, 100 bp, Homo sapiens
aagatcatgccactgcactccagcctaggtgacagagcaagaccctgtctttaaaaaacaaacaaaccaagaaaaaaaaagatttccatgaatccagtgg

SEQ ID NO: 684170 - DNA, 142 bp, Homo sapiens
ctgtctctgtgtgtgtctgtgcacagtgtgtgtttactgtcacaaaggcacattttcagacccctactcctgtggtgacggacaccctgagggtccccatggcaggactggccttttcccatcaagtgggtccataatggga

SEQ ID NO: 684171 - DNA, 336 bp, Homo sapiens
aagaactgcagcattctccaaactaggatctcaccacaggctctcctactccaatctgtcttacaaccttagctggagttacctgccccaaaacaaacactgttccttttcttaaacatttttttggccaggcacggtagctcccacctttaatcccagcactttgggaggccgaggcgggcagatcgcaaggtcaggagatcgagaccatcctggctaacacggtgaaactccgtgtctactaaaaatacaaaaattagctgggcgtggtggcgggcgcctgtagtcccagctactcgggaggctgaggcaggagaaaggcatgaaccaggaggt

SEQ ID NO: 684172 - DNA, 1256 bp, Homo sapiens
  misc_feature (72)..(73): n is a, c, g, or t
  misc_feature (112)..(112): n is a, c, g, or t
  misc_feature (130)..(130): n is a, c, g, or t
  misc_feature (198)..(198): n is a, c, g, or t
  misc_feature (292)..(292): n is a, c, g, or t
  misc_feature (315)..(315): n is a, c, g, or t
  misc_feature (326)..(326): n is a, c, g, or t
  misc_feature (842)..(842): n is a, c, g, or t
  misc_feature (994)..(994): n is a, c, g, or t
  misc_feature (1142)..(1142): n is a, c, g, or t
  misc_feature (1190)..(1190): n is a, c, g, or t
  misc_feature (1198)..(1198): n is a, c, g, or t
  misc_feature (1206)..(1206): n is a, c, g, or t
  misc_feature (1222)..(1222): n is a, c, g, or t
ctggggcatctcggcctcaatacctgcatgagcacagtcatgtccaggccagggctgctggtcgaggtccgnncccatctcttccagcagaaagggagtaagcttgcagggnggctgggggacaagatcncaggatctcagcctctgctcatggatcagctctgagaccccgagtgagctgggggtgctctgtgcgcnttggtttccccagctgtcaagtaaagggattggatgaggaagtcttgtcaaggtggaatgatctcagatttggggcagcagtgaatgatcccgntccctgggccatgccagtggccnggcctcggctnaacacagccccaacactctggaatggggatgagggggcagtcagctcttgctcctagtaagagagatgcaacagggctctgtggctgagctgggtgccttgcctcacacctgtaatcccaacctttgagaggccaaggcaggaggattgctcgaggccgggaattttgagaatagcctggacaacatagccagaccccatgtctacaaaataataagaaaacacacagctatagtccaagctacttggcaggctgaggcaggaaggtcccttgtgtccgggaattggaggctgcattgagctataatcgcaccactgcactccagcttgggtgacaaagtgagaccctgtctctaaaagaaaaaaaaatcggcctgtgagcatgggcttgattttcaaacaggacccggagggtagggacagacagtgctgtcacccttaggtgctgaacactcagaaacgggccagcggcagcccttccctcacctgcagacaccagattgggcagaacagcacntggcacttgcagctcttgcagtgagggcagaacccagtgtcaacccttctgcctgtggaaggggctgctgaggcctgcggagaggccagggtggaggctcgtccccttgtccagcccttgggtggtctccaccaggtccccagcccaccagngcagggccccctgagcctgctgctgccacgggccctgtctctacccaggacgtccccccaccctcgcagtgtcagggaaatgatcatggtggcggtgacactccgcaggcagggctgcttgagagaagcttgagaagggtcacaattncaggcaggggcccgtgttgacaaagccctttttaccccgagagagttnaccagggnagtttaangagcagagccaaattnccgggagttcgagaaagttcttgggttgggttta

SEQ ID NO: 684173 - DNA, 191 bp, Homo sapiens
ggtcgtcgcgggacatgccgcaagcggtcgcacataccgacacagttccagatgtgggctggtccaacccaccagccagaccgaggagggtggatttaccggaccccgacggccccatgacagcggcaaaggtaccagggttgacgcctaggctgacgtcgacgatggcgtcgacccgctgctcaccctcg

SEQ ID NO: 684174 - DNA, 1141 bp, Homo sapiens
  misc_feature (1141)..(1141): n is a, c, g, or t
caccgatgcatacaccacatgaaacatcctatcatctagtaggctcattcattgtactcgtcaacagcagtaatattaattaatctgtcatgattttgagaagccgttctgcttcgaagcgaaaagtccttaatatgtaggaaggaaccctccatagataccatgcgtagatgactatactggatgccccctcgacccctaccacacattcgaacgaatcccgctatagcataaaatctagacaagaaaaggacggaatcgaaccgccctcaaagtctaggtattctaagcctcgaacccccgatggtcctccatggacttgtcttcaggagaacaagaacaaaacaaggaggggtgcagacatcgtagaagttttcgccctactggaggggctcacaatggtgtttacggctgtaccccaggttttctctgttgtgttacgcaacgtggggttgtcccctatataagtatggtaggtcactgtgctctttgtatacatatgcgctaacagggccaattggcggacacggcccacgatttctgacaaacacaatcgctcaacgttgggacgtggggggataaacacgatctggctctaacaatctgggggacgatgatcctctattctgggtgtggagaacacgggtggaacacccctgtaataatctaattgtcctctgtgcgccgcgctgcgtgggaaccgcaagttagcaccctgttgggggatccggagataggatcatcaacctcgtattacccaagaagaaggtatttctatagaaaaggacgcgctctaagaaaagggtggcataaatacgtctttttttacaagccatattttatatctccaagacagaggtggtctcaatataaagggcgggtggtggttgttgtacaccattggtatagatccctcgtgggcccaattttagttgttggtcctcttagtggacgaagggtgtttttgggaaacaccactggtgtaatatggggtcatttgttaacctagtggggaacgtgatatggtggcaacatttttaagagtagttggacaaacccaactaggtgtgatttattcattgttatgcccaggacaagtggaaggaacgcgtgaaatggtgtggtgtggacatattataan

SEQ ID NO: 684175 - DNA, 350 bp, Homo sapiens
aggggcctaaaaacctttttctggggatgggtttttttcacaggtcaaaggtttaaaaaaaggggccgccccccctcctttcccctattaaaaaaaggttgccaaaaaattttttttttttttttttggcccaatttttggttgggctgggggccccacccccaaagcccttgggggttttgtttttttttccccctttttttcccaaaaaaaaattttggggccccctggaaataaaacataatggttttttgggggaaaaagaggcctggggtgaggaaacccccctagggatttttttcttccttttcccaggggcaatttggaaaggggggtcttattttctcttc

SEQ ID NO: 684176 - DNA, 232 bp, Homo sapiens
gctagactctagagatcccctacagaaatagacaactatgtagcatgggcatgatggacagcaatggttgtatcaactatcaagagcgcgtccgcatagtgctgaatggctgaggaccctcccagtctccccagagtccgtgcctttccctgttgtgaatattgtatctaacctatagtttccctatgctttcttgtctctgctacttccccatctcgtctcttctcttgta

SEQ ID NO: 684177 - DNA, 369 bp, Homo sapiens
aaagaaaaatagaagatcataggcagggagtagacagaccatcgtccatatccagtaccagtgcactgagctatcaccgtgactgaaggccaaaccaacgagcagtctctccgcataggactgggcccatctatagcagcatcaggagacttagctaccatgactgcatttctgtaattcggaatatcttcctggatatactagaagcaggaaaggtgaggctctaaaggtatgtacacaggaaaagctgaaaaagcctatgtataaccttttgatgaagaaccatagtgataatgtgagttaaacctgctatcgccagcatggatgctagcagcttgaacacaatggaacccctctacctcatcttgc

SEQ ID NO: 684178 - DNA, 267 bp, Homo sapiens
aagttaatggttttttctgggcagaaattaaatttttttttccgcattttgccccgggattcttcccgtgggggccccgctttttaaaaacaaaacttttctcaaacattcatcattagacaactggggtttttgctggttttttaacccccccaaatgggtaggctgttgaacattccccattcaaaagtttttttggggggggggaaatggggggtcttcaatgtttttttttaaaaaaaaaaaaaaaagttcttgacttttcca

SEQ ID NO: 684179 - DNA, 125 bp, Homo sapiens
gattccattgatcctcatcgtcccgcaacatccactcgtggtcctgatacgcatcgattctgctagcctggccgatccatcttggcagtctaatagttgctttcctgtgatgaagtgtgcccatg

SEQ ID NO: 684180 - DNA, 134 bp, Homo sapiens
gcagtcatcattcagattaggaaattctgagaaatctagctgaccatcactgttggtgtacagatttcttcatcatgcgggtcatggacaccagggtccttctggcttctttgtgaaggcagctagttctgtat

SEQ ID NO: 684181 - DNA, 703 bp, Homo sapiens
gatatgagctgaaaaagtggctgagcctaagcgtgacaggtgtcaggtgccagtctcaggagtaggcaattgtcctgcatgcagtgaaaagccagaagatggaaggaaggacaggatgcaaatgagttctcggaacgatccacctggtggctgggtcagggagcaggcatggtgacttcagacctcatggtacgttagaggctaatgtgaagcccatgtgaagctgttggtttaaactgggtcgatatcagtggcacacatttactgaccatgtgtccagccctgtgtgaagtactgtagtaaattgctccaatggaaactcacaataaccacagaaggccagtaacagcattgtcgttattttatcatgacgcaactgaggcttagggcagacagctggtgggtggtgggactgggatttgagcccactggtgtcccaggcccggagcttggcttcttccattgtcttaccacagcctgcactcacaggagagtgactcataagttacaataccatctgctgaccatctgctctcacactagaaggaaagtctacttgggaagacaatttaggatccgaatttggtagttgaggatggagctaggaaaaagcggatacaggaggtagccaagttctgcttggacctgcagggagtgaggctggccgggcttccaggtggaaatgcccaggtgaaacagggcg

SEQ ID NO: 684182 - DNA, 113 bp, Homo sapiens
gcctattcaagtatcaataggttatttaggatgaaagttttaaaactaagtcatcagtaagctgctgccaccatacgtggactacgtcggataccggagctcgtaattcgcta

SEQ ID NO: 684183 - DNA, 129 bp, Homo sapiens
gaggatccccaacctaacagcgcctggttggtagaagggggctagggtattttaatcttagagcgaaagcctataatcactggcgcccgctcataaggggatggccagggctaggttaatacgatagtt

SEQ ID NO: 684184 - DNA, 108 bp, Homo sapiens
tggccaagttggactttgatcctttgggcagatgtcccattgctccaatgggccatctggaccaaaggtggggtctgtacacttgtttataataaatgcaatagtatg

SEQ ID NO: 684185 - DNA, 418 bp, Homo sapiens
cccagacctactgcaccttgctaccatacaaccttagtcaaaccatttacccacatacatgatacgcgcaagaagatgcaaactggcgccataagtatagtgccgcatgggaacgatgatcgcttataacacaagcataatatatcaaggactaacccctataccttctcgatattgacattaactagaaacttctttgcaaggagagccaaagctaagacaccccgagaccagtcgagctagctatgaacagctcatagagcacacccgtctatgtatcataagtattggaacatggataggtacaggctaccctaccgagactggtgatagctggttgtgcaatatataatgttaggtcaggtatagagtagcccacagaaccctatagattcccttgtcaatttaactgttgtgc

SEQ ID NO: 684186 - DNA, 1609 bp, Homo sapiens
ggccatcatcctggccaagtctctccagtcgtccccgatgcggcacgaggctactggggagaacaatgatcggtacagccctcgacactgtcccgttgtcaacggtgactaggcctgctgcggcttcttgtgtcgtggtacggcctcatctcgctgccacccagggcgtcactggtgctatcgtcgtctcgtcgaccgtgctgcctaagcaagtctgctcatgatggccatggctatgtcgatggacttgacgtgactcaccatcaggcccggtggtctgtacttgcgcacccgtgggtctagacttgcgccagaggtctcatcctttgactggccagttctctaaaagcctatgcagacctacctgtagccaccgaactctatggcaacggcaggactaggtaattccactcaagtctccccatcatcgagcgagttcaactagaaccaacgctgcgttcaagtatcgcgactagcccaggagttctcacgtgcgaaacgggaactccagtgtcttccaagcttgttgggactaagcacactagttagcgcggtttctatattagcgaatgcaaattatattaccacggtgacatttgaaagcgtttgagactgattgaatgaaacacacggggtggaggctccgtattgaaaagatgttaaccgcttcgatggcgtggcccacaaagcgttataaaactgcatgtctcacgcaaacgtttgatattgaggtcacaaacaaagaggaggtgccccaccataaaacacgtcgagcggtcgggaaatgaaacaaagagagcagaatgcgtaagaagaggccaatgccgggtgtgtagccacacacgcgttctggcgaactcgaggcggaaaacccactgggtagaaactttgcgagagcactcacgttgcaattagcgcaacggcgaaccccgttaacccatccatcagcagagacgcccgacgcaacattgtcaatatcgggcgacagcacaagctcaaaagcctgaaaccgagcagaacatttccacaaaccgttcaaacagccgcaatagctctattacgacacatttttgtaacgtggcgtgcacacacacgttggtcgaaacacaaaactacaccataacgcacttatgctcgtatttacagcacctgtggaggttcaccacgagaatatagtacatgtttccgcgagaaacaattgtttcttaaccaggagcgatgatatggatgatacacactcatccgcgaccagatatgtcgaccattccagaacgagccctcccaccaccaagaactctaacaacccaaaccctcaggatagaacacaaaagagggcaaacaatgatccacgtaagtagaaacgaacacacgctgaaagtacacttgactacgcaaaacgatccgacaacactaacgaaccgaggaggcacataaccaacccagcacacgagcatggaacagtaagcaaggcaacaaaacaacgaagcaaagcgtcggataagaacatatcagaacaaagcaaacacgtgacacagtagctagtacgacaaaaacaacactacaaaacaacacgtacgatcatagaacgagatcaacacaccaaccacac

SEQ ID NO: 684187 - DNA, 819 bp, Homo sapiens
  misc_feature (819)..(819): n is a, c, g, or t
gcgagtctgagtttttagttcaggggattcacgtaaagacggggcttcaccggtaagccaggagggtctcaatctccgtgacctcgggatcggcccgcctcggcctcccaaagggcggggatcccaggcgtgagccaccgcgcccagccccatttaatttttaacttaaaatgcctgccaaggagcagcctcaagcccagagaagactgaggctacggggaaacttcccttgctgcaggctgttgtaacactttaggggccccaggtctccactgccaagcaggattgtggcacattgagcacccacccacaaagcaccatcaggcagcacccagtgggctccacacagcccagtctctgtcccttcccttaggtaaagatcacacctgaagtcttcaagtcccacagaaaccaagtggggggtggtttccattcctcttacaggcagccatggcccatggttgaaaggccgggctggaggcccaggaaactcggtatactgatgtggccacccttattcccacttggggagcaccaggagccctggagccctttccaacccaatcccatctcgcaggagagcagggtctggggatcctgcactcaccgtctggtcacagagacacctcacacgcggggtcccactgttgcctttggaaaaaagagccgaatatgagtggacggacaacagtatattaaggggtggctcgaactcacaaaacggcaagtgtgtaccctggatcttgcccagttgccagttcccccacacaggattgtgtcctcatttctctgacaccccggtcactcgggaaagtacgn

SEQ ID NO: 684188 - DNA, 409 bp, Homo sapiens
taggtgactctgaggatcctattacagcgcagggagggtctggggctcctgttctagcctgcctgtccctgctttctttgctggctcatggcctggtgtctctgcagtgtatgactgccgtcccactacatgcagcctcctacagaccttaggacgggcttcatgatcttgtgttcacctgcccctccctgtcctcctcctcttccccaaactttgttgatgcctcaccttggcttagactccattctcacagcatatatgtttatggcaaccgtttattgacatacaattcacataccatgccacctgcctctttaaagcacacaggtcagtcatttataacatgttcacagagttgtacagtcaccaccagtcaattttaggacattttcatcacctcagaaagaaa

SEQ ID NO: 684189 - DNA, 327 bp, Homo sapiens
  misc_feature (16)..(16): n is a, c, g, or t
ggggttgtttttgggngggaatggttcttccaagtttgggcccttttgttcctcaagaaaaagttcccttgttttccttttttgggaggtttctttagggaaaaaaatttaaaaaaaaaccaaaccaaagttttttgccatttttgggtggagggtttttaattttcttttttcattttagggaaaaggttagcccccatttttttttcttagggccccccccccccccccccagggttttccttttctttaggggcattaccccagggcccttattgaggaaacaaaccccaggttttttcccctttttaaaaaaaggggttttta

SEQ ID NO: 684190 - DNA, 228 bp, Homo sapiens
aatgatgtggcgtttcatgagtatttcgttttcaattagggagatagttcggtatccggattaggattgttgtgaagtatagtacggatgctactctgtccaatgactcggttagaaagggttgcttactgtgttgtcctccgacttcaggtttcagaatgatggaggctctcgcggtctaccgcagctcatctacacacgctgatttgaacctcattgaaagaaccg

SEQ ID NO: 684191 - DNA, 668 bp, Homo sapiens
ggcgtacggggaggcggggtcagtggcttctggtgctctagggtgagctctgcccggtgcaggatggcgggaggggtaagctcatcgcagtgatcggagacgagacacggtgactgtttcctggctgcggcataggggagcttaacaagaacggccatcccaatttccctggtggtgtggagaaggatacaaccatcaatgagatcgaagacactttccggcaatttctaaaccgggatgacattggattcaatcctcatcaaccagtaccatcgcagagatggtgcggcatgcctcgtgacgcccaccagcagtccatcccctgtgtccgtgagatcccctccaaggagcacccatatgacgccgcaaaggactccatcctgcgcagggccaggggcattgttcatgccgaagacctgcgctaggggactctcatagccctcagcccttcctcgtttccaggcctctcccgaggcttgcaatcaagcttctttacttttggagctctgatatccaattccttgtcttcccattcaataggaggctaggtaaggcgcaacaaggtgcggggctctggtgtaggaaaaggaagctgacattttcttcaattactcttcctgtgctgtacacaggtgtccttgtgatgtaataaagcatatctgtctctc

SEQ ID NO: 684192 - DNA, 232 bp, Homo sapiens
  misc_feature (4)..(4): n is a, c, g, or t
  misc_feature (8)..(9): n is a, c, g, or t
  misc_feature (11)..(11): n is a, c, g, or t
  misc_feature (18)..(18): n is a, c, g, or t
  misc_feature (21)..(21): n is a, c, g, or t
agcngctnnantatgttnatngtatactgaagaaagagttatgaccacattatttcaatgtcatggctttctgaaggaagttatcttcttatttattttctgccactgaattctagattaccagagtggttgctcctggggatgtcttgctggtctgtccctccggaagaatgatgatgcttcctgcaggctggtatggtgaaagtaaagtcttcatagttcacatcattat

SEQ ID NO: 684193 - DNA, 331 bp, Homo sapiens
ttttttttttctgggagatttctttccttcctccctttctttacttcataataaaattgctccattgaagctgactagaaacaacgcaagcatcaccaacagcaaatatttctgttctttgctttctctgagaggacaggcgactagtcagggtgaggaagatggtggaggtaaatcagtttcaaaggtgggtgtgggaagccagcacacatgctgcttaacgtttagaacacacagcctggccggcgagaagctcaagtggaacgcagacaggtagcaattatgaatgtaccgtggtagaactgtctttgcagagaatggcctcttgctt

SEQ ID NO: 684194 - DNA, 713 bp, Homo sapiens
tcctcttagcgttcacccccgaatattgccatgcttggggcttttggagctgatgattgggacccctgaacatgttacgtcccagtgcaccagattccccatgccagtctgagaccgatgtggcgggtcccaatcgtcctgcgtgccctaaagatctccctccgaagatgtctatccacaccccgtgtggctatgatgcccggcccaaaccccggaagttggacccacccagattgtcatcttaccaccaaagagctgtgtgcccccacttttgaaaaacatggttgcccaggacccatttgaacccatcccttgctggtattttcataggccattgccattgctgccagaataatttgggcataataccctggccccacaaatttggttcagacgatatcgaagactgtcagggcgagactggtagaccccctgcaaccgctgctgcaagaacactggcaccagaccccgctttcgggaccctccggcgtgccgaactgatcttcgagctgccatggaccttcatccaccagatagccagcctgccagtctcgcctaaatggagctgccctttaggggagtgtaaaactggggaaatctgctccctgacagaatttaaaaaaaaaataacccgtatgaagtcgttgccccctgaatctctactgtagccctgaatttatggaccgttagatgcttaccccaaaaaaaaaaaa

SEQ ID NO: 684195 - DNA, 1553 bp, Homo sapiens
  misc_feature (1121)..(1121): n is a, c, g, or t
cacgacaccaccaaggtatgtggttgtttttattataacacacccgcgcgctctcctcccctctctccgcggggggggtatatgcacccccgccctggttaagtgatgtaccctcccggcgttgagcgaccacgcaatccaaaagggaggttgttattggcggcccaaaccgatctaattgagtagtgtgcgaaccgacccgattggtggtggttgttgctccccctcctggttatgcagaagttataattcagggggggggaagccacccctcccgcgggtgttaatattgtgaacaatgattttgggggggtcttgcctacccccacccacacggaagtaggtggtgggttttttttatacaaacaaccaccttcgtgtttgttccttcttccgttcataattaatccatgtcttgtttgtgaagaaccacgccaccacccagcctgttgggataaagaaacatttttgggaagaacctcccttcgtgctgccccccccgccttgcgtaagaaaaggagtaggtgcccccgccggcgccaccaccttcggaatgatcctccccatccgtgctctacatcagaatcctcgcaagcaggataaatgtagcccccccctgtcattttgtgggagacgccctttgttaaaaaattttgttaatatatgataacatacgtccctacacccctacttgttgatgacctccttctttaccaccaccacaacacctccccaccaacaccaggtgggttgctcctcctcatataaccacttcatctcccccactacaacacttccttcgcgccaccgatgttataataaaaaaagatttttgtcttcggcgcttttcgtgggggggctgcggagcaactcttcttcgcggagagccacacagcagatcatctcttcacatcacctccttctcttcgcagctgcacaccgcgtgaacaacagcatcgtgcttataagagaacatcctcgtatcaccacacaccagcgtcttcatcacacagctgctgagaacacatattctctatatatacgtccacacatgtagagtattcccacacatagacactcgtgtagacacacaccggcggagacacacacgggtttatacnccctcatagaagagatatacacagcgcgcgcgcacacataccatatatttctatagagaggtctcacatatatcacaccacacatatagggggtttttatacgcagcacctctcgagatgttgtgtgagatccacgcgagacactctcccgcagatgtggtgccacacccgctctatattataaagagtttttgctcttgtgtttcacaccgcagttataaagtcctaacgtggagatttgaggttcacagagcccggaggtaaatcccaggtctcggtttcttatatttatcttccaaattctcctccacctgtaccgaaaaggacacacaagagagaaaataaaggcctaacttcaccaagccccttcccccctaaatgataatcatttccacttagtatcataccccccccccccccaggaccgggttt

SEQ ID NO: 684196 - DNA, 953 bp, Homo sapiens
tggaacattccttggaccaggtgttgtattgcaggaccccttcccccagcagccaagccccctcttctctctcgctggtatcggcgcgtccaggatgtgtgtccgtagaggaagggacagaaaaattgtggcagtttaactatatatcgctcgtttttaacttcacaaataaatgataacaaaacctcccagtctgagggtgccagtctgtctacccccccctttacttccctcccgtgtagttagaagcggatgttgttctttatagatgtagtttaaaaagcctgataatggtgattgaaatttacaaacctgttgtgtaaacaactttttaaggaaacatataaaatcgtttcatcagcgcgcaaggggccttaccgtaacgcggcaccaaccccccattcacgcacgcgtaccaccacaacgggcctaccggttttacaaacaacaacgcccaccacacagggcgccaccgcaactaacaatatcccactgcagcgaccacaggtacaacctaacccaggccatccgtgtacaagcagctcgctcccgcaaaagcgaggcacgacataaaaaacccaagcccaggtggaccgacgtataaccacccccggcacggacaacacctgacgacacgtggcgacaatagagaagaggaacaccacaaccatgcggcgctgggcacaacgggcaacactccgcacacagatatagcgcccccaggcgcaagtccacaacacgcgtaaggcgaaaacacggcaagtgcggcaccaacagcagacgcccaaatgcaagttatacagagcgagaaaacgaacccccacaccatacggaggatgaccaggcatagaggcacagagctgcgaatgcgacacgctacacacagccaaacgccagcgcacaacaacaaagcaaacagacgcgagaaccgtacgaacaatccacgtgatcat

SEQ ID NO: 684197 - DNA, 137 bp, Homo sapiens
cgtgtcagcttctctgtgctgtcacctcctctgtgctgtccacctcctctgtgctgtccatgtgctgtccacctcctctgtgctgtccatctcctctgtgctgtccacctcctctgtgctgtccacctcctctgtgc

SEQ ID NO: 684198 - DNA, 856 bp, Homo sapiens
aatgacaggctgtacggtctggaattacggatggaggttgcagtgagccgagatcatgccactgcattccagcctggtcgaaagagctaaactccgtctctcaaaaaaataaaagaaaaaaaaaagttccagtcatgtaattatttaacagtcacgtgacctgtttatggaactcccaatgggccactaaaagcacttgcagctagtgtgatatcatcggagtgtttgaggtccccgtcttgcattgtgactgtcggaaactactgcaccgggggggatggtgcatttttctgagttaaagcaggagtcgggagtccccaaaggggaacacaagaacaccttgaatcctggcataatcttgtgtgccctcttgtgggccatcagttgtgttccacagggatttgaaaaccttgggaaggtaaaattgctcatctcatctgaagaaagttgtcctgccattagataaaacggtggacgcgggagaactagttcaagccactgggacttgacattggcacagtcgccttgaaccaacctagggatcaccatatcgcaaaatgtgtagacgctgtgggccacggccctggggggcaacacttatagagaccatgacttagtcattcccctgcaagttgtgcacggaaacatgtgttgaccccaataaaagccccacagactttggagtgcatccgattgaccagaagaagggtctcccgagagagccaggacagacgatttgcattacacacctgtgacaaaggatttagacacaggacgcagagcgagaaaacagagagaatacccaggataaaagaggaggaagcgcagaatgggaggaacaacacaatatgcctcg

SEQ ID NO: 684199 - DNA, 216 bp, Homo sapiens
ggacgtccagctagatctcctaggcggcgccggcgtccttaaaaaaaaaaaaaaaaaattgaaaaatttgaaaaataaacgtataatttttttaacacgtaaggttattaattttagtaaacttgttttttttttttaccgtgagactaatttgacgtaatgtcggacgcctgtggaacccggtcgaaccaaaatgagatctaaagtgacagcagg

SEQ ID NO: 684200 - DNA, 559 bp, Homo sapiens
tccccgggccagtatgtaatgtgtattggggtagggttagtgatgggaagtctgcagttttaacaaccaggcgagaccagactatgctacaggtgggcatgtgcagccatcagagacccctgagtgagaatgaaaagtgggtgagctaaatgacatggtacataaaagattaaccttggtatgctctcttccacttcttgccttccatgtggcctaataaattagagagcacaaagaaatagtttcatctccgcaaatatgaaagaacattgtgacttctgctacccatcatataacttcagtcctctttacatattcaaattggtttcagggaacacttcagatgtgggtggatgtttaccccaagagtatggggccaccaggccctcctttcaacatcaaagcccggaaagcgaggaaatactacctgggtgtgatcatctggaacaacaaggacgtaatcttggaagagaaaatgctcacaggcgaggaaatgagtgacatctacgtcaaaggctggatacctgggaatgaagaagaaaaacagaaaacagatgtc

SEQ ID NO: 684201 - DNA, 110 bp, Homo sapiens
gtgatagcctgcacgtcgtgcgcatccacccgcccgcctgtcatcctgcttccataacggccgccttccatgggcccgacgtgggctgctaccaggacgatttcctagat

SEQ ID NO: 684202 - DNA, 117 bp, Homo sapiens
tcgacgttttatcaaaggccccctctctatgctcatgctagttttgctccttctgtgtctttttctgaaccatatccatgttgctgacttttccaaatccaggttttcactcctcac

SEQ ID NO: 684203 - DNA, 1000 bp, Homo sapiens
gctagccgtccgcgttaatggccgaggcgacactggttgtgctgtagtggcggagaggaacgtggtagtgctatggaggaatcatcggaatccttcaccatggcatccgagcccggccagcgtcgagcgaggcaatgatcctctcactctccaggacactggccgaagctcgcggcgtactgatggccctcacctccagccctggcgtgaccttccaccattgaggatgagtccgaggggctcctaggcacagaggggcccctgcaggtaaagaagaggatggacgaggagctcatcggagatggcatggaaagggactaccgcgaccatcccagagactggacgcctatgaggccgagggactgggctctggatgatgaggacgtagaggagctgacggccagggcagagggcaggcacggagagcggagccatgcggcagggtgaccgcgaggcgggccggggcctgggcccgcatgcgccaggggctcctgatatgacatccatgacgcgaggacgagcgagcgccctgcgccgccaagcgccggcacgccgcagcgggccacgcagtgacagcgaggaggaccacgcacatgatgagaccatcgagcaacctggcggatctcgaccaggaccactctgatgggcgagtggcgagaggcatggaaggggcccccggcgtggcaggatcacacatcggtctcactacacgtaccctggcgcagtcacgatcggcacagccaagggcccacaatggcccgaacaggggcaggcgcctcaagccgagactgatgcaagagaagaaaccgagccacaaccccggcggcgaaccgaaagcgccaactcgcggagccacaagccagcgcaccaggcgggcctaagtccgagcctgcagcacccgggcacgcctctctcccgcaccacggcacgaggggggcccggcgcgcgcgacagggcacggaccccagcaggacggcacaaaacccacacagtcccgctc

SEQ ID NO: 684204 - DNA, 278 bp, Homo sapiens
cttagcaggatgcttatgctcagtgatctcgggcggaatgtgtttccggattttgtgatgttggcggttagtggggtcttcaactcggggtgggcagcagtgcaggtgaaggtctccccatggttccaatgggttggggaacagcaggcaggacactggacacgctgtagcagccacagaggtcacgctcaggtggtccttgaacatgcgcttcttcccactttgagtggcgtccatggttgaaggttggcaccatgaagggcattctcctcatggcc

SEQ ID NO: 684205 - DNA, 1236 bp, Homo sapiens
acacctactaccctatacctactactagctactttacctacctgttttctacttccctacctccccctggtcctaccgcgtctcctacctactccggcgctagacgctcgcgtaggggccctggcgtacagacgcgcgggggcggggcgagtagcggcgcggggtataagtaagagggtagcaggagtgctgtgtagcttacccctatctaccaccggcggaatagtagctgacgagtagcggagtgtagtagcctaccagggctacggaacacacatattatataatctaaacacacaatccaaacacaacacaatctaaacacaacaatctatttcacaaaaaaccccgaaacaacacaatattcaccaaaaaacatccgacgtcataccccacgacccggcagcactataatcatacatatcatctattactaaacacatactatataaaatccaaaacataaacaccggggtgacaagccagaccggagaacacggaccgacgaccacagacacacgggagacacccgaagcagaccaggcttacacaagaggaaacgtgcaaagcaccgaaatgacacaacacacaagaagaggcacaataacacacggctaggccacctaggcacgcacccaagaacaaaccaccgagagcaaaaacactaacaagaagtacacacacaagaccagggacaaagaccacaaggaacagcaccaaagcatagagaccacagtaggacgaacaccgaaaacacaccccggaataaacgcaaccgagaacaacgacaaatgacaagaaaagaaacaaacacaaaaaagacacacgacgaacagcaaccaaaagaaggaaaccaccaaaccaagaaagaccaaaaaaacaaccgacagcacaaaacaaaaaaacaaaacaaaaaccaccagcacacaagacacccgcgaacaacgcgaaaacacacgcgaagacacgacgaacgagacagcacaagcaacacaagacaccagacgccaacacgaccccgcagagcaacacccacaacaaggcagaccacacagccccaaaaaacaaaacaacaaagaagagaaagacaaaacaggacagcacaacacaaaacaggaaaacccaaaaccaaacgcaccaaaccaaaacccaggagcaacagaagccagcagacacaagaaccaaacgcgaacagaaaacacacacacaaaaccagcgacacgaaagacagcacaa

SEQ ID NO: 684206 - DNA, 252 bp, Homo sapiens
agtttacgctccatcctggtgctcgtatggtggccagccccagatgaccactgaggtgccggtactggtgatggtgacacccatcaacgagttctccccagacctgtgcccctcgcaacgttccgggttcaggaggatgcggcgcccaacactctactgggctccgtggtgggcacggatatggattaccctcatgacaacattgagtactacacctctggtggtcctaccacctttgctgtggaccgtctc

SEQ ID NO: 684207 - DNA, 334 bp, Homo sapiens
ctatacaagcaggacataatcctgtctgtatcaggatatctgatgaccagtcaaaaatcacagtaatggagtaactgatatttgagctcaggatttacgatcagatggggccatcaacaggtcccattcagcacttccctgggtgggcacaatctaagccatgctgatgtgtctgccccattattggtgtcatttctgcagtatttgtaccagcagcctcctgtactggatttggggtgcggggtggctgaggttctcgcccagagccttctctagcaggaggattccgagcagatcatgactcagctgcagtcgctgatccctcaggcacgtg

SEQ ID NO: 684208 - DNA, 654 bp, Homo sapiens
  misc_feature (245)..(245): n is a, c, g, or t
gtagagacagggtttcaccttggtggtcaggctggtctccatctgacctcgtgatccgccccccttggcgtctccacgtgctgggatgacaggcgtgagccaccgcgtccagccaaataaacctctctttaaaatacatcacccagcctggggaatccctttgtagcaacacaaaacagactaagacgagacggaaattcatttccctccatttcccacatctagaaaaggctgactttcttcantggtggttgctgtcactcaggcctgctgttgactcctcatatctcactggactgtgactctcctgcctccctctcataaggacaattattattattgttatttgggatggagtctcgctctgtcattcaggctggagtgcagtggcacgatctcggctcgctgcaacctccacctcccgggttcaggcagttctcatgcctcagcctctcgagtggctgggatgacaggcacctgccaccacacctggctaacttttgtattttggtagagatggggtttcaccatgttgacctgaccacaggtgatccgcctgcctcaacctctcaaagtgctgggattacaggtgtgaaccaccgcacctgttccttataaggaccaattgtaattacatgtcaggccacggggacc

SEQ ID NO: 684209 - DNA, 384 bp, Homo sapiens
ttttttttggagacagagtctcacttctgccacccaggcgggagttgcacggccagtgatcacggctcacggcaattctcaacctccggggctcgggtgatcctcccacctcagcctaccaggtagctgggactacgggcacacaccaccacacacagctaactttggtaattttagtagagatagggtttgggcacgttgcccaggcgtggtcgtggaatctccgtgggctcaagttgatccgcccaccttggggtcccaaaggtgcggggattacaggtgtgagccacgtgcgccgtggcttaatttttttgggggtgttttaagtacagatgggagtttcgccatgtgggccaggcgtggtctgaactcctgacctcaagt

SEQ ID NO: 684210 - DNA, 103 bp, Homo sapiens
atgtagaaactggatgcaggtagagcattttggtcaccacagaatgggcatttcacaagacctattagatgatgaccagaattttccacacaactgacaaatg

SEQ ID NO: 684211 - DNA, 144 bp, Homo sapiens
tggacatcacagagagggcacagaggaggacagaggagggcagatctgggcaagggggctaccccatttgagggtcctgcttaggaagacgaggggccagcttcctcccctcctctgtgctgaccacctcctctgtcctgtcca

SEQ ID NO: 684212 - DNA, 102 bp, Homo sapiens
aatagcgtacatgtataatgatgcttcacgatttgtcacggataaggttgcactgctggaaggctagcccaagcagtcactaatggtcccctccatctttgt

SEQ ID NO: 684213 - DNA, 1065 bp, Homo sapiens
gattgctgtgctgagacactggctacgtgcgactgtggggagcggctgcggtgctgggtgctgcgtgatggccgatgctggccgccgcggggggcgggttcccacatgcagcagtgagcgtggttgctcctgaggccagcgagacctgcagacgccatctcctcctatgtggcaactgtgggagcctgagggcccgtgcaaatttttttgtgccaatggcaggagggtctctgggaagcgacgcaggccgcaggaggaggcgcgcaattactcgagagggtgagccgaagggaccgccttcccggaagcggggcagtgagcgacggaaaaggaacatgtgaagtccccggcgcaggtgccgccagccagaggggcgccaaagcaggccggtgggaccaccccggcgcggacaaagtgacccccggggaaccgcaatataaaacagtggagggcgatcaaatggacacccgcaattgaagggaaaaacaccccacggaaatggtggggtacataccgtgcacgaccctaggcacagagctatccagttcgtgcactaatcaaacccgggagccaagaaaccacggtggatgcacacccaggagagccttttttagttccaaagaacattgacatcgggaaggcgcttataaacaaaagtctacacgcaacacgtgattgtgggatatagtgaagcgccgtggccgttcgagaaagaacatgatgaacacacgacgaagtcgaggaacacatacggacaccccaagaacgcaccttacacagtaggttacggaggaaaggaatcgccttaaatgagacttagacaagacggaacgcgaaggaaatatgccaaagcagcggacaccacacagctggcgacgagcatccacgggcgacagatggaatgagggcacgcacgcgcaaggacaagcgcgccgagtggtgagaagattggaccaacagacatcaaaaagaacgccaacagacacaaacggtgggaggcggaacgacgaatagccaagcgaacccgaccgaagaaattcgccacgaaatgtggaagagacagtg

SEQ ID NO: 684214 - DNA, 412 bp, Homo sapiens
  misc_feature (55)..(55): n is a, c, g, or t
  misc_feature (82)..(82): n is a, c, g, or t
gatgaatctgcatatggttgcaggtagagccaaaataatttcctgacggaaaggnagagaagactcaaaagctttggatctnaacaaactcgaaggataaagttgccatcaactaagatggagaagaatgtaaatggatcggctgggcatggtggctctagtttttgacatgtagagtttacaatgtctatgtgaggctgggcatggtgactcaagcctgtaatcccagcactttgggaggccaaggtgggtggatcacctgaggtcaggagttcaagaccagcctggccaacatggcgaaaccccatctccattaaaaatacaaacattagctgggtgtggtggcacccgcctgtggttccaactactcaagaggctgaggcaggagaatcgcttgaacccgggagatgga

SEQ ID NO: 684215 - DNA, 256 bp, Homo sapiens
cgtgcttattaggatgatctagggtaatctttatagatagtatagactcacgtactaaggcatgagcttactggagtctctacagaatactctgggtattcaacaaccacgggctcttcattctatggaattgttcactttataacccccctgacattgatcttatcctgctatatttcacttggctgcttggagtttcaccctatgcagcacagattcctattcaaagcctcatgagtattcttatgccaatccg

SEQ ID NO: 684216 - DNA, 1048 bp, Homo sapiens
  misc_feature (6)..(6): n is a, c, g, or t
  misc_feature (14)..(14): n is a, c, g, or t
  misc_feature (88)..(88): n is a, c, g, or t
  misc_feature (100)..(100): n is a, c, g, or t
  misc_feature (107)..(107): n is a, c, g, or t
  misc_feature (169)..(169): n is a, c, g, or t
  misc_feature (324)..(324): n is a, c, g, or t
  misc_feature (326)..(326): n is a, c, g, or t
  misc_feature (348)..(348): n is a, c, g, or t
  misc_feature (380)..(380): n is a, c, g, or t
cgtttncgactatnattcgaactggtccggaagccccttctgacccccatcggcaccgtccacaccgacctgccttcccagcttcagntccgggacaaancccagcngcacagcaaaaaccaggcgttgaactccaccaacggggagctgaatgcggacgaccccacgnccggccactccaacgccccgatcacagcgcctgccagaggtggaggtggccggatgaaaccaaatgctgctgtttcttcaagaggagaaagagaaaatgctgcagcgacacaagtgaccctgggcgcgtgcagccccctgaatcttctccgtgcnanccttggggcgcgaccttgtgcngagcctcggggcccacccacgagcgcccaggncagacgcctgctggaagccagaacgcagactgcgagggcctggcctggctcaggcggccccgacccccgggacgtggggtcacttccttcatgtaagactttggccgaaatttctacacctgtgtctagtcctcccctccaagagcattaactatttaaaacaaggaaaagaggaaaaaaaaaacagaggcccgcccttaccccactccttgccccatccgtttctttgctgaagtgagtagtgtgatcctggaggccccgcgcggcgtgacagcggcccgaacagccggccaaggttacgtatgtaaggtccgagcattgtctccctcgatccagaggccgtttgctcgacggcgagggcagcccggccgggatggggtgctgtggagctgtcttgccaggccctcctgggagggggacaggcattgttgccaggggtgacggctgttgcccaggtctccccgaaaccaaaaggggaccgagcagaggagtaggaggacagtgagatgaagccggatcccccgaaacaagaatgctgcaccacaagctcgggcgccgctgggcacggctgctgccagctcttcccacctggccctggcacggggcggtggggcgccaggcggatgctctcgagccttgtccggaggcggcccgggctgaccgagtgg

SEQ ID NO: 684217 - DNA, 763 bp, Homo sapiens
ttgggtgaggaagcacggattcgccaatgtgtcgactttgggacccagtttcgaggattttcactgtgttcgccgccgttgcggatggagtacggcggctagccaacttcgtcatgaacgagccaccgtttagtggctgcccacgaccgcagcgattcgttgtagtcctggggagtgcaggatccacgtttctctgaccaagtggtaggagcttgcgagagcacagttcgccccgttgatgtgagggacagtagctaggcatgatggaatgactccagtgctgatctccctatcatgccacaccggtacctcaccccctagtcactcatatacggagcctgagacatggcctccaggatgaggatgggcggtggcaatgacaccctgcaggggaaaggactagccccgccatgcacacatatgacaggcgatggatgccgccaccatgagctaggtgcgagtaactcggtttttcttgggtggtctgatgacatggatgcagcacagactcagccttggctctggagcacatgcttactgcgtggcctcagtttaccttccccagatcctagattctggatgtgaggaagagatccctcttcagaaggggctggccttctgagcagcagaattagttccaacgcaggtggcccccgaaccacatgcctcacttttctgtgccttcctgagggggttgggaccggggaggaaacccaaccctctcctgtgtgttctgttatattacgaccgagtgcatagcacc

SEQ ID NO: 684218 - DNA, 119 bp, Homo sapiens
actctctccggatgcgacatttggctgccgccatcttattacctttcccttcggattctcctatactcttcttcttactggagatcactgttaccacacttgcccctcctgaccaatgc

SEQ ID NO: 684219 - DNA, 617 bp, Homo sapiens
agcattcctgaagctgactgaattcggaccgagacggctcgctccgtggcctaacctgtgctcgagctactctcgctttctggcctgtaggctatccagcgcactccaaagattcaggtttactcacgtgatccagccatgaacggaaggccaaatttcctgaattgctatgaccctgggtttaatccatccgacattgaactggccttactgaagaatggctagggaattgaggactacactgaattcacccccactgaacaagatgagtatgcctgccgtgtgaaccatgtgactttgccacagcccatgatagttaactgggaccgagacagtgaagcagcatcatggagcgtagaagatgccgcattcggattgtacgaattccaaattctgctagcttgctttttaatactgacatgcttatacacttacactttatgcaccttgcgagttatagcaatgtgaacatggacaggatctcgtttagtaacctactttgagagctgactccatgttggatgcatctgagcagcttgctgcacagcgagctctaggaggcctggacacttatagccggcagcacagacttctcttatccaccatgcatgttgacc

SEQ ID NO: 684220 - DNA, 190 bp, Homo sapiens
  misc_feature (2)..(2): n is a, c, g, or t
  misc_feature (131)..(131): n is a, c, g, or t
gnggcgtcgagggtagtgacccgtccgtactggtgttattaccagattccccgaccaactccagcagcggcaggacagccggccgcttcccgagaggttccggctcgtacccgtccagatcctcttggggngacatgatgcgtcagcgccgggcttccatctcctcaagcggcgcgcggcggggggcgcg

SEQ ID NO: 684221 - DNA, 129 bp, Homo sapiens
ctgggtaacatggccagaccccatctctatttatatatatatatataaaaccttagggggtttttatcttcccctaaaagaggccgttatatttgcagcagccttaaatttctttttaaggggattggg

SEQ ID NO: 684222 - DNA, 451 bp, Homo sapiens
tcaccgtgtcccaagagaccctctgttgacaagtacaacgtgagcggcaccaatgggacctgcctgcttgccagcattgtgtgctgcagctgaacctcacctattagaggaatgacaacacgaccgtgtgacaatgcttctcaacatcaaacccaacaagaactcgtgccagcgggagctgtggtgcccacctggtgactctggagcttgcacagtgagggcaccacctgccctgctcttccagttcgggatgaatgcaagttctagccggtttttcctacaaggaatccagttgaatacaattcttcctgacgccagagaaccttgctttaaagcttgcaaagggtccctgcgagcgcttgaggccacagtcgtgcaattcctacaagttgcaacgcggagtgagcacgtccgtgtcacgaagtgcgttttcagtcaatatattccaagt

SEQ ID NO: 684223 - DNA, 453 bp, Homo sapiens
cgtctcttagaggatcccctttgatgcccctgactgccgtcctgtgctgggagagggactgagagcagacgcttcgcggaggccccgagcgacatccgagccactgtgcatctctccaggtgtggtggacgcacactcttcgccttcaacctccacgacaatgaccctgtagaaggcagttgccacctataagtcaataacgtgtctcaaaccccgaggactgctgggcccaggctgtgtatctacagtcgctgtaccgtcgtccacatcctcgataggagacatccagatgaggcccacggagcatgtaagctagtgactgtgggagctcctccttccctccccagccttcatggcctgcctcctgcctctggattttaccgtgttgatttctgtgatcacgggataccacttctctgtcacaccccgaccaggtcctagaatatgagtatg

SEQ ID NO: 684224 - DNA, 142 bp, Homo sapiens
ttctgagatccagtgagtcagtcgaatctcaatcatccaaaatgatctccctttattcatgtcacacctaccagatcatattgatataagaagcagggtttccatggtcttggagagctccaactcctctctatttcgcaga

SEQ ID NO: 684225 - DNA, 555 bp, Homo sapiens
tgtggggaaaaggggggagatgatcgaagtaataaaaaagcggtgcgtggtaatcatataattaatcttttttttcttctctttctctgtctctgttaaaaaaaaaagggggggggggggggagtgtgggtggtatgttgtgtgtgtgtgtgcagcaaaaaaaaaataaaaaaaaaaaggagaaaaaaaaaaaacaagaggggggcggcgcgcgccaacataaatacatcatctcgccgcgggggggcgcgccaccagtatgcgcgcgcacccacccccccttgttgtgtgaaagaagggcgcgcgccccacaagaggagaggggcgtgttttcacaaccagaggaggggggcgggcagcgctgttgtatacaacacacgcgcgagagagagagagagagaaaataacagacctccgcgcgcaggagcgagatagtgtgagagagaggagaacagcaccactcgcagcggggagggggggaggagaacaacatacgaggagagaacccaccacccaacaaaaatatatacaccaccgcaccgggggggaaacatt

SEQ ID NO: 684226 - DNA, 111 bp, Homo sapiens
tactcaggaggctgaggtgggatttcatttgagccaggagtatgagtcagcctgggctggataccaagaccccatctcaaacataaattaataaataaaacaggtatacta

SEQ ID NO: 684227 - DNA, 157 bp, Homo sapiens
ggccaagtggaggaagaagcgaatccaaggctgaagcgcaaaagaggaaagatgaggcagaggtccaagtaaaccgctagcttgttgcaccctgggggccccaggggcggaaacatggggttcccaacgttggggattacttggtccaaattttggg

SEQ ID NO: 684228 - DNA, 109 bp, Homo sapiens
gcaaatggaaatatgaaaggcccgatggctccccagtatttattgccttaagatcctctaaaaagaaaagtgtgcagtacgacgatgtaccagattacaagtcagattg

SEQ ID NO: 684229 - DNA, 422 bp, Homo sapiens
  misc_feature (4)..(4): n is a, c, g, or t
  misc_feature (417)..(417): n is a, c, g, or t
  misc_feature (420)..(421): n is a, c, g, or t
caanctggcctagctggtccggacaccttttgtacctagtttttcagggcagacacatatccctgctgttcaagtgagaaccccctgcaactttcccaaagagcctgcctttgtgatatatatcaagaggtctgggcccaggcatggtggctcacacctgtaatccccagcactttgggaggccaaggagggtggatcacttgaggtcaggagtttgagaccgacgtggccaacatggtgaaaccctgtctctactaaaaatacaaaattagctgaacgtagtggagtgcacctataatcccagttacttaggaggctgaggcaggagaattgcttgaacatgtgaggcagaggttgcaatgagccaagaacgtgccactatactccagcctgggggacagagccaaactccatctnaannt

SEQ ID NO: 684230 - DNA, 651 bp, Homo sapiens
  misc_feature (235)..(235): n is a, c, g, or t
  misc_feature (242)..(242): n is a, c, g, or t
agggttatttggtcccaatccagtgtgggacggcaaccagggtttcccccaaaagcaggtgttcttgaccctgcccgggccccgcccgccctaaggtaaggggcatccttgtccacccccaggagactgggagaaaaaaaaagaaatcccgttcgtggttgccttggggacgcacatctgagcgttctccacttggtttttgtaaaaaaaggagagaaggatattcctgggttgnttgatanccaggcgcctccccgccggggccccaaaaaaggtagcagaatccgccaacttttcattttctttaaagaagatgagggccgcccggatgtggtaagaaagccctttaataaagagggtaagaaccctgggccccaggccccccagattcggggttttgttaccccccgggtcctgcggcccaaacgggggggttttgtttttaaaaacccggggccccagaaaaattaaaaagggggcgccgaatttggtttaccttttggcccagagaatgagggggggtaaggaaaggcccccgggcccaattgggaagagacgccgcctttccccttgggggggttttccttttaggtttgaaccccgcccgaaaaaagattttttggggacccaataaaaaaggcccggctttga

SEQ ID NO: 684231 - DNA, 127 bp, Homo sapiens
tgccgggtccagattaattggttctgctcctggtaacgtttgtatatccatggatgacttgcttgcggtaatgacatgaagacagttccatgtcataccttattaaaggtatggagagtcggcttga

SEQ ID NO: 684232 - DNA, 652 bp, Homo sapiens
ctctagtccaagtaaaccaggggcacaatgcactgtggaaagcctgagggacctctgaccttgaaagctggctattattgaaagtttgcgcctatgtgatagtctgaaatatggcctcatgggatgagaaaggtctgacggaccactagacggatacccataaaaggtctgtgctgagggggattaggcaaagaggacagactctggcattggagatagaggaaggccactgcatcctgcctgccactgggaactgaatgactcggataaaacacgattgtacatgtgttcaattctgagatgggagaaaaaccgacctatggtggcaggcgagacatggttacagtaatactgccttgatagtctttactccactgagatgttagggtggagagaaacgtacatttgcttacatgcaggttcagcatagtaccttaccttgaacttgattatgacagagattctaatgctcacatgtttgatgctgaaccttctaatattaaccttgccctcgtactgacatccgtttttgttgaaatattaaagatggaattcagttcacctggtgcttcgagcaggggcccgttcccgaattggccttatagggagtccgtttacaattcacttgccggcgtttaaccgttgtgctggt

SEQ ID NO: 684233 - DNA, 744 bp, Homo sapiens
gaagaggatggttctagctgttttgatgttcaacaagctctttcttcatcagaatcagattcatgcagtagttgcagttcagacatcataagagatcttctataagaagaggaagcctgggaagcatcacataaaaacgatcttcaagacacagaaataagtccaagacagagtgcgccgcacaagagccgctgtaagtgctgagattgagccaagaaacaagcgtaatacgaattaatgtgggcttttgctgacttttcaaatgcattgattagaataccgaacttgtaggttgccacagatagattgtctatttataaatgcccaaggaaagatgctaaattctaaatattacggctagctgatattcattcttttctgctttttcagaggggaaaaatgttacgaaatatgcttacttggtcaggtgcctcctgcctctcatctgtctgtaagaatactgacatttcacacaggtgccagctttgcataggaggtagactctttggcactttggcacatggatttggtttggtttggtttgggttgtaattaaatttcacaatgtccttaggccatactacttctgttacatggagaattcagcctcactatatggaaggcgggatgtcaggtcaatccatggtgtcgagtaaggtccatgcacgccaccccatgcctgtgttcagggtcatgatggtttgcctaggctatggtcctggctgtacacctgcgcttcctttt

SEQ ID NO: 684234 - DNA, 267 bp, Homo sapiens
gttttaggtttttagcagcctgaagccatggtttttggtttgtctctagtgataaggtggaaaacccggatgaggaagggctttactgccaacagaaacagaaactaagcacccacgactgtattcgtaccttggacacccgctctatactctagcccttgagagatactcaaggtctcaaggtctgaatcctgcaacacttgcatgctctctgctatcttctgctagtagcctaacgcgagctactctggatcgactagcgtacta

SEQ ID NO: 684235 - DNA, 657 bp, Homo sapiens
tctgtggtaaaggtcacacgttccaaggataacatctgtgtccctgccccgtgtggttgaccacaaaaggtagtgaggggctgtgcgctttagtgtattttggccccaaagacgcccctttcccaaggccctcgtgatgccccaccaagttaccgatattcaccgttagtgggtcttgtatacgcactgcgtttgtgcaaaagtgccccaatagcgctggggagcactattagaggaatagaccttagaactcttttagattggattagacccagttgggaataatcccattggatagaaatattttagatttttagggaaaattggtttgatatttcttagagtctttattgactatttaggttatagtgagcttgggccaatctgcgttaatactttgagtctagttttcttctccaaaatgaggaccattaggcgtaaatgatttccgagtttcccagctagtcctagagttcttatatttctacaatagttgaattattttatcatgctgttgctggggaatatgactaacccttttgaagctactaattttatgttgagctttataagtccataattgttatcttcagaaaatattatttgacctacagtatgtcccaatccaatttaattaaatcgctttattacagggga

SEQ ID NO: 684236 - DNA, 592 bp, Homo sapiens
  misc_feature (104)..(104): n is a, c, g, or t
  misc_feature (238)..(238): n is a, c, g, or t
  misc_feature (385)..(385): n is a, c, g, or t
  misc_feature (451)..(451): n is a, c, g, or t
  misc_feature (456)..(456): n is a, c, g, or t
  misc_feature (460)..(460): n is a, c, g, or t
  misc_feature (498)..(498): n is a, c, g, or t
  misc_feature (509)..(509): n is a, c, g, or t
  misc_feature (512)..(512): n is a, c, g, or t
agcgcgagagggtgtaagctaagaacgtcttgaagtcttaagttttaaaaatgaagagtgtgtgggaggatgaggggctcaagggtaagattagcgaggctganaagaagaaggtgctggacaagtgtaaagaggttattttgtggttggatgtcaatatcttggttgagaaggacgagtttgagtataagaggaaggagctggagtaggtgtgtaatttattattagtggactgtantagggtgttggtggttttgggtttgggggttttggggcttagggttttaagggagggtttgggttaggccccaccattgaggaggtagattaggggccttttcaagattgctgtttttgttttggaggtttaagactttgcatttcntagtatttctgtttgtcagttctcaatttcctgtgtttgcaatgttgaaattttttggtgaagtantgaanttgntttttttccggtttttacatgcagagatgaatttatantgccattttangantattttttctttttaatacacttaactcaggccattttttaagttggttacttcaaagtaaataaactttaaaattcaaa

SEQ ID NO: 684237 - DNA, 1022 bp, Homo sapiens
ggctcacaataggataaaggtgtaacatatgattacattgatctgctcaggaaatattattgagcagtatactgtgtcctagagcatcacttatagttcttgagtggtgagtagtaaagaatagacagacaaaatagatagtaccctggtggagttgccatgctagtggggacagaataaacaaaatgaatgggcgaaatgtatatagaagtattggaaggaagtacatgctggtgagagataataagcgtgggagggaaacagggagtgctgggggagaaggagctaagagtctcagtaccaggagttaggcaggctgagctggagattagaacgcccagactgcatgcaggggctcatggcctgtgtatcccagtagctttgggaggccgagagtgaggcggatcaccatgaggtcaggaggtatgagagctaccctggtcaaacatggtgaaactccagtctctactaaaagattagcatgaaatgagaaaaaattagtcggggctatgagtgatcgggtaaccgtggtaatccttaatgtgattggaaaaaggttggatccatggtagacatggttttgaaactcggtaaggtagtgagaggtgcaggaaagttgtagatcacgcgcgagaggggaacatgcaaggcctggggacacacgaaaggggaaagctcctggcgatccagatacacgaacaagtggccgaaacaactaatcaataatgggcgctcgcgatggacctgacggactacagagaaatagaccacctcattggtggagcattgaaaaatgaaaacatcctgagcgggaacaagacacgtataaagggtgttcagcggagccaggacaggaagacaggaggaaagggggacaaccccatgtgatcccaccagggaggagtcgcagagaaagcgggacacacgagagagaagaccacggggaggcagggcacagacattagccacacgctgggcggccgcacctgaaataaccgcagtgtactagccgcggagggtga

SEQ ID NO: 684238 - DNA, 391 bp, Homo sapiens
  misc_feature (1)..(1): n is a, c, g, or t
  misc_feature (3)..(5): n is a, c, g, or t
  misc_feature (35)..(35): n is a, c, g, or t
  misc_feature (251)..(251): n is a, c, g, or t
nannngaaaaaaaaaaagggggccacccctgcttnaggatttttgaggtggcggggagacagacaataaaccagcaacgaatgaataaaggccaacgtgcttggtagttgaaaactgctttaacacaactgagctcaggaaaatacacctgtgtagagagtcaaagcgctgaggctaccttccactgggcacaatgggccatttcaacagggacggcgcaatgttggcctcatgcctgactgccacacacnctcagaatcaggtgtctgaaaagtggcagtgacgaaagaagagactctccccgccgaagccccagtgcatggaaagaaggaagaaaacaaactcctaaatggcaccataaacatcagaaggaagggttctagtgtgccta

SEQ ID NO: 684239 - DNA, 634 bp, Homo sapiens
ggctctcggatgcaggagcctgggcccaaacagcagcttccggagtcggaaggagctgaggaagaagactgactgaaggagcttgcgaattttccgcctcgagaaccggacccagcagcaagcaggacgggcggcgctctgctactggtcccgttaagccagagtagcccaagccctgaagtcactgctcatccggaatggaaatcccgccgaccaagtacccagcctccaggcggccttggtggcacagaactactatcaactaccagcaggggaccccgcacaggctgtcgaggtgcagcaaggtcaaacaagccagcatggaaggatatccaggaagaggcacataagtatcaccttacattcgctgttgacagcaaattatccacaacaccagagttaacggttgaactgtgcaacagcctgaagtactttacccttcaacgggacaagaaattgcaccagaagtcaacttcacatttgacaggagaaactgggacaagaatccagatgaccgaagcaaacacattttatcagagactaagtccatgagggcccgctagaagcacacaatatccacgacattcgggactgttctccagaatggcgccgtccacattagccggttgctggc

SEQ ID NO: 684240 - DNA, 458 bp, Homo sapiens
taggtttgagggggaatgctggaaattgtaatgggtttggaaacttgtcatataagtaatgctagggtgagtggtaggaattttttacataaggaggtgtataaagtggggtcgtacgcgagaatcggggggtatagcttgtcagaatttcataaagaacagggatggttaagaagtagggtctgtggtgacaaaatatgtttgtgtaagagtacaagggagaaatctcgcgtcatatgttgtacctagagaaaaatgtgtaaggtcggaagaaggggatggttcgacttaactaactaccctcgctcaggccgatataaccgcgcatattcgacacgactatacgcgcgccgaactgttgccccctcacgagcgatcattccaaattgttacgacacgcgctcgcacattacattcggaaagcaccccgttccggccaaggctccaaaaggaggaac

SEQ ID NO: 684241 - DNA, 868 bp, Homo sapiens
  misc_feature (32)..(32): n is a, c, g, or t
  misc_feature (39)..(39): n is a, c, g, or t
  misc_feature (49)..(49): n is a, c, g, or t
  misc_feature (77)..(77): n is a, c, g, or t
  misc_feature (124)..(124): n is a, c, g, or t
  misc_feature (142)..(142): n is a, c, g, or t
gtatcccaaatctatgcatcaactgcacgtgntacctantgagacactnatatgccaaagatgactatgagcttatngacgtgctggtaaacaatgccaaaactcatggagatacaagagcatnggaactgaatcagagatngtcctcacaataacattggattattttatagtaaggaagcaaagaaaaagctgtaagaatgaagcaatgaatcaagacttctacccaaaacaacatttttttaaactatatttattccttttctaaaggaatctagagaagttgaagtttttaagttaggaatgcaattttctgttaactccaaacctgattttaatctgaaaaaaaaaaatttaatttgggaaaaccagaatgaaaggaaaaccattattgcctgtggttgcttaacattatttgtaaaccattattttctgcatcttgcatggtgcacaatagaatatcttttactgtaatcccttacaataaagccttaatagccattttctatgtaatatgcaaaagtagattagcacaatgcacaattttcttttgttaaaaatcaaattcaaagatttaattcttgctatgaattctaaagttcggcaaaccaattcatcataaaatccaaataatcttgtaacctatttatctagtgattcatctccaattctgttgaaaaagcataatataaatgttgatgagactagactctaatggatatgtttatataattccaaacactcaggtgtgtgaatgcatttaaaaacattaatggaaaataatgctgataatatttaattgatcatgcaattccttcaattatgatggaaagacttgaactttctgaaataaaacaaaaatacagca

SEQ ID NO: 684242 - DNA, 151 bp, Homo sapiens
  misc_feature (90)..(90): n is a, c, g, or t
ctagaggactcggtcatcccctcgttctggtctcttctgttctttccctatttggaaaaattctggaaaaggaaagaagggatggagaanactgggaccagggatcccaaattctctagaacagaaactctaggggggagaaagagaatga

SEQ ID NO: 684243 - DNA, 914 bp, Homo sapiens
  misc_feature (32)..(32): n is a, c, g, or t
  misc_feature (39)..(39): n is a, c, g, or t
  misc_feature (49)..(49): n is a, c, g, or t
  misc_feature (77)..(77): n is a, c, g, or t
  misc_feature (124)..(124): n is a, c, g, or t
  misc_feature (142)..(142): n is a, c, g, or t
gtatcccaaatctatgcatcaactgcacgtgntacctantgagacactnatatgccaaagatgactatgagcttatngacgtgctggtaaacaatgccaaaactcatggagatacaagagcatnggaactgaatcagagatngtcctcacaataacattggattattttatagtaaggaagcaaagaaaaagctgtaagaatgaagcaatgaatcaagacttctacccaaaacaacatttttttaaactatatttattccttttctaaaggaatctagagaagttgaagtttttaagttaggaatgcaattttctgttaactccaaacctgattttaatctgaaaaaaaaaaatttaatttgggaaaaccagaatgaaaggaaaaccattattgcctgtggttgcttaacattatttgtaaaccattattttctgcatcttgcatggtgcacaatagaatatcttttactgtaatcccttacaataaagccttaatagccattttctatgtaatatgcaaaagtagattagcacaatgcacaattttcttttgttaaaaatcaaattcaaagatttaattcttgctatgaattctaaagttcggcaaaccaattcatcataaaatccaaataatcttgtaacctatttatctagtgattcatctccaattctgttgaaaaagcataatataaatgttgatgagactagactctaatggatatgtttatataattccaaacactcaggtgtgtgaatgcatttaaaaacattaatggaaaataatgctgataatatttaattgatcatgcaattccttcaattatgatggaaagacttgaactttctgaaataaaacaaaaatacagcaaaagtagtagtcgacacaaaagtcgacgcgggcgagaattaggtgg

SEQ ID NO: 684244 - DNA, 234 bp, Homo sapiens
  misc_feature (11)..(11): n is a, c, g, or t
  misc_feature (44)..(44): n is a, c, g, or t
  misc_feature (94)..(94): n is a, c, g, or t
  misc_feature (119)..(119): n is a, c, g, or t
  misc_feature (138)..(138): n is a, c, g, or t
ccctatcccanacctgcctgtcacgttccctcccctttccccancgcactgttgagggcagcctctccagctctcttgtttatgcaaagccgancgcctgggaggctcggtaggaggantcttccagggcccgcccgnccctgtgggtccgccctccccccgcggggctccctggggctgtggccgaaaggtttctgatctccgtgtgtgcatttgactgtgctgggttggaat

SEQ ID NO: 684245 - DNA, 415 bp, Homo sapiens
caggtttcattgcctgattcagggtgtcttgattagcacacaccgtgcttggttctaatatgccatctgctgttctccgttggctctctccccccaccgttttgggtaacgaaacagaggaacaggctctctgaccgttcctcacggcaggttaatgggcacctgtgttctgatttattgcgctcgctgccttccctggccccgtgttaggtagggaaatcggcacggaaggtggcacggcaggagtgacctttcgctaatcaccacacctcagttactactggcgcagctcattagaagaaggaatccttcaacgagctggctttcaaatacagtcacactttgattttctccagaacaaagattccactttcacataaaagcttctgatgcatgattctgtcaactggggcac

SEQ ID NO: 684246 - DNA, 199 bp, Homo sapiens
agacaaaactaacaaaaactgagatcaacacttctgtcctaacatatgtgtgaatgtagtacgggcgggactaagtcattttacacatgcttagggatattttcacttattgacacctaataaaggcagcaagtctgaaactaacaaataatcattaatgtttctccagacacactctactctcccccttcctcccccc

SEQ ID NO: 684247 - DNA, 883 bp, Homo sapiens
gagcctagatggagcggatcagtctccagcgccgggtcccgggagggccagtgggtgtggatggcctgttgcgcagtttgccgttagggctaagcgttatgaaaggacatgaacacctggcacaggatcaacaggaaggtcgcgcgattgctgtattcaaagtacacgtagctagtacgagaattaaaatgtctcatcattgaggctgaccgtgcctagctcgtgcgtgtgtcaccttcggtctcatgggctgccggaaatgagagttgtcacattcttgaatactctttttggatgccaacggacattatgtcctcagaatgccacgtttcttatgtatggggcttatgattatgatacttgatttcatgtcgactacgacaattgaatgactgagtggggagtttaccctgtggggtggtagtgtggtgttaggttgaacgtgtagtgctccaatgtagccgttgtctagggtgaacatggtttctttactggagtatcttattctcggggtgacgagtagctggtctatttcgtacacataatgcctcggggttcaatctggtggtggtttatgggtccacttatatggaatttgatgggtagatatacgcgatcgttctagggagggttttaaacgagagcacatatttacaaaaattgagacgggttgaaccctttggtttgaatgaccgagtcgaggagaattgacttgcaatcgtgatggtccagggatgacgtttgataacttgttgtgggtgttgatgataggatgggccggcgctaataggtctattctatagcatattctggtcccaagaagggaaagggaggcgaaaggggaaaaatggagaagatattggtctggagtcacacaaagggg

SEQ ID NO: 684248 - DNA, 622 bp, Homo sapiens
tcctttactgccatcttgcgtccccgcgtgtgtgcgcctaatctcaggtggtccacccgagaccccttgagcaccaaccctagtcccccgcgcggtcccttattcgcgtccgacaatgatgaatagaaacaatcgatgaaccaggaaaagactcgccgaactgctaggcacaagtgcgcattgtgtgggaaaggaactgctcgcagaaagaagaaggtggttcatagaacagaccactagcatgatgcacaagagaatacttcagtgctccttcaaagaagttaggggtcaacaatcatctctggtattagagagaggtgaatagtgtttagcaagaccataggacagcagtgatccactttatagaaccctaacgttcaggcatctctggcagtgaagactttcaccattacaggccatgctgagacaaagcagctgacagaaatgctacccagcatcttaaaccagcttggtgcggactagtctgactagtttaaggagactggccgtggctctgcacaaacaatctgtggatggaaaagcaccattgctactggacgaggatgatgatgatgaagttccatgatcttgtggagaacttttgatgagcgttccagaatga

SEQ ID NO: 684249 - DNA, 651 bp, Homo sapiens
  misc_feature (78)..(78): n is a, c, g, or t
ggacccctagttccctggtattcttcaaccccggccccacccagggagcgggggggggcggcccggtgtggcgccttnttttttcctctcccaggacagcgccccccagggtaatctgccccttgctgaatcagttccccctccttgaaaggaaaggagcaaaacggccttttgggatcccagggtggatgaaaaggtgaaaaaatcaggggattaaggacttgggtgggtgggcatctctcaggagccccatctccgggcgtgtctacctcctgggcagggttttgggaccctctgtgggtgacgcacaccctgggatggggctagtaaagccttcaggcgccttcgggcgtggactctggcgccctctagtggacaggagaaggaaccccttccaggaacctgtggactaggggggcagggacttccctttgcaagggggaacagacccctggaaaaccctgtccctttcagagctcggtggctcccagcgtgtcctgccccggtttgcggacgaaagaaatcccggccccccagcatccccccctcccctgcagggtggggggtgggcatgctgcctcttaaccctttgtatttattccccccccttttgcagggccccgggcgggctgaaattaaagattttttaga

SEQ ID NO: 684250 - DNA, 1038 bp, Homo sapiens
caacctcctactcctcattgtacccattctaatcgcaacggcattcctaatgttatcgaacgaggaaaattcgtaggctatatacaactacgcgaagggcccaaacgtgtaggcccctacgggctactactaacccttcgctgacgccataaaatcgtcaccagagagcccctaaaacccgtcagatctaccatcaccctctacatcaccggcccgaacttagctctcacccaatcgctcttctactaatgaaaccccgcttactgtatacaccaaatccccggggatcgatccctcaggcataagggcgtaccataatttaattcgagccagcgtgataggcctggtcggtcaacgtccaagacactcttgagtccacgggtgatgcatctgctcaaggatacgtcttgatcggcgtgttagtagaagtagaatccaaagcgcgataatgaagtagcgctagtacagaataatactagtagagagagtaataagtggaatcactctcatagtacggacataacatatgatagaaaacaaaagaagaaacgtcgtgtatagctcatgacaataatgaactatgaatatcatatgtataatttgaaaatcactcagcagacgaatgacgcaaactattagactattggaagaaggagagtcagaataagtcacatgatacatattcgatttgggatgaaggggcctagataaaacatttgaagtgcgaattaacaagccttattttaagagaagcatagagtaataatagtcctagtgaaactataggacatggccctggggacggtaaaatagtgggcctggcaattttaccggcggcgaaaaataagtgagaaccggtaggaggaggtgcaacgacattaaagtggcacacggaagagaataagggtcatacaagagacgaatagcccagacaagagaaaaaaacaaaacacgagggggataacaggagacagaaagtaagataaacagatagagatatggaggaacaagacaggaaaaaataatagggagttggga

SEQ ID NO: 684251 - DNA, 679 bp, Homo sapiens
ccagtcaaaggccttgggtgagcccatttagggtttaacccgtaccattttggttgaaaactgtggggtgccactttttaaaatgggctcaaccaaaaaccccagttaaggcacctggcaagagtccaagtaggtgctttcggtacgtcccctagagccctgtgaaataagtgccctatatgtatgtcccaattgtaaatatatctacccgagtctagacgagcatttttttgtataattggatctcctaaccctgtcatcccaagataaagtgtatcgcttcttaaaaaaagacagtgtattagcaaataaagcagcatgcaaagtccactttttaatatctcgttctgtcactttttatcataaaagatggcgatatcactccttccggcgcccatgtatgtcagtaccccatgtatctgcgctaagtatataggaattggtttcacgcgtgaggcaattagacgctttgcaagatggcataacctgtctcccctggacttaagcgtctgtgtctaattcacagtgctcttttgtcctccctgtatgcaggttccttcccagaggagcctccagttctcatgggtggcagtcagtctctcttctctccagcttgagtatacatcttttctggaccagttatttcttccaagcactaatgtctaaaggcagttttcta

SEQ ID NO: 684252 - DNA, 142 bp, Homo sapiens
gggtacgctgcctcgctgcccctcagtatacatacttaagtgattgcaatctagtgactccagtggaagtcttcatctctgactcgcttagagtagatgacacgtttggcatctatcaatcctgtgatactccccaaggagt

SEQ ID NO: 684253 - DNA, 311 bp, Homo sapiens
  misc_feature (96)..(96): n is a, c, g, or t
agcgttcagggtgggagagcttatcacaggcctcgaaatgtttctgtgtgtctctttgtcttgcttatctggaagggagagttttgtgtctgttcnccatacatcttcctgcaactgcaggcatagcccccacgtctgcttttagctttcctatcttggtgcacctaaagggaaacgaatgtgcttattaggacccactgttctactggggcacatggtatgagtgtgaagtttggtgcttacccaagagactttcccctctctgtctgtgcccagctgtgttatctgtgttttactatctgcactagttc

SEQ ID NO: 684254 - DNA, 167 bp, Homo sapiens
ggtccgccggggcttcgagttgccctcatttacataaatattactagcatttgccatctcacttctgaggaatactagtatatcgctcacacctcatatcccccctagtatgcctagaaggagtaatagtatcgctgttcattatagcaagtcgaaagccccaagcg

SEQ ID NO: 684255 - DNA, 327 bp, Homo sapiens
aaaaaaagggtttttttttgggcggggccttctttttccttttttggccccaaaattttccttcccaaaaaaaagtttttttcaaaaaccgttttttttccaactttcccttttttttgggggtcacaatggggccttccttaaagggggggggggcccccggcggggtcctttgggccttccccaaagtccagggggatttttggaatggggggattgggcccaaaaaggtttagggggccccctttccccaaaggatcccccccccccccttggggggggggggcccaaaaaaaaccccccccaaaaaagggttttttttcccca

SEQ ID NO: 684256 - DNA, 118 bp, Homo sapiens
atccacgcatggtcggagagtatgcctagcaggcaccttcagagagttacaggacatggctgaaccccccaccctggaccagtaaaggtagcttgcacgaagctactgtcgtgctctc

SEQ ID NO: 684257 - DNA, 571 bp, Homo sapiens
gaattcggcacgagggcaataaatacttttttcacaaggcgaaaatccaagagatggatgcagccagcgtaattaattgcacccagttacaggagatcagcaagtttgtgagattcacatgctgctgtaccatatggttgcccagtgggcgaaaaatttgattaatgttttgaagtagatttttttcagcaaatattgcagccccagatgaggtgggggttgtcccccccttttactttctagtattgttagacttagctgaaggaaacaatcctctgatttaaagcttaataatactgtgattcagtgaaaacttaacatgcgataaaaattacatttctctcatctcttgtggatacagaaaaataatacatgatgtcttcgtttgtaattaaggaaaatgtgatcgttggattctaaaacttgattcttgatttttttttcccctaagaaatggaactgtggttttcactgatgcacttttggtatgatttataagtagtatatttgggcagactcttcatactcaaagcagtaaaaaataaaataaaataaaatacaatgaaaaaaa

SEQ ID NO: 684258 - DNA, 204 bp, Homo sapiens
atttcactcttactctcttatcttctctctctttctctctctctcttttctgtcttactcttctcttcttcttttcttattctttatctttattcttacaggatcttaccctgtcacccaggctagagtacagtggcacattcacagctcactgcagcctcaacctcctgggctcaagcaatcctccttgtctcagcctaccat

SEQ ID NO: 684259 - DNA, 503 bp, Homo sapiens
tttctttcttaggacaatggactcctcctacaagtatatggttccgaccatggccaaggataaggtggtatagtgtctcaccgtgcagtgctgtgtaatcctcctatagacagaatagaacatgacgtttcctggtagtggatatatattttctcacaagtcgctctcgcctagtagtaccactttaggtgtatctctcgtaccaggtactctccccatccactggggagtgattatacggactgcgcaagaacttatagcctcgatatttaaacagacgtacatgattccattttcctatgtagctgtaccacccacctcgtattattgcaaattgacccattttgcgtgccacgtcatctagggactctcgactctggtttcagacatgattgtggcgcgcggggacaaaaacaaaaaacatgccaaatgagcacacaagagagacaagaacaacaataaaacacaaagagaaacaaagaaaaacaaagacagagaagaca

SEQ ID NO: 684260 - DNA, 605 bp, Homo sapiens
tgctttacagaagctttttagttgaattaagtcccatctatttatctttgtttttgttgcatttgcttttgggttcttggtcatgaagtctttgtgtaagccattgtctcaaagggtttttctgatgttatcttctagaatttttatggtttcagtcttagatttaagtgtttgatccatcttgagttgatttttgtttaagatgagagatgaggatccagtttcattctcctacatgtggcttgccaattatcccagcaccatttgttaaataaggtgtcctttccccactttatctttttgtttgctttgttgaagatcagttggctgtaagtatttgactttatttttgggttctttattctgttccattggtctatgtgcttatttttataccagtaccatgctgttttggtgactatggcctggtagtatagtttgaagttgggtaatgtgattcctccagatttgttctttttgcttaagtcttgctttggttatgtgggcagttttttggttccatatgaattttaggattttttttctagttctgtgaagaatgatggtggtgttttgatgggaattgcattgaatttgtagaattg

SEQ ID NO: 684261 - DNA, 363 bp, Homo sapiens
  misc_feature (296)..(296): n is a, c, g, or t
  misc_feature (324)..(324): n is a, c, g, or t
aatagagtctcattcttgtcacccagactggagtgcgatggcacgatcttggctcactgcaaccctccctcccgggttccagcgattctcctgcctcagcctcccaagtagctgggattacaggcgcacgccaccatgcccagctaatttttgtatttttagtagatgtggggtttcaccatgttggccagactggtctcggactcctgacctcaggcgatccgcctgtctaagccttccaaagtgctggggattactggcaggaaccaccaggcccagccaaccagcatttcttnaaggtggaaaatacatggtgttaatttnataattttgagtgtagacccagttccagctgctataact

SEQ ID NO: 684262 - DNA, 420 bp, Homo sapiens
  misc_feature (15)..(15): n is a, c, g, or t
  misc_feature (23)..(23): n is a, c, g, or t
  misc_feature (42)..(42): n is a, c, g, or t
ctcgtatccccctgnccctgttnaccaattctccctttcctnattgttcctcataatttgtccctgccttaaaactccctaggttcctaagggacaccccctgcattgcttgccctttccctttgcctagacacccagagagaggctaaaaagtgaaatgtgcccctggtgcagtggctcatgcctgtaatccccaacactttgggaggccaaggcaggcagatcacttgaggtcaggagttcaaggccagcttggacaacacgacggaatcctgtctctactaaaaatacagaaattagccaggcatgatgacccatgcctgtagtcccaactacttgggaggtaggaggatgcttgagcccgggaggtcaaggctgcagtgagctgagattgtaccagtactccagtctgggtgacaa

SEQ ID NO: 684263 - DNA, 381 bp, Homo sapiens
taagcattatattcaggatatactgtatatggacattattctcataattttatgggttccttcatagttagaaccaaataacttattcactcatctccttcaaaatagctcatatgcaagttgacacttcttaatgatactgagataatcctctaatgatattatcccaaatcctcattaccaatctcagggcatggacaacatctaaaacatttcaattcatcatcaattcacccaagcacaatcaaattcgttttcatcaggtcgttattcttattctcagtctatttatttttttcaaaacatcaaactatttatcttccagcaatcagtttattttcttttttctttggagcacaagggtcttggcattcaattggc

SEQ ID NO: 684264 - DNA, 129 bp, Homo sapiens
aaattactatcgataattataatacaaaggtccattcagtgcagcatatacataatgtaatttagtctaacacagttgaccctatttatttggacacttccatttgtttaaaacatacacattggaaaa

SEQ ID NO: 684265 - DNA, 288 bp, Homo sapiens
gcctgtttcaccccggggccaagtgggggcttcccttttggtttcctcccggggtccccaatgttttaaggggggggcccccttttgggtcccttcttttgccttcccttgaagccccccacgccaaacattgaatgtcccttgggcctgccgcctgggtcccccttggggccggggtttgactcaattcggctcttttaaggttaaaatttcgggcaaaatcccaggttggggttttgtttttacccttgtaagggttgcattcccaataaagcattaaaagtttta

SEQ ID NO: 684266 - DNA, 349 bp, Homo sapiens
  misc_feature (25)..(25): n is a, c, g, or t
  misc_feature (40)..(40): n is a, c, g, or t
  misc_feature (196)..(196): n is a, c, g, or t
  misc_feature (201)..(201): n is a, c, g, or t
  misc_feature (304)..(304): n is a, c, g, or t
  misc_feature (313)..(313): n is a, c, g, or t
ggccgcgtcggatacgggctgcaanaagacgacagaaganccccttctggggcctggagccagctctaaaaacataatcatatggaattattggaagatggtggagagtaaggcttgttcagtctaggagagtttagacaataccttcacctctgggaagaaccctggctaggtatgtggaggaactctagcaganggaanggggccccctgggcagatggggtttccctccaggatggggcatttggcagttgcctgggggctccttctactgggccatacccacttgccctggacagtgtcnaaggctgantgttggtggggtggtcaaccatctctttctgggggg

SEQ ID NO: 684267 - DNA, 314 bp, Homo sapiens
actacgtcgcatatgtttattctacatggtatagctattcatttatccacaaacaatatcactactatatgccaaatgcaggatactatgaatgagtgtaacaaaattcccatctatctggagcttacacccttatgggaagaaagagtatatatacattaaaaccagctgagatattttcgggtcgctgataagacctatgaagaatataagagatttacaagctgcaagagtgaaggagttgagtaggacgctgctttcatgagaaagggcagtagaatgtgctttacgttatataatatgctacagatagt

SEQ ID NO: 684268 - DNA, 613 bp, Homo sapiens
  misc_feature (102)..(102): n is a, c, g, or t
  misc_feature (432)..(432): n is a, c, g, or t
  misc_feature (459)..(459): n is a, c, g, or t
gtggtctgaggctgcgtgtctcaccggttgaggatcgtcgagaatatgtccggggctgaggtacttcgttggcatgatagtactgggcatcgcgtagggcancgacacgccctgtgtgacactattcgcgctctagcgcatgagaaggtgaactcgtgcaatacgtgctactccgatagggcgcactcggacataaatgctcacgttgtacagcccattcgctcgtagcctgttggatggggctccgtcgcgaaagctagattaattctcgtttaccccaagcaactatgaacatgcgggaatccgcaaaattaccattgtggaaaccaaaaaaggggcaactccggttttttgggttcaaagagacgcatttggcacgttcgtacacaaaggaattgttcatcatcacatgattgtggttgggtaagaggnctggtggtatcctgttggagctgatgntggaaatactggttgcatgactacaaacgtgcggatactgtgtatgtgatgcatgctgtagaactgcgagtattggaaacgttgtatcataccgcagacgagggttaaagaaacaaaagggtttcctttggggaattcccgtttaatttccaat

SEQ ID NO: 684269 - DNA, 800 bp, Homo sapiens
  misc_feature (800)..(800): n is a, c, g, or t
ggactggaagcggtggctgctaagctcgcggggctcaaggacgagctgctgtgctccatctgcctgagcatctaccaggacccgtgtgagcctgtggctgcgagcactacttctgccgccgctgcatcacggagcactgggtgcggcagggaggcgcagggcgccctgctgactgccccgagtgcctggcgcactgttcgccgagcccgccgctggctgcccagcctcaagctggccaacatcgtggagctggctacagctccttcccgctggactgccatcctcaactgctggccgccgtgcctgcgcgaccctgccaaggcgcacgagaagggtcaatgctcttctgcctcactgggagccctgctgctgcttctctcgctatccttacttgcagacagagccttgcacttgcgacggacgcaggcatcatgtgtcacctggcatcgacgactgccttcgacgacgcttgcaggacgggaggctgaatggaaccaaacttcacgggcccttcaaagaccagctggaggcgggggaaacaacatcctgaagacgcgcttgccacgccttgactccacagggcggagcgaaaaccttgggctgcagaaggaacgcacaaggttcgtttccccgccacagggaagacccttggccgcggacccaccttattcggggcgaaggggccctatcagacagccgggccttggccacccggccttgcttgccgtttgacactgcccccgaaacgtgcccagtgctagaaggcgacggcctgggagggctcggaccactggcccggn

SEQ ID NO: 684270 - DNA, 418 bp, Homo sapiens
  misc_feature (18)..(18): n is a, c, g, or t
  misc_feature (373)..(373): n is a, c, g, or t
  misc_feature (399)..(399): n is a, c, g, or t
cacatgtgggcatattcntttccataccttcttgtctgttttaacaagctaaccccagtcacagtagcagagagagggtccatcctaacttagctgaccaggctggattcctaatcataaaaccaaaaaaggaagaacctaaccatttctctctttcagctatgtgttccaagattactgaagcaggattctggccttcctgataagaacatgaccagatccagctggtttgcaacaagatgaacttcagtgctgagctttcaccaagtttttctcactacaatctcattgtaatactaaaatctccacccaagatggaggttatctgccattttctgtacatgtgttaccagaaaggggtcctgatccaggnccccaaaagagggttcttgggatctngacggcaacagagagttcg

SEQ ID NO: 684271 - DNA, 156 bp, Homo sapiens
ctactggacattctcctgaaagaaccaacttcttcttcctgttttaagaagaagttggttctttcacgagaaggtccaggtttcccgacggtccagcgtatgccagtatggtccaggtatgccagaaggtccaggttgccagaaggtccaggtatg

SEQ ID NO: 684272 - DNA, 120 bp, Homo sapiens
atgactccagtcgacgggcgcctgcctggatgcggacactgcacaccaccgcgtcaactggctgtcacctcatcccccagacgctgagtccacctcaagcgcaccgtgtgatgaatatcg

SEQ ID NO: 684273 - DNA, 172 bp, Homo sapiens
cacacaagcgctagtggctcataaggagtacctacttgggccattgtccacagcagaatgtgatgcttgggacagcggccttaatcctctggtatgtaatgtatatctaggtatgttctatacataggaacattgaagtcgactactccataacgacccgtcttccctatta

SEQ ID NO: 684274 - DNA, 491 bp, Homo sapiens
caacatgagacttcaaatttgccctcgtgtggaaaagagatcttggaaaatccactcttgaattgacacacatcatttgcacttacagtccattggctagaactagtcatgtggctcaaacctaacctcagggaggctgggagaaataaaggagggcatgtaattctctgtggatatcactctcattatcacatttgctccatcccttgtcagacattaaatcaacaaacactttgaaaattgcaatgttaaaaaaaaaaaaagaaagaaaaaacatttctcaatcctgtcacctcattaagttaaaatccctagttattccctttattgcagtgctgctcctcataagagacaagtccagacaatctttctctccttgctctatctctatacgctgctgaatcctatggactggacttatctgacttctaccttcaaatctaaagaatatgattgttgaagatttacaagactttttatatttaaaaaaa

SEQ ID NO: 684275 - DNA, 303 bp, Homo sapiens
gccccaaccctgtggtccctctccccaattttgtaaccctgtaccaggtggtgactgtttaactctttggggtctgtgctcaaaagactgccttctccagtgcccagggtatgagtgtgtgccctgtgcccttgtccctccctccccccatgttggaggtagcccttttcctcgcccccctgggagggacccatccttttcccttgctttcctggggacccctaaacccaactctgttgttgtgaaaaatccagtgaaaaattttgccgaaaaataaaccggaaccaattcccccaaatccca

SEQ ID NO: 684276 - DNA, 212 bp, Homo sapiens
gagagatccgtcctggaagattggactctccgtgtcttagtttaggctgtacttcccatctctcgtgcctaccgtcccacatgctcacacattgtacctttcaaatcctttcagcattttgggaagcccaggcgggcagattacctgaggtctggagtgtgagaccagtctggccaacatagcgaaaccctgtctctactaaaaatacaaaa

SEQ ID NO: 684277 - DNA, 191 bp, Homo sapiens
tgctgggattacaggcatgagccaccgtgcctggccccgttagttccaactttaagtcatttccttgctccctgtatcgattcataggctgttataagcagccaggccacatcttaactgcttcactgcttagaaatttcttctaccagaaacctgtgttatcactcttaagttcaaacttccatagatcc

SEQ ID NO: 684278 - DNA, 694 bp, Homo sapiens
  misc_feature (40)..(40): n is a, c, g, or t
  misc_feature (90)..(91): n is a, c, g, or t
  misc_feature (181)..(182): n is a, c, g, or t
  misc_feature (184)..(184): n is a, c, g, or t
  misc_feature (233)..(233): n is a, c, g, or t
  misc_feature (238)..(238): n is a, c, g, or t
  misc_feature (262)..(262): n is a, c, g, or t
  misc_feature (269)..(269): n is a, c, g, or t
  misc_feature (294)..(295): n is a, c, g, or t
  misc_feature (315)..(315): n is a, c, g, or t
  misc_feature (356)..(356): n is a, c, g, or t
  misc_feature (365)..(365): n is a, c, g, or t
  misc_feature (399)..(402): n is a, c, g, or t
  misc_feature (480)..(481): n is a, c, g, or t
  misc_feature (483)..(483): n is a, c, g, or t
  misc_feature (494)..(494): n is a, c, g, or t
  misc_feature (499)..(499): n is a, c, g, or t
  misc_feature (509)..(509): n is a, c, g, or t
  misc_feature (511)..(511): n is a, c, g, or t
  misc_feature (535)..(535): n is a, c, g, or t
  misc_feature (544)..(544): n is a, c, g, or t
  misc_feature (563)..(563): n is a, c, g, or t
  misc_feature (577)..(577): n is a, c, g, or t
  misc_feature (584)..(584): n is a, c, g, or t
  misc_feature (595)..(597): n is a, c, g, or t
  misc_feature (618)..(619): n is a, c, g, or t
  misc_feature (624)..(624): n is a, c, g, or t
  misc_feature (652)..(652): n is a, c, g, or t
ttattagacacctgatagttcctagccttagacataactngcagcatcagccactctgctgcactttagatcacattagtcagggctagnncccagccccatttacacggcatctgatgaatggttagctgtggcagttctaccataatgccattttgctccaaagaaatccagttaaccnncngcccatggcccagtagtttcacctctgttgcccccagaatagctttggnatggngaaggaacagctgtcttgatgtgnggcattnaagaaaaatgggatagactaatttnnctttaggcttggctgtgtanaaaaaatttggggtgagagtgtaattgtgggatggggaggnatgggtttnataaatagcttttctattgacttttagggaggannnnatttgccttagtgggtgtttaaaaattatagaaatggtgttatatagtgtggggaaatattaattaaaagattttctnnanatgaaattgtntttanaagttggttnanaaattttttaattgtaagatagtnagagatttnagttttttttttatagggnaaggagagtttgtntattgtnatggagttttnnnatttatgtgggaaaagatgtnntgggntataaagataaatggaggtatagaaggnaaaatgtttaaagatgataaaaaggttataaaagataatggg

SEQ ID NO: 684279 - DNA, 774 bp, Homo sapiens
taatggtgttgtcgtgcagggtcctacgccccacggaatctcgctgattgctagcacagcagttctgaaatcaaatctgcaaggcggcaccaaggtctgggggaggggcgcccgccatttgcccaggctttgctttaggttaaacaaagcagccgggaagctcgaacgtggggtggagcccaccacagctcaaggaggccgtgccgtgcctcttgtaggcctccaccttcgtgggggcagggcacagacaaacaaaaagaccagcagtataaccctctgtgtcaggactttaagtgtgtctcccgtgttcgtgacagcctttgtgaagaaaaagcgaggtggttctcctccccgaggcagcgcaagcgtgtgaagacactcttgagaacagcgggcaaaaccgtggccctccctcaaagtgtggggtctcccgtgatacacccctgtgatacaccccgcgagagacagagaccaatacactgtgtggagagaggcgacccccgcccaagacgagggggcccaacccacgtgataacaaactctctcaaccagcgggcgcgagggtggttttattttccccaacccgaagaaacaccgttgttgccaggcctgtagaaagagggggctccccgctgtagctctcgtggtgtttataagacaagacggggacaaaactttataaccaacaaccgagagaaaagagggtgaccaattttctcaacacaccgcgcaaaaaacaccccccatcttcgttgggttacccctttacatacc

SEQ ID NO: 684280 - DNA, 684 bp, Homo sapiens
  misc_feature (47)..(47): n is a, c, g, or t
  misc_feature (55)..(55): n is a, c, g, or t
  misc_feature (75)..(76): n is a, c, g, or t
  misc_feature (79)..(79): n is a, c, g, or t
  misc_feature (82)..(82): n is a, c, g, or t
  misc_feature (86)..(86): n is a, c, g, or t
  misc_feature (109)..(109): n is a, c, g, or t
  misc_feature (119)..(119): n is a, c, g, or t
  misc_feature (136)..(137): n is a, c, g, or t
  misc_feature (150)..(150): n is a, c, g, or t
  misc_feature (199)..(199): n is a, c, g, or t
  misc_feature (213)..(213): n is a, c, g, or t
  misc_feature (557)..(557): n is a, c, g, or t
acaccccccaccccctccgtctccaacttaaaaaaaggcaagcccgnacaaaaanaacaaaaaccccaaaaaaannagnagnaagncaaaaaaaaaaaccagtacaaanaaaaaaaaanaaaaaaaaaaaaaaccnnaaaccaaaccgcnaaaaaaaaaaagaaaaaacaaaaaaaaatataccagggggaggcccccnccccaccccaaaanaaaaaaaaaaaccaccaaaaaagacccaaaaaaaaaacgcccctcccacacccccccacaccccacaagcacacaaacccacaccaccccaacaccccaaaaccaccccccccccccctcacccccaaaaccaacaccccaccgccgcctcacacaccccccccacccccccccccaccacaccaccaccaccccccacccccccccgcagcatccccacccccgccccccccccacacacccccgcaccacccaccgcacaatctcccccgaatacaccccccccccacccccccccccccaccacccccaccccccccccctcccacccccgccccacaacnaacaaccccccacccccccaacccccccccaccccgcccacccccccacaacactccccccccccccctcccccccccacccccccccccccccctccccctcccaacaacccaccacacacaacaa

SEQ ID NO: 684281 - DNA, 343 bp, Homo sapiens
acccctactttaaggagttctagatatgtgagatactaccttaccctttcagacagttccatgtgagtatgttaaccatacttcttagtcaaaaataaagagaagcctccgggtctttgtgggaacaaagttacaaattaattgaaatccatactcttcctaagcagcttggacctactactgtcccacatgtaagtatgcaaaactacattttgccaagaattaactcatgagaaccattgaacttgtattgaaagtcaccttaacagtggtattgtgctctgtaaaactggaatcttttcccacaagatgcatgtaaataagagatctcaaaaatagaaag

SEQ ID NO: 684282 - DNA, 918 bp, Homo sapiens
cccgtggaaacacatatgagccgcaaggtgaataaactaaaaacgaagtaaaagagacacgatatcaacataagaccatcaggaacccacacacaccaacacaattttacacacagacaagaacagcaagagacaaagaaaacagaaaatgagctgccgcacagagcaagaacaacaaggagcaagaggacaaaaacagagcagaagaggggagagagagacgagtcaaggagacgacaacgcatcacacgcaacgaaacgggtagaggaaacagagacagggagcagcgaaggagccgggaaggagaggagatgagaacgaaacagacgagcaacagagcagagctgagaaacctgcagtatagaaacatgagatgtatacgaagcaccatggaaacgggaacgaatagcaaggcggtagggaagaccgggcagaaggacgaagcagacaaacataaacataacacgatagaagaagtagaaagaggaagaagacagagacagtataatgcagcggagacaaaccacaggagcatagagaacgtgcaaaggaatgaagaagagagcacatagacaacgagagaaggaatcagagaggacgaagcaagtaaacagctggagccacccgaacgtcacaacaagactgccacgacggagcgcgacgcaaggacacagagtcagacagcaacacaggacgtcaatacacgatggtagaaaaggcgtacaggacagcagaggtgacaaccgagagtaatggcgacgcagagacttgagggaccgaatgaaggacgcacgagagcgaggcaacacaaggcagatgcgagagcgcgagacaaactgaccgacccagagcagaacagaggaaaaacatacaaaacaaaactggaatagagacggaatgcggatgtgaggacacac

SEQ ID NO: 684283 - DNA, 170 bp, Homo sapiens
cttgcgtactcatattctggatcctggacagaaacccatgcatgtcaatgctccaacttacaaattatggcatttagatccagatacctgaatatgagatcctgagtactacttacaacgacctggtgaatggtggaacggtggctcccatggacctcctactaatcacc

SEQ ID NO: 684284 - DNA, 225 bp, Homo sapiens
cccattggatagcggataggggccagaactacatctgggctgcgcgcttgcgtttcgcttcctggccctcgtatcctgggacatccctggggctagagccctggacactggattggccaggcacgcctaccatgggctggctgcactgggagcgcttcatgtgcacccttgcctgccaggaagcgccagcttcctgcatcagtgagaagctcttcatggacgctg

SEQ ID NO: 684285 - DNA, 440 bp, Homo sapiens
ctcgagaaagggggaagcggcagacggaacttaagctgcaagatttgaacagatgaaacaagataagatctaccagataccagggtgttcaatcttgtatgtgataaatcttggatgatggtattgatgatgaacgtctccggagagagaaaactccagtgggtacaatcactagtgcaaaggttatgatggagggtggtcgcagcaaagggtttggtttggtatgtttctcctccccagaagaagccactaaagcagttacagaaatgaacggtagaattgtggccacaaagccattgtatgtagctttagctcagcgcaaagaagagcgccaggctcacctcactaaccagtatatgcagagaatggcaagtgtacgagctgttcccaaccctgtaatcaagccctagcagccagcacctccttcaggttacttcatg

SEQ ID NO: 684286 - DNA, 225 bp, Homo sapiens
  misc_feature (45)..(45): n is a, c, g, or t
  misc_feature (71)..(71): n is a, c, g, or t
  misc_feature (121)..(121): n is a, c, g, or t
  misc_feature (185)..(185): n is a, c, g, or t
  misc_feature (195)..(195): n is a, c, g, or t
cagttgtgaagttttgtaaaatggtcacccaacttaaaactaggnaattacgaagaagagaaaattgcccngtatctgttaaggtctgcctgtagatctgctgtagggcttgtcaccattngaagcaaggtcctacttcagtggcagatcttgtggcctttgagtggctgaagaccaccaccctncacagggctngggccatgcacaggcatccttccctacctt

SEQ ID NO: 684287 - DNA, 870 bp, Homo sapiens
catcaatcgcccacatcacgtcgagacgtaaattatggcgtgaatcatccgtaccttcacgccaatggcgccggttcagtattctattatgctgcctcttctctactacatcgggcgaggcctatattacggatcatttctgctacgtcagaaacctgagaacatccggcattatcctccgtgcattgcaacgtatagcaacgagccttcataggcttatgtccatccgcggttgagggccaaatatcgattctgaggggccacagtaatgacgaacttacttatccggcatcccatacgattgtgacagacctagttcaatgaagctgaggaggctacatcagtagaccagtcccacccgtcacacgattgtttacctttcgactacatcgttgcccttcgaatgtatgagccctagcagcactcgacctcctagtacttgcacgaaacgggatcaaacaaacccgctaggagatcacctcccatgcggagtaaaatcaccgttccacccttactacacaatcaaagacgccgctggggttagttctctatccttctctccttaatgacagtttagcactgattgctcgagcagagctcctaggcgacccgagacgaattataccctagtccaaccccttaaacacgcccgtccccagatcgaagcccgagtgatatttgcctattgcgcctacacgattctccgatccgtcctaacaaactaggaggcgtcccttgccctattatatgcatcctacatctgagaagtaatcccatctccatatttgccaaaaaaaggataatatttcgccagtaaagccatactttaattgatctagcgagactcctgattcttacctgaattggggc

SEQ ID NO: 684288 - DNA, 890 bp, Homo sapiens
ggggcggcgcggagccttgggcccggctgctgcccggcggctggccccggcgcggtgcgggctgttctgctggctgccccgtgtgagctgcatgggtgcccctgggcggctggcgaggcctggacgaggggcgcggtcacgggtacacctgtgcaaccccggctgcccctcaggatgccaaagggctgcgccggcgtgaccaccggcgtggtgccactctgctgccgcgctgcgacgactgagtgccgaaaagcgtgcaggggccttccgacgtctctcggcagcctgcatccactttgctgtggtgccccgtccaccgttcgttgggcccccgatgtgtgggacacagaggcgacgctgggccctgggagtgcatgcttgacgcctggctggccaactgggtgcacatgcgtcgtgcttaccacgccccattgcttgacattgccccaggtcctttggtcacggcgactgccgaacttacctggacgggaggacacctgatacgtgcgacgtgtgttgccccgtaggagaccgggccccctccatccgtgccaggttcatgttgcccaacttgtaccccggaggcgtgtcagggtcccaggctgcgctctccctgggtctcacgggatttcactggtgaccgcccatgtgacccttgaacctttggcgctggcccaaccagcattgatagcccaaggagcaggtcccttatgagcgcctttcctggcagggacgagctggggaaccttgtctccctatagcaactggacttcggcctgggcccccaccatagtaaaacgtctcatgttacaccttgttcaccgattgccaccctctcccgtgttcttacccgcggacattggcaccaggaaccgctgcagggtaccccc

SEQ ID NO: 684289 - DNA, 360 bp, Homo sapiens
cagcgagccgagatcctgccactgtctcaaaaataaataaaaataaataaataataaagcctatagaagcagtctttctgcagccccaggtcctgctcactcatgtcctcatccagaaaacattctggagcagccacttcgtgtctgcacggtgcaggcaggggtgcagctagggtgcaggtgtgcaaggcatccacaccccgcaggatggtgcagacacagacgtcagccacttccccacgggccacctgcatgactgctcatggcaggctcctaaactggagtctcttctccgcaaaaattgcatgtgcctgcctagatcttaacaggaaaaataataaaacttgctggtcaaagtta

SEQ ID NO: 684290 - DNA, 100 bp, Homo sapiens
catcatgcgttcctggactctcctatagtttgaccaatcagttgacccataaaggttatggtctctcagcgttctcaattatttccacaactagactact

SEQ ID NO: 684291 - DNA, 431 bp, Homo sapiens
  misc_feature (39)..(40): n is a, c, g, or t
acaaatattccatgttctcacttagatgtgggagctaannaattaatctcatggaggtagtgagtagaataataattaccagaggctgggaagggtaggggacagagcagagggcagcaggttggttagcaaatacaaaaatacagttagacagaaggaataagttctagtgtttgatagcacagtagagtgactacagttaacactagtttattgtatatttcaaaatagctacaggagaagatgtgaaatgttcccaacacaaagaaatgataaacatttgaggtgatggatatcccaactaccctgatttgctcattacacactgtatgcatgtatcgaattatcacagggaacccataattatgcatagctattatgtatcaattcaaaaatcagtgaaacaactgaaacatgaatcttaaaccaaa

SEQ ID NO: 684292 - DNA, 297 bp, Homo sapiens
  misc_feature (46)..(46): n is a, c, g, or t
  misc_feature (157)..(157): n is a, c, g, or t
ccctagcacccttcctgtacccctagcaaccttcctgtacccctancaaccttcctgtacccctagcaaccttcctgtacccctagcaaccttcctgtacccctagcaaccttcctgtacccctagcaaccttcctgtacccctagcaaccttcctntacccctagcaaccttcctgtacccctagcaaccttccttgatgctgccaaacatgcccataagttttgtaacacagaagatgaggagactatgtatctgcggagacctgaaggcattgaacgacagtcaggaaggtggc

SEQ ID NO: 684293 - DNA, 263 bp, Homo sapiens
  misc_feature (46)..(46): n is a, c, g, or t
  misc_feature (157)..(157): n is a, c, g, or t
ccctagcacccttcctgtacccctagcaaccttcctgtacccctancaaccttcctgtacccctagcaaccttcctgtacccctagcaaccttcctgtacccctagcaaccttcctgtacccctagcaaccttcctgtacccctagcaaccttcctntacccctagcaaccttcctgtacccctagcaaccttcctgtacccctagcaaccttcctgtacccctagcaatcttcctgtacacactggaaacgtccttagcacc

SEQ ID NO: 684294 - DNA, 268 bp, Homo sapiens
  misc_feature (46)..(46): n is a, c, g, or t
  misc_feature (157)..(157): n is a, c, g, or t
ccctagcacccttcctgtacccctagcaaccttcctgtacccctancaaccttcctgtacccctagcaaccttcctgtacccctagcaaccttcctgtacccctagcaaccttcctgtacccctagcaaccttcctgtacccctagcaaccttcctntacccctagcaaccttcctgtacccctagcaaccttccttacttcttcttcttcatcgtcctcttcagcctcctcggtgtcatcctcatctcccctagcaacttcctgtac

SEQ ID NO: 684295 - DNA, 188 bp, Homo sapiens
cactttagtgtacaaaggttaatacccagcgaaaattactcttgagcgaggtctacagatgagtaggtcaaaactgcaggatatggatttttgtcagggttgcgggatagatagagccagaagcggggtgggagcgaggcattcacaaatcagcataggcggcgatccattgcaacacggtctctcaa

SEQ ID NO: 684296 - DNA, 786 bp, Homo sapiens
gcctcatttgtacctcattgtaaccagtgcatgagatcttacatggacgttcctgaatgactaagcagttacgaggtcattctaggactatatacaatgacgctgaggccgctgcgtatattggtgcaccaaggtgtcttatatgcctctcgtctgatatccttgaaacactctacaccaaagatgccctcattggtctggcacatctgcctatccactctatctgtgcactaacctgtattctgttccatcagtctcctccaatcggtcgacggactagcatcacatagtggggactctcatgctctcttatgactgatgtcatctgaacaaatgtagatccatagtcttcttaatatacgcagaatatttcttaagacccaatgctccacataatgtatgtggacaacgagggcccaaaagtcaacggcaaagcaacgtgcttatgggctggggagttccatgggcacaagtcacagggtggggagcattaatttagtcggcccatctttttgtaacattgaaatgcctctttcccccatggcgtgggtaacagaggttgatggcctcgccgtggcggggcattcttaaaggaacctaatggacacaatggttcagtggcctaccctgacagtggacttggtactccttcacgcagggtgggcggcacaatacttcctttgaaagttttcaaagtgcctgatcctggtggtacaacggtttgaacgcagggtccatccccactgggtatggtgtgggcctccaactacctgacaggatttagcc

SEQ ID NO: 684297 - DNA, 197 bp, Homo sapiens
gtgcgcggtgaccttgttcagcggtggtttttctcgcatgatgatgaccgcttgaaactcaccgtctacttccctcgcatcgccgtggataataaattcgccaatatcaaattccgtcacgtatggctttcccttcaaggtaactgcgttgatgaaacctgacccgcggggggcaaacttccatgggggtgtgcttt

SEQ ID NO: 684298 - DNA, 281 bp, Homo sapiens
catcattccatactaacttttacaaatagctagtcaagtaaaaatttacctgttctaaagatgaggccaggcacggtggctcatgcccgttatcccagcactttgagagcgtaaggtgggaggatcgcttgagcccaggaggtggaggctgcagtgagccgcgattgcaccactgcactccagcctgggtgacagagcaagactctgtctcagaagaactagttttctttttttaatagtttttgggaactatacttttgaaatgtcccgtcgaaaagctt

SEQ ID NO: 684299 - DNA, 364 bp, Homo sapiens
aatccctcacacaggcgaatgcccctctggaatagagcttccagaagaaaactcagccagcaatatttgccgttctacagcctccactggtgatacccaggcacacagggtctgaagtgcacttccagcaaactccaacagacttgcagactggagataaaagccagccctctaggaagtatctcaatatcttcagagccactttcaagttcctcaataaggtgccagttctcaggttaacgtggctccacttctcgagaggcattcaccctttctctaaacgccaggacacatctccccgactaagcacaggccgacccacagcaggaacagcgccacgagcttccacatggtctaggggtgc

SEQ ID NO: 684300 - DNA, 167 bp, Homo sapiens
acgaaaagtggaagcaggacgtgggcaacgtcttccacgacacaggcgctgacaccgccgaggaggctaggtcggaagcgcaagaacggctcacaaaacatctgatggacaagggatggtccagggagcagcccgagcgttgggttgaggcccgctggaaggacgcg

SEQ ID NO: 684301 - DNA, 339 bp, Homo sapiens
  misc_feature (184)..(184): n is a, c, g, or t
gacccccttccaccagcctcggcctcccaaagtgctgggattacaggtgtgagccaccatgcccagccctaatgtagtatttttaaatgatatgattatacaacaactttctttaaaatctaagttcacaaaaattggtcagtacatcatctcgttttatctcatattgactatatattaccangtgtgtaagaacacattctacaccagtattatcataccgtgacagaacagttgaggcctgtattataactgggatattggggtagcatccatgttaaagtatcagtagcagctgtggatgtatcacaagaaaatattttattcaagttcccaaaa

SEQ ID NO: 684302 - DNA, 272 bp, Homo sapiens
tccgaggtccttcgatgcctacgcccggctaattttttgtatttttagtagagatggggtttcactgtttttagccgggttggtggcgatctcctgacctcgtgatccgcccgcctcggcctcccaaagtgctgggattacaggcgtgagccaccgcgcccggcccacagcctactcttatgtcttctgttacaaccttcatgcagtaactgccacatctatatctttgcctctcagctccagtaccagaattcctattggacctagtgcat

SEQ ID NO: 684303 - DNA, 479 bp, Homo sapiens
gcctccagagctatctttgcttgaaagaatgaaacttcaggaatgaaagtttgcacataaagcaagcccatgagaaagacatttcgggaaaactagaatcctgttaagttatgggatttttttcaagccacatggttgataagtagtctgaccaggatcctggagcaacacaaggaagacaaggacccttgaagacaaggcagccttgaaaccaaatgaagccctgggccagtgagcatggcaagaggaagactgttaattgcgagaaagctgggtcttgaagatgattccatatcaacatacagggagttccaccactgaatggtctatcggttgggaatgccatcatttattttcaccagtggggaagaattggtattaatatcaaaaccacagtactgtcatacccagctataatttgcaatgtttatatgcctgtacgaatgaataattaacagttaaatgaatcaatatatata

SEQ ID NO: 684304 - DNA, 116 bp, Homo sapiens
gtacctcgtgacgagtgatgacatgatgctggtgctttccctggtggcaccctcagtcttgttgcatcactctggttggttggcttctgtccccgagaacctttgttcctctgggt

SEQ ID NO: 684305 - DNA, 736 bp, Homo sapiens
cctatctttaaaaggaatttaaattttgttgtatatacagtgaactaaatcagtacaagtttggggtgaaaaggaaatttttaatccatctcaaatccctaccttatataatataaccaaatacatttgagatggattatactaacggtagggatttgatttatatttcgaagaatttaccacattggttcagtactgtgaaaccaccatttcccctctgattagtaactgctatttttagtagaatattaaattcttatgtgtcttgtgtgtcttaggccaatttctgggccttctgggttttttctacactgtcaataattatcgctttaattggtgttaatatttggtagtacacaggttctcccttgttcttttaaattttgtgaaatataacttacaaatcagtacttaaaacagagcttaatgggtaaagcaacagctgtgtaatcacaaactagatgcagaggaggtcttgccagcactccaaaatctctgtgtgtcccctcttgacactcactgtttcccccaggagctaactatcctgacgtatggtaattctcccgtctgtccttttacagaattgatttgtaccagttgatgtgtataagcaatagtggtttaccattttggctgcactttgtgactttatatagaaatactagaagtaatacttaaaagaaacagaatgaattctggcaaacaaaaaaaaaaaagggggggcatcaaaaaaatc

SEQ ID NO: 684306 - DNA, 449 bp, Homo sapiens
tgacggttggttaccatcatttcccagaaaccagggttttaaagaagacggtggtggatggtggtttaatagatgtcatgcagccattccaaacggcagatcctactggggtggccagtccacctgggacatggcaaagcttggcccagatgatggtgtagtatggatgaattgaaaggggtcatggtcctcattgaagaagatgagtttgaagatcaggccttttttccaacagcattagtcccaattacgtaaattttggctcttctgtttgtgacaacattttggtccattatgttattggaattttctttcatacattatattcctttaaaactttcaagcagacgtaagtgtgactttttgaaaaaagtttaggataaattccattaaattagcacatgatttcctttggtttccttcatttctctggctaaccaagaagtacc

SEQ ID NO: 684307 - DNA, 310 bp, Homo sapiens
tattcatcggcacccgtattgaattcaacacaccacaatactatgtcgctattcatcggcaccggggttggtgtaaactaggcgtacgtgaagtagaggttaaggagggtgatggtgccgataatagcgacatattattgtggtgtgttgaattcgctattcatcggcacctgccacagaggctggctagtttttgtatttttagtatagacggggtttcatcaggttggccaggctggtcttgcaactcctgacctcatgatccagccgccttggcctccgctagtgctgggcttggtgccgatcaata

SEQ ID NO: 684308 - DNA, 161 bp, Homo sapiens
tgatctcctttttccctgcattataaaacaaccataaaaggaacgcagctaactcacactaatacaacataatgcatgtaatgttaaaagcgattgtcttaccctcagtaccattctactttttgcaacctattgtatttcctagaataactcactgacaa

SEQ ID NO: 684309 - DNA, 932 bp, Homo sapiens
tacaaatcttactggaagggtgttcagaaattaaaatctgtgtttgctaagacttcattctgttgggggttttaagaagtaatatattttatgttacatatattacttcttaaaaccccaaagaatgaggttctttatgtaccataaaatatatgtaaacgattgcagtttttttggacgtttttccatgcatcagtaagttgtctgacagtagccaaatgtaacttgcagaaaattattgaaaattatatcagaataatagcaatcaggccttggatgttctttattaaactcttttcaggcagtaaattttaaaaaaattgtcattttctaaagtccttttgctaaaatgttgactatggaaaacaaaaaaaggaattttttagtctgctgctattattaacatttattatctgtatcttttggtcaggaaatgacttcacctattttttccataagcagacctttaacagagtcacttaattgggctgcttaacagatgttctgggagaaaattataatatttagtatttgtccaaatatccaaaagtattttgacagtttcttttttaagatagttctaaagcttaacctgggtagaggtgtttgtaccaattatatataggcaggctgatctagcaagcatgccatagagatcacaatcaacagtgtggggaagtcaccgcagtggaagtggatgccccccttatttgaagcttaacccaatgtcttgcattaagcggttctgcgctctcggtcagcacaaacaaagaagggagcgtgtcgcttcactaccatctccgttgaacaaaagagcttctcacaacgcacaacaaatggtgttttattacaaaatgccgcgggaactttaaacagagttggccgtcacacactcaccacaacacaggcgcggggcaacacatacatgcata

SEQ ID NO: 684310 - DNA, 332 bp, Homo sapiens
tacaaattggcttttttttttgcccctttttgaagtttgaacttttaaccattttttggactgggggttttttttctttagtttgttaaatttttcccccttttttgtccccaggggtttttccaaaatttttggttttaccttgaagctcctttggctttcccaatttaaacttgggtttttttagcttttttactttttttacgaaaactttttggggggggttaattgattgggaagccttttttatggtttttccaatggtttttggaattaattttttggccacccggcccgaaattttgtaggaggtttccccccgggaatttcgg

SEQ ID NO: 684311 - DNA, 357 bp, Homo sapiens
tctccaggattactcgaatcgacggtttctcttacatattagcaggtcatgttggtgactcctaaataccttctcagagtctgggacaatctgcagagacacccttggagcacagtgcagcagcttcccataccctgcattcagattgctaagttctgggtgacagaggatttgtatgcggaactattgaagggagaaatgatgtgtgctctgtaactttcttcaaaatggttcaggaaaaaatatatatacctgtgcagatgaagcaaatatggcaaatgttaacatctattatatctcagccattgatgtatgggtattgacagttatatacttacaatagtgctcaatagttga

SEQ ID NO: 684312 - DNA, 589 bp, Homo sapiens
gcacgagctactagtgggcccaacgcacaagacgctgatgcagcttatgtccaactaacactgatactgataaaattgatccataaaaatccaaatacgtggcatgccagacaaccatctggtataacagaaattccaaccacaactcagaatattatccagctaaggactattatggaactagtggaatgtgatattaaaaaactgtagcagctaagatcttatccacatgattgcctacattgtgctctccctacttatctcattgcctacttcatgcttgccacctttctgggaaaacactgcacgcaacgtaagaaagagcagcgctgtggcacaaacaggcgtgtggctacaaatctcatatccttgcagaatcattgagccctgctttacagtgaggcaggttgaagggcctttcggaagacatggccgagtgtcaaggtaaccctctaagctgtaatccctggcatgaactcaaagctcgtgggtacaatcttggtccaagacttgaactttaaggcctaatgaatactccacaaatgttttaaggtcaacctttttttgagggtaaactcgttcaaaaata

SEQ ID NO: 684313 - DNA, 119 bp, Homo sapiens
agctggtccctcattcttatacttcataccgggaactgagaagtgttgagaagataaagcgttgaggaagtataaagcgttgaggatgtataaagcgttggggaagtataaagcgttgg

SEQ ID NO: 684314 - DNA, 166 bp, Homo sapiens
tccatgcacgctggttatgttcctaaagccatgtcgaagcccatcgctgggtcatagtacttgctgcagtactcttaaaactaggcggctatgtataatacgcctcaactcattctcaacccctgacaaagacataaacgagcgtggcaatgggtacgagctcgaa

SEQ ID NO: 684315 - DNA, 184 bp, Homo sapiens
ccgtgctaggctaagcacttgacattacctcgtttattccttacaacaacactgaaccatagcaataattttataaacaagatactgagacataaagaaattaaccaccttgtttgacaaacagtaagtaatacagctgaaattttaacctggctatccttctccaaaggccgtatttttaaca

SEQ ID NO: 684316 - DNA, 246 bp, Homo sapiens
ggggtcccttttcaagcccttattaaatggggcataatgattttgcttaatccccaatcctgagaggggggcgatccctgtggtgatgaggaaaccgaggcttgggggttaatggcttgcctagattccccctgctagccaaggaatgaactggaatttcccccctgccccgggcggcttttcccattttttacccagccttttcaagatccccgccaattttaaaattaaatgattttatgttta

SEQ ID NO: 684317 - DNA, 788 bp, Homo sapiens
  misc_feature (634)..(634): n is a, c, g, or t
  misc_feature (669)..(669): n is a, c, g, or t
  misc_feature (684)..(684): n is a, c, g, or t
  misc_feature (696)..(696): n is a, c, g, or t
  misc_feature (706)..(706): n is a, c, g, or t
  misc_feature (726)..(726): n is a, c, g, or t
  misc_feature (754)..(754): n is a, c, g, or t
  misc_feature (766)..(766): n is a, c, g, or t
  misc_feature (785)..(785): n is a, c, g, or t
aacactcctcgtccccattctaatcgccatagccttcctaacattagtagaacgcaaaatcttagggtacatacaactacgaaaaggccctaacattgttggtccatacggcattttacaaccatttgcagacgccataaaattatttataaaagaaccaatacgccctttaacaacctctatatccttatttattattgcacctaccctatcactcacactagcattaagtctatgagttcccctaccaataccacacccattaattaatttaaacctagggattttatttattttagcaacatctagcctatcagtttactccattctatgatcaggatgagcctcaaactccaaatactcactattcggagctttacgagccgtagcccaaacaatttcatatgaagtaaccatagctattatccttttatcagttctattaataaatggatcctactctctacaaacacttattacaacccaagaacacatatgattacttctgccagcctgacccatagccataatatgatttatctcaaccctagcagaaacaaaccgggcccccttcgacctgacagaaggagaatcagaattagtatcagggtttaacgtagaatacgcagccggnccattcgcgttattctttattagcagagtacactnacattattctaattnaacgcccttacnactattatcntcctaggacccctatactanatcattttaccaggactctacttcactnactttcatattngagctctactactatcatnaca

SEQ ID NO: 684318 - DNA, 401 bp, Homo sapiens
caataccttttcggtagcagaagtgggataatgaagcctaatagctgagcgagagagaagagataagtcagcaagcgcaatagcaggcaggatggttgctgtggcacatgcatgtcatcccagaactttgacaggccaagttgggcagatgacttgcggtccggggttccacgaccagcctggccaacatggtgaaacctggtctctactaaaaatacaaaattagctgggcctggtggcaagtgtctgtaatcccagctactcaggaagctgaggagggggaatcacttgaacctgggaggcgcaggttgcaatgagcccagatagcgcagatagactccagcctggatgacagagcaagactccatctcaaaaacacatcaaacggaaagtagcaagtt

SEQ ID NO: 684319 - DNA, 176 bp, Homo sapiens
atctagagggctataatttttggtatttctagtagagacggtttcctatgttggcaagctgtcttgaactcctgacctcatgatctgcccacctcggctcccccagtgctgagatatacaggcttgagcgcctgttctttggcgcctatttatttatttataaatttatttattta

SEQ ID NO: 684320 - DNA, 638 bp, Homo sapiens
atgattcctcaagctatccatatatccactgcagattatacaaaaagagtgtttcaaaactgctgtatcaaaagaaaggttcaactctgtgagttcacacatcagaaagaagtttctgagaatgcttctgtctagtttttatgtgaggatatttcgtttttcaccataggcctcaaagcgctccaagtgtccactaccagatacaacgaaaagagtgtttccaaactgctctatgaaaaggaatgtttaactcagtgagtcggatgcaagcatcacaaagaagtttcggagaatgcttctgtctagtttttatgtgacgttattcccgtttccaacgaaatactcaaagctgtcctaatatccacttataaagtctacaagaacagtgtttcaaaactgctgtatcaaaggaaatgtttaactctgtgagttgagtacacgcatcacaaagtagtttctgaaaatgcttctatccactttttatgtgaagatatttcgtttttcactaaaggtctcaaatcgctccaaatgtccacatgcagatttcacaaaaagagtgtttcaaaactgctctatgaaagggaatgttcaagtctctgagttgaatgcaacataaaaagaagctttgagaatgttct

SEQ ID NO: 684321 - DNA, 809 bp, Homo sapiens
tttgcagagaaaggaaatctcgctcttccgaaagtcctgcgcatgggcggagagaggaaagggcctaggtactgtgacaggggtcgcacagtcgggcgaaacagtgccgggacggggagccatggcttcctagtgcgcccggtcactgactccgtccggcagctttcctcgtgcgctctgcaggctccttggttcgttggagaacagccggctgccttgttcagggcctgagtggggctggggcgcaaggtgcaagctgataatgccctgagatggagccagcagcctctggtggagttcggtcgggatgtgggggtagtcaaggaaagaagcagaagggaagtagcctcgctctgaaaagatggcagaagcagtgtatccatgccccaacagaggaaacagaacgagtgtatgaggacttacgagtctccattgccaagtcccttgtgggtcaggaccatggtcctctgaaagaatgcaagatattccggtgctgataatgattaatgaaccaatgtgattgtgaggaatgcgggaggacattggagcgagctcgtatggggaaaggttatctaggaaaaggtattctatcaagaagccgtccaagcttcgcaatttcagatcctaaactgggggctaaatggacaagatctgaagactaacatgcctatcatcacatcaaagaggtatcagcatagtgtagagtgggcagcagagctgatgcgtagacaggggcaggatgagagtacagtgcgcagaatcctcagggattacacgaaaacgattgagcatcctcctgtgaaagggaa

SEQ ID NO: 684322 - DNA, 986 bp, Homo sapiens
gccctgtaccgcgtatcctgaaaactggagggccttcacgggtctcatcgctgcgcagtacagcgggactcaggtccgcgtgttctccgcgacactcgccagttccattattggtgccaaagcaaccgcacccctgaattgctccgaaaatttgcctgaccagagacgagagtgtcggccagactatgtgatgggtgatgatggattcatgtgttgtttggagtagcatagatgcccatggccctacgtacatgtgcagcacactgtagagaagctgctggggtgaagtagtcccagttcagtgactagcgagaccaagttgtggatgcatgtaggagatgagcattcgcatgattcccagattatcaccgtgcccctcaggctactacctgggatgttcgcccaccatttgaggacaatcgatgccaccaactaactaaatcaggccaacttgcaagaaatgctgaagtgaggaagtgaggcgaatgctgggggctgcgtggatgccgttatactatgagagacgaggactttgggctggtgggcgaacgagtgacattggggtgacatcacagttgtctgcaccctgttgtggctctatgagcaggttctagagccttctttccggcaggctttcccaataccaaacgtggttcctcacctgcattaaccagccccagttccgggctgtctggggggaagtgaaactcgtgtgagcaagatggcccagttcgatgcgaacaaacgttgggcgaaaagccaacctaaacatggatacactcgagcggaaagagaaggggttcacgggagagaagccggaaggccaggctgagcggacggaggagaacaaggggggtgccccggctctgaggaggaaatggtgaatgttgagccggcgctggctggtggccacaggccaggacccttggtccctgcccaacagggcctctgggtggcggattaaggcaagtacccaggggccatct

SEQ ID NO: 684323 - DNA, 354 bp, Homo sapiens
agtgcagtgagctgagatcatgctactgcactccagcctgagcaacagaacaagactctgtctcaaaaaaaaaaaaaaaaaaagaaaaaggaaaaaagaaaattgaaccaggaattgctaacattttcacttttctctgcatgttccagaagcctttgtgaagtgatttttttttttctatttcattattttaggatgatagtacacttaaaaaaaaaacaacttgtattttaagttcaggggtatatatgcagttttgttacataggtaaacttgtgtcatgtggggttgttgtatagattattccctcacccaggtattaagtctagtcccattagttgtttttcctgattg

SEQ ID NO: 684324 - DNA, 779 bp, Homo sapiens
gtacgcgcctggcagaaggtgctagcgtagtgtgtttctctgcttcatgagtgcccgccggcctttgcagctgctggaagacccatttatctcatgcttctatgtatctttgtgtgacctgcatgtgtgaagagaagcagtggtgacggtttggtatccccacctaagagcacgtcccactttcccctgatggccagccgtcaggccccatggacaggggcgtctatggaagccagaggtttatcggcgtcaggggcagggaaagggctgcaggatccccagggggctgcctggaggtcggtctcactgacatcatggcctgaccccagcaatcaggacatggtcccacagatgtcggccctctggtccgctgtgtcttactcaccatcgttggctgattctccacaaacagaggacagacgttgaaagatacccacgtccagttacttcagcagactcaactatcatggacattcaggtcccgacacgagccccagatgcaggtctaaacagaactccagaccactctccgaccccaaactggcctggtgatagaaaaccaataaccctcagatcccagatccatgcaactggaaggaacgggatgggcctctagtgacaagatccagaagacacaacaatgagcaccaaagtcatgtgattccgattgattgaaaccactgaagctcatctgagagagcattccccaatgcacagacgtacagaagaacccccagacctcaggcatcatgtttcatgagttacccttatactataga

SEQ ID NO: 684325 - DNA, 917 bp, Homo sapiens
  misc_feature (917)..(917): n is a, c, g, or t
gagcgggggccctcctcggacctgtaggcgggcgagcgagccagcggacaaggactgcgtggtgaggctgagctagcgagcggccggcagtggggggctgccctgggctgctgagcctgttgagccctagcctgcgctgccgcctgtcggccgtctgtggtggccggaatggctgcaaggcctggagttgggcgctggggcgctcggcggcctgggcttgcctgggtagagtcctgttccccggcccctcgcttttgcggggccttgcgggcccggtgccggctttgcttgccccgggggtgggccccagaagcggggcgggtcctggccttgtggccccatgggaataccagctgcctctgggcgtgtgagggctaccctttttgcggccgttgaccgcccaggcgttcagaccgggggtaaccggcgggttttttcccctgatgcggtggtgttggcctggaattccttcccgagaaggctccgcctgggttgtggttcaccacgcgcgtgggaccagtggggcgtgatctcgcgtcgcaaaggtaaattccaacgtgcccgttgtggcagcatccttgggagagaagtgccccggcaagtgaggtgcccttgggcgacaggacagcacgaactgggtattttggctcacggtgggtgttgaccttcgtgtgtgggcccctacagagggggtggtcggtcggagtaccgagagaagcgttccaacgtcaggacttttaggcgcagaagcgagcttagttatttattcagcccaaaagtcgtttcaagacgccccgggggggttatggagccttaagagacgacttgggggacaattacacgatatgctgagccctgggcgagagcagtatacttgtcgctagaacggagactttcaacgggtagagagcccgaan

SEQ ID NO: 684326 - DNA, 281 bp, Homo sapiens
tcagcctttcctcggtgtgtggaactttccacatacgtttgccaggaggatcttccctccaccccacaggcatggatcagtgtggtctgatgccacaactgtgtggggtccctctcatccccagatggtgctgaggttgaagccctttgatttgggagcagtatgagtgtagtaaaagactgtgggcgtgggggtggagggctcgtccttcataacagtcagtaagaaaacgtcttgccacctttaaaaaaatagagagacaacagcaacgttggcggccg

SEQ ID NO: 684327 - DNA, 545 bp, Homo sapiens
taaattcgcggcccgtcgacattttggaagtatgattcaacaggcttaatttttttcataccctttaaataagattgccaggtttcattccttcattcaacaaatatttgttgaatggttccagtcagctttaaagatgcttagaatattgctatgaacagataggggtagatagaaaataaaccagtaaactggtgtaacaggatttaagtgaaactgactaggtttatatgaagtggtgatagcataaatatcacataccaaagtaaggcagacgtcccatatgtagaatttacagaggagatttcaaaggagctcgttccatgtattttgcacccctcagataggtaatgggttaacatgtagaaagggaacagaattttgcataaataattctttagaaagagctgtaggctgggctcggtggctcacgcctgtaatctgaacactttgggaggccgaggtgggtggatcacctgaggtcggcaattcaggaccagcctggccaccatggcgaaatcccgtctctacttaaaatacaagaa

SEQ ID NO: 684328 - DNA, 372 bp, Homo sapiens
  misc_feature (261)..(261): n is a, c, g, or t
  misc_feature (317)..(317): n is a, c, g, or t
  misc_feature (368)..(368): n is a, c, g, or t
ctcaaaacccaatgagatgccttcttataccagttaaaatgggtattattaaaaagtcaaaaatcaacagatgccggcaaggctgtagagaaaagggaatgcttatacaccgttggtgggaatgtaaattagtttagcccctgtggaaagcagtttgcagatttctcaaagaacttgaaacagaactaccatttgacctagcaatcctattactggtatgcatccaaaagaaagtaagttgctctactaaaaagacatatntactcatatgttcatcacaatgctattcataatagtaaagacatggagtcatctangtgcccatcaaaagcagattagaaaaagagaatggggtattatacaccatngaat

SEQ ID NO: 684329 - DNA, 316 bp, Homo sapiens
  misc_feature (79)..(79): n is a, c, g, or t
gcccaggctggacttgaactactgggctcaagcaatcctcctgctttgccctcccaaagtgctgggattacaggcgtgnacccgccgccccggccccccccaattactcttaaaggtaacatcactattgtgaacctaagatcagctttttgagatgccttttcaggtgtaatggttaatactgagtgtcagcttgattggattgaaggctacaaagtattgatcctgggtgtgtctgtgagggtgttgcaaaagagattacctggggaaggcagatgcacagttaatctggtgggcacattctattcagatccca

SEQ ID NO: 684330 - DNA, 318 bp, Homo sapiens
ataaacagcagtgaccaagtgccatgacataggtgttccgtatgcattagcctcgtatacttgctttccttttttgttgtgttttttggagacagggtcgtgctctgtcgcccaggctggagtgcagtggtgcgatctcggcttactgcaagctctgcctcgcaggttcacgccgttctcctgcctcagcctccccagtagctgggattacaggcacgtgccaccacgcccagctgatttttttgtatttttagtagagacggggtttcacagtgttagccaggatgggctcgatctcctgacctcgtgatccacccg

SEQ ID NO: 684331 - DNA, 278 bp, Homo sapiens
gaattcggcacgagcgaaatctttcgctccctacacaccctggttggacagcttgacctcagagatgatgtgggtggaaaatttacaatccggttgggaacaaggctcccagagcctctctggcattcagccttgcattgctctttgagtgcacttgaacacacacatttttatattaacaggcctttttttgagcaaaacttcagtctccaattaagagaggagattacaactgctgttgaagagatagggaggaacagacatggggcacacaaatg

SEQ ID NO: 684332 - DNA, 828 bp, Homo sapiens
tacttggagtcaccgcagcttaaagagcagaaggtctccggtcagtatgtgaggcctcattcgggaatgccttataaattgatcaagggtttttgggcttatgattgcactgtttaccgcactactgagccctgtgtgctggaaagaagagcggtgcacatgttgatcccaccaagatattttgatggctcgtaaaaggcagaaagtaagtggaagacttctgagtgacggatatggcacattccagtaggtctctgtgggacatgttgccaaagttttctcccggtggaagttgcattttgagtttgtcttttgggttttctggagggtgtaagaatcagaccatagggtagggacaggataactgtttgaagttcatttgtcaacttggtgttgaaaagcataggtggtactctgactgatgtgggatgacctgatatgtgcaaagttgcattattatgaaattcgagtatcagtgtctatcaagagagatcagcttatatggagtgttgttaaggcatatacagtgaacagtttcttgaaacagatgtatgtccttgtattggggttagaatgtaattggaaaaccatttggattaattagaggtctgtctgaaggagttgaagctttatttatgaacccatccacgggtgctgatcaaggccctgaagaatttgcagaggggttagtgattggagtgagaagcctctttggacacacagtaggtggtgcagcaggagttgtatctctgaatcatcggttccgttgggaaaaggtttggcagcaattacccactagcaggaataattagcaaagggacctagaaa

SEQ ID NO: 684333 - DNA, 205 bp, Homo sapiens
tgaaatttttttttgggtttattggggggggtccttgaaaaaaaaaaaaaatttttttttttggtccggggggggggttcccccggagaaaaaacctttttttccctttaaaataacttggggtggaacccccctttttttttttataaaaaaaaggaatttatgggttcagaaatggctaataaatgaaaacccttttaaggga

SEQ ID NO: 684334 - DNA, 107 bp, Homo sapiens
tcggagttgtaggtagcttccctacacttgggacatctcccaagcatccatatcattcattgtctcaagtccagcatcttgcaaccattgtatcagatatatttatc

SEQ ID NO: 684335 - DNA, 231 bp, Homo sapiens
gctttgcatttgtgagctgagcacagcagggaggggtaatgcagatgcaagtgcaccaagtagaagcaggacactgagcctgaataagggaggagagagactgagagtggggaaggaagaagtagtttactttggactaaagaatatattgggcgaagaatagagggggagcttgcaggaaccagcaatgagaaggccaggaaaagaaagagctgaaaatggagaaaacca

SEQ ID NO: 684336 - DNA, 127 bp, Homo sapiens
caggaggaggaggaggaggaggccaggtcctggtggagcctttgcccagcccagtcctttttgcctcctccgggctgaagctgtttgtcaggattcccctcgggctaaagaggaaaaataaagatgt

SEQ ID NO: 684337 - DNA, 1599 bp, Homo sapiens
  misc_feature (266)..(266): n is a, c, g, or t
  misc_feature (436)..(436): n is a, c, g, or t
  misc_feature (859)..(859): n is a, c, g, or t
accccttaaaagccaaatctgggacaggaaaagactcactatcatgcatctgtcgtcagttggacgcgtagattcgggcaagtccatccactactggccatgtgatctagtaacattgacggtggcattcgtaccaatgagaacccatgtgatgaatatttgtatgatacggacgtgctgcatgagtatgggcaacacgggctcgcttcaacgtatgtcctgtgcgtgtcttgtgcatacacatgcgtgatacaggcatgcatgcnggtgaatcgtcgcgctcatctactcgatgtgcatatcgtcgcgtctgttgggaaagttctgaggactcaagcattatgtacttcatgtgacctatcattgtgatgctccgctagggagggacaagaggtagctcttgatcaatacagatcgaatggcatgtgacaggggnaaccaattcatcgatgtgactcgtagcttgcttggccttggtcccgtagtactctcgttgtggacttggactagggttcgattagtgctggtacaattctagacatgcctgggataatcatccaaagtaattggtgcacagaaccactgaggaaagtagctgctctcttgtcatggcggttatcaacaaactaggggctgttgacatagcaaagcgtatagcttggttccgcgtagcttatagcatagaactagggagtttgccaccatttgaagctcaacctcctaccaatgcaccaggcaaaggtcagattatggcacggggaacatacttcgctttccatagggatacgctccacgtccaccatttaaccgctgttaagacggacacatactctgtggggcttagcaaagggcgcctggnagaacaaggttatgtccaaattttgggtggacccgaaatttaggcgtgggtgtctggggacctcggggttggcagcaaaaccgattgtctcggggtagtcccaagggtggcgttgaaacaattgagccctttgggcgttgcatacgaggggcaattcggggcaagagaaggttccatcgcaccggtttaaacacgggacaattggggccttatagtgggctccggaaggtgtgggaaaaccccgagggggccctgacgcttagtagcaaagaggagcttttcctgggagcaaccattgcggactttcccgttgaataccaccatcccaaaaggcttccgaggttccaacaacctggtgatagagactaagtcgccccctttggttgacgagaccatcgtggggcttccttttcaccacacagggcagactggcgtcactcaaccgagacaacgtggggcgtgcgagccaacttggggggtagaccctgggatttcccctgtatttgttgcacccgcatgattgtggttcagaaccgcgtggtgtgtacgttcttccatcataagaaacccgggtgctctagtgatgtgaggaagttcaccacccattgggtgcgttcccacagcaatgcacatcgatttccaaccacgtggacaagagactaagaacagtctgggtggccatgatcgatgcgaccacatgccatcagagccttcggtaagagacaagaaggaatctttca

SEQ ID NO: 684338 - DNA, 268 bp, Homo sapiens
ctttcataatcctattatacgatcatatcaatgcatagtgcattgccccttagggatatatttgcgaacaaattctggatgtatgtgacgtggtacttctggtttcggaatgatatccttagattataaagatcataccaaaaacaaatttcgtttgccattggaatagatatataataatttgacattaggactgatctactcattcataatacattaaaatagtgttcctagaaaatttagtacactaatataagtaatgttttta

SEQ ID NO: 684339 - DNA, 432 bp, Homo sapiens
tgatcagacagatcattaatctagatataacagtcgaatctgtcaaagaccatgttggataatccagtctgttaaatatgacctaactgctttgtttgtttagatactactcaaattcttaggtatgcaccagaattctgttcttttcttcagaatatgccagacaggaatgcgtggagagattcccgtcatttaaccctgcgacttatggcaaagacactgcgacgatttggtgccttctaacgaagattgtcatattctgtcctgtgtgtgactgtttttctgcccttaaattatataaaagtacttagtcttctctccttggctgagtttcaagcactttgtaaataaaaatattcatgagttgccttaattttacatttaataatcatcaggttatctctacagagagacatacccagagcaggtttc

SEQ ID NO: 684340 - DNA, 162 bp, Homo sapiens
taacttggcttgcatttgtgaaggggccgactatccgaacacaatttgaatcctatgtgcaccattcagggcccttagggtaggaggcaccagggttcaagaaggaacttgcgtagtagtaggatctgaagttggggcggctccttttccgtactatccatt

SEQ ID NO: 684341 - DNA, 407 bp, Homo sapiens
  misc_feature (123)..(123): n is a, c, g, or t
agaggatccagagtgagctatcagctataatacactggacatagagctgacgacagtgtgtgttgctgcaccggctgatagtcgttctttttctgaatgtgcccagggctgaagcgcagtgcnctttgtcaccagctgctgtgctgagtttgcaaaggcactgatgtgacacctgcccgcatgtctgtttgcttctttcaggggaaacttttgatacattggcagtcgaggatggctacgatatcgagaagtgcagtttcccgtgcagttagaagaatgttgactcatctgtggagctgggacaggtggccttaagaacttcattagaggtttggatgcacacagatcctgtttctcagacaaactgagtctgtacggaaccaggtggaggatctccctggccacat

SEQ ID NO: 684342 - DNA, 300 bp, Homo sapiens
tgttttatactccggaactatgtataagctgtagctcaagcatatcaccgtgaggtcaggatatccagaacatcctggtcaacatggtgaaacccggtctctactaaaaacacaaaaattagctcgaggtggtgactcgtgcctgtaatcccagctactcgggaggctgaggcaggacaattgcttgaatccaggaggcagaggttgcagtgagccaagattgcgccactgcactccagcctgggtaacagagtgagactccatctcaaaaaacaacaacaattaacgaccgtatccgca

SEQ ID NO: 684343 - DNA, 336 bp, Homo sapiens
gggagacatatctgtgtttttgcacacacaaagagcactccagcgtcgagcccactttttcaaggttcagaacctgtgacaagctgtgaagcatatgaagaagacagggagacattcatggacaaattcatttatgtgatagcgagagggcgttcctttctgtgtgcacctacaaatcttctttgggctggtcgctatgactaattccatcttggtgcaaagcgggaaatgcaggtggatgctttccaacaaaggcggcgaccggttccaaaggatttagaggaaggcgcttggttaatacatgcatgtgcgcggatggaggttaccggttatttt

SEQ ID NO: 684344 - DNA, 866 bp, Homo sapiens
ctcattaagcatggagacacacacacaggagctacagctacagtatggcgaggacaaaggtaaacttacgtaagtctcatcggaattacaacagggaaatggagcttcaatgaggacttgcagtccttagcttggttaggttaaggatgatagaatttctctgccagtgcagtaagagttgaaagccggtcagttacactaagtaagtaggagggaatgaaagtgtctcgaggtgaatggtggatataatttccctcttctgattatttattactgtgatgtggttcctaagcacaaactgggaagagatagaattcatctatactgtcttttttcttggagagaaccgtttaaaaaattacaagatatatttaaaggaagtaagccagataaggagtagcacgatgtgctatttgttaacacaataacagttcaagagttaaagtgtagataaatgagagttacaaagtttcatcagaaagtttacatatcttgagtcaaatatattgtttatatgtgtatgggcatataatggaaataatacttggaggcaacagaagcgtattattaactactgcaagctaagccgagcttagaaatgcctttggttttaaaggggcttggcagaaagagaacagaaacaagcgattatttcaacatctaatcaaccaagtcagaatcctgtgtttggatagacaagagtatacgaaagtatatcgatactgtacaagtaggcctctctcgctatttactatcttataggtaattcaggctctaattagctgagggaatgaaacacgcagaaatcactgagtcctaagaagttccttaactaagcgagactagttacaagtcagcagcataga

SEQ ID NO: 684345 - DNA, 371 bp, Homo sapiens
tcctggaaccccgacgtcgctcggaactgcccaggatgaggctctgtcactctctgccagcgccaggaggagttcgtaggcttcgatgcactgctcgctgtactgcaaggccagcctcagcgctgtggcattggattcgtattttcccaccagcatgctcatcctctcggcattgcttttacattcctccaaggttatggtcaggaggtcattttgggatttgaggtgctcaatccggctattcagccgttctgtttccacctcaaactctctaatcttgctttctgagatggcagatccgtgtgagtagagtgtttggaaaatctcttggatattggagcagtcctgaagtgagtgggccaggtgttcag

SEQ ID NO: 684346 - DNA, 189 bp, Homo sapiens
cacatacaccggcccgcggccgccgtgccacgcgtcttcatcgtggcccgcgaggcgctcattgcattcggatcgcttgaaatagggcagcacgtcttcccacgcccagccgtcgcagcctgacgcggcccagccgtcgtagtcggacggcacaccacggatatagatcatgccgttgatcgacgggct

SEQ ID NO: 684347 - DNA, 423 bp, Homo sapiens
cgtctcattcaatagctcagaagtgtcatccttggtcctgcgtagctatcaaactcgctggccttgaatccgtaggtggactacaggcataaagctattagcaaggaacattcttcgttgtcctaggcccatggtgttaataatggggtccattagtacatgttcagacgttggtccatgtatcccagatgactcagaagccatttgttggataggcacttggtcatacggccgaatagtttcccatgccttggtctcagtgctagaagtctggcattgatgtcctactccatagagtcctacatgacggtgatacgatagggtttatagatgtcttgagctaggccatgtgcctcgagcgcagttatgtcaccgccaagcaccagccgagagtgcttggccccagtgtgcatcaagcacccg

SEQ ID NO: 684348 - DNA, 99 bp, Homo sapiens
ggacgcagggggctggcgggaacgtgaagctccgcggtgctgatggggccgttgggcggcggtagctgttgctgttgggggaccccctcattcctgccg

SEQ ID NO: 684349 - DNA, 372 bp, Homo sapiens
gtgaggtatctagaggatcttgtgagaagctggaggggtgggtcaggaagcacagtgggggacagtttctggcatgtcggggacttggctccagagcatcgtgctcgtgtgaagtctctcaatgtggggagggagagctctaggtcactgtctcctgggaccagcacagtgcccagtggaacagaggcctccttgagctgttccttgtcgtagggcagggcctcatagtcgtgcatgctgacgcgactcacctggatgcgcaactgctctggcaccggttgctggtcgctgtgcaggggggcggcgctccggggattggccttctgcaccatgggggcctggttggggcagggcgatgcgggatgcgtgagg

SEQ ID NO: 684350 - DNA, 154 bp, Homo sapiens
ataacaggctcagatggactccggtgacgggctcacccacactgtgcccatctacgaggggtatgccctccacccatgccatcctgcgatctggacgctggctggtccgggacctgatctgactacctcattgaagatcctcaccgcagcgcgg

SEQ ID NO: 684351 - DNA, 411 bp, Homo sapiens
gtttaaatagctatgtttcatgctcactgaagttttttttttgatacagggtctcactttgtagcccaggctggagtgcagtgtcatgatcacagctcactgctgcctcaacctgctgggctcaggtgatcctccaacttcagcctccccagtagctgggaccacaggctagcaccaccacacctagctaatttttgctggattcttttttttgtagtgatggggttttgccatgctgcccaggctggtctcaaactcctgggctcaagcaatccagctgcctgggcttcccgtcctgggattacaggcgtgagccaccatactagggcttgaagtatttgcaattgctaacgcctatatgattcacttcacagctggagctgggcctagtggctcataccctggggcccg

SEQ ID NO: 684352 - DNA, 239 bp, Homo sapiens
ctaagagttggtggtgcaggttccagaagtttaaaagtgatgctgtgagcaggagccccttccatttgatgctgctgtgtgcagtggaggggctgagagggttcccatgtgtctctgctgcttgtgtgttctcctcatgtggagagtaagcctaggatccatgaaactcttctgagcactgggtgtacagcgtgtgctagtccttgcctcatttcttgtgcttgagcctcgttcccagt

SEQ ID NO: 684353 - DNA, 136 bp, Homo sapiens
caacgctggcaaccttatccggtctcttacttggaaaaccccttgccgtacatggaccagcagactggcaacctcaagaaggccctgctcctccagggctccaacgagatcgagatccgcaccgtgcttatctcat

SEQ ID NO: 684354 - DNA, 980 bp, Homo sapiens
tcccttgacgcgcttgttcgccgttttacctcaatgcgtctccctggtagcccctctttttcgacgcccactctttccatctcaatatgttccgcgcgcccaaatttccgtttccgccttcccgcgggctattttcttctttaagcgacgtatcccttttgggtccccagttgcccccctggccgctcctccgcttgtcccataagtagggccccccctgtgcttcccgcaataatcgcgcgtctctttgtggccacaattacggctttgtgcgagtggtttccccagccccgcccttatctcgacggcttcctcccgtatctctcgcctcgcgggtcagcacatcttcgtcgccacgccccgggcgcccacaatatacgatggcacgtgaggccgctcacatgtttcttgcagcacatcatcccccccttctcccttatgctcccattgataccccagtgctgtggtctccacaaccaagtgctactcactccagagatccacgctgcccttgttggactaatgaagtattaacaacggggtgcaccacacacaatggggggccttccaagatcgagtaactcacacctgggatactccttcctccgagatatcgtgcatagtatctactccaacttgtagaaaagtggtgtccaaccccagggctggtggtgagagaaatagcgcttgatctcttttatgcagatagcgagatacatagaccaaatccttgcgacgatcaaggcggcttgcagtggagaaacaactgctcgcctctccggtccacataacgacccggtgacgaccgcccttgcaatgggtaaaatcatgtccatgccgttcaatggccctcccctctttttgctccccggtcgcaagccaccaccgttgcagtggctgtttcactggggatgcaaacgagcgccttttagtttccccctcccaataaacacccttttaacaacgccattcatgacaaa

SEQ ID NO: 684355 - DNA, 271 bp, Homo sapiens
agagtgaaactctgtctcacaaaaaaaaaaaaggaaaaagaaaagggagtaaaacccggggggcctctctgtatgagggtaatggagaattaccactctctggtatatggtgtaaggcactgggatggtacagagcatgttttctgtaccataggacccagcaaacaggtaagatcatgtcccaggtaagcacttctggcccagttttagggatggtcatcctcacacatgaaagagcccattgactgatgaggtcataatactcatggat

SEQ ID NO: 684356 - DNA, 510 bp, Homo sapiens
ccccacagaagcaccccagttatccctctggaagaagcttgtcttataagcaggaccatcggcagagaaacacagcagctccgtatctgtgctgtggcggctggccatccaggtatctgcagccccgtgaggtggaagaagctggcatatacctgggagtccacggaggcaacatgtcgacgccatcgagcaacagtggacaggtaccaccttgcctctcctcgccctaagcaagcactgagcgtgagggatgatacacctgaaatgtgttcagtatcctgtgcttctggtgaaaggggcctgtgcaaacccaacagcctggtcccacactgttccaacacacctggtgctctgtccctcctccaggcctctgcacagggtgcacacttcctgcctctcccccattgatagtggcatttcacaattgcttcaccaatcagcccaaagtggataccgcagtgtttataacctaaaaattaaaaccatacttgggtaaaaaggaaggagggc

SEQ ID NO: 684357 - DNA, 152 bp, Homo sapiens
tgaaaacattaagctaaataagtgaatatctccagcctccctctctgagcccctccctaccttctcatccattaaaacagcactccatttcattacaatatctacctagtgtataagacatacatgtatatataaagtaatatgatatatga

SEQ ID NO: 684358 - DNA, 186 bp, Homo sapiens
cttagaggatcccaagctccacagatagctgagccccagagagagctctacgtacaagtacaggccagctcaggcccaatcgccagctctcccgctctgatctgcactctaacatcgatctgtgctctgggaagacagaatagctctgcatgaactatatcactaaaactgtcttgttgggagctt

SEQ ID NO: 684359 - DNA, 311 bp, Homo sapiens
  misc_feature (284)..(284): n is a, c, g, or t
tcttccgtgcccaggccccgtcggcgtggcaagaggatctcaaactcagtgtccagatccaagtcagtgctgcagtagtctttgggtaggttgatctcacctttaaacgacagggttatgcttaagcagagaggagttccaactcctcacagaatctaggcgtggggaggagggatgcagaagccatcagctccacacacagccgggagccgggtctcggttctgccccatctcatctgctgatagagtttcaaatgctttcagctcccttttgatgccatatntagggacggaagatcaggggattctca

SEQ ID NO: 684360 - DNA, 1156 bp, Homo sapiens
  misc_feature (905)..(905): n is a, c, g, or t
agcggaagaatcctatacgagatggaaatggacatgccgacgtttatggccaagatgtttgcagactcctgtgagcagtgggaaacaaatggaccaacttctttggcaagtggacattttactggctcaaatgtagaagacagaagtagctcacggtcctggcgggaatggcaggacatccaagcccgttcaggaactatggagatgggactccctatgaccacattgaccagcagggaccttgggtcacatgacaagtctctctccacctgtttgtcaattccatgaatacataagtaataatatgaaacggggctcatactcatctgatggagacgatgaatcaagacgttacagggtggaccaacagcagagtctccttggaggtgacagtggcataatgggcaaacccaggaacgcctcttcgcctcgaaacgaagaccgtggattccaggtacgtatcagatatagcgtaggcaatgaagtccccgaaggaaaggccgtcttcagcagtaagtgcctagtggcaggtacaagacgaacacgaagagttcgacaaaatgttccgtcgcaaggatgttgccagtcgtatgcaggtcgtatggcgtccaagtacagactaacgccatctggccagaggtacacagtagggatctcgtcccaggtgcttatcacgtatcctccaaaactcgagcaaccgagataacgtgttggcccctgaagtcatccgcattgcatctccaatcgtcggaggaattgaggcccagtacagcacgcgatggtggaaacccggtgtgggaaagcgtccatccaacgtgggggactggaaattcaaggcttgggcgttatgccagggacaatgttcggcggccaaactcgttccttcagtatttcggcaacaggcntcccaggcagggcttagagggtaaccccctgtcgattccgcacaaatgaaagcgagtttggaaacggtaaatacctattcaaccgacttccccttcgagcagaaacttccaagtttcccatggtctttgcctcccggcatgtgttcaagctgttcccaatggctaacctggtggtctctacaaatccacatacaagggaccatctttcaggcgtgccgctcccgtgtggcaacggggaacgcaacagcatt

SEQ ID NO: 684361 - DNA, 462 bp, Homo sapiens
  misc_feature (37)..(37): n is a, c, g, or t
  misc_feature (103)..(104): n is a, c, g, or t
  misc_feature (128)..(129): n is a, c, g, or t
  misc_feature (133)..(133): n is a, c, g, or t
  misc_feature (137)..(137): n is a, c, g, or t
  misc_feature (144)..(144): n is a, c, g, or t
  misc_feature (168)..(168): n is a, c, g, or t
  misc_feature (184)..(184): n is a, c, g, or t
  misc_feature (186)..(187): n is a, c, g, or t
  misc_feature (190)..(191): n is a, c, g, or t
  misc_feature (205)..(205): n is a, c, g, or t
  misc_feature (251)..(251): n is a, c, g, or t
  misc_feature (349)..(349): n is a, c, g, or t
  misc_feature (360)..(360): n is a, c, g, or t
  misc_feature (380)..(380): n is a, c, g, or t
  misc_feature (462)..(462): n is a, c, g, or t
caagtttatttccttatttaaatacaaagacataaancacaaacaggtataatcaagacattgtgtctcacatttacactcccatcggatcctcttccaattnncagaccactgaccaggctagcagnnagangaangaaagantttcttagggagcaccgtcgtgangcccgacgcggggttngnnggnnatcaaagacgaggncagcctctcatacctgtctccattcacatttacctgggaccagggngggcaggggacaccagggcatggctcctgaaccccggccccctggactgaagggacagtgtgtgagaatcagttctgtgaagggcgggagggagcagncacctatgccncctgccttcacagttaaggngaaaaccttagccctatccttgattcctgggggctgccgggccctgtgtgctcccctgcacacctgggtgcctttctgaagn

SEQ ID NO: 684362 - DNA, 269 bp, Homo sapiens
cccccccccccccccctattatttatatattttttttccggggaaatttttcggggtttcccaaagggtttgggtttggtggtaaaagccccccagaatgtttttgaagaaatggccttttttttttcctttccatttgaacttttttatggtttaaaaaaaacgttttgggagggccccttcccccgattgaagagggggttttgggttcccctaaacttgcaacccccgttttttggattttgtaataaaaaaaggttttttgccca

SEQ ID NO: 684363 - DNA, 173 bp, Homo sapiens
gcaaaatgtaatgaaatatcaggttgatttctttgattaaacagaccaaattacttgagtaataggaaattaggaggatctagggacagaaggaaagtgaaaatgtgaaatacaaataccaagatttagaccgggggaaaaaccacaattggtaataaggttgctattgtaaa

SEQ ID NO: 684364 - DNA, 885 bp, Homo sapiens
  misc_feature (639)..(639): n is a, c, g, or t
  misc_feature (643)..(643): n is a, c, g, or t
  misc_feature (663)..(663): n is a, c, g, or t
  misc_feature (700)..(700): n is a, c, g, or t
  misc_feature (703)..(703): n is a, c, g, or t
caattatacttttgcagctggatctatgactatcaggtctctcaaggattttatgtatcaagataatatgtattgacttttttaaatgataaaatgaattctagttagagtctttccttggtatctgcagtggattggttccagaacaccatcccccaatattaaaatccacagttactcaggtcccttatttatataaaatagcacagtatttgcatataacctgtgcacatcctcccatatactttaatctccagatgattagatatgattgcatagcacttacgttgtgctatgtagttgttatattgttttttcatttgtactattttttatgatatttattggttttttaaattttctatccaaagttgtttgaatctaaggatacagagcctgaggatatggaaagctgactaaatatagtaacactgaagagtattcaaatgataactcataccagtaccaaaaacttgaagacttccttttaacattaaaaatacagtaactttttacgtgatttgttgaattcaacatatttggaaccagaataatcagaaacttcattctctaacagatccctgttaattacagatttatttgtcatattaggtcttttctttctcccatattcctaanccgngtactagctccaactgttgngaggtttgactctgaagactgagtagagtactattgntgnttttctttccttagtcagagtaatcagttttaacatgaagttgctcattgctgctaagaagcattaggcttcactgctagcacacaatgacaaactacaaatctgagtcttctttcacagatgttattgaccataattaaagtcaacagtcgtcagagatatgcaagaaggaaactttttgg

SEQ ID NO: 684365 - DNA, 142 bp, Homo sapiens
agaaaaggtctatatgcatactcccgccctggtcaccacccaatgacgtataacgaaggggacagtataacaaagtacccggccatctcatctccagaccccacctatggtgccctaccatttccgacgccaacaacacacc

SEQ ID NO: 684366 - DNA, 939 bp, Homo sapiens
  misc_feature (693)..(693): n is a, c, g, or t
  misc_feature (697)..(697): n is a, c, g, or t
  misc_feature (717)..(717): n is a, c, g, or t
  misc_feature (754)..(754): n is a, c, g, or t
  misc_feature (757)..(757): n is a, c, g, or t
caattatacttttgcagctggatctatgactatcaggtctctcaaggattttatgtatcaagataatatgtattgacttttttaaatgataaaatgaattctagttagagtctttccttggtatctgcagtggattggttccagaacaccatcccccaatattaaaatccacagttactcaggtcccttatttatataaaatagcacagtatttgcatataacctgtgcacatcctcccatatactttaatctccagatgattagatatgattgcatagcacttacgttgtgctatgtagttgttatattgttttttcatttgtactattttttatgatatttattggttttttaaattttctatccaaagttgtttgaatctaaggatacagagcctgaggatatggaaagctgactaaatatagtaacactgaagagtattcaaatgataactcataccagtaccaaaaacttgaagacttccttttaacattaaaaatacagtaactttttacgtgatttgttgaattcaacatatttggaaccagaataatcagaaacttcattcaaaacctatgcatctgaacttttttagtaaggtaatactcaggactgttctgattctaacagatccctgttaattacagatttatttgtcatattaggtcttttctttctcccatattcctaanccgngtactagctccaactgttgngaggtttgactctgaagactgagtagagtactattgntgnttttctttccttagtcagagtaatcagttttaacatgaagttgctcattgctgctaagaagcattaggcttcactgctagcacacaatgacaaactacaaatctgagtcttctttcacagatgttattgaccataattaaagtcaacagtcgtcagagatatgcaagaaggaaactttttgg

SEQ ID NO: 684367 - DNA, 129 bp, Homo sapiens
cttaatagtctcgggagaatgatgatccctacggcacaaagaggggtaactggttcttattaaaaagatttcacaggcttgatacaagggctcatgtttataaccccagcatttgggagaggctgaggt

SEQ ID NO: 684368 - DNA, 516 bp, Homo sapiens
ttttgagatgtagtctcgctctgttgcccaggctggagtgcagtggtgtgatctcggctcactgcaagctccgcctcctgggttcacgtcaaaggccttcttttaaaaatagtattcattatagttttggttccgaactagcatgctgaaacttcagctctcatatctaatgtaatttttttgcattgtgaaattatcttcctaagattttgtataaatcgggtgctgctgtttatcttgttgaagccttttaattgataccttatgaattttcttgacctttaaaatttaaatctatcctgagtgtattcaaaaattgtggttaggtttcttttgaataattctgttcagattgtgaggctaaatatgctttattttttgaaagattataagtttttgaaaaatggcagaaactagacagtagttgcggggagggaggtatcacacttttacacttgtttgctgtctcctgttgcaggaggaccagtatgatcatttgatactctacatgacaaa

SEQ ID NO: 684369 - DNA, 270 bp, Homo sapiens
tgagtaatgaggattcaaggaggggaggaaaaaagtgtgcttgtcagtttggaaagtcacaggagttaccattctataaattagattaggaggaaaaatgagaacccactggtagaagaagaagcaacagtcttctagggtctggcatttgatgagataggtattcagttacatgtgcatttccattgttcatccatggcacaacatacggcagagattcgggaactcgcattcctgaagccaggttattcttatgttctgtaactatgt

SEQ ID NO: 684370 - DNA, 492 bp, Homo sapiens
ggcatagtgtcctccaggttcatctatgtggtcacaaatgacaggattttcttcctttttaaaggctgaatagtattccattgtgtatatatatcacaaatcttttatttattcacctatcaatggacactaggttgattccatatcttggcttttgtgactagtgctgcaataaacatgggagggcagaatctctttgacatactgatttcacttcctttggatatatacccagtagtgggattgctagatcatatggtacttctatttttaatttttttgaggaacctccatactgttttccataatggctgtactaatttccattcccacccacagtgtacaagggctcacctttctccacatcctttccaatgcttgttattttttgtatttttgacaacaactattctaacaagtgtgaggtaatatcgcattgctaactttttacaaatcgcatatttcttttttctcccctcctcataaggcctg

SEQ ID NO: 684371 - DNA, 787 bp, Homo sapiens
agcggggggttgttaaaacccagtgcgttagaagtcggatgcggtggctcacacctgtaatcccagcactttgggaggcccaggcaggcggatcacttgaggttaggagttcaagaccagcctggccaacatggtgaaaccccgtctctactaaaaatacaaaagttagccgggtatggtggtgcatgcctgtaatcccagcttcttgggaggccgaggcacaagaatcgcttgaaccaggagacgggaggtgtcaaggggaatgaagatcggtgccatggtattccaagcctgcgggtgaaagcaaggtgaggacttgtgattttcattaggagactcctagataatactgtggtttgaactgaatggtgggagggaggcaagtgacgtgttatgagcggtcgactttatgctgctagttggttccacaaagatcgttatctgggaggtgagcaaagtgagtgtagcggtagtcgaggtcacaaaggcaatcagcctccttcctctcccagtgcgatggccagcttctcagtgcttctccctgttgttaccaagtagtagaccctacccattctggatacttgcacctgttactaatataattcgaggtgtcattcctaaaatctctcttagatcctgtccttggataacagcggtcagtgcctactacgggggtctagacagacctcttgtggagcagttagaggcgtgccctgactccacaagggccctttcctgggcatgacaagtatgactagtgaatccgaactttgccttgactatccta

SEQ ID NO: 684372 - DNA, 402 bp, Homo sapiens
  misc_feature (50)..(50): n is a, c, g, or t
agttccctgtaaatatatgcataattcatttgtaggcagttaaacctccnacttttatggtaaagctttcaattgtatcagaaaataggcagggcgcagtggctctcatggctgtaatcctagcactttgggaggcggaggtgggtggatcaccttgagcccaggagttcgagaccagcctgggcaacatggtggaaccccgtctctactaaaaatacaaaaattagctgtgcgtggtggtgcgcacctgtggtcccagctacttggaaggctgagctgggaggactgcttgagcctgggaggtccaggctgcagtgagctgacattgtgccactgcactccagcctgggtgacagagcgaaaccgtgtctcaaaaaagaaaataaactgctttgaatgagg

SEQ ID NO: 684373 - DNA, 228 bp, Homo sapiens
cctccaacttcaacaaagctgaagccaagagaggcagaggcttggtagtagctcttgggcagcagacaaaaggatgagctaccagaacagacagattagacattagggacacagagctaataggagtggattgacctgcgggctgtttaaaagatgtcctgcgagtgaacagaagagcgccactctctgtctagctggttatctgttcagtcgcagggtcgagtcgat

SEQ ID NO: 684374 - DNA, 221 bp, Homo sapiens
taggtttttttggaatcccctttgaaaggtaatttccccccccttgccagggcaaaaagtttgtgatttttatcgccgaaaaagcttccaacattttgaaattgacttaaaaaaatgttggcggggaatgtctgtatctggcatttcaatgggctttgtgacccaaattgttttggattaagtctgatctttaaaaaaaaaatttctttgggttctctcta

SEQ ID NO: 684375 - DNA, 164 bp, Homo sapiens
tgaaggagacgacgtttggagttggtttccagctgcggagaccaccagccaagcagaagtgcccacggagacagaggcagcccagaccctccttgtgcctatggggagccgagggctaggtgagaagtaggcaagcgctgggatcctgagccaagccacattgg

SEQ ID NO: 684376 - DNA, 870 bp, Homo sapiens
tcatacgatactgcgcaaacatggtcccaggaggagaacatccgcgtgcccagtgtggcgccaggaagatcgagctaaggagagctggtgtctctgcagactctaaagtatatctgcgtgtgtctctggcgacttggtaaatttaacatgcacattgttagcaggacgagtgtgtactactatactgcagtggtccaccagaaatctggtgaccaggattccagcttaacctcgaaaacatctacagctgtatcttgttcccttgatggcacaaattaacctgtgggactatatagatggcatcttaataaagactttcatagttggatgtacacttcatgccctctttaactcttgcccaagctgaggattctgtcttgtgtcatagtgaataaagaaaaaccagatatatttcagctggtttcagtgaaactgcaaaatcctcaagccaggaagtagaacgccaaggagctgtcctttgtttggattacataaaccagtcacccaagtgcattgcttgtgaaacgagggagtatatgtgctgcagtacggggaattttcacttgtctgtcattttttcaaacaagacaacaaccatcaggtttactttatcatcatccagacatagaagcatgctaaaacacaattttacgtggtgtagccttgtcacccaatggagactgcttcggcttctgggtccacattgcatgggcaacattcgtcttgggaggaatttattacataagaaatttcgtccctgttgaacttggccctgaatggtataggtgggtttcaggacagcccagcgctgaggggcgcgcaccggcgtgactgggcagccaacaaaagagttccggaggacatagacat

SEQ ID NO: 684377 - DNA, 523 bp, Homo sapiens
aatgaaggagatgtacatgtttaaatgtgaccaattgaatttgaatatggtgggaaatacgctgcttgtaagaggcagcatgacctagtagtttaaccacatgaattctgagtaaaaattaatatagtcttattctacctctgccatttaccaaggctgtatccccatgcaagttgctgaatctctctgttctttgctgttctcatctctaactagctcataaaaatcttgtgagatattggcagtggctcatgcctgtaatcccagcactttgggaggccaaggcaggtggatcacgaggtcaggagatcgagaccatcctggctaacatggtgaaacctcgtctctagtaaatatacaaaaaattagcccggcgtggtggcgggagcctgtaatcccagctactcgggaggttgaggcaggagaatggcgtgaacccgggagatggagcttgcagtgagtggagatcgcgccactgcactccagcctgggtgacagagttaggctccgtctcaaaaaaaaa

SEQ ID NO: 684378 - DNA, 470 bp, Homo sapiens
gggtcagtgattagggtaatggtgacacggtgtgttggaagtagaaggtgcgataaaattatgagccttaagataggtaagctagcaatgaatgctagggtgggaagtgggtgagccagtggacattagataaataccttgcaagtgtgagcttagacgtcaaccctaagatagttaaccgtaatgctaatcgtgatcattagtgaatcccttcagtcacatgagggggaaggtagtgggctataagtacggtcattcgtagtccagtcagtctgaaaaacatcttgggttacccacgccgtccactcccataggctacagaaaaggtcacaagcgcgtggtttccaaccatatgtgttttctgcagttatttctcttgttcgggccaagacaagcctaaaaatcctataccattccacaagagtgggaccatcacttgtgcacccactttgactatgagtataccagcc

SEQ ID NO: 684379 - DNA, 288 bp, Homo sapiens
  misc_feature (42)..(42): n is a, c, g, or t
  misc_feature (52)..(52): n is a, c, g, or t
  misc_feature (63)..(63): n is a, c, g, or t
  misc_feature (65)..(65): n is a, c, g, or t
  misc_feature (106)..(106): n is a, c, g, or t
  misc_feature (126)..(126): n is a, c, g, or t
tatgttagacaacagttatgacacatatgccaacagcaccancacccctgtngcccccgaggntnagcagccacaccaagaccctcatagagcggagtgagagttntgaagacatgtctgtcccanctgtacctgacacagaagctggggagcctaggagagctggtggaagtgtgtctgaactcggagtgctctgggagcgggctccacagcctccttgtgggctccagcctttgtcagccgcagcctctcttgagggggactccctgtccccttgaggcccagctg

SEQ ID NO: 684380 - DNA, 882 bp, Homo sapiens
  misc_feature (569)..(569): n is a, c, g, or t
gcttttcgatccgccatctgcggtggagcctggcatcaaaatgcagattttcgtgaaaaacccttacggtggattgaccatcaccctcgaggttgaaccctcggatacgatagaagatgtatgggccaggatccaggataaggaacggaattccttctgtgatccatcagagactgttcttagttggcaatgtgctgtgagatgtgacgtactctgtcttgatctacaatgtttcataccatggtatgtctactcttcatccctcccgtgcagggacgcacttcagtgtgtagagttgcatgagggaacaagcgtagaagagcgaagtcttaccaactacctcccagttgacagatttaggcactatgagaaaggtaccggttccacgactaggtctgctccattgcaatattatctatctagtggtgtgatagcagaattgtgcatcaattacggtacagccattcgtcagacgagttgccctttctagacggaatagtagagtagcattgcgtgctgttcatgtgactacgatcagtttagactgatcagtctattgatgtcagagntgttgggtctgatggtataatttggatgtaagattaataggggcaaagatcgaacgggggcccatcgtgtgtatgcacagtttatcctttggataggaccaattgtatactccataaatagggaatacgaccaaacataagactttgccaacaatgaagatgggggaaataaggttcttacgctctcaaggatgacacgtgtgttcaaaactacgctccaccttagagtgagtcggttactagaggcgtacgcggcaatctggatgtacgttaggccttaagttggtggtgtcctcgcaaacgaaggtaaacc

SEQ ID NO: 684381 - DNA, 433 bp, Homo sapiens
taattcctgttccactccaactaacaaaactatagagatggaggacagattggtggttgccaggagacagggacaaggtacgaggatgtgactaaaaagaggtagcacaagtgaattcctctcagtgatgaaacagttctttggcaaggacagttggtgcaagtggttacaggatactacacatgagatcaccttgcatagaacacacacacacaaaggagtgcatgcaaacactgtgaaaactgcataaggtctgtagtctaacaatagtcagacaatgcccatgccctggttttgatggtgtcctgctgttctgtaagatagctgttctgttagggaaagccgggtaaagcatccaagggactctgtctactacttttgtgactctctgtgaatctacaatcatttcaaaataaaaactttaaagaaaaaa

SEQ ID NO: 684382 - DNA, 570 bp, Homo sapiens
  misc_feature (5)..(5): n is a, c, g, or t
  misc_feature (29)..(29): n is a, c, g, or t
  misc_feature (45)..(45): n is a, c, g, or t
  misc_feature (73)..(73): n is a, c, g, or t
  misc_feature (122)..(122): n is a, c, g, or t
aacanacgcccggacaatggccaacagcncgccaatactcaaaanaagcaagcacgcggctgtgcaggttccnaaaatcccttccagaagaaaatctcagtacgtctatagcaagtaagagnccgagttagtcccttagaaacctcccagtggccgggccgggtgtggtggctcacgcctataatcccaacacttcaggaggccgaggtgggcggatctgagtccaggagtttgagaccagcctgggcaacatagcaagaccacatctatataaaacattaaaaaggaccaggcacggtggctcacgcctgtaatcccaacactttgggaggccgaggcgggcagatgagttgaggtcaggagttcgagaccagcctggccaacacaatgaaaccccgtctctactacaaatacaaaaacttagctgggcatggtggcgggcgcctgtagtcccagctactcgagaggctgaggcaggagaatggcatgaacccaggaggcggagcttgcagtgagccgagattgcgccactgcactccatcctgggcaacggagcaagactccatctcc

SEQ ID NO: 684383 - DNA, 1641 bp, Homo sapiens
tttgttttatattccggtggcagcctataggcagatgcttgtagctgcctccagtttaagaaaaattccttggagaaaacctcagctctgcctcataactgatgctctcctctcccagaaagttgggaaagttccaccttgatttgaactcgctggccaaacaccagctatctctgtagacacagattttgacaggttcagacccagattggaaatgattttgattcaggttgcctttgagtctgtggagagtcagagtttatggcaatttcagcccgctctatcctctgtttgggattatgtgttcccagagagtaaactgtgtggccccagagtcaccctaggaggatctgagtgaccctgggttttgtgtttttactctgtggatgttgtggtcacgctggatcatgttgtgtggaggcttgggagcatgtgttggaggaacagttgagattttaattttatttttggtggcttttttggtacatccaaccctttcaggttaattaaatgccaggtagagctagcccacaagtggattttgttttgaaaatgtgcctgttttccaggagccctttgtggcagcctggtctggttgcccagatatcattttggcttcttggtgccttagtgcctgggatgaattggcctgcctgctgcagtctcttctcctcagccctgatatccgccaactgggtggctttgatgcctctgctgagggctctggtttcctgccagtctgggaggcgtgggatctcatgcgtgggaaaggtaatcaagcaataaaactaagcctgggtgtgagaggtggattaaagtgggcaaggaagaagcaggggagagggagggagccagctgtccagagtggccggaagaggcagaatgtgggctccatcctggctgggacctgtcagcccttgtgagaacttttagggcggtagtattatagtttggattttccccattcatcttctctccttcccctctcctaggttttagctgcccacagaatcctttgaggaggtgattcctggaaacctgtgttcactggatttagtagaaatccaccttgacttcctgttgaatatttgacatgtcctgacaagtgtttccctcccatccccgcaaccccgtcaccctgctttaacaaaaagcttcaaagttgagaccctttgctctgaggtagaagattttatatactcttatttttcagaaaagggcagaataatgcagtagttaggaacacagctctggggacagattgcctgggctcctattgcctctgctgctgattggctgtttgactctgatgagagatctctgtgtctcggtttcctcatctttaaaaagggctaatagctgagcatgctggctcatgcctataatcccagcactttgggaggctgaggtgggaggattgtttgagtccaggagtttgagaccagcctgggtaacatagtggaaccctgtctctacaaaagagtttttaaagattagctgggtggtgtggtatggcctgtggtcccagctactcagaagtctgaggtggaaggtttgcttgggcctagggggtcaaggctgcacaagccttggtgttgtgccactgtactccaatccgggcaacatagtgagaccttgtct

SEQ ID NO: 684384 - DNA, 179 bp, Homo sapiens
tatccccgcttctgcttccccaggtacaataaaactgtgttgtttcaaatgtgctctcagtttttatgtgtgaggtttttcaccatcacatgtgatgatacaatctggcttagccattgcgcccgttgttcctggttctggctacaagtggtccttgcgaatcaggatcttgttgaggt

SEQ ID NO: 684385 - DNA, 261 bp, Homo sapiens
tccgacaacatagaatgacatgttattcgttcaaaacaatgcctccactccaaataaatcacagtcaaaatatctgaagagctcaagatgacatcagtcccatatgtcttaagtcctggggttgtgtggatgacgagtagaagccagttatgatgcacaggtgatagatccaaaataattgccacatgtgttaacatttttccatttctaaagcatccttacagaaaagtcatatatggagtcacagccttctatggtagt

SEQ ID NO: 684386 - DNA, 888 bp, Homo sapiens
tgggttggtcagcaaaaatcttttaaaaaaaaaattaggacccgggttaagtttgggtaccccgcggggggcccgtcggcctgtgggaaggctcaaattccgggccttgtggagggaagttagggtgggggggggtcgggggggggttcccgggggccttggcagaaaggcgggatacacctctgcggccctggcaaggaaccggagagcagaacaggtgccacagccctaaggggagctccaggcccagcgggctcaaaaggtgaggagtctggcccctggcccgtgagaatgcgcgctgcggccccggtgggtcacgcgcagggcacatacctccagtgggggatacctccgtgaacccgcaatatcactccagttaggtgtccccaaaaccaagggccggtctgggtttccccggggccaaggagaaaggtcactctccgggactaacccgcgagaaagggcacaagaggcggcgcgggtggggggagactcataaacaactctctttcaaacacccgggggtggactgggggagtgggtctccggggcagaacccggtataattggaccacaacgacccaggaaatacccgggcctggggctcctggggcagaaccttagggccctggtaaggggggatgcacctccatatggaggggcctccggccctgggccgtggaagggcgcgggaacggaaatcctaaagaggaccaaggtgggacgggtggccagcccatcgggcgcaaacgcggtccccgaccaagggccacggcttcaaattgggggtgacgcgaaaaagaactggggacatgggcttattaaggaaaacaagctctgggcacacacgtctggaaatcggcggaaggggcgcaccaaccggtagac

SEQ ID NO: 684387 - DNA, 275 bp, Homo sapiens
cgaatgtcttaaataagtgattgagcctagagatggaggttttttgatggtgttgagtttgtggggaagcttgaaaagtatcgtggcactcctatagggtaaaataggtgtagaaggaaggaagaagagaggaaggagagggatacggaattgaaatggaggaaaggaaggaacttgaaaactgaagacgtcaatactgcttggcgcacgtagaactctgaagtgtcacagcaagagtggtaggtgccaggcagtaccgacagcaggaccgttga

SEQ ID NO: 684388 - DNA, 727 bp, Homo sapiens
  misc_feature (3)..(4): n is a, c, g, or t
  misc_feature (10)..(10): n is a, c, g, or t
  misc_feature (12)..(12): n is a, c, g, or t
  misc_feature (14)..(14): n is a, c, g, or t
ccnnccgggncncngccattaccagggcggggggccgccacgccccccccaacggcaccgggcggcacaccgggaacaacggaagcgggaaccgaacacacacgcaacaccccaggaccgaagaaaccagcaagaaccaccaacaagggaacaaagccatactggggggggcccacaacgcccaccccaaagagagcgagacacaaaacgggggcgaaagccaccaacaaaagcacacacccaaaacaggaagcgcccgaacagagcaaaaacaaagagcggcaacgaaaagaccccaaccgcccccaaaccccaaaaaccacgccacccaaaagacgaaacaacccagagcaccaaccgaaaaccagcgccaaaacaacgcacacaggccaaaacgccgaaaaaccaaaagccgcccaccgcggacagcaaacagggggccaaaaacagcagaacgaagctaaaagacaacccgaaagccgcccacaccaacaaaaggcccccaacacgcaagatgcggactaaaaaaacgaccccgagcaaaaacccgcgggcaaggccaaagggaccaccaaacaaaccaaaagaaaaaacccgcgaaaaaggccgggaccaaaaagcacaggagacaagccacaacaacaaccaacaccttgggaaaacaagagaaaacaaaacaagggccaataaaaaacccggggaaaacaacctaaaaacaaacaaccca

SEQ ID NO: 684389 - DNA, 116 bp, Homo sapiens
  misc_feature (110)..(110): n is a, c, g, or t
gagccccacttatgcgtgggtacaaagtgactcagcagtgccgggaagtgccactgaggaggcccgaacgttcgctgaaaacaatggaactgctcttcctggagacctcnagccct

SEQ ID NO: 684390 - DNA, 656 bp, Homo sapiens
  misc_feature (524)..(524): n is a, c, g, or t
  misc_feature (593)..(593): n is a, c, g, or t
tgtatatggatgttctggatgactatgctatgcatatgcctatagcagtgctctgatctggaataaacatcgcttctttgtgatccattctctgctatgttgggagacagaacaaattcaaagtgggatagagactcgtactctgcttgatataaacatcagctttttatatgctgtgagacactagaagagctcttaaataaaggcatacttagttaaataaattaatatgacatgcacatactgcatctggtcctggtaatggtctcaacagtgaactgacgattagcttattccacagtattaagcaaacataggcatcttactatggtatataaaacagccttttcctgcagaccagctgttggatcattatttacaaagatacccggcatagtcatatgacaattgtgtaaagtacacttcattcacgagtaaatggcttgatgacaaatcgtataatgaaaggtcatgtgctatggttcatgtcttgccagtccgagccatttggtgcatcatgcagngtagatacacctccagtcacaatgagctttgagatcatgtcttggagcacattgatgaaatctcacgtntctacataaggattacaatgaaattagcactggaccatggtaagcatcgaagacctgatcccc

SEQ ID NO: 684391 - DNA, 173 bp, Homo sapiens
tggggtttatggtttcggaacttaccgaatcccgttctgccgggaatttaccctacggccagaatggctgttgtgacactgcctgtggtggggttatggtttcggaacgcacctgaatcccgtttctgccgggaattttaaagtatgggaagtttagggcatactttgcaagt

SEQ ID NO: 684392 - DNA, 212 bp, Homo sapiens
tgggaggttcgtgattggaaaaaccttgcggagcagaagctactactgtgtaagtaggatacaccccagttgaaatctctgcaccggtcggttctattcagcgaacagcactataccaaaagaagatccgtaccatataataggccccattaaattacagtgtatctcaatgaacttgcaaaggaatatcgctaaaaacaaacaaaaaaact

SEQ ID NO: 684393 - DNA, 359 bp, Homo sapiens
gtaaaatccatgcttcattattcaaaatttcctgataccatttcctggacttccaaggtacaagggtaaccagctgtttcacttcagatgttgtgttttcaacttaatgtaatatgtcttccaaagcctgtagatccttgtcgactttggtttgataagtagccaggaaatctgcaatgccacaggtagttgcacaagagtttgttatgagacagggcctcactctgtcacagagtctggaatgcagtagtgagctcatggcttaatacagtctcaacctcgcaggctcgagcgatcctcctatcacagcctccagagtgctaagtctacaggcacagggtaccacgcctggataatct

SEQ ID NO: 684394 - DNA, 363 bp, Homo sapiens
acagacagaaaagtaaatacaaaagcttagccaactatcacggacgacatgaaccataaatgggtaaatagggaaaggaggatatgccatagacctacaaggggtaaagaccaaagcatgtaaaataaatgatggtccatctacttaatggaatattatacagacctattaaaatgatgtacccaaataatacaagcaagagacttatgatatactattataagagaaaaaagcagggtaatatacagcactgttacaactactaaaaaaaagagactatgcagagagaaggaaagagtggaagaaaactaaaatagttaaacagtgatatgtgtctgcgcaaacgtagtgggtaccagaact

SEQ ID NO: 684395 - DNA, 269 bp, Homo sapiens
cgacgcccttgtagcgctacgtgtcgataatagagatccggagtccgtacgttgcagagcgtgacatgtctctggcttaatcgacaatgcctcgtgccttagccgctgaacatgcaagacagacatatgctaagaggacaccttgattaacaagacgcaggctccgtactcatagctggcatgatgcagcaggaatattatgtcgagcatcccattggtcaatgaggcttcgtctgtatgacgactgattatcttttacgactgagtgg

SEQ ID NO: 684396 - DNA, 377 bp, Homo sapiens
  misc_feature (9)..(9): n is a, c, g, or t
  misc_feature (87)..(87): n is a, c, g, or t
  misc_feature (126)..(126): n is a, c, g, or t
  misc_feature (135)..(135): n is a, c, g, or t
  misc_feature (139)..(139): n is a, c, g, or t
  misc_feature (146)..(146): n is a, c, g, or t
  misc_feature (152)..(152): n is a, c, g, or t
  misc_feature (154)..(155): n is a, c, g, or t
  misc_feature (170)..(170): n is a, c, g, or t
  misc_feature (181)..(181): n is a, c, g, or t
  misc_feature (185)..(185): n is a, c, g, or t
  misc_feature (212)..(212): n is a, c, g, or t
  misc_feature (217)..(217): n is a, c, g, or t
  misc_feature (222)..(222): n is a, c, g, or t
  misc_feature (239)..(239): n is a, c, g, or t
  misc_feature (241)..(241): n is a, c, g, or t
  misc_feature (254)..(254): n is a, c, g, or t
  misc_feature (290)..(290): n is a, c, g, or t
  misc_feature (306)..(306): n is a, c, g, or t
  misc_feature (308)..(308): n is a, c, g, or t
  misc_feature (313)..(313): n is a, c, g, or t
  misc_feature (333)..(333): n is a, c, g, or t
ttacccgtngtggtggcctcgtcgctacgcgcgctccgtgttcgctcggcggcgggaaggtcgaccaccgcgccgttcgcacgcgcnaacgcgcacgtgctcgacgcgcccgacgcacgctcgcgncgaccgacngacngtcgcancgcccngnnctcggcgccgacgcncgctcgccgcngcanctgcacgcaacctgcccaccgcgccgncgcanaccgncgaccctcgcgaacgcncngcgcacgcccganctcgtgaccgcgacccccacgctgcacgtcgacgcntgccgctcgatgcgantntgcgncgccgcacgacgccaaacgncacgcaactgaacaaactgcgccgacgacactgcccaaacgatg

SEQ ID NO: 684397 - DNA, 523 bp, Homo sapiens
catgcatcatggtttcttggtgtcctaatattaagagcaagtatgtaacgtgtcattgggtatataaaaaagtgtgtcctgcttacaagatgcttttgatctaacaatataaattaaatctagattagagctaaattagatttgttatctatttctgcctagtttttgtttcctatcatttttgccttttgagtggtaatgctatgttatatggggcaattcagtattgatattcagtggtttgcactctttattgttaataaagtaaaacacaatggtttgcactctttattgttaataaagtaaaacacctgttacgtactccatgaagtctataacctagagtcatttgtatgcttactggtctagaaaccactgatttattcttggttcttttttctctctctgaagtcgttatctttcattagttacctatttttttggttggtgttttttccagcgctctgttgaattacatattatggtttggtaaaagtgagtttcttatggacagcacaacctg

SEQ ID NO: 684398 - DNA, 154 bp, Homo sapiens
accaggaacatatgggaaattatgaaaccttgctgtcagatctacaacatggaaattgctagcaagatcaacttcttgatgtataagaatcaggcagaaccgaggcaggaatgctgaggcctgcggattagacatccagtatgaaaacacccca

SEQ ID NO: 684399 - DNA, 610 bp, Homo sapiens
tataaaagttccagaagaaaacaggaaaaaaatctttgtggccttgagatatgtcaaggttccttagcacaacaacaacaaaattctttaaaaagaaaaaattgatatattggacttatcgaaactaaaaattttcattcttcaaaagataacattaagaaaatgaaaaggcaagccacagatgggaaaatatttgcaaaatgtatatcaaaggacttgtatctactcactaaagaagataatacacatggtgataagcaccataaaagatactcaacatcagtagccatcaggcaaaatttaaaaccacaaatacagtaactacttacattaccaattaagaatggggtaaaaaattaacaaaacgagttgaccaataccaagtatgggcaaggatgtacagaaaccaagctctcacagtgttgcatggtaaacatggttacaaccactttggaaaaaatagttgggggacttttttctctaagttaaaacatatattttacgcatattacccagctattcccactttggcaatcatttaacctaagagaccggaacactgtacatcttcagggaagactttgtaccaccaaaattttcataagccaac

SEQ ID NO: 684400 - DNA, 921 bp, Homo sapiens
cgaggtgtcacagagattaacgcgggtgaacacaacgttggggacacgcgcgacgagtcccaagatgtccaccggaacggcctcttggggacaacccaccgctccggggagtagcctccccggggccagtcccccccccggaaggggagcttcccccaatagcgcggcacacttaccgcggatccttaaagctatcgcgccaaaatgtcaaagaaaagtgtggcaaaaacccggcgtcccaccagtggcgcgcgaacattgaatctttgctgacccccttgggaacagagcgaccagcaaggggtgactacccccaggcggttagtgggacggtgtcacaaaccacctctatgggggctccttccaagtccggcccccccgcgtggtataccccattgacaagggcggaatgccccttatgagtgaaaacgaaccggggggcacttctatcacccgcgtctaaacgtctacagtgaaaccgtgttagggggagaattaaagaaaattttcagcgccgagtcgcttctttataaacgcggagtgttaaccccgaaggcgggttgtaaaacacccctgttaaaactccacttgccgccggggatattgcgcctctttcaggcctgtgtaaacccctgtatctttaccgcccccccataatagctgacaagacttaatcggggaggatggttcagtgagtggaaaactcctcttgggaggaagaaaagataacatttgaaagagggaacatctgagcaacataagtactcggcgatggccgaccgtatatgagattagagaaagatagtagggaatttagtatgcaggtttcaaacgagaccctttatgagtaatacataacaagagttcatcttacccgcaaattgggcaccagaagcaaaaaccaccttgcggacaataaca

SEQ ID NO: 684401 - DNA, 239 bp, Homo sapiens
  misc_feature (183)..(183): n is a, c, g, or t
cttaaataagctatgtattaaatctgtctccagttagggctatcttcctagcatagggccccttaagtagcatggggggatatatttttttgctataaccgtaaaaatttttcctttaaccacttgccctcttcctttcttccttccaagggtcttttccccctcaagtttttgttgttgtcnttactctgggagatggccaagtgtatttttttctctctatgtaatttttagatcgc

SEQ ID NO: 684402 - DNA, 213 bp, Homo sapiens
aggactacttaccccgaaccggtaacgtatactaggaactacagagcaccctagaccagcggatcagtagacaccacctatacccggactgtacctaacagtacctacaggactactaactaccctacgagcagcgtagagtagaccgtagccctaccagcaactatagggcaccccagaacctaacacctagcaagcgtagaatacacaagg

SEQ ID NO: 684403 - DNA, 112 bp, Homo sapiens
tagaggattccgtcttagggaggatggggtcagatgtagcatggggaggacgggctgaaaagctgtcattggtgttggaagcttgccttgacagggaagtcgcagagaggct

SEQ ID NO: 684404 - DNA, 353 bp, Homo sapiens
gcgtcgacgtgggcagatcacgaggtcaggagatcgcgaccattctggccaactcggcttcccaaagtgctaggatcacaggcgtgagcaccgcgccgggccaactttggatttctaaaaatgtaaatagtttatacattttgtaaccactagtataacagaagtagagcttataccttgcaaaccaggggaagaaagaaagagattaaagaaagttactaattcactagacaacagggaggaaggaagcattaggaaaaaactgacgaaaagagcaaaataaaaaaataaagcaggaaccaactcacatcctccatggaaaatcgtggaatgtgtaaggtaacgtgccagct

SEQ ID NO: 684405 - DNA, 372 bp, Homo sapiens
  misc_feature (38)..(38): n is a, c, g, or t
  misc_feature (310)..(310): n is a, c, g, or t
gcaacttgaaaatgatctgaatgtaagacaagttttgnaatttattcaatacaccacatgaaagactaattacgcattttaaagtaaaatctcctaggtgtaatttgaattcatccttctcctgagcatgtctcttttcaagtacaggcggtcagcacagaactcagacacttgacttgacttcaaatgatgtcaccttcttggcccggtacctctgactgttttcctggcagcagctcaaacaaatgtcaggcagatctaaaatcagaaaagggggaaaatggttgtgtgggatcaactgcatcaaccnagatttattacaaagcaactctaggcagaatgcaggaaaaggctgaggatctgaaaaagtca

SEQ ID NO: 684406 - DNA, 225 bp, Homo sapiens
aactgcactgacctcatgtacaatttcagtctgttcatgttgttttaaaaatgattgctcagcagcatcatacttaaatatgaaggattggagtacagtggtatggtctcgaactcctgagctcaggcgatccacccaccttggcctcccaaagtgctgagattacaggtatgaaccaccatgcccagccaaaaattacttctttttaatgtcatctttttttta

SEQ ID NO: 684407 - DNA, 624 bp, Homo sapiens
  misc_feature (185)..(185): n is a, c, g, or t
  misc_feature (196)..(196): n is a, c, g, or t
  misc_feature (203)..(204): n is a, c, g, or t
  misc_feature (592)..(592): n is a, c, g, or t
gcgcttatagaggatccctctcggctcccagattaagcggattctcgctcagcctcctcagtagctgggattacaggcacctgccgccacgcccagctaaattttgtatttttagtagcagacggggtttcaccagtgttggccacggctggatcttagaactcctgacctcaatgtgatccacnctgcctcgtgnctcccannaagtgctgggattacatggagtgagccacctgtgcccatgccgaagcgttcacatttgaactggattaacttagatattatgtcaattctaccttcaataaacatattaaacatgcttacaaaagaagaatgaaaatatgacccatagccaggatttaaacattttctgaaaagaaagagacccagaaatgatacagatggtttagcagacaaagatatagaaacagttcttactaatatgctctaaatgttcaagacacgaggggaaaaccgaaagatgatgtggcaatacctagaacatatcacaatagagatgaagaatgccgtatctgaaataaaatatatattggctgggattaataggcgataagacacaccatcagtggcnttgaatagattacatagtgactatccaaatga

SEQ ID NO: 684408 - DNA, 132 bp, Homo sapiens
agtaaaacccagcccatgaccctaacaggggccctctcagccctcctaatgacctccggcctagccatgtgatttcacttcacgtccagtacgtgtcgtcagtacgtaggcagtacgtaaccaacacacgta

SEQ ID NO: 684409 - DNA, 800 bp, Homo sapiens
tgatgccatttggtgtaacgggcccaaactgctgcgaacagaggtggtgataccccctaagcttagtgttacgagttgggattagggggctattttctgctagggggtggaagcggatgagtaaaaaagatccctggctacaactatagtgcttgagtggagtatgggctgaaactgggggtgggcggccttctatggctagaggggatgtcaggggtgcgaagacctaatggggctgatttcgcctgctgctagctaggaggaggcctagtagttggggtaggaggcttggattagcgttataaaagggctattaggtggggggctctcatgagttgaggcagtgctacggataaatcatgcaaaggcgaggatgaaaccgatatcgccgatacggctagtataggattcgcttgaaatggctgctgcgatgggccatctgcatcgggccgatatcatacacactgatgacgcaagcaagtgatataaatccctaacgccctctacaagccgaatggaccagtttggacatagcgttcgtaagcgggcacctacaaataagtaaatggctcacactcagcgaagagtgaaatagaatacttgtgagagaaaacggaataaagtacagaggggcctcgagaggtaatatatctcccacaggtgaacacttcctatatgatggaccctgttacacgacacaaatgccaccggggagaaactatttgcgacaaacacccaatatatgagcctagggaaaaaccggttgctaggcacatcacactcgaaaccggttgcccgcg

SEQ ID NO: 684410 - DNA, 181 bp, Homo sapiens
gcttatggaagcactgggccaaccacacagcttaagcacaccaccccgaaacagccacagccaaaggtagtgcatgcactatgaggtattccccataccctctggtgtgttagagaggtttagccacatgagcggagcagagtgacaatctactgcgagggcgtgggatgtgggtagtgga

SEQ ID NO: 684411 - DNA, 233 bp, Homo sapiens
gagcgaggctgagcaggatgttaggcccgggcccctggcacgtcctccaccgtgcctcctttgggaagggaaccagccctccagagcaggagactggcaagagctctttgtctcaccagctcagcccggccactccttccaactcattacaagccacatctgtaccttcttgcaaactccaggactgagacagatttcttgggcgaggccaaggttagtttactcgttcgctg

SEQ ID NO: 684412 - DNA, 138 bp, Homo sapiens
gagatccccagcagtctcgtcggaagccgcagtcagcgctgacgcgtgtaagtctcccccacaggcgtggcgtggcactggcctgtttttgcagacgctgtcgtacgacagtagcaggtcacaggtgaacagctggaa

SEQ ID NO: 684413 - DNA, 296 bp, Homo sapiens
accacatatctagtcagtataatggtaatgagcgtatctgtagattctgctcatatacacacattaaaaaacagagttccagagaggttaggggaactggcttacacacgaaatgagtagcagcgacagaattgaatccagatttatcacttaatagatgacagagactatcccctttaccaaattggaccaccatatatccccacatccatgatatcacaaccatgtggttctagaacagctggctttaccccctgctccaggaatggagtacataacctcagactctgccaagg

SEQ ID NO: 684414 - DNA, 109 bp, Homo sapiens
gaggatcccccgcaaatggaatccccccaaatggaatctccccaaagtggaatccacctagcctgctggttcatgcgtctcggcgcgagcagagccggggattccactt

SEQ ID NO: 684415 - DNA, 547 bp, Homo sapiens
ggcacgaggtgtttctgtgctcggatatgcatatttatagcattgctgggagagacccccaggcctgtgcaccctgtcaagacttctcaagcagcgtgtgggtcccgcactctggccccattttcccgatgtcccctgcgggcgcgggcagacacccaagcctgctggctgtgggcccctcttgggcaggcattggctcaacccgctgagtggggggtcgtgggccagtccccgaggagctgggcccctgcgacaggcacacagggcccgcgcacacccagcgggcccccgcacaggcacaccgtggggtgctggccttatgcccggcgccgggcaccaacttcatgtttggtgtgtgtctgtgtttggttttcaagaaatgattcaaattgctgcttggatattgaaatttactgtgactgtgagtgtacacgtctggaccccgtgtcatatttacaccaatttggtaaaaatgctggtctcagactctcacacttaaaccgcatgtgagctccacaaaaaaaacagactcgagggggggggctgc

SEQ ID NO: 684416 - DNA, 887 bp, Homo sapiens
ccactgtgctcctactcctcatccccaccccgccaggctgccaggtccccctcaagcctccccagctcccacagcaagttcttccagcgtgcctttctccaccgactgcgaggacatcagcacatgcgtacactacgcccggcagcatgcctccgacacaggatcatgacgacaatgacctgacaccccaatggcacaggggagaccagttcagccagcaccatgcaggccgctgaagactccttcgccgatacagagaaccctcattagggctccccaaggacgcggacaggacgcactgatctactctgctcatctggctcatggacctacacggacttcctggccgccccacgcacggcgtgtccgagcctccttcgccgctcctctaccttacgccccgaaccacgcctgcacctccgctactgcgcggttgccctggctggcacttgcttgccccgcctgccctggccccttggtatctcttgtctgttgcttgccacccctttccgccctaccctcgctcacacgaccactgccccttggcttgcccctcgggcccgctctggtccctccggcgccctctgcatcggccccccacccggctaagccttcctgaccacctctctccctaccccactctctcgtcaccgcaagcgctagcctcgcccggtccccgctccttgctcccggcgctctgctccctccgtcttcagccccacacggtccactctcccttcgtgctcccatagcccctgctcccctcctccttcccaccccccttgcccctcgtgccccgtggctcctgtctgcccccgacccccctcttgcccgtccgcgccctcccactcctctccccgcgccctcgtctcgctccctctgccctc

SEQ ID NO: 684417 - DNA, 863 bp, Homo sapiens
ctgctccccgtttgggatccgggttcgctggtgccccccggtgtctttttccccccgctactttgcttagcctggagcctgccatcccttgatactagaggatcccattgatcctcggactttagccccttccgtggccctttaactaggatgctggacatccccgctttacaccagggtgtgagttattatgggtaacctaaggagtgtatagccacgactttgaaaagggtgttgaaattgtatgggaatgtaaggattgttggaaagagatttttttttttggacagcttcaaggagatgttacccatttcagatatagctacccgtttaggtatgactttggaagtgccagaaaccgaaggatactgttagagatcctaccatggtctcccgcaagtggtcacccctggtctcactgcctttccttcccccccgacctgagtgtgaaagactgagagttgaggagttactttgtggatcttgtcccaatttagtgaaatgtggaagtcaacccgacccatgatggaattaaatgtaaattcccagagggctttcacccgtccaccgggtgtccaatgacttgggttaccagaaggtattcttagcttacctgttatgtgaccgtgatttacctcgtccctttcccaccccaaagcctgtccagaaagccattctttagagaaaacccctttacctttgttgttaaactcctgatcgctacttttaagaatatacatgtatgtattcatagggaccttttttctccatatttgtatgattcgcttactgttattgtgctgagtgagctcctgtgtgcttcagaccaaaataaatgagactttgtgtttaccgttaaacca

SEQ ID NO: 684418 - DNA, 196 bp, Homo sapiens
gcatgggatggaggacccggatgtaatcctggtgggcgaattgcgcgatctggaaaccattcggctcgcgctgacggcggcggaaaccgggcatctggtgttcggcacgctgcacaccacgtcggcggctaaaaccgtggaccgggtggtggatgtgtttccggcgggggaaaaggccatggtccgctcgatgctc

SEQ ID NO: 684419 - DNA, 189 bp, Homo sapiens
aatggcataagtaacaagtcaaatgttaatcaccaagacaatggggaaaatgtctccagggcatgtctgagaccttcatggcagcccctcccatcacaggctctgaggcgtaggagggaaaaatgcttccctgggccaggcccaggtacacactgctctgtgcagcctcaggacatggtgctctgcatc

SEQ ID NO: 684420 - DNA, 202 bp, Homo sapiens
  misc_feature (49)..(49): n is a, c, g, or t
ccgagcttgtctgttgagaaggagcatcatgttactcataaaacacaanttcattccttggtatttttctctctgctgtgtgataggtaagggctgcagagaaaataagggtacactcacatatacacacctgaaactatctgcaaagtgttccaaacgtttcttgctattattccaaaatttagaattgtgacttaaatct

SEQ ID NO: 684421 - DNA, 128 bp, Homo sapiens
aggtgctggagcaggttggcagcaataggcaaccttttacactgctggtgggactgtacactagtatgctatatgttataataagccattttgtacattaataataaacagtgatgagacgtagaagg

SEQ ID NO: 684422 - DNA, 914 bp, Homo sapiens
  misc_feature (47)..(47): n is a, c, g, or t
  misc_feature (72)..(72): n is a, c, g, or t
  misc_feature (80)..(80): n is a, c, g, or t
  misc_feature (103)..(104): n is a, c, g, or t
  misc_feature (114)..(114): n is a, c, g, or t
  misc_feature (117)..(117): n is a, c, g, or t
  misc_feature (130)..(130): n is a, c, g, or t
  misc_feature (133)..(133): n is a, c, g, or t
  misc_feature (278)..(278): n is a, c, g, or t
  misc_feature (280)..(280): n is a, c, g, or t
  misc_feature (345)..(345): n is a, c, g, or t
  misc_feature (375)..(375): n is a, c, g, or t
  misc_feature (412)..(412): n is a, c, g, or t
  misc_feature (421)..(421): n is a, c, g, or t
  misc_feature (423)..(423): n is a, c, g, or t
  misc_feature (425)..(425): n is a, c, g, or t
  misc_feature (429)..(429): n is a, c, g, or t
  misc_feature (459)..(459): n is a, c, g, or t
  misc_feature (529)..(529): n is a, c, g, or t
  misc_feature (554)..(554): n is a, c, g, or t
  misc_feature (600)..(600): n is a, c, g, or t
  misc_feature (611)..(611): n is a, c, g, or t
  misc_feature (788)..(788): n is a, c, g, or t
  misc_feature (790)..(790): n is a, c, g, or t
  misc_feature (816)..(816): n is a, c, g, or t
  misc_feature (912)..(912): n is a, c, g, or t
gctgatgggctgtgattggtagggcgccttcggcatgtccgcccgcngcataagccgcgtcttccatctcgnctggcttnatttcactcggcggcgggagctnnaatagcaganggnaccacctcgtgantcnggccggagcccttgcagtggctcatatcggttgcatggaccgccatgttgtcacatcttcctcaagccagtgccagccagtgtatcgctgcatgcaaattcttctcgtgggctatatgcacgctaaccagagctcggcgtgtatngncttcgtcatgaagcaggcccttggaggggccacaaaggacatggggaagatgctggcgggagatnatgagaaggaccccgacgcgcagaaataangagtgagtgagcggcaggaggcgctgcggcagcaggnagtttggancntnattncaagcactgtctgtcgctttggatgcggangtggaggaaggtccgggcagcaagatcctgagataaagtatggggctgaaagaagaagggaggagaaggnaagcagagggagaaagcagccctgngagcagccctgcgagggggagcctgacccggcccaagaaggccatncctgcgggctncggggacgaggaggaggaggaagaggagagcatcctggacacggtgctcaaatacctgcccgggccgctgcaggacatgttcaagaagtaaccaggcctcctgccccagcctactccacctgttactacttcttttttggttctttcttttctttttattaggttaagtctcaattntnaaggggaaaacctcagttggcctctncccctcttccctggccaggggcttctccccctcagctctccctcacacctcccttcatcccagggtatcacctgcaccccactcccaagtagcttnaa

SEQ ID NO: 684423 - DNA, 431 bp, Homo sapiens
ccccttccccccctttatcccgttccgcaccccgccccaatcacttcaggcaaacgcgcaaaccaccctcgcatagcacaaagactaaaacctcttagccccttaagcaatgtttgtattcttgggaacatgtgggacaactgcgcaagtggtgcccttggagctcgctttaaaagtcagatcttttgaaaaatgtttattcatgccctttgcccactttttgatgggatccttttcttactgattcgtttgacgcccttgtagattctggatattactcctttgccagatgcatagcttgcaaacatacttgggtgacgggtgcactaaatctcagaattcaccactatagaattcatccgtgtaaccaaaaaccacttgtacctcaaaagctactggaataaaataaaataaacgacaaaaaaaaaaaa

SEQ ID NO: 684424 - DNA, 524 bp, Homo sapiens
  misc_feature (30)..(30): n is a, c, g, or t
  misc_feature (68)..(68): n is a, c, g, or t
  misc_feature (71)..(71): n is a, c, g, or t
  misc_feature (159)..(159): n is a, c, g, or t
  misc_feature (161)..(161): n is a, c, g, or t
  misc_feature (169)..(170): n is a, c, g, or t
  misc_feature (179)..(179): n is a, c, g, or t
acgaatcacactcaatgaaatatggccaanaacttctcaatctgagaaaagacacgaatatacatgtncancagttaaactccaagcaggataaacaaagagatccacatcaagacacattacagtcaaattgttgaaagccaaagacaaagggatatntntttttttnnttttaaaanacgggtctcaccatgatttggcccaggcgggtctaaaacggcgtggccctcaatgtgattctcccacctcggcctcccaaaggtgctgagactatggagtgtgagccactagacgggaaatcccactaagaaaaaaaccttaacatatagagaaggaaagaagaggggaatcaaaagggtacaccaccaaaaaaacaactaacttttaaacttttttttttttttggaaaggaagttgggccctggtaccccgggggggcgaaacaatggaggtccccggacttgggaaggctgctgacacaaaaaaacaaaatcatgactaaaaacaccggggatagagtgtaa

SEQ ID NO: 684425 - DNA, 114 bp, Homo sapiens
ctgagatggaagccgtcttcccagcccaccatccccaacttgggcatcgtttctggcccagctgtcctggctgtcctggctgtcctggctgtcctagctgtcctaggagctttg

SEQ ID NO: 684426 - DNA, 365 bp, Homo sapiens
tcttgctcaggtctcactacgtgtcgggaagtaccgatgacacactaaaacatcagtgatcaagcctgatggacattctggaagtgtgacaccgatgacatcagagttgtcagtgtggagcccttcgtgaccatgggccaagtgactgccctgctgatctccattgtgtggactctccccgtgttgcctgagcttgatgatctcacggtggcgggcttgatcatgggcacaggcatcgagtcatcatcccacaagtacttgcctgtaccactacatctggcactgcttacgagctggtcctggctgatggcagctttgtgcgatgcatctccgtcccaaaactcagacctgagcaagccaggggt

SEQ ID NO: 684427 - DNA, 102 bp, Homo sapiens
gagttgtcccagatgcagacgcttgtctctgacagctcagtggtcctctccatggacaaaaccggggcctggacctggatagcatcatcgctgaggtacaag

SEQ ID NO: 684428 - DNA, 902 bp, Homo sapiens
  misc_feature (6)..(6): n is a, c, g, or t
  misc_feature (77)..(77): n is a, c, g, or t
  misc_feature (89)..(89): n is a, c, g, or t
  misc_feature (93)..(94): n is a, c, g, or t
  misc_feature (101)..(102): n is a, c, g, or t
  misc_feature (107)..(107): n is a, c, g, or t
  misc_feature (112)..(112): n is a, c, g, or t
  misc_feature (121)..(121): n is a, c, g, or t
  misc_feature (416)..(416): n is a, c, g, or t
  misc_feature (448)..(448): n is a, c, g, or t
  misc_feature (459)..(459): n is a, c, g, or t
  misc_feature (475)..(475): n is a, c, g, or t
  misc_feature (482)..(482): n is a, c, g, or t
  misc_feature (514)..(514): n is a, c, g, or t
  misc_feature (541)..(541): n is a, c, g, or t
  misc_feature (546)..(546): n is a, c, g, or t
  misc_feature (548)..(548): n is a, c, g, or t
  misc_feature (550)..(550): n is a, c, g, or t
  misc_feature (559)..(559): n is a, c, g, or t
  misc_feature (568)..(568): n is a, c, g, or t
  misc_feature (570)..(570): n is a, c, g, or t
  misc_feature (593)..(594): n is a, c, g, or t
  misc_feature (599)..(599): n is a, c, g, or t
  misc_feature (602)..(602): n is a, c, g, or t
  misc_feature (617)..(617): n is a, c, g, or t
  misc_feature (627)..(628): n is a, c, g, or t
  misc_feature (642)..(642): n is a, c, g, or t
  misc_feature (648)..(648): n is a, c, g, or t
  misc_feature (659)..(659): n is a, c, g, or t
  misc_feature (661)..(661): n is a, c, g, or t
  misc_feature (663)..(663): n is a, c, g, or t
  misc_feature (676)..(677): n is a, c, g, or t
  misc_feature (691)..(691): n is a, c, g, or t
  misc_feature (707)..(708): n is a, c, g, or t
  misc_feature (715)..(715): n is a, c, g, or t
  misc_feature (749)..(749): n is a, c, g, or t
  misc_feature (901)..(901): n is a, c, g, or t
tctganagccatccaccctccaatcttacttcactttacaaccaagtatcaatagaggctgttccttcatgcgagcngtgggagtatantcannaattgannacaanacacntccaagaanatcaacagatgtacattatttacatattactatatttaccgcaaatagaaatattttctaagaaaaaaagtcaatttgtggtttctggtctaccacagacctaacttctcagcaaagcatatctatgtagatatctgccgtttgtaactttaaaaataggcattgctttctatgaagcactaagtgctgctccatctataaatagctcctattttgcagtttggtaccacattagaactgccccaaaatgttctgtgaccccaaagacacaaagttgctgcttatctgggtccanggtcagtacaattaaactcaaatatgaaccanggcggcagcangacaggctggaagggntgtggcngtcgccgccgcctccccgcggggctcccctcnactgccttcctggcttctgttttcggnaaaantntntttggccgngttggggtnantatttctagaccctgcgctcganngtctnggngggggggggggggcntgtgcatgtnncgcggcctgccccnggtggngggcaaaaaananangtgtcctgtttcnnggccgtcctggtancggctggccctgcgcnntcactgnaccaagagttttctgggaccaggcctgcctcaangatcagccaggcatgatggtcgcacagccttcatgctaatactgtcctaacacagcctggagctaggcgatttcctttgaccacaaagtacctggagtctaactcagcaccacagcctctgcatggctccaaggtgcccacacctggcgacnc

SEQ ID NO: 684429 - DNA, 140 bp, Homo sapiens
  misc_feature (43)..(43): n is a, c, g, or t
  misc_feature (69)..(69): n is a, c, g, or t
  misc_feature (117)..(117): n is a, c, g, or t
  misc_feature (135)..(135): n is a, c, g, or t
ggccatctggagactcctggctttctgaactttgcgcgttaancgggacagctgctttgctgcccgganagtagtccgcgccaagaagagagcaacgaggaaaggagagggactctngcgtcccggcagcgaagntccga

SEQ ID NO: 684430 - DNA, 759 bp, Homo sapiens
catcctctgtgccccctgtaccaccctcagaggccctgccccacctgcgtgcccctcagccgcctgccaggcgcagatcatctctaggctgttgggacgtcactgccaccgatcagccctccaccatccagagccagtcccggccgacacagggagccagcaacggatccaggacgtgtggacagcgactttgtatgctgacgacacgcctggagccgcagacttcctggcaagaacagcaaccgcacaccgcacagcggacgcagagagacaggcgtgcggggcacacgcgcatgcacacaggacacgagacaagccgcacatgtgcactgccgagacggacacgtggaggcggacaagacacgattggctgccaagggctaccgaggaacacgatagtgccacactcgtagagaacccgcggcacacggtgggaaggtcaccccgcatgccatgcaacggcacccaccggagaaccccaagtatcaaacgacaactcaacgtcatacttccggcagtatgaaggggaagaggaaaagcaggaaagcagactgggcacagagtatcggcgaaccagtagacgggtccaccccgttaagccacagaggtatccaccccagtacagagatggcgcatccagaacgaccgagtgagtgaaccaaccagtttgggtacccatcacaaataacacaacgcattaccgaaaggcacaaacgtgcaatgggtgcaaccacggcactcagcacagagaacgcggag

SEQ ID NO: 684431 - DNA, 853 bp, Homo sapiens
agtttaaaaaaaaaaaaaaaggctggggggggcaggcgcgggggttcatacctgtagtcccagcgcttggggaggctgaggtgggcggatcacgaggtcgggagttcgagaccagttgggccaacggttggtgaaaccccaatctggtactggggaatagaataattagccgggctatggtgggcgcacgcttgtatgtcccagttactggggaggctgaggcaggagaattacttgaacctggggaggtgggagggttgcaatggggtctggagattggtgccatgggactcaagcctgggcaacagagtgagactctgtctcaaaagaggaaaaaaaaaaggggtaaaattttggctgtaacttcagggggtcccttttaaacactttttagtgggggtacaggttaggtgggcttataaggtaggatttcatcagtggttgccggtaattcacaattattccttcttcaaggaattttctccaatcattttagtacgggaaattctattccatttaaacaaataggttaatatttctttctctccaagaggtcccgttgggacccacgttgtgctcttttggatttgtggctattcctaggtacccccatttttttggtggaccccctcaggagttttgtgggttctccatggaggggctgaattcctcttaggcatagttgtcttccacagttcacccatggtgggcgcttgtttcgacctttcatcgctcggggtgtccgacttcaatttaccagccgcgactggctggtggcttcattttttccatctgggggtcacgtggcgctgggaggggcttcgggagggccgtgaggtgtttgcggagcctg

SEQ ID NO: 684432 - DNA, 380 bp, Homo sapiens
  misc_feature (380)..(380): n is a, c, g, or t
atggcggccgcctggccgtctggtccgtctgctccggaggccgtgacggccagactcgttggtgtcctggggttcgtctcaatcactacaagacccttgggggctggtggcaacttcggccggggccaagaatcccttaaatgccaagaccttaaaatgggaccatttttttggtaaggatccgtttcctgttttccagcacccaacataacttgtgaggattccagtggcaatgaaacacattttactgtgaacgcaaatgggtttttcaagcccatatatctgcccaatgtgaatgggtatttctacacagagggagacgcatagtgtctctttctcggatgaggtggagagcagatctgttccaccttgcccccccn

SEQ ID NO: 684433 - DNA, 904 bp, Homo sapiens
  misc_feature (45)..(45): n is a, c, g, or t
  misc_feature (60)..(60): n is a, c, g, or t
  misc_feature (81)..(81): n is a, c, g, or t
  misc_feature (85)..(85): n is a, c, g, or t
  misc_feature (87)..(87): n is a, c, g, or t
  misc_feature (111)..(111): n is a, c, g, or t
  misc_feature (118)..(118): n is a, c, g, or t
  misc_feature (122)..(122): n is a, c, g, or t
  misc_feature (133)..(133): n is a, c, g, or t
  misc_feature (159)..(159): n is a, c, g, or t
  misc_feature (165)..(165): n is a, c, g, or t
  misc_feature (178)..(178): n is a, c, g, or t
  misc_feature (215)..(215): n is a, c, g, or t
  misc_feature (218)..(218): n is a, c, g, or t
  misc_feature (221)..(221): n is a, c, g, or t
  misc_feature (246)..(246): n is a, c, g, or t
  misc_feature (262)..(262): n is a, c, g, or t
  misc_feature (288)..(288): n is a, c, g, or t
  misc_feature (292)..(292): n is a, c, g, or t
  misc_feature (294)..(294): n is a, c, g, or t
  misc_feature (297)..(297): n is a, c, g, or t
  misc_feature (307)..(307): n is a, c, g, or t
  misc_feature (310)..(310): n is a, c, g, or t
  misc_feature (321)..(321): n is a, c, g, or t
  misc_feature (336)..(336): n is a, c, g, or t
  misc_feature (372)..(372): n is a, c, g, or t
  misc_feature (390)..(390): n is a, c, g, or t
  misc_feature (461)..(461): n is a, c, g, or t
  misc_feature (523)..(523): n is a, c, g, or t
  misc_feature (552)..(552): n is a, c, g, or t
  misc_feature (611)..(611): n is a, c, g, or t
  misc_feature (685)..(685): n is a, c, g, or t
  misc_feature (733)..(733): n is a, c, g, or t
  misc_feature (745)..(745): n is a, c, g, or t
  misc_feature (843)..(843): n is a, c, g, or t
  misc_feature (862)..(862): n is a, c, g, or t
tgtgcttgttttattggaagcaagactccagccagcggcagggcncaggggaggaggccnggagagtccagtcctgggtcncccncngggccagcagggggaaaaggggtntaaaaanagcnagaacccccanagaagcccccctgaagcaggggaaanaaaacnagaaaggaaaacngtcccagggcggggagcggaaaagggcccccacaccncanacncccccacccccaagcagtaaattcncaccccccgcctcccnctgtcaacggggggggggattccaanaacncnccncagcctccanacntcaggggcccnccgtgaatcccgggnggctttaacccttgggggtcccaaacaagtttccanaatcccactgtccaccantctcccccaaagaaggtcccagaaaaggtgaagtcccgtgtcttcacgcaacacgggcataagcagcaatnatcgcacgaagtttccctagggtggtcggggatcctctcctgccactcctggggcccctctnttgtcgccttaaggtccatgctacctgtnttgaggagctgtgtccaggttgtgggctccggaggaccgaggagtgaaaggctggaggnacatctgaaggtggaggcgctggcggaagaacctgccggactaggtggcccacagtccggagtttcaggccgtntgaacctcgtccgcaacccctggctcgggttgcgatcgcttcgcgganccttctccagcngcgggttcccctaggctcctcttggacgctggcgcggctggcggggacgagggaacaggatggggattcgggggctggtagccgggctgtcgcggatncagcgcgttctttggaaantaggatggcgaggccgggcacgttcttaagttcgctgagact

SEQ ID NO: 684434 - DNA, 100 bp, Homo sapiens
cttcctggttctgcctcaccaagacctctggcctcaccacagaccctgtcctgcttctgccggtgcttatcatctctgaaggatgagagaattcaagcta

SEQ ID NO: 684435 - DNA, 679 bp, Homo sapiens
tagcattaggagaaatacttaatgtagatgacgggttgatgggtgcaggcaaccaccattgcacgtgtatacctatgaaacaaacttgcacgttctgcacatgtatcccagaacttacagaaaaacaaaaagatggcttaagtcagttgttcctaaggtttcacaaaagaacttcacaggtctacctgaggggaatggtgctgaaatgaataggtttactcacagcaactctgcttaatataattatgccctaactaaatggttttttcacaaaaaagtgtttcgtcacaatcaacaacaccagaacaaacacatcaagtttaaaccccactagttcatatcatttcttagatcacttctcactctctacaactattcaagaacaaaatggaaaagatcataaacctaccaaaaagtttcaacaatcctctaactagtgtgacctagataccggccggtaatagagaaacttcaggaagtatggacaccttacacatgtctatgtcatctatccttaacacaactgatttgacaatcatggctcctacccttcaccccagcatcacgacacactatctcgaaaacagcaacaaaaccaacaccccacacaagcaacaccacttttcgcccgcccgacacgacacgtttacaccatcgtgtcggccccgttgcagtaact

SEQ ID NO: 684436 - DNA, 488 bp, Homo sapiens
  misc_feature (440)..(440): n is a, c, g, or t
  misc_feature (457)..(457): n is a, c, g, or t
tcacaccctaggatataaagataccccgtggtgctcccccatcaaggtgaagtatggggatgtgtactgcagggcccctcaaggaggatactacaaaacagccctgggaaccagttgcgacattcgctgccagaagggctacgagctgcatggctcttccctactgatctgccagtcaaacaaacgatggtctgacaaggtcatctgcaaacaaaagcgatgtcctacccttgccatgccagcaaatggagggtttaagtgtgtagatggtgcctactttaactcccggtgtgagtattattgttcaccaggatacacgttgaaaggggagcggaccgtcacatgtatggacaacaaggcctggagcggccggccagcctcctgtgtggatatggaacctcctagaatcaagtgcccaagttgttgaaggaacgcatttncagaacccaacaaactngacagtccgggtgtcctgggagacaccgaaa

SEQ ID NO: 684437 - DNA, 225 bp, Homo sapiens
aagaaaatcgagattatataggtgagttcgcttctttttcatctgattcatgatccgataatctgttctacgccttctacctccggaatataaaactgctgcatgtactgaattccatttatcagagtgatgatcgaactagggcagctggtacaagaacgctggagtttcaggggtacaatgccatcttcaaaggcttggtagattacatcccctccatcttgc

SEQ ID NO: 684438 - DNA, 568 bp, Homo sapiens
catttgctgttagatttagcttattttgaaatgttgacacttgccaatgtaatgaaaaggacacatcagaatttatcatcagggaagatatcttgtatgtggagcagctgcaatctgatctagacagactgtcctcttagaggccggttgcaagtccattctagtcattgtggcacttcgtagctgcagaaagaaatgatgcaaggactgtttagtggactgagatggctgagcaggttcttggcctgaattatccagaggagataggtggatctagcttcagaggaagtctacaccccattcccttctgcttacaatgtacccatgatatgtgtttagcacagtaatactgtaacaggacatcacatggaaaaatcaaagcagctggctcactgtatttaactgaaaagaatgcctacagattggctatttaatagggcaaattaaggcactttaataacaaacttcattatgtgaaacttgttgaatattaacatacaatataccttgtatattaatgccatagtttttagaaacactaatttaaacaacaaatagtcagccagca

SEQ ID NO: 684439 - DNA, 283 bp, Homo sapiens
cacgaggactctggccgttgtgctgggcgtttgtggcaacccgcccttccaattctcggttatatgactgtcaggaccgtggcacccgggacaagtcgggttaggtcaggctgaagacgatattgcagacgacgcacatctggctctgcttcacaccacacggcagtcacgatgtgtgttgatacttgagctaggggtgccgctgcacggagtctacgtccatacagtccaccagccagcgtaactgatcggtcttcaggccaatcaccgcctgctgacgggg

SEQ ID NO: 684440 - DNA, 285 bp, Homo sapiens
aaagggaagaattagtaatcttgaatacatattattgaatgactcactagttctccttcactgattaatccttttcctcatcccttcctacccctcccatcggccctaagaacaaagagcttgtaaatcaataaattgggcggacgcaaagagctctgggccatgagcaagcctccaacgctccggtcccctggacctgcctttaagactcttattctgtctctttctaactcctttgtctccgctgaactcggggtacccgctgggcaaagtggggctggcttc

SEQ ID NO: 684441 - DNA, 634 bp, Homo sapiens
  misc_feature (283)..(283): n is a, c, g, or t
  misc_feature (560)..(560): n is a, c, g, or t
tttgggctccatcaggggggtgcttcctcatatcccagacgaggggttggccaagcagagaatgctcctcacttcccagagggggttggcggccgggcagaggctgcaatctcggcgcttggggaggccaaggcaggcggctgggaggtggttgtagcgagccgagatcacgccactgcactccagccggggcaccattgagcactgagtgaacgagactccatctgcaatcccggcacctcgggaggccgaggcgggcggatcactcgcggttaggagctgnagaccagcccggccaacacagcgaaaccccgtctccaccaaaaaaaaacgaaaaccagtcaggcgtgggggcgcgcgcttgaaatcgcaggcactcgacaggctgaggcaggagaatcaggcagtgatggttgcagtgagcctgagatggcagcagtaccgtccagcttgggctcagcatcagagggagaccgttggagggagagggagagggagagggagagggagagcgtggtgatgactctaaaccgattttaaattattccaatcatttggtnaaatttacctgatagaattctgaattccttctctgttatcttgaatgtctccgagttttcttaaatcagctata

SEQ ID NO: 684442 - DNA, 303 bp, Homo sapiens
gattatataaaaaaatcctaagcatgaaaatacggtatacaatttatggtgaagggcaacttctggtgaccataaaagggtttatctccttcacctcatattaaagtccatactctggggatatatctgacatctcaatattaaatgactaagatgactaagtcgtttatgtggctcccacctcacacaaagttaaaactattggttactttaaatagttggacaaggttatttgaaaatcgggacaattcacaaatataaaatacttatttaattttcttcggtaaaaggatgtatgctcag

SEQ ID NO: 684443 - DNA, 707 bp, Homo sapiens
ggcccttttatttgctaaattggggggctttttagagggagaagcaaattcccatttggggggttggacctcccagaaacatgctaggggattcctatgtcctctccttgatgccaaaagaggggtgttttaaaaccgttttggcccctaaccaggtggatgttccctggccctttgagcctcggtttcctaattttttagggggacatgggaattcctatttcacaggattgtcacaagggtgaaatggggtaaatgtaacggcttattgtacggggtttgaaacaaagcaaacccccaacacatgtttgctggtgagggaaattcctcacccttaaaatgacgctttgttttttcactgaacctgtcaggacccgtccaggctgaaaccaggggagcgtgtcactcccacaggggcaggcaacattatggggtctttagggcctttagggggagggggggaggaacacaggagctgtgctcctggtgaaccatccaaataacagttcagaggaaaatgagggccctggctttttgttctttgggggtggaagccccaagtcaaaagactcctttttcatttggggtttggcaccattttttaaacaaatgggaaccttttgcaaaaacacaaggatgttttttaatgcacccaaggagtttttggaggggtttgaagagaaccgggcaccattttagcccccttt

SEQ ID NO: 684444 - DNA, 627 bp, Homo sapiens
ctcggctctaccttgttctagagcacattcccagaagcagatgggggctagatggtgatggagggcaggtattttcaagttaaaagtaaacattggtattcacatttcccaaaagaagaaatagaagtttataggaattacataatttgttcaagagcacagctaataagtgagagagccggagctcaaacccaggtcgacataacttcatagcctgtttcctggatcagtctcctatacagttttcaagctatgtcataatttgttcagtgtttgtcttttccctgagggcaggacatttgtctttcctttgtctagcctaccatgggcatctaataaatagtaaatgagtgatgagtaaagtcatgcatgagagggagagggaatgagaatgagagctagggtgagagggaggtgtggtatggaatctgaaaggcagcatcataactggtggcaagcgtttgtcagtagtagatgttcacagggagtcactagaactctcactgagtcccaggtgagaagccagatggatataatgaagtaataagctcaagagttggggggtggggatggtagcagaatggtttgaaagtttttctggcagcttccttgcccttaggtcgagag

SEQ ID NO: 684445 - DNA, 321 bp, Homo sapiens
tataggaggtatgaatacatcaggaattgagaactgagctttggatctggcatggagggtgatgagtggttcgtcagatggagagtgggggaatggctggctggtactaggcaggcgagagcctaggcagagacactgcgattctaagtgggagtaggaggtggagttgcctgaggaagggtgtgagggccaatgggagtgtgccaggagaccagctaccaggacagggtccaggacgacggacaccgttggtctccctgggactgtcttcagacacctcgacctctgacgcagccccgcgtttcactccaccgaactcat

SEQ ID NO: 684446 - DNA, 842 bp, Homo sapiens
ggagtgagcgcgcctgccgccagctccctgcgtcccgtcccgtgtccccgctgttccctgcgtcctgcgatccgccgccatggccagtgaggagctggctgtgcaagctggagctgccggctgcgtgcgcgaggacggccgatggagagtggcccccagctgtgctcccctcgtgctgccccagcccctgtgagcccaagcccagagccctgagcctccctgcccgtgctgcccactggcctagctgcctgacagcggagcttgagctgcccagactgagcctggctggcttggaccatcaactgaggggctgctgctgctgagcccggcgctagcagggtcttcgaacgccctacacggaggttccctggagttcagcctgccgcactcatcacaggaccctggagagcatgttcaaacctgtatgaccgctgggcgtggatgtgttcatcggaccctgatggagctgaagctgctgatggacgcaagctggggtgaccccccaagaaccgaccttggcgcctgactcagcattgctccaaggcaggtgggaatgagggactttcgagtgggcacggctcaagcatcccaggagagctccctgcctccaatcataccacacaaggcaagatgaacgggtcgtagaccgccacgcgcaggaccatcatgcgggcaggaatggcgacttgggcaaaaagcgtatcaggagaatctcgatgatggccctcgtcccgggctgtacaccagtcggtccagcacgcttcttctgaccgacccaggccaccacgcgccttgtaccaacgggaccgccacagcattgcagcaccgagttgtacacccga

SEQ ID NO: 684447 - DNA, 198 bp, Homo sapiens
  misc_feature (182)..(182): n is a, c, g, or t
tgtgggctcagtaatgtccccgctgatgacaatttcgagagtccatgttctatagaaaccttgaggtcggccagccgtgtcttggccaatgagatgtagttgtgaggagggggcgtacttggggaccaggggtgggtggagatgtgccctgtaggcacagggagactcaaaagcacgagttntgaaagcgtaaatggg

SEQ ID NO: 684448 - DNA, 229 bp, Homo sapiens
ccaaactttcttccccccacacttctggttttctgtgtggagggggagcagggatatctaagctgtggtgtgaaagggtaggagagatgctggaggtgggggtgctgtgttctagaccccccatattatcccagtgtccctttgccccttttttccctaccccattcccccaattttttggcccatcccgattttgaaaattttccattaattgtttattggttaccca

SEQ ID NO: 684449 - DNA, 100 bp, Homo sapiens
accactccacttactaccagacacccttagctaaccatttaccaaataagtatagccgatagagatagaaacctggcgcagttagatatagtaccgcagg

SEQ ID NO: 684450 - DNA, 200 bp, Homo sapiens
caacagctggcagatactggcataacgggccagaacattggcatcaccatgatagggcgagggctgagggggtgtgtccccaatctcagcacacaacgccatttggcgaagtcagctccgtccttcttgtactgcgcacagcgctcagaccgcccatccaacccttgggtggtagtctcgccatttgtccctgccatggt

SEQ ID NO: 684451 - DNA, 151 bp, Homo sapiens
ctcggccgtctctagcggagaacgtgcagttaatgagaaggacgcggccaactaacgctccacgtattaaatgaaacatgacggcatccgaaagattggttactggaatgaagatactagtttgtccctgcagccaccgatgcccgctagg

SEQ ID NO: 684452 - DNA, 147 bp, Homo sapiens
ggttcctttagaatgtcgttttctggttcttccaccagaggctgggacaaacctgacagcagtgtagggttccttttgaccccttgttgttacctaagcttggccaaagaggattggcaaggagggaaattgaagctttggaggcca

SEQ ID NO: 684453 - DNA, 408 bp, Homo sapiens
tcgcgcgcctctcgctacgcattacgtttaccacctcttgacttggaaaggattgccgtctgaaaactcccaattctgatattatcctgcgagttgcgttattcgtctccattttctagcgggaggagtgaaagcacgcagcatcaggaaatgcagttcctaagggctgctaagtctggcaagcaccgacacttgacgtgctgatcaaagagcagacggagaggggcgccaacacatagatcctgtccgcacatcgaaccaagaacacgatggcgtcatgtaaggcacataacgcaaggggcgtcggttcagaggatggagagagacacaggacggagccgcgcttgttagggatcatgcactttagagaagtcttgcatgatgagccatcggattctaaaacggaag

SEQ ID NO: 684454 - DNA, 117 bp, Homo sapiens
accctgcttacccataaaatcacgttggtgcttctacagtacgggtcaaacgagcaaatgtttccggggtataaatccggctcagcatgacaatttgatcaatagctttgctggtct

SEQ ID NO: 684455 - DNA, 645 bp, Homo sapiens
gttcactatgttgccccggctggtctccaactcctgggctcaagccatcctcctgcctcagcttcctgagtagctgggacccccggtgtgtgctaccgtgcctggccacttttttgcccctcttaatggagatattccggtttctttttttccatttaaaccaagaaaaaaaatgtatctactctaccttccctctgctctcctccctccctatcctaacttgcccatatgagcaccggctccccactggccaccatactcctgccaagcttttatgctgcttcgcttttctctaaacacgatctgatattgctgctcctgtggtttttctcacaaattaactttgccgtggtttttaaaaaggaatccaaatgcacttgttgcacttaagctttttccataaaggaaaattacggagaggaaaataggccacaccccgccaattatatgtggacacggtttctaaactctatatatacatatatatatatatatctatatatctatatacgtaatcatctagttctgtcatcttactgaaagggataacactttctaaagatcacccttttctgagaagtttcttgggaatctttatgtctaagtgattgtattagatcagccataatgactatgtaatctcca

SEQ ID NO: 684456 - DNA, 662 bp, Homo sapiens
  misc_feature (192)..(192): n is a, c, g, or t
ttttccgggggcgcgacacctaggatttattccccccctttcccacgggttggggtgtttgggccacccccaaaaggggggggggaagggtttttctccccggggttttttcaattcccccccccccctttgcccctatgtggggtttgtttggtggccccaaaacccggggttttttctatatttgtttanaccccccccccctccccccaaaaaggggggggggggtgggggggggggggttttttaaacaacacccctttttttacccccgcgaccgccgggggccccccccccctttttttttttccccataaaaaaccccgggggcccccccccccccttttttttttttggggcggggggggggattttttttcccccgagacacccttttccctcttggcccttttttgggcccccttaaaaccatttttttcaaaaaaacgggggggggcccggccggtttttccggggtttttttcccccccccccccccccccccccccgggttttaaagccccaaaaaaaaaggttttttttttttttttttttttttttaaggggggggttttttttttttttccccttttttgggttttttggaccccttttttccccccccaaccccggttttttttttttttttttttttttcccca

SEQ ID NO: 684457 - DNA, 101 bp, Homo sapiens
cttattaccagaaacctttagccaacccatttccccaataaagtttaggcgatagaaattgaccctcggcgaatagattagcaccgaaggaaagtgaaaat

SEQ ID NO: 684458 - DNA, 447 bp, Homo sapiens
aagcttggcacgaggacattttttaagtaccttaaataaaagaataaaggcatcattataaaactttaatttttttaaaccaaaccaaagggatttaaagttacatatttttaatgtgtattttaatagactgttagtggcactgtccttcatctgagatattaattcaaggccttttcagcttttctccctaaactttctgagtgggcacagaggatccagagtgtttatgtaagcagtaaaagaaagtcctggtatttccaccagaatcccctgcttaacagaaatatgtcccagcatccttatcctgaaactccctgacttagctgccacaaaaagaccctccatgttcctcaaagccaccacccccatcatgtaactcaggcctgagaaaattgtgtcctatcaaagagaagatgttgtgcaaaataaagtccttttgtgctc

SEQ ID NO: 684459 - DNA, 180 bp, Homo sapiens
ctcgtggtgcgcaaggcccataggtatggcccccccttccccctccccagtcatcagttaatttgcagtcaattgtcattgtccagcaaacagtgcattcagtcctcattttttttggtggtttcaacacaaaaaattttggggtgtgtgctttttttttttttttttttttggggggga

SEQ ID NO: 684460 - DNA, 475 bp, Homo sapiens
  misc_feature (124)..(124): n is a, c, g, or t
  misc_feature (139)..(139): n is a, c, g, or t
ctaatggaacattttgatgcatcacttagtactatttcaaggcattgctaggccctcgaggtatcagcagctctgtcctcagaatgggtccccacttccacagtgggtttttgtaagggaaganaattttggggggggnctcacacagcagctccaagcagcacattcagaggaagaagaaaaaatgtttcatttgtgtggttttaagcataaagaagttgtttcccagagctctttgccagctgtcatccctcaaaactcactggccacaattgcttcacatgcacctgcctgaaccagccaccagagggggttaggacccccccagattgactagatcctaaggattctctacctggggctggagttcgggtcaggtgcccgggaagccctgtgcggtgtgggaggatgaatatgtgccaatttggaaagatgagtatttgtgggaaaatgaataaagcaaagtgtaaatcca

SEQ ID NO: 684461 - DNA, 1086 bp, Homo sapiens
taacataaatcaagttttaatacaaaatgtaaacaaacagtacagaagaatggagttacttgcaattcgttggtgaaacaaagctttacatttagaacatctactttctccttaaatagatgacctctttattctcattaactcacaaactatagggttttaaattggggggtagaggtgctagttctctcttatattccttaatttttttaaaaaaagattttaattactgtggtattgggtgtttgtgagtattttctccagaaatagagtgtcgtgttattgccacattgttgttcccggtgcagtaacgtccagaaagaggacttttacagatgtggcttggtgagccaccagtgttagtgtgcttgagaaacgtgaaccgtgggctccctcgtggaagagcagccaggatttcttaaccggtgtgagttcactcttcgtgagtgtttggaaactctttacaatattataattctaatgggatctcattcggcctcctctcgtgtacttattggacagacttggatattcttaaccattagattttagacattacaaacaaaaaaaaaaaaaaaaaaaagaaaaacacacctacaacacacaaaaaaataaaacacaaaacaacaaaacaaacaaaaaaaaaagggggagggcacaaaaaaatccccccagggaggccaaaaaaagaggccacacgattttgataaaaagaggcacacataagaggaccacaaatataaacacagcaagggggcacgattaaaacaacgcagagctggagaacacaactacacggaggacatggaaaaaaaccaaatcatggggggagaaaaagggaacaacctaccagaataacccgcaggagaaaacacgagagaataatggggaacaccacagaaatttgcgggaagaaaaaatatgaccagatactataaaatacgacatgatacacacataacacgagcaacagacgaggcaacaaagggcagagcagagcacacgaaggagcacgaaaaacgcaacaacagacaaaagaaacaaacaacaacacacacaacaaacacacaaaataacaaccccaaa

SEQ ID NO: 684462 - DNA, 874 bp, Homo sapiens
tcttcttcggccttggtttttctttccctccggatggtgtgcgtctatgtgttggtcttttgggccgggcgggaagtcggaggggtgtcctggtcactctaatttcccaccgaaaacgtgggccgggggccgggtgttgcggcccccggggattccggggacgagggagaaggggcgagggaagaagaccttggctatcccagaataccaggacggtccaggtggctggctggcggggtcgcaggccagcgagacaagatcttgtgagcgggctccggggggtgagatgaggtgggtacgcggatgccggtgggggaagtaggtgaggccgcgggaagatggacgtcgatggggaaaatgcagagcggaggacggggtgtggccatcggggaggaatcccgatgtgcagggagacgctggcccgggggtgcggggcgacgcgggagaaggcgggcacagctcctgggggagacggctgtcgataggggtgactgtggccactcacggctcattcacaccggggaacaagatgcttcctaccgtgtcctacgcaagggcggtggaaacacaggaggcgagacgcgggcgacagttagtaatccggggacagggctgggggttagggtgtgcctccaatcggacaccagagtggggccggctgggcaccaacggaagaagcggcggcacggtcctctcgggacgggggggggccaagtggaagcaagggcagggaccccaagaaaccgggcgtcagtacaggtgctgaatgcagcactgatgtagacgagggcctccattcgcacgaccagaggtggcgcgcaacaaggagcaacagggacaccaagtaggaagcgcgtggaagaggctaaggcaa

SEQ ID NO: 684463 - DNA, 127 bp, Homo sapiens
ccagcgcggaatcaccagtgtattcaatgttgtcaagctaggcaataaaatgttctactgaatgtttcttctttgtctaattacggcatacactggtagcaactttgaaatgggaacagggagctta

SEQ ID NO: 684464 - DNA, 189 bp, Homo sapiens
gagatagacattacccgaaaccgagtatgtcaaccgcagcaaagggcgagtgatcgatggccgatttcactgaacaaaggtctgccctgtcgcctaggcttcgcgttcagtgcgggcatgcccagccgcttctagtcagacacatggtacgcaggctggaactaatgccgccacgtaccgcctacgtct

SEQ ID NO: 684465 - DNA, 981 bp, Homo sapiens
ctggctgaaaacctccgccggggccacatcccctcggggtattcacaaccgcggactaggccgcgtggaaaaccggaccttggctacccgagggtccggggctccccagggcgtccccggtggaaggtgcgcaaaacccggcccagcgcacctggaagcgcatttggctgaggtgacgcacctacaccatgttgcagtgacttcctgtttctctgagaaaggttaatagataaccgaggccaaaatggcgaaatgatgaaacaatggtaattctgggcaggtcaagttgtactcagggtttaaaaaaaatgtcattaatcaggattttccagtagccaaattgtcttgtgccggcagctgggtgactcacagatttggctccaatagtaattgtagagtgtgcgtaccatttccttctggatggtgtgactttttcattgcttggaagagaacacattagaatattttatcccctacatctggcagcatggggagcaggctgtaggcaatactctgtccaagcacatctgggcggggaggccgtggagggaccgaggtgacacagagccggccctgtcctcggttctgtctcgggtcacctgaggcatcttcaccgcggcagctcgggcgcgtgggatctgctctcagtgatgacctgggacgcatcctgcctctgtgcgccattcctgccccttcactgtcactccttggtgatcgcccgtgttcttgggtaagcagtggagaggcacagaatggcttcctttgttgatctaccgcgtcaaatctgtatattataatttcaggttaaagggtaagagttgtaagcaaaatgagtactacgtcaaataattcaaaggaacgaagtaattaaaagtaaagctttctcagcacgaagatgttttctcagataagcattctaagtcaacttttcatagtattcaatgtctatttgttattcttcgatagcaccttgcacttaga

SEQ ID NO: 684466 - DNA, 107 bp, Homo sapiens
gatgattcagaaatttttcccttggggaaaaaaatgaatatgaacctttcccttgtgttaagggtaaaaagggcccgacatggtcataaaattttaattttttccca

SEQ ID NO: 684467 - DNA, 600 bp, Homo sapiens
gcttggcacgagggcgtggtggcacatgcctgtagtcccagctgcttgggtgactgatacaggagatttgcttgaacctggaaggcggaggttgcagtgagctgagattgcaacattgtactccagcctgggcaacaagagggaaactccatctcaaaaaaaaaaaaaaagttgtaactgatgctgggcatggtggctcatacctttaatcccagcactttgaaaagccgaggcaggtagatcacttgagctcagaagttcgagactagcctgggcaacatgacaaaaccccatctctacaaaaaatacgaaaaattagctgggcgtggtggcatgcacctgtagtcctagctacctgggaggctgaggtgggaagattacttgaagctgcagtgagccatggttgtgccactgccctccagtctgggcaacaaagtgagaccctgtctcaaaaaaacaaaaaaaaattataactgatgtaaactggcagtttaggctgggtgtggtggctcaagcctgtaattctagcactttgggaggccaaggcatgtggatcacctgagttcaagaatttcagaccagcggtgccaacatggtgaa

SEQ ID NO: 684468 - DNA, 259 bp, Homo sapiens
ggatctcccgggagtatgtcaactggaaaaagaattagccaatcttgtgtggggttctgtgcagcagctctgatgaagaaggacctagcacttcctacttggtacatgaattagaagaagaccttgaaattcttgagtgaggctgcatatgcaggtgtgcaaaacccattctggaattcttggaaagggtcttgcctctttctcattcaccaacctatattagaagcccttgagggacacatttatcactccaaatcca

SEQ ID NO: 684469 - DNA, 734 bp, Homo sapiens
  misc_feature (76)..(76): n is a, c, g, or t
gagtgtggggagagcgggaactactcgacccacagagccgatcgcggagcggattctgcttttaggagtacccgcnaacaagcgggaccgagcaggaatccatatctgggaacaggatgctcccctgtcccgctggtagagatctggtgggggtcttcctgtctgccagtcccttactgggcatccccggggagaggtggctggtgttccctactggcggccctccctggtgcacggggtacccatgtcctgtcctggcacagtgcccgctgttgggtgccaagcgtggacaggaggatcctcgagccctttgtgctcctccctccgagaatgacgggatgaccgagacattcagatgtttatgcccaagagagaagcggatttcgttcagcatttctcccagatcgtagggtgctgactgaggatgagatggggccgccagagataggagatgctatgagcccggctcaaggaggtcctgcagtacaagtgccatgtgacaggcgagtatcaccgggctgtgacggtggtagtagcataccggggagctggggaagccaatggacagccaggatgctgatagtctccagcgggctgaactgtgcgctggtgtgtggaccttgctgcaagtttcatgctggtggggatgacatcatggttcatcccttaccggcggggacaaatctgggtggatcaaaaagcgggcgtggttgggtgccctccatgattttacc

SEQ ID NO: 684470 - DNA, 770 bp, Homo sapiens
tggatacggagtcccgctctgttaaccccaggctggattgcagtggcgcggtctccgctcactgcaagctctgcctcctgggctcacaccattctcctgcctcagcctcctcagtggctgggactgcaggtgcctgccaccacgcctgggttattttttacatattttaacgtggagacgggttttcactgtgttagccaggatggtctcgatctccaggatggtctcaatctccaggatggtctcgatctcctgacgtcgtgattccacccgcctcggcctcccaaaatgctgggattacaggtgtgagccactgtgcccggccaaaaagaacagaaattattttatcctgaagtaagctgtctaatattggggattatactgaccctatttgtccaatacacctgagttttcaaataatttagttcctataagtacttataattttttactcttactgaattcgattagctgacgggacaaacagttgaacgctgattaactggtcgtacctactacaacgttttcgggcgactcactgtggatgggttcctgtcccttcccatgcccaggccccaaagtgtctggctagtgctgcccctcctggagtggcacccctcttctggaggtcagtctatttttcagcgactttgagctgtcgtttaccgtgccctcctgtcttgcgtggtggggtggtaccttctccgcacgtgcaccgtggtttttgccattgcactctgatagttggcggtacggggtgagcccctatg

SEQ ID NO: 684471 - DNA, 882 bp, Homo sapiens
ggaagaataatgtgcattatgtcaggtcagctgaatttccgtaaattccatctgctctttgatttcaagatgtgaatgcttttcaattatgaaactcatgaaagtcagttgaaatttatttatcatgtccacttccatcccttcacctaagctctcacacaaacttagatctccttgcaaggtgccaactgcaagaaggaggtccaaagtgacaagacttctctggacactgttcattgacggttgactgctctagacgtaaacgaatcctacaataactggattcattttcttagccttccattctttcttatttcttgctcactcctttctctggtatcctgtattaattaggcagtgaataagacaaagaacaatacctctttgtgttcctacagattcagttactatcactaactgaatccccaagcatgcaatttagcatctctctacttaggtcaaagcatgttgcgaaattcgcaagactccaatcctacttaattttcatttattttaatcattatatagcgcagagtccttgtaagaggagtaatggtattctgtgaaaccacataagcaacaacagggtgctatatttccccaaagacaggaactcgccagtattgacaacttaagtggcaaatctacccaataaccgcagtagttaagacccatttgttttcaggaagtggagtgaatgagctgcttctcctcctggtatgcctcttctagtaggtctagtgataagatgtcatgtctcaaacaccctcttagtggtgcacattctggaagggactacaagagtttccagcaggtgccagcaaaaggttcttgcaatgtagtatccctaaatgagtaggttggagtggattagacattgtg

SEQ ID NO: 684472 - DNA, 313 bp, Homo sapiens
cattattctggcaggagcctttattcagcaatggtccctgacctgtaagaagctaagaagtgaagctagagattttcaagtgtgtgtgtgtgggggggggggggccttgtgtgtgtagtagtgtttggggaatatgagcaagggaatcccttctatctagtgaaatccgaggcagaggcccagtctatgaagcaggtaaacgtgcctactgcctcagtgaaagcagtcgggatccctagagatgctgtctgtgctcactctgtcaccccatcagtggggctcccagagagccttggagctcaaaggcacccag

SEQ ID NO: 684473 - DNA, 904 bp, Homo sapiens
  misc_feature (48)..(48): n is a, c, g, or t
  misc_feature (63)..(63): n is a, c, g, or t
  misc_feature (74)..(74): n is a, c, g, or t
  misc_feature (89)..(89): n is a, c, g, or t
  misc_feature (94)..(94): n is a, c, g, or t
  misc_feature (117)..(117): n is a, c, g, or t
  misc_feature (136)..(136): n is a, c, g, or t
  misc_feature (162)..(162): n is a, c, g, or t
  misc_feature (171)..(171): n is a, c, g, or t
  misc_feature (177)..(177): n is a, c, g, or t
  misc_feature (190)..(190): n is a, c, g, or t
  misc_feature (201)..(201): n is a, c, g, or t
  misc_feature (241)..(241): n is a, c, g, or t
  misc_feature (257)..(257): n is a, c, g, or t
  misc_feature (261)..(261): n is a, c, g, or t
  misc_feature (292)..(293): n is a, c, g, or t
  misc_feature (340)..(340): n is a, c, g, or t
  misc_feature (358)..(358): n is a, c, g, or t
  misc_feature (396)..(396): n is a, c, g, or t
  misc_feature (410)..(410): n is a, c, g, or t
  misc_feature (496)..(496): n is a, c, g, or t
  misc_feature (540)..(540): n is a, c, g, or t
  misc_feature (547)..(547): n is a, c, g, or t
  misc_feature (591)..(591): n is a, c, g, or t
  misc_feature (598)..(598): n is a, c, g, or t
  misc_feature (600)..(600): n is a, c, g, or t
  misc_feature (620)..(620): n is a, c, g, or t
  misc_feature (623)..(623): n is a, c, g, or t
  misc_feature (638)..(638): n is a, c, g, or t
  misc_feature (655)..(655): n is a, c, g, or t
  misc_feature (697)..(697): n is a, c, g, or t
  misc_feature (721)..(721): n is a, c, g, or t
  misc_feature (724)..(724): n is a, c, g, or t
  misc_feature (741)..(741): n is a, c, g, or t
  misc_feature (746)..(746): n is a, c, g, or t
  misc_feature (748)..(748): n is a, c, g, or t
  misc_feature (771)..(771): n is a, c, g, or t
  misc_feature (777)..(777): n is a, c, g, or t
  misc_feature (781)..(781): n is a, c, g, or t
  misc_feature (787)..(787): n is a, c, g, or t
  misc_feature (825)..(825): n is a, c, g, or t
  misc_feature (832)..(832): n is a, c, g, or t
  misc_feature (848)..(848): n is a, c, g, or t
cccacatgcacataaaaaccaacaggggcaaacaacaaaaatgcatancattatacaaatgangccactctgtnaagtttacaggattnccgtncatgcaaggggatcataggcatnatttatgaagccttaaganccagaagttttgttaccaccaaaccnctgaataanactgtnaagtaagtttttnggaaggcagtnccatgagttggctaaaatttctttaaagcaaataacttcntctaagcctagccgtncaanaaaatttggttgaactgaaaaaataagtatnncattactgtttgcagccctgtaaaggacaagcaagttgtgggcacanccaccaaaaacaataacntctccctcaccgccggcacaagccgtttgccaaaaccntggtttttcggtanaaggatgaataaattgtatccattcatttttactgaagcagtaagtccaggcatcacttagtggctgtttatcagtggtaaatccnccaaagagaaaaagaagaactgaagaaactggtgtgagtaagtnccaagancgaccaactgggcaaatgccttgtggaataaattcattccactnccatgtntncagattaagaaagttaagancantcattctagcatctngatatctgccttcaaanacgaagcctctttttccgacagttgcccaggcatgggcagcncgaggggaaggtgcttaaccagtngtnataggctggctccaggnaaatntntaagtttctaaaaaatgtacatnaccatnccancccctnggatgacttgaatcccaaaaagatgtttcatcgaattnaaaagtncccaatactttatctncaggcaaatatccataccctccaaaaaatataaacttgtgtttatataccagagac

SEQ ID NO: 684474 - DNA, 1224 bp, Homo sapiens
tagcgggtaggccgcggagcggaggtgcatgctcggcttaccccggcacccctaccccctcgggcgcagaacaaccagaccagccgagcgagtccgacccacgacgcaactactcccacaagcagagacagcagaagaacgagcagaccgctctcacagaccgcaccccacagcacaaaacaccaacacaatgccacaagcacacgacccaacaaaagagctccacacgtatcatcgtacagatatgacacagccctgacgcgcacgcagcacagacacgtgccaggcatattacccacccctgcggcaactgacgctcaaaacgagcctacctcaccacctagccacaacagactcgacaagacgcacaccatctacacacaccctacacttctcctccccacacgcgcgcacgcacgccgagcacgaagcctaccaccacacacaacatccaaaaacccagcacacccaagaaactgccacagccaccacacatacacaccccaccaaaccatacggcccccccacctcagcccccactaccccagccacccccaacgaacaaacccaccacataactcccccacccatcgcccacccaaaaaaccccacccaccaaacatagaacataacatacaaacacccaccctacaccccccacaccactctcacactcactattactacccctcaaacaaaaaccaaacacaaccaaccaaaacaaccacaacccaaacccctcaaaccaacttccaccataacacaactcacaaccacaaaaacacacaccatcaatacaacacacacaacacaaaaaccactaacaacactaccacaaacccccctccctcccacctcccaaccctcacccccaatacccacaatcaccaaacaaacaacaccaacaaccatcccctcaaacatacccaactacaccacaccacactcctactaatacatataaacaaataacaccacacaaacaccacaccattacaaacaataaatatactcaacacacaacaccacaaacaacatctaccaataacaaaacacactaccacacacttataaatccacaccctctacaaaactcatatccctacatccacgaacaacaaacataacacacacacctcccttcacaacaaacaataaaactacaacaaccaacaaaaccacacccacacaaccaactctacatttacacacacacataaccaa

SEQ ID NO: 684475 - DNA, 449 bp, Homo sapiens
atcggtccaggcagcgtgcctttcgtcattcagtctgcgcacctgttggtaaggacgatcggtccgtgcctgcttgttagttcgtcagctggctaaagaaagatgtatttcaagccaattaatttaggtagctccaggcattttccagtcagtccgttgtatgtcaacggccagtcaattgaatttaggtagctctatatataagctatctcgtcgcatgcatgcgtgcgtaagtatgcatcctttatatcgaccgcctgcttcttattctatccgtctgcgagaaagcggccgacgggaacggacatgctggatgaagaaatcgcccagcttgagtaacacgtgcatactgacgatatctcagccttcatcaagctatgtatccagagtgagtgtacgtgcgtgcgtgcgtgagtccgtccctcgattaaatactgagtccggctaac

SEQ ID NO: 684476 - DNA, 302 bp, Homo sapiens
ttaaaagcccccccccttttttttaaggaaaatggccccgtcctttcccaagtccccccagggggggggaaagcattgcttttgtgtaaattatgtaaagcaaaattttttttatcttcccccaaaaacttttttattttgtttttttttgaaaaaagagccttggggcccccccttcccccttttttttcccccaactttaaatgtataaagggttttggtttccctgggagtgggtgggggcaaccagggttttcctttcccctttttttagaccagtttaataaaagggccccccttta

SEQ ID NO: 684477 - DNA, 342 bp, Homo sapiens
ggtcgacctcagttccagagttaggcagcctgagcgcgaattagaaccccagctgcatgcagtggctcatgcctgtaatcccagcactttgggaggccgaggtgggcggatcacctgaggtcaggagtttgagactaccctggccaacatggtgaaacccagtctctactaaaaatacaaaaaaaaaaaaaaattagctgggcatggtggcgggcacctgtaatcctagctacttgggaggctgaggcaggagaattgcttgaactcgggaggtggaggtttcagagagcagagatcacgccattgcactctagcctggcaacaagagcgaaactctgtctc

SEQ ID NO: 684478 - DNA, 110 bp, Homo sapiens
gtgatctaagatccatgaagcgtagactgagctctatactgcaccactgtgtatgataagcagcacccaccaaaaatcgtgcctatcgttatcatgggtacggctcgatc

SEQ ID NO: 684479 - DNA, 944 bp, Homo sapiens
ccggtgtcctagaatacactccgggtccaaagctttacgggtccctgttggcacggtctccgcctccccgggtggagccccctgaccgtgtgtgaccattgacaaggggacttttgaaagcgcaggcacccatcggcgtgtctccaaaggtagccgaaacgtggtgtgctaaaatatggcgaacaccagtaaacacggttgtggcttggtgccagaaggctccttattggcaacaacaaggggcgcgcgctcgccaagtgtgttgcaccagacaacatagtggcgcgcctcttttcaagcggcatcttcttcatccattcgtctcccagggaaaccccgtgccttgtgtctagaccggattggtggatctcgttgccctatctaaatgttatggttgcgcgcccccaccccccgtggacgagctgttgggactccccggtcggctgtaaacaatcttcaacttctgaacaaagccttcttggttagaacaacacgaaatggtctggtctattacgaccgccacagaatgcctaatcttctcccgaagatgttccccgcggtgtaactccccgccccagagggagaggttcatatattggacgtcggtaccaccaagacggcgagtccgtgtatgcagtttataaataagggcgcaaggtagcttcggcatagtggcatgggcccgccgtcccccggagaatgaaggataatggtcggccttcggactcgagttctactcactagaaggggagcgtgctgtgattgggaaacaacattgcaagacatgggagtgagggcatcacggggtgcaaaaagggcagatctatggcaaaccaccgggagcatctctgtgtcaaaatgacagatccaggaggtcttgtccgtcgtacaagctgcctgctatcaacaaccccaaaaaaacaaatttcagacccaacaaaaac

SEQ ID NO: 684480 - DNA, 931 bp, Homo sapiens
gagacaaaggcacgggcggcgtggagggcggcgcggagggcgcgggcccgggagcagggagcgagcgggcgcccggagcgcgagtcaggccggggggccgacccgatcggctggacactcgcgggcgccgacctggcatgggcggcacaccagtgctcgtgccaaccttctctgggtgccccatagaggcgtgcccattcccagcttgaccatttgttccacacgccaaggaaggcagtgcaaacgtcttcagcacaacgggcgccggcacgttgtccccaaattggccccaagcaaggggcacaaaaaggcggcgaagggggatacaagaaagacgtgtggcctggaggggacacccgggggcgcgaaggtaccaaggtggtgaagcgccagagggtttttccgggcacacgtgtgagggacccaggtcaaacacaaacaaaggtgtgggcaagtgccccccctgtgagaaagaagggccaaaactgccggtccggaacgtcacacagcgtggaaggggcaagcaacgtgggagggccacaaacgggttcaaaagaggtgcccgagagcgggttgcggacaagaggagggtgggcataacgcgggaagcggctcaggagcagaggtttacagaaggcgggtatccccccccacccggcttgaccaaagcgcaggggggcgtgggaccaggggcccagtagtctggtggggaaacagtgggggaaacgtcctctgtgggtgccaaccacagggggaccaggagagaatctaaaggacccttgaaagaagtcagaactggggggtccccacgggagaggccccagttgacaggactcgccgacgcgtgtagagcagacactacaaagaagcgtgctgaggcccctggaaaccccggaagcgcgggagtgagacccccatgtcgcggcgtagg

SEQ ID NO: 684481 - DNA, 116 bp, Homo sapiens
cacgacaaggcagctctaacttgtctgcacccccagcaaggaggcgagttagttttctagagacttgaatggagtctcccccttcctgcatcaccaccttggttttgttttatttt

SEQ ID NO: 684482 - DNA, 355 bp, Homo sapiens
cattcattctttctttctttcctttctttctttctttctttctatctatctttctttctttctttctttctttctttctttctttctgtttcgtccttttgagacagagtttcactcttgtttccacggctagagtgcaatggcgcgatcttggctcaccgcaccttccgcctcccgggttcgagcgcttctcctgcctcagcctcccgattagcggggattacagggaggcacccccacgcctggcttggctgatgtttgtgtttttagtaggcacgccgtgtctctccatgttgctcaggctggtctccaactcccgacctcctgtgatgcgcccaccgtcgacgcggccgcg

SEQ ID NO: 684483 - DNA, 482 bp, Homo sapiens
tggtgcctggtggagacctggccaaggtacagagagctgtgtgcatgctgagcaacaccccagccattgctgaggcctgggctcgcctggaccacaagtttgacctgatgtatgccaaacgtgccttttttcactggtaccttggggaggggatggaggaaggtgagttttcagaggccccttaggacatggcctccctttggaaggattttgaggaggttgggttggattctttttaaggggagggtttggaaaaagggggggaattctaaagtttaaaacgccccaaagggggtgcctttaccggggagctttttcttttttaaaccatgaaaaagtgtgggccgaaccgttaaatttttttttgccggttttgccttcctttaccaattctggccctttgctttaaacctggatgctttttttcaggcccaagccggccaattctgtggtgggttttgaataaagtattccctgtctta

SEQ ID NO: 684484 - DNA, 99 bp, Homo sapiens
catgctccccgaccccaagaacacgcacaacggggggagcaggatgaccgcgcagaccgtagacgccgtggcgctaggagtcctaccccttcgcacgga

SEQ ID NO: 684485 - DNA, 955 bp, Homo sapiens
  misc_feature (723)..(723): n is a, c, g, or t
caacccccaccccaccctcagaggagggaatgccctcagtagcacacatgagatttgttgcaagaactctgtctgaggaaaatgaatccacagctctaccctaggttctagcgcagccttctactacccgaaagcggccccgtgaaggggaagcccagggtgcccgagaccactaagggcccacatgtgcgtgctgctgcgttgcctactccttggctcgcccctcacacaatgcacattgttatcctatgaatcgttgttttcctctcccccccccctctccttcgtgtcctcccaccctccccactcctcgactttcccccccccttgttttctcatcctccccccttatgcacccgcccctccccctttttatattctaccctcactccccccacccccaccctcctctcctcctcaccccgctccgctccttacttccagcgccacctaacccacccctccacaccacctccaaatccccaacaccgctctacaccgactttccgtctaccccacttcactcctcttcctctcctccctccatctctcctctcatcttcctctactctctctctagccccacgcccccacccacgacctactctgctagcgtcatcgcaagttatcacgttatcacttcaccccacccatctttccctttctaccaccaatctcctccctcatcccctaccctcccccacggctctctacccactaccncattataaaattatgtcaataaatataatgcaccctaacagtcttcctcctcctcctcccaatccttccccaccgaatgacgttttcacagccaacatcatgcgactcgacgcacctcctatagctcctgtccagtctcttccacttccttcccccctctcacttctccctcctcccaacttttcgctatgacatcgccggccccacctccccccactcttcccctcctcct

SEQ ID NO: 684486 - DNA, 724 bp, Homo sapiens
gttaggtcttaccagtacgctgatcttcctccggatcatactggagagacttatcagccgttcgtgatcacgccctcataatcatttccgctgtgatctgcgtagcgcgtagtcgctgtatgtccttatgcctatacatcgtcagctacacaaatgtaatctattactagcgatctcagacgcatcatcgaaatagaatccgtctgcgctatgctgcccgccatcatcctagtcctcatcgccctcccatccctacgcatcctttacataacagacgaggtcaacgatccctcccttacatcaaatcaattggcaccaatggtactgaacctacgagtacaccgactacggcggactaatcttcaactcctacatacttcccccattattcctagaaccaggcgactgcgactccttgacgttgacaatcgagtagatactcgcgattgaagcccccatacgtcatcatacattaccgtcacaagaccgtctggcatctcatgagctgtcccacattaggcttacccaacagatgcaattccggacgtctaaaacaaaccacttacacgtacacgaacgggggtatactacggtcatgctctgacctctgtggaggcaacacagttcctgcccttcgtctagaattaatcgctacaacttttgactagggggttttacctatgaccccgttagcctctctaacaaacaaaagaaaaaaaacacc

SEQ ID NO: 684487 - DNA, 284 bp, Homo sapiens
  misc_feature (154)..(154): n is a, c, g, or t
  misc_feature (165)..(166): n is a, c, g, or t
  misc_feature (170)..(170): n is a, c, g, or t
  misc_feature (175)..(175): n is a, c, g, or t
  misc_feature (189)..(190): n is a, c, g, or t
  misc_feature (195)..(195): n is a, c, g, or t
  misc_feature (197)..(197): n is a, c, g, or t
  misc_feature (200)..(200): n is a, c, g, or t
  misc_feature (225)..(225): n is a, c, g, or t
  misc_feature (228)..(228): n is a, c, g, or t
  misc_feature (233)..(234): n is a, c, g, or t
  misc_feature (256)..(256): n is a, c, g, or t
ccgactcggagcccccagctccgcgcgacagctagccgggctggctctcggtgtgtgcccttcggatggtcggctgaagagggccgccagctggacttctgtagacaagacagatactgtaaagacagcaaagaccaaacagattggcagattnctaatgtttgnnccangcganaaagtgatgattgnnctcancncgngcagtgtcagagtagaagatgtctntgnttgtnnagctgatctctcccatgctttnaagcaattagaactagataatgcagcca

SEQ ID NO: 684488 - DNA, 100 bp, Homo sapiens
taacctttccttatagcatgcctgttttgggttgacagtaagggtaataatgcttgtggtgatttagatattgggctgtaatgtcagtcaagttttaatc

SEQ ID NO: 684489 - DNA, 455 bp, Homo sapiens
cggggagacgcggacatttaaacttactcaggacggcgccggtatcttggccgctgagggtctttactattgacgcctgggaccacagtggatacagcctagtaacaccaacttgtgtaagagatagaacatgcacaaggcggtagatgatgacgtcggcatggagatgaacatgatgatcatcatgcagcagtacatggacgatggacactgacagcgaaagctgaggtagatccgagttactaggacatagcctataattcatcactgcgatagtgacatgacagatactagagcttaagtctataacgctagggtacgaaacggttgctaaagctatggcatgcaagcgtacgcttccagctgagcacctgacatttcatcgtcaatttgtcagctccattcactaggcagcgcctatacctggattgggttatacacaagcgcgcatgtcg

SEQ ID NO: 684490 - DNA, 884 bp, Homo sapiens
  misc_feature (523)..(523): n is a, c, g, or t
  misc_feature (602)..(602): n is a, c, g, or t
tcttcctttcccctttctgggttctcttctctcctctgaagggttgaagacccctctgccgagggaggtgggggatgggggggacagggtcccctggggtgctcgatggcctgaaggggcctgagttgtgggcagatgcagttctctggtgggcgctgggggaaaccctctcacgtggctgtggtccgtggtgagcagcccgaccaataaacctggtttttccaaaacacacaaaataagcaaccaaaacaaaaaccactttgcggcgggccaggacttcggccccatcgaggaaaacagcgttttcagacacacaacactgcctgttggggagcgggggcccccacgtaaaggagagacgcggcaccagtgggcgcccaacggcgagtcccccagaaagaaacaccccggtggcaccagacacacaagcggcctgtcgatccctcacaccccagataaaaaacggcgccgcgggggaaacaccgcgcagacgtcttccggcaaacacatccacaagtggganctccgaggagacaccacgcgggcaccatcccaacggggcgtcccaagaggggcagccggaaatcataaatattaggccnccgggacgggggggtaaagaacatacgcaaccagcagcacacgtcacaacgagcacgacagcgatcggcacagcccaacccgcgctagtacgcagacaacgcagcagaccacgaagaacgcacacctgcgcataccacaacagaccctacccgaccacaccaaaactacaacacgacagcagcgcaagccacgacacgacccgcacaaccaaagaccaccctgatagcgactatagctaccccacagcataacgacacgctacagccagcaagcgagcagcg

SEQ ID NO: 684491 - DNA, 257 bp, Homo sapiens
ctttttttttttggggggggggggtaaataaaggaatttttttcccccccccccctttttttttggggccccccccccccccttttttcccagggagggggggaggggttatgggttttcaaacaacggggggggcggggggttttttttcacagggttttcccttgggccccccttccccccctttcccccctttttttttttttctttcttttttttgggggcttgggccccttttgggggttttaagaaaccca

SEQ ID NO: 684492 - DNA, 397 bp, Homo sapiens
taaatggtgtgaaatagtataaaaatcatgggtgtcattattggcttggcctgagctcaaatcaaaatgtttgaaaaaaggaattattttggcaagtacgtacagtttatgcttgaaatattcaaatgttatgtttttgggaacttctacagctggatgcctccgggcttttatagcagtttatggggagcacttgaaagagcgtgtgtacatgtattttttttctaggcaaacatggaatgcaaacgtgtatttttttaatataaatatataacggtccttttcatcccaggtggccgctaagtgatattcatatgtgtggttatactcataataaggggcctggtaagtcttttcaccattcatgaataataataaatatgtacggctggcttgt

SEQ ID NO: 684493 - DNA, 580 bp, Homo sapiens
  misc_feature (85)..(85): n is a, c, g, or t
aggagacggtaccagggggaccccatgactatattatttcccttggacacccctagatacacagtaatttttcagtaaagtcagntttcttctctagaggggagactagttcagacattctagactgttctgtcagactcagtttcaaaagagaatgtgtgggagaacagtctttgtccgacttttatatataaaataatagtataaaaaagcttctggttgtcaagtgaagtacatgcatgaaacatttatcttgcagctaagacctagcttgttgaaatttgcctggagcaaaatttcatggctgagttacagcctcagaaaaaaaaatattctaggtttgaatttctgtaccaaccttcacatcctggccctatttaaaaggacattttaagtctactgtgaagttgcatttgagatgataaaatttttgttgaaggagaaaagaggggagacaggaatatttgtattggtttgctttagtagctttctatctgtgaaaactagaaatgatctctgcagagagtgtaatagaaatgtttgggtggcctcaaatctgcacagtgtcctgagggctcac

SEQ ID NO: 684494 - DNA, 146 bp, Homo sapiens
  misc_feature (81)..(81): n is a, c, g, or t
  misc_feature (107)..(107): n is a, c, g, or t
  misc_feature (111)..(111): n is a, c, g, or t
  misc_feature (129)..(129): n is a, c, g, or t
aactttctcctcatcctcctctgaagttacttcttcttccttcttctccagggtctctagtttctgtattgtttcctcctnatcttctgtggtcttaggggccctcntggnggagaattgtaatccgtnccttctgtcgtcttctc

SEQ ID NO: 684495 - DNA, 233 bp, Homo sapiens
acttcacttgcggtgacgccatcgcgcccgtgtctcctgtgcgtgtcttacgggtctctgtgactctgtcccttcttcgtgtccccaccggcctgtactcttgctacagacctgcggcattgggctaccatggtactaccaccttactttttccttcggcacgtggacactctgctttcgcacgagcgtgtctgcatgtttggtcctgttgcggtagtaagctctgagaccgg

SEQ ID NO: 684496 - DNA, 935 bp, Homo sapiens
  misc_feature (934)..(934): n is a, c, g, or t
ggtaggcaaccctgacgtcctcagaatggcgtgcacaggtttggtggctggagggagttgtggtggatgcgcgtgccgtatgttgatcaaggttatgaatgcccctgggtgtgcgggaagcggctgcagcgctggtgtaggaggaaactcgcttgatccgacctactaagaactaccgtgagctacctgacagccccggattattctgcctttgaaactgacataatgagacagatgattttgatacgactggcctgtcctaaacacaattgaattgctcagtataaaacgatatgagcttccagccccctcctctggtcaaaaaatgacattactgcatggcaagaatgtgtaaacaattctatggcccagttagagcaatcaagcagttagaatttgagaacctgggacactaatgtcacagcatggatgtaatgcctggaaagtatacaatgaaaatctagttcatatgattgaccacgcacagaaggaacttcagaagttaagaaagcatattcaagattaaacctggcagagaaagaacatgccaatcacagctggatctaattgagagaaatggcgtcaattgcgtatccctggtcagtaagaattatgagattgaacgggactattgtcagctagaaaatggaatctatccaattaagcagccacctggagaagccaacagaaaaactcggaagcttctgaaagccacttcgcagttcgagaaagtgggcttccacaaggcctcgaccttaatggctttggaggcacacgtttcccaacactggttgcgttaaacacacaggtgcgcgggatattgtattcacgaaaatgccgggggttccaagagtggcaaaggacaaaggtaataacggcgttcagcaagagaaagtgtaatctccactttcttcccctccaccatcctctcccng

SEQ ID NO: 684497 - DNA, 180 bp, Homo sapiens
gcctgcgccctggatttccttcttcgccttcctagctccatgggactcgccccaggactggggcttcatggaccatctgccccttactcttcaagccctgactgtggcgtcggtcgatgcctctgatcctcagtatgctctctggccatgttccacggcttctccttccggggagctggc

SEQ ID NO: 684498 - DNA, 764 bp, Homo sapiens
  misc_feature (259)..(259): n is a, c, g, or t
tccatggatatttaaattaatttgtaaaaagagagtttgttttaaaaggtgatttttggagttaaaggatgtggtttagtatttaagaagggacccacaccagtttcggtgccaccagagatgtggcttaaggggcgctgtttaaaggagatccgtaaaggagactgatgtgaccccatgaataggttttgagtaaatccaccccagtaatattttggtggtgttataacccctttgaagattttattatgtaccccgncacgctattttctctcgtgtgttctgtgggattttcacgccacgcttcacgggatagaggtttaaaattttaggaaaatttttgcccgtggacaaaaggctagttctcttttgttcacgccacccactaaaattcacggagatggagatttaatttctaattggctcttagtcacctctggaactgagttatattctgactttctgtcacctaagcaccctggtatttggccctctccactttctgagcaccccaagcggttaacaccgaattgtccacctagaactctgctgtgtgtcaccccctataatcaacgtctaaattcttccacgaccaaagccaatggcacctttatggatttaagtcattagattttccactgaccttaattaatccctcttgacttgattatatcctccagtatttatatcttaaataggaggtaggatttctgtgttaagactcttatttgtaccccataattaaagtaaaatgttttttatga

SEQ ID NO: 684499 - DNA, 295 bp, Homo sapiens
ctcgccaactcacggcgagctgctgtgtgaccccgtcatcattcccgtccgggtcttcatgctgcaccactggacctgcgatctcgcacgcatcgcctttttcagtttcccgagacctccggcacttggggactgagctagggtttgagcgtatgactatcgcgtatcctggtgacgtcaacatgcaaatctttatatttgacctgtgtggtgtggatcaaatgacagtgcaatgcactcagacggaagccgctcggcctgcgagacacagccggtctgggcccggcatggaaac

SEQ ID NO: 684500 - DNA, 137 bp, Homo sapiens
acagcactagggctaaaaaatcagggctctgcctagggggcagcaacaagtcaagatacaaccacaccctctacagagcctggaagtagccctgcaggccctgcgtctcgcaggacactgggctgagaccagatgag

SEQ ID NO: 684501 - DNA, 1131 bp, Homo sapiens
aacaaatccgaaactttcttttgttcgcactgacaggtctgtactttatttctattcctttctggagttcaggactatggagccgagtatttgatcttttactatagccgatgtttactgtgtattaactctacagttaacataggaacaatatacaagtacggatgtgagaatttcgcattttaatgtggtaagatttgcaacccttaatctgagataatcagatagacagtcttaatataaatgtactgtgaagaatgctattgatgttcatggtttctgattactttccaaatttggatgtttttcttgccagattggctttatcttaaagtgaaaggacactggtatccattgtagaagttacattgatgctttcatccagtaagagcaatagaatttccattggtgttcctttaagtcctttactcaattatactaattggaaagcgaagaggaagggcctatattaatatgctgaacagtgtaacaggtgatgactttattagcagacatctgcttaaaggagacctattttgttagcagttggcttaaacctacactttctaagaactaaccattgacccaatgtacaataccgtagcttaggttcctcgggtcactattatggttgacttccagattgtttcgcgtacccgtactccgcggacttgtcgacgattgattcgtccaggaactaaactggtctttttcaaagccaaaaacatttttccacgaatcttctaacattacaaaatctcttggtaaccggatacactgtgcaccttttacacaacacacttttctgggaaacccaatcttataacaaactctccagttaccaccccttaattgtgggtaacttcagacaacggaaatggccctggctctacgagacagccatttaaggggaaacgggggagcatattcatcctttcctcttggaatcgccccaacaaggtgtcttggccacgaagcaattttgtgggggcttattcgtccacaccctttcaccacttctcggccagcggagtaggtttatacgatagacggcgcgttctatcgtcaaccccctgtgggtcgcacccacaatcttcatcgacaacaccgccaaacactacacggaacact

SEQ ID NO: 684502 - DNA, 243 bp, Homo sapiens
  misc_feature (235)..(235): n is a, c, g, or t
agagaccgcgctgtcacatagtacttggtcttagcacacatttctagctttctttctggagcaggtttagtgttatcctccgtttttggtggaacctaattcttttgggacctaattactttctcaacctattggttcttctgtcgtgcctctggggtgaatcttttataaaaacaatatgtaatggtagcttatggttataactgaaccacttaaaacttggccagagtctganggctaaag

SEQ ID NO: 684503 - DNA, 363 bp, Homo sapiens
acggacaacgggttacgcactttgtgtggaacgtgacacggcaaggacgcagacgatgtctgagtgtgaggcgggcgctctgagatgcacgacgggcacgacgcatctctgtcaccagcctacggccttgtgctgcggaaacccacgtacgctcctggaggccctggtcagcttgcttggaatccagcaggcagctggggctgagtgaaaacatctgcacaactgggccactgtgaagcttttccttctccagtgtctaccttcctcctcaactcccagacatctgtataaacacaatccttagttctccccaatctgaatcgcattcctcttttgcctcctttttaatgtcagtaaggatca

SEQ ID NO: 684504 - DNA, 657 bp, Homo sapiens
cagaactgcctgatcccgagcagctgatgatcgggaagaggatggctgctcccaaggccgttccatggtgccactcacagaggaaaatgaggaagccatggaaaacgaacccctagcttgcgcaacagtattcaggtggatgaggagaaatacggagaaactatgctgaaatgaaagatcgaaagaagaggaaaggctccaaaaatgatattttacgtgcagacggtgaagatacaagaagaaaaggcacgacaacgctgcacgaagaaacagaccaccaagtcaccacttaccacgcctgcagccgtctaggaagacagccagacaggagcacaagcacgacgcaccacataacaagacaccggccaacaggaacggcaagacagcacgcagacacccacagaagatgccagtaaacgacggagacaacaagcaccctgacgcaacgacaactgcaagccataacgcacagagacaacagacaaaggacacggctgagctgcccaagatgcagccgcaaagcggagacgcaacgaccaagcacctcgaccacgctgcgaacaaaaaaaccagaaaccacaagcgccaagcagagaaaacagcgaccgaacaaaaacgcaagagcaaggaaaaacacacaacccgacaaaaatcaaa

SEQ ID NO: 684505 - DNA, 219 bp, Homo sapiens
tgttgtgattataggcaagagccattgcacccggccatagggactctggctggcacatttcagtgtgtggtcagatgctggggtagaggttcgaagctaagtggttagacttaataatagacttggggacgttaaggagggtcgtggtaatataacttaaggaataattgcatgatgataggtagtgagggagaaatgtggctggtttgaccagtggag

SEQ ID NO: 684506 - DNA, 147 bp, Homo sapiens
tcgtagtatctaagaccgtacaggaccatcattactgtctcacagcttatctgtgttgctacatccatgccagtttgtgctcatctctcatgcagtcagtgcaggaactataagtagtgtcagcttgtctctggagcgctcgagaat

SEQ ID NO: 684507 - DNA, 903 bp, Homo sapiens
  misc_feature (441)..(442): n is a, c, g, or t
  misc_feature (461)..(461): n is a, c, g, or t
  misc_feature (872)..(872): n is a, c, g, or t
tgacagtccttcactgtaaccattaacttaaaaaaaaaaaaagttaaatctgttatatattattctcctttctggatcccaactcactgtgttatagtgtttatgggggtagagaaatacataggtgtatgtatttcaacagtacggttatttgtttaaacgagaggcacacagatttggtggtttttagcatcatgggccattcattcagtcattcatgcaatcagaggcaggtctccttctgtcacccaggctggagtgcagtggcaagatcacagcacactgcagtcttgaactcctggactcaagtggaactccagcctcagcctcctgagtagctgggataagaggtgtgagctactacagctggctcattacaggctttaaagccaaaatctgagttcaagcctcagccccgttattagctacatgatctttagnnaattattatgtctcctctngtttcctcacctgtaaaatgagaatagtacctaccctcacagtatcaaatgaaaaagtatgctgaaatggctataaatgtaatatactatgcttttttattttgttgagatacaattaatatactataaaatttatcttttaataacctatcatgtaatggtttttggtgtattcacaaggttgtgcgaccatcactactatataattctaaaatatttcctcatccttgaaagagaccccatatccattcaacagtcacacctctcctctcctctccacattctcctcctcctaaatccccaggcaaccactaatctactttctgttgctatggatttacccattctggacatttcccacgaactctactttctgtgttctatggacttgcctaatgaagggatcctccnagagtacgaccgcagtcaacagacgcactgg

SEQ ID NO: 684508 - DNA, 345 bp, Homo sapiens
  misc_feature (232)..(232): n is a, c, g, or t
  misc_feature (269)..(270): n is a, c, g, or t
tttttttttgagacgaagtctctctctgtcgctcaggctggagtgcagtggcgtgatctttcactgccagtctgcctcccagggtcaagcgattctcctacctcagcctccagagtagctgggactacaggtggcatgccaccatacctggctactttttttgtatttttagtagagatggggttttccatgttggctggcctggctcaaactcctgacctcaagtgatttnccacttaggcctcccaaagtgctgggatcacagcatnnccaccatgctcagccaggaatatggatttttaagcaggctcttgaggtagtggtggtgggcactgagtggagacc

SEQ ID NO: 684509 - DNA, 344 bp, Homo sapiens
  misc_feature (15)..(15): n is a, c, g, or t
  misc_feature (17)..(17): n is a, c, g, or t
  misc_feature (43)..(43): n is a, c, g, or t
ctgagccaccccagntntcctggacatagactgtggttcaagngtatcctgtctgttccatgcccaggcagatttccaagcatctggaatggcaactcttctagattagaagtttaagccatctcccattcctgtgtagagaacatggagcccagatggtttcccagctgcatgcctaggcacaatcctgcattctcggtggctgccctctggattctcccttggcgctagtgtctgtgcctgccactgggggatctgtaggccaacctgctctgtttggccctgctctttgtggccgctgcccccccaggggtggagcagaggaagctcaggagcaactatat

SEQ ID NO: 684510 - DNA, 182 bp, Homo sapiens
cctgacccgatacgaggctcgagaggatgccgccgactgcgatagacgcgagcagcaggcctgcggtgaccgggccaccaccgatgacgatggcgccgaccgcggggaagagcaccatgggctggccgaaggtcatcgcgatgaggtcgacgacgaagctcatgcggatgttgggcgcgcgg

SEQ ID NO: 684511 - DNA, 691 bp, Homo sapiens
taatctgagttattggggaggctgaagtgggaggatggcttgagcccaggagttcagggttgcagtgagctatgatggcaccactgcacccaagcctgggcgacagagcgagactctgtatctttaaaaaaaaagatgttaaaaagaaaaagacgaaaatattaatagcaattttttatttttaaaaatgctcattttccaaaattttcttgtgaggaagccattttatttttatagggcatacaatatgtcttatattacaatatttataactatacaacacttattaaaatacaatttatgaacttgtcacccaccccagtgggcttttctcctgccccatagggctggttctgcactcaagacttttttactgtggtctgtgtctctcttagcaagactctacaaaccttcaagagcaggggcatgtctggccttcaattattacttctgattataaggagaatgagcaaatgatctaacctccctgtgcctcagtttcctcatctgtaaaggtggtggtaagtacctacctcagaggggtgggatgagcccttagggttatttcccaattttttcttattagaaaccaggtgttggtcagaagttaagtttggacgaattaaaaccattaaaaattcttagatgaaacatatggaggtaaatttttttgacctgtggtttaggcaaa

SEQ ID NO: 684512 - DNA, 173 bp, Homo sapiens
agctcggtacctgtttgagctgctgaggaaaacactagaaatccagtgcagcctgttctattacttgctcgccatacaccccctttgaatgttgaaatccttgttttttttctttttgttgagacagagtctccgtctgtcgctcaggttggagtgcagtggcgtgatcttgg

SEQ ID NO: 684513 - DNA, 366 bp, Homo sapiens
ctctaaagtgttaacttaggtaatctgtggtgtttgccagttgtcacgtggggtcgcaaagggagaaatactgcgaatattatattttattaaaataacagattttaataaagggtcgtgttcttgcgtaaaagctgcttccactgttggaaaaaaaaatgtgtttccctctattctgaaagaaggctgtttttaacactaaaattatccgaaatgctacataagtaaatcctttgtaaacgatgacataaaaactaattccaaaacggaagacgagttgacatctctgtaaccccttccccatcctgctccgcttcatgtcccctcctgagtagtcatgtgataataaactctcatgttattgtt

SEQ ID NO: 684514 - DNA, 371 bp, Homo sapiens
tacctgttacgatcttttaaggccagctgtcgtcctagcaactgcatggaggcacaatatcatggctttgccatgccctatttcatccaggtcatgcaggagtacttgacaaaggtggataaattagatagttcagaatcactgcgcaacgaagaagaaccagctacagagacacaacccattgtttatggtcagccccagttgatgctgacagcaggcaccagtgttgccgtccctccccaggcaactttaggttatggtaataaccgccacaccgtatggacagccacagactggcatagggtacagcatgtgacgctgcagcgcttgatcctgtagtcacctctctttcgtacttgaaaaattctgtc

SEQ ID NO: 684515 - DNA, 352 bp, Homo sapiens
ccacctcacttttctttttccccaacttcagtcatgcacagggttggtaaatgtgttgctaaaaccgcacatgcacgcaaccgacacacccttacatttctgcaaaatggtttagaaaccggttactccagtattgctgaaaaggaaagagagaggaactcagcttcatgaaatacagagaggaaccgttagaatccctatttaatatagatgaagctccacagccacagatgaaaaggacacattcagcttgctcttctcaaggtctcaagcacagcatttctgattcacgtgtccctgaggtcgcgcccacacaggatagcatctaagagctctggcacagctcgtgccg

SEQ ID NO: 684516 - DNA, 169 bp, Homo sapiens
aggcccttttttttccccccggaggacctaaactggtttttccctttttccaaaccgccagattttttttttggccagaaaatttccccttgaaaatttggctgggacctggggaaggggtaatgttttttctgggttttttccatggggaaaaaaattttttttttga

SEQ ID NO: 684517 - DNA, 169 bp, Homo sapiens
ccacaccgtggcctggcagcattgcactcattcaaatgtgcatcacatccaccataaattcttcaggcaccagtgcctggaccatcccatggatgcagccaatccacaccaacatcagagcagctgtctgttagtccatatacacatcaaccatcattttgtcattccc

SEQ ID NO: 684518 - DNA, 327 bp, Homo sapiens
aggtgatctaaggacgcggcgagtgcatggttaaacaccaatgaggcaggttcaagagtcaggtttctgtagaaaactgtttttttcctcttgtgacagaaaattcagcttctgtccgggcattgtgggtcacgcctgtaaccccgcatttgggaggccaggccgggtggatcacctgaggtcaggagtttgagacccggctgggccacatggttgaaaccccatctccactaaaaatacaaatattatagcagccatggtggcacacgcctgtaatcctagctactggggaggctgaggtgggagaatcacttgaccctggaaagg

SEQ ID NO: 684519 - DNA, 481 bp, Homo sapiens
cagttgttatgggttgaatgtctcccccaaaaaggtatattgaagacttaaccccaatacctgtgaatgtgaccttattttgaaataaggtctttgcagatgtaatcaagatacattgaggtcattagggtgggccttaatacaatatgactggtgccattataagaagaagaaaagagaaaaatacatacgagaatgccatgtgaagactgaagcagagattgaacagaagcatctacaagccaaggaccaccaaggactctcagcatcatcagaagccagaggcgaggtatgaaacagattctccctcaaattcctcaaaggaaccaaccttgccaacaacttgattcaaacgtctagcccccagaactgtgagacaaaacatttctattgtttttctaagtacccaatttgtggaactttgttatcgcagtcctgtgaaactaatgccatagtaagtaaacatacctgtgagttttaa

SEQ ID NO: 684520 - DNA, 125 bp, Homo sapiens
  misc_feature (88)..(88): n is a, c, g, or t
atcttatgcgttggctttatgcacttgcaaataatgcattttttaacaaatggaaggtttatggcaactctgcgttgagccagtctantggtgccatgtttccaataaaacttctcctttcatgt

SEQ ID NO: 684521 - DNA, 250 bp, Homo sapiens
  misc_feature (45)..(45): n is a, c, g, or t
aaattttccagggggggggggaaaaattatattgtttttttgatncccgggggcccccccttttttcaggaaaaaaggtcccaaaccccccggggggggggggaacccgggggaggacaaaattttaaaaaaacaagggggggatttttttttccctttttccaatttcccccaaggggggggtttttcaaaagattttccccatcccgggaaactttttttttttttggggccccccccggatttgcga

SEQ ID NO: 684522 - DNA, 913 bp, Homo sapiens
  misc_feature (450)..(450): n is a, c, g, or t
gatcccactattaattgaggggtactccttccgcgtttccggtgttcctcaggttttccggtcgtagcaggctcccgtattggtaatatcccgtagtggcaacccctaaggcggtttcaattccagggggaagccccccctctgatggacgccaattgcgccgcttaagggcccgaattgctagaggacctggtcatgtcatctatatggcctgagttttttccctcagtctactagaattgtcaggccctctggtccaacattagcgcgcgtctgcaagaccccccgtcccagctgggcccgggtcccaacggaccaaccctcataattttcgcgcccttcataatgctcctggcagtatatcccgcttggggaacccgctcttccccttgggggaaaattttttttcggcccccccctctgacgaatattcttagcgcgtctcttttnccagaggaatcaagctacacttgtgtctggcctgacaaatgctattggaacaaactccccttttcccaggagcgcttggacttgtccgccacctctctatctgcttgaggggcccaaagtggtgctcaaacgatacactagggccattattctctcaaaagagtactaagcagcacctctggtcgcacctgccgcctaaatggccaaaccctgaacagtggttgataatgtcattataaaaggaagcatcttcccatcgctcagggtacttaattgcgccgacagtgcttcataccacaacatttcccagataccccaccaatcatagaagccaatctccacgtatagttagaggtacgtgtatcacaagttcagtcctcggacctgccccgtggagaataccccccccctggcaaattttaacccgtacacccttaaacccttttgtttaccccacaaaaca

SEQ ID NO: 684523 - DNA, 140 bp, Homo sapiens
tttgtaaaaaaattccaaaattttaaaaaggggggatcccttttaaagtcgggccaccagtttgaaatcttgccggcaagaatgtttccccatcgggatttatccccccccccaataaatgttaatggttaaacccccca

SEQ ID NO: 684524 - DNA, 123 bp, Homo sapiens
tggcgttctagaggatcccagagagagacgaagaaaagggaaagaatatacttggtatctcatgaccaaatgatgcaagacatctctaataacgagtacttggagtacggcggccacgaggat

SEQ ID NO: 684525 - DNA, 152 bp, Homo sapiens
cccgcctcagccccccgggtagctgggaataacggcgtgcgccaccatgctcagctaatttttggtagagtggggtttctccacgttatcccggctggtctaaactataggtcgagtgatcctcccgcctggttccaatgtcctggattaca

SEQ ID NO: 684526 - DNA, 389 bp, Homo sapiens
atacatgtactaggggaacaaacccctcgttaccttgtggtgtaaccagactgacttctatactacccagtaaaccacatagcaggtagagagcgtaaaaaaactgcaaatcaggtcatattgacttccccgctatatagctcttccatgaatacagtaatgtctttacaatataatacagatacgtttccatggactgcaagaactacaccgccactgacccctcatactatttcccctacaaccatagtgcttcagcaacattggctgactctacttactcttaataactatacctccctatctactcctaccctaatacttccctctcctctaccaacctgtctccctgcctccctaccaacctcccgattgagtccacatttaag

SEQ ID NO: 684527 - DNA, 576 bp, Homo sapiens
  misc_feature (29)..(29): n is a, c, g, or t
  misc_feature (54)..(54): n is a, c, g, or t
  misc_feature (71)..(71): n is a, c, g, or t
  misc_feature (114)..(115): n is a, c, g, or t
  misc_feature (120)..(120): n is a, c, g, or t
  misc_feature (122)..(122): n is a, c, g, or t
  misc_feature (130)..(130): n is a, c, g, or t
  misc_feature (137)..(137): n is a, c, g, or t
  misc_feature (141)..(141): n is a, c, g, or t
  misc_feature (143)..(143): n is a, c, g, or t
tcgacacaattgattacagccaccaaaanaatagacgtaaaaataaaggcattnggctggtccaagatgtnattatcaatcagtcagcacctgtgattcttttacttatttttnngtggntntttttttnaaacaantttnancccaattttctggagtcattctctctctgcagcagaagaggaagggcctggtacctccctaccaatgactgggggtccttattttctaccccaagagcaggggatataagcggtgtccaaatggggtccggaatttctacagactcatcaacttgagggcaagggaattcattggaaaacccacctggttgtctccttgggggagacttgacatatcttaaagatattaacgatagctaaatctgcatatatctacattttgcaaagggtttccttaagaagtaagcgggtacatatgcatagggggaggagatcagaccttcactggtaaggtaccgcctcaaacatttatggtcagccagtctgtgaaggagacccattttattggatcctcaagacaagatcctaagcctcctgaagggatggtcaggac

SEQ ID NO: 684528 - DNA, 171 bp, Homo sapiens
gaaaatagtaaaatagctgggcacggtggcacatgcatgcagggccagctgctgtggagtctgtggtaggaggatagctcgagcctgggaggttgaggctgcagtgagctatgatcatgccactgcattccagcatgggtgatggagcgagatactggctcaaaaaaaaaa

SEQ ID NO: 684529 - DNA, 316 bp, Homo sapiens
aaccactgcagaaatgacatctgttctgtgccaaccttgcggctctgaattctcctaactccatttcgaaagctgctaacactttacatgaacaccatagtggtggtgcaagtcataattctccatcctccaagactcttgaaaccaaacggggaaaacaatgatcttgcagttatccgtaatgtcagataccacctataaaatatactggactgttatactcttgaatccctgtggacatctacatttgacgacaacatcactctgaagtgttatcagcaacaaaaattcagtagcttatctttaaaagaaaact

SEQ ID NO: 684530 - DNA, 429 bp, Homo sapiens
  misc_feature (174)..(174): n is a, c, g, or t
gggttttccgggctccaagggggtttcccggtttttccggggttccccccctcccccccaggggttggtgtggggtgttttgcccggatctcccggattttttaaagttggcccacttcccccaatttgcggagtggggggggggggggggggtgtttagggctacttcaatcnagctccctttgtttccctgggaaccgccccggcccccttttttctcctttttcctcccctgggggccccggggccggttccttttttgtgtttttggggggggggtggggttttttcccattttcccccggggcccccttggcccttttgggcttttttggtggccctttttttcccgttttcccccggggccgggtggggccggtccgggtttttccgggccttgggtgccccccggggtgcccccgggtccca

SEQ ID NO: 684531 - DNA, 290 bp, Homo sapiens
caggttggtaaagagcagttgagacaataatgaacaattattgtatgaacacattgttagaaacagctaatcacaaacaacctgcgggcacaatgacctcattccacacgtagcacccttcagcaggaccctataaaactttcctccagcccttgcctctttgcaggtagccccttctctgctgagctgaccactgcaacatattttcacaatttctctaataaatctgcccttctttacctacaactatcttggtaaatggctttaccacctgcaaaactgaccctagg

SEQ ID NO: 684532 - DNA, 110 bp, Homo sapiens
agcgggggtgcgggcgctgcctaccgcctcacgccaatgtgggggcggcagcggggagggcggtgcagaggaaagtaaagaatttcctccctcattgtcagggaccagcg

SEQ ID NO: 684533 - DNA, 429 bp, Homo sapiens
  misc_feature (281)..(281): n is a, c, g, or t
ctgggatgtgctgtgtgactgagggtaagtccctctacctctctgagcttcaaggtcctcacctgaacagaagataacaacactgctggcctcatggggctgcggcgaggaccaaagttgcctctgacatgggctttgcctttggagagagtgagaatccccctggggaggcaacaacaacaacaacaacaaactctatctgtctatctatctatctatctatctatctatctatctatctatctatctatctatctatctaatctatctatctcccaggncctgagctccacccagccagcccttgccagttgccagttgacttagcacttagcataagaatgtgtgtttcagagggagctagtctttgaagcaagtggcagggataggccctgagccctcagggagaaggagcaatgggtttttatc

SEQ ID NO: 684534 - DNA, 331 bp, Homo sapiens
  misc_feature (331)..(331): n is a, c, g, or t
gctgaccccccagaaggtgcggctggtggtgtatagagatgaagcacactaccgcttttaggagaacttgtagattttccctgtggatctgcagaagaaagctggccgcggcctgggcctgagcatcgttgggaaacgaaatggaagcggagcgtttatttctgacatcgtgaaaggcggagccgcatacctggctgggagattgactcagcgagatcagatcttatctgtgaatgcagaggacgtgagaaatgcctcacagtagacagctgccaccatcctcaagtgtgcacagagacttgtgcagctagagattgcaagactccggcgn

SEQ ID NO: 684535 - DNA, 369 bp, Homo sapiens
taagtaggaattgccttgaaggcccctgaaagttccaaggcctgccagtaatgcctgattgtgccctgtgaaatagcccactgcaccccccagccttgggccagccatccagaattaataagagacagaaagtagaatgaatggttgccccggggttgccaggaagggccagccgagagggaattactgtgtaatgtgtacaaggtttcagtttgggaagaagaaatgagtccctggagatggattacggtgatggttgcacagcagtatgaatgtacttaatactactgaattgtatactcgaaagggttaatatggtgaattttatgtgtattttatcacaataaaaacattgaaaaataaaaaaaa

SEQ ID NO: 684536 - DNA, 542 bp, Homo sapiens
  misc_feature (8)..(8): n is a, c, g, or t
  misc_feature (37)..(37): n is a, c, g, or t
  misc_feature (89)..(89): n is a, c, g, or t
  misc_feature (440)..(440): n is a, c, g, or t
ccctcccnaaaggccctggtgaatgtgcaagtaccanccatacccctaagtaaattttattaggaattcctgggcaaaaagccattacnacctcccctgttattccgctcccttcctgttttgggggtggaaggtgagggatggggttggtgggggaggtgggcccccaagggtggtgaaattttccccacaggccccaaggggatgcctccttggtccttgcagatccgtaaccccggagagcaaaccttcctctccctgtgggtacactcatattaaacagtcttgaggcagatgtcccaaacacccaaaatagctgccccatttatgtatttacaatagaaataactgaccccaaaatcagaatacttcgaaatcatgtcctgccagaatatttactccctacaagtggggaaagtcaaatagtgatctaaatctgntctgctaatacagaaaatgtaatagagggaattaattacattaatgccactggaaatattattgtataaagactttggagttttcagagggcattttcaaac

SEQ ID NO: 684537 - DNA, 1059 bp, Homo sapiens
  misc_feature (474)..(474): n is a, c, g, or t
  misc_feature (675)..(675): n is a, c, g, or t
  misc_feature (803)..(803): n is a, c, g, or t
ggcgcgaagggcgagcgtagggccgctggcactgcgggtgactttggcgtccattcgatatatcattcctttaacttatgttccatcgaggaatccggcctgctgtgagctttacgaagtaatccatgctcatgaacaagactgggcctgttacaaccgcacacatgactggctagctgtgcgaaaattgtactaatctgtgctctagcagaaggtatcttgcaccgatgactgttattaccgcttaccgatcactgagctcatctgggctagcaagagagctctctgatggcattgggccattaaggcatcaggcagaacatcgtatatagactgacgtgcgcggccttcagactgggggaagcatttacttgagaggtagtgactcttatcacggggcgataacaaccagtgatacgctattgctactgcgactgcacttaggtcctgatgctctaatccctgcatggcctnggctacacgcctcccatagggcatactgcaaacgtctggagtgtcgcgattagtagatatgagtaggaatgctcgttagaagaaacatgattcatggacgatttcactaccaaggacgagactgtcacgagctcctgaagactacatagtctcgtatccctgccagcacccaagggtccgcgacctcgcgttcccgtgtcnttctatgcgctgtgtcagatcgcgcggccttggtagcgcgcgagccaaatagacgaacgtcttgtgtctctcgcgaaatatcatctgtaccaagttaagggtggttgctatctcggaatggtctcaancactggaagggctcaccccgaacggtgggtttcatgtaggcgatataaagttctcggtgggggacccccgcgacgaaggtaattgaatacgtgccgtgcgctcgttgggtagaaatcttccgcccacgattggcaactcccggaggtagagagccagttgaaaaagcggtaaaccggaaaaggaaaacgaaaaatgtgggcccatgatggaatttctttggtagatggcggggacgccgtgggattgacagttggg

SEQ ID NO: 684538 - DNA, 470 bp, Homo sapiens
  misc_feature (17)..(17): n is a, c, g, or t
  misc_feature (67)..(67): n is a, c, g, or t
  misc_feature (77)..(77): n is a, c, g, or t
  misc_feature (82)..(82): n is a, c, g, or t
  misc_feature (117)..(117): n is a, c, g, or t
  misc_feature (119)..(120): n is a, c, g, or t
  misc_feature (137)..(137): n is a, c, g, or t
  misc_feature (144)..(144): n is a, c, g, or t
  misc_feature (146)..(146): n is a, c, g, or t
  misc_feature (161)..(161): n is a, c, g, or t
  misc_feature (197)..(197): n is a, c, g, or t
  misc_feature (208)..(208): n is a, c, g, or t
  misc_feature (220)..(220): n is a, c, g, or t
  misc_feature (232)..(232): n is a, c, g, or t
  misc_feature (274)..(274): n is a, c, g, or t
  misc_feature (286)..(286): n is a, c, g, or t
  misc_feature (304)..(304): n is a, c, g, or t
  misc_feature (307)..(307): n is a, c, g, or t
  misc_feature (311)..(311): n is a, c, g, or t
  misc_feature (321)..(321): n is a, c, g, or t
  misc_feature (334)..(334): n is a, c, g, or t
  misc_feature (372)..(372): n is a, c, g, or t
  misc_feature (400)..(400): n is a, c, g, or t
  misc_feature (424)..(424): n is a, c, g, or t
atgtgtggatttggganaggattggggcatttttttttgggagttgtggggtggtttttaggttggnaagggatttnttgtnacaacgcatttttatttttggtttgttttatttanannacaacattgatgcaatnaaagttntnggccactttgtgaantttgggggttgctcgatacacccgcttgctgtaaanttacccgttcncgtttttatttnttgagttcagcnaaaaaacaaaaaaaaacaaaaaaaaaaaaccccaacctatanaacggacctggnccttttatattgtttttnggncaanttcggttttntttaaaaagggtnttccgaacctttcgttttagttatgttttgccaatttnggggtgggaggtggagggggggggtttnttataatattgtttgttgataaanttatgttggagggtggacagcgaggacaggttggagccgccgatcc

SEQ ID NO: 684539 - DNA, 289 bp, Homo sapiens
  misc_feature (46)..(46): n is a, c, g, or t
  misc_feature (48)..(48): n is a, c, g, or t
  misc_feature (50)..(50): n is a, c, g, or t
  misc_feature (79)..(79): n is a, c, g, or t
  misc_feature (82)..(82): n is a, c, g, or t
  misc_feature (85)..(85): n is a, c, g, or t
  misc_feature (90)..(90): n is a, c, g, or t
  misc_feature (106)..(106): n is a, c, g, or t
  misc_feature (114)..(114): n is a, c, g, or t
  misc_feature (125)..(125): n is a, c, g, or t
  misc_feature (140)..(140): n is a, c, g, or t
  misc_feature (147)..(147): n is a, c, g, or t
  misc_feature (149)..(149): n is a, c, g, or t
  misc_feature (156)..(156): n is a, c, g, or t
  misc_feature (174)..(174): n is a, c, g, or t
  misc_feature (182)..(182): n is a, c, g, or t
  misc_feature (190)..(190): n is a, c, g, or t
  misc_feature (192)..(192): n is a, c, g, or t
  misc_feature (213)..(213): n is a, c, g, or t
  misc_feature (247)..(247): n is a, c, g, or t
  misc_feature (275)..(275): n is a, c, g, or t
attcattcaatcaaggccaacttttataattttttttttgtttccnangnccctgaaatgttatagcatgggaatattntangcnaccanagttaaactttttggnttgacccnggattttttcncattgatttactggntgatgananattttanaacccaacggttttcatncggggggnaattgtanangcatggacttgtgtgttttgngtaattattgaagggcaatgatgtataaaaaagnggattcccctgtttttaaaaataaaacnttgataaaaggtga

SEQ ID NO: 684540 - DNA, 214 bp, Homo sapiens
gttaagcttgatgatggttaaaatcggtttgatagcaccatgggacatttttctaccaaaaataaatgcatgaagagacatagccttttagttttgctaattgtgaaatgggaaatgctttccaggaagtaaatgcaaattctttttaagtgtgctttaaagaaaaattttttccccccaagagaattttaaataaagatttttttttgtttaa

SEQ ID NO: 684541 - DNA, 324 bp, Homo sapiens
tgtcttccactggacaacgaaaatccacccctgaatccaaaaattcagacatggactgtggtaggatttcacagtaaagttagtcttgggatagggagaggtgatgagcccagacaatgcagggtgttaggtttaactggtttgcccccatcaggttttcgcatctttttagtgggtttcagtgcagtccttcaagccacaaattagattggccttcggtgtgctccagattgttggttcatattaaaggactgtctaaagatttgcatcccaaggacatcatggtccataaaaatgatccaagaattcgcccaaaaaacttct

SEQ ID NO: 684542 - DNA, 1612 bp, Homo sapiens
  misc_feature (1309)..(1309): n is a, c, g, or t
ggcgggcttctaagcaattatgcggacgcccgattggcagtgcaccaactggactcggtagttcgaaggtccctcgccaactttccgagcgtgtttgtggaagatgctcgcaaggaaggtccagcagtaggacgctatgaccagtggctacagtttaggtctgcggtgatctaagacatcattgtaccgcaaggacatgagacaacttagccaccggatgagatctagggcactgcattaagtatagtgagtcctcccgaaagcatgtgtcttggccagttagtcaaccataggtgaatccctaggctttcctcctatagtgggacacattgtccaagtcgagaaaggcgatctcctttgaggcgagcgcccctagtttcgagatcttctctcgcgatcctgactcttcgctatgcgccaagcttaaccttgaggaagcccacaacgaatggagaccgtatgtggccgcaggaggaaatagacagcaaagcatgcagagttggaatggggacttgagggagagaggcaattgtaggggccctccctcttgtccatggaaacgcttttcgccctcggactttatcggtttggagggaatggtttccgcaccatgagtcattttcccacgtgagaattttgtcggctattggtccccaaaatcggcggggatgtggtggatatcttggcaagggggaaccaaacaaatttacgtttaagagaagccccctctgcaacaaggggaaccataaagtagcgttcctttccatcttgaagagttcttgccttcaccaatactgagaagtgagaggacccccccttaacttttggcttactgaaggggtttagagcgactaaattagtccggcgtgagtttttccgcccatttctttttccgacaccagcagagaattttgacaaggtgaggaaggggacactcaagtgggaaaacggttgcaaatcggcaacagcgggaaagggttcccatagggactttgcggttcccttttttggggcccctctcagaaaaaggttaccagcacacacttaaagggccgttagggtcttgaagagcaccccctccccgaggaggaagccccgaatggagaatttccttgtgataaccgtttgcgcccaaggaaaggcgcccttatgataggacgctgacctttttaaaagtcgccaaacttgtggatggaccctttgcgttggcggggttggagttcctttcgccccctttgtttttggactctttgaaccaagttttcgaatagggaacgagtctttttttgcccacttcccttagattgtnaaagcgccacatttttgactttactgggaacaccagaaattatatcttaaaagtttcaaaatggttataagagtgaagacccttgtttgtaagttgcttcacacgggcgaagagagttccccacacaggggacaccaacatgtgtggcggcatttttcacccctgaattcacaccttttggttatgaacgaccacaacacggagggtgcttgatacaagagagcagcacacaatgggggccgagagattaaaccagcggggggccacttctgttgggtcccttttgagacatttgttgtgtgg

SEQ ID NO: 684543 - DNA, 318 bp, Homo sapiens
actgatttgatgatgtctgaacatcaaaatcacgcaggtgatgaacactataccttagaacatgcattaggtaaccaggaggcaacagcagtagtgactaactaaggccagacaactcagggtaaattagacctattcatctagatatatttgagcctcctataaaactgcccatggattccaacatgtactcaacatataatacaacttacttcaatgctgcatttataatatctgacatgaaaaccttatttaaggagtcaagatgctgaacaccctaacaaaagcaaaaacaaaattacggcctatgtggtgagt

SEQ ID NO: 684544 - DNA, 140 bp, Homo sapiens
attcgcgggcgcgtcgacgaggcatgagaattgcttgaacctgggaggtggagggtgcagtgagcagagaccgagccactgtactccagcctaggtgacaaagcatgacccacagtctagcccccactccccatctcgga

SEQ ID NO: 684545 - DNA, 599 bp, Homo sapiens
  misc_feature (6)..(6): n is a, c, g, or t
  misc_feature (138)..(138): n is a, c, g, or t
  misc_feature (144)..(144): n is a, c, g, or t
  misc_feature (203)..(205): n is a, c, g, or t
  misc_feature (217)..(217): n is a, c, g, or t
  misc_feature (232)..(232): n is a, c, g, or t
  misc_feature (241)..(241): n is a, c, g, or t
  misc_feature (246)..(246): n is a, c, g, or t
  misc_feature (279)..(279): n is a, c, g, or t
  misc_feature (286)..(286): n is a, c, g, or t
  misc_feature (336)..(336): n is a, c, g, or t
  misc_feature (351)..(351): n is a, c, g, or t
  misc_feature (365)..(365): n is a, c, g, or t
  misc_feature (368)..(368): n is a, c, g, or t
  misc_feature (383)..(383): n is a, c, g, or t
  misc_feature (395)..(395): n is a, c, g, or t
  misc_feature (398)..(399): n is a, c, g, or t
  misc_feature (416)..(416): n is a, c, g, or t
  misc_feature (424)..(424): n is a, c, g, or t
  misc_feature (431)..(431): n is a, c, g, or t
  misc_feature (454)..(454): n is a, c, g, or t
  misc_feature (459)..(459): n is a, c, g, or t
  misc_feature (463)..(464): n is a, c, g, or t
  misc_feature (475)..(475): n is a, c, g, or t
  misc_feature (482)..(483): n is a, c, g, or t
  misc_feature (497)..(497): n is a, c, g, or t
  misc_feature (599)..(599): n is a, c, g, or t
tttgtntccccatttttatgttcatagttcacatttaaaaccacattttttctttactttttttaatttgatataacatcttatcgtttaacatctaagtattcaatataaatcatactgttaaacagctataaggtnccattnaaactgctgcggtgccagatcaagtattttctgttaaatatccgcttttttacattttnnncttcctaaattnattcttgctccccanttgattcanttttnccaaggcattctttgtgcaccttggtgtatttncccagcnccacttttttattccaaaactccttcgtttaggtttttctttctcctgtnattcatctgtgacanttcccgtgggtttnctntacgtcgtcttattngtatcctgtttncgnncctctgcccagtgtacntttagttngctactnctactcacttcttggttatcatnttatnaaanntaaatgaacgnttcattnntttaagtttgtggntaaaatagtgtaccttgcttaaatttggattcccccgtatagatattacgtttgggatttctcatgtttttttgttgtgtaaatttactttctctcattgtn

SEQ ID NO: 684546 - DNA, 87 bp, Homo sapiens
gagagagatgaagggtcttactactgtgcctgtgatgccatggtactgggggaatcccctagtaaacgagacaccgataaactcact

SEQ ID NO: 684547 - DNA, 146 bp, Homo sapiens
ctgcacacacacacgctgatctcacagcaccatgcactgcacatacacatgatctcacagcaccatgcactgcacacgacacatgctgatctcacagcaccatgcactgcacacacacacacacacacgctgatctcacagcacca

SEQ ID NO: 684548 - DNA, 143 bp, Homo sapiens
agcggggcatcacttgaacccagaagacggaggttgcagtgagctgagatcgcaccactgcactccagcctgggcgacagagcaagactccatctcaaaaaaccaaaaagacaacaaccgaaataagaggttcaggataagca

SEQ ID NO: 684549 - DNA, 303 bp, Homo sapiens
cctgaatgagcgggtgaaacccctcaaaaaattgggggcccccggtgccccatttggccaaaatgggggggcccaattttggtttgggggaattttttttttccaagccccccctggggaccagtaataataaaagttaaccctgggggtattttccccaaacccggggggggttttccctgttccccaaggcagggaaggaatgttggggtttcctttcccttttttttaagttgtccccaaacccccccttaattttttttttttggccccttcctttaaaaaaaaaaatttggtccccca

SEQ ID NO: 684550 - DNA, 675 bp, Homo sapiens
ttttccaatttaattgacaacttatattttcctaacccttaaaaaggctgatgaaaacccttcatttcaattgaaaacgtaatggacaccggtgttacccattattattagtttcctaaaacccacttgaaaacatccagcatgcagttttaaaaatcaaggtacaatgatttcaagaaccaagttatcacttgtaacttccagcaagaggctagaattacagattatcatagtcatcatcatcatcatcgtcatcatcatcatctccagcgttttctttccaagtgctttgtgatgatccatgggcgagaatttggtgatgcaccctcatatagaggggtaataagaatgttttgggccccgattaatgatggattaactcagaactttctgacctgctgaggttgcaggaattgaagctttatacagctggaaactgaaaagtaggcttctgtactgtaaacctttgacctggtgagggacatgggagctccctactttagttgaaccagacctgctctgaggggttggtgtcccagtggggcagaacttggcccgctagatacctgaaccaacatttaacccgggggactgtaattctccccccgaagaaagttagtacgacttttttctctggtaaagagaatttaccggctatattgtttggggcctttg

SEQ ID NO: 684551 - DNA, 168 bp, Homo sapiens
  misc_feature (19)..(20): n is a, c, g, or t
  misc_feature (30)..(31): n is a, c, g, or t
  misc_feature (72)..(72): n is a, c, g, or t
  misc_feature (92)..(92): n is a, c, g, or t
  misc_feature (94)..(94): n is a, c, g, or t
  misc_feature (98)..(100): n is a, c, g, or t
  misc_feature (125)..(126): n is a, c, g, or t
  misc_feature (137)..(137): n is a, c, g, or t
agctatacttctattattnntctagaaatnnccctccttttacccctaccatgagccctacaaacaactaanctgccactaatagttaggtntncctnnnattaatcatcatcctagccctaagnntggcctatgantgactacaaaaaggattagactgaaccgaat

SEQ ID NO: 684552 - DNA, 405 bp, Homo sapiens
  misc_feature (3)..(3): n is a, c, g, or t
  misc_feature (49)..(49): n is a, c, g, or t
  misc_feature (157)..(157): n is a, c, g, or t
  misc_feature (184)..(184): n is a, c, g, or t
  misc_feature (237)..(237): n is a, c, g, or t
  misc_feature (246)..(246): n is a, c, g, or t
  misc_feature (255)..(255): n is a, c, g, or t
  misc_feature (288)..(288): n is a, c, g, or t
  misc_feature (310)..(310): n is a, c, g, or t
  misc_feature (349)..(349): n is a, c, g, or t
ggnccctcctgctgctgctggtgtcaaacctgctcctgtgccagagcgnggcccccttgcccatctgtcccggcggggctgcccgatgccaggtgacccttcgagacctgtttgaccgcgccgtcgacctgtcccactacatccataacctctcctnagaaatgttcagcgaattcgataaacngtatacccatggcgggggtcattaccaaggccatcaacagctgccacacttcnttcctttgncaccccctnaggacaaaggagcaagcccaacagatgaatcangacttttctggagcctgatagncagcataatgcgatccctggaatgaagcctctgtatcanctggtcacggaagtacgtggtatggcaagaagcccccggaggctttcctccggctg

SEQ ID NO: 684553 - DNA, 101 bp, Homo sapiens
  misc_feature (3)..(3): n is a, c, g, or t
cantcccccttcgtgtgtcatcccgctttcgtgttccaatcccccttcgtcttcctcttcttctgaggatcttcatcagatggttccagttccccccaagg

SEQ ID NO: 684554 - DNA, 637 bp, Homo sapiens
atcttggctcactgcaacctccacctcccgggttcaagcaattctcctggctcagcctcctgagtgctgggactacaggcgcgtaccttctttagtagagactgggtttcaccatgttggccaggatggtctctatctcctgaccttgtgatctgcctgcctcagcttcccaaagtgctgagatgacaggtgtgagccatcagacccagcattttttttttttaatttaaatttaaatttttttcattttttggagaggtttttttggtttggtttggtggttgttgttgttgttgttgttgttgttttggagacagtcttgctctgtcacccaggctgggagtgcagtggcatgatctctgcaacctctacctcccaggttcaagcaattcttgtgcctcagcctcccaagtaactgggactacaggtgcacgctaccacacctggctgatttttttcatgtttagtagagacggggtttcaaccatgttgcccacggttggtctcaaactcctgagctcaggcaatccaaccgctttggctccccaagtgctcggattccggtgtgagcaccaacccagctttttctttcggtttaatttaccgtggggggggccccttgttccctgctgtccga

SEQ ID NO: 684555 - DNA, 305 bp, Homo sapiens
atcttgaccatctcggcacctgtcatatcttttccctctcgtgataaagctatggcggtcttattattgtgcaaaagacagaagtcatatttctaacctgtatgctgaagtatttggtacaataggcatcctgaagaccagaaacagtgtatatatacgaatgagatattattacactgtatactgacatgagtgttaaaaaaaaaagataaaagtaaatacttgccatgtactaaggcctttaaaatatagctaatcaaatgtatactatttaccaggagagctcacatttttctgcagttttc

SEQ ID NO: 684556 - DNA, 389 bp, Homo sapiens
aaaatcactattgtaactataccaaattactatattatgtgatgcaacaaaattcaaatatgaaaaccatctcggaggccgggcgcggtcgtcacgcctttaatcccagcactttgggaggccgaggtgggtggatcatttgaggtcagaagttcaagaccagcctggccaacacggtgaaaccctgtctctactaaaaatacaaaaattaactgggcgtggtggcacatgcctgtagtcccagctactcgggaggctgaggcaggagaattgcttgaacctgggaggcggaggttgcagtgagccgagatcacgccattgttctccagcctgggcaacaagagcaaaactctgtctcaaaaataaaataaaaaattgctttaaaaaat

SEQ ID NO: 684557 - DNA, 791 bp, Homo sapiens
tcagtgaatccggcaccttcctaggcctgggcacagaacactggctctgttgccatctacatagactattctctctccagtgcctctactacgtgagggaggcccatggacatctgtggtgaccgtgatgtggccttacataactgagaattggtctgttggatccagagctcctatgagagtcccatgaaactgccctgattctctgtggactgtgtgacagatcagtatggccagactgaatctagttgacctgacgacttccagtgcacatcaacatgcagtggcaacaaggcagagaacggccaggtatccaaggagcaggggccatcgaccaaaggaatgggagcagccccagcagagacagaaatgtggagcggaaaccacagacacgaggggctagaaactcagggtagagaatttgcacggcggtgcagacagacatagagactccgaaccagctgacagaaagaagtgagcttcaaccaacgaatactaaccactgatttgaccaatggaaggaaacagaatggataacgtacgatatgcccaataacatggaagaaagtacatggataaacaaagacacaataaactggataatagaaagacgtggatttaggagacttagatttggcactattgagaaaacatgtatgaaaagtagacattaatgacatatagaggagaatagtaaatggtagaaaatatgactggaatatattggtacactattcaagacactatacagacagactagattaggaggacaaaaatagagctgagtactg

SEQ ID NO: 684558 - DNA, 679 bp, Homo sapiens
caggcgcccgccaccacgcccagctaattttttgtatttttggtagagacggggtttcaccgtgttagccaggatggtctcgatctcctgacctcatgatccgcccgcctcggctcccaaagtgctgggattacaggcgtgagccaccggccaggccgacatggtgattcttaattgctatgtcattctttctgaacatacttaacagagaaataacacaagtgggggaacgtacttgcagacaatctaacgaagacctacgtatctagtgagtactctggccagtaccttccgaactcagtgacaaacaaaaacaagacaaacactagccgcggagtacacaaaaaagtggacgaagggtcaagaagccggcgagctcgacaacaacgcgcaggacacgtgcccattggccacagtagcagatcaggcgacctactagaaaaacaaaaacgcacacagaagctggacggaccgacaccagaccgaaaaccccccaacgaggaagagcgaccagacacacacaacgccgaggaatggggcaaagccacgccagatcgcagcaatcggcagcgcacaactcgctcgggagccgaaacacgcctggcgagaggcatagagtgcggaagcagcagcgcacacgaccacgcacgacgaggcacaagagaccgaagcccatcac

SEQ ID NO: 684559 - DNA, 423 bp, Homo sapiens
ctcaaaatctcatgctgaaatgtggtctccagtgttggagatgggaccgggtgggtgggggcaggtccctcatgaatggcttgggccctccccttggtgatgagatctggtcgtttaaacatgtggggcacctccctccctgttcttgctcatgcttttgccacgtgagacacctgctccccttgcaccttccaccatgactggaaacttcctgaggcctcgtcagaagctgaggtgatgctggcaccatgcttcctgtacagcctgcagaaccgtgagccaattaaacttctcttctttataaattacccagtttcaggtatttccttatagtaatacaagaatggcctaatacagcattacacgttaagtcagaaacccataaaagaaaaggagactatatttgagaacttaaaaactgtt

SEQ ID NO: 684560 - DNA, 936 bp, Homo sapiens
agcgggctggggctgctgacgtcgcggctgcggcccgctggccatgctggccctggtgatgtgctggtggatgtgctggctgtgccttggtctggccctgtgcccagcccatgccctgcagcatgctggacggctgctcatgacgtttggttccgtgacctgccgttcttgccgctggcccggtgtttgtcaccatggtcctggtggtcttgcacctggctcggccatgacctcgaccccccgtcttctccgcgcatggccctggtgctgtgtggctgctggatgcctgtgcggacgtgtggcccttccctgctgtgctgcccagctgcactgtccagtgtgactggtgcttgctgtgtgcccgctggtgctgcaggtggcacagacgctccgggcagctgtggccacgcaccatgctgacggcgttacacagtgtgcatccgagtgtgtgtgcctgccgatcgcaacgtaccagtacagtcgcgctcgcgtcgcgcagaaggactgcacgggcctggtccgcgatcgtgggcgtgacggacgtcgctccgttcgaggcgtgccgcctgtggtgtgcccctttgacttgcgcctgcattgccggaggctgcaccggacggcccgacctgctgggggcccctgtgcgacccctggggccccgcgaacgcatacagtgaccaggcacagacccttgccgacagccttggggttgcttcgaccgaacgccattgcacacccagaatacggcattccaattcaggggccggattccgaaacgaacacggtttgcccatgagtgacccaaggggcccaagcaggagtgaggccggcattgaggacagggaaaggggtccattccgaggacgacaaagggtcccgccggacccagagcgaacaaaggcccagggagataccaacagcttggaaccttcccaa

SEQ ID NO: 684561 - DNA, 137 bp, Homo sapiens
tgttttcccgaaatcgcatggtgggggggagggagaaaacctcttgcgggagctttttctttcttattttcactcttttgggttttctcttctgttgttgttgttgttgttttctgttggcaggacacgaatgttca

SEQ ID NO: 684562 - DNA, 503 bp, Homo sapiens
ttagggaaattagattataagtaaaagtgtgggcatattctcctcttttctacaaaggttttcaaatggttcctgaggttttttgttgttgtccgtgttgttactgttgttcttgtcatcaggtttgattttggtccttgccctttccttctagttctccttttattaataggaaggcaggcaaaagccccatttatgtgtgtgttttcccctcagacagctttcatccactgctctgcactagaatcgcaccaatcttcatggtgagcaattttaagaaatgttagtggaaggtaggaattatttcacacatcagcttccagggtcgttaatattaataaagatatttggcttcccattgctgtttggagttgttgattggatatgtgttggtgtcatcctcctcatgagtttctgaaataagtacgggtttgtaaaggattatctacataatccattccatggatgaagaagaggagtgcagctaatgcactgcctggtac

SEQ ID NO: 684563 - DNA, 463 bp, Homo sapiens
  misc_feature (3)..(3): n is a, c, g, or t
ggntgtgttgagtcaagccacaaaatccactgcttcctttgatgtttatgcgttcactgatggatccctttggacccacaagcctatttttgtagatcaacttgggtgcaatgcagaatgtgctcattgtgccctgctgggggataggaatactcactggtgttaattttttataattgctaatcacctatgcagtgagtcagcagaggtacagccctaggaatggtcttctaggctgtgggtggtgtgggatttgatttgccccaccatgtaggcatggagcccattcagatgtgaacgtggttacaggttgagccttgctgtatcgattcctctgcttcactttcctgctctattcctcttcatttccttccagatggggctactgatgctcaccactcatccatctggagtaggctgaagctaccctaggtgggacagagcagcacttccccctcttcct

SEQ ID NO: 684564 - DNA, 231 bp, Homo sapiens
  misc_feature (26)..(26): n is a, c, g, or t
  misc_feature (36)..(36): n is a, c, g, or t
  misc_feature (39)..(39): n is a, c, g, or t
  misc_feature (43)..(43): n is a, c, g, or t
  misc_feature (45)..(45): n is a, c, g, or t
  misc_feature (62)..(62): n is a, c, g, or t
  misc_feature (79)..(80): n is a, c, g, or t
  misc_feature (86)..(86): n is a, c, g, or t
  misc_feature (105)..(105): n is a, c, g, or t
  misc_feature (107)..(107): n is a, c, g, or t
ctctaccggagcttatttgcggtgcntttccaccanttncagncnctcaggttggaggaccnggtgcacactcttggannctcggntgaagtggctgggatgagncngtttctctgacgtcccccatagatcttggtcatggagccaaccccagtgccaccccgtgagggtacatggtgcctgcgcttggtggaatgcaggctcgcggtgtaggaaccatgttcttcatct

SEQ ID NO: 684565 - DNA, 298 bp, Homo sapiens
tgtagtatgtaaagattccaaaacagatgccttcgatgagtagtagccactatcaccattcctcctcagcctggaattctctccctcttcttctctgccccatcaattcccattcttccttaaagagaagtcagggtaagccacctcctgcagaaggccttcttggattccttttcccactcattatggtattggtgcttctaaagcattttgtaatatctctattactgcatgaaccacacttacctaaagtcatttgtacccacatttgctcccctcgttagaactgggatttccc

SEQ ID NO: 684566 - DNA, 446 bp, Homo sapiens
  misc_feature (431)..(431): n is a, c, g, or t
  misc_feature (436)..(436): n is a, c, g, or t
ccacgtgctgtgggccatgtacgggattctgccggcgggatcggtgcagaaaccccatcggcatcagtcgattgcactggacttcattattgattgccccaagggctgttattcattggtgggcaccgagctggacgcggatgggcaaattcgtaacccgcagcgggtcgactggtcgcccggcctggcgtttgtcacgccaccgggttactggcatgcgcattttaatgaatcggatagcgaggcgttcctgatcccgattcaggatgcggggctgcaaacctacttgcgtgcgctggatatccgcttcagttgagtcacttccagtccggtgtttcgcccagtcgttcaacgataaagtcgataaaacaccggaccttggacgatacgatgcgcttgggcgggtacacaaaccacaccgcaaagcacanatctngcgtggggat

SEQ ID NO: 684567 - DNA, 280 bp, Homo sapiens
attttttaaaaaaaggtttttttttttgggcccccccctaaaaatgggggggggcccggggaaaaagggggaaccttggttattttttcaaattgccccccaaaaaggggggccaaaagaaaaccaaggggggggggggggttttttcccccccgtttttttcccccccaaggaaaaaattttgggggaacccccctttttttgttttttaaaaaaaaaaggttccccccggcaggttaaaaagaaaggggggggccaaaaaaagggttttcccccttta

SEQ ID NO: 684568 - DNA, 248 bp, Homo sapiens
ggaacacaaaagcggcgtgattgaaatgtatctttctttaaaggcacaaatatgccagctacttttggacacttggcagggggatatgatggccaatattatggatatctttggagtgaagtcttttccatggacatgttttatagctgttttaaaaaagaagggataatgaatccagaggtatggtattttttttttccttttcttaaatgtctagttgtccccccgctttggtgtcccgggtaccg

SEQ ID NO: 684569 - DNA, 549 bp, Homo sapiens
  misc_feature (33)..(33): n is a, c, g, or t
  misc_feature (46)..(46): n is a, c, g, or t
  misc_feature (50)..(50): n is a, c, g, or t
  misc_feature (60)..(60): n is a, c, g, or t
  misc_feature (70)..(70): n is a, c, g, or t
  misc_feature (77)..(77): n is a, c, g, or t
  misc_feature (95)..(95): n is a, c, g, or t
  misc_feature (105)..(106): n is a, c, g, or t
  misc_feature (121)..(121): n is a, c, g, or t
  misc_feature (133)..(133): n is a, c, g, or t
  misc_feature (163)..(163): n is a, c, g, or t
  misc_feature (184)..(184): n is a, c, g, or t
  misc_feature (186)..(186): n is a, c, g, or t
  misc_feature (245)..(245): n is a, c, g, or t
  misc_feature (247)..(247): n is a, c, g, or t
  misc_feature (256)..(256): n is a, c, g, or t
  misc_feature (263)..(263): n is a, c, g, or t
  misc_feature (269)..(269): n is a, c, g, or t
  misc_feature (273)..(273): n is a, c, g, or t
  misc_feature (282)..(282): n is a, c, g, or t
  misc_feature (288)..(288): n is a, c, g, or t
  misc_feature (316)..(316): n is a, c, g, or t
  misc_feature (384)..(384): n is a, c, g, or t
  misc_feature (397)..(397): n is a, c, g, or t
  misc_feature (407)..(407): n is a, c, g, or t
  misc_feature (410)..(410): n is a, c, g, or t
  misc_feature (425)..(425): n is a, c, g, or t
  misc_feature (439)..(439): n is a, c, g, or t
  misc_feature (445)..(445): n is a, c, g, or t
  misc_feature (449)..(449): n is a, c, g, or t
  misc_feature (458)..(458): n is a, c, g, or t
  misc_feature (464)..(464): n is a, c, g, or t
  misc_feature (501)..(501): n is a, c, g, or t
tttggttaaaacacccctggtccaccaaggttnagagataagagtnggcnggtcacttgngcatgttctnacagagngggtattggggttttttntggtaggaanngcatgtcctaaagcnggccttttgatnttaaattttttaaaaagcaaaattatagangtttagattttaatcaaattngnagggtttttaggtaatttttcaaaatggcttgtttgcttcaactgtttcccccctttgntnttggagganatggggncagggntggngtcaaaacncttgtnattttgttttttgaggtttttgttaagncggcggaagaattatttttttttttttataataaggaataacccccccctttattccttcatttcatnacccatttttggntttttgggtnggntggggcaggccagcnggggtttttttttnccatgncaanttttaattnccatgnccggtatgttcaaagtcaaataactcctctttgtaancaaacggggtaacggcccaaagcggcctttataaatcggcctaacata

SEQ ID NO: 684570 - DNA, 375 bp, Homo sapiens
  misc_feature (31)..(31): n is a, c, g, or t
  misc_feature (62)..(62): n is a, c, g, or t
  misc_feature (289)..(289): n is a, c, g, or t
  misc_feature (310)..(310): n is a, c, g, or t
aggcctctggtgttcagtaagttgagtgtgntcaatgcattttcctctttataatattttcnacgtgtaatgggtttatccaaatgtaactccagccctggcgcagtggctcacacctataaacccagcactttgggaggctgagccgggaggatgacttgagccctggaggtcgagacaagccttggtaacatggcaaaaccccatatatacaaaaaaatcaaaaattagccaggcatggtgacatgcacctgtggtcccatctactcaggaggctgaggggcacggntcacttgagcctgagaggtcnaggctgcagtgagccatgattgtgccactacactccagcctggacaacagagcaagaccctgtct

SEQ ID NO: 684571 - DNA, 127 bp, Homo sapiens
cgccaatcacagaatcgaatctatctcacagctgacaaccttgtgctgaacctacaggatgcaagttacaccaggggcagtgccagcctcatcaacgggtacagaaactgagcctacgtcaccaagc

SEQ ID NO: 684572 - DNA, 556 bp, Homo sapiens
taagaccggtcagcaagttgctcacatctgtaatcctagcacttgggaagccaaggtgggtggatgtgcttgagctcaggcatttgagaccagccgtgggcaacatggcaaaaccctgtctctacaaaaaatacaaaaatgtgctgggcgtggtggcacatgcctgtagtcccagctacttggggggttgaagtgggaggatggtagagactgcagtgagccaaggtcgtgccattgcactgcagtctggctgacggagtgagagccggtctctaaaacaaaacaaaagaaacaaaaaacaacaatccccagttcaggagggcagggacatccctgaactaatagctggagctatgtggtgaacagctgtcatgactgccacggtctctgtcgctgtctctgtctctctgtcatcactatgtcatctgcctctcggtttcggtctctctcggtggtccatctccatccatcaagtcctgcctctataattttccccaaaagttctgacctggtttagggacagagatggggctcccaatatttgacactggtccct

SEQ ID NO: 684573 - DNA, 1121 bp, Homo sapiens
gacctactagagcagcatttatagagtttgatggcaaatagattaggcagaacttcatctagaatattcttagtcaaactaatgtggacacgttctcccatacctagtcagtgtgtcatttcaacacacttgttgcaaatttcttaacaaagcgtctctgaggatgttacacatttagtatctatacaacagtagatatatagagtattgatctcgatagcgtcatacacgttaagactggggtaaagtccgagacaactattctaacacctcaccatgtgaaatctatatgccaccttgtctctcataacataggctgaaaatagttacctaagaatggaaaagtcaatcttcatgttgttgagaggatagttataagagtaatttgttcttgtgtttacagaatttcgggcagccgtagtatttaacaaattgtaacgtttgaattgtaaccaaatagtgtaaacatggaagggccaggttcataacactaactgaacattataaatgggctcttaagcaccttgtagatacaattgttaaccgtatctgggaatcgtgacacggtcgtgaagtgaggggtcttttgactcttcagacactgttctcacatgtacaagccgagaaggccttgccttacatatcataggtgtaagtcattggaaatggcacaaaagtgggcattactatactattatatatatacaagtagtattattactacataactctacctttactttacttgtcaggttaacccagtccccataagaatctgcacaagaaattgcctatgactgaacaggttctcgagattcctaactttaacacacctttaatacaatgcgcaagtcttgcagtaacttaggcgctgaaaatcgcattaccatgaaagagtaaaatcgtccagagagaatagcgggggaaatactcggacctagaggaacgtgaaacgggcaatcctgacaggccagcacgtcaccaattggtcaggaaaggtacaaggaaggggggaacaacgagacgagcaaacggctacagggaagggggaaccgtagcccaccacacaggcgcctgtggagccgaccaccaggaaacatggaaggcagcaccgtggaaac

SEQ ID NO: 684574 - DNA, 225 bp, Homo sapiens
ttttcagaactactagaatgaattctccacatcagccacaagaatgaccttccggcatacaagacacttcttaccatgtaatgcgggggaggagaaagttcaggtacttcattaggatgttggaaaagacgacttcccctctaataggatgaacacatgatcatttcatttacatcattcctgatcccttttaattgctccacactcccctataaacgcaggatt

SEQ ID NO: 684575 - DNA, 142 bp, Homo sapiens
aaccgagctcgtacccaagcctgaagcactggctgaagcaaagcactggctggatactattgcctacactggctccttggtggtctcttggtggttgcaatggtggggtaatccatgtgaccaccaagagaccaccaaggag

SEQ ID NO: 684576 - DNA, 412 bp, Homo sapiens
  misc_feature (228)..(228): n is a, c, g, or t
ccaaacattcaaaaaaagggaagatttaaggagcgctgaagtcgggtcaaaaataaaatatatttacatatatacattgcttagaacgttaaactattagagtctgtcccttccaaagagggatgtttgggaaaaactctgaaggagaggaggaattagttgggatgccaatttcctctccactgctggtcatgagatggtgaggctgtgggacaggttctattggcngcttctaagagcgtacttcacataggaagggttctgtgtacacgttgccaggggcttgagaaggttactgtgtgagttattgggagtcttaattaatttaactcggtcttcggtccattcattaatttgttccagtttctccttgtaatgagttaaaactagaaggcttctctccacagtgttg

SEQ ID NO: 684577 - DNA, 317 bp, Homo sapiens
aaaaaaccccccccccccaaaaagaaatttcggggaaaaacccaaaggttttgggccccccccttttaaaagtttcttccttttggtggggccccaaaccaagagggttcgccatttcccccccccccaggtttttggaacttccgttaaggttgttcccccggccgaccttccggccgttggggccctgggcgttcttttccggggccaaagggggcaggtttttttttggggttcttctttgggccggttcttttgggggcccggggggggggtgccccttttggccccttttttcaattaattaattgccggga

SEQ ID NO: 684578 - DNA, 112 bp, Homo sapiens
acctaaatggctgttactaaatggctatacctacatgcctgctggatttggctgatcatgagttgccatttacggtacagccttatatgtacagccattacagccatttagg

SEQ ID NO: 684579 - DNA, 107 bp, Homo sapiens
gattcgcacgaggaaaagagaaaacagctgggccggtggctcatcctgtaatccaagcacttggggagttgaagtgggccggtacactgagtccaggagttgagacc

SEQ ID NO: 684580 - DNA, 671 bp, Homo sapiens
  misc_feature (626)..(626): n is a, c, g, or t
aggtagttttttcttaaagattagttgtaacgtagactgttataccataccagtaaccttttcatactctgttacattaaaataccttggtctgctgtatacttgggtttttttggcatcatgcatgcatcatttgaaaaatgtcacttcgctgcattatgcgtatcttcaaagtgctgttaacacatttcattatgcaatatcaaaaaagtcatattatcaccactgatctcaacagagataagtattgacttgaccatcagtttacagtagcaaatattggttttccaaaactgcagtttttactggaaagctcagattctgtcattggtaataaatactgtcagttgttttacttaaagtgacaggctcactttattcatttttgagaaaatgtgaaccagatacccaagtctgagtaagcctagttcattgctgtgagttatttcacgtaacaatgatgtttatggaaaaggcagctagttggcctcacaatgtaagaaatggccccaggtgcttttccttgagatcacccgtgtacttcagtgtgccccagaaatgctttcaagagcacttttcccgtcatcatacagaagttaagagtgtcttaatagttgagattaatnaaattaggaaattttacttcatcaaggacattgttagtgttcctt

SEQ ID NO: 684581 - DNA, 299 bp, Homo sapiens
  misc_feature (30)..(30): n is a, c, g, or t
  misc_feature (37)..(37): n is a, c, g, or t
  misc_feature (117)..(117): n is a, c, g, or t
  misc_feature (155)..(155): n is a, c, g, or t
  misc_feature (161)..(161): n is a, c, g, or t
  misc_feature (187)..(187): n is a, c, g, or t
  misc_feature (198)..(198): n is a, c, g, or t
  misc_feature (224)..(224): n is a, c, g, or t
agcggcccccaagtgtttgagggagagacnccagtanccaggtgtgccatggaaacatgtgtaaaacaagcactgcgggattcccgtgtgactcttgcaggacgccgtgaacaatanttttatgatttgctcaacggattgaatctgagtgatcntgtacnctccatgctgccctctgcgcccaacntcccacactantctggacaaactggggtctaggctancccagaagaaaagaaccatatatatatttttgtttgtttgttttgttttgttttttacacaatatagatacacaa

SEQ ID NO: 684582 - DNA, 1259 bp, Homo sapiens
  misc_feature (191)..(191): n is a, c, g, or t
  misc_feature (487)..(487): n is a, c, g, or t
gctcccacaatgctaggcgccggagcagggaggcgatcaagaatattgatgactgagttccagtgtatgttgatctagtaagtgagtatatgccgtggcaaagtttcgaattgaatggtgaggtaatgggagaaaacgtggatacaggtactgggagtcgactaggagagtatagggatagtggtgacatnggtcgtagaggagtagcaggggctgagatgcgtgtggctatgatcgtatgagaaaattgtgagtgacaaggtccaattatctagttgaaattagtcattccaggggttacatgctcgctgttatggatagatcagtaatgcaattctagatgtcgagagcatcttcgtgttgcagaggtacttgtgttgagaatagaatgggtcgagtggcagtgtaacagggtggggatggtatgagtgaggtcgtggagtgaatgagagaagaagatgttggatgcataggagggtcgcgtacnaagtgtaacggactaggattgtagtgtaaagaagtaattacggtagggccagtgttttgtcaccgggtgttacaacatgggcgggtggatttggatttaaagcaaattgggatcttaaagtgggttaaaggtaagtattttaataatgggagtgcattgaaaaggtaaggataaatagtgacttgccactaacttgatcttcaagagtcggggaggtaaactgcgcgaggagaaacaccgagaggaagtcacttgagggtgaactttatttgggtgcggacaaacgcctgggaaggaacactggacggcaatctcttggcagtgggaggaatcaaagcgaaggcggcttgataaggttgctccaattgcacaaggcccggtcaccgtgcttcggcgctaaagtggacgtgcccatggctgccgggcaggtattaaacgcagagggcggttttgattgggactcggcgtgacatttgcgaggctccaactgtagttacggaaacgaacagagattgtggcagccaaaagagaacggattggcatattgaagcctatatacaacgcgttacagccattttccagaaattaacccttcgggttgtggggcgttccccgttttcgcgttggcaacaacgtcacaccatgagcgatcttttagccttgtgggaacgccgattaattccccgatggggtgggtcacacgcttgggagggcgcaacgccccgcgtaggctgagtcctatatctcgtcgtgggacacacattcggtctgg

SEQ ID NO: 684583 - DNA, 865 bp, Homo sapiens
gctgtgcggagcgggcggcacagagcctgttgttgagctcagtatgtcgtgggaatccggggccgggaccatggtctaggttcccagggatggatctcgtgtggtagtgcgtggtactgaagatgtgcgttaaagggaaagggtcgttgccattctcggcccacggtatcgtggtcgcctggctcagtagggccgagctggtgaccaggtgacggtatatatctgttctgtgacgaccataagcttgcagccggtacgcgcttaagccgcatcacggtgttggaggagcaggtcaggcaatgaatctccctctggcaggtggcttctactgctgacctgtagtactctgtaagctcttggatgtaagctggtggcttggggcactgatgaacttagacttgctctagtggcgatggcattggtcaggttcgtgaatcttatctcgagagagggaagacaccagtttgccagaggtccccctcaagtgtctggctcaagaggtaactattcctggattggattgttgaccttcgcctattgagttgaaccataagagaatgccccatataaatgacttgcgtaagaggcgtggtaatctggtccgtggagttggtgtcgcagaaaagaagctaattggggtggccgcgcgagctgggtgagaaacaggctgagtaggaggactggggagtgtgggagggaggttcagggggaagggggatagaggggaggaggggttcaagaggcaggattaagagagacatttgtttgtttggaatggacatttgtaggaaaacgaataactagagacccgcgagtaatggggagaaaagtacgggggcacaaggttaatggccgcggtgtgagc

SEQ ID NO: 684584 - DNA, 475 bp, Homo sapiens
  misc_feature (35)..(35): n is a, c, g, or t
taactaatctattgggttcattattggaattaccntgcggctggaattttcaaattggatctagggcagctggttttacacaaacccctgtgttcctggccatagtgtgttttgattagaaatggcccatattatcctaagaaaagatacggcttttttttttgggagatagaaataaatagccatatccctggcccggaggttttttccaccacaatgttccttggaatggtactggtcaagccatggtgagggggtttgaatggtttgaccttaaccgttttccctgaaaacggtttattggggttttaatttatttattaagaggggttttccgaaatttatatttttattttattttttttccccctgaggtcttttgacatgtggaaaggggatttgaatgaaaaatttaagccttggttggtttttggtcccagaccttggccataaaagccttttagttggatgggga

SEQ ID NO: 684585 - DNA, 360 bp, Homo sapiens
gacgctcttctgtggggtgtgtcctgctcaccagtgaggggagaatcttcaaagggtgcaatatagaaaatgcctgctactccgtagggatatatgtgctgaacggaccgctatccataaggccgtcttacaagggtacaaggatttcaggccaattgctatcgccagttagtcaccaactggcccgtgtacatgaccaaaccggatggctacgtatattgtcatgacggtctaggaactgctgacctcctcactttgcgtcctgagagacctgcagaagacccagtgaccgccagagaatggccactgcctgtaacagccaccttgaagaacttcatacagatgtctcacagacctggt

SEQ ID NO: 684586 - DNA, 283 bp, Homo sapiens
cgcgtcagggggaggggaggggagggtaggggagggctcaccttgacgctgcgtgtggtggacgcgagagggctagcacttgacacatgctcgtgtttgcagcagccggtgcagctgtatcacctccatgcacggtggccagatcaggaagttggcggacgtagggtcgcacttgactaccgaggaatctcgtaaaatgaccgtccctgggtcttgcagacagcggggtaacagctttcctcgatgcttctcttcctccgaatgggcagtgcgcctgcttctc

SEQ ID NO: 684587 - DNA, 138 bp, Homo sapiens
gctagaggatccccgtctctccacactggtcccaggcacagggataacttatttatttatttatttatttgttagtttatttatttatttatttatttttgagatggagtcttactctgtcacccagtgtggagagag

SEQ ID NO: 684588 - DNA, 411 bp, Homo sapiens
  misc_feature (28)..(28): n is a, c, g, or t
taagcctggaacccagtagttattatcntgatcatctccctcttcccatcctccaccctccagtaggtcccagggtctgttgtttctttgtgcccatgtgttctcatcaaaaatgccctttctggccgggcgcggtggttcacgcctgtaatcccagcactttgggaggccgaggtgggcagatcacgaggtcaggagatggagaccaacttggctaacacagtgaaaccccatctctactaaaaaaatacaaaaaattagctgggcgtggtggtgggcgcctgtagtcccagctacttgggaggctgaagcaggagaatggcgtgaacccaggaggcagagcttgcagtgagccgagatcacgccactgcacttcagcctgggcgacagagcgagactctgtctcaaaaa

SEQ ID NO: 684589 - DNA, 183 bp, Homo sapiens
attgaagataaagctcaagtctaaaaggaaaacaaaaacacagggggaaggggttgtatacgcaataactctggggcagaaagaattacgggatgtgaagaacattacacgctgtttttctgaacagggagcagtatgtacacacccataacgatgtgagtgctgagcccctaaatatggaaa

SEQ ID NO: 684590 - DNA, 995 bp, Homo sapiens
ggcttcccttcggaggaaaatttcaggctgaaggtttagctggtgtgccgcctctaaagagagcaatcactaacacttatggctgggatattggcgcttagtagttcaatgggcccccaggctagaatacagaccgtgacaaaaggtgtggagtctctatatttggtacagatgggattcgtcacaaattcaccagatcaagaattccagaacacaagtgtatcaggcctcacctgaagatcatgaaaaataacggtggggatccacagaaccctacataaactgcatatggttaccagaataaacagtacaagaagacgtccatatggggcacacagatataataccagatgctgggattagaacaagcaaatacccctcaaagttcacaagattatccctacagtgaattgcaaaatttgaaagtagtaagcatttggataagaatcaagcccttgaagttggccacaaggacttccaacagaggagaccatgtcttaaacacgttgctcaaaagcactgggcagtcagtagtggcatgtggcatctgaaacttgtgaagcaagaaagccacaattgagtcctaaatgccccagacaagtttccgaatggaccacaatgcacacttggttctattcacaggatggtgagaaaggttttccattcacacaacactgttccacaaccatttacaggccgtagcacacggaggatcacctggtaatcccaggctttgagaatgccagggtaggaactttcccgtggtcctcgactctccgttgatttaaaggcacatcttaccaacataaggactctcaaaaaggttaggactacggggaatgtaaccagggtaccagcacaaattgtctttcataagtaaatctcaaaatttggtgaatagcttgtactcaactgtaccgagcgtagaaacccgggggtaaaatgtcccccattgtgatagcttttgcggaaacaaaccacagaacatgttacag

SEQ ID NO: 684591 - DNA, 410 bp, Homo sapiens
ccccagcctcagaccccacccagcaccttcccagacacgcgtcccgagatttggaaatgtcatgcctgcaatcattgaacccgaggggtgagcccgatttctggatatgattgaccagctcagatgttcccagagaccatatcttttcccttttctttttgggcttaaaacttttttataagggggacccctccttttccttaggaccagaaaccattggggcagaccccttttgagcacatatgacaaattggcctctgttttataaatcccgtttgggataagagctttgatatttaattactaatattattgaatgccttagaggaggcggcgagcccggtgttctgaagacctgtggcccagcagagcctctgacagtaaagttttgctccagcaaaataaaaaaa

SEQ ID NO: 684592 - DNA, 929 bp, Homo sapiens
ggccccgcctgtgatgtgccccctcggccgggggggagacaaagaaagcatcaaggacgaagaatggccggtccgcttgcgagagaagacacgaagaggtgcccccccccccaacgaaggtgaggggaacgaacctcggggaggaggggtctcctctcttcgctcggcggcggagagaacgaccgccggaccgcaacgatgccgaggtggacacaacagtaagtgaaagaagaagaaaaggtgaagcgccgcgcccgccgcagagcgtgtgtcgttagaaatctagccgccccgccccctccgtatacttgatagtggtgggggggagacaaaacacataggatcgtgtcgttgggcgtatatattataataagttgttataccacgcacgctgtttgggaggaagattgtcgccccgcagacaaatcatattgtcgtggacgcacgcgcgggacgactctcgtggtaatactattcttctctgttatttgtattcgctctccccgctcccctcccacgcacgtttatttatctctcacacagtaatagggtttgtctccgcaagacagacactatctgcgggggtgtgtgtgttagaaagaagcgccgcggttaatatagtatttgctgtttaggaacccactgatatatacagcagacagggggggcacccggggggagtgattttctcagcaggcgtcttcaatacccccccccccgcggtggtagatagggtgacgcggggtgtttttctctgatatgatgattgggcccgggtgcgcggagagagtttttcaccaaaagttgttttaataggacagatcacccgtgaccatttcccccgggggcccaaaaaacacccttttttttttttttttttttaaaattttgggttttttttaaaaggaagaaggagatttttggggaga

SEQ ID NO: 684593 - DNA, 1990 bp, Homo sapiens
tttgtgtttcgtctcttgcttggtgtgtgttatcacttggtctgtcatgtcgttgtgtttcgtgggacctgacatgatggtggggctccctaccccgtcgttttactggggtgtccctgcgtgggcttttccaggacgttcttttggtcggactccctcgtgtgggtgtgtgttgtgccttgttgcccgctcgctgtggattgggtgtccgcttcgatagccacggtcgtgtgcctactgaggtaaggcgtatgtgtgtttttgtccgtgggtgatcgcagcgcgatgtgtcttcgtggcgttgctggcgtcctcctcaagattttgtttggtggtgagtctgttggctcgtcgagggtgcggttgagaacgcactgtttgggtgtggtcactaatcgcttcagttgttttgtcgtccgctataggggccggatgtgcttcggtccgcgctccctcacatcagtggtctgtgacagatggtgacgcctcagtaggtgtggtactcctccctgcgatgttattgtggtttctcgtcgggtgggtctaaatattcaatgttgggtggtggctcctcccggtgggtgaatatttataatgtgtgttggatgaggagtgaatatgtggtgtttctttgggttgttttctgatggcgcggtgtgtggagcataccgacttgtgctcggaagacgttttcttttttgtggggctttgtcggtgggtgctccatcttgcgccactgtctgtttgtggtttgtgcctcctcctctgcgactagatgggtgccgctttgtttgtccatccgacggcgcgccggcggttgtggttgtctgaaacactgccgcccaagttttgtgggtggtgtacaccctccactaagagattgggtcatcattgagatagtatattggtggtacgagaatgcctccccgcctggtgtgtctcccactttgtgtgtggtggggatgtataagtaggtcgcctcctgcgcttcttgtaggctgctctcaatggtgaactcgtcatgtgttggagttggtagcaccactgggttatttggtactgctgatgttgtgtgtggtttgaggaacagaccccgacttgtgtattgtgggggccttttttccaacagcgtttttattcataacaggagcggtcacgaagatagttgttgtccccgtggggagactcccccgtgttgggcgcacacacagcacgacaactagtacgcctgctgaagagttgtgtggtgcttctgctgaaaaaggcgggatgcttcgtctacaactcctggtggggccgcgacacatcttgggccgacaactagccacttgttcgcgacgtcaactagttttcccccccttctacagaggatgattggggatactcgtgtggagagatagtagtgggagatatagtagtctcttgtgatgagaggagattctctacacctcacagatacttgtgtctgtcatatatgtctcctctctcacactgcgtccctctcacactttaataatattctgtgtcacactcccacgacgtgtgtctactccggggtgtcgcgttaaccacatgatacgctgtgcgcgaggtgttcgctgttgtgttggccacacctcggctgtctcggatatataagatatgtgagcccacctcttgagaacctcgtccacacccttattgcccgcgagacacactcgagatggttgtgtctaattcggtgtctgccacagtggaggaggaagagtgtggggggtaattcttctccccacattaagacttatgagaccccctctttgttctccagaactggtggattctctgggagcatctcctcttggccaattaaagatccagatgtaaatggtgtgaaatctcaaagagccaaccacctggggtattgtggtctcccatttcttcttaggggtaacacaccaagggcaaaagagtttctatggtatttggaaaccaatgtaaatgggcctgttta

SEQ ID NO: 684594 - DNA, 133 bp, Homo sapiens
aaggtaacatactaagacaggagagctgggtcatctccattctctgcaaagtgaacaagaaagatcaatgttgatggaccctgaggcaagagggcatggcttagggataagggatcccctaggctgcctctgg

SEQ ID NO: 684595 - DNA, 260 bp, Homo sapiens
cgactcttagaggatccccctcacactgcgcccggacagacttgatggagcccgtcaatcacaaccttttccttctctattcctgctgatggtcacaggttgtaacacgagctctctgctactcctgacttccacttccggcttgttgtgtcgcttccacatcctggtcaggaatagttctccaggccgagtgcagcctgctaaatgtgtaccgcacggtactcaggtagggtcgcgagagtggcactcatcgcgggtcg

SEQ ID NO: 684596 - DNA, 939 bp, Homo sapiens
cggtggcggtgtgggtgggtggtggacatgtgttgcgggtgagggagtcctgcggggagtggtcgcgtttgttcggcgagtggtgctttctcggtcgtgcgtctgagtgtgggtggcgcgcaagggtgtccgctaccgtcgtgttgtttgtgtggtcgcggtcggggcacagaagtgtgggcttctttgtggcgagtgtcgggcggtacaacctctagttgggcctgtgggtgtgtgaggtatgagcgtatgccggtcgtgcacgtcgcgggtagggctgtctctcggtggtgtggtggacgtgctgtcggcagtgcaccgaggtgcggcggcggggtctgtggcgtggtctccggaggtgccgcggggctgtggagtgggcacgcggggggtgagtgggtagggggtgtggacaccgccgcggtgtgtcgggtgggagtggtgtgtgtgctgtggggttgctcggtgcgtgtgcgtgggtgtcgtggggtgtgtggtagtggtaggggcggcggcgtgggggtcaggtacgagggtggtgcgggcggctggcggccgccgccgtggtggtggtggggtatgaggtcgcgcgccgaggggttggctgtggcgctacggagggaggcccgcgggtgctccccctgtggcggtggggggggcacggttgtcggggagaaggtgtggcgagggtgtggtagcgtagatgtgtggtctcgcgcaggcggggtgcctgcctgcccctcccgcgacggtggtcgtcccgttcaccacgccgggcacccccgcggaggcccgtggggtgtagcctgccccctagttgcccgccatgttagccgcatgctcccgcctgctggccccccgtgctgtcagtgccctgaccaacgatggtctgtgcccggatgccataaaagcttttttgtctcgctaacaaaaaaaaca

SEQ ID NO: 684597 - DNA, 753 bp, Homo sapiens
  misc_feature (18)..(18): n is a, c, g, or t
  misc_feature (63)..(66): n is a, c, g, or t
  misc_feature (79)..(79): n is a, c, g, or t
  misc_feature (81)..(81): n is a, c, g, or t
  misc_feature (95)..(95): n is a, c, g, or t
  misc_feature (106)..(106): n is a, c, g, or t
  misc_feature (121)..(121): n is a, c, g, or t
  misc_feature (123)..(123): n is a, c, g, or t
  misc_feature (134)..(134): n is a, c, g, or t
  misc_feature (147)..(147): n is a, c, g, or t
  misc_feature (178)..(178): n is a, c, g, or t
  misc_feature (187)..(187): n is a, c, g, or t
  misc_feature (189)..(189): n is a, c, g, or t
  misc_feature (202)..(202): n is a, c, g, or t
  misc_feature (204)..(204): n is a, c, g, or t
  misc_feature (234)..(234): n is a, c, g, or t
  misc_feature (236)..(236): n is a, c, g, or t
  misc_feature (246)..(246): n is a, c, g, or t
  misc_feature (302)..(302): n is a, c, g, or t
  misc_feature (304)..(305): n is a, c, g, or t
  misc_feature (313)..(313): n is a, c, g, or t
  misc_feature (368)..(369): n is a, c, g, or t
  misc_feature (432)..(432): n is a, c, g, or t
  misc_feature (455)..(455): n is a, c, g, or t
  misc_feature (470)..(471): n is a, c, g, or t
  misc_feature (493)..(493): n is a, c, g, or t
  misc_feature (500)..(500): n is a, c, g, or t
  misc_feature (509)..(509): n is a, c, g, or t
  misc_feature (544)..(544): n is a, c, g, or t
  misc_feature (623)..(623): n is a, c, g, or t
  misc_feature (752)..(752): n is a, c, g, or t
agggggagtttcccaggnggcctaaagaagggcggggcataggggtggatcccagggcgctgnnnnggtggggcgtgcntnctcgcgtcgggggnggggggggtgnggttctgggcaggtngnttctgttaatnggggccttcagcntggtgccctcaggtggctggggttgttgggngtttttttntnttcccctgtgaancncgggggcatgttgggaaggccttggggttntnagagaatggnccagcccctccgacgcttgttcttgccgccctggttgtcctgcccgagtggccatntnnaacacctnccgcactccctccttggtcttggctgagcactcaaggtagccaaaggcactgttnnggttcgccatgtcccggccttcctcagaccgaacgggctcctgctttttcttggccagctctntcctggtgtgctcgtcttgcctnaggtccttctttttnnccaccaggatgatgggcacgtnggggcanacgtgcttnacctctggggtccacttctcaggaatgttttccangctgtcagggctgtcgatggagaagcacatgaggatgacatcagtgtccgggtaggagagaggccgcagtcgatcatantcttcctgccctgctgtgtcccacagagccagctccacctgcttgccgtccacctcaatgtccgcaatatagttctcaaagacagtagggacgtagacctccggaaactgatccttgctgaagacgatna

SEQ ID NO: 684598 - DNA, 848 bp, Homo sapiens
tccttcttttttttatataaagatatttatacatagagaacagacacacgtcatgactctttacatattgtcctatctttcctccgtcccttattttcggcccaataaattttaaaaatgggcccaaaattctcggcctctcacccattcttagggaatcccctcttcccctctattaaaaatatagttataattgacccttgctctgaagcccttaatcacttcgtgtttaaccctccataaagcgtctttctgtccattttttctaaaaagtggtatcaagaggccctattcctagcgtttttcggccccccccggcaatattctgtatttaagaactgcccaacatttcacaccaataaggcctttagaaaaaacactgtaaataataaagtttttcttctagttttattagaaaaacagtatttccccacccctccacaataggcctcaaagatggctttctgtatcaacactggaggaatcacagtctttcaaaccaacatccacacaattgtagcatttcttcccacacaacctgtacttttcaaagcataaaatgctgacatacaacatctaggtcgatggaggaatgccctaaacactttcaaaacactcaaataaggagtaccaccttgttagatccactagtggcaacatgatcatgcggcgactttcttctccaaacacatttttgcgttcgaaaataatgttggccctcttttccaacaaattataaaagagaacgatggcccccatataaaagtggtgatataaattctacatttactgtggggaaaaacacccctaacgggggaaaaacccctaaccccatccccaaacaaaca

SEQ ID NO: 684599 - DNA, 198 bp, Homo sapiens
caggatggagcagttctgggagctgtgtcagctaggcatctgtgagcccaaatggcatgaataaaagggcaggttgctaagagccagggagggcatggggcagagagaccaggttggcccagacatggacagaggtgctccagtggacatgggtgctggatgtgaacgccatggtggacgctggtggaagctgggtac

SEQ ID NO: 684600 - DNA, 576 bp, Homo sapiens
  misc_feature (202)..(202): n is a, c, g, or t
gcaacaagagcaaaacttcatctcaaaaaaaaaaaaaaaagaaaagggaaaaaaacaaaccaacaagctttggaaaccttaggaacaatttgtgggacctgtgttgggagcaggaaatgtggtgctagttgtgctcattgtgacggggtggtgaaccattacccctataacctctctatatctctctatacctgtgtgtgtnggagagacctgtgacccacagaaggactatggaacccatggaagaagagtggatggtggacatggtttgggcattttaattaagtaccatggatctaacccaattggagctaacgggggccacacccattttaatcctttataatggatcacttatgagggctggagtggcagaaatgggagtggtttggtggcgtcaagaggtgggaaggctggtggagggctatgggcaggtaattccaagaaaagaagggtggacaagtgggtttagacttccagtgggtagtggtgggaaatgggacttaattagacttttccagggaaatatatcggatcctagatctaataaggacttggtaatagattagaagtagg

SEQ ID NO: 684601 - DNA, 471 bp, Homo sapiens
  misc_feature (275)..(275): n is a, c, g, or t
cgtcagagtcgagacagctgtcatatggtgaactgttctactaaaatacaaaaatagtggcatgtggtgcgtgctgtagtcccagctacttggaggctgaggcaggatcacttgaacccgggaggtggaggttgccagtgaaccacagattgtgccactagcgctttagcccttgcgtgacagaagcgagactactgtctaaagaaaacaaaacaaataaacaacagaaagaggaaacggtgtcttggaatggggtggctttaggtcccctttgnatgacacagccaaggtctgtaatagccctccccctttactccttgccttgtactccagcctccaggcattgcactccggccagccattgcactctggccagccattgcactccggccagccattgcactccggccagccattgaactccggcaagccattgaactccgggcagacattgcactccggccaggcatt

SEQ ID NO: 684602 - DNA, 627 bp, Homo sapiens
  misc_feature (201)..(202): n is a, c, g, or t
  misc_feature (354)..(354): n is a, c, g, or t
  misc_feature (554)..(554): n is a, c, g, or t
  misc_feature (563)..(563): n is a, c, g, or t
tttacttactgcggctgaggggggcctaattaagacaacattaccagcaaacaggggccatcatccacgtcattcaaggcagacatagataactaccaaacacctatatttagtcaccagacagataacatctaaaggatgtactggcaaacagacttcatccgtttttatgagggggtggtaaaaaaatattaaaccganncaaagaaaagaagtcaccaaagagtatatattcgaggctcttattttactatatatgcccttatcaacaaaatcatcagcaaccaaacccacgacacgtgaatcaaacctaataagagagtaacactcatagtcacaaatccactatccaancaattaataatcaccccaacctttctatctctttcctctttcgctaaagttctgctccccgttttcaccgccttgtttcgtgtcgttccctctccttcctttatacttatactccctctgtccttttttctttcccacctcctttcattattcctctcttttatttctatcttatgtttgttcttcgtctattggttgcntccatcccncgtctttccttctttatctctttttcttgtacttcttctttctatacttttatctaacatttat

SEQ ID NO: 684603 - DNA, 120 bp, Homo sapiens
agaagaaggatctgatgatgatgaaacagaaaatggccccaaatcaaaaaaacgacgtccaccaaaagcagagaagaaaaaggctcccaagccagaacgtctgcctccatcaatgaaggt

SEQ ID NO: 684604 - DNA, 601 bp, Homo sapiens
  misc_feature (255)..(255): n is a, c, g, or t
ggactcctgataatatccaagttatggccctgaaaaccctaaacaatatcctcccaactctcccctgtctgaaacaacaatgacaactttctcatattggtgttctcctctaactttaataaacattagctttacttaacaaacatgttttttcagggtggcgttttgagagagttaatattctctttttacttgtgtagaaactggggtctctcatatgttgctcaggctgggctcgagattcctgcggctcanagctattctcgccacctcagtcctcctgagatagctacggaccacaggttgtgtgccatgcgcatctgtgctaatttctttatttttaacaatttcgtggagagacaaggtctcgctattgttgttccaggctagtcttgaactcctggcttcaaacaatccttctgcctctgcctcctgagtagctgggattacaggtgcacaccagtatacctggctaattttttaaggtttttgtagagaagaggtctcactatattgccctggttggtcttgaactccttgggttccagtgatcctcctaacttgggctcccaaactgttgggattacaggcattagccacc

SEQ ID NO: 684605 - DNA, 205 bp, Homo sapiens
agttgtggctctctgggacagacccatctgacctctcttcctcccaaggctgctcctctccgggccgagctaggtcccaattcttcctcagcctctgcttctccaccctataatctttttatcaccttccctcctcacacctggtccggcttacagtttcgttccgtgactagccctccccgacctgcccagcaacttactctta

SEQ ID NO: 684606 - DNA, 898 bp, Homo sapiens
agcggtccagatccctgggtaatcgataaggaaacccggacgctgctgcccctttcttttgtttcaggcggtccgggaatgatggcggtagcattcagactgacgtcgtgcctacctacataacgcgaggccgaccatgctttcaataagaaagaaggagggtctctgcttggggagaaactggcaaggagatagctcccgcaggtacgtacagagaagcatcgcgtctgtgtgtcttcgatgagcacccgatacgggagtgcatagttgatgggcacaactatcattgacaaggaatctgccccttcacgtggtaatgtgtcctatttgcgaggagcggatccttctctggctgtgggtgaccataagatgaagatgcaagaggagctcaattgttcattcctggcgaggattatcttgcgactaggaatccagacaagtgtcgaaccagtctttcgagaagactgccaccttaagatatcatgtctgtacatccgtgtcgccatcgtgcttcaggggtatcgtccagatcggtgacatcgtcactagtgggcgagtgctcggcctctgagcatatgacaggtgcgcgttcagagcgtggctcagagggtctaccataggcatgtcgtgtaccaatgaatgcacgttccatgaagtgtctgagggctggacatcggcccggctcacccacaaatgaaataagaagttattttcgtcattcccgaacatggaataatgaggattcttcttcaggcgtctcgtactcggagccgttgttgggcctagatcgtttcaacggggggggctcgtttaccaggcttgaggcccctgatgggacgggtaagaatcacaaacttgcggtgaatgggggtgaaaagttgctgcttgggttgaactt

SEQ ID NO: 684607 - DNA, 533 bp, Homo sapiens
atgatctcagctcactgcaacctctgcctccgaggctcaagtgatcctcccacctcagcttcccgagtagccagggctacaggtgaacaacaccacgcccagctaatttttgtatttttgtagaaacaggtccttcctatgttgcccaggctggtctcaaactcctaggcccaagtgatctacccaccttggcctcccacagtgctgggtttacagtcatgagccactgcacctggcccaaagagatttcttgaaaacctctcaggcgggttcgaaaagttggaatttcctggatgtttaattgatagtcaatttgaacattctcgtggtagtggggattatgtacaaataatttgaacctgattgattgttttaccatgttttatttttattttaagcattatttagtttttctgtactacctgactgcactttttggaaaatttgagtaagtcagtaacataggattaagtttgtttgattaaatcttttcttgacagaaataagtcttagaactcttagaccctaggcaa

SEQ ID NO: 684608 - DNA, 177 bp, Homo sapiens
atcgtgctgaagatacctcattgtcagccatccatgctccccatattcctacattctcagcattcccgtaagacaggagcgtctctatccattttctgcctctatccacaacttccttcttctcctataagtccttggtgaggtgatcttctgcacgaggtgatcttctagcacgat

SEQ ID NO: 684609 - DNA, 1391 bp, Homo sapiens
  misc_feature (13)..(13): n is a, c, g, or t
  misc_feature (25)..(25): n is a, c, g, or t
  misc_feature (42)..(42): n is a, c, g, or t
  misc_feature (1379)..(1379): n is a, c, g, or t
agcagtagcgtcncatagaataatnagtatagtatcctgtanctctccttcggtcccctaccttctccatattatgctaattaccggatagatacttagatcttagtgtagtatttttctcactcccttcgtatcatctcacatttctacttcttcgtttttgctgcatcaagtgacctatgaaatagaaactgacttcagataattttaatttcttcatagttcagcttcataatagtaaatatctaaatttttgaagaaagttgatcatttagaagttatgtctgtcttttttaggactcaaatccaaaagcatgaagcaacagctaagcaagaactaatggctaaattatcaacttggaaaactggaaaatctggatggcagagaaatatactatctcaccagtatttgctctcgactcaagaaggttaacattttctgattcatgttagactttgaagagactaaagaaaattttcaagaggaacatatgcctgagaacctttgcatgaatttaaaatttcaattatccattcttataagaaggaagatgattgtaaagaaatatctccgaagttaaaatctgtaataggaattgattcattctctaatgaaaacaaaacataaaaacatcacactaatcttggaggaataagaaaaattgtacatccattaaatgtacaattgattgcaacatcttgattgttttaaccattaacttgtcaaattacaatcacagttaagaaaatgatgtaaaattctgttttgtggatctctttcctagattagcttctgaaatcattattagctatatcatttgaggttttctacaatttggtataactaagaatttaaaaatgttttatcatatatatttgtataattaattactggcatggttaaagtggttttcactttttaaatggagaaaatttcagttaaattaataggataaaccaggttgcgaactggtgacctgtaggccatgtttgcactgcaaatatatttggtctgaatgatattgatattggacacatagtacttttacatgttttgaatgtattgctaatatttaaaaattgagagatcttgcataaacaatagattcccagctttgtcagatgtaatcaaaaagtaatccgatgctttgtcaacaacagacttacattgcccatagcaaccgtcagcttagttgatgggtaatgtagcaaacactattggtttcctaccaaataatcccctttttcctggcttttagaacaataattttgttcacctgcccacttctaggaaagaatatcctatctatctaatctatctagctcagggataaatccctatccttttaagtaagtcaagtcaattaaaataacctcanttttccttgcta

SEQ ID NO: 684610 - DNA, 1222 bp, Homo sapiens
  misc_feature (1210)..(1210): n is a, c, g, or t
tgagtcagatgaagccccatgtgtatgatctgccagtagaaggcaatgagcccccggcctcttttcataaagacacaaacgcacttccccctactgttttcaaggataatccaatgtctacacctaaggactcaaatccaaaagcatgaagcaacagctaagcaagaactaatggctaaattatcaacttggaaaactggaaaatctggatggcagagaaatatactatctcaccagtatttgctctcgactcaagaaggttaacattttctgattcatgttagactttgaagagactaaagaaaattttcaagaggaacatatgcctgagaacctttgcatgaatttaaaatttcaattatccattcttataagaaggaagatgattgtaaagaaatatctccgaagttaaaatctgtaataggaattgattcattctctaatgaaaacaaaacataaaaacatcacactaatcttggaggaataagaaaaattgtacatccattaaatgtacaattgattgcaacatcttgattgttttaaccattaacttgtcaaattacaatcacagttaagaaaatgatgtaaaattctgttttgtggatctctttcctagattagcttctgaaatcattattagctatatcatttgaggttttctacaatttggtataactaagaatttaaaaatgttttatcatatatatttgtataattaattactggcatggttaaagtggttttcactttttaaatggagaaaatttcagttaaattaataggataaaccaggttgcgaactggtgacctgtaggccatgtttgcactgcaaatatatttggtctgaatgatattgatattggacacatagtacttttacatgttttgaatgtattgctaatatttaaaaattgagagatcttgcataaacaatagattcccagctttgtcagatgtaatcaaaaagtaatccgatgctttgtcaacaacagacttacattgcccatagcaaccgtcagcttagttgatgggtaatgtagcaaacactattggtttcctaccaaataatcccctttttcctggcttttagaacaataattttgttcacctgcccacttctaggaaagaatatcctatctatctaatctatctagctcagggataaatccctatccttttaagtaagtcaagtcaattaaaataacctcanttttccttgcta

SEQ ID NO: 684611 - DNA, 1340 bp, Homo sapiens
cactatgcgtctgacgttttacccttcacagaatctttagttctggactgcagttgagtggaaatgggcaacggcgggcggagcggcctgcagcaggggaaggggaacgtggatggggtggcagcgactcctactgctgcctcggcctcctgccagtacaggtgcatcgaatgcaaccaggaggccaaagagttgtaccgagactataaccacggtgtgctgaagataaccatctgtaaatcctgccagaaacctgtagacaaatatatcgagtatgatcctgttatcatcttgattaatgctatattgtgcaaagctcaggcctacagacatattcttttcaatactcaaataaatatccatggaaaactctgcatattttgtttgctttgtgaagcatacctgaggtggtggcagcttcaagattccaaccagaatactgcccctgatgacttgatcagatatgctaaggaatgggatttctatagaatgtttgcgattgctgctttagaacaaactgcctattttattggcatttttaccttcctgtgggtagaacggcccatgacggcaaaaaaaaagcccaacttcattttgctgctgaaagcattattattatctagctacggaaaactcttgctgattccagctgtcatttgggaacatgactacacatctgtgtgcctcaaactcattaaagtatttgttcttacatcaaattttcaggcaattagagtgaccctaaacatcaaccgtaagctctccttcttggccgtgttgagtggcttactgctggaaagcatcatggtctacttcttccagagtatggaatgggatgttggaagtgattatgccatctttaaatctcaggacttctgaagagttttattcttcttcactatctgtggcatgaccagctgtatctgaaagagaaaagacatgaaatataaaccaacctcctcatttctgttgagtaaaatgaagcaaagattggaaacactttctgaaaaagaaagcaatgataatagcggtggatacccacccccacaaatgcacccaagagacaagccatttacatacagatattcacagtcacacatagaaacacccacatggacacaaggaatgttgctgcagagactgaatgacatgcaacaggtgaaggtttatacgttatacacaaggccaggtaagcgctcataattcacacataataaaacatctaggtttcattcctttgacatgtttatatctttttaatttaaatgttgttactggcttaaaatattttgtgttcttacaatagaaacgcttttaataaagtctttcagaataaacca

SEQ ID NO: 684612 - DNA, 422 bp, Homo sapiens
ggtctcacttcgctttgagctcacacctcaattaggaatgagttagcacttcagaagggattggaccagatggatgcctgggtggggagaggggcaggaggaagaggctgcccacagctctgcccagctgccctggtgtggctcagaccctcttgggggcttggatcgcttgcttgtgctttgccccctcacgctgaacatccgccgtgagcggagactcaccctgtggggtggaagtcagcagaaccctcccagaacagaagggcccaaaggcgaggcgtgaacactcacaaggagagaagacagcccactgtggatctgtgccaccggcctcccgtctgcaagaacattggcttttgtttccttagctcaatcttagaactgtacacgaaatgcttagtaaatgtgatttgaatgaaaaa

SEQ ID NO: 684613 - DNA, 1484 bp, Homo sapiens
cactatgcgtctgacgttttacccttcacagaatctttagttctggactgcagttgagtggaaatgggcaacggcgggcggagcggcctgcagcaggggaaggggaacgtggatggggtggcagcgactcctactgctgcctcggcctcctgccagtacaggtgcatcgaatgcaaccaggaggccaaagagttgtaccgagactataaccacggtgtgctgaagataaccatctgtaaatcctgccagaaacctgtagacaaatatatcgagtatgatcctgttatcatcttgattaatgctatattgtgcaaagctcaggcctacagacatattcttttcaatactcaaataaatatccatggaaaactctgcatattttgtttgctttgtgaagcatacctgaggtggtggcagcttcaagattccaaccagaatactgcccctgatgacttgatcagatatgctaaggaatgggatttctatagaatgtttgcgattgctgctttagaacaaactgcctattttattggcatttttaccttcctgtgggtagaacggcccatgacggcaaaaaaaaagcccaacttcattttgctgctgaaagcattattattatctagctacggaaaactcttgctgattccagctgtcatttgggaacatgactacacatctgtgtgcctcaaactcattaaagtatttgttcttacatcaaattttcaggcaattagagtgaccctaaacatcaaccgtaagctctccttcttggccgtgttgagtggcttactgctggaaagcatcatggtctacttcttccagagtatggaatgggatgttggaagtgattatgccatctttaaatctcaggacttctgaagagttttattcttcttcactatctgtggcatgaccagctgtatctgaaagagaaaagacatgaaatataaaccaacctcctcatttctgttgagtaaaatgaagcaaagattggaaacactttctgaaaaagaaagcaatgataatagcggtggatacccacccccacaaatgcacccaagagacaagccatttacatacagatattcacagtcacacatagaaacacccacatggacacaaggaatgttgctgcagagactgaatgacatgcaacaggtgaaggtttatacgttatacacaaggccaggtaagcgctcataattcacacataataaaacatctaggtttcattcctttgacatgtttatatctttttaatttaaatgttgttactggcttaaaatattttgtgttcttacaatagaaacgcttttaataaagtctttcagaataaaccaagtttttgtaaattttcaattcaataattaaggtaatctttaaaattggatgatccaaaaataagtgataatgaaaaccactgagttatatactttgcaagggtaaattacatctgaataaagctgtaattaaaaacaaaaaaa

SEQ ID NO: 684614 - DNA, 160 bp, Homo sapiens
caccccacaacaaataattaaccaacccctaatattaatacttccaaagttcaaaaaccctctactataacatccttctctcttacccattattaactaaaaatcccatagttcttattttctctactacctataatatttcacccatttattttacaat

SEQ ID NO: 684615 - DNA, 583 bp, Homo sapiens
atgggatgttggaagtgattatgccattccatactctggaagaagtagaccatgatgctttccagagtatggaatgggatgttggaagtgattatgccatctttaaatctcaggacttctgaagagttttattcttcttcactatctgtggcatgaccagctgtatctgaaagagaaaagacatgaaatataaaccaacctcctcatttctgttgagtaaaatgaagcaaagattggaaacactttctgaaaaagaaagcaatgataatagcggtggatacccacccccacaaatgcacccaagagacaagccatttacatacagatattcacagtcacacatagaaacacccacatggacacaaggaatgttgctgcagagactgaatgacatgcaacaggtgaaggtttatacgttatacacaaggccaggtaagcgctcataattcacacataataaaacatctaggtttcattcctttgacatgtttatatctttttaatttaaatgttgttactggcttaaaatattttgtgttcttacaatagaaacgcttttaataaagtctttcagaataaacca

SEQ ID NO: 684616 - DNA, 1241 bp, Homo sapiens
  misc_feature (730)..(730): n is a, c, g, or t
cactatgcgtctgacgttttacccttcacagaatctttagttctggactgcagttgagtggaaatgggcaacggcgggcggagcggcctgcagcaggggaaggggaacgtggatggggtggcagcgactcctactgctgcctcggcctcctgccagtacaggtgcatcgaatgcaaccaggaggccaaagagttgtaccgagactataaccacggtgtgctgaagataaccatctgtaaatcctgccagaaacctgtagacaaatatatcgagtatgatcctgttatcatcttgattaatgctatattgtgcaaagctcagggccgtagcatggactatattctgtctttgcaagtatcgtcaagactacatactattcacgatcggatagaacctccttgccatacttgtctcgttgtagcatgtttgttgaaggcacttagcctgagggttgggtggcaggccttcgacaggattccaaacgcaaggatagtactggcctccgttgagtggacgtattgcagtccagagtattgcgtgatagggagagtaggggaatgtgtccttactaagggaacagtggtctatggcagatttggccttggcatgtttaggaaaactaaaaattttgtcgccttatatttgggccaattgttggggccaatttgtgtgtaaactcggttttccccttggctaggggggctcagagcaaacggtggggcccccagtnggcaacagggggcgtagacattacagacattaacgcccgcggagtacgtctcccattgtgtttaaggcgtaaggcgattcggaaaaacgcctatgtgactctaaatttgcaatgcgctggaagcccttgagcggtgagacagaaacctcgcttatgggcgcttggggaatttccccgaggggcgtggtttaccgaattgttgaggggtgaaacacccgattggtatctttaggcagcaattggctcgtttgttttggccccactcctataaaatccgtttcagacttcttaaggaagagggctacggttgtcagggggttctccacttgtaagcgaattttccacaaatgtgtgtctattaccgaggggggacgaacaaatgttaaggcacaggtaggaaacctccccggttaagacacattgaatttcgaaactcccgggtaaaaagagccgcttccgtccgccggttatcctgttgtgaggcccggggtgggtttcgggaaccgcgtgg

SEQ ID NO: 684617 - DNA, 438 bp, Homo sapiens
  misc_feature (190)..(190): n is a, c, g, or t
ttattcgttaacaatgggggtaaagagctatatacatgaaaatgagttttataaaattaagtgaagggcaaataaaagccctggttctataaaacattttggaaaggttgtttaataaggggattatccctttgatctaaagcaatgtggttttttttttaaaaaaaaaaacaggggggtttcctttttnggggggtttctttgggttaagcccttcatcaaatgctttatttgggatttgggaagtaatttgcaattttttttggtttttttaaaatttgatttggtataaaattgccaaaaaaaagggtttcaaaaacatagtttggacctggatttttattttaatgcctcaaggttttgtaagtcatttttaattggccaaagattgtagaccctgcttgaggattttttttaataaaacaaagccaatcccca

SEQ ID NO: 684618 - DNA, 1059 bp, Homo sapiens
acatagatgtgtgacaatgagcacgaaactccttatagaaagagtcaaaacaagagaagatggcgtgtagagataagagcatgcaagacctgcttgagcactgggccactttactactgtccgacacggagcctcatttactgcaacagtggcaagaatggttatgccttgtcagcacatcttatccaagcaacaggaaaggataaattcacagcagggaagagcatagaaagacaacggcacaatgttagcacaagcggaaacctccatgccatgggtcaggcccctcctgcaaccaatgagcagaaacacgcggacacacagcaagaccaatggagctgaaaactgaaaccgttacaccgttaagcagaactaccacttgaaccacgaagacacatcttcaaactcacgatccagcgtcactcttaacacacaggagcgaccgccagacgatccaggcacgacgcatggcagagacctagaacacgggtcagcacacactctcacactatcacgggaacctacaccacaggataccatcactgaccgataccttcaccaaccctcacacgactcatccaaccgctcaacctgccacgactcatccgacgtcacaccgttccagggctagcaggcacggctctcacgtgccacttaccacatgccactctgcatcctaccccgaggcacacactacgtagcctgttgaacactttcaagcaggtataacctacaaaacctgggagaagcaagacacgtcacaggccgcactctcacccaccagccactgcactgtaacgggacatcaccggattccctaaacgcaggtgacaccatccccagcagagtaagtcacgccctgctctgcaataccagctgaacacgagggaatcagggaccccgcgccgcgcacacgcgacttagactagtacctgaggacacgaaacactagtccggcccctcactaccatgaacgcatcgatacagcctaacggtccggacaaaacagtgccccgcatcactaataacgtagacccctcgaacgccaccaaccgaact

SEQ ID NO: 684619 - DNA, 1399 bp, Homo sapiens
  misc_feature (1359)..(1359): n is a, c, g, or t
cactatgcgtctgacgttttacccttcacagaatctttagttctggactgcagttgagtggaaatgggcaacggcgggcggagcggcctgcagcaggggaaggggaacgtggatggggtggcagcgactcctactgctgcctcggcctcctgccagtacaggtgcatcgaatgcaaccaggaggccaaagagttgtaccgagactataaccacggtgtgctgaagataaccatctgtaaatcctgccagaaacctgtagacaaatatatcgagtatgatcctgttatcatcttgattaatgctatattgtgcaaagctcaggcctacagacatattcttttcaatactcaaataaatatccatggaaaactctgcatattttgtttgctttgtgaagcatacctgaggtggtggcagcttcaagattccaaccagaatactgcccctgatgacttgatcagatatgctaaggaatgggatttctatagaatgtttgcgattgctgctttagaacaaactgcctattttattggcatttttaccttcctgtgggtagaacggcccatgacggcaaaaaaaaagcccaacttcattttgctgctgaaagcattattattatctagctacggaaaactcttgctgattccagctgtcatttgggaacatgactacacatctgtgtgcctcaaactcattaaagtatttgttcttacatcaaattttcaggcaattagagtgaccctaaacatcaaccgtaagctctccttcttggccgtgttgagtggcttactgctggaaagcatcatggtctacttcttccagagtatggaatgggatgttggaagtgattatgccatctttaaatctcaggacttctgaagagttttattcttcttcactatctgtggcatgaccagctgtatctgaaagagaaaagacatgaaatataaaccaacctcctcatttctgttgagtaaaatgaagcaaagattggaaacactttctgaaaaagaaagcaatgataatagcggtggatacccacccccacaaatgcacccaagagacaagccatttacatacagatattcacagtcacacatagaaacacccacatggacacaaggaatgttgctgcagagactgaatgacatgcaacaggtgaaggtttatacgttatacacaaggccaggtaagcgctcataattcacacataataaaacatctaggtttcattcctttgacatgtttatatctttttaatttaaatgttgttactggcttaaaatattttgtgttcttacaatagaaacgcttttaataaagtctttcagaataaaccatgtaggcgtgccagacctnatcacacccacactcaacacacaacagaaactactactta

SEQ ID NO: 684620 - DNA, 105 bp, Homo sapiens
gctggcgatagctgtattatataatatactctctagagcaacccctctaagcacaagtgatacacgccgatccactcaacactcgtatggtgtacgcagtggctc

SEQ ID NO: 684621 - DNA, 1064 bp, Homo sapiens
  misc_feature (1064)..(1064): n is a, c, g, or t
cgtccgttatcagcgagatccgagaagaataccctgatcgcatgatgaataccttcagatgtggatgcctgtcagctccaaagctgtctgagcaccgtggtcgaggcccgtgacaagtgccagccgctctccgtccatcagttggtaggagaatactgatgagagcctattgcagttgtacagacgtagagccctcgttatgatactctggcgtatcacgcatctcatgagagctggaccacagccgaacgctatcggggactctgaagccatgcttgtcgtcagccagcatgagtggtgtcaccatcctgcgctccgtcatcccgtggccagctcaatgctgacctccgcagagtgggcagtcaacatggtccccttcccacgtctccatttctttatgccgtggctttgcccctctcaccagccgtggaagccagcagtatcgagctctcactagtgccggaactcagccaggaggtcttcgatgccaagaacatgatggctgcctgtgagccccggcacgtgcgatacctcaccgtggctgcatgtcttccgtggtcggatgtccatgaaggaggtcgatgagcagatgcttaacgtgcagaacaagagcagcagctactttgtggaatgcgatccccaagcaatgtcaaggacagcggcctgtgacaatcccagctcgtggcctcatagatgggagtcacctttcattgggaataggacaaggcatccaggagggtcttcaaggggatgtcggaagcaggtcattggccatgtgcccggccaggaagcgctttccttcacatgcgtacccaagggcgaagaggcatgggacgaaaaaggagtaaaccagaggggtgtaacacgacatgtaaaagaccctgtcttgcaaatctacagggaaccagagagggggccccgcgaaaaacagaggagagacacataagagggggccacacaaagcgcctacgagaaacaccaacaaacagaaaggaggcagagagacacaacagcggaacagaaacaggccgactcataccgcacaaagaggtagggcggcgaan

SEQ ID NO: 684622 - DNA, 1547 bp, Homo sapiens
cactatgcgtctgacgttttacccttcacagaatctttagttctggactgcagttgagtggaaatgggcaacggcgggcggagcggcctgcagcaggggaaggggaacgtggatggggtggcagcgactcctactgctgcctcggcctcctgccagtacaggtgcatcgaatgcaaccaggaggccaaagagttgtaccgagactataaccacggtgtgctgaagataaccatctgtaaatcctgccagaaacctgtagacaaatatatcgagtatgatcctgttatcatcttgattaatgctatattgtgcaaagctcaggcctacagacatattcttttcaatactcaaataaatatccatggaaaactctgcatattttgtttgctttgtgaagcatacctgaggtggtggcagcttcaagattccaaccagaatactgcccctgatgacttgatcagatatgctaaggaatgggatttctatagaatgtttgcgattgctgctttagttaacttgcttcagaaacactggatgagcttccaccttaaggcctttgaagtggctcttcctgtgcccggaatgcctgtccccctgatgcccagatgtctgactcctgcatacccctcaagagttggctaaaatgacactttctaaatgaagtgtacctctgacactcctgatctcctgttccggctctactttgttttgcttatagaacaaactgcctattttattggcatttttaccttcctgtgggtagaacggcccatgacggcaaaaaaaaagcccaacttcattttgctgctgaaagcattattattatctagctacggaaaactcttgctgattccagctgtcatttgggaacatgactacacatctgtgtgcctcaaactcattaaagtatttgttcttacatcaaattttcaggcaattagagtgaccctaaacatcaaccgtaagctctccttcttggccgtgttgagtggcttactgctggaaagcatcatggtctacttcttccagagtatggaatgggatgttggaagtgattatgccatctttaaatctcaggacttctgaagagttttattcttcttcactatctgtggcatgaccagctgtatctgaaagagaaaagacatgaaatataaaccaacctcctcatttctgttgagtaaaatgaagcaaagattggaaacactttctgaaaaagaaagcaatgataatagcggtggatacccacccccacaaatgcacccaagagacaagccatttacatacagatattcacagtcacacatagaaacacccacatggacacaaggaatgttgctgcagagactgaatgacatgcaacaggtgaaggtttatacgttatacacaaggccaggtaagcgctcataattcacacataataaaacatctaggtttcattcctttgacatgtttatatctttttaatttaaatgttgttactggcttaaaatattttgtgttcttacaatagaaacgcttttaataaagtctttcagaataaacca

SEQ ID NO: 684623 - DNA, 1438 bp, Homo sapiens
cactatgcgtctgacgttttacccttcacagaatctttagttctggactgcagttgagtggaaatgggcaacggcgggcggagcggcctgcagcaggggaaggggaacgtggatggggtggcagcgactcctactgctgcctcggcctcctgccagtacaggtgcatcgaatgcaaccaggaggccaaagagttgtaccgagactataaccacggtgtgctgaagataaccatctgtaaatcctgccagaaacctgtagacaaatatatcgagtatgatcctgttatcatcttgattaatgctatattgtgcaaagctcaggcctacagacatattcttttcaatactcaaataaatatccatggaaaactctgcatattttgtttgctttgtgaagcatacctgaggtggtggcagcttcaagattccaaccagaatactgcccctgatgacttgatcagatatgctaaggaatgggatttctatagaatgtttgcgattgctgctttaggctggagtgcagtggcacagtcacagctcactgcagccctgaactcctgggctcaagcaatcctcctgcctcggccccccaggtagctggaaccacagaacaaactgcctattttattggcatttttaccttcctgtgggtagaacggcccatgacggcaaaaaaaaagcccaacttcattttgctgctgaaagcattattattatctagctacggaaaactcttgctgattccagctgtcatttgggaacatgactacacatctgtgtgcctcaaactcattaaagtatttgttcttacatcaaattttcaggcaattagagtgaccctaaacatcaaccgtaagctctccttcttggccgtgttgagtggcttactgctggaaagcatcatggtctacttcttccagagtatggaatgggatgttggaagtgattatgccatctttaaatctcaggacttctgaagagttttattcttcttcactatctgtggcatgaccagctgtatctgaaagagaaaagacatgaaatataaaccaacctcctcatttctgttgagtaaaatgaagcaaagattggaaacactttctgaaaaagaaagcaatgataatagcggtggatacccacccccacaaatgcacccaagagacaagccatttacatacagatattcacagtcacacatagaaacacccacatggacacaaggaatgttgctgcagagactgaatgacatgcaacaggtgaaggtttatacgttatacacaaggccaggtaagcgctcataattcacacataataaaacatctaggtttcattcctttgacatgtttatatctttttaatttaaatgttgttactggcttaaaatattttgtgttcttacaatagaaacgcttttaataaagtctttcagaataaacca

SEQ ID NO: 684624 - DNA, 1852 bp, Homo sapiens
cactatgcgtctgacgttttacccttcacagaatctttagttctggactgcagttgagtggaaatgggcaacggcgggcggagcggcctgcagcaggggaaggggaacgtggatggggtggcagcgactcctactgctgcctcggcctcctgccagtacaggtgcatcgaatgcaaccaggaggccaaagagttgtaccgagactataaccacggtgtgctgaagataaccatctgtaaatcctgccagaaacctgtagacaaatatatcgagtatgatcctgttatcatcttgattaatgctatattgtgcaaagctcaggcctacagacatattcttttcaatactcaaataaatatccatggaaaactctgcatattttgtttgctttgtgaagcatacctgaggtggtggcagcttcaagattccaaccagaatactgcccctgatgacttgatcagatatgctaaggaatgggatttctatagaatgtttgcgattgctgctttagaacaaactgcctattttattggcatttttaccttcctgtgggtagaacggcccatgacggcaaaaaaaaagcccaacttcattttgctgctgaaagcattattattatctagctacggaaaactcttgctgattccagctgtcatttgggaacatgactacacatctgtgtgcctcaaactcattaaagtatttgttcttacatcaaattttcaggcaattagagtgaccctaaacatcaaccgtaagctctccttcttggccgtgttgagtggcttactgctggaaagcatcatggtctacttcttccagagtatggaatgggatgttggaagtgattatgccatctttaaatctcaggacttctgaagaggtcctgcagtgcccttgtctccacctaaccagatacggtcagctttgcctctccatggaataagtgaagactttccaaaaactccagtttgcagtgcttactttttccgttgacctccgagtgctcagcttaacacctacagcagtcacgtgcccaagaacttctgacattgccccagggtcagatcttttgtttctacttttcataagtgcatctgcttgtctgacaatcaattataatttatagttaggaaaataaggtcacatatcttgaatcacttgaaagccattaccctgtattgtattatcttatgtttatacttatctatgtctgtctggtattacaatttcatgtgtttatgcctcactctcccagcctgttcagaagtctggtgctgggagaggcatgccttgggttccttgtatccaccttaactcagggcctgccctagtgtcatgtcagttggattttcagcagaatgtggcattctaaatacatcctttattatcacattttattcttcttcactatctgtggcatgaccagctgtatctgaaagagaaaagacatgaaatataaaccaacctcctcatttctgttgagtaaaatgaagcaaagattggaaacactttctgaaaaagaaagcaatgataatagcggtggatacccacccccacaaatgcacccaagagacaagccatttacatacagatattcacagtcacacatagaaacacccacatggacacaaggaatgttgctgcagagactgaatgacatgcaacaggtgaaggtttatacgttatacacaaggccaggtaagcgctcataattcacacataataaaacatctaggtttcattcctttgacatgtttatatctttttaatttaaatgttgttactggcttaaaatattttgtgttcttacaatagaaacgcttttaataaagtctttcagaataaacca

SEQ ID NO: 684625 - DNA, 172 bp, Homo sapiens
  misc_feature (7)..(7): n is a, c, g, or t
  misc_feature (83)..(83): n is a, c, g, or t
  misc_feature (125)..(125): n is a, c, g, or t
  misc_feature (170)..(170): n is a, c, g, or t
gaggggngggggggggcggagggggggcgggcggcgggggggggcgcgaagggcgggcggggggggaacacaagaaagacacnaggaaaaagagcgggggcggcaaagagagagagggggggagnggaggggggggggggggaggagcgagggcgcgggggggggcgggngg

SEQ ID NO: 684626 - DNA, 1286 bp, Homo sapiens
cactatgcgtctgacgttttacccttcacagaatctttagttctggactgcagttgagtggaaatgggcaacggcgggcggagcggcctgcagcaggggaaggggaacgtggatggggtggcagcgactcctactgctgcctcggcctcctgccagtacaggtgcatcgaatgcaaccaggaggccaaagagttgtaccgagactataaccacggtgtgctgaagataaccatctgtaaatcctgccagaaacctgtagacaaatatatcgagtatgatcctgttatcatcttgattaatgctatattgtgcaaagctcaggcctacagacatattcttttcaatactcaaataaatatccatggaaaactctgcatattttgtttgctttgtgaagcatacctgaggtggtggcagcttcaagattccaaccagaatactgcccctgatgacttgatcagatatgctaaggaatgggatttctatagaatgtttgcgattgctgctttagaacaaactgcctattttattggcatttttaccttcctgtgggtagaacggcccatgacggcaaaaaaaaagcccaacttcattttgctgctgaaagcattattattatctagctacggcctcaaactcattaaagtatttgttcttacatcaaattttcaggcaattagagtgaccctaaacatcaaccgtaagctctccttcttggccgtgttgagtggcttactgctggaaagcatcatggtctacttcttccagagtatggaatgggatgttggaagtgattatgccatctttaaatctcaggacttctgaagagttttattcttcttcactatctgtggcatgaccagctgtatctgaaagagaaaagacatgaaatataaaccaacctcctcatttctgttgagtaaaatgaagcaaagattggaaacactttctgaaaaagaaagcaatgataatagcggtggatacccacccccacaaatgcacccaagagacaagccatttacatacagatattcacagtcacacatagaaacacccacatggacacaaggaatgttgctgcagagactgaatgacatgcaacaggtgaaggtttatacgttatacacaaggccaggtaagcgctcataattcacacataataaaacatctaggtttcattcctttgacatgtttatatctttttaatttaaatgttgttactggcttaaaatattttgtgttcttacaatagaaacgcttttaataaagtctttcagaataaacca

SEQ ID NO: 684627 - DNA, 306 bp, Homo sapiens
cccctttggatttttttgggccccccaaaaaaacccggaattttagtttcccccccgccgggggggtgggggccaaagaaaaaattttaaaatagaaaggtggtttttaattttttttcccggggaggcgggttcccgccccttttaaattgggcaaagttttttatggaatttccggggcaaggttttgggggcgggttaaagggggggaattcccccccccctttttaaaaacaaaacccggggttttttctgggcccccgttttaaaggctataaaaaagggcctttgccttttttttgttta

SEQ ID NO: 684628 - DNA, 1384 bp, Homo sapiens
cactatgcgtctgacgttttacccttcacagaatctttagttctggactgcagttgagtggaaatgggcaacggcgggcggagcggcctgcagcaggggaaggggaacgtggatggggtggcagcgactcctactgctgcctcggcctcctgccagtacaggtgcatcgaatgcaaccaggaggccaaagagttgtaccgagactataaccacggtgtgctgaagataaccatctgtaaatcctgccagaaacctgtagacaaatatatcgagtatgatcctgttatcatcttgattaatgctatattgtgcaaagctcaggcctacagacatattcttttcaatactcaaataaatatccatggtcaagattccaaccagaatactgcccctgatgacttgatcagatatgctaaggaatgggatttctatagaatgtttgcgattgctgctttaggctggagtgcagtggcacagtcacagctcactgcagccctgaactcctgggctcaagcaatcctcctgcctcggccccccaggtagctggaaccacagaacaaactgcctattttattggcatttttaccttcctgtgggtagaacggcccatgacggcaaaaaaaaagcccaacttcattttgctgctgaaagcattattattatctagctacggaaaactcttgctgattccagctgtcatttgggaacatgactacacatctgtgtgcctcaaactcattaaagtatttgttcttacatcaaattttcaggcaattagagtgaccctaaacatcaaccgtaagctctccttcttggccgtgttgagtggcttactgctggaaagcatcatggtctacttcttccagagtatggaatgggatgttggaagtgattatgccatctttaaatctcaggacttctgaagagttttattcttcttcactatctgtggcatgaccagctgtatctgaaagagaaaagacatgaaatataaaccaacctcctcatttctgttgagtaaaatgaagcaaagattggaaacactttctgaaaaagaaagcaatgataatagcggtggatacccacccccacaaatgcacccaagagacaagccatttacatacagatattcacagtcacacatagaaacacccacatggacacaaggaatgttgctgcagagactgaatgacatgcaacaggtgaaggtttatacgttatacacaaggccaggtaagcgctcataattcacacataataaaacatctaggtttcattcctttgacatgtttatatctttttaatttaaatgttgttactggcttaaaatattttgtgttcttacaatagaaacgcttttaataaagtctttcagaataaacca

SEQ ID NO: 684629 - DNA, 407 bp, Homo sapiens
tgcacttttacactctgaaaccactgatactactagaagcaaggagacagcccaaccagcccgtgacataagacagagcaaatattcttgtgtaagtacacaccagcacaggcaaccagagcaaaaatagacaattgggattacataatgctaaaaagcttctgcaccacacaggaaacaacaaactgaatagacaaaccacagatagagagaaaatctttgcaatctaactgacaagggactaataacctgaatatataaagaactcaaacaactaaatagcaaagaaacaaataatttcatttctaaaaatgggcaaaaaattgggacaaacatttttcaaaaagaagacatacaaatggcctacagttatattttttaaatgtttgacattgctaatcatcaga

SEQ ID NO: 684630 - DNA, 111 bp, Homo sapiens
gccatcactattgtctggagtggtgcaggccctgcgagccgcctgttgcccagcctgggccccaggaccaccgagccccctgacccacacgcagtctgcctgagtgaggcg

SEQ ID NO: 684631 - DNA, 407 bp, Homo sapiens
tgcggcatccgtaggaaggtccaaaagatacgtccttatccctcttaataagtacctttaaaattcggtcatgggccagtaagtctgagatgtatcttcatttttctcttctaaaaataattccattttcaggaggaaaaaatatgattgattccggcttcccagttttccctcggtcaccctgtgtaaattggtccggattttccatttatttatggggggggctggcagttaaaaaataaagtagcgggccagggaagtgcacgcctgagtcccaggctagtgggaaagcggaggctagaggatcactggagccccagatttcaagcacagccggggcaccacagcaagcccctgtctccaaaccaaaccaaacaaaacccggaagggggccaataataaatatt

SEQ ID NO: 684632 - DNA, 240 bp, Homo sapiens
  misc_feature (223)..(223): n is a, c, g, or t
tggtgagctcggaatgctgtacatgattctagttttggcgaatacgttattttttcatataaacagtctcctaattacaggccaactatttcatatggtattccaagctttgtgcgtggcatatacacaacaaccatgtttatatactttaagtttctggggtcatttgacgatattttccatagataattttgacttatttgggaatcctcacgtttatgtngtaaacatttacacacg

SEQ ID NO: 684633 - DNA, 282 bp, Homo sapiens
tgtgactggcgactgatgctacatcagagagtaaaagttgagtgttgggagaacgacaggatcgaacaactcgattctgttgggggagtctgacgagactttacaatgatggtgttagggtcgacggtcttacaggatcaataggatcctttgttgtggtcgtgtttgctgacagagtgtcactccatcgcccatgggtgtaagtgtcatcggcatggtagtcagctcatgagaagctctgtgtccggatgtcggtggtccagaaaggttaccgtgcacgaa

SEQ ID NO: 684634 - DNA, 256 bp, Homo sapiens
cccaaaggggggaatttttaaaataaataatcccccagtttttggcctttttttaaattaatttttccttttttttaaaataaaataccccaaaaagggtaaagttccaaaaaatgtcgttgaagaataatattttaaaactgtggaaaaaaaggaaaaagacccgtccccaaattttaagattaatatgaaggtcataatttaacataaaagaatattttttatgggtttgtcataaataaataatgaaacccta

SEQ ID NO: 684635 - DNA, 264 bp, Homo sapiens
cgcatcacatttgcatggtaagggcagggcaccgttgcccctcgctctgttcatgtacaaggcatgcgtagcgcatgggcagggcgcatgcaggcctcaagcatgcatggcgggccaggcatcagttccagcacaggttgcgtcatattccgtgcagacgtcttgcagcatcgttcagtcattcagattcagtctttgctctgtgcagtgcttcaggcacacacagggccatcaccaggcacctcaggcacagccagcatcaca

SEQ ID NO: 684636 - DNA, 414 bp, Homo sapiens
  misc_feature (40)..(40): n is a, c, g, or t
  misc_feature (46)..(46): n is a, c, g, or t
gataccgataatgtattaatgaaactggagaactagctantttaanacgcgaactctagaggaccgctctgaaaagcaaatattcaacccctaagtgttttaataagtctacagtttaatatattaggttgttaaaaggaggctgtaattatgaagaaacccatagccaatcctagcctagcacctcatagcaatcgtgagagtgaaggaaaatattgttctgccttgctaagttcaaagacaacgccacctgtcaatagagtggtacctggccaacaatcagcagaattaatcatgcaggcacaggccttagagacatgaggcatggcaaggtggggatattaggatatacacaagaggaaacacacacacaaacaaagcctttgttcacaaagcagacgaccagcttgcaga

SEQ ID NO: 684637 - DNA, 197 bp, Homo sapiens
agaaggctggtaggggcatccgagatcattaaaacgggctgacccgataacaataggtacgaagaatataaaatgtagaataagagaatacaaacaaatttcctttttgaagtacttttaagaaaaagaagcagggtcgctggaagtgtggttctttgtgcctcccacgggtcgcaaatcctcatggtttgggttgg

SEQ ID NO: 684638 - DNA, 1332 bp, Homo sapiens
ggcgagaccgtggccaagacaggtgcatcccagggccccacgaccccagtggaccgctctgtcagggacgtagatccggccctggaaactcaatgaccaatgcacgcagaatcctgaacgcatgcggcagccaggcgtccatgaaggctgcatcttcctgctagtcggtgagtggccatcgcacgcacgtcgtcatctgcaccgggaagtcgccgagccgtcagtccagggatcatgcagcaaggggcgcccgtatcggtccgagtggttgaccccgtctgccagagcataggggccacacgaattgccgcgcaatgcacgggcactgctagacgcgaactcccaatgggagcgccaaggactccgcagatggcacttactcctgtgcaatatggggccacctctaggagcgcttgtgcgccaacttcacaggactaggaaacgcgctaatctcccggaatggacaaactccaggacgtagacagcgttggacccatatgtgccgtccccaatgaggtggacctgtgggggccgacaatagcttagccgctgatgaagcccgaaatatacgcgctagtggacatagcgggcaaaggccccaatttccaatttgccttgttatcgcacaacacatagcttggcaattgccgatccagtgggcgttaccttactgcaggcacccccaagccaatgtgcaagcatgtgggtgactacgaaggatccagggctcgcgtttgaccctagcttcccacgttggcccccttaacaacgtggaccccaaggtcatgctaacctcaacctcttaatggaaatatcaaaggtcgggcccgcgtgtgtacacatggggcggttgggtcgcccaatgaggcacggttctccggacctgacgtggtacacgcatcggcctccgcggggccacagggcggtcccgcaaaaggaaccctttcggcaacacatacaggggccacatcaattcaaagaactgtagcccttggctcttgcttttgtgtccccttagactgagttgctattaccattgggaggactaaatcgaaaagcaaagaatggtttccaagcttggtgggcccattttggtcgaagaccccctgggggagaccattcaccaacaagggtcacagggtcgccaaccagcgccccatatttttgtagccagaaaactggagatgatgtgtggtgtcacccacccaccatcgtgtttagctatccgcgccacacacacgcagtcgagtcagggcagagcacaacatactattgactcgagtcaatcagctggtgcgtgcgctgatgccccaccactaatcatacaagcga

SEQ ID NO: 684639 - DNA, 688 bp, Homo sapiens
cgtgggttgggttgacattagggatataaaatctaccgcagggttatgcgtaagagaatgttttcatgtccttagccaagccttgtgtttctatacgtcataggttggtcaattgcgttcatgaggtcagtgatacgttcgcagtgcttagctaatgggtgttgatcttagacgcgtccttgatgggtgcccggttctagtcgtacgaagcatgttcatttttcgactctctggcacgagttagttcgtagtgtaagcgacatgatcattttgagactatcagctaactggcaaaaggatttagagggtgctattggccatttgatcgctgacctgtgttacgatcttgggcacacagaatactcctggctaggtaggttagtcgcctccgcctatcagtctggccactgttttcctacatagctggcagtgctctgtcagctgctcatagtgagcacgacgtgtttccggcctgtgatcggtggctctgcacaccgggttgtcaccagtcatcttggtcacctcttggtatactcgccgctccagcacatcatgaatggagtcctcctctaagagtcggccttggcgaatgcaattctctgctttgttgaatctaacagatctcgtcaccgtctgctcagccttgctgaggtcacagtcagcatagatgataaggggtgacttagcg

SEQ ID NO: 684640 - DNA, 133 bp, Homo sapiens
atgtggagaagagtgtatcccagctccagcaaacagatggacatattcgccttatctttgtttttattttatctgggcccccagcctattagatggtgcccaccctcatggagggtagattttcctcacctgg

SEQ ID NO: 684641 - DNA, 121 bp, Homo sapiens
tctctctgtgtggcttactgagtcgaagtgctggagaagttcttgccacgccttatgggtggacaggcccccttttctgtggggtcgtccagccgtggtgtggaccagtgagcacagcctt

SEQ ID NO: 684642 - DNA, 124 bp, Homo sapiens
tcctcggctagataggctgttcacctgccggtggtctgaggagtgcccacctatgctagacgccacacagacagcagcagcagcaggtggcagcctgtgagggccgggcctttgacaacgagca

SEQ ID NO: 684643 - DNA, 135 bp, Homo sapiens
aagaaaaccccttaaatgaaaaattcctaatgaacccggggggccgggtttgggcggcccccataaaaaacccgaaccccctaagggcctttatttttggtccccgtaaaatttccaatttttggggttttttta

SEQ ID NO: 684644 - DNA, 286 bp, Homo sapiens
taggctggagatgcggctccagtgtttggtcactgcaacctccgccccctgggttcaagcgattctcctgcctcagacctacccaagtagctgggatatacaggcatgcactaccacacccagctaattattgtatttctagatagagatggggtttctccatgttaggtcaggctggtctcgaaactcccgcacctcagctaatctagcccgccattggacctcccaaacttgctggcgattacacggtgtgagccacacgcacctggacctaattaagtcattt

SEQ ID NO: 684645 - DNA, 656 bp, Homo sapiens
tggcctccccacttctggattaccaaataaaccgtcctcagacgtcgctgagctccccaaccccagcacaagccactgatggcgatgggccctcagcaagcccccccagcagcagcagcagcgagcagcaaccacaggtgcagcagcctcccccgccgccagcagcccagcgcgccacaccacacgcacagctcccactgcgacagcagcagcaacgcaagggaccaagacagtgagacagtcaaggagaaggcaaaggcacacaaagggaaaggggaagccctgccgtgtcccgcaagaaggagacaggagaggcccccacggcaactgcagccacgatctcagccccggtgaccaccatggagtatgcggtagaccctgcacagctgcaggccctgcaggccgcgtggacttcggagcccaacagcattgctcacaagccagttccttccttacttcgtacccaggcttattcttcctgatgatgcgtcccacagatccctggcgcccctgcagagcgggataccctgcgaggctatgtaatggcatggaaaggccttgttccgcctacagccctgcactgtcgcaggcctgatggaggcatgtccccaggctccctactgcagcagtaccagccatagcagcagaaagactgc

SEQ ID NO: 684646 - DNA, 1116 bp, Homo sapiens
  misc_feature (230)..(230): n is a, c, g, or t
cggtttaaagggcccgcgcgttggcgccccctcggcccgggcatgctgctatccagtgccgctgttggctcgggctcctcggcctggtcgtcgccgaggcctgccgtcgtacttcaaggagtcagtttctggagcggagacgggtggagttcccgctggatcgaatccagagacacaagtcagattattgggcaaagtatcgttcgtcagttccggcaagattctacggntgagcgaggagagaagataagggtattgcagtacaagccaggatgcacgcttgtgtatgctctgtcggccagtttcgagcctttcagcgaagcaaaggccagacgctggggggtgcagttcacggtgaaacatgaggcagaacatcgactgtgggggcggctatgtgaaggctgtatcctaatagtttggaccagacagagcatgcacggagactcagaagtacaacatcatgttaggtcccgagcatcggtggccctggcagcaagacggttcatgtcatcttcaatctacaagggcaagaacgtgcggatcaacgaggacatccgtagggaggatgatgagtttgaatgaccgtgtacacaactgatggtgcggcgagagagagcgtatgaggtgaagattgaggagaggcaggtggagtcgggtcgtgggaagacgactgggaactacctgccagccaagaagctaacggatccggatgcgtcaaaagcggaaggaccggactgaacggggcaagaaccgggagtcccagagatcacacccgaggacgggaaagggccgggaaatccggagccttatgctagaagcccgagaatgggcctagaaaagtgggggcagaggggacccccaggggttgacacctcggtgtcaaagggtgcgtgtggaaacccgcggagcatcaacacaattaaagaggggtagatgtaccagaattgtacccaggattatacagacagagacattgacgaaaatagtgcagcggcgcagtcgagaagtaggacgtaagtacgcacacaaaacacgagctcggcagaaggagccagacggaacacatgcgagaagataagcagtgaagtggatcatggtcggcggtcgctcctgagc

SEQ ID NO: 684647 - DNA, 215 bp, Homo sapiens
acagcgggcattcgcgcggcggcgcggcatctggggctgtcgcaggcggcggtgacccgcgcgctgcgcgaactggagcaggaacaggcgctgccgctgctgatccgcacgccgaccgggctgggctttaccccctacggcaaaaccttgctggcgcacgcccggctggtgctgaaccagctggagcaggcgcagggcgaaatggcggcgctgcg

SEQ ID NO: 684648 - DNA, 1263 bp, Homo sapiens
gaccgaacgagaaattctaggctatatacaagcgttgggggcttcgcgtagttgtactatagcctaggccccaagcgttgtaggcccctacgggctactacaactcgcttcgggtgacggccataaaaactctgtcaggctaaggagccccttaataacccagtccacatctatcctagcgaccgcatcgtccaggcattcgcccctccaagatcgcgtaagaaagaaaaaagaaggagaacacaaagaaaaaataagaaaagaaagaataacagacaatgataacacatacaaaagagagaacagagacatagacgagctgcgttgtattgtgtgtctataggatactaactctaattgcaatggccggcaagaggcgcaatcgctgcagtgggcaacccgtgggaaagaacgaaagcgcgcgaggcgatactgagaagaaaatactagacatagcgcgtcaataatctctgcgaggggaacatagctaggcggctataagatggatgcacgccagaggcgagtgaacctttcacctagaagaactgcaagagagatccaataggtacacgctaggggcgcgagagtacaacgggtggctcaagggacataggtcttggcaccccggatagagcatagggttggccacgaattttggcgcaccgcaaatttggctgaaaacagttcccaagcatggggtgggccgtctaaaggtcccgccgaggaagaacgaacttagggtggtacacttactggagggacacacccgtgaaaggcaaagaggaaactctcttgacaccatattataagattgacaacaaacagggagccgttctgcataaaggaggttgaattacagatcacgccaattgttaacaccgataatttcctttcaccaaatggaggggagacaaaccccacgattctagggacacaacatatcccacccttggggcagtcgtatgggacacttgggttcggacaaacggggacgtatagggcacgatatccaagagtagggaaaaccagtgggggaaacgggacacccaaaataatcgtcttggggatgggaaaggaccccccataggtgaggataacaatagacccaccaaacagaggcactatttgatctttgcgaatcatccacaaactttggcctgttcaaacaagccaaagtttcatgtttcacgcaccgccgccagtattgtacgtacacccgtttatctggaggggaggcacatatggggctagctaaatatgccc

SEQ ID NO: 684649 - DNA, 148 bp, Homo sapiens
cggccgccacagcttgctcgagtagctgggactacagtgcgccgtgccatcacgcccagtttattttttataatttagtatgtaaagacgggttttcaccgagtttagcctggatgggtctcgatctccatatctcgtcatgatccag

SEQ ID NO: 684650 - DNA, 113 bp, Homo sapiens
tttaacgacaaggcacacatataccccattatggcccatattagttattatctgaacaccatcagcctacacattcaaccaatagccctggacgtacgcctaagcgctgaaca

SEQ ID NO: 684651 - DNA, 274 bp, Homo sapiens
cattatggccgtttgcagtggctcatgcctgtaatctcagcactctgggagcctgaggcaggagggagggtcgcttgaggccaggagttcatgaccggcctgggcaacatggtgaaactctgtctctgccaaaaatacgattagctgggcataagcccagctacctggagggtggaggtgggaggatcacttgagcccgcgaggtcggggctgcagtgagccatgatctcaccactggactccagcctgggggacagaatgagaccccatctct

SEQ ID NO: 684652 - DNA, 208 bp, Homo sapiens
  misc_feature (64)..(64): n is a, c, g, or t
  misc_feature (66)..(66): n is a, c, g, or t
  misc_feature (92)..(92): n is a, c, g, or t
caactctgtagctctctaatgtttctattttgaatatgacagttagaaatgtcactaaaatatntncattacaaatttgactataaatttgnattgtatttggtaaaactttcaaaatatttctggatttaataataaatttggggtgggggaaataatgttaaaagaaaagtagagcttgagtttatacttaaaatgaatgaatgta

SEQ ID NO: 684653 - DNA, 303 bp, Homo sapiens
gggggggcccccccgtccttttcccccccccagggtttttttcctgacccaggggttaggcaggccctgtggttttagggctgcaagggctcccgtgttaactccggaggggggggggttaaaaatggggccccgggctggggccccccccgggggcccaactccccctccctccgttctcccccacagggggttaggggtgcagccccccggaggtcctttttggtttccccccctgtgggccccctgccctttggctgggcctttcccaaggcccaaaagttaaaatgttttgggttttta

SEQ ID NO: 684654 - DNA, 118 bp, Homo sapiens
cggtccggttatgtattctgaaccgatgggttagagctagccctacggtaacatcattctgaaccgatgggttggtgctagccgtatggtaacattctgaaccaatgggttggtgcta

SEQ ID NO: 684655 - DNA, 465 bp, Homo sapiens
  misc_feature (3)..(3): n is a, c, g, or t
  misc_feature (218)..(218): n is a, c, g, or t
  misc_feature (276)..(276): n is a, c, g, or t
  misc_feature (335)..(335): n is a, c, g, or t
  misc_feature (354)..(354): n is a, c, g, or t
  misc_feature (383)..(383): n is a, c, g, or t
  misc_feature (389)..(389): n is a, c, g, or t
  misc_feature (417)..(417): n is a, c, g, or t
  misc_feature (462)..(462): n is a, c, g, or t
ctntaatttgggagtctgagccaggagatccctcaagtccaggagctgggggctgcagtaagttatgattttgccactgcactccaagcctgggcacagagtgagatcctgtttcttaaaaaagccagtcatgggtggctcatgcttttgtaatatggggtactttgtgaggctgaggctggtggcttgcttgagcccagaagttcgagaccagggtnggcaacgtggcaaaactccgtctctaccaaaattaacaaaaacgagctgggtgtggtnttggcgtgcctgttagtctcagctgaggctaaaggtgggaagattgcttagaacacagngaggttgaggcagcagggngccaagactgtccactgcatcccagcctngagttnacagagtgaggccttgtcttcaaagagnacctctgccaactttgaatgaaaaataccttaatttgtatttttntta

SEQ ID NO: 684656 - DNA, 569 bp, Homo sapiens
gactggtctgcagctcccactgctcaggccactgaatgggtaggagcaaccactgactggtcttaagctgttcttgcataggctcttaagcagcatggaaaaatggttgatggaaaataaacatcagtttctaaaaaaaaagcagaacaggatgttgaaaagaaaaaataaagccctcctggggacttggaatcagtcggcagtcatgctgggtctccacgtggtgtgtttcgtgggaacaactgggcctgggatggggcttcactgctgtgacttcctcctgccaggggatttggggctttcttgaaagacagtccaagccctggataatgctttactttctgtgttgaagcactgttggttgtttggttagtgactgatgtaaaacggttttcttgtggggaggttacagaggctgacttcagagtggacttgtgttttttctttttaaagaggcaaggttgggctggtgctcacagctgtaatcccagcactttgaggttggctgggagttcaagaccagcctggccaacatgtcagaactactaaaaataaagaaatcagccatg

SEQ ID NO: 684657 - DNA, 232 bp, Homo sapiens
tttatttatttccttaaaaaaattacttggggaattaattttagatttgattgcaaagagccctgtatagcagttggggccagcttttgggttgggttgggttgggttattgttaagagtttattgggtcaagactaacaaaaaactttgtgatgaaaatttttcaaaaaaaaagctacttttttcaaggaaaccctttaaaatattttatcaggcagagccctggcccgga

SEQ ID NO: 684658 - DNA, 1098 bp, Homo sapiens
  misc_feature (115)..(115): n is a, c, g, or t
  misc_feature (127)..(127): n is a, c, g, or t
  misc_feature (129)..(129): n is a, c, g, or t
  misc_feature (147)..(147): n is a, c, g, or t
  misc_feature (149)..(149): n is a, c, g, or t
  misc_feature (153)..(153): n is a, c, g, or t
  misc_feature (156)..(156): n is a, c, g, or t
  misc_feature (181)..(181): n is a, c, g, or t
  misc_feature (192)..(192): n is a, c, g, or t
gcttcctttccgctcggctgttatcctgcgcaggagccgcaggtccgtagcagcgcatgtgcgcccagccggaatggcatggtcttgaatgccccacttccacaatggacttggnagcggcgcgtgncnacgtggttcaaccagccngnccgnaanatccgcagacgtaaggcccggcaangccaaggcgcngccgcactcgtcccgcgccccgcgtcgggtcccatccggcccatcgtgcgctgccccacggttcggtaccacacgaaggtgcgcgccggccgcggcttcagcctggaggagctcagggtggccggcattcacaagaaggtggcccggaccatcggcatttctgtggatccgaggaggcggaacaagtccacggagtccctgcaggccaacgtgcagcggctgaaggagtaccgctccaaactcatcctcttccccaggaagccctcggcccccaagaagggagacagttctgctgaagaactgaaactggccacccagctgaccggaccggtcatgcccgtccggaacgtctataagaaggagaaagctcgagtcatcactgaggaagagaagaatttcaaagccttcgctagtctccgtatggcccgtgcccaacgcccggctcttcggcatacgggcaaaaagagccaaggaagccgcagaacaggatgttgaaaagaaaaaataaagccctcctggggacttggaatcagtcggcagtcatgctgggtctccacgtggtgtgtttcgtgggaacaactgggcctgggatggggcttcactgctgtgacttcctcctgccaggggatttggggctttcttgaaagacagtccaagccctggataatgctttactttctgtgttgaagcactgttggttgtttggttagtgactgatgtaaaacggttttcttgtggggaggttacagaggctgacttcagagtggacttgtgttttttctttttaaagaggcaaggttgggctggtgctcacagctgtaatcccagcactttgaggttggctgggagttcaagaccagcctggccaacatgtcagaactactaaaaataaagaaatcagccatg

SEQ ID NO: 684659 - DNA, 1665 bp, Homo sapiens
  misc_feature (115)..(115): n is a, c, g, or t
  misc_feature (127)..(127): n is a, c, g, or t
  misc_feature (129)..(129): n is a, c, g, or t
  misc_feature (147)..(147): n is a, c, g, or t
  misc_feature (149)..(149): n is a, c, g, or t
  misc_feature (153)..(153): n is a, c, g, or t
  misc_feature (156)..(156): n is a, c, g, or t
  misc_feature (181)..(181): n is a, c, g, or t
  misc_feature (192)..(192): n is a, c, g, or t
  misc_feature (1246)..(1246): n is a, c, g, or t
  misc_feature (1369)..(1369): n is a, c, g, or t
gcttcctttccgctcggctgttatcctgcgcaggagccgcaggtccgtagcagcgcatgtgcgcccagccggaatggcatggtcttgaatgccccacttccacaatggacttggnagcggcgcgtgncnacgtggttcaaccagccngnccgnaanatccgcagacgtaaggcccggcaangccaaggcgcngccgcactcgtcccgcgccccgcgtcgggtcccatccggcccatcgtgcgctgccccacggttcggtaccacacgaaggtgcgcgccggccgcggcttcagcctggaggagctcagggtggccggcattcacaagaaggtggcccggaccatcggcatttctgtggatccgaggaggcggaacaagtccacggagtccctgcaggccaacgtgcagcggctgaaggagtaccgctccaaactcatcctcttccccaggaagccctcggcccccaagaagggagacagttctgctgaagaactgaaactggccacccagctgaccggaccggtcatgcccgtccggaacgtctataagaaggagaaagctcgagtcatcactgaggaagagaagaatttcaaagccttcgctagtctccgtatggcccgtgcccaacgcccggctcttcggcatacgggcaaaaagagccaaggaagccgcagaacaggatgttgaaaagaaaaaataaagccctcctggggacttggaatcagtcggcagtcatgctgggtctccacgtggtgtgtttcgtgggaacaactgggcctgggatggggcttcactgctgtgacttcctcctgccaggggatttggggctttcttgaaagacagtccaagccctggataatgctttactttctgtgttgaagcactgttggttgtttggttagtgactgatgtaaaacggttttcttgtggggaggttacagaggctgacttcagagtggacttgtgttttttctttttaaagaggcaaggttgggctggtgctcacagctgtaatcccagcactttgaggttggctgggagttcaagaccagcctggccaacatgtcagaactactaaaaataaagaaatcagccatgcttggtgctgcacacttgtagttgcagctcctgggaggcagaggtgagggatcacttaacccaggaggcagaggctgcactgagccaggatcacgccactgcactctagcctgggcaacagtgagactgtctcaaaaaaaaaaaaaangagacggggtcttcggcacccaggctggagtacagtggccacaatcatggctcactgcagtcttgaactcagtggcctcaagcagtcctccctcagcctcccaagtagaggggttaataggcncgagaccgtgcacccaaccttagagtggcctttttataagcaaagcagtttctagttaatgtagacatctgggactgggggcgatcattctttaagctggtggtgcccggtaaccagggtcctctggctctgataacccttccttcagtgggctcttaacccagaacaccaggtatgagatggccctgccaagtgtcggcctctcctgttaacaaaactttctaaagccatgttcttgcttcatggaccagaggcgccaaaaaagtgcagggtgcctggtctgagctggatcccct

SEQ ID NO: 684660 - DNA, 2150 bp, Homo sapiens
  misc_feature (34)..(34): n is a, c, g, or t
gtttctttttactccccctcgtgtgggtgttgtngtgtctttctctatctagtgtgcgggtgtgcctttgttatgatgatctggtcgctgattgtattgatgtatctttatgtttcggttcgtggggtctcccaccatacgctggtttgtgtgtgtctctttgtgtgatcgtgcttcctatgtgttgttgatggaatgtatgatctgttgttgtgcggctgcggtctcactacatctttctgttgggatctttttttgtttctttttgctcctacttcgtgtgggggttgttgtgtgtggtgtgattatagattgtttgtgttgggtggggggcttgatgttgtcttgctctcttcgtcagggtggcggtggtgtatctctacccctcctctgtgttgtgtttcagtgcgcggtcttggtttgtgtgggttctcaatacgtgttgattctaccttctgtggggtggtgttctttcttctcttcttttttttttgtttcctcgggttgttttcttttggtgtgttatatgtttgtgttagttgtcttttcttcggctggtgtgttttcgtggtggtcgtcggctctatgtttgtttgttgctctggtggtcgactcttagtgtgttttggttcgttgttctctatgttgtgtctccttccctttcattgttttgtttttgtttctctcttggtgttgtggttgtggtggatgcgctctcctcgttgttggtgccgtgcgttgtggtgttttagtggggtcctcttctgtgttgggtggggtggttttgcttcgtttgtcttcgtctcctgggtgttggttctggtgtctcactactgtgttgtgttgggtgtgttctgttgactcacgtctgtgttgtttttgttgttctttcttctcctcgtttgtttgttgtgttgttgttcttgtgggtggtggtggtagttccgctctgttgatgatgttgtagggtgcgccctctccgtggggttttgtttggtgcgggctcaccctattctgtttcttcgtgtgcggcttctcttttctgtgtgtgctagggggtgtggtcgtctgcgctcctcttctgctgctctgctgcgcgtggcgctacggctgggtgttggttctggtcggtgtgtgggtgcgacactgacatttgtctgttgcttctggggtggtgagtcttcccttctgctcttcttctcttctgtggttggggactctccccccagccgttggtttgttgtgacaccactgtggtgcttcttctgttcgtctgcctgctgttgtgttgttgtctccctaccatggttttgttgttgatgatatattagtttatgtcgtcccccatgctgttttggttttattagtgttttgttgattggagttcgtagcgctgccggctgctgctgttgttgatgggaggggcggcttcttccctcgtctccgtccttattattgtttgttgcgtcttctctcccgatggctactgcgcccacgcacgtctgtgttgtataaggagtagattggtgtttgttgtgcatacacctctctctctcgctgccttccgctcctcatctcatcatgtttgttcatctcagcgcgcgcttcggattgggaggagagagtagagagatagagtgcacttcaatcactcataaatgatagtatcacatcattttgttttttcgcagagagtgaatttgtttatgatctcaccttcataagtgtctctcgtcctctctttgtactgatggtgtggcttcgtgcgcgaggaggtgtcgggttattctctttggagagtgatatagatgaacacacactttgtgcgtgatttgagcgtgagagagggaggtactccctccttatgactccctctaaatgagtccacaataaaatgaaaatgtgaattgatgttctcttatgtgtgtgcgctgtatgtatataatctctctctctctcttagatatagataatggagcaccccgtgtattatatagatatataagtcgctcccgccgatctgtctatgaatattataatattaataaataaaacaataataaataaataagaagagaatatataataaatcgctttgagggagatgatcctctgggagccgagaaatgagatggtaattgtctatcccc

SEQ ID NO: 684661 - DNA, 1118 bp, Homo sapiens
  misc_feature (115)..(115): n is a, c, g, or t
  misc_feature (127)..(127): n is a, c, g, or t
  misc_feature (129)..(129): n is a, c, g, or t
  misc_feature (147)..(147): n is a, c, g, or t
  misc_feature (149)..(149): n is a, c, g, or t
  misc_feature (153)..(153): n is a, c, g, or t
  misc_feature (156)..(156): n is a, c, g, or t
  misc_feature (181)..(181): n is a, c, g, or t
  misc_feature (192)..(192): n is a, c, g, or t
gcttcctttccgctcggctgttatcctgcgcaggagccgcaggtccgtagcagcgcatgtgcgcccagccggaatggcatggtcttgaatgccccacttccacaatggacttggnagcggcgcgtgncnacgtggttcaaccagccngnccgnaanatccgcagacgtaaggcccggcaangccaaggcgcngccgcactcgtcccgcgccccgcgtcgggtcccatccggcccatcgtgcgctgccccacggttcggtaccacacgaaggtgcgcgccggccgcggcttcagcctggaggagctcagggtggccggcattcacaagaaggtggcccggaccatcggcatttctgtggatccgaggaggcggaacaagtccacggagtccctgcaggccaacgtgcagcggctgaaggagtaccgctccaaactcatcctcttccccaggaagccctcggcccccaagaagggagacagttctgctgaagaactgaaactggccacccagctgaccggaccggtcatgcccgtccggaacgtctataagaaggagaaagctcgagtcatcactgaggaagagaagaatttcaaagccttcgctagtctccgtatggcccgtgcccaacgcccggctcttcggcatacgggcaaaaagagccaaggaagccgcagaacaggatgttgaaaagaaaaaataaagccctcctggggacttggaatcagtcggcagtcatgctgggtctccacgtggtgtgtttcgtgggaacaactgggcctgggatggggcttcactgctgtgacttcctcctgccaggggatttggggctttcttgaaagacagtccaagccctggataatgctttactttctgtgttgaagcactgttggttgtttggttagtgactgatgtaaaacggttttcttgtggggaggttacagaggctgacttcagagtggacttgtgttttttctttttaaagaggcaaggttgggctggtgctcacagctgtaatcccagcactttgaggttggctgggagttcaagaccagcctggccaacatgtcagaactactaaaaataaagaaatcagccatgaaaaaaaaaaaaagtcgacg

SEQ ID NO: 684662 - DNA, 408 bp, Homo sapiens
  misc_feature (354)..(354): n is a, c, g, or t
ggcagcttcaaaatatgactcaggaaagaatgtgacatggtaaacttagaaatcttagtaaaagtggctcagggctgagcacggtggctcacgcctgtaatccccgcactttgggaggccaaggcaggcagatcacaaggtcaggagatcgagaccatcctggctaacacggtgaaaccccatctctactaaaaatatgaaaattagccaggcatggtggcacgtgcctgtaatcccagctacttggcaggatgaggcaggagaatcttttgaatctgggaggcggaggttgcaatgagctgagatggtgccactgcactgtagcctgggtgacagagccggactccgtctcanaacaaacaaacgaaaactgaaggcagatctcatttgctggagtgttttgaatga

SEQ ID NO: 684663 - DNA, 417 bp, Homo sapiens
aaaacgttaccacctgcacaactggttttctacaacttgagccattaagggtctatgtctttggattgtgccgcaggatccactatgggccgactggacggcaaagttattgtcctgacagcctgccgctcaagggattggacgggcatccgcattagcttttgcaagagaaggagccaaagtcatagccacagatatcaacgagtccaaactccaggagctggaaagttaccgaggtattcaaactcgagtccttgatgtcacaaagaagagacagattgatcagtttgcctcagaaatccgagagaattgatgttctctttaatgttgctggttttgtccaccacggaaccatcctggattgcgaggaaaaagactgggacttctcaatgaatctcaacgtccgcagcatgttcc

SEQ ID NO: 684664 - DNA, 887 bp, Homo sapiens
cttatatcatacaattcttctatactcttgaccccttgtacgcattaccccatggttccccacaccgcctatttgtgaaccccatttttaccaccataatttctgtgccgccccaaattgccgttcccctcccccgggccctttgccccaccgcagctttttcaaggaccccatcctttcggaaccccccagaatgttctttcttcttaacaaacaggttttatcccgcctttctttagacattacccacaggtgtactaaaacaattctccccgcctcaatgtttttacaagatcttttaaatcccctaccagtttttaaccaccaaatattgatctcttccaagttctccttaatcaccgacaacatattaaaaaggttttctataaacacctggccggagtcacaatcaaaccttttcctcaagggcatgaacaaatctatttgttaacacaccatcttggactaaacgtagtcccctgcgccccccctttaaatccacacaatagggccctcccttttagaagtcaaacagtaacggcgatctttcaccgctttaagaaatcatattataaaatcctcttacgtgcattcaacataaatttctttaagatccggcattttttacatacaagaagaataataccgccagagggagaattaacagaccccttgcatttccccctacccccaggagtaatatgttctccccattttaacaccctgtttatagcccctaatttctatatacaccccaccaagtccaaattctgaaaacaattataatttgcggaatctgtctaagaatccaaaccacacttgcgacagaaaaaatacaaactgaagggggaaacgggaaaccaaaatcccgggacggcccacataac

SEQ ID NO: 684665 - DNA, 130 bp, Homo sapiens
ccccgctgtatacactacttcaattgtacaatgctatagtatcaaaatgtttgggcaaaaaagactcttgaaaggaaccatgaagtttggacaaagatagaaatctgtaataaagccaatgaactccaac

SEQ ID NO: 684666 - DNA, 239 bp, Homo sapiens
aagaggggtcccgagcgcggatgctttaggattatgacagcgtggagcaggatggcgatgtacccggaccacaacgctctgttgaaggctggattctctctgtactcgagtgcatgaggagccaccgaagaagacatacacgacaaattcgcagattatggggaattaaaacattcatctcacctcgacaggcgacaggatatctgaggggtatactctagttgaatataacaacagga

SEQ ID NO: 684667 - DNA, 431 bp, Homo sapiens
  misc_feature (4)..(4): n is a, c, g, or t
  misc_feature (34)..(34): n is a, c, g, or t
  misc_feature (70)..(70): n is a, c, g, or t
  misc_feature (93)..(93): n is a, c, g, or t
  misc_feature (425)..(425): n is a, c, g, or t
  misc_feature (428)..(428): n is a, c, g, or t
gtgnggtggataataacactaaaaatgatatgtngcgttccaatttaaatgtggtatactagtttgcccnctgctggtgggtgaatgatattntagcgttatacgactggatgataatgataaaaattgaaagtataataattattaagggaatcatgccctcttgccgtctcggaagggcgcctgggccgtggctctctggcttatggatcgggaggagtgcgtgtcccggcggctcatctgcgagattcgggatgaggtacttgaccgggccctgggctatcctgatgtttcgggccccctcttgcccgcccggggcggattcatggccgcgcgggggcttttggagcgggtttttctatttttccagggcccgggatctccccccaccggctctttttcgaggggaaatcaccaaaatcatnccntca

SEQ ID NO: 684668 - DNA, 270 bp, Homo sapiens
aatgcagaagagcaagcagcaagagcaagcagcaagcagcaagagcaaacagcaaacagcaacaagcaacaagaaaagaaaagacaaagattgtttcccatgcctgcttaacacaacatccattcttcagccccatgagtcaaggcagtaattttaactcttcaagtcttcattatttaaacaaatatatttcttcaagacttatagctgcccataaatacatgcacttctctgcgtgggggtccctgagctctgaattctgtaatccca

SEQ ID NO: 684669 - DNA, 548 bp, Homo sapiens
  misc_feature (130)..(130): n is a, c, g, or t
gagcggtttcgccatgttggccaggctagtctcaaactcctgacctcaggtgatccacccacctcggctcccaaagcgctgggattacaggcgtgagccactgcgccccgccccctcaagtgttgattgnactttacatttctcttactgtttattgacaagtgtgaaatattatgagaaggaacgtgtgtgttctcacacgtgagtggtggccacagaggagtggactatacacatcgaaggaggaatgacctatcgcgcgagaaaacccctgtgggaaggatacactgaggacatatacaggagagcaccggggtcagcacaatcgtcatcggagagcccacgatgtaaagccatctagttgtagccagggacaacgataaaagataactgttggcacgcgcagaatattacgcacgactattccagacacagtgtcgcacagtacataggacaaacgagattgtatgacgaggggaaagaaaccatggggtggggatactagctgagctttgtatgacaagctaggcgatgaaaaacgcggagag

SEQ ID NO: 684670 - DNA, 728 bp, Homo sapiens
aagtggctgtacggttggaattttgggatcccggtcactgagctcgggtgacgcggtctgggtagctgggatcgagccttccgcgggatctgcctggcgatcccgaccatcctcctgctgtctctccgctccgtctagcccgcaaccctgccaaggctcctgtccttttcctccgtgtcctttgccatgcagttgtggtcggaccgggccttgagccgggcttcgccggtgtgcagtctttaaccatggcgtccctcttcaagaatgaaataactcgtggatgatgtaatacacaggaacagaatcgagagttacgcatggtacatgagagggctataatcagagatcgatgcatctttagagataacacaagaaagagacagctggaattagaaattacgaccaatggccaagattggtaaataagtgaagcttgcaacagattttagcctagacaacttgtgcatctacggaaacacgacagacgagaacttttgctgtaagttcaaaaagttacttctatgtctacatcaaacaatagtgatgaattcccaagagtgaagatggtctggatgcaatgtctaccacagggaaatagacaatgcatgctagttaacaagaagatggatccacaaaagacattacaaagcaatgcgagatatttccaagaaggaatacatgatgatggacagtgactgaagcaagatgatcaatgatacacttgatga

SEQ ID NO: 684671 - DNA, 852 bp, Homo sapiens
  misc_feature (212)..(212): n is a, c, g, or t
  misc_feature (229)..(229): n is a, c, g, or t
tccctgtcgccgcggaggggcgggggcaggacgcgcaactccggccggagctgtccggggtcgtgagccggccccgccttggtggcggcgccccctcgcggtccagaggcagacgcatcgggtgggctcgggtctccagcccggccgggagggaggggaccgggtctgcggagcggggactcggggcctcggcggggcgcgcaacacgcagngcggggcggccccgggngttgcgggggcctctgcgcggttgaccaggtctcccagaggcgttaggcgccgcccaatggccgagcccgttcagccagaccgcgggggcggcgaaggaacgcgggcggccaagctgtggagacgccgggtctggaagggccccggaggacgcgggcccccagcccggaagtttatgagatccgacatttatggaccacggcccaaggggggttcagcacgtccgtgggagttctaatgggacggggattcaggccaatccagaggggtttaaacgaaattgaaacagttacattcaggcaaacaccgagcacggagttgacccttaacgttgacggtccggtggcgaagcctaggtgggagcctgggttcgggtccttttaggtgagttctacccattaccatatcccttgttatttcaccttcttggagcggcaatttggttccacccgggggctttaagagtcgagattgtcctcatggaagatggagccgaaatgactggtgttgacgggcttcgaggggttttcttgtgccaaagaatccgacacctttggcctcaccgcctttaggcgagtggaactgcgggggacgggcacccggggggcacaggccggactgtaa

SEQ ID NO: 684672 - DNA, 203 bp, Homo sapiens
agtggagagagaacggcaagtggagctgggaaaggacttggtgactaaggcagaggctaaattcagtttcaatcagcctcctaaattatcacctactgtaaccacactaaatgtgcactatctgatacctggatacatccctgcctctgcttttgctcacactcttcagtcagcctagaactaccttcccaaacctttctctc

SEQ ID NO: 684673 - DNA, 640 bp, Homo sapiens
ctaggtgtcacgttctctgttcatttctcagcttgcccctgaagcgagtcatatgctaaccccatgtcaaacagggactaacagtactaatccatcagtcgtagtgaggtctacgagaaggaccgggactaagccaggctctcgggaaaattcaaacaacagttcctcttgggtcttcaatatagccccttctcagtctgtcatgggctgaagaaccactggacgcgtgtaaaccaagcacatgaggtataagtccacagcaccagagtgaaggcctagatggcaaaacacatgggctatgtgactccagtactgacttccagagctaaggaaggactgacttagtgagctgttccaagaccactgagctcatggttccctggtggctgggacctccatcatgaccggggcttgaagagggtactctgttcccgctgccacatttggaacagtatgacggttgcagcagaggccaaaaactaagtgatcagccccagagagtcgatggagggacactgacaaaccaatcacaaagttggtgccattagctcttagggaggagaggtggggcctgggcaaggacagcagctggagggtgaaacgcagacctggctctcagtagcggtagtgatccggtttg

SEQ ID NO: 684674 - DNA, 412 bp, Homo sapiens
  misc_feature (212)..(212): n is a, c, g, or t
  misc_feature (229)..(229): n is a, c, g, or t
tccctgtcgccgcggaggggcgggggcaggacgcgcaactccggccggagctgtccggggtcgtgagccggccccgccttggtggcggcgccccctcgcggtccagaggcagacgcatcgggtgggctcgggtctccagcccggccgggagggaggggaccgggtctgcggagcggggactcggggcctcggcggggcgcgcaacacgcagngcggggcggccccgggngttgcgggggcctctgcgcggttgaccaggtctcccagaggcgttaggcgccgcccaatggccgagcccgttcagccagaccgcggcgatgacaatgacgctgtggcccaatctgtggacacaccggactggaccgcctggatcgaggcctgctcccggcccgatatgtggttcatacaacgg

SEQ ID NO: 684675 - DNA, 410 bp, Homo sapiens
ggggggggggggggggtgggccccacatgtcaagtccaggggcggtttttttcccctttttccccgcggcctgaagagggggtccttgtttccaaagtcggcccaaaggggggtttttttggggttttcccttttagcccttcaggggtgggggggggggggaattttggggggggggggggggttttttttgggggccccccaaaggggggcccccccggggtttacccccccccctgggggtttttttttttttttaaagggggggggggggggggcgactaatgttggggcccgaaactatgggaaggggggtaaaattttttttttggcaaaccttttttgggggttttttggtttttttttttttttccccccattttaatttttaaaaaaaaaggcccccccga

SEQ ID NO: 684676 - DNA, 1206 bp, Homo sapiens
gtgcttccccttggtaaacccgtggcacccccgaactcccgggggaaagatgggcacatcccagaaaagcccactcacgggggaaggcccccaccaccggtgtgaagttgttgaaaaacgcccctgtccaaagacacaagaaaagggcctaagtgggctgtatacaccccgccccaacaaggagggtcccaaaaacggggttttcgggaaaaactttgggtggtgtcgcttttcctggaagaggtgggtttttcgcgtggggaaatgagcccacctttccgcgtctctgtgagggaaaaccttccaccgtggcttctacgtggggtgcctctttgggttggccaccccccctggtgtgtgtcgtcaaaataatgggctgcccacacttgggggaatgggctatataattggggagatttgggtaaaatgatttgggagacacccaattcttgagaaaggtggttgtgaaaagcttacccacaggaattttttggggaaaatttccacaccccaattcacggttttctcccacaattcttgggaccccccctttaaaagggagaggaaaatttttggagagcgccagaaagcctctgtggcccccctattgcgccgggtggaaaggcccaaatatcctttgcacaaatccctccgaaaaccacacacaggggggcgattatgggcgggttttccacgcacgggaccccacgttaagcctatatggccacagtgggccacgagaagagttttttaaattatgggaacaccacacaagccttatagccacggaggagggagagagtctctccgcagagataatgtgacacacgcggagaagctacacacggtgtaaccacacacagagtttttgtggaaactctcaccgccacaggacacacacagtgggtgggccacagggccctatagctcgctcaccacacaagagaagacacacaggtgtttaagaccacaaaaactcacacagtggtaatggggccacaaaatctctcgagggagccgtaatttgggagactaaattgtaaaaccacggtgtatttttagttttctgtttctgtggagaaagtggtaaaccacttcccacacacaaagggtgtttaaagtaaggtttttttttttgcaccccatgctgttgattgctaaaaggaaccgtctgatcgtgacgcctgaataaatgtctttttttta

SEQ ID NO: 684677 - DNA, 225 bp, Homo sapiens
ggcagtgaatggcctttttttaaaccctgcgtcaaacaatgggaaagggcagtgcccggtgccctggtgctcccaactgccctcctgctttgggcctgggccgagggccttttgtaggccatgttcctcgggcaactgccccgggccggaactgggccctccaacggccctggggggtgggtcctgcataactaaccccaacccataaaaggcttttattagtta

SEQ ID NO: 684678 - DNA, 174 bp, Homo sapiens
  misc_feature (31)..(31): n is a, c, g, or t
agcatggccaagctatagtttatggcccgcnattcgtgcaggacgggatcacaacttcttccgcaacatcggtgacgtcggcaacttcgccaacgacgtgtgcaactcaagccccacgctgcaggcgtcgacactgcccgcttgttgatgaacggcccaaaaatgtgtaaaata

SEQ ID NO: 684679 - DNA, 396 bp, Homo sapiens
tcggactgaagatgtcaggaactgtattaatttattacatcaagaacttaaatgtatttaaatgatctagagcgtgctagatgtgttaactttactcatttagataattatactatgattacagaagagaacgtccttgtcttcagaaaatgtaagtatttagaggttaaaggtaaacctctaatttggtttgccagtatttcagataactacacacacacacacacacacacacacacacggaatgataacacaaaaagtaaggtgtaagacaaggcatggtgactcacacctgtaattccaacactttgagaggcccaggcaggtgtatcacctaggtctggagtacgagaccagcctgcacaacatggtgaaacccctctttattaacgtaca

SEQ ID NO: 684680 - DNA, 284 bp, Homo sapiens
  misc_feature (27)..(27): n is a, c, g, or t
  misc_feature (88)..(88): n is a, c, g, or t
  misc_feature (228)..(228): n is a, c, g, or t
ataaaatataagaaaaagatcattttntggccagccacaatggttcatgcctgtaatcccagcattttgggaggccaaggcaggtggntcacttgaggtcaggagtttgacctgtctactaaaaatgcaaaaaatagccgggtatggtggtgagcacctgtaatctcagctatttgggaggctgacgcatgagaatcgcttgaacccaggaggcagaggtttgcagtnagccaagatcacaccattgcactctagtctgggcgacagaggaaacttccatcttc

SEQ ID NO: 684681 - DNA, 560 bp, Homo sapiens
catggttacccgccctccggagtatcgggatcgcctccccactcgtccccgggctgtcactggctgccgccttattcgcctgctgtggagcgccgctggctagtgtgtctgcgcgcacctcccggccgcgcaagattggcacagctggggaaggagtgaacatccagaggaatcgctggggctggggtggtgggttgagagccaggaaaacaggtggcgcagtgaaccaagaaacgtacgttgcgctggactaatgcgtggacgtcgggcaggatcgtgagccaaacaggcgaggtgtacaccaatgggcctgattcgagagtgaagccgcacctgatggacacacatcagcaacccgggaacacaggaagcttagatggcacagacgaagcctgggcgggccaaaacggttgccagagatgccgggtggctgtggacgcctgaggaacaaaagttgacaaaatgcaacctgaaacgactccccgggtgaacacaaataccgagcattaaaccttcagaataactgaggaagacacatcatagcacgataacaccacctc

SEQ ID NO: 684682 - DNA, 336 bp, Homo sapiens
aggtcgtcgtgaatactggggacccttctgccagatggtctaagtgtcagtctctttttttgggatgcggttgcttctaagtcatcttgcctcatggttgggcatgggttcaggatccctcatctccatcaagttctcttaattcctcgggtgtgtgtagtcttttagctcttacatttctctaagatcgcatatcttaaaacccgttcactcccgtacttctttcactgtttttttttttttgtttagtgggggcccattctccaaagcaccccaaggaattcccgggaaggggacctgggattataaactctctctctcggaaggtattgtgtg

SEQ ID NO: 684683 - DNA, 177 bp, Homo sapiens
cccagcaaagtgaggctcctgtaaaatactaccatactactcttgggtgatgtcatcagggtttctaggtccaaataggctaggtcttgtaaagttctatcctgatcaatgtatttctctttgatcttctaagttttcttcttcttatccctgtacgctgtcatcctcctctttcga

SEQ ID NO: 684684 - DNA, 309 bp, Homo sapiens
actagtgattaattcgcggcggtgggacgacccgatggactgttcttccgaggctgcggcgatctcctgcaccaggtcagaggtcttggcaatcgaaggcacaatctcatccagcaggttgcccgcccgttcagccaaggccacgctgttcttggccacttcactgatttcctgtgcggcaatctggctgcgctcggccagtttgcgcacttctgccgccaccaccgcgaaccctttgccgtgctcaccggcccgcgcggcttcgatcgcggcattgagcgccagcagattggtctggtaagcgataga

SEQ ID NO: 684685 - DNA, 359 bp, Homo sapiens
ttgaaaaggccatcggttcgggcctttttggtttttcgcccacttgcaaaaaggggttttttttcaaagggttttaatttgggtaccccaaggtttttccaattcctacgtttttaaacctgggcccattaatttttattcggctcccttttgggggaatttgggtccggggccccccctaaattttttttttttttttttttttttttttttttttttttttttttttttttttttttttttttttttttttttttttttttttttttttttttttttttttttttttttttttttttttttttcagacttcagttttaatggttaaagctgcctgtgggagccagtctggagcacgc

SEQ ID NO: 684686 - DNA, 885 bp, Homo sapiens
  misc_feature (10)..(10): n is a, c, g, or t
  misc_feature (20)..(20): n is a, c, g, or t
  misc_feature (30)..(30): n is a, c, g, or t
  misc_feature (39)..(39): n is a, c, g, or t
  misc_feature (41)..(41): n is a, c, g, or t
  misc_feature (46)..(46): n is a, c, g, or t
  misc_feature (50)..(50): n is a, c, g, or t
  misc_feature (82)..(82): n is a, c, g, or t
  misc_feature (84)..(84): n is a, c, g, or t
  misc_feature (90)..(90): n is a, c, g, or t
  misc_feature (93)..(93): n is a, c, g, or t
  misc_feature (100)..(100): n is a, c, g, or t
  misc_feature (108)..(108): n is a, c, g, or t
  misc_feature (139)..(139): n is a, c, g, or t
  misc_feature (169)..(169): n is a, c, g, or t
  misc_feature (171)..(171): n is a, c, g, or t
  misc_feature (185)..(185): n is a, c, g, or t
  misc_feature (187)..(187): n is a, c, g, or t
  misc_feature (204)..(204): n is a, c, g, or t
  misc_feature (208)..(208): n is a, c, g, or t
  misc_feature (228)..(228): n is a, c, g, or t
  misc_feature (236)..(236): n is a, c, g, or t
  misc_feature (240)..(240): n is a, c, g, or t
  misc_feature (242)..(242): n is a, c, g, or t
  misc_feature (246)..(246): n is a, c, g, or t
  misc_feature (248)..(248): n is a, c, g, or t
  misc_feature (250)..(250): n is a, c, g, or t
  misc_feature (272)..(272): n is a, c, g, or t
  misc_feature (275)..(275): n is a, c, g, or t
  misc_feature (289)..(289): n is a, c, g, or t
  misc_feature (296)..(296): n is a, c, g, or t
  misc_feature (310)..(310): n is a, c, g, or t
  misc_feature (317)..(317): n is a, c, g, or t
  misc_feature (320)..(320): n is a, c, g, or t
  misc_feature (328)..(328): n is a, c, g, or t
  misc_feature (333)..(333): n is a, c, g, or t
  misc_feature (335)..(335): n is a, c, g, or t
  misc_feature (338)..(338): n is a, c, g, or t
  misc_feature (352)..(352): n is a, c, g, or t
  misc_feature (355)..(355): n is a, c, g, or t
  misc_feature (404)..(404): n is a, c, g, or t
  misc_feature (414)..(414): n is a, c, g, or t
  misc_feature (420)..(420): n is a, c, g, or t
  misc_feature (438)..(438): n is a, c, g, or t
  misc_feature (443)..(443): n is a, c, g, or t
  misc_feature (449)..(449): n is a, c, g, or t
  misc_feature (458)..(458): n is a, c, g, or t
  misc_feature (465)..(465): n is a, c, g, or t
  misc_feature (474)..(474): n is a, c, g, or t
  misc_feature (484)..(484): n is a, c, g, or t
  misc_feature (530)..(530): n is a, c, g, or t
  misc_feature (554)..(554): n is a, c, g, or t
  misc_feature (783)..(783): n is a, c, g, or t
  misc_feature (858)..(858): n is a, c, g, or t
tggtttccanagcaatttantcaggaaaanctattcaanangccancaanagttctcctgtgtgtattgtgctgaaaaaaananactganaanatttaanaagttcancatttaaaaagtctgaattcattttcaccanacggtattgtacacggtcatctgttgaaananatttcttttttaananatcttagtttaaaaaantcanaggtactgtgagttctgtanaaactggngganantaantnanttcctttgttttaacttaaaanccncaacttcaccgcanaaaaaanaatgtaggccaaanaaagcanaancggtcacncgtananaanagtattgtttctanaanttgaagctttctgaatggacgggttcaggcctgatgcaactgtaaaaanattacttaangaaaanactaaatggaaattgtanaaaangttatnaccttttancgttagnagcttaaanagcactaaancactaattgctattcaaaaacaaaaacctgtttttgaatccccaanaaggcagcatgtgtatacaaccanaccaccttgtacttaggggtgtgtcaaaacataattcaacagaaactttggctttaggaaagagtcacaaatatttaaaagaatggctttgtcattttaagtatacggtcggggaaaagtgtgctttaattaaatatacatcataccagtgatgctggcaaggttgaaagttactcctaatgttgatagctataaaaactagtttgtacataacaagacaatgagaggnaaaagcaatccctttgaaacaaaattctcaaataaaaaatgttcacagtggtttgtatcaacagtatgcattttntgacaagaacatgtacagattcagagc

SEQ ID NO: 684687 - DNA, 480 bp, Homo sapiens
  misc_feature (21)..(21): n is a, c, g, or t
  misc_feature (468)..(468): n is a, c, g, or t
aattagactactgaaaaaaanagagatattagtgttctaatttatgggctgctcttcctcagtccctcagataaattttgtcctattgtttttttgctattagcagtctgtctgcataatcttgctaaatgacctttccactctcctgccttcaactataatctgctatttgatgactactaatatgtttctccaaatcatgtcttctatagaattgtatatttactgtatactggtagtttcactgagtgtcctatgtgtagttaaggttcagaatatccaatacaaattccccacatgtcctagctttcacaagctttctttttttaaattaaaaaaattatttttctcttattcattgaagtagagatatctcagtacatggcaccatattcacttatttctccaaactggaaatctagaagtcattcttaactattttcacatgtgctttcagtctatgtcctnggccccacttta

SEQ ID NO: 684688 - DNA, 717 bp, Homo sapiens
  misc_feature (25)..(25): n is a, c, g, or t
  misc_feature (563)..(563): n is a, c, g, or t
  misc_feature (567)..(567): n is a, c, g, or t
  misc_feature (578)..(578): n is a, c, g, or t
  misc_feature (580)..(580): n is a, c, g, or t
  misc_feature (587)..(587): n is a, c, g, or t
  misc_feature (590)..(590): n is a, c, g, or t
  misc_feature (593)..(593): n is a, c, g, or t
  misc_feature (602)..(602): n is a, c, g, or t
  misc_feature (604)..(604): n is a, c, g, or t
gacaagtgtgagaaggcctgccgcnccgaggaggagtgccttgccctcaacagcacctggggctgtttctacagactttgataatcacatgtagcgtctgcatctgaaattgtttttacatctgtcccacctgcacccttcaccccaggctgttagtttcttgaggacaaggacttcatcattttcaaacattattggtcaaataaatgaagaaataggctgcatcctttctctttatcctttgacctcctctatcatcctgctgttatcttccagaaggagaagaaacagcttcacaggaaaagtagaggagattttcccattttggtgaaagtgccaaatcagaatgtgaaataggaattctgggctctgtaccaggcatttactcctatgctgttagctgatgttaaagagggtggatttcttttcccttaggtctcaccttctgtgccttcaggggaagttggttggaagtttgaatggtttgttgttgtcgtcattgttttgtattaaggagggctgtaatggaacgaatacaatggttattgatggagagtaagttnaganaagctcaaggntnattattnaanggnaggaggggnanaaaaaaagtaaatctataaagagcttgggacaccaagtccagaacttcatgcatataacagccaattaacaatcaaattttagaaagtctcagagagggacttgcaaacacac

SEQ ID NO: 684689 - DNA, 638 bp, Homo sapiens
aagaaaaggtaaggtaaataaacatttttcaaaatgaaaaaaaaaaaaaaaaaaaaaaaaaaaaaaaaaaaaaaaaaaaaaaaaaaaaaaaaaaaaaaaaaaaaaaaaaaaaaaaaaaaaaccttgtggcccgcttggcccaagcgatttttaaactgggcaaggttaagcatggggcccgaatttgggcctaattggccaattcccccttaaggggggccgtttacaattcaatggcccgggttttaaaacggtgggactgggaaaaccctgggggtccccaatttaaaccccttggaagaaaatccccttttgccaagtgggggaaaaaccaaaaggccccgaccgaacggcctttccaaaaggtggccaaccctaatggccaatggaaattggaaggggtaaaaatttggtaaaattccgggtaaaattttggtaaaacaagccaatttttaacccaatggcccaaattgggaaaaaccctttataatcaaaaggattaccccgaattgggttgaagggttgtccaatttggaaccaggagccccttattaagaaccggggcctcaaccgtaaagggccgtttttggggccaaggtcgccaaaggccttaatccggaaccctaaggggacccccc

SEQ ID NO: 684690 - DNA, 1542 bp, Homo sapiens
  misc_feature (709)..(709): n is a, c, g, or t
  misc_feature (843)..(843): n is a, c, g, or t
  misc_feature (1082)..(1082): n is a, c, g, or t
ggacgtagtaattagttgtcctcctctggggttgataatatagttggtgtgtgttcttttatgatagagtctttcttctctactatgtggtgttctgctatgtggagtgaaagccccctttgtgtggcaggttttttcttgacaggcctttgtaaattatttttgggtagacaaccaataagccgtcttcgttgtaagttgggactattattattaagggggtggcctcgtaaattacaccccggggggggaagccccctaatatgtgcccgcaccaatatgtgtggaaagtgatctcctcagcgaaaatttggtggccgctcatcccctaagaaccccctttgtgtgggaaaaaacaccaacacgggggagatataataagttgggggttaaactgtcgagaagtagaccacttccggaggaagtattgttgtccccacgcgccacgtaaaggggaatttgaaaggtttgccggagaaacaacacaataggtcccggcgttttctctctaatataaaaggggaaaaaaagaaatttcgcccacactgctgtgtgtttccgcgtgaactcggcctatcacggtgatatagttatacctgtgtaggccccccgaagaaatttggcgtgcccttttgagaaaggaaacacacgggaacggtatataatcgaggcgaatattttttcacaccgccccacttggacacacagnctcttttggagagaaggtgatgaaaatagcgaaatattatagagaaattggcctcataaagagagaggtggtctcacagagaaaaggctgtctccaagagaggcctgcctgagattttgtgtgagaactaaacngttcttctgtctgtgcacattttgggttgcgcaccacatggagagagaggagatttatccctcgtgtccaacaagccacaacatcggccctccacagagacacctgtagataagaactgtgttgtttgcgcgccacactctcgaagcgcctcgcttaagagaattcacccactcggagaataccacgcgctcccacactggggagaaggcctcacctcggagagagaagctcagaatgnggccacacctgtgagagagacgccacatcgagaggaatggcctcgcttgtcacaccagagatgcctcacacaggagatcgggtctccacacggtgtctacatcaataagggtaatatattgagaacctgtgttctcctgagaattcacatggtccacacaaaggagaaaataagacctcttaaggggcctccacagaataaataaagggtgaagcccaagaagcacttttacattgtgcaccactgctttctctggagacttgggaataataccacggttccacgcggttaattaagcacgccacctggctaagggaaaatgaatctttggtgttttgggttaaattgcttcctaagaaaaagatttcatagatggactgtttagaaagaagaaatgtaaagatcccgctttgggattatgaaattaacccccaatttaaaattttgtttaaactgtcca

SEQ ID NO: 684691 - DNA, 4059 bp, Homo sapiens
  misc_feature (122)..(122): n is a, c, g, or t
cgcgctcagcggacgactggccggatcccaacgcgctgccccttgcccagcctgcgagcgcgtggtacgaaggcgcgtctgcatccatgccccagcccggggagctggaggcgctcgcagtnagaggcgagtgatgctaggctgagcgcgtggcggcccgtgtcgtgccccgctgagccaagtgcggaagggcagcggcgcgctccagctctgctcgccgcgcgcagggcgggggggcctggccgcccgctgggagctgcggacgagcaggcgcgctgaggacccgagggaggacacggttaaagcattgctatcaactgtgaacccagagagccctccttagccaacacgctaactccgaagcctcccttacgcccccgaaccaccgaaggcggcgacacctgattcagcgcacaaacacaggtcccttctgtcccggatacaattacgcggcagacacacactcagactcgcgcggggcagccaagagacgagctatgaagtcttacactccatatttcattctcctgtggagtgctgttgggatagcgaaggctgccaaaatcatcatcgtgccgccaattatgtttgaaagccatatgtacattttcaagacgctagcctcagccttgcacgagagaggccaccatacagtgttcctcctctctgaaggcagagacatcgccccatctaatcattacagcctccagcgctacccagggatctttaacagtaccacctcagatgctttcctacagtccaagatgcggaatattttctctgggagattgacagcaatcgaactgtttgacatactggatcactatactaagaactgtgacctgatggttggcaaccatgccctgatccagggtctgaagaaagaaaaatttgacctgctgctggtggaccctaatgatatgtgtggatttgtgatagctcatcttttaggggttaaatatgctgtattttcaactggcctttggtatcctgctgaagtgggtgctcctgctccattagcatacgtcccagagtttaactcactcctcacagaccgcatgaacttgctgcaaaggatgaaaaataccggtgtttacctcatttccagattaggggtcagctttctggttcttcccaaatatgaaaggataatgcagaagtacaacctgctgccggagaagtccatgtatgatttggttcatgggtccagcctgtggatgctgtgtactgacgtagcactggaattcccaagacccactctgcctaatgttgtttatgtaggaggaatcctaaccaaaccagccagcccactaccagaagatctccaaagatgggtaaatggtgctaatgaacatggctttgtcttggtgtcttttggagctggtgtcaagtatctgtcagaagacattgctaacaaactggcaggagctctggggagattgcctcaaaaagtgatttggaggttttctggacccaaaccaaagaatctaggaaacaacactaaactcatagaatggttaccacaaaatgacctgcttgggcattcaaagattaaagccttcctgagccatggtggtttgaacagtatttttgaaactatgtatcatggtgtgcctgtagtgggaattccactctttggagaccattatgatactatgaccagagtacaggcaaaaggcatggggatattgctagaatggaagacagttactgaaaaagagctctatgaagcactagtgaaggttatcaataatcccagctaccgtcagagggctcagaagctttcggaaattcacaaggatcaacctggtcaccctgtcaatcgaactatctattggatagattatattattcgtcacaatggagcccatcacctacgtgccgctgtccatcagatctccttttgtcagtattttttactggatattgcctttgtgcttttgcttggtgctgccttgttatactttctcttgtcttgggtgacaaaatttatctacagaaaaatcaaaagtctgtggtctagaaataagcatagcacagttaatggacattaccacaatggaatcctcaatggcaagtacaaaagaaatggccatattaaacatgaaaagaaagtgaaatgagccaacagcccaggtgatagaaataaattggttcactcattgaatttttattgctattatttagtctaacagctactaaaagtaaaacatcagtaaacaattctaacatgcccttatgagatctactaatgaaattctgtggaattaagatggctgtaaaaagcacaaacctaaaatgcagaaatgtattttattcaaatactgatgtagagagttttggcactgaaccttttagaagccttaattatttaaatcaattcagtgactgtgtcagaccttagttttaaatcttgatatgtgcgtgtcccggatcaggaatggttcatttttcttaataatgtgtgtgtgtgtatgtgtgtgtgtgtgtgtgtgtgtttgtgtgtgtgtgtgtgtgtcctaattaagagaatttttactggctgcttgttacatttgttgagggtacaacacactcaagaataaagtaaaaggatagtcaggatccagatgtttcttttctagcatttaatgtgtgtgaactcagaacactaccatgaaagaacacttccccccaaaactggatgcagaggaagaaaaaaaaaaaaagaaatggcacagttttttgtatttttttttttagttattttttgttgttgttgtttgtattgtttctcttttctgatagagtatggccacttctgggggaaaaacatgtaattaagtaaatgtatacattggttttcacgttttacttttgttttcccactaccaataattttcctctggaagaattttatagttttttctatttcattttaatgagtaacaatatgttaaatgcataattaagacaaagcaatgaaattctgactttattcaaagtactgaagattattgcttctagggcatttttaaacagcaccattgtattgttgaatgtttatgtaactgatggcttttctataatgtaatttttgaatgttcaggtgttacatttccaaagtttaacttttaaaaaaccatcttctgatcccttttattgtctgggccatacaatctatattacataggtgccaacatttaattcttttaaatggaacatttgcagttttccatattggtacctgctttttctggagaggtttgagatcttgttaacaaatcagactttacactatatacagatgtgacagataaattgaaccacttgtttgtgaaaatgagttcctgtcatcttcctcattcactcagccctcaccccagcagccttttccggtcattgtagctgacatggagcagtgacagtattcatttgagaacagggatgcaagtcacagacatcataaaatcagggtctccctgctgaagcattcactagttggcaactatgaatttattccatgtcattctgtttacttagcacttgcactacccttgttggttgagtgtatgctttatttgtttctagtttgaaatcccacatctgatagctgagagtaggcaaatacaacatttacctaatgtcattcactaacatggaagagttgtgaaaattctagagtgctgtaaatccttggcatacactatgacaaacaacttcattactctcccaccaggagctgctctcctgcacttagaaataatgtcacaagtagttttctaatgtacaatgcagacaaatgtactgctctctgaatacttgaagaaatggtattatacatacatagaaacttattagttataccttttcacaatcttattacgatgttgccgttaaaagggaaaaaagacacaggcaatgaatggtgggatagtaagaggacttagagtgtatgaatgagttgattttacttttttggaatttgattaagttgacagtaggcactgattggatgattaaacataagttaatctccactgtgataaaaacttaaataataaacatgatttaaaatag

SEQ ID NO: 684692 - DNA, 4077 bp, Homo sapiens
gggttggttccaagtctttgctattgtgaatagtgccgcaataaacatacgtgtgcatgtgtctttatagcagcatgatttatagtcctttgggtatatacccagtaatgggatggctgggttctagatccctgaggaatcgccacattgacttgcacaatggttgaactagtttacagtcccaccaacagtgtaaaagtgttcctatttctccacatcctctccggcacctgttgtttcctgactttttaatgattgccattctaactggtgtgagatgatatctcattgtggttttgatttgcatttctctgatggccagtgatggtgagcattttttcatgtgttttttggctgcataaatgtcttcttttgagaagtgtctgttcatgatttttttttttagacaaagtattagatcagatatttttggggaaaaatgctttgtgattgcttgttttgaatggtgagcattgtattttgttttaagttgttttctggttgttattacagctatgaagtcttacactccatatttcattctcctgtggagtgctgttgggatagcgaaggctgccaaaatcatcatcgtgccgccaattatgtttgaaagccatatgtacattttcaagacgctagcctcagccttgcacgagagaggccaccatacagtgttcctcctctctgaaggcagagacatcgccccatctaatcattacagcctccagcgctacccagggatctttaacagtaccacctcagatgctttcctacagtccaagatgcggaatattttctctgggagattgacagcaatcgaactgtttgacatactggatcactatactaagaactgtgacctgatggttggcaaccatgccctgatccagggtctgaagaaagaaaaatttgacctgctgctggtggaccctaatgatatgtgtggatttgtgatagctcatcttttaggggttaaatatgctgtattttcaactggcctttggtatcctgctgaagtgggtgctcctgctccattagcatacgtcccagagtttaactcactcctcacagaccgcatgaacttgctgcaaaggatgaaaaataccggtgtttacctcatttccagattaggggtcagctttctggttcttcccaaatatgaaaggataatgcagaagtacaacctgctgccggagaagtccatgtatgatttggttcatgggtccagcctgtggatgctgtgtactgacgtagcactggaattcccaagacccactctgcctaatgttgtttatgtaggaggaatcctaaccaaaccagccagcccactaccagaagatctccaaagatgggtaaatggtgctaatgaacatggctttgtcttggtgtcttttggagctggtgtcaagtatctgtcagaagacattgctaacaaactggcaggagctctggggagattgcctcaaaaagtgatttggaggttttctggacccaaaccaaagaatctaggaaacaacactaaactcatagaatggttaccacaaaatgacctgcttgggcattcaaagattaaagccttcctgagccatggtggtttgaacagtatttttgaaactatgtatcatggtgtgcctgtagtgggaattccactctttggagaccattatgatactatgaccagagtacaggcaaaaggcatggggatattgctagaatggaagacagttactgaaaaagagctctatgaagcactagtgaaggttatcaataatcccagctaccgtcagagggctcagaagctttcggaaattcacaaggatcaacctggtcaccctgtcaatcgaactatctattggatagattatattattcgtcacaatggagcccatcacctacgtgccgctgtccatcagatctccttttgtcagtattttttactggatattgcctttgtgcttttgcttggtgctgccttgttatactttctcttgtcttgggtgacaaaatttatctacagaaaaatcaaaagtctgtggtctagaaataagcatagcacagttaatggacattaccacaatggaatcctcaatggcaagtacaaaagaaatggccatattaaacatgaaaagaaagtgaaatgagccaacagcccaggtgatagaaataaattggttcactcattgaatttttattgctattatttagtctaacagctactaaaagtaaaacatcagtaaacaattctaacatgcccttatgagatctactaatgaaattctgtggaattaagatggctgtaaaaagcacaaacctaaaatgcagaaatgtattttattcaaatactgatgtagagagttttggcactgaaccttttagaagccttaattatttaaatcaattcagtgactgtgtcagaccttagttttaaatcttgatatgtgcgtgtcccggatcaggaatggttcatttttcttaataatgtgtgtgtgtgtatgtgtgtgtgtgtgtgtgtgtgtttgtgtgtgtgtgtgtgtgtcctaattaagagaatttttactggctgcttgttacatttgttgagggtacaacacactcaagaataaagtaaaaggatagtcaggatccagatgtttcttttctagcatttaatgtgtgtgaactcagaacactaccatgaaagaacacttccccccaaaactggatgcagaggaagaaaaaaaaaaaaagaaatggcacagttttttgtatttttttttttagttattttttgttgttgttgtttgtattgtttctcttttctgatagagtatggccacttctgggggaaaaacatgtaattaagtaaatgtatacattggttttcacgttttacttttgttttcccactaccaataattttcctctggaagaattttatagttttttctatttcattttaatgagtaacaatatgttaaatgcataattaagacaaagcaatgaaattctgactttattcaaagtactgaagattattgcttctagggcatttttaaacagcaccattgtattgttgaatgtttatgtaactgatggcttttctataatgtaatttttgaatgttcaggtgttacatttccaaagtttaacttttaaaaaaccatcttctgatcccttttattgtctgggccatacaatctatattacataggtgccaacatttaattcttttaaatggaacatttgcagttttccatattggtacctgctttttctggagaggtttgagatcttgttaacaaatcagactttacactatatacagatgtgacagataaattgaaccacttgtttgtgaaaatgagttcctgtcatcttcctcattcactcagccctcaccccagcagccttttccggtcattgtagctgacatggagcagtgacagtattcatttgagaacagggatgcaagtcacagacatcataaaatcagggtctccctgctgaagcattcactagttggcaactatgaatttattccatgtcattctgtttacttagcacttgcactacccttgttggttgagtgtatgctttatttgtttctagtttgaaatcccacatctgatagctgagagtaggcaaatacaacatttacctaatgtcattcactaacatggaagagttgtgaaaattctagagtgctgtaaatccttggcatacactatgacaaacaacttcattactctcccaccaggagctgctctcctgcacttagaaataatgtcacaagtagttttctaatgtacaatgcagacaaatgtactgctctctgaatacttgaagaaatggtattatacatacatagaaacttattagttataccttttcacaatcttattacgatgttgccgttaaaagggaaaaaagacacaggcaatgaatggtgggatagtaagaggacttagagtgtatgaatgagttgattttacttttttggaatttgattaagttgacagtaggcactgattggatgattaaacataagttaatctccactgtgataaaaacttaaataataaacatgatttaaaatag

SEQ ID NO: 684693 - DNA, 238 bp, Homo sapiens
actggtctctgtagtgccatcaggtaacttgctgagcagtatacaaagagtgagatcatatcctcatatggcattccagcagagttccacggaccaacagaatggatcccataagcgagttcatattcttcctttcccatcagattaatgaagcccgggttcagtgaattaatacaggaaaaatgttgctaagaaccagtaatgcacctcctgctcacacgatatagaataagaaagt

SEQ ID NO: 684694 - DNA, 4179 bp, Homo sapiens
  misc_feature (122)..(122): n is a, c, g, or t
cgcgctcagcggacgactggccggatcccaacgcgctgccccttgcccagcctgcgagcgcgtggtacgaaggcgcgtctgcatccatgccccagcccggggagctggaggcgctcgcagtnagaggcgagtgatgctaggctgagcgcgtggcggcccgtgtcgtgccccgctgagccaagtgcggaagggcagcggcgcgctccagctctgctcgccgcgcgcagggcgggggggcctggccgcccgctgggagctgcggacgagcaggcgcgctgaggacccgagggaggacacggttaaagcattgctatcaactgtgaacccagagagccctccttagccaacacgctaactccgaagcctcccttacgcccccgaaccaccgaaggcggcgacacctgattcagcgcacaaacacaggtcccttctgtcccggatacaattacgcggcagacacacactcagactcgcgcggggcagccaagagacgagctatgaagtcttacactccatatttcattctcctgtggagtgctgttgggatagcgaaggctgccaaaatcatcatcgtgccgccaattatgtttgaaagccatatgtacattttcaagacgctagcctcagccttgcacgagagaggccaccatacagtgttcctcctctctgaaggcagagacatcgccccatctaatcattacagcctccagcgctacccagggatctttaacagtaccacctcagatgctttcctacagtccaagatgcggaatattttctctgggagattgacagcaatcgaactgtttgacatactggatcactatactaagaactgtgacctgatggttggcaaccatgccctgatccagggtctgaagaaagaaaaatttgacctgctgctggtggaccctaatgatatgtgtggatttgtgatagctcatcttttaggggttaaatatgctgtattttcaactggcctttggtatcctgctgaagtgggtgctcctgctccattagcatacgtcccagagtttaactcactcctcacagaccgcatgaacttgctgcaaaggatgaaaaataccggtgtttacctcatttccagattaggggtcagctttctggttcttcccaaatatgaaaggataatgcagaagtacaacctgctgccggagaagtccatgtatgatttggttcatgggtccagcctgtggatgctgtgtactgacgtagcactggaattcccaagacccactctgcctaatgttgtttatgtaggaggaatcctaaccaaaccagccagcccactaccagaagatctccaaagatgggtaaatggtgctaatgaacatggctttgtcttggtgtcttttggagctggtgtcaagtatctgtcagaagacattgctaacaaactggcaggagctctggggagattgcctcaaaaagtgatttggaggttttctggacccaaaccaaagaatctaggaaacaacactaaactcatagaatggttaccacaaaatgacctgcttgggcattcaaagattaaagccttcctgagccatggtggtttgaacagtatttttgaaactatgtatcatggtgtgcctgtagtgggaattccactctttggagaccattatgatactatgaccagagtacaggcaaaaggcatggggatattgctagaatggaagacagttactgaaaaagagctctatgaagcactagtgaaggttatcaataatcccagctaccgtcagagggctcagaagctttcggaaattcacaaggatcaacctggtcaccctgtcaatcgaactatctattggatagattatattattcgtcacaatggagcccatcacctacgtgccgctgtccatcagatctccttttgtcagtattttttactggatattgcctttgtgcttttgcttggtgctgccttgttatactttctcttgtcttgggtgacaaaatttatctacagaaaaatcaaaagtctgtggtctagaaataagcatagcacagttaatggacattaccacaatggaatcctcaatggcaagtacaaaagaaatggccatattaaacatgaaaagaaagtgaaatgagccaacagcccaggtgatagaaataaattggttcactcattgaatttttattgctattatttagtctaacagctactaaaagtaaaacatcagtaaacaattctaacatgcccttatgagatctactaatgaaattctgtggaattaagatggctgtaaaaagcacaaacctaaaatgcagaaatgtattttattcaaatactgatgtagagagttttggcactgaaccttttagaagccttaattatttaaatcaattcagtgactgtgtcagaccttagttttaaatcttgatatgtgcgtgtcccggatcaggaatggttcatttttcttaataatgtgtgtgtgtgtatgtgtgtgtgtgtgtgtgtgtgtttgtgtgtgtgtgtgtgtgtcctaattaagagaatttttactggctgcttgttacatttgttgagggtacaacacactcaagaataaagtaaaaggatagtcaggatccagatgtttcttttctagcatttaatgtgtgtgaactcagaacactaccatgaaagaacacttccccccaaaactggatgcagaggaagaaaaaaaaaaaaagaaatggcacagttttttgtatttttttttttagttattttttgttgttgttgtttgtattgtttctcttttctgatagagtatggccacttctgggggaaaaacatgtaattaagtaaatgtatacattggttttcacgttttacttttgttttcccactaccaataattttcctctggaagaattttatagttttttctatttcattttaatgagtaacaatatgttaaatgcataattaagacaaagcaatgaaattctgactttattcaaagtactgaagattattgcttctagggcatttttaaacagcaccattgtattgttgaatgtttatgtaactgatggcttttctataatgtaatttttgaatgttcaggtgttacatttccaaagtttaacttttaaaaaaccatcttctgatcccttttattgtctgggccatacaatctatattacataggtgccaacatttaattcttttaaatggaacatttgcagttttccatattggtacctgctttttctggagaggtttgagatcttgttaacaaatcagactttacactatatacagatgtgacagataaattgaaccacttgtttgtgaaaatgagttcctgtcatcttcctcattcactcagccctcaccccagcagccttttccggtcattgtagctgacatggagcagtgacagtattcatttgagaacagggatgcaagtcacagacatcataaaatcagggtctccctgctgaagcattcactagttggcaactatgaatttattccatgtcattctgtttacttagcacttgcactacccttgttggttgagtgtatgctttatttgtttctagtttgaaatcccacatctgatagctgagagtaggcaaatacaacatttacctaatgtcattcactaacatggaagagttgtgaaaattctagagtgctgtaaatccttggcatacactatgacaaacaacttcattactctcccaccaggagctgctctcctgcacttagaaataatgtcacaagtagttttctaatgtacaatgcagacaaatgtactgctctctgaatacttgaagaaatggtattatacatacatagaaacttattagttataccttttcacaatcttattacgatgttgccgttaaaagggaaaaaagacacaggcaatgaatggtgggatagtaagaggacttagagtgtatgaatgagttgattttacttttttggaatttgattaagttgacagtaggcactgattggatgattaaacataagttaatctccactgtgataaaaacttaaataataaacatgatttaaaatagaaaaaaaaaaaaaggggggcgtaatatcctgggggcaagttagcgtcagttttgtcaggggccaagggggttaaagaggcggcgggtaaaagggagggaagtcgggtggggactggggga

SEQ ID NO: 684695 - DNA, 133 bp, Homo sapiens
cgcctatcagatgcataccaaagctctcttataactgtagttatcaacctagactcccaattaaattttagctcaacaaggcacaggatacagagcaattccctagctaaagttccacagaatgtttgaaact

SEQ ID NO: 684696 - DNA, 160 bp, Homo sapiens
gtttatcaggctggtcttgaacaacccgacctcaggttatccacctgcctcggctcccaaagtactgggattacagtgcgtgacccactgcgcttggttagaacttatttaactttttaggcacttggtaaactggtagctgtatagtccatgtagtact

SEQ ID NO: 684697 - DNA, 217 bp, Homo sapiens
tacatgctacacacaaatagtcaccccgtacaccacacacacacactcataagccacccacacaccacacacacacgccgtgtcatgctacattgaaagccccaagatgcgatttcatttatcctattgtgctctggcttgcgatttgcatgacaatttcacgagtattttcgtgtttccgtacgttaatctactccagcaggttacatcttttgcc

SEQ ID NO: 684698 - DNA, 1863 bp, Homo sapiens
  misc_feature (122)..(122): n is a, c, g, or t
cgcgctcagcggacgactggccggatcccaacgcgctgccccttgcccagcctgcgagcgcgtggtacgaaggcgcgtctgcatccatgccccagcccggggagctggaggcgctcgcagtnagaggcgagtgatgctaggctgagcgcgtggcggcccgtgtcgtgccccgctgagccaagtgcggaagggcagcggcgcgctccagctctgctcgccgcgcgcagggcgggggggcctggccgcccgctgggagctgcggacgagcaggcgcgctgaggacccgagggaggacacggttaaagcattgctatcaactgtgaacccagagagccctccttagccaacacgctaactccgaagcctcccttacgcccccgaaccaccgaaggcggcgacacctgattcagcgcacaaacacaggtcccttctgtcccggatacaattacgcggcagacacacactcagactcgcgcggggcagccaagagacgagctatgaagtcttacactccatatttcattctcctgtggagtgctgttgggatagcgaaggctgccaaaatcatcatcgtgccgccaattatgtttgaaagccatatgtacattttcaagacgctagcctcagccttgcacgagagaggccaccatacagtgttcctcctctctgaaggcagagacatcgccccatctaatcattacagcctccagcgctacccagggatctttaacagtaccacctcagatgctttcctacagtccaagatgcggaatattttctctgggagattgacagcaatcgaactgtttgacatactggatcactatactaagaactgtgacctgatggttggcaaccatgccctgatccagggtctgaagaaagaaaaatttgacctgctgctggtggaccctaatgatatgtgtggatttgtgatagctcatcttttaggggttaaatatgctgtattttcaactggcctttggtatcctgctgaagtgggtgctcctgctccattagcatacgtcccagagtttaactcactcctcacagaccgcatgaacttgctgcaaaggatgaaaaataccggtgtttacctcatttccagattaggggtcagctttctggttcttcccaaatatgaaaggataatgcagaagtacaacctgctgccggagaagtccatgtatgatttggttcatgggtccagcctgtggatgctgtgtactgacgtagcactggaattcccaagacccactctgcctaatgttgtttatgtaggaggaatcctaaccaaaccagccagcccactaccagaagatctccaaagatgggtaaatggtgctaatgaacatggctttgtcttggtgtcttttggagctggtgtcaagtatctgtcagaagacattgctaacaaactggcaggagctctggggagattgcctcaaaaagtgatttggaggttttctggacccaaaccaaagaatctaggaaacaacactaaactcatagaatggttaccacaaaatgacctgcttgggcattcaaagattaaagccttcctgagccatggtggtttgaacagtatttttgaaactatgtatcatggtgtgcctgtagtgggaattccactctttggagaccattatgatactatgaccagagtacaggcaaaaggcatggggatattgctagaatggaagacagttactgaaaaagagctctatgaagcactagtgaaggttatcaataatcccaggtaaggtttcaattaacattaaagctgatgaacttacataccacagtatattgtcagtagccaattattttcaatagattgtcaataaattatcaaattatgga

SEQ ID NO: 684699 - DNA, 101 bp, Homo sapiens
ctcctcagtcccagggttggctcatcagtcccagggttggctcctcagtcccagggtggggctcagtccaattcccattcccagctgtcatcactcagccc

SEQ ID NO: 684700 - DNA, 365 bp, Homo sapiens
catctagaggatcccgttagagaacaggtgaggatggcttccatggagtctcccagtgaatgctttcccgccagaacaactacgggctctatgactcctggggaacgtgtgggagtggacagcattaacgtaacaggctggtgagcaggacatgcgcgttcttcgggggggattcctggatcgacacaagcttgatgggttctgccaatcaccgggcccgggtcaccaccaggatgggcaacactccagattcagcctcagacaacctcggttttcccgctgtgctggcagacgaaggcccgggccgccaggggaacctgtaagcagcccgggtgttgacaagggagaaaaagccttctaggggt

SEQ ID NO: 684701 - DNA, 350 bp, Homo sapiens
  misc_feature (5)..(5): n is a, c, g, or t
gtgtntatcgatggccacggggcctgagtcgccacccccatttttttggtcgttggagacggaatctcactcggtcgcccaggctggagtgcgccccgggcagtggtgcgatctcggctcccggcaacctccgcctcccagtttcaagcgattctctttacctcagcccccacaagtagctgggattacaggcgcctgccatcatgcccggctaatttttggtattttagtagagacagggtttcaccatttcagccaagcgggtcttgaactcctgaccttgtgatccacccagccgggcctcccaaagtgtggggattacaggtgggtggcatcgataaacaccgggt

SEQ ID NO: 684702 - DNA, 458 bp, Homo sapiens
aacacagtgtcgtttacacttaacacaattacttactaagacaattacaacccacactcattattgctagagaacaactacactttttaacggctgcacatacaatctcagaaatccaagcattatccacagtcatcatttccatattcaacacagctcatagacaaggaactgcggcatgggcagcggatggctcacgacctgtaatcccatgcacttatgggacggccgagtgcaggagagatcacgacggtcagtgagatacgagaccatcgctggctaaacacgtgtgaaaccccagtctctacgtaacaaatacaaagattagcctgggtgtgagatggcgggcgcctgatggtccctggctactcgggaggctgaggcaggagaatggcacggaacccgggaggcggagctgcagtgagccgagatcgcgccactatgctccagcctgggcg

SEQ ID NO: 684703 - DNA, 508 bp, Homo sapiens
tggatgccaagtctggcggattgtgcactaactttcgtacttatgtcagtatgatattcttacatagacatctgtatgctgtgcttgacaagttcattagttactatgccgtttgaatttggaagtggttggctgatggtgaattccagttggtatagtgtggaaagtagccatatttacactatcatacttgatgtttttcttacacctcgttctccctcacgaatacagtctaaacggctagtaaatgatcttctgaatctcacctattattggagacatcatagagactggataaatattatatcaaaagtacttaccggattacttctaagtattttatgaaatttattttttacacaccatcggtagccaatcttttggccatattgcaagaagaattgtctcgggccacacataaaatacactaacactaacaacagttgatcagctcatacatatatagttcacacagaccactcctaatgtatgattaaacttcataaaa

SEQ ID NO: 684704 - DNA, 107 bp, Homo sapiens
atgacaacatccgaaaacactacatgtcgtcaaaggcatattcagaagggggatcacagcgctcaaaagtggtcagataaagacttatagtgcagtcattgcgagta

SEQ ID NO: 684705 - DNA, 323 bp, Homo sapiens
gtagccggacggtgttccttgtctggtcattcctctctccttcaaccaaagatcgtaatattctctcttcccacctctatgatcctttattcttgctgcccttttttgtttgtttttgtttttttttttggagatgtagtctagctctgtcacccaggcgggggagcaggggcgtgatctgggctcacggcaacctccacctccggggttaaagcagctcttggcctcagcctcctgagtagctgggattacaggcacgtgccaccacgcccggctaacttttattttggtttggtttggttttttggagacaaagggaaaca

SEQ ID NO: 684706 - DNA, 354 bp, Homo sapiens
ttgggccaaggctttttgaccccggggtgaaggatttttgggttggttgggggtccacggcccagggcctcctttggtttaggctgggggaagggggtccctttcttggtctgggggtttttgggcagcccctcctggtttcttgtcccacagccccagggtggggaatcggtcctgtttgaaggcccctcctttgccgattggttttcccctccccccaatttggttcggggatacgtggtggcttgtaaggaaccccagaaaaagtggtgcctcttggcagattcgccatcccccaacgacccagggcaggaccgcgggggacgttttggggttaaaccccttcccccccca

SEQ ID NO: 684707 - DNA, 959 bp, Homo sapiens
gctgccatcttagcgtccccgacgtgtgtagcgcctaatctcaggtggtccacccgagaccccttgagcaccaaccctagtcccccgcgcggccccttattcgctccgacaagatgaaagaaacaatcatgaaccaggaaaaactcgccaaactgcaagcacaagtgcgcattggtgggaacaggaactgctcgcagacaagaagaaggtggttcactagaaccagccacagcagactgacaaaacacttcagatactcctatacacgaacgttaccgggtacaccaactatctctggtatcgacgagctgaatactgttacaaaccacggacacagtgatccactttaacaaccctaaagttcaggcatctctggcagcgaacacatttcaccattacaggccatgctgagacgaagcagcttgacagacatgctacccagaatcttccaaccagcttggtgccggatagtctgactagtatacaggagactggccgaagctctgccaatccaatctgtggactgccacacgcaccactgcctcctggcagaggatgatgctgactcgaaagctccaagaatatatgtcgaacccaaatatgaacgacaccatcccaagcactgacacacacactgcaccttgcgtccactcctgcacgcataacctgaagacacttactggaagccgccatttacatatcatcaccggcctactcaaacatgcatgcgtctctcgcaccccccccaaacccagcaccttttatatcacccaccccaagaccatgggcaaccgccagaactacaacgaaccggcataataccaacgcatccacagccgaaataaccccgcacacctctgcactcagttaacacaggtaaccactctacgcaacataacaacccacacaaaacacgatatcgcacaagaaccacaaacagcacgcagccacgaaactaa

SEQ ID NO: 684708 - DNA, 369 bp, Homo sapiens
  misc_feature (198)..(198): n is a, c, g, or t
cgtatattctaaggctagtcaacgtgatgaatgttatcagcaccgtttggcctaattcttggttgatccgcttaaagtcatccatgacttcgtgcgccgtcaccggatctaacgctgccacgggttcatcagccaagaggacgctgggttttgcgttaatgtccgcgctaatgacacccgttgttgttgaccaccagncaattgatcagtccgacgaatgctttatctaacattgcattcgatctagtgcctctaagggcgaatcttttctgttttggaaatccccaacaacagggccaaatggatatccgaaccacgactcatcacattttgcggactcgatcgtgcagagatatcgatggaaatcat

SEQ ID NO: 684709 - DNA, 190 bp, Homo sapiens
atatgtctattaggctttattagagatgggtctgttctttacattttgttgataaaactgtttcatattttaaggaggaaaacttcttattttatttttattaaggtaacttgataattgacttaaccctaggaaattgaggttgaattaaggtaacgtggggtagatatatgctgctctaattgagaga

SEQ ID NO: 684710 - DNA, 97 bp, Homo sapiens
ggatttgctggtgcagtacaactaggcttaatagggatcaagcttctaacgttagaagcttgaattcgagattcaagcttctaaacgtttttttttt

SEQ ID NO: 684711 - DNA, 653 bp, Homo sapiens
  misc_feature (653)..(653): n is a, c, g, or t
gtgtcccttctattggctagaacgaggtcggctcgcccgtgtggtggggttggcctgatgcgagactgctccggatctctgatcagtgtcagcagccttgtgagatctgcctaggtcacagatgcctggtccatcatgtcagacactaagcatgccaatctattgatacatggacttttgagaaacatgcacacaaagcagcacttataaaatcaggcctaacataagaaaaaaccaaaaaacaaaaaaaaaaaaaaaaatgttgtgggggccccccggcccgaagaagaagtcctctacagaaaccccaatctcgctgggggagcgcgccgggggacccccaccagcagaggacacgacgcgacacaagagtgtgggcacaaacccggcgtcccaccaacgagagagacaaccccccggggcggcacaagacaaacgaacccgcgcggcgggaggccctccccccaacacaaaaaaaaaaaacacaagccggccccgggcggagccaccccccggagcttttcttgcgagacgcaccacatccacacagcgcgccgcacttcacacaggcagcaccaaaccgcggcgagcaccacacaccacacgggggccgccccacaaggccaccctccaaattactcacatcccgcccn

SEQ ID NO: 684712 - DNA, 272 bp, Homo sapiens
tctgagtgatcttaccgactagccgacaggcgctacgagttactgtgcactctgcaggcggcactcgaagactggagaagacgtaggcacgaccaccctgaggttgcaccatgctgaacatcgtgcactgtctatcgcgatcagaacaagtacaaggaggctgcccacctgctcaatgatgctctggccatccgggagaaaacactgggcaaggaccacccagccgttgttgcgacattaaacaacctggcagtcctgtcgggctagtcggg

SEQ ID NO: 684713 - DNA, 444 bp, Homo sapiens
  misc_feature (175)..(175): n is a, c, g, or t
  misc_feature (203)..(203): n is a, c, g, or t
  misc_feature (404)..(404): n is a, c, g, or t
ggcgggagctgagaaatggccatctgggagaagcattgattcctgtgcccagctagaggcgctgtgcgtcgctcgttctttgtattgctggttgtaaagttgtattcagtcagacactcccactgccacaaataacatgttccctggagttgctaacagtatcacacgcgatcangactcaactcctatagccccgttatttnggactcccatgcaggtttagcaattcacagtggtgttggctatatagagcagagaaggcctccatagtttctcagaaagtcagcttgacagttgactcacgtattttctgtatccagaaagagatgggacgtgaagtttagatagacagggctaggattagcgaggaatttgtcagtcgcgttttcctaaaaaaaccactngagttagaccatctgtactcatagtctctcatctaaggcc

SEQ ID NO: 684714 - DNA, 152 bp, Homo sapiens
ctgttaatgaaaccttggaatggagtttggagtcaggatctcatatctctgcctgaaactcctggaagaccaccctgttgtggaagcctggtgcagatacggatgcctcgagaacacctgttgcagcgcgagttgcaccagcacgagatgcg

SEQ ID NO: 684715 - DNA, 306 bp, Homo sapiens
aggtcaggagttcgagaccaacctggccaacgtggtgaaacccgtctctactaaaaatacaaaattagccgggcatggtggcagctgcctgtaatcccagctactcgggaagcttaggcaggagaattgcttgaaccttgggaggtggggattgcagtaagccaagattgttctgcagcatgggtaacaaagtaagacttcgtctaagtaaataaactaaatttttaaatcaaacatgacaaactgttatatattcagagtaccttgaaattgaacatattgtgcatgatcataggcttttgcctg

SEQ ID NO: 684716 - DNA, 506 bp, Homo sapiens
ccaggctctctacctaacaggtcaaaaataagcaagtcgggaccacaacaacaacaacaaagagaggcggggagattctattatatggtagggtgtgggtgaaaaacacatagggaggtccggagagcgtaaagaactaggtccagctagatttcaaaattccaggtccaaaaatgaagtcaacatagtccctcaaacatttatgttggctatatgtcccttttctcatgagaaataggggcagctcccttatttcagaaacaaaaactaagaggtggcccctgagtcttccctcaggtatgtgatgcattataagtatcatcaaactctatgtcccaacatcgggtagaaatctcaggccgggacacttctcgtgataaccagggtagtacactatttaagcaaatcatcgggtcgggataactacaatagcatctcagatgcctctccctccctccctcgggagtggggtattgccaggctcaaccaattccatatcctagatg

SEQ ID NO: 684717 - DNA, 1127 bp, Homo sapiens
gggcagtcgttcgggtgagcgaagtatggcggccgagagggaacctcctccgctgagggcacggcgaagcccaccgactttgaggatcctggaggacggagaggaccctgttcaccagccactgtctcaaccctagagtcaagtccatcattctccaggaaaccatgctacgtcttcccttgcacgcaacgcatctcacgtggcaaattccaattgggcccaaaaaacccaacaagcacagtcggcaactacacgacttgcattgacccacgcaggaccgactcattataatgacacgagacgcccaaccagtgaagcgaaacggtctctctcaggcgacacggcctctgaaagagggtaaacccatataccttattccttcgggacacccttctctacctggacaatgttgcgacagctcgttgtacagctttcccttaacttaaccacttcccattgggcctccccttaagcacatttgtgcaccttccaaacagcaacgttaatggtccgtggcactcccccggtggaactccttatcggggactagccgaagtacccagtgggctacacgacggccactgtgacaacggcacaggcaacggtgcaccaaaatcttggggacgcgcacaccatatttttgttcgggtcgcactccaatttcaggcacacaacactatgggggggctgcgattacttccgaaagacattcccccaaggtcacaaacacaggctttgtgctgtgcaactatgaggtctattgcgacacagcggtcctgatatttattgggggcatatactcaagcggcacgcttacaacgaagagcaaaagaagaacacattcttccttccgtccacatgtgttctcaaagctcaacgaaacgttggaaaccttcactcaagcgtgatccaaacacgactacgccaattcccctgacgagacacctttatccagggggtatgcaggaccaccgaagcaacaagaattatagcccaagacgcaaacaattcttctaccagatgtactgagcatatcaaccatgtggtgacccccccagaatatccacccggaaacaacagcgcactacacagcaacacgcgaggcctgcaccaccgatgtgccccca

SEQ ID NO: 684718 - DNA, 179 bp, Homo sapiens
atactaactaaagagaagctgctccgggagactaagggcacctagacagcactggcaggagagcagaggcgcgtgccgcgtatatggaacaaaagcaccccatgtgtagtggacagaagcacagacctagggcttaggagaggaatgcaaccaaacttcctgtttcttcaggagctgac

SEQ ID NO: 684719 - DNA, 395 bp, Homo sapiens
  misc_feature (23)..(23): n is a, c, g, or t
gctgccaggaattccggcacganaaaattgtccacatgttgctgagccatccagggggaagtaagtgatctactagatttatgaacaaaatggaatggaatagcgattcgaacggaatgcaatggaatggaatggaatggactcgaatggaatagagtcgaatggaatggagtcgaatggaatgtaatcaaatggaatggaatcaaatggactggaattgaattaaattgtaaggagcagaatggaatggggtgttatcaaaagatatcgaatggaatggaatgcagtggaatggacttgaatggaatggactggaatggaatggaatcgaatggaatggaatggaatggagtggactcgaatggaatggaaacgaatggaactggaatggaatg

SEQ ID NO: 684720 - DNA, 587 bp, Homo sapiens
tggacgagcaggcccgaggtcctgggggcgaggggcggggctgggccggtggctctctcctctccgctggcgagcgctgggctcggggtcccggcgggctcctctcgggtcgggcgggttgggcgggcccaccaggttcccgtagtctgggccgtgcccggcaaaagcgcctttgtccacccgtcggccggtttgggctgttggagcctgccgcggcccctgggcgggaaggcggtgcggggagctggggagccccgctcggtaaataacccagagcggtggctccacccgctggggagcgcccttcatgacggaaggccggtgacccgaggggctctccaccccatgctgcaagatcccacagccagcaagctaaagcatggcgggccatccccctccagcggctcgctcgtgtgcacccaggaatactaccggcgttgagtcgcccccttgccccccatccaccgcggatgctctgctggcgccagtggcggccctgtgcaggctggcggaaccagcgctcggctgaaggccggtgggctggggaggctcggcccccggagtggtgacggggacctctcttctca

SEQ ID NO: 684721 - DNA, 460 bp, Homo sapiens
  misc_feature (381)..(381): n is a, c, g, or t
gctccacaaagctattttagaaacaaaaattatgctggattctaattaactcctaaaatggtcattttcaatgaatattgcagtgatttctgaaagagaaactgatcagtatctaatgcttgtagcagttttactttgtataggtatgtcaaaattgataattgatgatatttttattgaggctaatatattatcctttggtgccacgactggatgaagaaacttttggaaggctaaactagtggatacaagaaacttaggcagattattacaccatatgggtgtgagagataatgaatattatctacttggtatcagcaaacaggtgtccaaggtgatcaattcaggactcttccactgaagagatgtgaagtgtaagtntaactggaagtaatatgagaattcaatacagtggctatataaaaatcaagacagcagcacacagagcctcatgtggagc

SEQ ID NO: 684722 - DNA, 1113 bp, Homo sapiens
agcgggtctgtggcccggcccgttggcgcccgagtgcactgaagatggcggggctgtaggacggttgctccggagcgtcggtctggccgacatgtgagtgcacaattccattgaggcgcgatttcatgtccaactggtcgagaccgctctagcgacctggctgtcactgttggagatgcaagcgcagcattcgacgaaaatctctattggtgttgctggctataccagtgcgaagacaacatagttgattcagccaccagcttacctcatgaccatgtcaacactagtcatgttctagcctctagccatggtctacccctaatctatgtatagggagtcatccatggccgttgtgcaatcggcacgtagtatgcgaacaggactctaacgcactaagcatcgacctttattaagggggggaacacatgatatctggcttgcttttatgcttgcgttatcctgtgtggtatgtttcggcccctttttgctgggtggattccgcttagcatggaagagtctcgtttcagcctctctttacggtggacccatagagggcctacatcgaaagattgtcaccggatggttggaagcgctggtgataggatctggtggcgacagggttcttcagaggttggggactataccccaacattttacgctcatgtctttggcccctggagagttaaaattaactagcgcacagtgcacaaggaaagtgggctgggattcatggaggaacgcaacaattgggagaccatttcgtgacaaactgctttggctgcaagcaatcatgtgaaacacctaaaagggccagtaatttttcacgcgaaaggataccttaacgggatttggttggcctaggttttcagcaacacgggttatcgtcgggttccattttgacacaaactttagaggacagggttcttccttttccataagagttctgaacccccaccataagagggaaggtttccaagtccgaaaggacgagttgtttggaaggcggaatacacaacaggaataccgtcccccgagagtgggggtcgccggacaggcagattggggaacacggaaaataaccgccttccccgagccttctggtggtcggaacaa

SEQ ID NO: 684723 - DNA, 153 bp, Homo sapiens
ccccctcctatcatgcatggtagaaaggctggcttcctgtattcattttgttgagctgccataacaaattaccacaaactggttggtttaaaacaacaggctgggcgcggtggctcacacctgtagtcccagctactcgggaggctgaggtgg

SEQ ID NO: 684724 - DNA, 245 bp, Homo sapiens
ttttttcccccccccccccaaaaaggcccaaaattttcggggccagggaggttttggctttttcaaaaaatccccttggcccggaaaaaggggtcccccctgggtttgaccaaccggccccgggggtggggttttttaaaaccacccccggagggggggggggattcctctttttccccaaaaaaaaatggggaaccttttccccgggcttccctttaaaaaaaagggcccttttgggtccccca

SEQ ID NO: 684725 - DNA, 565 bp, Homo sapiens
tcgatggcactaccagagttgagggagtcaacgtggacgaagagcaggtttcgacttgcgctgtactaggtcgcatctcatgaaacagttcgacggtgtcatatgcaacgggcacatgggcgtcaagtggcgatggcgaagcaggtccggcgggagcttgaccaacgcgatcttcccattggcacagcatacgagacgtagcatcccacaccctatccgatgcatcgacggaacgttcacccgtgagagagggtggtgggcccatgtcaaattgcgcgcggcgttctcggtactgcttccataatgcacgtaagctgggaaccacaggatcgtctgggaagctcgatggggatgcctgggaatcggaagcgtggtttactcgccgattcaaaatgtcatgcgcttgggcatgcacttcgacacgacaagccgtacagcgaggcaaggagatggcatgctctaaaaagacccagtcacagccaaatactttgtagtcgagcatccactgcaaatggtattgaacatgtgcctcgtacggctggaatgtatgcatggcgcgcccttg

SEQ ID NO: 684726 - DNA, 83 bp, Homo sapiens
tattttcagtattttctacataatatggtaaaatgtagagcaattgcaatgcatcaataaaatgggtaaattttctgaaaaaa

SEQ ID NO: 684727 - DNA, 748 bp, Homo sapiens
gcttttgctggtgtagctcgtccggttagccttcaggaagattggcataagccaagcaaatgactaatcaagagtctgccgtacatgtgacaaatgatgccagaattccagaaaagtatcatttcgaatgaagaaccgtacaagagtagaagaaattatctgtggtcttatcgaaaggaggagctgcggcaaagcttcagataatatcggactttgatatgacagctcagtagattttcatataaagggaaagagatgacgcaaatgtcaataatatgattgacaatgtaagctggttacaggatgattgtagaataaagttattgcaattaaatggaaaaatactactgctatagaagattgatccgtgttcgttactgtagaagagaagtacccttatatggtggaatggtagtactagaatacactatggttagcgttgtacagcagagctttaccaaaagctaagctgtacagaagattgtggcagaatctgaggttatgctcaaagaaggatatgagaattggttgataagctcaaatcaagcatagcatcccgggtgttacatatgtatcgggtgtgaatctggcgatgtactagaggaagtcattcgtcaagctggtgtatatcatcccagatgtggaaaagttgtgtaccaattttatggattttgatgaaactggggtgtcaaaaggatttaaggagaatattttcatgtattaacaaaatgatggggcttgaggaata

SEQ ID NO: 684728 - DNA, 219 bp, Homo sapiens
gctataggcccttctcatctgtcaggggctgaagaaacaggggaccggtaaaccaagcacacaggtataagtccacagaccaggtgaaggcctagatggcaaaacacatggggcttggtgactccactacgtgacttccagagctaagagcaggacgtgacttaggtgacgctgttccgaagaccacgtgagctcgatggttcccatgtggcatgggac

SEQ ID NO: 684729 - DNA, 1022 bp, Homo sapiens
  misc_feature (504)..(504): n is a, c, g, or t
taagtaactgggtctgtaagtgcttttctctaaaacgtccccggcagattgaattgagggccagtgtggcctttggcagaggcaggtgtgtgtggccctcgttaaaggcaggtgctggccgcgccagggcatctcaggtgcgtgagtgtgtgggagcgtggtgcttccacctataagccgtgtggatagggggactgtggtggcattttaaaaatgtggtaaaaagcggcattccttttgtggattctctcctgtgggcgggagtgtgaacctgtgcaggtggccaccccaagaaacctgtgtggtctctgattgcactgtgcaagcaagtatacccagcttctctctcacctccgagtttctcacagtgtggcctattatatgtgtgtaattattaaaattctcaagagcgccattgtggtggaattatgcaaccctatagcattgtaaaaacattaccacctttgtgtgtgtgcgcccactgtgtgacatttgtgttcaccnagaacagttgtgttcacccagtgtattgtgtgtgttttgttgacaccccctgtgtgtgaagccgtgtatgtgtgcgcccccggtcccctgtgtgcctctgtgtgtgcccacctcttttctgtgtctcccggtgttcacccccacaaggacaaccctctgtgtgttgtcgggaagacagaggctcacaaaatctcttttccagctttcccggtgtgtgggagcatttcttcccctgtgtgtacactctttgcaatctcacgacaccatgtggacttctcaagagacggctcacttgaacactccggctagagccagacaaacgtggggtgctctgggagggcgttattttccccccccactactttgtgggcgtagggagtgagaagggacctaacaggttccccggtgggacttcttattaaacccttccccaagaaagcgagagggggccctccattgggacttccatttctcccaaagacatggtgccttgcaccatttctctggagagagaaccc

SEQ ID NO: 684730 - DNA, 81 bp, Homo sapiens
  misc_feature (14)..(14): n is a, c, g, or t
  misc_feature (51)..(51): n is a, c, g, or t
ggcacgagtttatnagctatctttttccccatgtaaaacttcaggtaaatnctttgcagattttttacttggaagaatgat

SEQ ID NO: 684731 - DNA, 137 bp, Homo sapiens
ctcttccaaactgccattttcgtgccttttaagtatgctttgtaattggctgttgataggtagacatgatacactgggtaaaaggaattgcagtaaacagggctttcatcctgttttcaggtgttggggataacata

SEQ ID NO: 684732 - DNA, 111 bp, Homo sapiens
ttctcgtctatcactgattagagtggggtggcaggtattagtggatatatttatttagcattctgaccattctgactctgcccagaacgccgtcccacctgcagacaccct

SEQ ID NO: 684733 - DNA, 173 bp, Homo sapiens
ctacattatggtgatttgagacccagattctgccctcatttgcgccggatgtgtagggctgaccctgggtttccaaattcctcttgttatctcctcacctctcccaccagattgctctcccaccttatatttcttcctccatagctttacctctccttttccattgccttaga

SEQ ID NO: 684734 - DNA, 210 bp, Homo sapiens
  misc_feature (11)..(11): n is a, c, g, or t
  misc_feature (20)..(20): n is a, c, g, or t
  misc_feature (28)..(28): n is a, c, g, or t
  misc_feature (84)..(84): n is a, c, g, or t
  misc_feature (183)..(183): n is a, c, g, or t
ctcaccctganatgggagcngtcttccnagcccaccatccccatcgtgggcatcattgctggcctggttctttttggagctgtnatcactggagctgtggtcgctgctgtaatgtggaggaggaagagctcagatataaggaggtggggagaccaccccacccccatgtccaccatgaccctnttccaacgctgacctgtgctccctccc

SEQ ID NO: 684735 - DNA, 560 bp, Homo sapiens
  misc_feature (328)..(328): n is a, c, g, or t
  misc_feature (332)..(332): n is a, c, g, or t
  misc_feature (352)..(352): n is a, c, g, or t
  misc_feature (385)..(385): n is a, c, g, or t
  misc_feature (395)..(395): n is a, c, g, or t
  misc_feature (435)..(435): n is a, c, g, or t
  misc_feature (447)..(447): n is a, c, g, or t
  misc_feature (492)..(492): n is a, c, g, or t
  misc_feature (506)..(506): n is a, c, g, or t
  misc_feature (538)..(538): n is a, c, g, or t
  misc_feature (548)..(548): n is a, c, g, or t
ttgttttgtcgcctacgctggagtgcagtggtgtgatcacagctcactgcagcctcaacttcctggactcaagcgattttcctgcctcaacctcccaagaactaggaccccaggtgcatgccactacaccaggctaatttgttgtagagaggaggtcttgctatgttgcccaggctggtctcgaactcctgtgcccaaaagatcctcccacctcagcctcccaacatgccagggattacaggcatgagccaccctgcccagctcaataacctaagttctatgaatgaaaaccatgactgcctgtgggagtgagggggccgtcagtggntggnggagctgggtgaagacccanccaggcccagggccagcttcaggttgaccttantccccccagnttcccactttccccttccccaagtggttttgggccgcagnattaaggaacantgttggggggttgttgaaaagagggggacgcaaggttgggggcantgcattggggaccnggggtgttcagggacaagcaagcagctttacngttttgtagntttcgtttgttt

SEQ ID NO: 684736 - DNA, 319 bp, Homo sapiens
  misc_feature (18)..(18): n is a, c, g, or t
aggtcttttcccctcaanagctcagtaatctttccacgttctcccttttcctgagaggtttactcactgagaagttcaggctggtttcgaactcctgatctcaggtgatccacctgcctcggcctctcaaagtgctggaattacaggtgtgagccaccgcgcctggcctaatttttaagttacttgtagagatgtggtctctctgtgtttcccaagctggtctcaaactctaggcctcaagtgatcctcctgcattggccttccaaagtgttgggattacagtcatgagccactgtgcccagctgcgtttcacttccga

SEQ ID NO: 684737 - DNA, 116 bp, Homo sapiens
cactgggtataaaccacattctttattaaaaaaaaaagaaacaaaagcagggtaggtggggagcagtggcccatgcttgtactcccagcgcttggggaggttgaggatggtccgca

SEQ ID NO: 684738 - DNA, 245 bp, Homo sapiens
ctgtcagtcgctctgggcataaacactaatgtcaattaaggcttcaactcaaggttaagtcaaactcaagtcaaggctgaactgactctagtgtcaattagggctggatggttggctatacacatggtattgggaacaactatctccaaaatgaattttctgatatccggcagggagtgagctcagactgaagacttgggcacagtgatgacatttataagatttctgtccagtatgcattctct

SEQ ID NO: 684739 - DNA, 689 bp, Homo sapiens
taaaaaggttcttggtttagccccccctccatgtttttaatcgaccaaaattgttggcaaacccttgagaaacaatttttttatattgccctctccaaaaaaaccggtgtaaggaggctgcccaaggttacagttttggggttccattttattccggaaacagctctgagtagtaactgccccttattgtatgtcgccaataatcataaacctgctccatcaaaaaagtagtatttccgcataattgatttgcctaaacttgcaatccacaaagaacgtgatgtgttttgtaacctgagcaagtgtattcggcaatccagagagatgtaaggtgcattttttccctccccgttgtgtcactccttgtgatgatagagggccatactacccgtttcagaccccatgtaatcgtgtcccgcatggagatgggctaagtagatagcaattggtttctcgcttaaggcaattcgccgctttggtagttgccataacctgtctcacttgacctgaagcgtctggcttcaattcacagggctcttttttgctcttagcatgcgggttccctaccacaggagcaaccagttctcatgggtggcactcagtctatcttctcccaagctcacctcatttttttcctgccccagttattttttccaacgactaaaacattaaggcagttttctaaaaaa

SEQ ID NO: 684740 - DNA, 99 bp, Homo sapiens
gccagcaccaaccagacatctatgtacctctgtgccagcagtttaccgagctcctacaatgagcagttcttcgggccagggacacggctcaccgtgcta

SEQ ID NO: 684741 - DNA, 100 bp, Homo sapiens
  misc_feature (55)..(55): n is a, c, g, or t
gccagcaccaaccagacatctatgtacctctgtgccagcagtttattcggcagcnaacaccggggagctgttttttggagaaggctctaggctgaccgta

SEQ ID NO: 684742 - DNA, 89 bp, Homo sapiens
gacagcagcttctacatctgcagtgctagagcggcccgagctcctacaatgagcagttcttcgggccagggacacggctcaccgtgcta

SEQ ID NO: 684743 - DNA, 862 bp, Homo sapiens
gcccggatcaccgtacctctcggcgtggttgccggagttcccgactgtgtctgtctctgtcgccgtcccgtctcctgaccaggcgcggagccctgtgagccggggtgggccccaggtgcgcatatcatgtgctgttccgcaaagcgcgctgggctgcggggcgctgggcgtatggggttactgtgcgctgtgctgggcgctgtcatgatcgtgatggtgcctgtcggctcatcaagcagcaggtccttaagaacgtgcgcatctgaccccagtagcctgttcttcaacaatgtggaaggagatcccttatcccttctatctcgtccgtcgtacttctttgacgtcatgaagcccagtcgagatcctgaaggtgcgagaagctcgcaggtgttgggagcgcggtgccctacgtgtacagggagttcaggcacaaaagcaacagtcgaagccttcaagaaacgaactgacaccgtgtccttcctcgagtaccgcaccttccagttccagccctccaagtcccacggtcggagagcgaggtacatcgtcatgcccaacatcctggtcttgggtgcggcggtgatgatggagaataagcccatgaccctgaagctcatcatgaccgttgtgcatttcaccaactcctcgggggaacggtgccgttcatgaaccccgcactgtgggttgacgatcatgtgcgggctacaaggacccccttggtgattctcatcaagaagtactttccaggcatgttccccttcaaggaccaaatcgggattattgctgactcaaaactccagaattctgggctccttcagcggtgtcacggggggtcaaacattagaggatcactcgtgccagtgaa

SEQ ID NO: 684744 - DNA, 100 bp, Homo sapiens
gccagcaccaaccagacatctatgtacctctgtgccagcagtttacatggcccaacttcctacgagcagtacttcgggccgggcaccaggctcacggtca

SEQ ID NO: 684745 - DNA, 98 bp, Homo sapiens
aagacagcagcatatatctctgcagcgttggagggactagcccgccgagctcctacaatgagcagttcttcgggccagggacacggctcaccgtgcta

SEQ ID NO: 684746 - DNA, 204 bp, Homo sapiens
tcccactcctacccctgacctcccatctcccgaatatgggcctccagtctctctgctggatacttgtaattccctcctaactagaactatcctagtatctatgtcactctggtccagatactgtattataacgggaaataggccacaattaaccttcctacacggagttctaggccacatacaggctcctagcttcagcaggct

SEQ ID NO: 684747 - DNA, 97 bp, Homo sapiens
gccagcaccaaccagacatctatgtacctctgtgccagcagtttatctcagggccgtgggggctacaccttcggttcggggaccaggttaaccgttg

SEQ ID NO: 684748 - DNA, 96 bp, Homo sapiens
gccagcaccaaccagacatctatgtacctctgtgccagcagtttatcgtacggggccaacgtcctgactttcggggccggcagcaggctgaccgtg

SEQ ID NO: 684749 - DNA, 146 bp, Homo sapiens
gcggccgcctactactactactgctcgaattcaagcttctaacgatgtacggggacatggtaagtactgtgtaagcgtaagctgctatatttatgtgtgtatttgagcctgggcaacagagtgagactccatctcaggaataaaaa

SEQ ID NO: 684750 - DNA, 94 bp, Homo sapiens
gccagcaccaaccagacatctatgtacctctgtgccagcagtttacccggcgaggatacgcagtattttggcccaggcacccggctgacagtgc

SEQ ID NO: 684751 - DNA, 101 bp, Homo sapiens
agtttacaatcacgtgtccatcgagcacgtctgaaagcccctggtagccccgacttctttttaattagaataaggtacgcccttcagaaaataatagaaag

SEQ ID NO: 684752 - DNA, 346 bp, Homo sapiens
catgaacaagatttaaaatttccctttgccaaatcctgtgtagagggtcctgcccacccatgggccttccatccttccaacatccgtccttggccccttcgtaaacttatacatttgcaaactgcctgatttcctttggggaattattccctataaactttttgtaaagtgtcagtgatttcacccattctttcacccaagcttcaccataggttttatgtttgttcttgcttccatttaaatgcagaatttatgttgctctgataggggctcttttcaagttgatgtcttatgcttcttagtgcctcaaactagatcctgctcagacatgttatagccaagttag

SEQ ID NO: 684753 - DNA, 937 bp, Homo sapiens
cttatttcccgctcctcctgtgtgccccgggccggtcctctttccctttgattgccgggcccatccggcagaatgaacagctcggagcgaagaggaagcgagctgcgcgctcgattaccagtctgaaggagcaagcaataggcgaatatgaagagcttagagcagagaaccagaatacacaggagacgtgtgacacacaagttaggccagaacgagatgaagccgtacaaaaactggcagaatttcagacccaatttctcacatggtcatcgcggctgtctattacagtgcagaagcatcttgaaactagagaagacttgtcgagaaagtgctgaagctttggcaccaaggctactaagaaataaacgtgagagacttcgcactgtggtacatggccaagctgggaccagatgtatgtaactgaagagatcacattgatgaatgaagattcgactacagacacagacggtgccgccgagacttgtgtctcagtacagtgtcagaagccaatttaacgaaccttcgagatcccacattgtatctgttcaggaggcaaccggaacgatttcgcccttggaggctggaaatctcaagagcaaactcgtaaagtactgaagcagttacaataaagttcagcaggacagacggtttaaccttccggaagtttcttgtaacgaggcaccggtctttggaaaaactggcatggagtgtgcccggttagcctgtgaacaagcttttggcgcaggtccagtaaccgtggggtggggaaggcccctgtcaatagaatccgacattgccccagtggtttttggggcaagcctatgaaaaccctttgggggaccacagcttaaatggtgtataccttaaatgaccccgctgtgacacgagttactccaccgcatattacacaatagccagcaaactctccggccgtagt

SEQ ID NO: 684754 - DNA, 90 bp, Homo sapiens
  misc_feature (45)..(45): n is a, c, g, or t
gacagcagcttctacatctgcagtgctagagcggcttcggcagcnaacaccggggagctgttttttggagaaggctctaggctgaccgta

SEQ ID NO: 684755 - DNA, 87 bp, Homo sapiens
tctgtgtacttctgtgccagcaggtccagggggccgagctcctacaatgagcagttcttcgggccagggacacggctcaccgtgcta

SEQ ID NO: 684756 - DNA, 1344 bp, Homo sapiens
  misc_feature (517)..(517): n is a, c, g, or t
  misc_feature (541)..(541): n is a, c, g, or t
  misc_feature (545)..(545): n is a, c, g, or t
  misc_feature (563)..(563): n is a, c, g, or t
  misc_feature (594)..(594): n is a, c, g, or t
  misc_feature (661)..(661): n is a, c, g, or t
ccacgcgtcgcgacgcctcatggagacccatctaccttgttgggagatccagtgtccagagcaggtggtcggtggcatctacggggttgggaacaggaagcggggcgcacgtgttcgaggagtcccaggtggccggcacccccatgtttgtggtcaaggcctatctgcccgttgcaacgagtcggctttggcttcaccgctgtaccgtgaggtccaactacgtgtgcggcatggcgttgcccccagctgtggtgttatgatgcagctggctagatcctgcccgtgcagatccccgttcgacaacagctagtccgccccagtccaggtggtggcggagacgcgtcatagcgcaagggcctgaaagaaggcatccctgccctggacaagcttacactggacaagattgtatggcggccttcctgcaagcgcgctgccgcgcccggggactcgcagtcaccagcagcaccacgtcctcgaattctcagacgacacctggagactgtcccgacacagcgangctcccctgagaggtttctggggncccntgcgtgccatcactcaancataacacttgatgccgtttctttcaatatntatttccagagtccggaggcagcagacacgcctcttagtagggacttaatgggccggtcggggaggnggagggggatgggacacccaacactttttccatattcttcagagaggaaactacagatgtaccaaactaattttaacaaacgcattcaagaggtattatattgggtacaataggcccgcagatggcttttgcacccagcaaaggggaaaggaacacgcgaggctagatgatttctagcaggacaggaagtcctgtgcggtagtcaccatgagacacctccagagtgtaactaggtagccattggaatacataaatttgcgtcaggtggatgaaaaagcacaacacaaaacaaaaaagaaaagaaacaaaaaaaaaaagaaaaaacaacagcacaaccacacaaccaacacaaaacaggcgacagagcacacacaacacaaaagcggggggggagaccgcaccaggaacgagacaggatgcagaggggaggcacgaggagggagagagaagaggaggagggcgaaacagaggagcgagcggaagcggaagagagaaagagggggacgggaggagaggagggagagagagaaagagaagaaaaggaagagaaggaggagagagagaggggggaagcgagaagaaggaagtgaggcaaggagggagggaggagggccagagaaaggggagaagggacacacaggaggagggaagaaggccagggagagaagaaaacagggaaaagc

SEQ ID NO: 684757 - DNA, 411 bp, Homo sapiens
ggctgtctagaggatccacgtatatgtaccatgtgtagcatatatcagtacttcattctttttatggctgaataatataccatggcatagatatataatcatgccttcttagtgatggggatatgttctggaaagtattattaggcgttcttattatgccagtgtcatggggtgtgcttacagaagcctaaatggtgtagcctaatggacactaggaattatatggatagcttttgctcctaggctacaaacctgtacagcacgttgctgcactgaatactgtaggcaactggagcccactgttaagtatttgtatatctaaacatagaaaaagtacagtaaaaaacagtgatataatctcatgggaccataccatagtcatatatgtggttccttgttgactgaaacatc

SEQ ID NO: 684758 - DNA, 649 bp, Homo sapiens
taaaaacataacaggggaacattaagcgatgtacggaagaaaagtagtaattttctgatggcacagtttgacacagtaagttaggttcaataggcaagaacttaaaagcatgtctcaaacagcaagaaaattcaattttcaaattaaactattacttctaatggggtcacatttttaactacagggataattatacttaaagcagcgaactggtgtctgtctcttcattcattttcccagccgccaacttactttaccacttatgactgcacttgtcagtatgagaattttattgaatcatattgggcaagcagtgattttaaaacctcaagtttttacacatgatttatatgttctgtataatgtccagtttgtaactttttaaaagtttgaatgtatagagggataaataggaaatataagaaattggtaatatgggggcttttatccttactgtatttagaaatacaagggtattgatatgaaattatgtaaattccaaatgcttatgaatcgaatcaatgttgagcaaaagatctgttggtgtgtaaataatgtgtggcaggcatttgagagacataaatattcccataattatgttttggatcaaataggcataaaaaagcctagtaaaagtgcctattctgca

SEQ ID NO: 684759 - DNA, 961 bp, Homo sapiens
cgtccatctactctaccatctttgcaaggcacactcatcacagcgctaagctcgcactgattttgtacctgagtaggcctagaaataaacatgctagcttttattccagttctaaccaataggaaatagaccctcgttccacagaagctggcatcaagtatttcctcacgcaagcaagcgcatccagtaatccttctaatagctatccgtcttgcaaggaattgatactcctcacggactaatgagaccataacctaattaattaccatatcaatacttcatcattaagataagtcataatggcgtatagcgaataaaacttaggaatagcccccctttcacgttctgaggtcccagaggttacccaaaggcacccgttcgtgacatcccggtctgattcgttcttgacatgagcaaaaactagcccccatctcgaatcatatgccgaagatctgtccctcacgtaaacgtaagccttgtcctcactctctcagatcttgatccaatgatagcaggccgttgaggtggattaaaccaaaaccagctacgcaaaatgcttagcatatgcctcaattacccacataggatgaataatagcagtggtaccgtaaatcctaaataaccagttcttaatttaactattatatgatcctaatagtacgcattctactagtcagttaactcagaccgaccctactactatgtcgcactggaagaggtaaatgataaaccgttattccttcacttcttcctaagaggtgacccgtacgctgtttgcaagggctctctgcaatgctccaaataagggttttccccataagaaaaccctttattaataaaggatatccccaaaaccctctaagaaaagatggtggaaccctccccagaagacatcttgattaaaaaaaggaagggggggctagatgttatgttgtctgtctttatttcttatcatgtgtgt

SEQ ID NO: 684760 - DNA, 131 bp, Homo sapiens
gaaagtagctgaagtcgatatcagatctagtgacgctttgggccaagatcatggggtttctagatatagaatcatatcgtctgcaaacagagatacttcgacgttcctttctttttggcttgccttttatt

SEQ ID NO: 684761 - DNA, 191 bp, Homo sapiens
  misc_feature (134)..(134): n is a, c, g, or t
  misc_feature (181)..(182): n is a, c, g, or t
cctaagtggaactgctccggctttcaagcccgcgagcctagcccaggcgcatgacagatttgcgacaggaaggcctgtcatccaagcgtcaccataacttcatggagctgacaccgacgcctacatagcctgangtttggacaaacaatgtcgacctggccgcgtacgtttggccggcacnntcggagcag

SEQ ID NO: 684762 - DNA, 153 bp, Homo sapiens
gtcggggtttcaccatgttggttaggctggtctcgaactcctgacctcaggtgatcggcccgcctcagcctcccaaagtgctgggattacaggcgtgagccactgtgtccggcccaaaagctgcattttcagttcgagatgaaaaggtatttc

SEQ ID NO: 684763 - DNA, 105 bp, Homo sapiens
tgtgtgtgtctaagtggtgacggtatgtgtggtgtaggggtgagtggtgatggtggttgtgtggcgtgtgtgtgcagtgttttcggtgacgggggctcctgacga

SEQ ID NO: 684764 - DNA, 476 bp, Homo sapiens
ggaacaagtgatgtggaattaatgggtgcaaaagctgtacagacaatccaataacacacacagttctggaaaggaacacatcacttgtggcttgttggatgacgcttgtcaccattcctaatccctctccccatccgtgtttcaatttggggaacacttgtatctgctggtgtcagccaattctgattctgaactagcgactcacaggctttttacatacacacacgccttgctctttcatattctatgcgtgtccgactcgctggccttcatgacactaacagcgccaggccacaagttgtgcagacacctcggtcttcaccggaccatttatctttctatttgtcctgttttacacgctaagtgtttagcactttaaagatactctaattttcagaagttcaatacttgtacaaaggtaattctactgtacggtgactaacaggtaccactgacgaccaacaagggttacttga

SEQ ID NO: 684765 - DNA, 286 bp, Homo sapiens
cgacccgtagcgtcggtacaattgacgtgggcaacgcgcccatagatgtcccagtcatcgagcagtaccccctggaggtcgaattcgacacctctcgacttcgccccatacagtgtgtgctacgccaccgatatcattcggcagcgcgtagctatgccgcctgcgccaggttatcgagccgcatatatcaaacaaggcgctcgaagcatacaggcgcccgtctaaatattcgacccttcaacccgacttgggtgtataatcacataggttggctggaacgtaacag

SEQ ID NO: 684766 - DNA, 405 bp, Homo sapiens
ttgcggcgttgcccctggggtgcaatactgcaatcttggctcactgcaacctccacctcctggttcaagcgattctcctgcctctagctgggattacaggcatgcgccaacacgcccagttaactttttgtatctagtagagttggggtttcaccatgttggtcaggctggtctcgaactcctaagcttaggtgatccacctgactcggtctcccaaagtgctgggattacaggcgtgagccaacacacccggtcagccaccacatcggcctttttttttattttttttggcctcgacactggcgtctcaggcgggtttcaaactctggggccccagtgattcacctgccagtggccccccagagtgttgaaattacgggtgtgagcgaaatagtctcactctgt

SEQ ID NO: 684767 - DNA, 905 bp, Homo sapiens
ggtccgccgccagtcctctcaacgcgcgcttggccgcccgagacgcgggagccgacgcgccggacgaggctcgctgcgctcccttgttgcccagcgcgggcccgttgaggcggagccctcagttccgggccaggacacggtctgggccgcgaatctccggcgaagagcggcggggcaggggggggaacaaattgaggatgaattgtgctgccgtgtcttcttttcaacaaggctagtgcgaaaacatgatatgtggaaccaaagaggcagtcgagaggttgtgtgaggaatttggaccctaatacttcaggacaatttaacaattcagtgtatccagaaaacccatcgaagggaccgggctacagatgtatcgggtcactaatttcaagagagtggatcctgatgtctgaagcctgtgaaaacagctgcatctgtgttatagtgacctggtctggccaaaggaaggctcactctcttgggtgccccatgtgaggtgtgtgtcggtatggagagacacaccagtgctcatgtgtggcccgtttgaaaataccgatgacgaccagggttgagcttctcagggaaaagttacccaggcccttgataaggttacctcttggttatcatcaggatcctccttcctcagatcgacgaaccacggacggacttggtgtggcaccccattcggtggctgcagccgagtccgtgtccccgtttcgatttattttcacttttcatgtgggccttggcccaaaaaccccgatgttcggcgaggccaaaacatacccccggctgggtccacccggaagaaacctccgcccggggggccccggaggggcgcaggaccctgtgccacgtggggtggcaaacacacacatgacggtgggacacactccaacaacggagcg

SEQ ID NO: 684768 - DNA, 1217 bp, Homo sapiens
agggggcaagccatggaggcgacgcggatgcggatgcacctgggagcgacggtgctggcccatggcgcgcagctgggcgcctccttcctgacaggccaggcatggatctgtgagcgctgatgaggctgcccgcacggctcccattccaccgtcgacctctggttctacttcacactgcagaactgggattctggacttatgggctgtaccattgccatgcatggtattccctctcgacgtggtttccactcaacaagcccagtgatggggactacattccacatggcctacaacgtcatcaccgccactttactcattgctcaagctcatcgagcggtccccccgcaccctagccaacgctccaatcacgtacgttgagcatcatcatcttcactcatgggtgccagcatccaccatggtgggtgactctgtcaaccaaccgcatgctctccagtggataccagcacccaccatgtctgtacgatgagaaccccatcatcaagaatctacacgccggaggacgctgatcgactcctttgagctgctctactcatatgatgagtacctgggtcactgccatgtggtacatcccccttctacactcatcctccttccatgtactatcagcggctggcttactggcatctaaagctgagagcctctgattaccagggcctgccatgctcactggtgagcacccagtgggacctgcactaactggtaccatggtaaccgaggcccaagcatcttcacaatccctccatgcaatcatatcacaccagttcttcgccatcgcttgggcactcgtaccgtgcaccaggaaaggcgcagcgcgaccatacatcaggggacacgaacagggcctctctacctatatctcatccatcggcagtgccccgtgtgcgtgggtgacgcgactaggacgacgagatgttgtatatgcccgtcacacagaacacagacacccacgggttacaacaccgccaacgaccagccaagggaacacaacacagtaaagacagagacgaaaaaaaccacaagacacggacagaaacaacgaaagacagacggagcagacgcaaaaaacgagaaagggcacgggaacaaacgcgagacaggtagccgagagacggacgtgagaccagggcagcgagccccgccgcgccgccgaacagccggacgacacgcggaacaagacgcgacgcgagccctacgaa

SEQ ID NO: 684769 - DNA, 435 bp, Homo sapiens
  misc_feature (36)..(36): n is a, c, g, or t
  misc_feature (48)..(48): n is a, c, g, or t
  misc_feature (121)..(121): n is a, c, g, or t
  misc_feature (123)..(123): n is a, c, g, or t
  misc_feature (125)..(126): n is a, c, g, or t
  misc_feature (310)..(310): n is a, c, g, or t
  misc_feature (312)..(312): n is a, c, g, or t
  misc_feature (314)..(314): n is a, c, g, or t
  misc_feature (316)..(316): n is a, c, g, or t
  misc_feature (368)..(368): n is a, c, g, or t
gccaacggtgtgacgtcatgctctaacagcggcatncctggcgctccnattatcgaatgcggtctgcccactgttgcgccagagcgggagtggcaaccggtacccacttccccagaggcanantnntgcgcttgcatatcggcccattgcccattgccaagccgtatagccgcatcgaaccctttgcgcgatagatcctgcacggccaacgatgcatcaatatccagtgcaatgtcggcataagtcgcgtggaaagatggcaggcgcggcattaaccaataatgtgcaaaagaaggcagcacgctgatancngnanacgctttggccaggcgtctgacccggcctattccctgttgcaatgccaacangtgcggctcgcaaccgccaacaactcacggccggcagcatttagatgcaacccccgcccttgtcgtt

SEQ ID NO: 684770 - DNA, 220 bp, Homo sapiens
gtcgtatgttctaattaaaagctaaaaggacttgcagctccatcagtttcaccccacaatatggagagcactcaggtcgaggcgtactgctcccagctcctgcaaaatagcgcaggcatggtctgaggcgagggcgatgcttccatgaggtgtccgccgactgcgtcgcgatcctcaatggctcagtgacttgctggccttgagcattcgttgaaggatg

SEQ ID NO: 684771 - DNA, 239 bp, Homo sapiens
tttttttttttaccccaaccccccttatcccaggggggttttattttagggggggggggggggttttccatttgggaaattgccccccccctttcccccaagggttttccaagggtttcccttttgggggttaaaaaaatggggccccccccaaaaaagccccttgggttggttgggggggggccccccaaattttaatttccgatttttttttccaaaaaagggggttttttccctca

SEQ ID NO: 684772 - DNA, 735 bp, Homo sapiens
agcgggtttgatttgtacttccctgataatcagagatattaagcttattttaaattaattaattagagacagggtctcgctctgtagcccaggctggagtgcagtggtgtgacctcagttcactgtgacctccgcctcctgggttcaaacaattcttctgcctcagactcccaagtagctgagactacaggcacacaccaccacgcctggctaatttttgtattttcggtagagacggggtttcaccatattggccaggctgctcttgaactcctgacctcaagtgatctgcctgctttggcctcccaaagtgctgggatgacaggcatgagccaccaggcctggcctccagtctgcaattctaaggcaggacacacgctccttgaatcatctcagttgcccttgtttgatctatgtccaactctagtccacctttttatatacatatatatttatttatttatacatttcattggtagacgccttctgatgatgcccaatgtggtagtgagttggcaaaaacagcacacagagcaaatttcatgactaacctcccattagtgcaaggttgccctaggactgtaataaatcagatcgtaatgaagcctggtatattataaatagttgtgtcccatgtttattacataatgcttatgatgtgctgtaattgcaaagagtgcaggttttcacatcagaaataccttggttgattcctaggcacttatctggtgtgaa

SEQ ID NO: 684773 - DNA, 891 bp, Homo sapiens
ggcgaaaggaacactgactgaagcttttcctgtcctaggtggaaaagcaattgaattttgcatagctcgtatggtagggcaagtctacagtgatgtcaacatatgattataccatattctttccatgggatagtgtgtactagctcctcagttaaacattcatagcatcggaaggaatcaaccgctttgatgttcagtacctccttgaaaatacgaagatctaggctccctgcatcaactttgaagaactgggtccaaacaactgcagcccagtgagtagcaaaaacaaacacctttaaggatcaagagatgtctagccaaataagcgtcaactattacatgcagatggtcctgaacgatataaactttcatcaacccaagcagtggggcaagtaactcccaagctagccactactttgtgcaactcattcatatgcaatctgaatatgacagccaactgttggaattcatacattcgcaccaagaacaaaaaggcagacatgggttcaaggcagattgcctatccaacaatcaagtattctgattgacaactggacgaaaaggagattaataccaattacagaaataacagatttcgccatgacgcacaactcagtgatatagggcaccggccttagaacgaaacattacgacataaactatggtaagcactcaataagcaattatgtacctaaaaaaacccattgcaagcatttaaggaataattcacttgagacaattccatagcttacatggcacatatgctcgggggacaagggacgaacaattccagagacaaagtacggagcacattaacaagccacaaagatataaagcaggccaatagattgggatcaccttcgcttaaccaggaggaatacaaatacctac

SEQ ID NO: 684774 - DNA, 1236 bp, Homo sapiens
ggcctgcaccagctgttgcttcgctgggcttgggagtgccctggggtccccgtggcgaacagagggctgctgtgtggactgacgccgcaggggcgagctagcctggctccgctgcctctccgctgggatccagacgcctcctggtggcttgctggctggagtggtctgagtgctgtgctgcggtgccatggctcaccgtccggggattttgccaaccagcactctcgcagtggaccctgagtgagctcttcaccaagctctgactgcattggccagggctcgtttggtggcaggtctacaagtggcctcgataaccaccaccacatggaccgtggtggccatcacagatcatcagaccatggatgtgacggcctgaggatgacgactcggagggacagatccatgcagtgagatcacgtgtcctcaggttcaggttgcgacaaggctcattacaatcagcccgcttaccttactggctcctacctacaagagcaacaagctattggatcatcatggagtaccttgggctggcggctcaagcagctggaccttgcttaaacccaggtcccctggcatggagacatagcatttgccacggatccttgcgttagattctgcaacgggccctggattagtcttgcacctccgaaacggcaaggaatccaactcgagaccatcaaatgcttgcacacgtgctaactactcgggagccagtggttgaccgtgacagctggcggaccgttctggcgggtagccacgggccaagcttcacatgcactgccgccagcatttacatgagggaagccaccatttcgttgtggccggccccactttcctctggcatggcaaccgtgaccggtccattcctgcggcaggtccaggcacatatacgacttacaccgggcgtgaccatccttgtatccccatgggggattcatgcaggcaccacattgggatcgctttgcgccgatctggtgtgtgtggtcactcgcacaaccacttcatgtgacccctcgctaatccccaatatgtcgtggtgttaccgtggttcccgcgtcactttccccagagggaacgcagttgcctagacccccagtacctggtgtagtggtgcccagtggcacacggaccaaggcccctttcacagtgcaagcgttacgcagtgtcgagtgcccattacccttcacagcacagaaaggacaccacccgtcaattctccggtgcacagcaggtagc

SEQ ID NO: 684775 - DNA, 342 bp, Homo sapiens
gggggggaaaagaaagacccccagaaagaaagaagaaaagagtgggggttttggggaaggggagggggaattatgtcaaaaggtaaaaaaagggggaaggggggtggaaggaaggaaggaaaaaaaaataccccgctttttttgaaccagcagatttgcaaaatgggccctcagtgcaaatggcccccctcggctggggcagagggctctttttttttttttcagaaagagttttttgggtcaccagggcacccatagccactttactcatttgtgttacctgtctggcccccgaaagtttttgtgattttgatccccaaaaaaaccataaagctttcttca

SEQ ID NO: 684776 - DNA, 1331 bp, Homo sapiens
  misc_feature (811)..(811): n is a, c, g, or t
  misc_feature (964)..(964): n is a, c, g, or t
  misc_feature (1196)..(1196): n is a, c, g, or t
cccgtggcgaggcgctgtttgttttgcttcgccgcccggcgctgcgttatttatgttgctgtactgctgtcccctgtgggagcgctccccccgttccgatctaactcgtgtggggagggtcgcgccgcgctgtcgggctttatgaacgcactgctgattggtagctcgctgagtttgttcgagcgacagcttgatggttcttttttgttcccccccccgcgtgacgctgggttaagcctttgatgtgcacaatctccgtgggccccctcccttggggggggactcccaagcttatttgaagaggcttgtaggcacatttttccctgtgtgagaaacccttttagaggtcacaccccattatatgtttatctcggagagagaaggaaatggtttaaaagggggacacacacaggttttaatggcaaagaattctcctctccaaagtaccctcgagagggacccttttcttgggggcaaatgtaccccagatacgctcatttcttagaggtctcccaaaaggtcttaagaacgactctgtttcaataacctgttatagcccaccttttgggccaaaatgggtttggggaaccactggaaactttgtccacgcactatgagagagaaaatgtggtactcgtgtaaacacattcacgagatggttatatgggacccactcacataccaccgtttgaaaggtgaaaaatgcccaaaatgctgacactctccccacacctattgagcccctccacgtatatgacactctcttaaaaggcgaaatttatttataagtctccacacaataactctcttntggaggtattataaccacgtacacttgagactctttgtgcacacacacacacttgcgtaaataaccctcttctgcaataacagtgtttaattttctctttctcgaatgttttcacagctatacacacactcgagagttataccacagagaagnctataaataaatataatataaaatgagagaaccacgatatgcttaaaaatatttgaaaattgtcacattcctggccgcggtttggtggcttaacgccctgtatgtcccacgcacactttgggaaggtccaaggcacggcacgatcaccgaaggtcacggagatcgaaggccactcctggccacaacacatggtgaaaaccccgtttccaccttaaaaatcccacaaaattancctgggtatatggtgaacgcacatgcctaaatatcccacgctatctcgggagagactgaggcataagaatcacttgaaccccggaggttgcccccctgcactccagcccggtgacagagccagactccgtttcca

SEQ ID NO: 684777 - DNA, 452 bp, Homo sapiens
cgtacagagttgaggattttttcctctcttgtactaataagcaatctgtaggaaaacaaaggcaaaattttccctagatttggcatctgttaatgattcttgcctgacctttaccacagtggttgcaaagaaaggatgttcctattctaacaccccaaccacacttaccagttagtctttggctttctcctgtggggaagagctggcccgtctgttttatgtttcgttttgttttatccatttgagcactactttaccttctggtataacaaaatattttgaggtcatcttgtacctttcttgtccaaactatagcattaagcacttcttgagaaatctagttccatttagggggaatgatggtagagaccaagatttgggtgctgagtgtgctcgttgctgcttgttgctgtctccgcgccctttgaccctcacgtaccatttgtataatg

SEQ ID NO: 684778 - DNA, 98 bp, Homo sapiens
tagacttgattgctattggagaggaatgactttctttttctcagaaatttcattgaacacagctttacatttaactggcaagtgtctgatctaacgag

SEQ ID NO: 684779 - DNA, 823 bp, Homo sapiens
  misc_feature (96)..(96): n is a, c, g, or t
  misc_feature (115)..(115): n is a, c, g, or t
  misc_feature (132)..(132): n is a, c, g, or t
  misc_feature (217)..(217): n is a, c, g, or t
  misc_feature (252)..(252): n is a, c, g, or t
  misc_feature (261)..(261): n is a, c, g, or t
  misc_feature (307)..(307): n is a, c, g, or t
  misc_feature (312)..(312): n is a, c, g, or t
  misc_feature (397)..(397): n is a, c, g, or t
  misc_feature (430)..(430): n is a, c, g, or t
  misc_feature (566)..(566): n is a, c, g, or t
  misc_feature (575)..(575): n is a, c, g, or t
cggacgagaaggtgtacaacgagccttttctctccaacggtaaacacagagacagcttgggaataagccaaaaacagggtgatctcattagatttngaagatatatgactccttngggctacatttcatatngatcaatttctaggtatttttcactggcccaaagtattgcattcccttaacagcaagcacaagttctctatatcacttgtttttngttgttgttgttgtagtcgtcgttgttttgagacngagtcttgntcaggtgccccggagtgcagtggtgcaatctcagctcactgcaacntccanctcctgggttcaagcaattctcctgcttcagcctcccgagtagctgggattacaggtgtgtaccaccacgcctggcaattttttngtatttttagtagagatggggtttcgccgtgtnggtcaggctggtctcgaactcctgacctcaggtgatccgcctgcctcggcctcccaaagtgctgggattacaggagtgagccactgtgcctggcctatcccacttggtttttgactgaaggggaagtgtagaaatntattgattngtgatttctggtgtcacctgtgttaccaaaaatcaaaacaaatcttcttatccctgatcattattcattatttttgagacagagtctcgctctgtcgcccagtgtggagtgccagggtgtgaatcttggctcactggcaactccgactccaggttcaagcgaatctcccactcagctcctgagtgggtcctacaggcgcaacgacacgcccagctattttgtatccagtaaagtgggggttcaccaag

SEQ ID NO: 684780 - DNA, 401 bp, Homo sapiens
  misc_feature (129)..(130): n is a, c, g, or t
cttcgacaatctcatttctaccttccaacatctcatttctccttccaacatctcatttctccttccaacatctcatttctccttccaacatctcatttctccttccaacatctcattatctccttccannatctcatttcacctgccaaaatctcgtttctccttccaagatctcattcatcctagtactatatcactaatatcttctatgttttacctattcatctcatttctggctcatcttctagccactagaatatacacttccatgagagtcacataattttatattcaatgactcttattcgtccttgcctctgatcatatctaacccctagaaggtactcaccattagctgtagtattaataaattcgcataagtaatacccgagcctgaagta

SEQ ID NO: 684781 - DNA, 271 bp, Homo sapiens
  misc_feature (129)..(130): n is a, c, g, or t
cttcgacaatctcatttctaccttccaacatctcatttctccttccaacatctcatttctccttccaacatctcatttctccttccaacatctcatttctccttccaacatctcattatctccttccannatctcatttcacccaaggaagacatagacctggaagaatgatgctgtgtaggttatttttatccctctctgccatctcctcattcaagggacacctgcacctcactcctctttgggtgtgtgtactgctctattctgctta

SEQ ID NO: 684782 - DNA, 1006 bp, Homo sapiens
gccaaaccgtatactccgcccgagcgagcctcatggagatccatcgatgccgggcatcgacatgtctggtggggcagtgtgatgggcacgagagttgatcacgccggaattctgactcgcgcttacagcttccacatggacatgagcggacgcgtgttcccggtgtacagccgatgctacgacggtgcaggtgaatgggcaggaaaagtactcgtatcgtgaatgatgacggtcggcgcgggcggtgcccgaggcgttgcgagccggcggcaccatccagggcttcctgggcatactcttggaccacgcatgtgcctttaccgtcgtggaacttcgaccccgagggacccctatctctcatcgcgccgtttggtcctgcttcggcagctcgtgttgagcgtcggtcgcacgggacttggttctgtctagggcctcatctgccctgggtagtgacctggtgatgtggctcctggcgtcagactggtgtgttgagttgggcagcttgcactcggaacacggtcccttgtttgcttcccttttggttggtcaaggagttcttttggagagacaacccaatgtccctggcaacaggagcagaaccccgcgtggatcttgtgtccttcctctgatggcggagcttgctgggaaacggttgctacggtcgcgccgcttctggcactagtcatctggcctacggtctatggctggccggctgtcggctccctctgactcccggggcaggtgcctctgtgcgtggcccattggaattgtagcatcaacatcttccctcgtgttcgacaccatgggccgcctttcccaggagttgtggtccccagcagagcctggatccgtcttcccttctggctccgggggctgtgggggttagaccggggggcgccgttgggccggaagcctcaagaacctcacgtctaagagcggtcccttggtagaaaagccagtgtgtgggccctggtgtgcccaagtgcgccttccctggaacctgggg

SEQ ID NO: 684783 - DNA, 265 bp, Homo sapiens
  misc_feature (129)..(130): n is a, c, g, or t
cttcgacaatctcatttctaccttccaacatctcatttctccttccaacatctcatttctccttccaacatctcatttctccttccaacatctcatttctccttccaacatctcattatctccttccannatctcatttcaccgctattatccactcggtgttacctattgcaagaaatgagatgttggaaggagaaatgagatgagaaatgagatgttggaaggagaaatgagatgttagaaggagaaatgagatgttggaagg

SEQ ID NO: 684784 - DNA, 347 bp, Homo sapiens
tcctgtgtatgacctctctgcttctgtcgctcgggacagtcaaagctgtcgtctccgaagtatgttcttatcgattcgctgattcctggctattcttcgctgtgctcggtagttccatatcccggcaggtaccttctggtgcttccatcgcgtctcttgatttgccttgcttcattttccaattgtcgtctgggccatatccgtgtgaagagacaacattttcagttaaaggaagactatctattcttttagtgagattctgaagttgagcgtaataccagtctttttccttttcttctttgtcacgatcagcaagaagcaatgacctctctttctcaagttcttct

SEQ ID NO: 684785 - DNA, 182 bp, Homo sapiens
cggtcccctttacattcatttctccttcaacatctcatttcttgtggagttatatcaaaagctattatccactcggtgttacctattgcaagaaatgagatgttggaaggagaaatgagatgagaaatgagatgttggaaggagaaatgagatgttagaaggagaaatgagatgttggaagg

SEQ ID NO: 684786 - DNA, 1061 bp, Homo sapiens
ggagtcgagaagcatagagcctgagttgatacaacgtgaagagtgagctgcacccatggatccgctgccactcctccactgagtgaagtgaaaggctccctcctcaaagcacctatcaggggtgccctgcagggtgatgccatcggatacgcctctagagaaggaatcagatcatagtaaaccccggtgagtggatccttccctgcacctgttgggtggtgctcttatgagacactggattatagacggaatggataaatggatgagctagggctctgtgtgcgtctgccgtgcacactctggggagccagtgggccccagcaaccctccagtgacaggagatctggggatgcctggcatgctggagctacatgatgttacagacgggttacgtccatcaaaacccccagtttctcacctcatgtcccacaaggacaaggctagcaacaagaggcgagatgggagcaaataactcgtgactgcatggagtacccaacgttgaacgtgcgctggcctcccctgtctcagggagcaggtcaccaggtcaccaatggggcacattctagccagcccacatgcggaggagaatgccaacccaaacgaacccaactggcatggcgacaacatcaacgagaggagaggcacggaacgacagtcgaggcggcgacctgatcgatgacggccagcaaacgagacgaccgaagagcacagagagcagaacgaggcggaaagcaaagaagtagaacaccggacaagcggacgccggagcaacaccagaagagagaggccgagaggaagaagacacgaacaaaacacgagcgcagagaacgaacaaaaagcgagaaaacgaggacaacgaaaagaacgaaagagagaaggacagggggaaaaaagggaagaggcgaacacagagacacgagagcgcagacaaccgcgacacagacaaagaggcgagaggagggaacgagcccaggtggaggaaaaagaaagaaaaaaagagacagaacgaaaaaggaaagacgggggagagggaccgcaggacgagaagagcgggaggggag

SEQ ID NO: 684787 - DNA, 106 bp, Homo sapiens
acacctctatgagttggtgctactttatcatcctcattttaaatgatgaagaaactgaggcccagtgcagattaagtaatttgcccaaagtcacatggccactcaa

SEQ ID NO: 684788 - DNA, 1251 bp, Homo sapiens
tggagaagacatgcggaacaagatggacagtgagatgaggaggctgcaagacttcaaccgggatcttagagagagattggaatctgcaaatcgccgcctggcaagcgaagacacaggaggcccagtgccggcagtcagtgacatgtgtggccaaggctgctatgcatcgagagaacattaagcggaaacaacccaagtgccgaggttacgaaggaggcgaaaagggtacgaaaaggccaaggcgcaagaaggacccatgggggtgaaaagggccgcccggagacagggcacaaaggcggccacaattaggacggaagcccaaaaaacccaggtttggggcaaccctttgggggacccagggaaaacccacgtgctgtgcaacatgagaacccacccataaagatattaccgagggagaccaacacggtcggagaaaaaaccaccagaaaaaaagagcgcccccggtgggagcgaggacacaccagaagtgggaagtgacgaaaccatgtgtggatttttttgggggaccacacacacaccaaatgaggcgagaaaacaccggggggaaaccccgcaatttctgggggggacgaccccaacaaattatttgggcggggcagtgcgcactccacaacacaggcgcgaggcacacaccacccaagaaaaaaaacgaaggacgacggagaggagcgacgcaacaccctcgacaagaaattttttacccccccagatatcatttaggtgggggcggcacacaacggacggaacaacagtcgcggcggcacgacaacgccccacgagaaaacaaagaacaaaaacacaacctcttcgtgcgggggggcacccccccacaccagaacagggggagcacgcacacacccccacgacacaaacaacaaaaatgcaggagaaatcacgcgagcgggtggtacacgggacagagcaccacacagaccgaactgcagacagacaacaacaagaaggggggggagaaaagagatgacataaacagagaagcggaggatgaacacaacaccaccaacaaaaaagaaaagagagagagagaagaagaagccacccagaacagagacaaatactctccccacccccccccccgaggggggggcgaacgatcaaaacaaaacaaacaagaggcgagcggcgaaaaaccaaaccacaccagacgaaaaccaccacaacagaaagggggagagcgaaagacacacaacaacacagaaagagaaaaaaaaa

SEQ ID NO: 684789 - DNA, 136 bp, Homo sapiens
actgacttacgtatgttaaccaaaccccccctttcccctttaaatgtataccatctactcgtgctgaatccttccaaggcagattgctccagcgtatatctccaggtcctcgcttagatcgattttccacaaacaa

SEQ ID NO: 684790 - DNA, 372 bp, Homo sapiens
ggtcttttgacttcaaccaccatcagctaacatcatatcattcctctactaaatgatagcactaatcttcttccacatgcccccactccaagctctgctttgtcataggaatccttgaagcgccatggtataccgaccttcagacattttgataccatactggaatgcagccttgggcaaagctatctttgttgttcatatactcgctgtattcttcctgggtatcaaagtcccaacggcctaagggccccttctatgttaccctggtccattttgctataatccacctcctcatcactatccacagccatgtcatccatcgtggctgggtagcactctgcataactgtaggacatgccaaagaaatctccc

SEQ ID NO: 684791 - DNA, 790 bp, Homo sapiens
tgaggtggctcacgcctgtaatcccagcaccaggggaggccaaggcaggtggatcacctgaggtcaagagttcgagaccagcctggcaacatggtgaaatcccgtctctgctagaaatacaaaaaaattagccaggcatggtggtgggcgcctgtaatcccagccacttgagaggctgaggtaggagaatcgcctgaacccgggaggcagaggctgcagtgagccgaggtcacaccactgcactctagcctgcgcaacagggtgagactgcatctcggggaacaaacaaacaaacacgggagtgacattaacattcaaaattaatttcaaaatagccccagaattttggcccccttccccaattattgggccaacacttccattaacgcggatatggccccagcatctctaattatacttccacgtggcggtaattgggcgggggaaagctccgggtttcccttccttagaagctggggatatcttttcaaacaatttgggacgccaattcacggcttggttaatccccgggccattttggaagagggccagagccgattttgggtctcccagggtccgggaggctccagggaccatttcttggcccgcgccttgggcttgaaaccccccggttcttccttcttaacagatttactaaacaatttagcgctgcggtggggggcgcgaccattggccttgtggcccccaggtctactcctgagaagggctcgagggcagcggagaattgggtcttgacgccttgagaaggccgcagtttgtagttggaggc

SEQ ID NO: 684792 - DNA, 311 bp, Homo sapiens
ggcacgggcagcggcggagacggcaggaggaggcgggggtagcagcgcggaggtgctccgcccctgcgcccctgcccgctacgcctccggccccgggacgtcgccgagcttctcctcgccgcccgccagtacgtcacggccacatctcagcgctggaggttcctggtccccggccgcggcgagcttccggggctgacggtgggaagggcgggggcggaggggggtgaagaagttgttgactctgggcgcgcagagcgggtggaagagagcccgaagtttagacaactgaggcgggggcacgggggtgcggg

SEQ ID NO: 684793 - DNA, 864 bp, Homo sapiens
  misc_feature (75)..(75): n is a, c, g, or t
  misc_feature (77)..(77): n is a, c, g, or t
  misc_feature (408)..(408): n is a, c, g, or t
  misc_feature (412)..(412): n is a, c, g, or t
  misc_feature (427)..(428): n is a, c, g, or t
  misc_feature (469)..(469): n is a, c, g, or t
  misc_feature (489)..(489): n is a, c, g, or t
  misc_feature (494)..(494): n is a, c, g, or t
  misc_feature (544)..(544): n is a, c, g, or t
  misc_feature (550)..(550): n is a, c, g, or t
  misc_feature (567)..(567): n is a, c, g, or t
  misc_feature (575)..(575): n is a, c, g, or t
  misc_feature (671)..(671): n is a, c, g, or t
  misc_feature (758)..(758): n is a, c, g, or t
  misc_feature (815)..(815): n is a, c, g, or t
tggggactggggtggggtcggggaatagccccttggagtggatgtggaccccagagtcaaggagggaagctggtngnccagttggctgggggcaaggcccagggtcacctcaggtcgacaggtcctgctggtgggcgggcccagagtttatcttcatggagtgctggtttctggcactgggctggaaggaggccagctccagggatctggccgggggtgggcaggcagaattcaagaattcatcttcaacaagcgagtgacagcagaggctccgggagatgggcacaatgtccgaatcccacagacagacagcaggggactggcagagaaagcccatctctgcacggaggcccgggtaggagggggtggtggggccggttcgccaagatgaaggctttccccttctantgtncccagggtggagatnntgggtagggtggcccaatccctaggccagagctgtttggtncatagtcaagctcccagagnttggnatctgtggctctggccagcagggcctggggccagcttttaaggcatcagngggggngggggctgcggcagggnccccgggncccacggctggggtataggccagatgggcaggcaggggcaggagacagccatgcctgcagcaaatgtgggaaaaacagctgtttcaaaccgcaagngtggaatgggggccggacaggccgggccttgaaggaatcagagcggggggctgtccggggtggtttgaaaaataaaacttagaaaangaaacagaagtcagttgtcaaagttaaaaaaaaaggagacagtctctgtatcttcangggaggtcagggaacctccaaggcactcgaaaggccaaattacaggagc

SEQ ID NO: 684794 - DNA, 503 bp, Homo sapiens
ctctctgctccagattcctggaagctgacagctattcgggccgaatatgtctcgctccgatggactctagctagtgctcagcagctacatctctcttactggcctggaggctatccagcgtactccaaagattcaggtttactcacttcatcctggaaaaaatgttaagtcaaatttcctgaattgctatgtgtctgggtttcatccatccgacattgaagttgacttactgaagaatggagagagaattgacaaaagtggagcattcagacttgtctttcagcaaggactggtctttctatctcttgtactacactgaattcacccccactgaacaagatgagtatgcctgccgtgtgaaccatgtgactttgtcacagcccaagatagttaagtgggatcgagacatgtaagcagcatcatggaggtctgaagatgccgcatttggattgggtgaattccaaattctgcttgcttgctttttaatattgatatgcttatac

SEQ ID NO: 684795 - DNA, 1163 bp, Homo sapiens
  misc_feature (1163)..(1163): n is a, c, g, or t
gttatttgtattaagaaatgtaagaaaaaaaatatagaaagcaagaaggataggatttggtgtatgtgtatggatggacccttggatataaaatcacttcttggcgcttaccattcattatggtttagcacagccagtgagcttctcgtactttcttcctttctattgttccatcgagacgaaagcctagcattgcatcatgcaccccgcaggattctcaggtgcatcgagcgcaatcttggggtcactgaagccacgggctcccgtgtcgtttcctaggtgacttcgtcatgcactactagtcccctgtgaagatacgtgggataatggtacaattgccatgcactcattggggtgtcaagtattgatcttttgttgttcattgttgagattacttttaaaactacaaaagaacaacaaatgtcatgaatggtaggctgtggggtgccacgaggactggtgtccgttggatatctccctagtgagactcggtcctcttagtttccacacgcatgaggcactcctgagcctctcccgcatggatgtccttcgaggtgagcccaagcaaaacttcttgagaccctccccaaagtgcgttggcgcccccttcgagctttttgtgaagcttatatacttgatgtgtccacccccgctgggtgaaagaaagaaacaacgatgtgattaaggcagagacgaaaccgtgggtgtcgttctccccctacgcatgtccgacacagggggggccgttggctacccaatgtggagggatccatacgtgcggaataaacttgtcgcaacccagatagttgtgccacattcgattgaaccctaatttatatcttcgggtaccctccacttagagtggcctctgaacgcagcccttctgccttggctggtgtattgtagcacaactagggtacgttgccaccaccctgtggtagtattatcactgaccaattttgttgtgagagccggcgacattgcaacctgccgagaaagtttactatccagcgacagcattgtgccggacattttgctgccaacatagactgcctgacttgggtgagataacacacttctatggtgcaagaactctgtaatcacactgcacagtagttcccaccttctattttcaccatctgcacaacacgatacgtgcggcn

SEQ ID NO: 684796 - DNA, 630 bp, Homo sapiens
gggcgggcaaaaaaaaaaaaatctttattatgattatgttaaaagtaaaaattggcatgttttctaaataggctgttaccgggataaaaaaatccaaaaggggggcctttttaaggattcacctgaattacctttaaaattaaaacccccgctaattattatcttttaaaataccccaaaattttttcaatccccaatacaaacctcagtaacccaattctcctaatatgcaattttttataccctctgaactaaaaggaaggggtttgcctaaacaaaaaaaaaacaaggtttttatcctaagaaatctatccttggggggaaaaaaccttatttaaaccaaaggggtaatttttaatttttcccagggggtattctttattttgaaaaacacggttaattatcccaatttttagttataattggtgagggggaatctccccaacctaatttcctgggggccgggaaaaaaccactttttaaaaggttggtttaaatctttgtaaccccgtttccttattcaaattggcactccaacttccctttttttaaaggcccaaatttaccctttttttgttgggttaaagggaattcttattacacatgaagagcttttcctttttaattgtt

SEQ ID NO: 684797 - DNA, 120 bp, Homo sapiens
agatataggagcaagtggtttctaggtatctagagtgaagtagaaacagaatactactaggggcatagtggtaaagataataccatagtatagtactagcgtagagttaaagagaagagg

SEQ ID NO: 684798 - DNA, 299 bp, Homo sapiens
gagacagggcctcactctctcacccaggctggagtgcagtggtacagtctcagctcattgcaacctctgcctcccaagtagctgggattacaggtctgtaccaccatgcctggctaatttttgtacttttggtagagacagggtttcaccatgttgcctaggttggtctcgaacttctgagctcaagcaatctgcatatctcagcctcccaaagtgctgggattacaggcgtgagccattgtgcccggacaccacaatcggtttttacctgtggacacctgcccttctgtcgtcttctc

SEQ ID NO: 684799 - DNA, 321 bp, Homo sapiens
accctgttgtctaatgcaactagagtgaattatagctgggcactgtggctcacgcctgcatcccagtcattcaggaagctgaggcaggagaatcacccgaacccaggaggtggaagttgcagtgagccgagatcacgccactgcactccagcctgggcaacaagagcaaaactctgtacccccccccccccaaaaaaaaaagaaaagacaaacacgagtttacttctggcctttaaaaaaacagaccaccaggcggggcacccaacccaagcccttgatcattacaaattcaaacaccaaaaaccccgtgttcccattcta

SEQ ID NO: 684800 - DNA, 204 bp, Homo sapiens
gagcgcctaaggatcccctaatgctgtcagataggacctgactagggagatagatgatctatatagggaaatcgatggtctttacgagaaatagatgatcactacaggtcaaaagttagggtataaaaggatttatcaagtgcatgagttactattatttccaagatatcaagtccccttgtattatatgaatctagatagcaa

SEQ ID NO: 684801 - DNA, 755 bp, Homo sapiens
  misc_feature (20)..(20): n is a, c, g, or t
  misc_feature (84)..(84): n is a, c, g, or t
  misc_feature (103)..(103): n is a, c, g, or t
  misc_feature (107)..(107): n is a, c, g, or t
  misc_feature (110)..(110): n is a, c, g, or t
  misc_feature (116)..(116): n is a, c, g, or t
  misc_feature (127)..(127): n is a, c, g, or t
  misc_feature (130)..(130): n is a, c, g, or t
  misc_feature (145)..(145): n is a, c, g, or t
  misc_feature (166)..(166): n is a, c, g, or t
  misc_feature (204)..(204): n is a, c, g, or t
  misc_feature (258)..(258): n is a, c, g, or t
  misc_feature (279)..(279): n is a, c, g, or t
  misc_feature (290)..(290): n is a, c, g, or t
  misc_feature (308)..(308): n is a, c, g, or t
  misc_feature (310)..(310): n is a, c, g, or t
  misc_feature (451)..(451): n is a, c, g, or t
  misc_feature (643)..(643): n is a, c, g, or t
  misc_feature (676)..(676): n is a, c, g, or t
  misc_feature (688)..(688): n is a, c, g, or t
  misc_feature (706)..(706): n is a, c, g, or t
ttatatgtggataagactanaaaagtgcctttatgggacgtttttcttcctcctcccatccgaatgagctttgctttagaagantcacagttacttagaggcnagtntgngtggcngcagcgcccanggngcatcagtgcttgtnaaaaagcaatacctgtgtgangcacttttacaccacaggcaaagggaaggaccactctngtgtgacactcctgcagggtcccttaataaaaaataaaagcattccatcaagtncttctggatggtgttattgcngtccatttgtnggtgagtcattttctgtncngtgtttgccttgaagggatcttccaatgtatctccaatattcctttcttatagtgtccttttctttagctaggctttcacataactctaatgctttattaagaatgtcttccttattgtcacactgattttctagcatgtnttcatagatatccacaagaaaggcaattaggtagggggaactatgacttggttgtaaatcaagtaatttatttaacagattaggatatttggaaagaccacgatcctgcaaaatccctttcaaatagttccatgcactttcattatgtggtactagtttaatcatttccagagtgtattggacttctctctncaatacagcacgatcattgtagccagtggtgtnagaaataacgantattctttggttccaganagagttatttctcacatcctctttcagaagttggtccacatactgcagc

SEQ ID NO: 684802 - DNA, 141 bp, Homo sapiens
cattacatttcatttttctttagaaagtggcatttcactacattgcctaggagggcatgtagtcgctgttcacaggacgtaactgtcgctcactgcagcctcacattcctaggctcaagcaatcctcctgccgcagccgcg

SEQ ID NO: 684803 - DNA, 127 bp, Homo sapiens
  misc_feature (106)..(106): n is a, c, g, or t
  misc_feature (127)..(127): n is a, c, g, or t
gcagatcttcatctgtagccaggaagagagcattaaacccaggaacttgtggagaagattgactttgaccgtgtgtccgcatcatggcctcctccccgttacttcngtgttttgatgtgttgacccn

SEQ ID NO: 684804 - DNA, 243 bp, Homo sapiens
gaacttctagtggtagttctgccctacactttatagcccagccagaacaatcacattctactgcaggccacatggaggagagagtacctcggagtgcccctatttccatacacacggaaacgagcaaacagttcactgtaaatacagtctagaggtatccaggtgactgacagtactccagagaccccgagaacagcgtaaaagaccccttgaggtcacctcacccctcctcagatctagaga

SEQ ID NO: 684805 - DNA, 1575 bp, Homo sapiens
aagagcctatgaggaggcgacggtgcgattatacttcagatgtcgaggtgcgagagtagcgtcagaatagagagagaagaggatgacgaataggcaacactattatatccctactctgacattgtgcctagcagagtacgtaacgaattgtgctacgttgggcgtttggagtgctggatagctagattgtcactcgagtacagaaagaaatagaattcgtacacacacgtactctgttgggtgcatcgttgtatagagatattttagcacgctatcactcggataaacaattgggcaatatgtattcatagagcacacacaattcgacgttaccctataactagtgactgtgagttcatgcgtgttaggcaccataaagtaggtttctttgacacgtcataacatctatgcacactggtaatagttagttaaagagccaaaatggctactcgtgggtgtacctttgagcacaaaaagtttaggttgcttgattgtcagcttatttgtataaccttagatagaagtagccagggaatggactcgttgtctttaaaagtagtggagcatgagtgggtccttgtcaggtgtgaaacacctgaaagggacgaggtgtcaaaaagtctcggggctcctaagttactaattggaggggagtgactccttgggatagagggtgttgaaagtaatagcgaagatgtacttgtttgggcagtggtgctcttgagtgaccattgaagttttttagaacactataattctaggagggcttgtgaaaggagatgggcaaccatacggaatcacaaggggggatggagttttggggaatataacacattacacatgtttgcattggtagttggaaggaccaggaataagaactaacaggtaggcaacaatttaaaaaaggttaattatatgggcaggagccggaagtgttgacctcgacggaatacaacaaaggcagaattcgagcggtttaacaaatgtacgggcatcatacaggctcgtgacccagtggccaacacaaacaacgacgtctcatgagcagtacagagtgttgatcaacgcgagcaaaccttgtttgcttgctgtacacaccttcaaatccatgtgcctttccgtcttctgctccccactctttcgttcttctctcccacagtcaacgcaaagtcgccaacacacaacgagacactacacgacgacaataccaacacacaaccgaggacaagcaggaaagggagaaaaagaaggaaggacgaaagacagaagacagggcaaggaacagcactgcagagaagacagacagcagaagaacgcagagacagaagaacggaagcgaagcgaacgcaggagagagggaaacaggaaggaaaacagaagaagaagagcaagacagacacagacagaaggcacacggaaagcactgagggtgacaacagcccggcaagagagcagacaagaaccaacacacggaggagaggcaacaaagagccaagaacgacaacgaagaagccgcaacacgagaacaaagacacgaacagcacgaagaacagagcgacaaggacgacgaggaac

SEQ ID NO: 684806 - DNA, 1249 bp, Homo sapiens
ggtgaagacagggcactctgcgcgcgaccacatgcgacagcctgtgccactggagacctgcagggtgcacagtgactgtgcaacacgtgtggttaccgcccactggctccagtgctctctgcctggcaagtcgtcgcaccttcgtgcccgccctgtcaccgatctcatctccacgatcggcataggcagtgatgctaggctcacagctgcgttctcacgagggggtctgctggataggggggccccgtggggggctcaggtcattgctgcttacgcatgctgttcgtatcctcagcgcatacttattgcattccatagacgtaaaacattcgtatttcgcatccaccccatgagtggttaattgcgaggctaacatatcggagaatgtcagccatcgtggtggtctatcgttgcatgcgggcgagcccttgactgcatgggaacgcagtatatacgttttcccttctccttcaaacggaacgtgcacgccaggtcacatccgtgtgctgaaggaccaggcacgagacctgtagatcgtatgcagtcatggcaatcgcgcgtggcagagtgtctatggacactagcggctgtggcttgcctatggctccatgtgtcatctgcatgggtatacgcgaaaacactcatccctttcaatggtgtagacatcacatggggctatccgatgagagatacctacgttacagcggcctctcaaattcccaaggcgcaagttatattttcttgtatgcgcccaagcaaagcccaactgaggggggcgtctcgcgggggacagggtaggacgacacccttgtgcaacgaaaggaagggagcaaccatattatggtccccgcaccttcgttgctcaaccgagaaggttacagcaacgcaaacctcgtggcatgggggatggttcccccaaaatactaaagtggctcgttaggattacccaaaggggtcaggctgcggtggccagcagtgcatggagagggcacacgcgaaccaagcccaagataggggaccccgtatccgtggggcaacacccattctatacgcagataaagacaacggccatgcgacgacaaaagggggctacgaaaggacccatgggggagagctccaagggggaagcaacgcgggccacccaagcgggaaagcatggccgatattggcgggcggaaccaagaccctggtaaggcggtggaaaacgcagttggacacaccccccacgaaatgcccccgatagcacgaa

SEQ ID NO: 684807 - DNA, 197 bp, Homo sapiens
accctctcgatcagctgatcagcatcttcctcattacaaaagggagaaaaatctgtttggtgtgttaaagggtagattttgtaaaaagtaaaattatgactcaccgtaccattcaatataaaatgaaaatgtggcaaagatttaacttacttattaataagggaaccagtcaactctgctggatcagcggatcgagt

SEQ ID NO: 684808 - DNA, 508 bp, Homo sapiens
  misc_feature (36)..(36): n is a, c, g, or t
  misc_feature (128)..(128): n is a, c, g, or t
  misc_feature (169)..(169): n is a, c, g, or t
tcccatgatgtcagtgatgggttctcctccctcctntgatgatgccagtgggacctgtctctggaatgaggctgccatgggaggtcacatgcccaatgatgcctaggcctccagtgatggaacctccnctcctgctcgtgatgatgcctgctgagcccagaatgactcnctatgcagatgaggacaggagggaggcctctttatattagtttcctattacttgttttgcttcaccaggagatcatggtgctgtgactctgggtgttttctttttttttgaaatggagtctgacccaagctggagttcagtgggacaatctcggctcacagcaacatttgcctcccggattcaagcaattttcctgcctcagcctcccagctactcatgagactgaggcaaaaaaattgcttgaacctgggaggcagaggttgcagtgagctgagattttagctgagatcacgcccctgcgctccagcctgggggaaaaaagcaagactctgtctccca

SEQ ID NO: 684809 - DNA, 349 bp, Homo sapiens
tgctctgagatcctatatctgcacccacagctaatatactgcttgttttaaaaatgatttttgaggcaggtgcagtggctcgtggctataatcctagcactttgaaagacaaggcaggcggatcaattgagggcaggagttcgagaacaacctggacaacatagcaaaaccccgtctctattaaaaatacaataattagctgggcattgtggtgcatgcctgtaatcccagctacttgggaggctgaggcacaagaatcacttgaacccaggaggtgtaggttacagtgagatgagattgtgccactgcactgcattccagcctgggtgacagagcaagaccttctctc

SEQ ID NO: 684810 - DNA, 116 bp, Homo sapiens
ttctatgcacaatatgctccatgctatagcatcttacccatggatgactgcatatgacctctaaatgatcttccagactccagccttgactcctacagccagccagagtggtctct

SEQ ID NO: 684811 - DNA, 258 bp, Homo sapiens
ttaatgagtgcggctggaggaccacggacattgaactcactgaggctgtacagaggggacccatggatgggggggctctggcgtcctgaggccacctggccccacctgctcctgatggcaacccggcgcggccagatatggcccgagctacagcttccaggatgcttctctggaacctcaaggcaggcagcccaggccctgggcctgatatataaccccgtcatgctgctgctgaccacacccagccaacctgcccct

SEQ ID NO: 684812 - DNA, 86 bp, Homo sapiens
aagacagcagcatatatctctgcagcgttgccgtggggtcgtcggtcgggacccagtacttcgggccaggcacgcggctcctggtg

SEQ ID NO: 684813 - DNA, 159 bp, Homo sapiens
caaccacatacacggtggaagcgcaaggaaatgtagcaacatatggacccaggtatcttccgtgacagttttttagcttccaatgtatagaaaaattcagttatgttcaatatcatcaaagcaaggcaaagcatatgccttcccattagaaacaaagta

SEQ ID NO: 684814 - DNA, 615 bp, Homo sapiens
tatggcgaccatttcaaataatttaaggaaaacaaaaatcataatgctacccaggttacttctataaaaaaatagaccagatctaaggtaaaaactagaagttacattagctgctaatacaaatacgagatttcaaatttcttacataaagaccctaactagggccagtctcagtggctcacacctgtaatcccagcactttgggagactgaggtgacaggatcacttgagaccaggagtttgagaccagcctgggaaatgtagtgagattccatctctactaaaaatataaacattagccgggcgtggtggtgggtgcctgtagtcccagttacttgggagacttaggcagaagaatcgcttgagcctgagagtcagaggttgcagtgagctgagattgtgttactgcactgcagcctgggcgacagagcgagactccatctcagaaaaaaaaagggggggaaaattacttatcagcttatccatcataagtctgtgtatatggcatatatttttattatgcaatggaataaaaccattattagaaacatgccaggttggtagtcttggtatcgtttagtaagaaacaaagatggaaatggtcgccaatccggg

SEQ ID NO: 684815 - DNA, 396 bp, Homo sapiens
tcgtacagagtgaatgtgggctgtggttggtattacatgctgccgagattagcttatgggttcagaatttacttccctgtcaaatactttgttttccttgttgaaagcctcgacagtggattacttatcgggattcagcctgaatgttattagcatataagaagttactagattcgatattttaatcctatgctttggtgtggattcagcgtcttttgatagattcagaagtacctcaggtttctagttctccaaatacatctcaatctttgttcgagcatcaccatttctgctattaggcctctgttactttacactcggatgcatctttggtctctgatttagaatataggctctggaaagttgatattaaattctgattctgccatttcctgt

SEQ ID NO: 684816 - DNA, 224 bp, Homo sapiens
gcagaagagcagtacattctcagtctagtgtgatatatatataaagacgactcaaacactttcgaccgcgagaggagaccatttatacaacactatctgatttcggtcacctgaagttatattcttatactaacaggcttcggaaataatctcgccatattgtaacttactactccgggaaaaaaagaagcatttggatacataggtatggtctgagctattat

SEQ ID NO: 684817 - DNA, 613 bp, Homo sapiens
ggatatggttaaccttttaaaaggcaggaaagacatacagttccaaatatttgtaagcttgttctcctttagtacttgaagggcattatcatcttttgttgctgttttgttctgtaaatggggtttcatgtatttctgcctaacaagtagcttttataatactctgaacttttcagaaaattgttatttgctttcctacacagtatgagggctattgacatccataacactttgatcccaagtaagtatagtgtgtctacaatgacaatataagggagacttgatcaatgctagagagtactacccattcaaaactgtaagctaaggtaatttttatattatgtaacagttttccaaagcacctcgaacaggaagagtaacataaatataaatctgcattatttgaaaagagttgtaagcttttttattcatgataaaatttacataggacagatataatctctggaaagccattggtactgactgtggtaaaagtacttggtgatacagattctggtaaaaacacatgcatgttattccatctctgtgtagtaaaaagtatacttgtacaatgttttgtacttgtatttcatgttattaaaatagtgatgtt

SEQ ID NO: 684818 - DNA, 512 bp, Homo sapiens
  misc_feature (499)..(499): n is a, c, g, or t
cgtagagacagggtttcactgtgttagccaggatgctctcgatctcctggcctcgtgatccgcccgcctcggcctcccaaagtgctgggattacagacatgagccaccgcgcctggccgattgagcatattttcatatgttcaaggaccatttgcattttttctcctatctttagcccaataaagatagagttattggtcttttaagagctctttattagggataataaaagttgcaatttttttttccaatttgtcttttactttgctcagcttttactccctccaaagtttttcttttaatttatgtaatcatatttatcaatcttttcctttattgtttttagattttgggtcatggttaggaaatatttttcccattgccaggatatgaagggacactcatgtttctcctattatttatatggatcacttctttgactcatttgaaatttacctgatgtatgaagaatggaataatttttactttttaaattcantttaattttgaga

SEQ ID NO: 684819 - DNA, 425 bp, Homo sapiens
  misc_feature (109)..(109): n is a, c, g, or t
ggcggcagcaggcagggttgctgcggcggaaaaatgagaacatcaccagctccatcaatgaatcatggactggcttttccgctatctggtgggtttacttcaatggganaaggtcaccggctgcgttagggtatttcgagaggcgttacgccatcagtgtgacgctccatgtgatttcgcctgcgcagaacagttgcacgacgaggttccgaaccctttttttattgagtgtcgctccatgagttgcaacgaacagcaggtgagggcgacgacctttttgcgtagcaagccctttcgggtagggcttttacccttgtgaaccattccattcgcttttagagaccatttacccttttgggccatttggcggtgggtgggggtagggcgtccgcgaactcatgacggcgcacccgtttatccattgg

SEQ ID NO: 684820 - DNA, 90 bp, Homo sapiens
taagaggatggccattgacagtcccgacgttctgtgacaagcatatacaaacaacctgggtccaaataaaaactaaattgtaaactcctg

SEQ ID NO: 684821 - DNA, 648 bp, Homo sapiens
accgctcattgcagcctcaacttccccgggctcaggtgagttctccatgtcagcctcctgagcagctggaattacaggcacaccaccatgcccagctaattttgtatttttagtagacacagggtctcactgtgttgcccaggctggtcttgaactcctgggctcaagtgatccacctgccttggcctctcaaagtgctggagttacaggcatgagcaacctcgcccagcctcaattcattttaaactattaaaaagctgtcaaggccaggcaaccactgcactccaacctgggtgacagactgagaccctaactcaaaaaaaaaaaaaaaaaaaagggggggccgccctttttttttttttttgtattgatgtaatttttgtttttttcttctattttatattttttattatttgatttgtctgtattgtttggttctaggtggtataagagaaaaacgtagggatgagaggcttcaccaagcatggtagttagacttgtacgttggaggagtacttagaggcctgtgatctcatgtggaagaataatgagtaaggtgagattctaccgattctcagtgggggggaggagagaggggattgtggacctattggaaataataaacagtagtaaggagaaggcgtgtaa

SEQ ID NO: 684822 - DNA, 121 bp, Homo sapiens
gaagaagcagagactgttggcccgggcgagaagaaggctgctggaaaggggcgttccccgaagagacccctgtacttcgagcggagttacaccgtcacccccttgtgagaccgagagctag

SEQ ID NO: 684823 - DNA, 484 bp, Homo sapiens
tctagaggatcttccgcaatctccacctctcgggctcaagcgattctcccgcccagcctcccgagtagctgggaccacaggcgcgtgccaccacgcctgccaaatttctttgcatttctcagcagagacagggcttccccgtgccggtcatgccggtcttgaactcctggcctcgtgatctgcccgcctcggcctcccaaagtgctgggattgcaggcgtgagtcactgcgcctggccaagtttcagttctatatgaagtatttgatgttttgtttgaaacaatacagcattaaagaaccaatgttattcactaatatcattcatctttcagtttggatgatttggtttgctgcatctagattgcggtgtttggagtcggggtttcaccgtgttgctcaggctggttttgaactcctgagctcaagcaatcctcctgccttggcctcccaaaatgctgggattacagatgtgagccaccacacc

SEQ ID NO: 684824 - DNA, 874 bp, Homo sapiens
  misc_feature (874)..(874): n is a, c, g, or t
ggcgcaatgatgatgcagtactcccgtggctccagaatgccgtcttgccttgtgctatcaactgcgtgctggtgagtattccggctggacaatcgtgatccgcgaaagcgccaaggacatagaccggcggatgttaaccgtatcgcaggagagcccgggttgcaagatttgccacgatgggacgtatctactctcgatggcctaaaattctaggaccgacctaggtcatggacgtgtgggcagctgaagtgcctgcgtgttgtacagtgtctagccactcctgtgagtaccctcacccgtagaaggtacttgaacctggcaggaaatgcagtcacacaggagcttaaacggtaaatgcgtattaccccgtcgtcaattttgcaaacttgctacttcgtggagatgaacgagctttggattctctcatcaaggtctacccaatgctggtggtggtgtcagttccacacagtcgcacacaatctcctgcttggtgaagaatggacaaccagaagactgttctaataggagtgctggaatttcttgttatctacaggaactctaaatagtctaagaagctgtccacgtgttgtgatgccacagaacggtctctctggaaaacacacatgccttgaattccactgggcagtggaggttccttatgttccacaacaaatttgatccagctaaccaattaacggcggggtcaagaccaagacgagcagggtggatgaggcgctcaaacagtgggaccgggcgcaccacaaaaaatggcgtggcactacccgcggcacacaagccacacaaaaaacaaagcggcgaaacagcgggcgcaactggtacactaagcacacaacaaccatataccaagtcaatn

SEQ ID NO: 684825 - DNA, 250 bp, Homo sapiens
cttgccagtctctactttaatggtccaagccaacttgtggtcatcaccgagacagtgttttccttcacttccttgaagtacgcatgacccctcctccaagtgggcctaatccttatgcgctgtaactgtcctcccttttggtcatgtgctatacccacacctgtgactggttatcgatacaggaggctcctctacaccaattaatgtagcttgtagatattggcctcccacaagattccagtactatata

SEQ ID NO: 684826 - DNA, 179 bp, Homo sapiens
tgttgaaagcaccctacctgtgtacccgagctacgagctcagtccaggccttactcatgcccagcccagaagaataagtcagcgccctgtcctagtataattccgagtcactacagtttgagccatgaaacagaaaaacccatgactccttcatgctgcttgctggatgaaaccatggt

SEQ ID NO: 684827 - DNA, 360 bp, Homo sapiens
atttttttacaagatacagctggacaggtgctcctgaaagggaactgtggaggagaaagggatcccacaccctggaaagtcacctactccacggaaagatcaaccaaactggaggaatctccagatgcagagaagagtgtagcagtaagttggagttctgaaaagcagagcgagaactcaacagatcatctgaactactggcacagtcaccaaaaattgagacgcttgggtggggggtgggcaccgagaccttggctctggaggctagtccctgggaaagagctgagggggtggagcagagactgcttgggaggtttatgaatcagtctgtcaagtttgacagagcagatactgcctggg

SEQ ID NO: 684828 - DNA, 167 bp, Homo sapiens
cgcagtgcggtcaggcagtccagagtcagttcagtcattcagcgcagtggggtgtttgattcagtgcggtgtctgagcagtgcaccacaggtttcgggtgcacaccagctcacacatcagtgttttgatttgattcgcatctttggagttccacacacacatcagtc

SEQ ID NO: 684829 - DNA, 310 bp, Homo sapiens
cacaggtcctgcagtgatgcaggcattgcacattgttcctggactagtagtctgaacctacagggggcggggaccccaccctgaagcagataggcggtcccagtgctcaggtgtggtatgccgactcatggagcctgcaccccaatatcacactccagaccacttattgacaccctcccccaaacacatacggtgtccccaacacacatgatttccaacacaccacaccccaacacacacagttctcaacacacacagagtgcccatcatacacataatgtctaacacacacaatccccctgcacacaat

SEQ ID NO: 684830 - DNA, 291 bp, Homo sapiens
aggagaggtggcgacgggggcgtatcatcacccagattcatcgccatcatatgtcatcaacataataagtctgcctgggaaacctggtcgtcgtggtcaccttgtacaagaagtcctacctcctcacccaagagaaggagctcggtgacatttgaggatgaagtggaccaaatcaaagaagctgacaagaactcgattcttcatgtgaaagctgaagtacacaagtccttggacagttacgcagcaagcttggccaaagccattggggccgaagccaaaatcaacttattt

SEQ ID NO: 684831 - DNA, 829 bp, Homo sapiens
  misc_feature (769)..(769): n is a, c, g, or t
gacaaccccagcaatgtggagaagcctggggcttgccctggtctctgtctcctcccatcgggaagggaaaagagagcaggaccaaagctccttatgtaagcaacccccagctgagcataagagatcaagatccaggtgctaaactccaatggttcagtgactgtggttgctcttcttcaagcaagttgatacctgtgcttactggcgggcatctaaaattagaagcacctggagtaaaatttgagagaaaggagggatattctaatatttcttatatgggttgttactcatcagggaatctctttctcgattaaaaagtacacacattctttaagaataaggttccagagcaattttcctgtttatcaacaaggagaagaccaaagagatgttctggactcttttaaatggaagcaaaggatgatttcctcatatatgattaggatgtggacgtctttgaataatcatcgtgggtggcctttttcctttcctaaatttcccatatgtagaagaagcattaagattggttactgtgacaaggaatgtggaaacgttgtcttctcacgaattaaagatgagactttgtaccgtgatcttgggtcggggtaaaacgtgactccttggtcattacatattgggttccaattaggattggcttggaggggagcttcagatatagcaggggcaagggtatattggctccaggtttacaccaaaacagggcgatggggtcaaaagcgttccatggaataataaaagcggagagtanactgtgcgcaatggacgagcgtatgataaagggcacaggacttgggaagaattagtataa

SEQ ID NO: 684832 - DNA, 707 bp, Homo sapiens
  misc_feature (558)..(558): n is a, c, g, or t
tggaaacggagtctcgctctgtcacccaggctggagtgcactggcttgatctcggctcactgcaagctccacctcccaggttcacgccattctcctgcctcagcctcccgagtagctgggactataggcgcccaccaggagccgggctaattttggtattttaagtagagacggggtttcaccaggttagccaggatggtctcgatctcctgaccttgtgatccggccgcctcggcctcccaaagtgctgggattacaggcgtgagccaccgtgcccggcctacaaatgttaacaaagcaattaccaagggccttttacaatattttgtgctttaatgaggaataatatgcttgttgaaaagacctacttaaagtcttcagttaatattctttcaaatcaagatcttattgaagtaccttatatatgtggtgggcaatggttcacattttgggagcccttggtattgggggaagttgaaatggtatcactttctaaacagagaaatggtgttggggtttaattagacagatatctggaagtacctatttttggcaggngtttcgacacagagccgcgtaaacctggtctcactactctgggatataatctgggatacatccgtgtatgctgaagcggggacacatcacttggtaaactgactttttaacgtattttatccggttaacacaggcaaggtgcacacttt

SEQ ID NO: 684833 - DNA, 643 bp, Homo sapiens
gcagatcaaaaatggcggtagtgggtgtgtcctcggtatctcggcatgctgggtcggtcccggccacagctggttgcggcctatgtcagagtggctgcccagtggcgagagaggggctcgagctctgcaatgtgagaatgacgtctcacacttctgtcgtcgcagctcccccgggtgtgagcagttcagtcattgctgaaagtgttgtaccgtagaagtcgcgacctactggagaagcatcgaagagatcctgagattcatcagctcgtacgccccatctcacgcatcaaggtagcaagccccgtttcccctgcgggagaatggctaaccatgacgtctagttcacataacccttcgatgtgaactcccaagcttccagagctgggactagcgagaggatagaagtagaaagacgagactctggtgacgccacttacgctcgggagactacctcagggagccaacacgcaccgtgggattgtggcacacgttgtagccttcttggacatcagtgcgactcgcccatgaccaccgaatgtggtataactcggcgcaaccctttataggctaccagcgcgtgtgcttatcacctaggttattgtcacggacttcgacgtgcacctgggctacttacgtggggtac

SEQ ID NO: 684834 - DNA, 123 bp, Homo sapiens
atgcacttttgctgggaggttgaataatagagaactagaacgtgtcagttgctttcagcaaacgtagaggctgctggatccagaagggaagagtaagcgggagaggagggtttctgatgacga

SEQ ID NO: 684835 - DNA, 176 bp, Homo sapiens
tgatccgaaccggggctttggtcgatggaccttgcactccaaaggtgaggagacaggccactgcctttcaagtgcattgcagtcatgatttcatcctcaagtttccgcacagtgcccaccagaagtatgtccgacaaagcctggcagaaggcagaataatactcatgtaaagacag

SEQ ID NO: 684836 - DNA, 455 bp, Homo sapiens
aggaagataatgtgtgtacacaggaacatgtacagacttgggtctggtcattattccctaacacaatacacagtataacaactatttacatcgcatccacatggtattaggtagtatgagtgatgtggagatgatttaaagcatacaagagaatatgcagagtttatatgcaaatactatgtcagttttattcatttttcctaggagacaggatttggctctgtcacccaggtgggtgtccaaactctggcctcaagagatcctcccacctcagcctcctgaataactgggattacaggtgtgagccactgcacctggcctatgtaactttttaaatagggaataaaatagctggtcaccctgatgcttccaaaggaatcatgcatttgtggaagaggggaacagtgcaatgcaagatttacgaagacagagctgattaccttccctccccagtc

SEQ ID NO: 684837 - DNA, 259 bp, Homo sapiens
tgggattacaggcctgagccaccacgcccaactgggaccagggttacctggttaacgatggaggtgaaatctctttgtaatccactgggttttcatcggctaaccatcttatgcctgactattaaacctattctatataaacacaagaccactttaatttttcgctaatttacagagtgacatcagctgcctatgcctatgataaggtagcagtctgcattcttatggccattagatgttacaaacttcttgcctgtaa

SEQ ID NO: 684838 - DNA, 240 bp, Homo sapiens
ccccgacggagcattcaatggagggatgagtaggtggatggataaataaatacatctgaagaaggatgatagattaatggaagagatggtgaaggaggacaaggtaatcaagcaattggtagataagtagatggatgggtgggtggatggatgaacagatggatagagagaaagctaggtgagtggatggatggatgcatggataggtgaataagtggatgaatgaatggtccgtcgaag

SEQ ID NO: 684839 - DNA, 546 bp, Homo sapiens
ctaggttcatgaacgtccagacgaactacaatactgcgcgactgggagctgctgaagttgctgaatggtattggagtgagcgacggtgacccgcctgtttcgaatggagacaatcgcgatcacctgacacgtttgatgttgcaagcaaacaccgtcctcggagaatatgcgccgatgatgaagcgaccgggggcttgccgggagatgctaatagtccctggaacctaagatcattcacttgatggctgcgtcggttgcgggtttggccatcgctcgtttcagcacgaatataagatcggtaactacgtcgatcacgtccagaagacggacatatacgtactctataaataatcgcgtatagtggcacttcttaaaggcatcggaacagtcggcgagaaagacctgctcaacacggtgacccgatccctcgcccaggctgcggctacggtaggcaaattcatcgacagaccttgctacgtcatcgaggggaactggtcggtcagattccgggacgtcgatacgtaggacgttgtttttcccgatcag

SEQ ID NO: 684840 - DNA, 152 bp, Homo sapiens
  misc_feature (35)..(35): n is a, c, g, or t
tgacttttagaagttcaatagccttagtgtagctnctgatctcagtattcctttcttctgctgggtttgggtttggttgttcttgtttctctagttccttgaggtgtgaccttagattgtctgtttgtgctattgaaacttctaaaactagg

SEQ ID NO: 684841 - DNA, 349 bp, Homo sapiens
taatgctcttattaagtatgtacttcaatgctggatcacagacagctcatatctcagttatcggtatataaaccatgcatgcagtagcatcattttaaaaaatgcaccttatgattaatttattttggctagggagtttatccctattcatcgaattatttttaagaagatgccaatataattttagtaagaaggcagtaacctctcatcatgatcataggcagttgaaaaatttatacacctttttctttcacattttacataaataataatgcttctgccagcagtaccgtggtagccacaattgcacaatatattttcttaaaaaataccagcagttactcatgga

SEQ ID NO: 684842 - DNA, 145 bp, Homo sapiens
gatagacagctcagatcatctgcagaatcttataagggaattgaggtcttcatacacccagactcagcctcatcaaagtgcaataacgaagacaggcatcaccagagacatcagcttcaccagatgggtcacaaaatctggttta

SEQ ID NO: 684843 - DNA, 805 bp, Homo sapiens
  misc_feature (433)..(433): n is a, c, g, or t
  misc_feature (646)..(646): n is a, c, g, or t
ccgctaacggaagataccttgcgattgctggaaaaaatcgccccttccacacaaacatacgagcatcgagcgcgattgaggccctggatcgccaggtcgtcagcggtctgaataaagcgcagctaatgcgcgatttcgtcgccgatggcggctcgctgattgggctggtgaaaaagcattgtgagatctgggccggtgactaagccgggaattgccttacagaagaatatccctgacaatggtgtattaacttacatttaacaatgttatgaaacaccctttagaaaccttgaccaccgcgagcacggcattttgctgatggctttcctctcttgcactgctgctgaccggccccgcactggggctggcgctggcacaaaaactggtgaccatgttgccatctgatggatcttagtcagctttacactttatngttgtgtctgtggttttaagtgctgggcgctatgagtattatgttctgcgcttgatctggcgacgctggttctcgctggcggattacaacgtcgattatcgccgtacttcgcggcgatacttgcttattctccttcgcctaaaggaacgttaatggcataagcaatcactgcacgaaacgggaaacgcctggcccttgagttaccccttggtngagcttatgctgggacttttatgcacccggagttacgatgtatgttaaaattggcggcaagaatctattgctgtcgaccggagatacacggcaggtcacactttatcaatctgaaagtacgaatccgaaaaataccctgtgaaactcaacaaaataacc

SEQ ID NO: 684844 - DNA, 462 bp, Homo sapiens
atgagcaggctagctttggggaagagggacacatggtaggtacagcagccaggatgccgactagcaggactgggacgtatcagaagagagatgtgtcactcggcacctatgcagccgggctgcggagccacaggaacaggagtttgggaagagcgcttggataagggactacagcagtggtggcagctccaggaaccttgacgcccaggacagaagctttggaacgagacccctgagctctgggttcagccccgaggaagcccagaaacaggatgaggactttgagaagaagattccaagtgtggaagacagccttggagagggcagcagggatgctggccggacaggagagagaggatccgggggcttgttcagtcctagcactgcccacgtgccggatggggcactcgggcagagagaccagagcagctggcaaaacagtgatgctagccatactctggg

SEQ ID NO: 684845 - DNA, 523 bp, Homo sapiens
ccgctaacggaagataccttgcgattgctggaaaaaatcgccccttccacactaacatacgagcattcctgtgtgaattgtcctctcgctcacaatgccaacaagatactgagcaaggcgcagctaagtgaacgagttgcagtacggcgatgcgttcgacgcggctgatcagagctggcgggaacaaaaagcaactaggccgagaatactggcagccggtgacattaatgccagggaaatggccttctaaggagaggacagtaattcccaccttttaatccagaactgacacaaaaataacgcaaaacaaataccaccaattatctctcccaacctgcacatactacaaaaaccaacccccccacattccacaaccacaaccccttttcacatccatatcacttaacatccagaccaaataattatttgccaataccaataacagccatattaacaccaacactagataaacacctgacttacctgaacacaaacttgccacctcacacctgaaaaaaatcaa

SEQ ID NO: 684846 - DNA, 130 bp, Homo sapiens
agaagattagagtgttcatcgtccttccttcagttctcttactaggctgatggttacagtcccacaacagccacagcactcagaataagggcatctctgctttaccagtcactttgagtggagagaagat

SEQ ID NO: 684847 - DNA, 243 bp, Homo sapiens
gaatggggggtcagcgccgtctgttagaagctgagtctcttcacatagacggatggagcagtgcttagcaactttttgtcttgattgtggaaaagcttctggactaaggtttgccaggctcctgggacgttccatgcatcttaaaatcctggaacttgagcccctgttcaacacagttgctccttttgcacctttgaggaacagcttctgtcctctgccctctggtgccgtgtccgctgcatt

SEQ ID NO: 684848 - DNA, 611 bp, Homo sapiens
  misc_feature (11)..(11): n is a, c, g, or t
  misc_feature (21)..(21): n is a, c, g, or t
  misc_feature (72)..(72): n is a, c, g, or t
  misc_feature (99)..(99): n is a, c, g, or t
  misc_feature (124)..(124): n is a, c, g, or t
  misc_feature (150)..(150): n is a, c, g, or t
  misc_feature (167)..(167): n is a, c, g, or t
ttccccacccnaatctcatcnggaattataatcccccatgtgtcaggagagggactggtgggaggtaattgnatcatgggggcaattctacccagctgntcccatgatagtacatgagttctcntgagatctgatgatttaaaagtgtgncacttcccttcttgctnttctctctgctgccatgtaagacatgccttgcttcccctttgccttctgcccatgattgtaagttttctgaggcctacccgagcccatgcgagacctgtgaatcgagttaaaccttttttcttcgataaatcacccagtgatatgggttggctgtgtcgccacccaaaatctcaccttgatttgtaatctccataatccccatgtgtcaagggtgggaccaggtggagataattggatcgatgggagaggtttcccccatgctgttcttgtgatagcgagtctcgatgagatctgatggttttataagcatctggcatttcccctgcttgcactcattccatcctgcctgcttctcctttgccttctgccataattgtaagtttcctgaggctttcccaacaaagtggaactgtgagtcaattaaacctctttcctttataaat

SEQ ID NO: 684849 - DNA, 238 bp, Homo sapiens
ggcccgtatacatccttacaggagactcatatgactaattcttttgtatattactatcaactatagctactgttggtttaaaataaaatttctaacttttcagtcattattggctagcaatatgccaacatgtttactttgcctgtgtttaggaatttcccaagtctccttttcccaggagaggactaccacaagtcatcactgcccagaatatcagtttccaacactaggatgtgtg

SEQ ID NO: 684850 - DNA, 754 bp, Homo sapiens
ccgctaacggaagataccttgcgattgctggaaaaaatcgccccttccacacaatcagtacgacgcacacggcagtcggcgtcgctgaccagcggcggcgaggcaaggcttgaacgatgctgtccgggctgtgacgcgcatgggcatttatgtgggtgccaaagtcttcctcatctacgagggctatgagggcctcgtggaggcgaggtgagaacatcaagcaggccaactggctgacgcgtctccaacatcatccagactggagcggacactagtcacttggcagcgctcgcatgcaaggcctttaccaccagggcaggggcgccgggcagcggccctacaacctggtccagcacggcaatcaccaaactgtgacgtcactcggcggggaatggcagcctcacaggtgccaacatcttgccgcaagcgagtggagcagcatgactggaggagcttggtggcggaaagggtaagatctcaggagactacaagaccggagcctactcgcgacctgaacatcgcggagactagatgggcctccaatcgataacagacttctgcggaaacgacatgaccaacggcacggacctcgggcctccaccgcattcatggagggtcatcgaatgccatcacaaccactgcaccagagccaacagaggaccttcgagctaggaagatgatgggccggacacagacgggtacctgacagcatggtatctagcaaggacacaaaggccgactggatgccaacccc

SEQ ID NO: 684851 - DNA, 276 bp, Homo sapiens
  misc_feature (9)..(9): n is a, c, g, or t
gtgaatacngcttctgagattgtgagggaagagatagcgtggaagccaggctagccagttcatcattgtgaaggctgggagaattggggaccataggctgaaatggcaagctatacgattctaggctctcatttctgccggctatttatttcgacctctcctattttccccaaacgtcgtctatcgagtgaaaacccattaagatgaagccagaggcatcagtgtgcgttatctgtgggggcagcacgcagggcagagagcggcacctaggtccca

SEQ ID NO: 684852 - DNA, 759 bp, Homo sapiens
acccgggaggcggagcttgcagtgatccgagatcgcgccactgcactccagcctgggctacagagcgagactccgtctcaaaaaaaaaaaaagtcagtgagatgggggaaggcagatccaccctaaatctgctgggcacaaatctaattcagactttccagccaaattataaagcaggctagaaaaaacgttgaaaaagaagagacaggcctagcctcccactttatacattgttatctcccgatgcgtggaacgcattccgtgccttgtgaaacgtcggactttcaagtttctatcagatttggggactgggactgggcatctcctttgatcctcagcttgcagaaagcctatggtggaacctggtgcatcatattaacgacagaacacaacaagatgtgcctgggtttcctagaaagccaaccaaaataggattggacagaaaaagatatggcagccaatgaagagaatcggaagtggatgagagaacactgtccctgaacactaagtcgaccaagccacgggttaccccttgcgcacctcaagatttccaatgaaaagccagtatcgcggggactatgattgcattctttgagccagagaaataatgcggtgtatgctacttaggcttgaaagcacccaccgtgttcaaaggagcagaagtgcaagcaagcagaagaatgacctaagaatgggctaagatctgaaagggttcatggttataaaagagatgatggtcagaatggaagtaaataaagg

SEQ ID NO: 684853 - DNA, 548 bp, Homo sapiens
  misc_feature (481)..(481): n is a, c, g, or t
tttgattcccactttccccaaataatttaagcaacatttactgaacatggattacatatgggacactggattagttgataaagattgaatggggagcgaaatcctctctggaacatttcagtggagctgaacctaaagtggaggaaatgaacataaactattacacccatgaaggtaaaatgacacctaagataagtgccgtgaaagaaagaatatgattccacagcaaaaaggaatatgcagttaaagaagtcatccttaggaaatgatactttaactgctacgtagaaagtgagcaaattacctaggaaaatggatgaatgtgtgagggcttgagaagtattcaagataattgaattgtacctgaagaggccaatgacctcggtgggtggattactgggatacagaagcaggacaggaaggctgaagcacaaagacctaaggtaggtagtgaaagatgaagctgagtacgagagccttntgaggttccttttaaaaatgtaatttcattgtggttttgatttgcatttctctgatggccagtgatg

SEQ ID NO: 684854 - DNA, 109 bp, Homo sapiens
gaggatccccaaccgcctgcgaaacccaagccgccgcgtaggagcgtgcgttcgggccctcttctcccacctgttcgactccccatccccaggatgtcaacctcagtcc

SEQ ID NO: 684855 - DNA, 212 bp, Homo sapiens
agactagcaataaacttacatgtggaatggctcagacttatctgtattttctttctttcttttttttttaaaaaaaacttttaggttcagggctactaagtacagggttgttacatagtataacttgtgtcacaagggtttgttgcacagattatttcatcacccaggtatttagcctagtaccctttagttttttttccggatcctctaga

SEQ ID NO: 684856 - DNA, 243 bp, Homo sapiens
tcagagtaacggatcgtgatgcagttcccaatgatttgaattggtagtaaatcagatctgtcatcatcaaggacaggtaacacaagaagaaggacggcagttagcacgtcaagttaaggtaccttacgtggtggcatcagcaaagattaggattgaattgtagatcaagctttccatgaactggtccgtgttatcaggaaatttcaagagctgtcaatgtcctcattacatgccatgggtacc

SEQ ID NO: 684857 - DNA, 154 bp, Homo sapiens
cagaggcttccacttgtgggtgcagtgatgacagaatgaacatcacagcattctttgacgcccccccaccctggggtttatgtttaactccaaatgctttgtgcctctaaggggtgtccctctgggtatgcattggatggggtcctctaaaata

SEQ ID NO: 684858 - DNA, 105 bp, Homo sapiens
ccccaccgcagttccggagagagccaagttgataaacgggcacgccagaaatgaagatagagctttgagataccccatcaaaaatggaaatgccgctttcataga

SEQ ID NO: 684859 - DNA, 448 bp, Homo sapiens
cacgagggtcgccgagatagctcagcgagatgctcgcgacgaagtcggcgggcttaccccggtagctgcaggcatccgcagcaaagtgcacgtccggtatccgcacccacttgcgcacacctaacaggccggtgagggccgtttcggtggcatccaggtcgccggtgacccaggcgatctgcgtcggcgactgcaagggaagcgtcatcgtctcgcacaatagtcgagccgccgggcggccagaaagggcccgaaagaatttgccatgccgatccggtccgaaccgggaaaccgcgggtgaacacgttctaatttcgtgctccgcggtccgtgaccggccgtggccggatcagtgccgggtcagcacgtcgaccagcagccgcagctgggcgtcgaagacggcttccacatcggtcagcgtgtccgccccgtactgtccgaacacctc

SEQ ID NO: 684860 - DNA, 174 bp, Homo sapiens
gggccccaacccccccccctggggtccttttttttattttttaaaaatccctctcgggactcccgtcctcgctgttgggggcaaatgccccaacccctgtaccccccctttttttgcctgggcagggggaaaggggggcccggggcccgtaattattaaacatgaattccatta

SEQ ID NO: 684861 - DNA, 421 bp, Homo sapiens
  misc_feature (38)..(38): n is a, c, g, or t
  misc_feature (41)..(41): n is a, c, g, or t
  misc_feature (58)..(58): n is a, c, g, or t
  misc_feature (271)..(271): n is a, c, g, or t
caggcaccactgcttcctctgcctcacatgggtgtttntancatcttaatgtcatctnttttgacagctttctgaagttaagtgagatcacagttgggggtggtgatttagaagacaattttagtgactttctgttttactcagggataatattttttacatataacattagtgatgccagtagataaaagcatgctgttcatcatgccaaaagtttgtgagaggagtcatatgttttgggtagactgtggccatgagtcttttatcattnccagttgtgatagataaacttttttttttttttttttttgagatggagtctccctctgttgccaggctacagtacagtgatacagtcttggctcactgcaacctctgcctcccgggttcaagtgatcgtcctgccttaaccttccaagtt

SEQ ID NO: 684862 - DNA, 1414 bp, Homo sapiens
  misc_feature (282)..(282): n is a, c, g, or t
  misc_feature (542)..(542): n is a, c, g, or t
gaatgctgagtatatgcacgtctgcgagagaccataagcttggcgccacccggattgatcccggtggactaccgcaacagagaagctgaacgccctaccgacttgccgcccagtattgcggcatctcggctcggaggcaacgagtgctctgcgtcggaccgtcaccgacgctagctcccgcaagaagtcaaaacagcgtcacggtgcgctcagcccgactctctcatctaggcttgactagatcacgtcggccgtgcgatcaaggtgagacgttgtgtggcnaattgtgccgttgagcgaaacgttgagttgactgtgacactagtgtgggacacgtgaccggtcgagagaggtgatcaaacgctgtgggtagtggttcttaactaacaccgaccttgcgtcgcagaggggtaccacactgggcatggggcacggtggcatacagtcgacgcgtccttgtcacaggtcgtgactcacacaactgggaataacacggagagtctactcaatacttacattctcgcaattgcgtccgatagacnaaccagcgtgtcaaagattgagagcccttgtgtgtttggcccagtcgcgccaatggcgacttgactcagggagagcccgagggggttcgctgagcactgcccaccgataggaattccaagcgtgcgcgaccaagacaggggttaccctgtggtccgaccaagttggtttggggcctttgtaggaaatcgcatggctacgtgcataaagtagggtcttctcgatccataaacgcaagagttagttggggtaagcaaggaatgcgcaaggaggagtaacactctaattccatccacagagcgttcatcccatcgttggtacctaaagtgtaggaactcaggccctacgtagacctatttagacgtggacatttgtccccttgggcggggacccattatggtgcgcttggttggctttgcccatagttgggccaaacccctagtggacatgtaataggaagcactggcggtaccatacaccaatagaactcgcctatggacataggagggttaaatagttgccaaagggcaccctaaagggcatcgagttacctgttacaggcgatgtggccctccgatcggaaaacgccgagttttttacgagtggaggcaaacaaagcataggggtgcgccctgtgaaaacagacgcccaagtttgacgtttaccatagacggtgtatgtggggttgtggggcccaaacacacgaacactacatatgcgcccagaaagtaggcaaacgcgaggaaattagcctagaacaagatgacagtccccatttgcaaaccgaagaacgcccaacacgatagccaaggcatttctgtgacacatcgcggtacacagggtgtgagtagacgacgagaggatgtgaccaaag

SEQ ID NO: 684863 - DNA, 279 bp, Homo sapiens
tgagcagtaacaaagagtattctaagagcccacaaatctcagatccaggtggcttccagttaatgagaagcttacaatgaagaatgtttctgttctaaagaagatatactgagatgagaattatgatctttatcagagatcatacctccagactgatatagccctacgagctctcctcacaaaatgccctaaacttcaagagatgctttttcccgggctgggcacctatatacaagactaaccaggtctctccatatcagagcagtcaaactcaattcc

SEQ ID NO: 684864 - DNA, 640 bp, Homo sapiens
atgtgaatggttctgtgcttgtttgttgtctttggttttgtgcttgtatgggaattagctttactggtaacttccttatttagtttttagtggtcaactctaataaaatgaaactagggctgagctagttagccctcactagccaaactgaaacgtctatgcgaacattaaaagaagagatccatcatgtagcttgtgacgacttttattttattagtcaccggggaactttgcagtgatgaaaatacaccagggtaagtaaaccttcacatggcttcaaagaggaaagacaagcaaatcttctctaagtctactcttactagtaatttccgtaagtgtacaccaaactctggacttggtaaacaatctgaagtactatagaacagttaagttgaacgacatggaccgtcaacgagtacgtagttcatggtttatatgttcttattctactggagtctcgtgaacacatctaggtggaatgcatctgagactaagggctggttttgtaatcctcataacgaaaccagtctgaagaattaacaattctcttcatggtattctaaacctcctaagatatttaggcttctgtacataaaagtgttttgctaaatttacgatatatagatccttcatatcatta

SEQ ID NO: 684865 - DNA, 588 bp, Homo sapiens
aggctgaggtaaagatagagacatcctggctacatggtgaaacccgtctctactaaaaatataaaaattagctgggtgtagtggtgccaccttgcgtgcctgtagtcccagctactcgggaggctgaggcaggagaatcgctggaacccaggtaggcggaggttccagtgagccaagatcgcaccactgcactccagcctggtgacagagtgagactccatctcaaaaaaaaaaaaaaaattaccccactttccccttatttaccattactacccttctttacttcccgggttctctacggaattctatgtcataactctggagaattaatttggcttcttctatgggaacctggagtcagatgtcgggagaactaagcaaagagggggaccggatagtcagcatgcgatttcgggggcaagaagagaactaagactgggcacaagggcacctttatggccatccagacagtgggtctgtgcaacctggggggaaccactcttgaagggcaaccggaaccctcaagggctgatggtttctttacccaataaccttccaattggtctctcaaatagcagcctggattaa

SEQ ID NO: 684866 - DNA, 791 bp, Homo sapiens
agcggaatcaaaataatggcatttgcaggcaacctggtatggaattggcagacgattattctacagtgaagtacactcaggaatggaaaaccaaagcattgtatgctctcacacataagtgggagctaagctttgaagatgcaaaggcgtcagaatgacttaatggactttggccgcactccgagggaaagggtgggacggcaaggtgacgcggatagaaagactacgacacctgagtacatgtctacgactacgtctgagtgatgggtgcacctaaatctcagtaaatcacctgcgtaaagaatttattcatgtaaccgaaactaccagctgttccccaaaaacctactggtaataaaaccaactagaggtaatactacattgtgagaagatgctacacgagctaaaagataaactataaaagtatactagtagtactttttactttacaaccaacgaagaacgaagtcatagcaagagtcagctcctggagcttctgtagggaagaagatttacaatcgaatgaaatagtgtgatccttcagaagacgggtataagctttccgttatcaaaagtattacaaccacctcctctcacccttagccactatctatcatctcagatgatcggagttgtatctatgatacaatcataatagattcagaaagtgctaactataaggcgttaactcgagcctgggttaaaaagcagaagtagagattatatgaattgtcctgattactcattctttcaagatattcacagcaagcatattctttggaaggaacatc

SEQ ID NO: 684867 - DNA, 494 bp, Homo sapiens
gagatcgggaagtagtaacgacgtggataggaacacgggcatatcgagttgtcctgccgttaacatcggcagaccgatgcccgctggaccttgatgctgcaactgccgttgagcgcggtgatggcggacttgcaggcgatgcaacacgacctcgacgcccagcgcataaccgatattttcggtatggccgtggccggtctgctcatcgccggcattggcttgctggtgatctggctggtgggccacgggattgcccggccgctcaagcaaatggtggcgatgctcaatgacatcgcccaggccgaaggtgacctgacccggcgcctgaccagtgatcgcgccgacgaactgggggcgattgccagcggcttcaatacattcctggccaagttgcaggtaatgattacccaggtggtgagctcggtgcagaaggtcagcgactcgtcggagcacactgccgacatcgcgattcgcaccaaccagggcgtgcacaa

SEQ ID NO: 684868 - DNA, 424 bp, Homo sapiens
ttttttttgggtaaatttttttttttaaattcttttttgcttagaaaggggccagggtgttaaattttgccggggacaatttgaaaacttttttgaaagcggggggatccccttggactccgcgcactggggagcttttaaagacccagggttcccccgcggggtgttcccccccaaacccaacttggggggcgctgtggttccccccccttggccccacccgtggggggggaaaaaaatgctgcacgccggttcacacttttcccgacaaattcgttttagccaagcctttttctgctcaaaatttccctactgtggaaacccccttggggtaaacactggacttgttccccccattaaaaagcccgttgcggggggggtttttctttcctggatcgggaaaaactggggtgtcataccttcg

SEQ ID NO: 684869 - DNA, 225 bp, Homo sapiens
cagtctactactcaggatatgtctcttaactgctgtcttagatgtacaattattggccccttctcctttcttctgtcactgtacatctcgttcttggtctctcctattgttctttaactgagccgtaatgtggaatcgatatttacatgttgatacggttaatttcttggccagtgtacggtatttgcctcatttccggctactgaatttgaaaattagatatta

SEQ ID NO: 684870 - DNA, 466 bp, Homo sapiens
  misc_feature (2)..(2): n is a, c, g, or t
  misc_feature (20)..(20): n is a, c, g, or t
  misc_feature (22)..(22): n is a, c, g, or t
  misc_feature (40)..(40): n is a, c, g, or t
  misc_feature (42)..(42): n is a, c, g, or t
tnagtagttacgggaaaaanangatctccgccccttctgnanccccccttaaaatttaaggaggagtatcctaatctctgaaagggggaatgagggtaggaggtgggactcaactctggaaagtggggctcaggcacctcagacccaaactgagcactagcctaaaataggtccccagggcagatgcctagtttcccataggacacaccgacctgtgtcaagtcagttcacccatggctctggcagcacccagaagttacccaccctcaccctggaaatgtctgcataaactgccccttcatttgcatataattaaaagtggatacaaataccactgcagaactgcctctgagctgctactgtgggcgcacagcctgtagggcagccctgctttgcaaggagcagcgcctctgctgctgctgtgcacagccggccgcttcaataaaagttgctaacaccaaaaaaa

SEQ ID NO: 684871 - DNA, 220 bp, Homo sapiens
tcggcccggttaagcggctcacagtaaatagcaattcagctgcttcagccgctgtcataacaaactcagagcagtcttaatggggggattagggcaggaggagggggggtgtcactctgagccctgggagagcctgggtggcaaggaagggttccccttttctctcctatctgaatatctaaatctctctctcctatcttaatattcacggacccgctct

SEQ ID NO: 684872 - DNA, 636 bp, Homo sapiens
ggtggggcctccaaaatggtgtggccaagccttgaaaaaaaatccaaggccatgattggttggaacaatgccaaacaggggtgttgcccaggcctaaaggttcattcctcgacccctgatccaaaactggggggcaagcaccatccgtttacttacctcccttcgggccaagcacaccaggaagaactgtgagacctggggtgtaaatggttaaacgggtactttggtggacataaaggaactgggcatatgggagccattggctgtgaagctgcaaacttataaaacaacagtggaaacggcagttttggtactgcgaattgatgacatcgtttcaggccccaaaaaaaaaggcgatgaccaaagccggcaaggcggggctccttattctggccaggagtgagtgctaggcaagggtacttcaatgccaaaacccaacagagtttccccctttcctaaagccaaaagggccaggaacactgtggacgttttttttcaaaaaggatcaggttggggggcagcccccagtccctttttgtcccaggtcagttttccaaaaaacactgaaaaggaatttttttttattgtaaggtttccatttagtttgcttccgaagattaaatttaagtcatttga

SEQ ID NO: 684873 - DNA, 107 bp, Homo sapiens
gtagaggatcccaaaaatgaatctcatcaaaatgcaaaggaaatgacttgatatcatgaagtatttccagaagtaacatttgttttcctcatcctgaattttatttc

SEQ ID NO: 684874 - DNA, 114 bp, Homo sapiens
ccggacggctacgaacatcaggtttacaactcaatacgatacgtctagtcagtacgtggatgggtgtacttaatttagatggcgaaacaccagcttcattgaaaaagcaatttg

SEQ ID NO: 684875 - DNA, 101 bp, Homo sapiens
tgtgagctccatgtgtagaagtgggctagggcatttttaatcttagagcgaaagcatataatcactgcgcccgctcataaggggatggcctagcctccttg

SEQ ID NO: 684876 - DNA, 156 bp, Homo sapiens
gagtagaaccccccctctctctcggtctctgcccctctctctcttggctctgccccctctctctcttggctcctgcccgctctctctctgggctctgccccctctctctctgtgtcttggcccctctctctctggtctctgccccctctctctatg

SEQ ID NO: 684877 - DNA, 862 bp, Homo sapiens
tttttccccacggaagatattgacccctctggcgactctttgtggtggaccacaataatacaccaggtggtgcccccacaaagatacaagctgtggtgtccgctggtcctgagatttttccgcgcgggtatgtttttggcaccacacccttgttcttatatctcatcggttttgatgaggaaacatacacaagtggctgcctctcctcttgagtgatttttacttcggcgcggatgtattaatattggccattacatactcgttgcgtgctgattgtgttcctcaccgcacgtaacattctctacttttccgcgggcagcactaactagaacgcctctctttctttttgccttgggttagtaccaccgcgctcgtgttttttgtaccaaataatcgcggcggtaggcacaccacacacgcgccctcggtggtttatgttgggggacgatgcttttttttccctctttttagtaggaggagcgtcttcttttctttaaactctggatgtgtgtccccaaagaaatttttttttgtgttctccaccactcctctcctgtaccaccaaatttttttctctcttcattccctccatcaactcgcggttagtgattctaatcatctagatgcgacgagataaatttgtttgttgataaaatggtgttcattagacattcgcgtgggagaacctcctgtatggagtagggttaatcataatagaccccggcgggggagaaaaaaaagaacactccgcggggggggccaatttttttttttttttaaaccgggtttttccccctcttttttcttcccccccccccccccctttttaaaaaaaaaatttttttgttattttttgggggga

SEQ ID NO: 684878 - DNA, 772 bp, Homo sapiens
  misc_feature (37)..(37): n is a, c, g, or t
  misc_feature (81)..(81): n is a, c, g, or t
  misc_feature (134)..(134): n is a, c, g, or t
  misc_feature (164)..(164): n is a, c, g, or t
  misc_feature (168)..(168): n is a, c, g, or t
  misc_feature (174)..(174): n is a, c, g, or t
  misc_feature (176)..(176): n is a, c, g, or t
  misc_feature (182)..(182): n is a, c, g, or t
  misc_feature (191)..(191): n is a, c, g, or t
  misc_feature (205)..(205): n is a, c, g, or t
  misc_feature (236)..(236): n is a, c, g, or t
  misc_feature (238)..(238): n is a, c, g, or t
  misc_feature (240)..(242): n is a, c, g, or t
  misc_feature (257)..(257): n is a, c, g, or t
  misc_feature (261)..(261): n is a, c, g, or t
  misc_feature (381)..(381): n is a, c, g, or t
  misc_feature (438)..(438): n is a, c, g, or t
  misc_feature (447)..(447): n is a, c, g, or t
  misc_feature (454)..(454): n is a, c, g, or t
  misc_feature (471)..(471): n is a, c, g, or t
  misc_feature (475)..(475): n is a, c, g, or t
  misc_feature (518)..(518): n is a, c, g, or t
  misc_feature (532)..(532): n is a, c, g, or t
  misc_feature (549)..(549): n is a, c, g, or t
  misc_feature (558)..(558): n is a, c, g, or t
  misc_feature (564)..(564): n is a, c, g, or t
  misc_feature (567)..(567): n is a, c, g, or t
  misc_feature (569)..(569): n is a, c, g, or t
  misc_feature (597)..(597): n is a, c, g, or t
  misc_feature (603)..(603): n is a, c, g, or t
  misc_feature (632)..(632): n is a, c, g, or t
  misc_feature (651)..(651): n is a, c, g, or t
  misc_feature (656)..(656): n is a, c, g, or t
  misc_feature (671)..(671): n is a, c, g, or t
  misc_feature (673)..(673): n is a, c, g, or t
  misc_feature (769)..(769): n is a, c, g, or t
gggcaggggcaggggcaggggcaggggagggggctancagcccccggcacacgaagtcgaagtccaggaaggctgcctgcnccagcaggctgtgaggggccgcgcagtcgcggggcgggctcagtgtgggggcntccccggtgaactcctcgtcgaaatagctnatgncggagngnccgganagcgtgggnacaaaaggcggtgncaggcgccgggacaacagggcttcccaaccnanannnctgaagaagggctgnttcntcacatcttctgcatctctctcgctagatcccagcctccgctctgggattacctccgaagcagcctatctcatgatgccgatgagcttcggccgacaggaagcggggagtagacgaaccncgtcgttgacgatgatgtcgaagacctcctcctcatcatcccctgggaatggggacntcgccaacnaggatcncgtagagcaacacaaanagtncccacacagtccacagatcgagtagtacgacgtgtccatcagnacctcaagggccangaaatccggggtcccanagaatgtgntggtcnggncnccatagcccatccccttccttgcagaanccaaantctgcgatcttgacgtagccctcggtgtncaggagcaaattgtccaanttcangtccctgtagacgananagtgtacaatgaagaaactgtaggacacaacaccacgcaggcggataaagattggcaggggctcagagaacacgtcgctgtggatgtgcacatcangtt

SEQ ID NO: 684879 - DNA, 99 bp, Homo sapiens
gtcggagcatgaacgcgcagccatcctcagtgtacccgcagcccagaaccctgaggacctccgcatgtttgccaggctccttcactacttccgcggccc

SEQ ID NO: 684880 - DNA, 109 bp, Homo sapiens
cagtatctggaatggacagtcgatctatcaggtgctatgcaagaaattatgtaacttttaaactgtatcgtttctccttcagtcccacatatctcacatagatacacat

SEQ ID NO: 684881 - DNA, 479 bp, Homo sapiens
ctagaacggagctggaactacactccgttgctactcttgcctgattacttacaaactttctcttatggtaggtctgtctatttcgagttcttccctaatttagttaaacctaaattaggtacctatgttaattcttcacagcataatagcatttatctcagtttgcaattgtgtgtgcatacagtgattattcgcttaatggctgttgctccctaaggtctacaagggcaggttccccagggtgtccacatagaaggtgctcagaaaaataccttgaattggcctagcttggtaagaacatgggctttggcagcaggaagttcaaatacctgctctactcttcattattagtaatgtgatcttggacaacccacatagccttgctgagacctgttttatttgtaaaacctctcttggagttgctgtggcgatacaatgacaaccatatataaacgagccaggcttcttctagaagaatg

SEQ ID NO: 684882 - DNA, 793 bp, Homo sapiens
  misc_feature (268)..(268): n is a, c, g, or t
gcccctggatccggtttgactgcaccagctgagatcaggaactgaatgatgcttgttgacgatctttctgtatgctgggcatgcttctgccgaaggctggccacctcccgccacagagcctcattctcatgcttcatggccaggagcttggagtccatgcactcctggcttcccacttctatcgacgcatgcacggtccgtcgagcgagctgtggtgcaccgcgtgtccatggctggatcttttagtgtcttgcgacatccttcgagnggtgtgacaccacgtggtcacttttcctcttgtatgttctccagtggaagctgctccttggccacgcaaggaagcatgggtgctggaactccgtgtcgtctctctctggacttgaccaggcgccgtgcctgctcgatgtgggagccaactttccggcaaagccatacatgttgagtctgcgcaggcacgaagctggccatgtcgtagtgcttgaagtacttgggcatcaccgtccttggtcaaagcgtggtcctggtcgaactaccgtggaagctgtttcccgctcgggctccagtcagatgagcgcgtcggtgtccgggtcgctcacgagggtccacagctgtggtcaggaagagccgggacgttgcgtgggccccgtcgcgccggggtccacgggcagatccatctcgagcaaggagggaataggcggacgcggagcagggcgaaatgagggggccgaagggcccggggtaccgccgcggcggccagactttccgggcggccgcgaccggtggccatggccgg

SEQ ID NO: 684883 - DNA, 192 bp, Homo sapiens
  misc_feature (120)..(120): n is a, c, g, or t
ggggttttaaagaacttcctcccaacttggtttaacccttaaaggtttcctccaaaagcctggcccttaatggggtttttttcctggttgttcaaatggtggaattttaatggggtaagntaaccaatcccttttcctcccttttgggggttttttaaaaaaataaagtttggcaagaaacaagaaaacttt

SEQ ID NO: 684884 - DNA, 108 bp, Homo sapiens
tctatatctgtgtcttttgtgcccacatcccatttatgaccaacctccaagtctgggctacatctggataccacctaatgatcacatgccaggtgcagaccagggcca

SEQ ID NO: 684885 - DNA, 723 bp, Homo sapiens
ttccgtagaggtggacatggtgtgcggactttcgccgacgcatattgcttgccaggtatggagtcccgtgagcgcgcagaggagtccctgaggagctagggacccctaaaggccgtttcaccgcgtgctgggccagtcctcagtcagctggagggtgggtcccacggaatcctgttagtttctaccagctcctcgcccttctctggagctggtgtgagctatcagagagtcctgtggagcgtcggctgggatcagcttggtctcggtgaaaagtaaactttgtaaagctttccagagttgtcgaatcttcgcacctagaaaacttgatcacagtcaatatctgcagtttccaatttgccgcaagaaagaagaaggtagctgattttcagcttctctgtggagttctttattggatgaagacaatgaccattcaagaccaggagtattcgagttcaagccaagagactagcagagaagctaggatgtgatacacgtggtgagtgaaagtcagtactggtcacacatggactgtaaactttcaaaagtatgagcagagagctcttaacaaagacagtgctactacaagtaacttgaagatggctcgacagatatggattaacaagtgaacttttctctggacttccccagaagaagattgtggttgagttcagttcacctaagtgttgccaaaagaatttcatgatggacatttgcgttctacca

SEQ ID NO: 684886 - DNA, 821 bp, Homo sapiens
tgatgctaggtgatccaaaacacagtttgacagacgcaactgaatgaggcaaaatcacatggctgaatcacgcgctatcaggaatcacagctctcaatagcatatgagggatgttataggaaagcggttgaatcacaagtctcagaaccacatgtcagaggcaaataagctgtgtacgcagattgttggttcatagtcagaaactgaagaacacagaaatggtgatcagtggtcgtactgtccagtggcagagctgtactggcgatcttcctcccataccatcgcgctgcccattgctcctgcaggtctctggccctctccaaggagtaccggttacagtacttggcctcctgaaacagtgctgaacattggctaatatgcgcagctcattcttaggaatcccagaacaggccttaagtcttctccacatggccatcgagcccatgctctggctcgacggggctatcctggacaaaggtcgtagccatgttcttgagtggccaagtgccaggtggcttcagcagcttcctaacgatcagccgaagaaagcagaagctctggaggcggccatcgagaacctctaatgaagccaagaagctattttgcaaagggtgactgcaaagagcgcatcagggagcgtcgtttacttcctaggccagactctaccatacctggggaagactccaggagaggaaccggtgtgcgatgctcttccggcagctgccatcaggagcacgcccttctcatggggtacccttgataaaccaatctctagagaggacatcctgctgggctgactgtgcagagtataagattttgga

SEQ ID NO: 684887 - DNA, 262 bp, Homo sapiens
ccgacggcaccgaggtgatcggtgaggcgctcgtgaatgtccgctggtatacggcaacaacgacgtaccgggcaacatgctggcgggtgcggtttccacttacgtgcgtcgctacggcgtggcaccgggcaagaagctggtgctgtcgaccaacaacgatcacgcctaccgcgttgcgctggactggtttgatgcaggcctcgcgtgcgtggctgaggctgatgcacgccacaacccacgtggtgcactggttgaagaagtc

SEQ ID NO: 684888 - DNA, 1011 bp, Homo sapiens
gcgtcaggaaatcaaaatcaccagcaagtttcgaggcaaatacctctcaattacgccccgccctgaaaggaccgagaaagcgagaagagagagaacgaggagcagagaggaggcgaagcagcacaaagcaacgcgtttttcggcaggcagcgaagaaagaaggagagacagaaagagaagacaagcgaagcaagaagaaggagggaagagagagaagaagaacagaacagagagacagcgacaggacaacaagaaaagcacagaaagcagcagagaagagagaaaacaagaaaacaaacacaaagaaaagaaaagaaaaaaagaaacaagaaaaaagaaaagcaaaagaaaggaagaaaaacaaaaagaagaaaaagagaaacgaaaacaaaagagaaaaagaacaagcaagaaagagagaaagaaaagaacgagaaaagagagagaagaggaacaaaaagaggaagaaggaaggagaagaacaaaaagaagaggagaagaagagagagagaaaaaggaaataaagcagagagaaagaaaagagaaagcaaggaacacgagagaaagagagagagaacacagacagcaggagagagagagccaaggacaagaaaagcagcgagacaaagagaagggcacgagacaagaaacgaaggagcggaagaggacagcaccgaaggcaggaagcgggagggacggcgagccgagcagaccctgagcagagacggaaggagacgagagagcgagaagagccggacagacggagaagagagagaggagagcgaggagaggaagcggagagggaagagagcagagggcgggtggaagggacggaggggacgcaggcggaggagaggaagagcggggcgaggagacgggacgggagggggcggggggacggaaggaggacggggcacgagcggagagaagggcgaagaggggggagacgaggaagaggagcgggacggaagagggagggagagagcgagaaggagggagcggggacgagaa

SEQ ID NO: 684889 - DNA, 464 bp, Homo sapiens
cccccaggttggggcccctcctcctcctccctggaaatggtggcctcctttaccccaaaggccttttccctgggcagctcccttcggggcaaacaacggatgagcaagcataactttttgcagggccataacgggcaaggggtgcgggccccccggcccttttacgacccccccaaccttttgggtcccctttgggccctcaacaaaacctgaacaggttttgcccacctgggcccttccctacattattattattttatggccccctggccacacccaacaaaggttttcagtggggccagtttttttctccccttttttctgcctttggccccgcctggccccgcctgcccccctgtggggggggaaagtactgccgggtttggggccggttttgctcccttatggggccccccctttttcagctttttgctatttaaaaaataaacccccccgttttgtta

SEQ ID NO: 684890 - DNA, 1191 bp, Homo sapiens
  misc_feature (92)..(92): n is a, c, g, or t
  misc_feature (143)..(143): n is a, c, g, or t
  misc_feature (177)..(177): n is a, c, g, or t
  misc_feature (187)..(187): n is a, c, g, or t
  misc_feature (356)..(356): n is a, c, g, or t
  misc_feature (406)..(406): n is a, c, g, or t
  misc_feature (445)..(445): n is a, c, g, or t
  misc_feature (777)..(777): n is a, c, g, or t
tcttgtttcggggggtgacatagcagagcacaccataagtggacagtaacagaccaccgacagcacacgaatggatggctagggaagtgagnagacgatcaagtcatagatttgttgtgcgacaagaagccagggcaccttgntatgtgcctcctgcctatatgtgcgtggcaagcncccagtcctnctgacgtacacataagtgcgcgccagcacggccgcgttttaattccgctctcaccactgggagatttgttcttctaaagccgctggagaccacccgtcgcacttcggcccagagagtaatgtttctcgccatagggccagagacgtaggcaccataccaaaagccgcgnggggacaccccaaatgatccccacagctgtgggcgcgacaaccctatgtntccattgtctgcgcccaacgcgccccaacggacttcgtntggggcgcccccggagaaccgctcgggcgttagaagacggggtccactacaatttgggcgaacgagtcacaagagggtccggcccgcaaaaccaatggggatggggcggccccccttctcccaaaacaccggggcgtggaatcccaaaacactccaggcgccgcggtcgagcgtggcatgcacgcacttgctacccgcacgctccctcggcgaggcagtcccttcgtacgaagcaacacaccgacagaccgccggtgggcctcctcgttctcatccacgcaacaggcgggccccaacaaccgcacgagagcctccggcgtacgaaactcacnccctcggagtaagaggagaatctcctgcttcaccctgtggtgtggacgccaccacgcagaggcgccaccaatcggccgctggggaaacctctcctatacgcgaggaccccacaatgggtgcgctccttaagacaccagaaagtcgtgagacgcgagaatatggcaaggaccggagagtgtctcacagccagcgaggaatggagcaatgtcagtgctctccctcgcgggctggaagtccccgatcagtgctccccgccgggcactccggggatcttgtactacctcgatgtcgtaggaagtcgcgcgtgtcttacaacacatcggtgcacgggccagcaatgataaagattttcatggtgtatcaaaatttgccccaaaacataaacccccacctttcccgggcggtaacataac

SEQ ID NO: 684891 - DNA, 396 bp, Homo sapiens
tttgacggcagccaaggtaccccttgaatagccggtgcgatccatggattgagcaaagatggtgtaagcctgctcgttttcaggctcgacaatgacatcgtaggtttcagcaacggcaatccggaattcatcgatcgacactggcttaacgtactgaccgtcggctgcgacaaccgtcattttcaagccggggatccgcacgtcgaaataggtcatcgccgagccattgataaagcgaagccggattttctcccctggcttgaagattcccgtccagttcccatttggcgcctggccgttcatgaggtaggtgtaggtgtgcccgctcacgtcaacgagatcggttgggctcatcttcatctcggcccacatctttcgatcggccacagcagcaga

SEQ ID NO: 684892 - DNA, 208 bp, Homo sapiens
cagcgccactatcctcattgtgttgtggtaaatatgtagagggagtataaggctgtgactaatatgttgagtcctgtaagtatgaaagtgatatttgatcaggaaaacctggttacttacccaaaaaagtcttccaatccggtaattatgggggggtaaggccaagttagccaagcttgcttgaaatcattaaaaaactattaatggg

SEQ ID NO: 684893 - DNA, 263 bp, Homo sapiens
ccttcccaggaagttcccggggtcgacccacgcgtccggtatattttataggcaaaaaaaaaaaaaaaaatggtttcaccatgttgcgcaggctggtcttgaaattctcagttcaagcagtccacccacctcggcctcccaaagtgctgatattacagacatgagccaccccacccagtcagcacacattttttttttttttaaataagacagggtgttgctgttgcccaggctggagcgcagtggcatgatcatagctcact

SEQ ID NO: 684894 - DNA, 318 bp, Homo sapiens
  misc_feature (230)..(230): n is a, c, g, or t
gccagtcttaattacagacacaagtttaaacctgtaaaactgactaataaagttacaagagatgcttaataaagtagcaacaattagaacatacaattatataaacagtgtattataagaagcaagcatcattttctgtattttcatctgacgcttcctagtttattttatcccagtggaagcaaactgcttcaaatgtgatgtagcaggcctggtctcctctatctatnaatcaagtgggtgagcagtccaaaatagcaacgagctccacatttaggaagcaaggggaagaagaaaacgagggcaggctttcaatca

SEQ ID NO: 684895 - DNA, 575 bp, Homo sapiens
aaaaaaacgggcccaacccctttttttcccaaaattaaaatggggtttttaaaaaaaaaaccccccgggcccattttaaaatcactttttcaaaaataaaacaaaaattttcctttttaaaaaaagggggtaaaaactcccctaaaaaataaatttggaaccctttttaatacaaaactttttaaaaaagggggcccctttaaaaggggttttttttttttccaaaagggggtacctccaattccccacacaaaaattttttttcccaatgtgggaaaaacgtaaaaaagaaaattttcccttttccaaaaaataaaacttgtccccctttcttaaaaaaaaatttttttgggtgcccccccctaaaggctgtttaaaaatctccaaaattttgcggggaaaataccacccggggaaaacatttgtggggggttgccaactggcccatttaaaaagttattgctgttccccccaaaagagaaaaacagtgcgggttgggcccaacacgggaaaggggggctatttcttccccccgggaaaaaaaatttccccctcttaaaatagtgggggggccc

SEQ ID NO: 684896 - DNA, 587 bp, Homo sapiens
  misc_feature (464)..(464): n is a, c, g, or t
  misc_feature (518)..(518): n is a, c, g, or t
aggcctcgacaccgagaaagtgaccggcaaggcactatccgcgctaagggaagccgtcaaggccgacgaccttgcccgcgataaggcattgatggctagcccccagttagccatcgaacacctcgccgacggggtttcgctacgcattgacggcgccgacctcgatgtaccgatcggtacgacgaatcagcgccgggtacatggcgagctcgtcatggagatgggtgaggcttggcgagtgcgaatctcccccacttctgaggtcatgaccttagggaacgatgccgagaaggcccaccaaaccgtggtgtcacaactcgaggacttaggtgtggcgagtctggagcaggcagagtctcgtctagctgaacgcagggtcatggagacccacatctcttcctggcgggaacacctcgaggaagagcagggcgaagtcaccatccaagagcttgaagccatggctnagcgcactaccgaaaccgtcagcatcacggccgccgaggctcagaagctggaanaagaggctgtcgccgcagcgaatgaagcgcgtacgcccaaggtcggctgacaccggttaaaaccgtgga

SEQ ID NO: 684897 - DNA, 385 bp, Homo sapiens
ctgcaggagtaggctagcgagcagaatagcctccatgacgtaggagagctcgttgataaacagctaaaggatcttgaccagcaaaggaatgtatggccagcgtactgggtattgggctgacttagagcgggtgcagatagccctcaaccatgctgtagatcacctctcccttcaaacggatatcctatagccgattgtcatctgcattgatgccatggtggagcagattacagagtgccacagagctgactttgccttcatactgtccatagaacaggtgctgtcggctatgtccactcagccataacaaactctagagcaggttagccagtaggtcctgggaggctacacaggaatccaagagagggtctagctgagtgtgcac

SEQ ID NO: 684898 - DNA, 285 bp, Homo sapiens
catacaagtaagcttatttaaagtgtttagacagggccttgcataaagtaaatgctatggcacactagcttcagcgagcctcccatggtgaagggcataccattattgcagatccaaattcggcctatattccagtgcaagaaggtcactctgagaggcagtacaagtttcagtcacattggtgcatgtctctcctctgcctgccagcgaagttccacccgactaatctgcttcccatatatccttcccatgtacatcttcaggggctccctgccatgtgcagca

SEQ ID NO: 684899 - DNA, 902 bp, Homo sapiens
  misc_feature (1)..(1): n is a, c, g, or t
  misc_feature (332)..(332): n is a, c, g, or t
  misc_feature (340)..(340): n is a, c, g, or t
  misc_feature (389)..(390): n is a, c, g, or t
  misc_feature (393)..(393): n is a, c, g, or t
  misc_feature (396)..(397): n is a, c, g, or t
  misc_feature (402)..(402): n is a, c, g, or t
  misc_feature (404)..(404): n is a, c, g, or t
  misc_feature (415)..(415): n is a, c, g, or t
  misc_feature (426)..(426): n is a, c, g, or t
  misc_feature (546)..(546): n is a, c, g, or t
  misc_feature (570)..(573): n is a, c, g, or t
  misc_feature (575)..(575): n is a, c, g, or t
  misc_feature (577)..(578): n is a, c, g, or t
  misc_feature (586)..(587): n is a, c, g, or t
  misc_feature (591)..(596): n is a, c, g, or t
  misc_feature (605)..(605): n is a, c, g, or t
  misc_feature (609)..(610): n is a, c, g, or t
  misc_feature (616)..(616): n is a, c, g, or t
  misc_feature (621)..(621): n is a, c, g, or t
  misc_feature (623)..(623): n is a, c, g, or t
  misc_feature (644)..(644): n is a, c, g, or t
  misc_feature (648)..(648): n is a, c, g, or t
  misc_feature (652)..(652): n is a, c, g, or t
  misc_feature (659)..(659): n is a, c, g, or t
  misc_feature (663)..(663): n is a, c, g, or t
  misc_feature (666)..(666): n is a, c, g, or t
  misc_feature (670)..(670): n is a, c, g, or t
  misc_feature (704)..(704): n is a, c, g, or t
  misc_feature (747)..(747): n is a, c, g, or t
  misc_feature (751)..(751): n is a, c, g, or t
  misc_feature (755)..(755): n is a, c, g, or t
  misc_feature (761)..(761): n is a, c, g, or t
  misc_feature (763)..(763): n is a, c, g, or t
  misc_feature (772)..(772): n is a, c, g, or t
  misc_feature (799)..(799): n is a, c, g, or t
  misc_feature (802)..(802): n is a, c, g, or t
  misc_feature (804)..(804): n is a, c, g, or t
  misc_feature (807)..(807): n is a, c, g, or t
  misc_feature (812)..(812): n is a, c, g, or t
  misc_feature (823)..(823): n is a, c, g, or t
  misc_feature (896)..(896): n is a, c, g, or t
nttcctatgaatgtaaatcataaattttgatgttttaaaaatcctaaatggtttaaaggacttaccgagacttgattaacccagtttttaaaataaaaaatcaaattataaatttatattataaaaataactgccagttttgcatagtaatatagtaacaaatcaacactcttcaaagtttaaaggaaaaggaagctggtattggtttctgtctgaagtcagatctaacttttacgaagacaatagtttcagatcagaatcaaataaatttcagaactcagtttgagagaaaaggaaaaactttagttaaaatctttacaataaaataattntgactatnaatctctttagttaaatatgtacacattacatggtatttgtataaagannggnaanngttantntttttctggcnaatcttatgcncaaatacaccatcttttagagtataatgtccgtttatcattcgttaacagctgtgttagacagtggctctgctttgtgcaaaacgtgataaacaaaattaggaaaaattctgcaaaattntttagttccccaaggaaattactnnnntngnnaatggcannagannnnnnggttgcacnctgnngcttgnttgtntnctcaggctacaatgaccagcnctgntgtnacccccntatntgntaantaattgggtagatttagtatgaagtaaaaaatgnagtaatagaaattgtgatttttatgaagaaaaatggaaaatanggtngatnttgtantnaagatgaantaaaaaatattaaataatattttgagnagngngangggtntttagaataantaaatttttggcctttttttcttcccctgggggctcgtgcggtccctgggccgtcgtttccccgggttgcccngtacct

SEQ ID NO: 684900 - DNA, 887 bp, Homo sapiens
  misc_feature (1)..(1): n is a, c, g, or t
  misc_feature (332)..(332): n is a, c, g, or t
  misc_feature (340)..(340): n is a, c, g, or t
  misc_feature (389)..(390): n is a, c, g, or t
  misc_feature (393)..(393): n is a, c, g, or t
  misc_feature (396)..(397): n is a, c, g, or t
  misc_feature (402)..(402): n is a, c, g, or t
  misc_feature (404)..(404): n is a, c, g, or t
  misc_feature (415)..(415): n is a, c, g, or t
  misc_feature (426)..(426): n is a, c, g, or t
  misc_feature (546)..(546): n is a, c, g, or t
  misc_feature (570)..(573): n is a, c, g, or t
  misc_feature (575)..(575): n is a, c, g, or t
  misc_feature (577)..(578): n is a, c, g, or t
  misc_feature (586)..(587): n is a, c, g, or t
  misc_feature (591)..(596): n is a, c, g, or t
  misc_feature (605)..(605): n is a, c, g, or t
  misc_feature (609)..(610): n is a, c, g, or t
  misc_feature (616)..(616): n is a, c, g, or t
  misc_feature (621)..(621): n is a, c, g, or t
  misc_feature (623)..(623): n is a, c, g, or t
  misc_feature (644)..(644): n is a, c, g, or t
  misc_feature (648)..(648): n is a, c, g, or t
  misc_feature (652)..(652): n is a, c, g, or t
  misc_feature (659)..(659): n is a, c, g, or t
  misc_feature (663)..(663): n is a, c, g, or t
  misc_feature (666)..(666): n is a, c, g, or t
  misc_feature (670)..(670): n is a, c, g, or t
  misc_feature (704)..(704): n is a, c, g, or t
  misc_feature (747)..(747): n is a, c, g, or t
  misc_feature (751)..(751): n is a, c, g, or t
  misc_feature (755)..(755): n is a, c, g, or t
  misc_feature (761)..(761): n is a, c, g, or t
  misc_feature (763)..(763): n is a, c, g, or t
  misc_feature (772)..(772): n is a, c, g, or t
  misc_feature (799)..(799): n is a, c, g, or t
  misc_feature (802)..(802): n is a, c, g, or t
  misc_feature (804)..(804): n is a, c, g, or t
  misc_feature (807)..(807): n is a, c, g, or t
  misc_feature (812)..(812): n is a, c, g, or t
  misc_feature (823)..(823): n is a, c, g, or t
  misc_feature (886)..(886): n is a, c, g, or t
nttcctatgaatgtaaatcataaattttgatgttttaaaaatcctaaatggtttaaaggacttaccgagacttgattaacccagtttttaaaataaaaaatcaaattataaatttatattataaaaataactgccagttttgcatagtaatatagtaacaaatcaacactcttcaaagtttaaaggaaaaggaagctggtattggtttctgtctgaagtcagatctaacttttacgaagacaatagtttcagatcagaatcaaataaatttcagaactcagtttgagagaaaaggaaaaactttagttaaaatctttacaataaaataattntgactatnaatctctttagttaaatatgtacacattacatggtatttgtataaagannggnaanngttantntttttctggcnaatcttatgcncaaatacaccatcttttagagtataatgtccgtttatcattcgttaacagctgtgttagacagtggctctgctttgtgcaaaacgtgataaacaaaattaggaaaaattctgcaaaattntttagttccccaaggaaattactnnnntngnnaatggcannagannnnnnggttgcacnctgnngcttgnttgtntnctcaggctacaatgaccagcnctgntgtnacccccntatntgntaantaattgggtagatttagtatgaagtaaaaaatgnagtaatagaaattgtgatttttatgaagaaaaatggaaaatanggtngatnttgtantnaagatgaantaaaaaatattaaataatattttgagnagngngangggtntttagaataantaaatttttgaaattttatattaaatgagggatagtgaggtaatgggaagtagatcaagagtng

SEQ ID NO: 684901 - DNA, 431 bp, Homo sapiens
gagcacaacagcatcattcagcgcatggtgcttggggtcatgacatgcctaaatgggcggcttgatatgctcgggcttgtcagagtctggtcgtatcgctttcactggttttctctgcaggatcctgtcagccagcaggaagtatgtggcgtgtgatatggtctatacgctgtatggaaaccagggcttctacaatggcgtctcgatccgcttatgtccccaagcaccatgcgctgaatgatgctgcttgtgctcctcttccgagagcattcgtgtatgacacaaggggaactgtgatactttgtagctggtgaagggtccagtaccctgaagccaaggatgatttgcaatctcttctaaagaagcccttctcttgggatctctctgtagcatccgtgtgattaggtcttgacactctattagacacatgg

SEQ ID NO: 684902 - DNA, 835 bp, Homo sapiens
gtggtgaaaccccctctctactaaaaatacaaaaagtagccaggcgtggtggcgtgtgcctgtaatcccagctactcgggagggctgaggcgggagaatagcttgaacctgggaggtggagcttgcagtgagccaagatcacgacactgcactccagtctgggcaacagagtgaaactcagtctcaaacaaaaaagaaaagatttttttaaaaaggcggggcacagtggctcatgcctgtaatcccagctactcaggaggctgaggctgaggcaggaggtggaggttgcagtgagtggagatcacgccactacactccagcctgggcaaactcttgtctcaggaaaaaaaaaagaaaaaaagctcaaataaaaggactcagggctagggaagaaggggtccaaaaatttccctggggggtttcccagaggctcaatttcaataccctcattcaacgggtccattttccactaaactcgtgggtatcatgagcttaccatctcttggcttgaaggtgagtacatcgcccttgcacttcagtttgtgtttcattcacccaaagattatttcacccaggtttcactatgtggggccttccattccagtccttgaccaattttttttgggcgttagttataaactagggcctggttaaggctccgggatccagggcaaacaaaaaaaaaaatctctggccaatggactacttccgggaaatcttggcaataatcacatgatgctttctggtcgggatttgcctggaaacacaggacgcgcaagcgcggaagggcaaacaggatcttgcgggaacaccgcatggacaagccaaggccgga

SEQ ID NO: 684903 - DNA, 427 bp, Homo sapiens
  misc_feature (14)..(14): n is a, c, g, or t
  misc_feature (57)..(57): n is a, c, g, or t
  misc_feature (68)..(68): n is a, c, g, or t
  misc_feature (73)..(73): n is a, c, g, or t
  misc_feature (115)..(115): n is a, c, g, or t
  misc_feature (208)..(208): n is a, c, g, or t
  misc_feature (211)..(211): n is a, c, g, or t
  misc_feature (230)..(230): n is a, c, g, or t
  misc_feature (249)..(249): n is a, c, g, or t
  misc_feature (313)..(313): n is a, c, g, or t
  misc_feature (342)..(342): n is a, c, g, or t
  misc_feature (398)..(398): n is a, c, g, or t
aaaacctatttatncccccgattagagtggaagtggccaccctatttaagggggccnggattttaagnccagnttttatggagatataagtcatgccagtaaaaccccttaaganaaaatcgattgcccgacgaagtattgtgtgtagtcctggttcagtaatgccttgtgccacagtaaagccttgagagtcaccttagcctaaagnaancccaaaaggaagtctgtantttgggcatcctatactantttgtctttaagatatttatccagtccttagcaatgaaagggagatgggtatacaactaattgntcctgtttatttgcctctgtatctatagnacatattagtttgttaatataactaagtgagccgagattgtgctgctgcaggccancctggcgacagagcgagactctatctcat

SEQ ID NO: 684904 - DNA, 454 bp, Homo sapiens
  misc_feature (5)..(5): n is a, c, g, or t
  misc_feature (14)..(14): n is a, c, g, or t
  misc_feature (55)..(55): n is a, c, g, or t
  misc_feature (114)..(114): n is a, c, g, or t
gccantttgtgtgnttttggaccttgccctgaaaagtgagtggtttggacctccngataagtaatagttttaatttatgttccttagtacagtcggtccctctatcctccgggntcccacatcctgtggattcaacgaacccatggatcaaaaataattcagaaaaaacaaatgatggttgtgtctgtactgaacatgtacaaattttttttccttgtcattatttcctaaacaatataacaactatttacatagcatgtacatttattaggtattttaactaatctagagatgatttaaagtatatgggagatgtgcttaggttatatgcagataactattttatataagggactccagcatccttggattttggtatctgagggattcatggaaccagtcccccacagatactgacgaaagactgtaattttggattgactgagaaaaaaaa

SEQ ID NO: 684905 - DNA, 187 bp, Homo sapiens
  misc_feature (139)..(139): n is a, c, g, or t
gacggtccaggtggaggtgatcaatctgatggagaatgcagtcaaagagatcactggtggtggatgcttcattcattaaacgctgtccccagcatctactttctcatactgtgtacacacagcactgtgattcttcgangatgacagctatttttagtgtctgttcggaataacgtactatttgcat

SEQ ID NO: 684906 - DNA, 224 bp, Homo sapiens
cacgagggttacttaacctctccaggaccacaatttccctaactgtatgatagctactgcatagcgtgactgagatcagtatatatgcacgtatatgtggagtacttacgacagtccctgatacaaattagctcgtcagtgagtgatacgttgcattaatatgtacaatgaagcatcaagcatctgccatggctctggcatgataccgatgaatggaccatgaa

SEQ ID NO: 684907 - DNA, 241 bp, Homo sapiens
catctgttactttttttatttttttatagccattctgactggcgtgagatggtatctcattgcagttttgatttgcatctctttgatgattagtggttttttcatgtttgttggcagcttgcgtagtcttcttttttttttttttttttgggagaggggttcccgcttctgtgtgccccagggtggaagttgcggtggttgcaatctctcagctctcatgtgaaaggctcccgcctccccg

SEQ ID NO: 684908 - DNA, 165 bp, Homo sapiens
  misc_feature (114)..(115): n is a, c, g, or t
ggtcgacacttagttggtattcctataatgtatatttctgggctacgatgtctctatctttactaggtgtgtctttgtatcccaagcctctctgctttccaaggcatctctatnnttcttcatgacccccaaaggggagctatttgataggttttgatgggttaa

SEQ ID NO: 684909 - DNA, 170 bp, Homo sapiens
gtgatagatgtactgtcttgcagacaatgatgcaaataacaatgaggcatgggctaatggatttgaagctggcagggactcatcgtcgatgttcttggcgaagagctggaccggcgacgggagacggtcgcttgacggggcacgggtgctgggctggaccactggttgca

SEQ ID NO: 684910 - DNA, 1974 bp, Homo sapiens
  misc_feature (901)..(901): n is a, c, g, or t
accaacgtgtacgcggacgctgtggggggatgcgtggttccggacgcgtgtggtagagggacgagggccggagtataaggctcggagggccaatggatgcgagggctaagacagcgaggaggacgtagcggagtgggagccatgggcatgaggtcaagcacaggattccatcgaatagacggacgcaagacaggatgagaaggacactaggataaacaatcgctacatgcaaggatggaacgtggctgtgccaagcatacaaaggcacatatgtgatgctccccccccccgtcaatggccttgatcgactgataacgtccacgtgacttgttgggaaacaaatgggccatgaacagagaaatataatccttgacacgccacaaggacgaacgagacgcattgacgcgcgatggacccggggagagacgagaagcgtaggaaaggattacgaacaccatataaatgcgtatgacagggcagaagaaccacaatgggagtccataggatgcaagagacacgtgccccaatggcaggttaaaatcataccaccttgacgaggaaggaagtggagacaaaagccacacggggaaaagtgacatagagaggcagacattggggatacagttaatggatgaaacgcgaaaaggattgtgggcatagggagtagcaaattagaatggaatagaaaagaggagggaggaaggacgaggaaaagattagattcagaacaaatagggggaagcatatggaagaatgggtaggaagaaggcaaattaggtacaatggaaatatcgaggacgtaatacggcgagtagtggaacaaggatataatagaaagagagaagtttgacacgacattaaagggagcgaagaggggagaattcacacacagtacaacagntgaacgtatttgtgtcgaatagtgataggcacccgattcgatactaagatttgggagaggaaataagagggtgcgaatagggaagatagcgacacgagtagaaagaggaaaaggaggcgcaaagactgacgatcaaagaaagtatgggcgaaagcaatttagaattaagagcagatatgggaggatattggagacagagagagcggattaatagcagtaagagatagcgaacattgggagaatatggaggagagaaagaggttgataaagtagaaaaagatttatgatgagaaagataacgggtaaaaaggagccgaacagcagacgaaaaaaagcaaaacaaagaagaggaaccaaggagcacgaggaccgagactacgaaaagacgtagcaacacaacaaccgaagtgaagggggaccacaaaacggctaacgacgaggagaagagcagcgaggagtatgataagtgtgaagcaaaaacagcacgagaaaccacataagaaaaagagacaagtagaggacgaaaaagcaaaggagacagtgaacgaaagacaagagagagcagtcacagaatccacgaaagagaggcgagcaagaaagcagctaggcagaagaacccgggcgagagacgacggccgacgagtagcaccacgcatgagcaagacgaagcagcgaccgagcagcaagcggaggcgagggagacaacacagggagaagcagaccaaaaaatgatgcaccgagaagcaatgacagaggaggcagagcgaaggaacaggacgcaaacagacaagcacacgcaacgatggcggagcaaaacgacgagaggagagcgtaacagagagcgcagagagaagaatgaaaacagaatgagagagaaaagacgtaggatgacagagaacgcagagaacgacgagcgaacggaagggctggacagaagtaagcgcgaccaaaagaggcgaaaccagaagaagaacgaaaggacgaaagagtaagatacaagagagagaaaggcagacgagagagaaagaagagaaacagcaatatacaccgaaaaaagaagacgagacaacaag

SEQ ID NO: 684911 - DNA, 374 bp, Homo sapiens
ctcaacaacatccgtctacaacttctttatattgtaattaaacgagttaatccagccagctcctcctaagagatcagtattggcgatttccactcttgcatcagagcactcgttaacaacggtccttgcctcggagaacattagaggctacagaagcattgcagagaagagaagaagaacaccgaagagggaaagataacttgggctctcaccatcatgcacttttttagcaacacaaaattaaaaaccacatctaatacacttttctctatactttagtggttgacacaagtgactcaaatatcctaagagtacaaggaacagcctaaaaacagctgttttaaggtttgtctctaagattatgataccgcgaa

SEQ ID NO: 684912 - DNA, 866 bp, Homo sapiens
  misc_feature (20)..(20): n is a, c, g, or t
acttccgggctgccaggcantgctgtggctccaggatgatggagacagagcgacttgtgctaccccctccagatcccctggacctaccccttcggccgtggagctcggatgcacggggcactgggagctgctgaacttgcctggagctccagagagtagccttccccatggcctccctccttgttgccccagatctgcagcaagaatgcatgaacagttgtttcttgtcatccccagcctggctgactctgcatggtgtggagcactcagccctgaaaatggcagagtgaatgactgtgatccctgtgtctctttttggctgtcctggagatgccccagtcccatccgacactacatgtgcccaaatgacacccaaccacatgtgccagatactggtgttacaaagaggtcttgcttggagaacacaaatctctcgtgcctacaacctccttgtctcttcgcctgtgcctccagtggccagcctcccagtccttatggggaaatccaactcgtgtatcccttctggccagtgggggatggatgaacaccaccataacatgatctgaacacacgggaggaggctgaggaggagatagactatagacaaagatccttcttactattccaccttggtttcaagaaaggcatggactttgcaccaaaagattgtccaaactccagctccttggactactaagacctaagctgtctgttggagcctctggatttggctgcgcgggtgacgagattagaatgagcagtaggaccccatgtgtccaaagggacactgttcaactatccctcatgcccctgccgaccacattaaaactattgtgagaactacgtttcccaagccaacatcagga

SEQ ID NO: 684913 - DNA, 894 bp, Homo sapiens
aggggctatccccgaagggtggtacaaccccctcggttacgccccgggctcccccagaggaggctctgcccccccggggaaagattgtgctccggccccgcgtcccgtgagcgcccgctcccgcccagtgggaaccgccaccaccgaaaaaccttgcccaccccgaagttggggcccgaccaacctctgggggccccggcgctctccaacctccccaaaggcggggccccccaaaagccgtcttgcgaccatttccccgatgagcacaaacccgtcgcccatttctgtcctcctccgcgggcgccctgactgtcttgaacatcatagggccccccccaagagtcatccaagccaaatcccaccagagaggggcccccccacaacggtctcctcctcaagggcggagacatcacctgctaccctcccgatagggggggccaccccccaaacaactttcaacaaagggcaaaaatgatgaaacggtcccgagggccgaccgccagcaattctgtgtctatcatgcctggtccactgcagagagaatcgctcactcgcccccatgggccgccccccgccccgagcctcagaacgcccgggcgatctcaccctcgcatgctgcagaagccccccccccaaacgcatgcttcgcactggagcacccccctatatcttaccctgcctcatgggggcccacagcgatagacactaggagtggccactttagaaaccaacggggagcacacaaaccgcacatgtgcgcaagggcgggcaggagaatggagatagcccgagggaataattgatacaaaacacaaagaccaaaaaaacaagacaaagaacatatgagagtcgggcccccaaaaaagccttttcttttttcccccacaataacaa

SEQ ID NO: 684914 - DNA, 809 bp, Homo sapiens
tgtttttatttaaaaacatgacatttggggccaggcgcggtggctcacgcctgtaatcccagcactttgggaggccaaggcaggcggatcacctgaggtcaggagttcaagaccagcctgcccaacatggtgaaaccccatctggactaaaaatgcagaaatttacccaggcacggcggcggacgcccatcatcccagctacttgggaggctgaggcaggagaattgcttgaacccgtgaggcggaggttgtagtgagccaagatcgcaccattgcacaccaacctgggtgacagagcaagattgcatctcaaaacaaacaataataataaataataaaaacctgatatttggctgggcgctgtggctcatgcctgtaatcctaacactttggaggattgctggagacaggagtttaagaccagtctgggcagcatggcaagaccctgtctctacaaaaaaggcaaagattagctgggcgtggtggcttgtgcctgtagtgccagctatctgggaggctgaggcgggaggatcacttgagttcaagctgacagtaagctatgattgcaccgctgcactccagcctgggtaacaaactaagacccatctctctgtctcaaaaacagtgatacttcgcaaagatgcttagactccaagaagctttggcatctctttccaaaccagacactgaggtactgtgtagcctcctccttgaataactaacctggtgagctgagatagagccattgcaatccagcctgggcaaacaagagcaaaactccatcacatttaaaaaaagaacaaaaaagg

SEQ ID NO: 684915 - DNA, 493 bp, Homo sapiens
  misc_feature (57)..(57): n is a, c, g, or t
  misc_feature (339)..(339): n is a, c, g, or t
gctgccccagctccacacagggggcatacctggagcctcagagccaggctgcctgcncctcccttctagagctgcagccttgctctttcctctttctgtccttgtgctgctggctgtctcacttccctccctgccagccacaggactcagtgccactgctcaaggtctccatggctgagcctgggggctcttacaacaggctccatgccgaaggtggcagatgtggaaccatcagagagggcacagagctcatggtttatggtgtaggggctgggagcttggagggggttgtgtggggggctggactcaggcggccagaggcctgggcacatcatcctnggcacgccgtacctgtcatgcagtctgagtcatgctgccagggcaggtatccagctcccagcctgggagtgccgagagccaaatccactgcagattaggggtgatagtcacggtcccacgtcctctatctgtcagcaatccagtggtgatctag

SEQ ID NO: 684916 - DNA, 361 bp, Homo sapiens
ctctacaggatccccggaggcgttgaatggccttccttcctgggtatggaatcttgtcggcatccacgagaccaccttcaactccatctatgaagtgtgacgtgaacatccgcaaagacctgtttcgccaacacggtgtctgtctgggcggcactcaccatgtatccgggcatagctgacaggatgcataatgagatcaccgccctggtgcccagcaccattaagatcaagatcactcgcatccccttagcgcaattactcggtgtggatcggtggctccatcctggcctcactgtccaccttccagtagatgtggattagcaagcaggagtacgacgagtcgggccattcaacgcctccg

SEQ ID NO: 684917 - DNA, 1539 bp, Homo sapiens
  misc_feature (134)..(134): n is a, c, g, or t
  misc_feature (1303)..(1303): n is a, c, g, or t
  misc_feature (1539)..(1539): n is a, c, g, or t
gttactagatggcctcgtatacagtatcattcgtggcaacgactgatgcggttgtgtctggcaatgggttggccaagggatggcattggcgtatgcacccatctagtcgtgagactactagacgctgtagtccntcacacgagcgcatcgggaacatgcctccaaccgtgacatgggagtatccacaatcggcagtgtaggacaacgagggtcgctattgcatgtaatctcgaatttgcaatactcttaacatacatcctacttccgtctcgaagtcaggggcctttgtcctaacctgtctctctcttctctagcagaactagatcgaagctaacatagctttgtgggtgctattcccggtcatctatgaatccgctgtaagtggccagtttgtatcggtctacattggattgttggcttgccaaaaacgcaccagggctatttgtcgctaggctctcccctctttttagcgtcgaatggtcaaaccaaggaaaagcagtggggggccacgtcttactgaggaccctaggttacgacaaacctgggtatctcaggtagcatatacttatttgaaggatggggggagaccttcgtgcttcgcttcgtgtgtaggattcaaaccttgatcgtgagccattttcaaattagatggacacaagaaaattggtgtcgctacgttgttaccctaggttttagtttaccggtccagggttgcttatagctgtttttgacctttcgctacagccccacggcttatacaattctgtaaagcgacaaatgccatacctgtgagagaaaggctatggcgggcgtgtcttcacaggcatagaacatacactttgatttgaatataggcttctcctgtagatacacaattattcctacagagaaccacattaactaaatagttttcctcgggttgaaattttgcccctcgccctaaataatttgggtaaggttttgcccccatcccttggagaattcaattaactgatggcgaattgacttggttagattgaagggcgggcactttctaagaacccggcgttcaaaagagcgtaggctttgactccacagactccgaaggtcgtggggttaacatactaaattgtctttggccaaacgcaatatgtgccgcgtataacattgtgcctctgttaacgtttctccgggttaaagaagtatttcgccaagagcgaagacgcgaaaaacagaaggttggtttcccagttcgacctttagttcccccatacttgttggttgttgtgttgacccgccccgccttgtacatacaatgtaactngtaatggcatattccaatatctgtagggtgttacggggtccttaggcgtggttacaggcagggcatcaagcttatattgctctacgaacgcctagttgtatgcgcgtgcacagctgtgcatcgtttccaacacaactcacgcgcttgtgccacagcctcacatgggttctgacattgtcgtccccgctcccaagagggagcgagccagaaagagtttagaagcctacaataaaagn

SEQ ID NO: 684918 - DNA, 269 bp, Homo sapiens
  misc_feature (1)..(1): n is a, c, g, or t
ntgtttagtaactcttgctctgtcgtccaggacgatactggctcactgcaacctccaccttccaggttcaagcgattctctcacctcagcctcctgagtagctgggactacaggagcctaccaccacgcttggctaattttcattttttttgttgttgtttttattttgtagagatggggtttcaccatgttgaccaggctggcctaaaacccctgatctcaagtaatctgtctgtttcggcctccaaagtgctggaattacaggcgta

SEQ ID NO: 684919 - DNA, 892 bp, Homo sapiens
ccacgcgtcgctgacgatgccggtgtggatcgctgtgaaatcgtgggctggtccggttctccgcttctccctccatcccctatcatttacctaccctcacctcgcatttctcattgctaacgtcgatatgtatgctatgctgagtggcagatatctcattgaccacctctcatggaccaatctcatacaactacaacgagcaatcgggttagctgttcatataacatggtcgccctacgttccctcctctatatgatagtctacgtaggcctcttatgacaccgccggacgctatagtaagggtaatgaccagtcaatatttattaactaagcgctgaaagattcgtctcagtgctgtatcgtatgcgttctgttcagaactatccttcatgtagatagccactcctggtcatctcactgtactacttcacaaaagactaaaacgtcgtactataactcagttcctatatcagttggctatacattacaaagtctgacatagtccctaatcgtaagactgcgtaggaattgaatgctaaataaactgactttcttacgagcacgagggggtactcaccgggatgattggcccactggggcatggattcttcaaagagcgttccaatccaaacgagctggttactggttttcgtgtgaagctttcgactattctactgggcaaactaacgagccttaggcgccttcaggccttaagcttaatccatgttccccatttgtttgactcttttcacacgctccaagaagggtgacttgcctgtacctgagtgttttttaactagcatggccttccaaataattctgtgtaccctccagagttatacaattttattaccttcaagttggtcgaaactgctgagaattttcagcgcca

SEQ ID NO: 684920 - DNA, 516 bp, Homo sapiens
  misc_feature (39)..(39): n is a, c, g, or t
  misc_feature (341)..(341): n is a, c, g, or t
gtggatgctttggggcaaaggcaaaaagaaagaccatcnaggatggggctaggaggagctgcaggagagaacggtcttacagtggacgcctgcacaaggtgggccagatcgtgtttgagttcgtgggcgagcctgagctcatggacgtgcatgtcttctgcacagacagcatccaggggacccccgtggagaacgacgaaatgcgcccatgctggttccagctggatcagatccccttcaaggacatgtggcccgacgacagctactggtttcccctcctgcttcaaaaaaaaaaattccccgggtacttcaagttccagggtcaggacaccatcctggantacacactccgcgaggtggacacggtttaacgggagcccagggcagcccctgggcaggaaacgtgggtgttgaacaaccccaaaccatcttcccctgggggcattgagtggcgcaaaaccgggtttcatctggaattaactggatggaaaggaaaataaagctatctaacggtga

SEQ ID NO: 684921 - DNA, 129 bp, Homo sapiens
  misc_feature (2)..(2): n is a, c, g, or t
angagtaaagtaataatagaatctggtgttagaatttagatgaactagttttcaatctttatagtatatcagaatcacctaaagagtttattcaaacacagattgctgggcccccacctctagggagtt

SEQ ID NO: 684922 - DNA, 961 bp, Homo sapiens
ccacaggagttaaagttcctcgtaattttcgctcgcttggaagaacttgaagaaggacaaaaaggagctaggcgacggtacagttacgctggggccttgaagatgactgaacgatatgacacttacaaggctggacaggccactgacttattgcggccaccaaggcacaaacttatgcaaacacagaactatatagccctgaaagtagaatgctggacctaaatacccacgaagctcctccgctcagcttagacttctgtaacaacaaacttaatatgaaccggaataaataacttccagctgggcactggctgcgatgcctcggcagccataccagctgcttagcacaaatggcaacaacttcatactagcacttaaagcttgtaccttcaagcagcctaacgacgatcataactgatgctcccaaagaacaactatgacagcttccacaagccaccagacaggcaccaaacactacaaccaacttaatctcacgctggatctcaaaactttgctctctcaacatccaacaacccttcctcacctacactgcctccacctgctcctctgcactctacaccctacatcccaccaactgccacccaactcaacaccacttccaagcttaccacagcacatctcccagccttgcgcttcacaccactgcaccctgcgaaccatccgcctcccgcactcctccttcccacctctccctgctccccacccccacttcactgcttctcccagccgcttcaccccgggccgtcgcacccagcgtggcctcgccgccccctctccgcccgccccgtccctctggtcccgcgtgccccctcgcccgttcctcgccgccctttacatcccttggcctgtctactgcgggcacacttagcatctgtcggcggctcctcccccctcccttgcaccgccgcctgtggctgaacctcgctccccctggcccgtg

SEQ ID NO: 684923 - DNA, 419 bp, Homo sapiens
  misc_feature (52)..(52): n is a, c, g, or t
  misc_feature (167)..(167): n is a, c, g, or t
  misc_feature (192)..(192): n is a, c, g, or t
cgggcgagggatggtgatctcagtcactgactctactcccaggctcagcganctcctgtgtcagctcctgagtagcaggatacaggcacatgcaacgcacccagtaatttttgattttagtagagaaggggtttcgcctgttgaccagtccggtctccagctcctgngctcaagtggtccccttgcctcggnctcccaaagtgctgggattacaggtgtgagccattgtactccgggcctttaagcatgtttctaaatggtcctgttcagttgtgttgcatgtgcaacaacagagtaagtgggtgcaagtcctctgcttcagagagttcactgtttaaaaggtgaaggagtgccaacttccaaagtgaatagaaacacaataatacatatatgggtaagtcccccagtagggcaacagc

SEQ ID NO: 684924 - DNA, 217 bp, Homo sapiens
tcagctccgacccagcgctgagcaaacaggagtattctggcttagactgacttgaagaagctccctgtacttttctgattcactgtctttcatacctatgtttcggcctcttcagattgcagtaagggtttgtggaattttttttttttttttttggaaaaagggtattgctttgccgcccagcctggagggcagggaaacaaatctcgcccttcca

SEQ ID NO: 684925 - DNA, 1448 bp, Homo sapiens
gtcaccccgactcaacgtgagacgcaccgcccggactcaccatgcgtgaatgcactctcagtccacgtgggagcacggcatggtgtccagatggtgcaatagcctgctgggaggctcttattgcttgcgaactatggtgattcagacctgagtgtgtgcacgatgcccagatggactaaagaccattggcttggatggggcacgactccttcacctaccttcttctgtgaaactgggtgctggaaaacactgtaccccggtgcagtttttgtggatctggatcctacgggtcattgcatgatagtccgtaagatggtcccatacacagaccagactcttccatctcactagagtcacgctctagtctacttggtggagaagaagtgactgctgactcaggctaaacttagtgtcctcgtgggtcatctaatactcaatatgcgtcacaccgggaagaatctatttggaccactaagtgtctgtgcatctggacctcccccgtctaaacgtcataggtcctttgaacccgaagattgtctacctacgcggaacttttcgagaggagtcgtttcccccttgcggttgtttgccttatccaagcccttttatggggttggggtgtgagcccatctttgggccctccctggtgggcttttcccacccctccaacgtaccccttgtagttgtggaagtcggggcctttcatacgtttggtttgggaactttatttgtgctagacagaaacaattcccgagagacgttggcaaattttctacgctaatacttatatctcaccaaggacccacctctcggaggggttgggtccttaacctagggctccgctggcgttcccggaacagtccccccttttaaccatagggttcccttaattctcgttgaagcacaacactcaaacaagcgcaaaccccctttgcgtaaggcgaacttccacgggaaactttggttaggccctgttttccaacctggggttggggagccaaaaactcgataaagagcgaaacgctcctttaggtggaacactaattccttggcgccctggtccctagaagaattaaacccggtaaagtaaactcaatttccggtgagggccgggcccccaaaaattccgttaagcaaacgccaataatcccttctaaagattgccggccctttcctaatttacaaggcgcccaaagagatagtgggtctcctttgcccgtctccctaagttccgacgcaaagggctttttccctttcggtggcgcgcgcgtttgttggggaccgcgcgtggggacaccccccttccggaacgttgggtgtgggcgaaccccctggtgtagccacgggagcgtttttccccgcagggaagcccgagagccccccttgtggctgggggcccgcttataaacgcgcctttcggggcgagtttcccggacagtttttttcca

SEQ ID NO: 684926 - DNA, 268 bp, Homo sapiens
aagaggatccccccttgttcctgtcttcttgaaatctgccaagtgctcaccgtaaggcctttggtcatatcgctgaagatttgatggagaagctctattacactcgtcttgaataggctaaaggttggtcttcaggttgtggcagtccaggctccagggtttggtgacaatagaaagaaccagctttaagatatcgctattgctactggtggtgcagtgtttcaagaagcaggaactggccagttcctgttcaagaagcaggaactgg

SEQ ID NO: 684927 - DNA, 198 bp, Homo sapiens
  misc_feature (23)..(23): n is a, c, g, or t
  misc_feature (43)..(43): n is a, c, g, or t
  misc_feature (55)..(55): n is a, c, g, or t
  misc_feature (112)..(112): n is a, c, g, or t
  misc_feature (157)..(157): n is a, c, g, or t
  misc_feature (171)..(171): n is a, c, g, or t
gtcaaataggtttggagattaanccttttcctcaacttgtgcngtttatatagcnaagcttccgtcaataaggcatcattgtgacctttaacaaacattatcttcccacatnccaggaactattggacatttattttacatgggaaaaattatttgnaataataaagcagnaacttttcctgaagttgcaatttaaaa

SEQ ID NO: 684928 - DNA, 1644 bp, Homo sapiens
ccgtcgtctgtctcgtatgggtgagtactcgaccgcatccccgcttgtgttgtgttccgcacacagccgcgcggttggtgtggaggagagagaattgtttggtagtagttcgcacgtatcaggtgggtgttcccctccccccgccccgcctctcctcgtggttccaccggagcgggggcgccacactcggattatggtgaggtgggcggtcgcggctgcgaaaagtagtgcgccccgcctttcttcttgggggggtgtttgggtggtcccaaacaagcgagcggcccaccatttggttaggatttagctgttggtgtgcgttttcgataaagaagactccgctctggtggctttttattaggaagtttttgtggtcatccacccgcgcaacaacaaatatttggggggccacctaattttcctcgtgagaagttggtgttattgatgactcccccgtcgccgcacccatcaccagggggggccgccgccttctggacgaggaagaggtctctgggacaataagaggccgccgcaccaccaccacacgggcgttcttattttgggtggtggtggacgcccacaacaaagagacggtcgatgatccttcggtggagaaggaggatgtggccccccccgcgcgttgttgtcaacattagtcttgtgtctgggagagcgttgttgttcactcgtgggtggtcttaatcaggaggcggtcgctctacatggtggggggaggatattgccgcaacaccgcgccccccctcgttgttgacgacgatctggtgccgctggcgggccgccttcaagaggaggcggttgttgtcggccgccccgtcggcgttcgcccaccccccacgtccttgatgaggaggcgtcgcgtctgaagatgaagcccaccacaagagatgtgtttctcctcacgtgtggggcgacgaccagaggagtctgaccgcactcttctctggtgttgtcttgtcgtggccacataagaggtggtgatgaacatcgttgtggtgggacgccacaacatcttgtcagaggaggacctgtggggcgcgacatctcccacacgacacatctgtgcagaaatacattttgggggcccaacagggccacacacaacttcataatctctacagagagtgtttgctccccgctctcacacacacacacactctcgccacagtgtcccacacacaccactctcttttaaggtgtatcacctctgttcttgtccactccacacactagcgccgctctttttccacaggcgctccctcccacactttataggtgcctctaatagatattcttgttctcttttgtcttcttcttactctctccgtgtttcttctgtcttgtctgtcttctccctgtctgcctctctctcttctttctccctcttttcttcttttcttctccctctcttcttctcctcttgtccacagaagtaaaggatataaatttcttttctaactaaaagccctcggttttcacaaactcttttggttctcacagagccccaccttcttaagaaatttgaaggatttccaagagactttgcttatattttgttcttttgatacttaccctactagaaatttaagcgaatacctttttataaataaatacacctgcccacca

SEQ ID NO: 684929 - DNA, 381 bp, Homo sapiens
  misc_feature (288)..(288): n is a, c, g, or t
  misc_feature (374)..(374): n is a, c, g, or t
actgcttcctaaatggccaaggataaaggggaataatcccaaccttaatgccgcagtgtaagtcaccttgattccctccctgctcagctctacctgaagacactaaaacacagtatatattccaaaggaaaaagtcacagtatttccctggacagaaccagaaagaggggagaaatggtttgaagcttactgatgatcaaactgtaaaagactcagaacttgactttaaaaacactcttcttggccagtcgggtgtggtggctcatgcctgtagtcccagcactttgngaggccaaggcaggtgaatcatgtggtcaggagttcaagaccagcctggccaacatggtaaaaccctgtctctactaaagagacanaaaatta

SEQ ID NO: 684930 - DNA, 142 bp, Homo sapiens
acataactagaatggtactggcgcttgagaagcaatcatagagcatcttcctgaaatcccagcagttcttttttttaggttttttttttgagatggagtctcgctctgtcgcccaggctggagtccagtggcgccatctcgg

SEQ ID NO: 684931 - DNA, 818 bp, Homo sapiens
agcagtggggtgtgagagacccggggagatccatcaagaatcgacccatcaggacgccagagactgtcttcagtcggatgaccacgcttctccctctaacacattcttccgttcttcacaaatggaccatgtgagacgaaggctcaagggggagccgtctgtgccctggcgctgtccccagtgcctccggagggtttgcatctatcgagggtggcggctgtgccgtgggcgtggctggccgtggttcctccggcttgtgggggctcgcgcgctagagttcccggggtctcacaattgacaagcataccccaaggcgttggctgccagagattggccgatcaaccgggcgggctcctggcatagcagcacaggacgctctctcgtcaccagacaccaggaatgaagatggcacggagcggggcgggtcagtttgggcttgcagagtcaggcgcgattgttctggcatagctctagtccgagtgcgcgaagacggaggcaggagcggggttggaaggctcattactgcattgaagtctggcgcgtccagtaagatgcattgtactacctcggcctctattgccctcctcacaacgttgccttgtgttgtggaaggagacgcggaagggcctaaggcgtctgcggagcctgttactccaagactatacgttaggaacgttatgcagggtgggcgtctcccctgggtaagtcttggacttaggactctggatcaccatgtgtggaggacaactggtggcaccaaatgggtcgcgaccacaactctgtcattggcaccagattggtctcgggccatggtatcc

SEQ ID NO: 684932 - DNA, 82 bp, Homo sapiens
atgatcctaaacaaagctctgctgctgggggccctcgctctgaccaccatgatgagcccttgtggaggtgaaggcattgtgg

SEQ ID NO: 684933 - DNA, 117 bp, Homo sapiens
tgagctgaggatgagctgaagatagctgagctgagctggggatgagctgaagatgagctgaggatgagcaggggatgagctgaggatgagctggggatggctcattgggttccgatg

SEQ ID NO: 684934 - DNA, 717 bp, Homo sapiens
ctcgagttggcatgtgcaggtcatggcaggagccagagctttgacccagacccatgagttgcgcaggaactgaggggcgaactctagcgactgacttactgtgaagcctggggcaagccccgttccaccatcgtctgggcctcgagttatccttagaacttcaacatgacagtacccattcgccgtaagatagagagccatagcgtgtcgttctgggatggcgtctgcttccagaatcgcaggcctttcagcatctttctttggaggaagattggaggctggtgctcactgtccaggcctcagactctggggcagagagggggattctcagagcctgaggccctcccttgcagccctggcgccctcaccgcgcgcaggcagtgggctgagcacctgcatggctgtgggccctgcggggacgctggcagcatgcgctgctgtgggctggcccagcggtagcacgctggagtcagtatggctgatcgcgtttccgagctggcgtggccggagtaccacgcatggtgccatgccgtggcgcctgtggccacgaaggagttcgaagcaagtagggcatcgagcgccacagggcaccggaaacgcattctacgcctgctacagacaggcaccgaagagggctccctggatcccaaatcagatagtgccatggaaaccatccaccaggccaggccccgacaaggcacaggccacctagagacc

SEQ ID NO: 684935 - DNA, 349 bp, Homo sapiens
  misc_feature (4)..(4): n is a, c, g, or t
  misc_feature (111)..(111): n is a, c, g, or t
  misc_feature (123)..(123): n is a, c, g, or t
  misc_feature (144)..(144): n is a, c, g, or t
  misc_feature (173)..(173): n is a, c, g, or t
  misc_feature (225)..(225): n is a, c, g, or t
  misc_feature (286)..(286): n is a, c, g, or t
  misc_feature (306)..(306): n is a, c, g, or t
  misc_feature (318)..(318): n is a, c, g, or t
cttntcgctaaagatggtatagacagcaggagggggaccatggatggggtcctgggacactcagtgttaacaggttagggagatgatagggggccaggacaggatgttganaaggagctcagntaggaggaggaccaccagggngtgtggtcccccgcaatccagcacgtcangggctcctgatggatcaagataatctgatcgagcaaagtgagagtcggtggngtccctggaaagatcagggtgagtggtgtggtggcgcacactcatagatgagtggagtcgngagagtaggggagaagaggnactggcggactngctgttgaggacaggagagagctgggttggt

SEQ ID NO: 684936 - DNA, 265 bp, Homo sapiens
gggtcgtctctagcaggatccccctttggtccgagagaaattagctgtaccaggcccttttggcatcttcagtgccctgggttctgcccgcccggacccccatctctgtgacttcctggtagactcacttcctagattaggaagtgccgcttatcaagaatactgggttaccaccgtgaccaacctcctcagcgcctgggatggcccgtgaggtctgtggctgggcgagctactctcttcgtaaagggctcacgtctcaaggcac

SEQ ID NO: 684937 - DNA, 1011 bp, Homo sapiens
  misc_feature (60)..(60): n is a, c, g, or t
  misc_feature (62)..(62): n is a, c, g, or t
  misc_feature (77)..(77): n is a, c, g, or t
  misc_feature (733)..(733): n is a, c, g, or t
  misc_feature (741)..(741): n is a, c, g, or t
  misc_feature (762)..(762): n is a, c, g, or t
  misc_feature (764)..(764): n is a, c, g, or t
  misc_feature (778)..(778): n is a, c, g, or t
  misc_feature (783)..(783): n is a, c, g, or t
  misc_feature (793)..(793): n is a, c, g, or t
  misc_feature (878)..(878): n is a, c, g, or t
  misc_feature (884)..(884): n is a, c, g, or t
  misc_feature (887)..(887): n is a, c, g, or t
  misc_feature (890)..(890): n is a, c, g, or t
tggttttgatgaggccatgctgagcttgatacactgaatgaagactcatacaaagacagnancctcatcatgcagtncttagagacaactaacacttggacatcagacagtgcaggagaagaatgtgatgcggcaagaaggggctgaaaactaaatccatacagggtgtcatccttctttccttcaagaaacctttttacacatctccattccttattccacttggatttcctatagcaaagaaacccattcatgtgtatggaatcaactgtttatagtcttttcacactgcagctttgggaaaacttcattccttgatttgtgtttgtcttggccttcctggtgtgcagtactgctgtagaaaagtattaatagcttcatttcatataaacataagtaactcccaaacacttatgtagaggactaaaaatgtatctggtattaagtaatctgaaccagttctgcaagtgactgtgtttgtatactgtgaaaataagaaaatgtagttaattacaatttaagagtattccacataacttcttaatttctacattccctcccttactcttcggggggttcctttcagtaagcaacttttccatgctcttaatgtattccttttagtaggaatccggaagtattagattgaatggaaaagcacttgccatctctgtctaggggtcacaaattgaaatggtcctgtatcacatacggaggtcttgtgtatctgtgncaacaggnagttccttatcatcttattgngngttaagtgcaactnccctnccaataaaantcattacactccgcttgtagtctgtatcattactatgtgatagaagtagcatgtgtgcagaatcaagcatgttggaataagtgcngtattntancantagaagggaatcattaaggcccagtccggctaactttacttccgcattggcttggaaggcctgcaggtgttaaggggcttggggtactcgggccaagcgggagtttcttagaaaatttcat

SEQ ID NO: 684938 - DNA, 742 bp, Homo sapiens
  misc_feature (217)..(217): n is a, c, g, or t
  misc_feature (439)..(439): n is a, c, g, or t
  misc_feature (544)..(545): n is a, c, g, or t
  misc_feature (555)..(555): n is a, c, g, or t
ctccctcatttatgaaagacagctttgctggataaagtattgttggttggcagttgttctcttgagcactttgaatttatcctactctctcctgacctgagggtttatgctgagaactctgctgatgattgtatggcactcctttttatgtgttatgtttcttgcctcttgatgctctcaaaattttttgcctttgatttttgatagtttattatgngttgtggtgtactcctctttgggttgaatttgattggaaacctctgcagttcttgtacctggatgttggcatataccacagattaaggaagttttcagccattatttctttaaatatgctttttggcccctttaaatatgcttttcaggcacctctttctccttctccaaccactattatgtgaaggtttggtctcttgatggtgttccataatctgtaggntttaattttagaaattcttttgttttttttgctcctggctagataatttcaaacgttctgtctcccagcacactgattctttcttcttcttggctgagtcagctnntgaagctttntgttgaatttttcagtctcttgaatttctatcccattcttattgtttctatttgtcaactttctttttagtgtactgttttcaaatttcattaaattttttatctgtatatattaatagttcactgaacttctttatgggtattattctgaattctttgtcagttatttcataaatctccatttctt

SEQ ID NO: 684939 - DNA, 174 bp, Homo sapiens
ttacaactttacttcgcttagatctgaagaatcattatctatggcagctatatctcatgaacatgtatttcttaaataataagacttgaaagttgaaattagccaggcatggtggtgcacgcctgtaatgccagtcactgaggaggccgaggcaggaggaatctcccgaacccg

SEQ ID NO: 684940 - DNA, 985 bp, Homo sapiens
  misc_feature (707)..(707): n is a, c, g, or t
  misc_feature (715)..(715): n is a, c, g, or t
  misc_feature (736)..(736): n is a, c, g, or t
  misc_feature (738)..(738): n is a, c, g, or t
  misc_feature (752)..(752): n is a, c, g, or t
  misc_feature (757)..(757): n is a, c, g, or t
  misc_feature (767)..(767): n is a, c, g, or t
  misc_feature (852)..(852): n is a, c, g, or t
  misc_feature (858)..(858): n is a, c, g, or t
  misc_feature (861)..(861): n is a, c, g, or t
  misc_feature (864)..(864): n is a, c, g, or t
gcggcagtgcatctgcaggtgcctagaggatccccccctcttatggagtggtttaagaatctagctacgttggacatcagacagtgcaggagaagaatgtgatgcggcaagaaggggctgaaaactaaatccatacagggtgtcatccttctttccttcaagaaacctttttacacatctccattccttattccacttggatttcctatagcaaagaaacccattcatgtgtatggaatcaactgtttatagtcttttcacactgcagctttgggaaaacttcattccttgatttgtgtttgtcttggccttcctggtgtgcagtactgctgtagaaaagtattaatagcttcatttcatataaacataagtaactcccaaacacttatgtagaggactaaaaatgtatctggtattaagtaatctgaaccagttctgcaagtgactgtgtttgtatactgtgaaaataagaaaatgtagttaattacaatttaagagtattccacataacttcttaatttctacattccctcccttactcttcggggggttcctttcagtaagcaacttttccatgctcttaatgtattccttttagtaggaatccggaagtattagattgaatggaaaagcacttgccatctctgtctaggggtcacaaattgaaatggtcctgtatcacatacggaggtcttgtgtatctgtgncaacaggnagttccttatcatcttattgngngttaagtgcaactnccctnccaataaaantcattacactccgcttgtagtctgtatcattactatgtgatagaagtagcatgtgtgcagaatcaagcatgttggaataagtgcngtattntancantagaagggaatcattaaggcccagtccggctaactttacttccgcattggcttggaaggcctgcaggtgttaaggggcttggggtactcgggccaagcgggagtttcttagaaaatttcat

SEQ ID NO: 684941 - DNA, 835 bp, Homo sapiens
gcctggtgtgattccgtcctgcgcggttgtcctctggaggcacgcgttcttttatctccgtccggacttactctcctacctaagtgcgtgccgtcacccgatggaagattcgatggacatggacatgagccccctgatgtccccagtcactatcttttcgggtttgtgagactaacagtgccgacaatgattatcagcttctaaggtggatagactcgactgcaaggatgagcacccagttatcttgaagaacggtcagtttaggggctggtgccaaggatgagtggcgcattgttgaagctgaggcaatgaattacggaaccgcgagtcctattagtgtgtctctggcaactttgacaatgtctgtgcagccaacggtttcccttgggggctttgaaataacaccaccagtggtcttaaggttgaagtagtggttcacgtggcctgctgcatattagtggacagtcactttagtagcctgtggaggaaggatgcacaagtccagaaggatgaagaggatgaaggatgtggaaactccttaacgtatgtaccttggaatagggacggtcttggcccttgaggtggtagtcaaggtccccggacctaacagtaaaactttggctgctgatgaacgatgatgacgatgatgatgcagaggctgatgatgcatcatgacttgacacattgatgatttcgcgctacgggggctgaaaaaaagcgcgcggagattctcataggagactctcagccaaatggtgttcacctaatgaacgctcgaccggttttcaaaccacggacaatctcccagaggaatcggagccaaggcctttgagcg

SEQ ID NO: 684942 - DNA, 1135 bp, Homo sapiens
agggtagtctgtcgtgtgtaatcgccccccgttttaacggggagctttcttaacggatgtttttgaatttcccccttttatgaaagccctattataacggcgcccacttgtttagttgtggcccaagggaatatgccacctggttgtccgcatgaagggtgtgtttgcgtaccccggtagggaccaagatatcagttaggggagcaatttattgggtttgggaagatttggtggtttcccggaaaattgtgttttaatagcgcccggacttctgtggtatagaactcttgttcgtcagaggtttccttttggttgtgagaaatgtggccccaccttcttgggttgtgttctaccttgggagatacccctcggtgcacacaaggattggtgaataggatttgagataattaatggagattaaataagtgtgaaatccccccacgggtgagatattgtataatcgtggaacataatgtttcgtttgtgcggcgaatttttggagattcccccggccccacggtgggtgaccaccttttgggtaaacactgacggttttttctattgggaatttttctgggccacaatagattggccttgccaccttggggcccacattccacacggttgggcccaaaccctgtataaatgcctcttggggaactctctaagaacgctaagaaagagttcccttcagataaaacgcccacaaaatgtatcacaacaccttgaactgcatttcactaaaaatcgtggtgtgtcctcgctatattcggaccacaacccacggtttttatgccacgggaatatgccacgccacattttctaatagcctgtgttggtgaatgaatggccacgtatattgggcgccgtgggagtcagaacttctgaatataaaatatcgtttgtgcctataatcacaaacttatgaggtgtgtttgttgtctcgtgtaaaataaagattaatgtgattcttgctagtaaagggcaccgtaggagcactttagagtttgttctttcagcacttcacatcacggctgagagctgaaatgtagtggagtgtttaccttgtttacattttttgtactgtcttcctggctcagactctactgcttttaactaaaaatttatttttgta

SEQ ID NO: 684943 - DNA, 136 bp, Homo sapiens
acccgtattaaccacaggctctatctatgtgccttccctagcctatatattaataccagctctgactgattgataagcggctacctagaatgctgggctaaacagattttaaatctacttggactctccctgggaa

SEQ ID NO: 684944 - DNA, 277 bp, Homo sapiens
aggagtatttcaagtgtagtagtatttgcagagtgagagagaactagggaagtcgcctacaccgggccatctgcggggccagatgggggctgctgtatgtctgggctgccgaacgggcaaggtgacataggcttcatagccgaagaggcacgtagcgattaggcccagtacccctgcgacgatttgggagtggattcctctctcaacaaggacaacaattgaggtgatcaggtagagattgccgctatagggtcggaagaatatccggccgtgataa

SEQ ID NO: 684945 - DNA, 229 bp, Homo sapiens
taggctgtgtaagaaaccggccacagccctgctttaccgcgctcacctctagggcattccagcaagaggctgatgcaggacaatggccacctccagaggacatttaacagagtttttgggttattccgcctgtttgttgctgctgattgcttactttctttattggccctgctgaggcccactcaagagccagtacttgccaagggcccatgccgtcagcttctacaca

SEQ ID NO: 684946 - DNA, 111 bp, Homo sapiens
catggtcttcaggcaacccctgtagtctcgatgctccagcatacctgccatacgcagaaccccagaatcacacagctccacctcagtcatgccctgcataagtctacgcac

SEQ ID NO: 684947 - DNA, 167 bp, Homo sapiens
atctgtgaaagactggcatctgaaccgggggactgagtaagaagatccctcctcgccaggtggggcaccatcactcaatctgttgaaagcccggacagaacaaagagacagaggcagaggcaggcaaaccctccctctgcaaaagctgggacatccaggctgggcgc

SEQ ID NO: 684948 - DNA, 109 bp, Homo sapiens
tgtcaggggcacatataatgatcgggaaccaagcagagggcgctggggacgcggatgtcaccatcactggttctccggtctcatctgcctggcccaagtagctcatcac

SEQ ID NO: 684949 - DNA, 232 bp, Homo sapiens
tctctggcaggctgtgtcatgacagagctcctcttgttacggttgtccatagcctgaagtcagatgtccaatgaatatgtcagctgctagttcaagtgctaactaagaaaggtaatcctctcaggagctagagaagctggcatcaaggtattgcctcaggcaggcatgcgaacccgtaatccttctaatagctatcctcttcaacaatatactctccggacacgaatgttca

SEQ ID NO: 684950 - DNA, 312 bp, Homo sapiens
cagtagagataaaagggagaaacagaatcatctagaaggtcaggaactatagaggattaaagaagcatcgggccacaaatgagaatgaaccaatgcaagaactctgactactcaaaaagttagagtgtcttctttcctccaaatgaccatgccacctctgcatcatgggttctgaatcaggctgcgatggctgaaatgacagaaataaaatttggaatatggataggaacaaagatcattgaggagtatgttgaaatccaaaccaaggaagcctaagaatcacaatgaaacaatgcgggagctgatagacaa

SEQ ID NO: 684951 - DNA, 219 bp, Homo sapiens
actctagaggatctctcggggcattctggactcataccaatgacaggtctctgaagaggcctgtattgtaatatgtcgccagtagctcgccgagtggtgggtaatggataattgtgcgcctgtggcttccttggatgtggtagccgtttctcatgctccctctccggaatcgaaccctgattccccgtcagccgtggtcccatctctagagtcacgagt

SEQ ID NO: 684952 - DNA, 353 bp, Homo sapiens
tgcaggatccccctcgggaggtgtcttgatattatcatccactgagggtggaaggtgacgctgacgatatgttgcacacttgtgtctcggtcttgcagtatgagaatgtgctctgtgcgtgtagccactgctttcctagaatgtcaagtacatatttttacactttgtagtttaacagcaattactatcagactgagatcttgtatgccagactttaatctgcttttataatttcaggctgaatgtgtgaaaatcctaagaggatttcatattgaatatatgatacactatcttaactatcgtggtgcacagcatactactattatttattattatatctaccacacgtcata

SEQ ID NO: 684953 - DNA, 493 bp, Homo sapiens
ctagagacttcaaaaaatctaaagttaaggttttagtgttgtctctagaataacatatttaaaaaagcaatttacaaatcatgtaattgaaagtgataagagtcattgccccctgtgttaagggacaccacacagcacacacacaacacacacacacacaacgtcttggattaagacgggcacccctgggagacaagtaggggaaaaaaaaggcttacctccctcttagtcttcaacttgtgtgtcggaaggacttgaagggaaggcaaaaaccctctcctggaatgttgagtgttgtgtaaaaggtaggagtcaagtgtggtctgctgaaaagaaccctttgattctaaagcacgattcattggctactcaagaccctggaaacttcaatcttttagccagcatatctttcatgcagtagatgggtcggaggaacaaagtgtctgtaaagttgcaggcgcttttttttatttccccctcttcttctggatac

SEQ ID NO: 684954 - DNA, 268 bp, Homo sapiens
atatcgattacacgaacaggctcctctagagggatatgaagcaccgccagttcctattgagttttaagcttgtggctcgtagtgtactaggcgagcagtttttgttgatttaacttgttgaggtttagggctaagccatagtggggtatctaatcccagtttgggtcttaagctattgtgtgttcaagatatgttaaagccactttcgtaggtctattttgtggtcaactggagttttttacaactcaggtgagtattagctttattg

SEQ ID NO: 684955 - DNA, 410 bp, Homo sapiens
cgggcgactctagaggagacacggaggaagggtgaaaacagcttctaaggagctgtaatgtttctggacagaaataaggttaggcctgtaagattgtggtagagtttcaatacagcagataggtagttattgggcttttgtaaaaaggtaacttttaacatagctgctcagggagtaaatcaggaaggaaaacccattcggactccacatactgctacaaagaaatacatcggtggttatattgagctgcaggagatagtacactttaaacttaagaaagttaaatgtttcacaataacattgcaatataatcttcagctactctctttccattgggaaaatctctgatggggtgaaaactgtttgccaacctacgaaacccatatctggaagaaacaccaggttccggg

SEQ ID NO: 684956 - DNA, 394 bp, Homo sapiens
  misc_feature (251)..(252): n is a, c, g, or t
  misc_feature (262)..(263): n is a, c, g, or t
aggttagagtctaaattattcaacataatgctatgcaccagagatgctatgacatcattgtagcctctagtaggaagcggtcaatcttcaagttagaggtaaggctggactcaaacagtatggcttcctcacatctatctgtcagtatcagttcaaggttctagtcttgttccagcatgtttggttacggaaatggttctgtagcttgcctttgggaatatgtgttcttttcttctcttttcttttctttnnttcttttctnntcttttcttttcctttctcaaatccccaaagaagaaaacacaataggaacattgaagttaaaataatcactttaaactctttttaaaataacaggttaagataataggaacattaaagtattggtcgacgc

SEQ ID NO: 684957 - DNA, 644 bp, Homo sapiens
tatcacaggatcttgagtgggcatcatctatcttgtgttggggcatggcctaagactcgcctggcagggtcctggtttgccccgcctgcccagcgtaattagcagccccctttacactttacaataacgtcttgcttgcattgtggaagacagcgtggccattccttaaagacctagaggcagaaatgccatttgacccagcaatcccatgactgggtatgcacccaaaggaatagaaataattccaccataaaggcatgcacgcgaatgctcattgcagcacgagtcacagtagcaaagacatggaatcaactgaagcgcccatcaatgatagactcgataaaagaaaaacgcgggtacatattcaccatggaatactatgcagacacagaaaggaatgagatcatgtcctttgcagggacatgggtggagctggaggccattatccttagcaaactaatgctaaggataattgggtggaggacacaatcacacaaggcgctgtcccttgcacggccacggaagagggaatgacgaggctcctctttgcattggagccctgggactccctcctgttttccacatccctcctcggtgtgtacataggtcaggagccagctccaacctcccagctctggagacgg

SEQ ID NO: 684958 - DNA, 135 bp, Homo sapiens
tttggaagaatgtgccaggctgagttacatactgaaataccttagtacaaatgtctagttagaactgaggtgcagtaacctcttgagactgaccgctcattgacatagggatacaaagaaaaagttgattgtgat

SEQ ID NO: 684959 - DNA, 831 bp, Homo sapiens
gtttgtcccctggctggaagcgcggaggccaggcacgatgactgtggagttactgtgaaagacgtgtaaccattcaggagttctgtcattgagctctgtcaaacttcctcaaacaagtccggcgaagctgaagtgtccccggaatgggtggattaccgtcaagctcgggcaagactactataaagatgccttgcctcccttacagagtgatgaacgtggtgctactatcgcttagctgggttttcaacagcttctggcacgctgtacctcgcggggtggggctggaggattggctccattgaccaagatttatgctgtggacgtcactacgaaacggttgtcatgcccagtcagtttcatgcggaggctccgaagagtgtggccctgacgggtgttctcatgctggtggaggggcgtgcaaatggtgtgaattgaggaacgagatggtgggacgtgtgaatgacggcctcggggacagaagatatctggaaagagtcgaatcggagtggtggatgatgttcaatcgatgaaggcattagaaaaactatgttgtgttaagatagttgcgtcatttcgtataaaatgggtggacgatatgtgggctggatcgaatcataatcgtgccgggaagagcaacgcaggtttaatgaaatagtgtttcgcgatcgtggctgcgcaaggatatatagcacagatgattggcggcgggcgcatggggagcaaggaaagaggttgtggtcaaggaaaaggggggaaatggggttggcgaaaataagccggggggtgacctcggaaagcaaagggagggcaaggttttaacaggggaggcgt

SEQ ID NO: 684960 - DNA, 290 bp, Homo sapiens
acacccaggacctgatgcccctcactaagccccagtgtcccccagtgcccccgtccagatgcctcctccagtgcccccgtcaagatgccctcccgactgtccttccacacacactgcctcagtctcccttctgtgcctcagcccttcccactggtgttgtactcagtggccatccccagccccttgctgccaccctggcaccccgggtggggggctcctagggaaacaagcgctgttccccctacttctgtccccagctctggcaagggctggggtgggccggtcctccg

SEQ ID NO: 684961 - DNA, 294 bp, Homo sapiens
tctgcttgaacttctttactaggcctagtttagatgtcactgcctgtgtggcgatcgggttgagtatttggtaggtgagtatcgatgcatctctctctctctcgtcttgcgctctctctctgctctcttgctctctctctcttgctctctctcttggtctctctctccctctctttttctttctctctttctttcgtgacagagtctcactctgtcacccagaggggagtgcagtggcacaatctcggctcactgcaaccaccacctcctgctgttgaaacttctaacactagg

SEQ ID NO: 684962 - DNA, 317 bp, Homo sapiens
tttgaggctcaacatgaatcggtaatagtgctccagtactgcgcacacagattaagcataattcagaacagatgttttacactcatctgcatttcttttaaaaaacaaaaaaagtaaaatgtttagttacttctgagcatctatttctagtgcatgcattgatatgataaaagactgcttctagaaaagtattttgtactgcaattgaattaagctgaaatgctcagttgggcaccatccaaggtcaagctcctccagatattgcacatccagaagtcagttctgctattccattctcagtaatatgcttacatccc

SEQ ID NO: 684963 - DNA, 947 bp, Homo sapiens
gcactggttgaatcagaaccccagactagcgtctccaaattatcacaaatgagacagaccccctggatacgaggaacattgccttcttttcaaccaattgtgttgaaggcaccgcacgtggtattgtcgtctacactggtgatcgcactgtgatggcgacagacattgccacacttgcttctcgtgctcggcaacggaggcctagacccccattgctcgctagaacattgaacattttatccacatcatcacgggtgcttgcgctgtgttcctggcgtgtgctcgtctctcttcactcctttctctcatccttgcagtacacctgtggcttgcacgctgtcttcttcctcatcggtatcatcgtaggccaactgtgcccggaaaggcttatgcttggccactgttcacgggtccttgtctgagcaacgttgacttgcctagaacctgccatcgcgcaaggcataagaagctcgctctagtcggaacgcaactctcagtacaggctcgatggaagaacgctatgcgtggtaccaacgctccaaccccagtctgctccttgattaacatacctgtgaagcgtcttgacctccagtaaaccggagtgaccagctggcccgacagtgctgggcttggacgaagtcatacattcctgtgaacaccatgaatacgaccagagcaagtcacgagatggatgctctcctctttgaccacagaccttcaggcataccataggacttgactcttgtcccacgaaatttgccagtgtcttttgtaaccagaggacagtgtatcacgggctaacccaggaaaaaccttaaccttattcctttaacgcagggcaacgttggcagcggaagaattgcctcttgagtccaggaacctctttaaaaggtgcattagaaccctgtgcttgtggttcccgtgaaaggcaaactcacagaaacgaa

SEQ ID NO: 684964 - DNA, 260 bp, Homo sapiens
atgctcaatgcatctgcctgcctcagcctcccacagtgctgggattatagatgctgggattacagatgtgagccactgcacccagcctctgatttctttctttcccgccccccccagaaatggagtcttcctctgtctcccaggctgtagtgcagtggcctgatctcggctcactgcaacctctgccacctgagttcttcgattctcctgcctcagcctcccgagtagctgggattacaggtgtacaccaccacgatctt

SEQ ID NO: 684965 - DNA, 321 bp, Homo sapiens
tgtggtgcaacaataaggaagggtccccaggttggggagagccccaagttgagaacaataatgaacaattagtgtatgaagctattgttagaaacagctaatcacaaacaacctgcgggcacaatgacctcattccacacgtagcacccttcagcaggaccctataaaactttcctccagcccttgcctcttggcaggtagccccttctctgctgagctgcccactgcaacatattttcacaatggctctagtaattctgcccttctttacctacaagtatcttggtgaatggctttaccacctgcaaaacttaccctagg

SEQ ID NO: 684966 - DNA, 466 bp, Homo sapiens
  misc_feature (9)..(9): n is a, c, g, or t
  misc_feature (15)..(15): n is a, c, g, or t
  misc_feature (87)..(87): n is a, c, g, or t
  misc_feature (150)..(150): n is a, c, g, or t
  misc_feature (158)..(158): n is a, c, g, or t
taccttgangccttnggtgggtttccttaaacttcctctgactgaagtttgtttcaaacttcccctagaagagataatacatgcttncatagctttgttgtacagatcaaataaaataacagatatgaaatattttatagccctataagntgctgtgnaaattttaagatggggctaggcgcagtggctcatgcctgtaatcacagcactttgggaggccacagcgggccgattgcctgagctcaggagttagagaccagtctgggcaacatagcgaaaccccatctctagagaaaatacaaaaaaaaaaaaattagccaggcatggtggcacacgcctgtagtcccgggagggactgaggcaggaggattgcttgagcccaggaggtaaagcccagtgagccatattcatgccactgcactccagcctgggtgacagagccagaccccatctctaagaaaaaaaa

SEQ ID NO: 684967 - DNA, 139 bp, Homo sapiens
ggaaaatgtccaaaaaatcaaccccaacggatagggggttaacattccggggaagaaatgaaaatgggttggttttaagtattaagggtagaggcccccatcccagcaaaggtattggcaattatggggttgaggcttt

SEQ ID NO: 684968 - DNA, 202 bp, Homo sapiens
tctgagcaagctgggaataatggataaatgtaggttcatcagttgtaaatgtactactctgttgtgggatgttgataatgagggagtttatgtatgtgtggggacaggagttacatgagaaatctctgtaccttcctctcagttttgttgtgaacctaaaactgctattaaaaaagagtctatttttagaaaaggaattgtg

SEQ ID NO: 684969 - DNA, 306 bp, Homo sapiens
gaactcagtaaccagaggactcccctttacgttattgtccattagttcttgggggtatcaattcctttggaaagccacacaggtaatcgtctctctctctctgcagatgaagtctcagtatatgatgcctacttcttccttgctatctcttacgacacttgaacagactctcttcgacacccgggaaacacatctccttttgttgacatcaccgtgaaggttgacgtccgctgtcaggaacatgttataaggactctcaattgccctgtggactacggtccgtgtcacatgttaaccggaactaac

SEQ ID NO: 684970 - DNA, 880 bp, Homo sapiens
  misc_feature (35)..(35): n is a, c, g, or t
  misc_feature (120)..(120): n is a, c, g, or t
  misc_feature (152)..(152): n is a, c, g, or t
  misc_feature (334)..(334): n is a, c, g, or t
  misc_feature (421)..(421): n is a, c, g, or t
  misc_feature (551)..(551): n is a, c, g, or t
  misc_feature (560)..(561): n is a, c, g, or t
  misc_feature (565)..(567): n is a, c, g, or t
  misc_feature (569)..(571): n is a, c, g, or t
  misc_feature (573)..(573): n is a, c, g, or t
  misc_feature (599)..(599): n is a, c, g, or t
  misc_feature (603)..(603): n is a, c, g, or t
  misc_feature (691)..(695): n is a, c, g, or t
  misc_feature (697)..(698): n is a, c, g, or t
  misc_feature (702)..(706): n is a, c, g, or t
  misc_feature (712)..(713): n is a, c, g, or t
  misc_feature (749)..(749): n is a, c, g, or t
  misc_feature (753)..(754): n is a, c, g, or t
  misc_feature (756)..(756): n is a, c, g, or t
  misc_feature (758)..(758): n is a, c, g, or t
  misc_feature (770)..(770): n is a, c, g, or t
  misc_feature (862)..(862): n is a, c, g, or t
  misc_feature (864)..(864): n is a, c, g, or t
  misc_feature (874)..(874): n is a, c, g, or t
ggatgtttgccactagctgaagatattactaacancctctccaaatgctgtgagtctgcctctgaagattgcatggccaaagagctgcctgaacacacagtaaaactctgtgacaatttntccacaaagaattctaagtttgaagactgttntcaagaaaaaacagccatggacgtttttgtgagcactatacatacatgccagcagcccaactccccgagcttccagatgtagagttgcccacaaacaaagatgtgtgtgatccaggaaacaccaaagtcatggataagaatacatttgaactaagcagaaggactcatcttccggaagtatncctcagtaaggtacttgagccaaccctaaaaagccttggtgaatgctgtgatgttgaagactcaactacctgttttaatgctaaggnccccctactaaagaaggaactatcttctttcattgacaagggacaagaactatgtgcagattattcagaaaatacatttactgagtacaagaaaaaactggcagagcgactaaaagcaaaattgcctgangccacaccnncggnnntnnnanagctggttaacaagcgctcagacttngccnccaactgctgttccataaactcacctcctctttactgtgattcagagattgatgctgaattgaagaatatcctgtagtcctgaagcannnnnannaacnnnnnccaganntggagccacccaggggaatgatctctgatgacctancctnngnanaccactgagctnctgggaagacaactaggatactttctactttttctagctacaatatcttcatacaatgacaagtatgatgatttgctatcaaaataaattgnangttttttttnaaccat

SEQ ID NO: 684971 - DNA, 769 bp, Homo sapiens
tggggcatggcccctggccccgcgtgctttccggcccgtttcgcggggaacctcaggtgacccctgcgtgccccccgcaataccacccgtattgtcttccgccgcccaacatggtcggtggacacccgccagtatgcgccgcctcacactatcttgtgggggcctcggttaaatggagcaggggactcctcccttaggcctcccgcgcaggtccttgtgtgcgtccccactcttggtcggcgcccgtgactatgccaccccgctggcactcggccgccagcccctgtcggcaaaaacgaatgggacgacgccccccccgcccccacagacaccaacagctcacgcggtcgttgatcgccccctatagggcaccccgcccttaggggcgaggcatccccgccgtgatagatccacacacccgctgggaggaacccaaggcgcaatcgagcaaccctcgacggcaacacgggggatctgtcatccgctgcgtcatgagcaacacaaaggtcgacacaccccgtgtgtcctcctgcaagaaagctcacgaacaatcaggtcggcagccttcgagtgcagcagtgcagctcgacacagtacgccacagttactacgagggacgggctcgatgccacagaagtaattgcatgtgctgcctcgggggagctgccccggtctaccaccacgaggcgtgtgcagaccaacccacaccgtggatgcccaccccgtgggtagtcacagagaacccagagtcccccgttcaataatgcga

SEQ ID NO: 684972 - DNA, 1305 bp, Homo sapiens
ctttgacaccccgtgtctctttattactgcttcttgtatcgtccgtacaacttttctaccacttctccccgtatggtgctccctgctcctgtttgggtgctttctatgccgtcctctttggtttcgcttaatcgcccatcgctctttcgtcaatacggtgctcctagaacccgtatacttttccacagacgcgtgtttcatagggtaccagtcccctggcgcgacgctgtataccatacttctgccggcgctaacatggggaacctgttctcttctaaatgccgtctaagtcttaactcccgtaagagtgaggtcagttgatgtttggatgtcactctgtttgtgtcacccttttccgaatgttaaatgcatggtcaaatactaatgcttgatcgtaagaggatgtccagagaaccctaggccaaaatctaaggttggtaagtactggaggtgatctagtatggattagagtcctgtaaaatgtatccatgctgaagcaagtaaagagatgccctaagttcatcttgattgaaaatgggtaattttgcaatccgtaagcgtctcctgtattcgacgataaaggaatcctccattaagcgcacctaacaagagtatcgttggtacatactaccagtacttcagaagtaccgagggcacaggtgggtcagcattgttgccacctcggtaagaacatgattattctgtcaaagcagaggctacaagcattactgtagttaagcccttacaggtaagtagtgttgtccgtatggtcagctattcacagtagtgaatcatcttgcagctttgccatctattctgaatcgacaatagtggaataaaggatagcctaacctgctgtattggctcaacagtgttcctacaagggaacaagaagtatcaagtgcctgtggagacaagagcaagtaaagcaaaatgtggctgcagatatcccaatcacagatacagaagcctatcagttgctgaagaaggccacccttcaggataatacaaatcaaactgaaaacaggtttcaataagacagatgccttctgtgtcacacttgtcaggtgtgaatagtggctagcggtgcattcgagacaaagacagcttacgtaaattgcttcggaagactagtttttcatctagtgaaggaagttctttgtacaacggcatgaaaacgattaagaaacccgtgctcaatttaaaatgtaatgaccctctgggatgatgtctgatgacagtaactcataaattgaggctgcttacgccccagaaccataataacgatcaggggatgatttagta

SEQ ID NO: 684973 - DNA, 336 bp, Homo sapiens
agaccaggtagcggatgccgtgggccacgaagcgttgtcgcagctgcgcggtgtcgaccccgcgatcctcgatgccgcgttcgcgctcgatggcgacgcggaagagcatcttgtcggcccgggcgatggccaggtcggtgcgcttggaggcccgaacgtcgaagatgaaggtgccatcccgattgccagaaaacatcaccacgctgttcgcgggcgctcgctcgatcacgtagttcacggcctgggcatagccgtcgacgtactgcacggggtggatttcgagctcggcgccggcgtgcgcgaagcacagcaccggcaccgcagtcatcgcggccg

SEQ ID NO: 684974 - DNA, 183 bp, Homo sapiens
catccccccctgcattttccttgagcaggcaggtgagcacatgagtcgctgtagggataaaatccgactttcgcttctttgattgcatatctgcacgggccgagatcacttaccctagtgtagtcagggactgattgatgttggctccttccttcaggcgcatgccccaagagagtgacggga

SEQ ID NO: 684975 - DNA, 238 bp, Homo sapiens
gagcggtctgatacaactggcagcttcaatttctatgtgaaataggagatacgtgtgttgctggagaaagggagtgagctctaaaggcagcaaggacagtgcaaaacaatggggcaattttctgattgttttgacttgcagttatgactgcttattatgaacaaataaaaaagttggccagagaaggctgcaggcccactgtgactgggcatctagaacagtgattgtctgcatggtg

SEQ ID NO: 684976 - DNA, 353 bp, Homo sapiens
  misc_feature (109)..(109): n is a, c, g, or t
  misc_feature (172)..(172): n is a, c, g, or t
  misc_feature (174)..(174): n is a, c, g, or t
  misc_feature (266)..(266): n is a, c, g, or t
  misc_feature (283)..(283): n is a, c, g, or t
agtgcagaccatccaacagatagaccagagaggaagaatcccgagttgaaaatggctttctgaataaaacaggaaaacaagatgggggaaaaaagatgaaagggatgancaaaacatctgagatatatgggattatataaccgaccaatctatgactgattaatgtacctgnangagatgagattggaaccaacttggaaaacactttcagatatcattcatggattgtcccaacctagccagcaggccaacattcaacttcaggnatccagagacctcagtnagtatgcctgaggtgatcatccccagacacataatcgtcagtttcttgggtcaaataaagtcaattgtta

SEQ ID NO: 684977 - DNA, 399 bp, Homo sapiens
atcatgcctcaacttcccattcttagccagcgcattgtcctggtctcgcgcccgcaaggcgcgctgacacctgaaaactttcgcctggaacgcgtgaacctgccggaattggcagatggccaggtgctgctcaaaaccctgtacctgtccctcgatccctacatgcgtgggcgcatgagtgacgcgccgtcctacgcagctccggtggaaatcgacgaagtgatgaccggtggtgctgtcagccgtatcgagcaatcgcgtaacccgaaattcgcggcgggtgatcttgtggtgggttccaccggctggcagagccatagcatctcagacggaaacaacctgatcccgctgcccaaaggcctggccagcccctcgatggcgctgggtgtattggtcgac

SEQ ID NO: 684978 - DNA, 711 bp, Homo sapiens
agcggaggaagtggtgagttcggagtatgagatggccgcgcttgcgccgttgcccccgctccccgcacagttcacgagcatacagtatcatctgaggatgggtcagagagcatggacaacgccgagaaacccatgtgagtggcttaatttctgtcgtatctataccgcaagtcgcagagcatggcatagtgaaggcatctgataggtaaaacgtcctgaatgtctgaacatttttagtacaaagttagatggactcagttagaagctctaatagaagcagatgggtgactagatgacagctacttcactcatacgaacatagtgggctgtgcccatttggagaacttatgctttggataacatgttctttgtattgcagtacaatgaagatctgtgctggactgatttcacaaaaacatgatcaagtccttctatactgcaagtcttttgatagatgtcattaaccgagtatttggagaactcactgatgacaaatgtgaaacagcaggaaagtatgccaggatggaatgggaacatagatccataagttgtttgaaacgaagtggggacgacgtcctcaaggctaggccgctgttcggcaacttgaagtaagatgagatgcatctgtgcacgcaacatgacagatgctggagcagcctctctggccactcagccaaggtcagccatcatcatcttgcaagttatgagcac

SEQ ID NO: 684979 - DNA, 224 bp, Homo sapiens
  misc_feature (10)..(10): n is a, c, g, or t
  misc_feature (28)..(28): n is a, c, g, or t
  misc_feature (38)..(38): n is a, c, g, or t
  misc_feature (43)..(43): n is a, c, g, or t
  misc_feature (45)..(45): n is a, c, g, or t
gtaaagtgtnctttgttatgtttgaggnacagcaaggnatatnangtagttttaaagagtgagcaagctggagagagcaagtaagaggtgacattatcagaggaagggggagagaggtgggtagggtgggtatcagatcatggaggtcccgtagccattatgaagatttaggctttgactcttaagtgagataggaagtcactggagtatttgggtagaggagt

SEQ ID NO: 684980 - DNA, 233 bp, Homo sapiens; identical to SEQ ID NO: 516957

SEQ ID NO: 684981 - DNA, 1895 bp, Homo sapiens
  misc_feature (141)..(141): n is a, c, g, or t
  misc_feature (203)..(203): n is a, c, g, or t
ggcaacatgggtccacgttcgcggccagatagccgtgaaggagtgcgtaccatgagatcatcgatatcatgaagtgacgtgagcacagtcgcgcgtgggacacaccgcaggtgtcgcaggaccgagaccaatgtcgacagntaggttgccgcaaggtatgcattctggccaatgtaatacctcgcaagctagagagaatgctncgcagcgtgggacagtacttccacgtgtttattcgcttcaacggacaactcttcgcacatgagaagacggatactaccaagaggaatgcggcccaatattacacgtaggggctactactcccgatcacagtcgtagaccagagcactgcacgcgcatgatggaaggaatacgcgaacggaagcatataatataattcgtgctcggtgatcggctcgtcgaagacgcgttcgtggaattccacctggacgtatctaactgtgggcacaggttgacttagtgccatctgcacctaccttgaaaggggaatagaattggcgtcgaatacggcgtctatttcgggaagcgtaatcccgttggcgaagctacctcgctttgccagaagcccttgtgcaaggtggttgcgaacgtaccaacgcctcggttaaccgacggcctttggcggttgagactcggaagacctcttgtgcacagaaccacttgggcccccctttcagttgggcataaaggcacggttggcttcccggaagacaactcctcctactgtaatctcttcggttccaggctcgggacattaggtagaggtccaaaagttggcatcttacaaagctatatacacagggttccgtaggccgacgggaaccaagaaaactttacaccatttagtcaacaaccgcgcccttcgggccgcttcacggacaccgcaatcccccaagagtcgcaacaccccttattggaggtaaagacgaagtcgccgccccggccgcgcaagagcaaacccaaccttgcgggcggaagcacaggcccctcctcgaaaatctaatagatgggcccacagaagaattaggcgccttcggcgtcaacaaccgcggcggagagcattggcggcccactggctggaagccacatcgggcgtggcctccttgtcgcggtctcgccctactggcgcagagccgccaacgtgggggaaacacgggggacccactccgagacgaagcttccctcgcactcatatcaacagaacctcacttttccaacgtcgacaccgccagacaggacaaacttccaccaacgcgtgaacatcttatcatgcaaaagtttccccacacggttggcaattagaaccccccgcgtaacatttcggaagcgtgtcgcgtcaccacccaagcggagaacatatttctccccccctcaaagacacacagacctagggacctgtggcccccccgccataaaccacaggggctttcccttgggggggctcttccaaggcgtggcgcaatgggcccccttaaccttggtgcagctttgtatcaaattccaaccccacaggcgctgcaactcgcgagcagggtcaccgcgacaaccaaccttggtccaacgaggcagactttcacacttgtggaatgctccctccccccatggcatacgcaactctgcaagcgccgcctcgtgacgcgacacttgtcgacgccatcgcacagtctctccaccatctcccccctggtcgtcggcgaaaagcgacatctgtacacttcccccctaagcgccatcgtgtgacccaccacgcgggcaaggtcaaccctcgttcctgttgcacagagacacgcaccacacacagtcaccatgcagaccccaccgcggacaccacgagcccagcatggtcccctctgtaccacacaacagcaaccgcc

SEQ ID NO: 684982 - DNA, 257 bp, Homo sapiens
  misc_feature (51)..(51): n is a, c, g, or t
gacgcacgggtgtgttgtgtgagtgtgctcggtgggtgcaacctggtgtgntacatgtgaacgtgcatctgtgtggatgtgtgagcatgcatctgtgtgtgtacctgtgagcgtgcatctgtgtgagtgcacccagtgtgcatcgtgcaaacgtgcatctgtgtgtgtgagcgcaacctgctgtgcgtatgtgtgagcgtgcatctctgtgtgtgagtgcaacctggtgtatatacatgtgagtgtgcatccgtgtg

SEQ ID NO: 684983 - DNA, 1015 bp, Homo sapiens
  misc_feature (379)..(379): n is a, c, g, or t
ggctgtaattgagaatgcataagatgaagataaaatatcttataggatcaactatcctgagtcctgagtaaatctggaagataaatctcctaatactgacgcaggcatgggataacttatcatcacacaattatggtgaatttcattttcctgggtcgacatagtcggagatgtttcggcattgttcatcgctatgcgctgttcacgtgtatgtgcatcgattgcgcctagcataagcggtgtcttccgggatagaaccaccattcattactctcagccacgtgagtgactcaatgatattacaagtgcgaatgcgagtattgttgactttctcgtagaagcaataattccactccggtctaatctcacacggtcgaangtcaagacgaattgttaggttcgactcgaaaccgtctccatcagaagtcccatttttgacatagttgattcgtttcatattacagtagcttcatagaagggctcataagtgatatatccagtgcgtggtgctttcatcacgctgtgaagaatcgcgaacatgaaggtggtgactactgttgcttagttacccttgttccaaattatctacgaacatctgtaacaatagttcgtaccacagatgatgtcatgttttgtgaagtgtacatggtttcggattttattgttggctaaattggaaataagtgaagccttgtgatttttagtcggtttctaatagggcatgtggtgttgcagtattaactgcatcttccctctttatctcttacacggtatcaccactccttgaagaaccgacatatccataggaactaataacattgcgaatttttaaacttagtccattatctcttcctctggtggtgcttaacaagtgtacaaattccaggtccggttaattaagatacttttcctcagtgcgcgaattcggagaataatggccatggaaagtttagtcgcgaattgacccccgtatgagcttttttcaattgtccaaattcctaatcaatcttgtaag

SEQ ID NO: 684984 - DNA, 637 bp, Homo sapiens
gtatcgagttattatctgtcatggctttcttaagagcaggagagtcgcttgaacctgggaggtggaggttgtggtgagcctggattgagccttgttgctccagcctgggcaatatgagtgaaaagtcccgtctcaaaaaaaaaaaaaaacggttagggtttatcgttttggtatctctgtgtcctttctggtactctaaaggttaaaacttattatttaaaaatttcccttcgggtgaaagtctgtctgtctggctatttccaaaggagattttagggacccgagaatcttaatttctaaattaagattacgtgtccctgggtggcgtaaatcatgtcagttactatttataatctatccaaatggcaaatgggcactctggagatcctagaatgtggtgacggtgaaattgtctgccagttttaataaaagatctggttccgtgaaaacttttttgagtcccttggtgcaactgtcattggacagtgaaagggaggagagctggaatttccaggttctcagcaaatgctgtaaaggtgcttggtaaagtgctctgcaaatgtgagttatacttcctggagatcaatactggtaataggctgcctggtgttaggaatgtaggaaggcgattgaactt

SEQ ID NO: 684985 - DNA, 202 bp, Homo sapiens
actcattaggatgtttcttgttataaaaaaaaaaaaaaaggaaaaaatgtataaaggaacgaaccatggggggggttggcaagggaccatacaaatgggaatttgggcccatcgttaacggaaccgtcaattgttacagatcccaaaaaaaaacgggggggggttttccaaaagttaaacatccacctgagggaaaattttg

SEQ ID NO: 684986 - DNA, 458 bp, Homo sapiens
  misc_feature (296)..(296): n is a, c, g, or t
  misc_feature (340)..(340): n is a, c, g, or t
  misc_feature (346)..(346): n is a, c, g, or t
  misc_feature (355)..(355): n is a, c, g, or t
  misc_feature (365)..(365): n is a, c, g, or t
  misc_feature (367)..(367): n is a, c, g, or t
  misc_feature (375)..(375): n is a, c, g, or t
  misc_feature (382)..(382): n is a, c, g, or t
  misc_feature (396)..(396): n is a, c, g, or t
  misc_feature (405)..(405): n is a, c, g, or t
  misc_feature (409)..(409): n is a, c, g, or t
  misc_feature (411)..(411): n is a, c, g, or t
  misc_feature (440)..(440): n is a, c, g, or t
  misc_feature (444)..(444): n is a, c, g, or t
  misc_feature (447)..(447): n is a, c, g, or t
aatttttttttgttcccctgagaccaaaatttaagttaactgttgctggcagtttaagtgtaaatgttaacagcaggagaagttaaaaattgagcagttttgttgcatgatttcccaaatgaaaaactgccttgggtagagtttgaaaaactaattgagcctgtgcctggctaaaaaacaagcgtttttttgaatgtgaaaagtgtttcaaaggtaggtagttacagaattcctccccaacagcttaaatttttcaaaaaagaattcctgcagcagttattcccttacctgaaggnttcaatcatttggatcaacaactgctactctcggaagactcctntactcncagctgaanaaaatgagcncncccttccncctgttnttcctatcctgaanatgtgatcncctnantggaaataaatagatgtaaataaaattgngttntcntttaaaaaaaa

SEQ ID NO: 684987 - DNA, 437 bp, Homo sapiens
ctgagggtgtgagccaggtgtgtccagtgtcatctctaagtaagaactatttatgactgagatggcctgtcctcccttcgttgttacaatttcttttctcttacttaacaaaaaaaatatgtaggaagcatgagtgcttcccctctctttttctgttctcttccctcgagtgtcacccaccttttagaagttaggcgtggccatgtgactggcttgggacagtgaactatgagcaaaagtgtctctgctgggtagaagcatttacgagccagtatgtgattctccttcttaccttctctctggcatggtgactgatgacattttagctggtagagtctggatctctgagtgatgatggtatggatcagaacctcaaccaacttgtgatggacattagagtgtaggtggggaagatggggaggaaccttcgttggctt

SEQ ID NO: 684988 - DNA, 427 bp, Homo sapiens
  misc_feature (32)..(32): n is a, c, g, or t
  misc_feature (82)..(83): n is a, c, g, or t
ctgttgcccaggctggagtgcagtggtggtanctcagctcactgcaacctccgcctcccgggttcacgtcctgtctcagccnncagtgtagctgggattacaggcatgcaccaccatgctcggctaacttttgtatttttggtagagacggggtttcaccatgatggccaggctggtctcgaactcctgacttcaagtgatccgcctgccttggctcccaaagtgctgggattacaggcgtgcacccacacccagctccaaactcatcttgtctacacacggacaaacgtgtgcacacatggcacaaaccaagctagaagacactgattctctagatggagggactaagattttcttttttcctttatcaacattttacagttattcttccaaatgaacaggtgctgctctagtagtttttaaaatg

SEQ ID NO: 684989 - DNA, 436 bp, Homo sapiens
tctggcttcttctaagcattagaggtcagaacagagaaatggatggctcaagcatgtgggcctccttctctccttgacacatgggatgggtaggggtcagtttagcggagactggttctgccctttctatagaagtcaggtccggctgtacttggtctgggtccaaaccatcctgggtagatgctgccaagactggtgcagcgtgcctccagagaaatggaatggtgcagcagaatacacatcttccttctttacctcattagcaaatgatggtgagcattgaagagtcattctctgaagctgcagttcctggtgaagcaagctcacattcttcctttgtagttctcaggaacatagttgcaggtgtgtcgggtgtcacagatggaggttccacttcatgtggttttgcttcatcttctggctgttgtggcactga

SEQ ID NO: 684990 - DNA, 853 bp, Homo sapiens
tcctcaagacggtcccttctattcccccctgggtttggcgcccctattctccggccattacctgacctgccccggctttctggcccgacatggttgggctcccctaatttaggcgcgtattgaggcttcccccctgtgccgtaattccgcttggccggctatttaggcccctagccatggggtgttacgacccaacaactctgctgccaacaaggcttatattcctcaccgctgccaatgtccctcattcacggcgggcggcacctataccacactcccccttcaacagggggatcctccaatgtttccctccccaaattttcacccccccgcttcgttaagcgttctaatcattgggacgcccccctctttatcaccaggcttcaaaataaggtgtcctccccacatcagtgaccattactcacaatcgggcgcctaacttagttccgcctcaccatttagtacatcacacccgccacacatactgttgtcctcgcctcaagaaagcgtaagacataagatcctagcactttttccatcgcaccctcacaaaagacaggtcgcgcctctaccttagccccgctgatttgactgaagagtggatctcattaatagccggagttataagggtcccctccctgggctatcactaataacatataggaagtggatcgtttgcatgctggggcccgattacgggggcgcacaacacaaagaagaagaaacacggattgcgatattactaatcgccccaacaaccgtgtatatccggccaaactaggttgtggccaaagaatttcttagtaataaagtgatcccccaagggggtccccaaaaaaccccccacatgaca

SEQ ID NO: 684991 - DNA, 427 bp, Homo sapiens
ccttcgcaggacttcccgccgtacagttgcggaggaggcgagcaccatagggagcaccgttgaaaggatcacggatgtgcagattaaataagtggcaaaaccattctcagttgtcaaaaatggccaaaaacacatccctatatttccgtattatagagggcaggagccttccagtcaaagacgtgtaagtatgtcttaattgtacttattcaacaggcagcaattactcctatttgcttatttatgtttctcgtggtgtgaagtactcgtatactaggatgtacacttgtttggaagttaataatacctttgttttacagcacttattgagatattgatggtaaaatgtgactccaagtagcctagacttgacaggtgtttaagatatttctatcaataatgtatttcgcaactggtacggcgtacg

SEQ ID NO: 684992 - DNA, 536 bp, Homo sapiens
  misc_feature (91)..(91): n is a, c, g, or t
  misc_feature (371)..(371): n is a, c, g, or t
  misc_feature (373)..(373): n is a, c, g, or t
  misc_feature (383)..(383): n is a, c, g, or t
  misc_feature (431)..(431): n is a, c, g, or t
  misc_feature (441)..(441): n is a, c, g, or t
  misc_feature (446)..(446): n is a, c, g, or t
  misc_feature (454)..(454): n is a, c, g, or t
  misc_feature (467)..(467): n is a, c, g, or t
  misc_feature (473)..(473): n is a, c, g, or t
  misc_feature (489)..(489): n is a, c, g, or t
  misc_feature (506)..(506): n is a, c, g, or t
  misc_feature (509)..(509): n is a, c, g, or t
  misc_feature (523)..(523): n is a, c, g, or t
  misc_feature (530)..(530): n is a, c, g, or t
accctgatggcgctgatgacaccggccaccgtcacggcctggacagcagccagtaccgcaacgctgcgcgcagcgtggatattttgctggncgactacctgccgggttggctcgaagagggctatcaggtattggttaccgccgaccatggcatgaacaacgaccgctcgcacaacggcctgctggccgaggagcgcgaagtgccgctgttcgtgtttggcgacgccttcagcctggacccggccgccaaaccgctgcagaccgagctgtgcggcaccatctgcgagctgctgggcgccgcgcacgacaaaacggtttgccgggagttgctgaagtgaatggcggcgcccgtggccgctacctggccctgntnttgctgctgncggtcgccgtgtcttcgtcatcttcaagtcgccccgttggctggtggngaacaacaancttgnatcggacnccgctggggattnacaagnttacaaggattcgctncaagtttacttgaggcntgnaaacgaaacttggnaaataanttttgg

SEQ ID NO: 684993 - DNA, 1325 bp, Homo sapiens
ccaacttacctctcttgtttgtgtcgcttgtgtgggggattagttatgtttcgattgttctatgtctgtaccacctcactccagcacataaatgtttagtttgtgtttggtgctcgccgcccactaccccgccagttattctgtatgcttctttgtttgctttttctttaccactgaatttagagtgttgtctgtttcgtcctccgtcgctcggtgtctccagcgagtggatttggcatctttcttttcttctgtcttgttggtttgagggtagctccacacactctttgtgcgcctccgttttgtgttccgcctctccctcgctactcgctcaccctttttcctggtgtgcgtccacatcctgctacgaatagaagcagcggtggtgggggtgtgaaaatagtatggcgcgcagaccgtaagtagtaccgggttgctataagcgagtgtgtgtggtctcgctgtataacaccggatggcgctaccgtccgcacgcgcgtctacttctctgtacgcttatcagtctcagcgtctcacgcgcgcgcggtcgccggtcgctgctggtgtggatagacgactttcgctttcttgttgatgctcgcggtgtggcgatgcgtgggtcgtcgccgcgctcacgcgcgcgcgctctcgtcgctgttgtgtttgggttcgctcgcgcggcgcgccccccgccgcctctgccgttgcgttgtcgcctctcgcctcgccgtcctttgtatgttagtccccgcctcgcgcgctcaccatctctctctctctcccttcggctcgcgctgcggctctgcgcttctcttttctctctctcctctctctctccgagagagcccccgctctcgctggtgtcgtgctccaattaacacccgcctcccgcgctcctgctctcgcctcgctcgctcttctgtgtgtgtcttctttttttttcctctcctctctctctctcgcgcgcctctctctctctctcctcgcgccgcgctgcgcgtggtgagagatgatattatgtggttcttttgttgttttcgtgtgttctctcttctctttttttttttaagtaaagttgctctcttcgcttttttgtttgtgctccttctctctctctctctctctctctctcctcctcctttgtttctctcttctctccgacacacagcagcagcagcagagaggagagagagagagagagagagagagagagagagaagaggaggggggggtcgcctcccccccacaccctcctcccccccctttttttttgttgttctttttgttgtagtgtagaaagtttttttttttctctctctcacaca

SEQ ID NO: 684994 - DNA, 1031 bp, Homo sapiens
  misc_feature (126)..(126): n is a, c, g, or t
  misc_feature (489)..(489): n is a, c, g, or t
  misc_feature (778)..(778): n is a, c, g, or t
gaggaaagagcaggcgggcacaacatactgtgttacttattgcaccatgtagtctggtcgtggtatgttatcctcgcttgacgttctaccctagtgatgcctctgacatgtatacgcttaggtgtncactatgcttgtacacatttatcccctgtggggaatttattgtccgcgactatcgtcactattggttttgtgtaactcgtcgctaccgatgttacacccctcgtctattacgcatacggaacccgttctctggtttgatctcccatgggcgtcttaacttacggcctatcttgtctggtttgcgtcaatctgggtctattattccccctcgtgcggaattgttgtcgatagcatttcgaaaaatgactcctccgtatggacgctcgcctgctgtggcccgcgacccgccattggtttttcccggggcggaaggcgatttttagttattagccccgccgggggttaaactcttccctgattgantgtgtgcgcctgggaactcaagtgtgccaattgtcgttgtgccagctgctgccatgggcaagtataattgcgtccctctctatagagtaagttctgacccatggttctgtactcccactggtacaatgaggtctctgcagcgcagtgtcatggccagacaggcctcgtgcgtcaaacgctgtgccgtcctccccccctccactgttttgacgcaggtggcggaaactagctgctggtatagcaaccccagtttgctcggcgactcaaaacaggatgctctcgtccatcnctgagtgtccggcaaataaggatgctcccgccgcccttgtaacttcccgctgggacatacatgttcgcccaggaacacccaagggggtccatagcccatcccccccacgatgaaacgagcaacatgggacacccgcctttgctccaccggggacacacacaccacttctcgggtttcacaggccatttctccccgcattttcccccatttccccacccccgcattcctacccgggttttcccccaacaaaaca

SEQ ID NO: 684995 - DNA, 150 bp, Homo sapiens
ccctaatgcaaaccccaaacaatacaccagcaaacaccccaaccaacactccagccaacatgaaattagtgccggtggccaacaacagactatttgacatgtcggctggagtgttggttggggtgttggctgacatattgcttggggttt

SEQ ID NO: 684996 - DNA, 278 bp, Homo sapiens
gtggcagacgttctgtaatcccagctactcgggagggtgaggcaaagagaattgcttgaacctgagaggcagaggttgcatgttctttcattgttgctccaaataggaaactaatagtccaatggctaaaaaaaaaggggaccgaggtgttatatgaatactgatataaaggtaataattacctcgcaggtggtgttgacgttggaatgagccattgatcataccattgcactccagcctgtgagacagagcgagaccctcttccaaaaaacaaacaa

SEQ ID NO: 684997 - DNA, 173 bp, Homo sapiens
agccatgtcatgttggtgcgtcgctttgcagtagcttgcttttagcctgcctcgatgttgcgtctggctttaattctttctccttcttctgcttccagtccttgccctctctgcgtcatgtctttccttgtcttcctcgttccactcttggcctttaagttatgctacatgtt

SEQ ID NO: 684998 - DNA, 164 bp, Homo sapiens
ctctcatctgacgacgatgaggtgacagtcacggaggatagatcaatgccctcattaaagcagccgtgtaaatgttgagccttttgggcctggcttgttgcaaaggccctggccaacgtcaacattgggagcctcacctgcaatgtagggcacggtatttcttg

SEQ ID NO: 684999 - DNA, 608 bp, Homo sapiens
  misc_feature (254)..(254): n is a, c, g, or t
  misc_feature (473)..(473): n is a, c, g, or t
cccagtcacagacagctagcaagcaggtagcagagtcggtggatcaaagcacgagtacgttacaactactggtaagcctatgcttctccgcgctcagcccttctgcttactggaagggctatcactgggggtgaacttgaaactcatcatcactcttcggcaaaagctcttcttcctgaagacagacccagcctcttgtgctctcaccctccactctggtaaagctgcacctctgggggaatgaggggctgggnatcctggagagcctggtgcttcacgatgctgctctggtgattcttgtacctaatctggtgtgctcaccaatgagtgaaagggatcgtgggtcagggacaccgagagagtgaggtcacttccacttcaaaccttcagtgagggggtgggatggagagcaatgctgaatcttttttttggacggcaggggtttttctacttgtacaaatattcttagattnaaaagaaccttggttgtttgtggcatataataatatttaaaatgataatgcatctccccagagtattttgtagctgggaaaagaaaaaaggaaaaaaagaaaaaaagattctaacagctgttaaatttataatta

SEQ ID NO: 685000 - DNA, 1140 bp, Homo sapiens
gcggacgcgtgggtttattatttttgggagggactggttctttatttcaaaaagacacttgtcaatattcagtatcaaaacgagtgtgcgactatgggatttgctcatttctccacaattcgtgccccagaagaagaaccacagtaaaaggcagagtacctttaaagccgaagtaagctgcaggatgtacacctaagcagacctcctagaaaccttaccagaaaatggggactgggtagggaaggaaacttaaaagatcaacaaactgccagcccagcggactgcagaggctgtcacagccagatggggtggccagggtgccaaaaggccaaagcaaagtttcagaaataatataaaatttaaaaacgtttggtacataagctatttcaagagtttctccagcagctgagctgatacaaagcacaaattgagatggcacttctagagacagcagcttcaaacccgagaaaagggtcatgagatcgagtttcacatggctaaatcagtggcaaaaacacagtcttcttactttctttctttcacggaggcaggaaagcaattaagtggtcacctacaacataagggggacatgatccattctgtaagcagttgtgagggggtagagatgggaccaaaatttgggtctcagaggtcttagcatcttaatttggtaattctaattgcaacacgcatacagacttggaactacctttatccaagaattttctaacagtgaaaactgtgaacgcgcatatcggggaaaaggacaaggggaaaacaccccgggaacaccacttgggaagacagacatctggagaaaacgatcggttcccaaaaaggaatctccaagagacaaatgggacccacaaaaggagggcaacaaattgagatcctattgaagaggaaaagaattaaagaaggaaagacaacaaacaaggataaagagtaatttatgacagaacggcaaccacgagcgttgacaaagtttgtaaacaacaaagagtaaaatgtagtaaaatgataatatcggagagacacgtcataaatagtcgtcagagcatatcaaagaaagaataataagaggtctttctttcctctttcttcttgtttttttgttttttttctctttcttatcgaggc

SEQ ID NO: 685001 - DNA, 862 bp, Homo sapiens
gagtgcagtggtgcgatctcggtcatgaagctctgcctcccaggttcccaccattctcctgccttagcctcccgagtagccaggactacaggcgccctccacatgcccggttatctttttatttttggtagggacaggagcctctctatgttgcctgggctgtcttgaattcctggcctcaagggatccctctgcgttggcttccaaagtgttgggattacaggcgtgagcccaccgtaccgagctcatacattattccactgtgttccttatttgaagcaaataagaaccagatcatcatcatcatcatcatcattatcatcatcatcatcatcatttatgcgagtgtttataatcttcatatctgtgtcaaagtcattattcccatcttgtactggaaaacaacactaggtttagataggttaaataccttaatggaggtaaggcagttggaagtggtacgatggactatgatcagatgagttcctatatatataactatgtttgtgcttttgtaaatataagcaagatgaaacaggatatttatatcatccagagggttcctctctgtgtctttcattagtattcccagaagatacgtgttggtgaccttgtccctattagatagagttctgtctttgtaatagttaactgtctgacttataaacgtgatcaatacgacgtactttgggtaggtctgggggatgggtcaaaggatcgatggggatataaaggaggggtggaatgggggatcctttactataactttcttgggaaaaactgggcttttggggcaaccgggcactttgtggggccttgtgtccaacttttggcgggctgcttcgggcggggcaaacaaccg

SEQ ID NO: 685002 - DNA, 371 bp, Homo sapiens
  misc_feature (304)..(304): n is a, c, g, or t
  misc_feature (319)..(319): n is a, c, g, or t
taaaaagggtaaccatcaggggcaacgaaaagaaagggttcgtatttccaagttcattattccttattcgtgaagaatagatagggcgagaaattttagagcagaagatagggggtgaagagtgggtgacattatgagagggtggactagtggccacaagtctggtgtctcccagttaatggaattttttaatgtggtgttggtgttaaaggatacattattaaggcttggtagacctataggggacatacaggagagtctccggtgcgaactagttcggacgggagactcttcaataaattanggtatgggagggggngttggtcataaatggctctgatcatttggagataggtcccatcaatacctaa

SEQ ID NO: 685003 - DNA, 488 bp, Homo sapiens
tagatcgagctcggtaccataaaagcttatacgagtagaaaaggacggagatcatgttaatagcaggcatttagttgatcatattagattaagtgaaggtagcggcatacacccgcatacgagacgagacccgcgaaaacttgacatttcattctttttccctcatgggttaaatcggggcttttgagatctagtgtttgaaagtccgttccaatgtcgctcaaatttcgcataaatttaactaattgataagcaaatgggaaaaggctgaatgctatatgtatgtgggagcgctccacatgcgcatggggccgtgtacgagtataagatcgtatacgcgtataggaagaaaggctgagcctgcatgggctgccatccgagtatagcatcaaataacacagaagggcacagaagggcattgaaataaaccatgtttcaaagtttttccgccgtctacacgcagaggtataaatgatacgtatctccgg

SEQ ID NO: 685004 - DNA, 320 bp, Homo sapiens
gggaacacgtacggcctgtaataacagcattgtaatgacagtttctcagtaacagaatcctggtgggccgttaattgggagttttttgccctggcgagtgcagattccttgctatacctccaattctgcccagaagagggggggaatcaccagtgttacaaaattagaagcttgttttggctattttagactgaatatttgaacactgcagcattactagccaccagtgttaaagggcagatgagggggaaaatttgtttttagcagaaattccatgcctcatcttttttaagcgatttgttccaaatgaggccatttag

SEQ ID NO: 685005 - DNA, 767 bp, Homo sapiens
  misc_feature (8)..(8): n is a, c, g, or t
  misc_feature (41)..(41): n is a, c, g, or t
  misc_feature (46)..(46): n is a, c, g, or t
  misc_feature (49)..(50): n is a, c, g, or t
  misc_feature (59)..(59): n is a, c, g, or t
  misc_feature (64)..(64): n is a, c, g, or t
  misc_feature (68)..(68): n is a, c, g, or t
  misc_feature (70)..(70): n is a, c, g, or t
  misc_feature (72)..(72): n is a, c, g, or t
  misc_feature (74)..(74): n is a, c, g, or t
  misc_feature (79)..(79): n is a, c, g, or t
  misc_feature (83)..(83): n is a, c, g, or t
  misc_feature (89)..(89): n is a, c, g, or t
  misc_feature (94)..(94): n is a, c, g, or t
  misc_feature (96)..(96): n is a, c, g, or t
  misc_feature (99)..(99): n is a, c, g, or t
  misc_feature (106)..(106): n is a, c, g, or t
  misc_feature (118)..(118): n is a, c, g, or t
  misc_feature (122)..(122): n is a, c, g, or t
  misc_feature (126)..(126): n is a, c, g, or t
  misc_feature (128)..(128): n is a, c, g, or t
  misc_feature (138)..(138): n is a, c, g, or t
  misc_feature (141)..(141): n is a, c, g, or t
  misc_feature (146)..(146): n is a, c, g, or t
  misc_feature (170)..(170): n is a, c, g, or t
  misc_feature (172)..(172): n is a, c, g, or t
  misc_feature (175)..(175): n is a, c, g, or t
  misc_feature (180)..(180): n is a, c, g, or t
  misc_feature (188)..(188): n is a, c, g, or t
  misc_feature (198)..(198): n is a, c, g, or t
  misc_feature (201)..(203): n is a, c, g, or t
  misc_feature (207)..(207): n is a, c, g, or t
  misc_feature (211)..(211): n is a, c, g, or t
  misc_feature (218)..(218): n is a, c, g, or t
  misc_feature (220)..(221): n is a, c, g, or t
  misc_feature (227)..(227): n is a, c, g, or t
  misc_feature (251)..(251): n is a, c, g, or t
  misc_feature (254)..(254): n is a, c, g, or t
  misc_feature (261)..(261): n is a, c, g, or t
  misc_feature (271)..(271): n is a, c, g, or t
  misc_feature (282)..(283): n is a, c, g, or t
  misc_feature (286)..(286): n is a, c, g, or t
  misc_feature (295)..(298): n is a, c, g, or t
  misc_feature (334)..(336): n is a, c, g, or t
  misc_feature (345)..(345): n is a, c, g, or t
  misc_feature (370)..(370): n is a, c, g, or t
  misc_feature (394)..(395): n is a, c, g, or t
  misc_feature (400)..(400): n is a, c, g, or t
  misc_feature (402)..(403): n is a, c, g, or t
  misc_feature (408)..(408): n is a, c, g, or t
  misc_feature (411)..(411): n is a, c, g, or t
  misc_feature (433)..(433): n is a, c, g, or t
  misc_feature (439)..(439): n is a, c, g, or t
  misc_feature (442)..(442): n is a, c, g, or t
  misc_feature (447)..(447): n is a, c, g, or t
  misc_feature (457)..(457): n is a, c, g, or t
  misc_feature (469)..(469): n is a, c, g, or t
  misc_feature (475)..(475): n is a, c, g, or t
  misc_feature (496)..(496): n is a, c, g, or t
  misc_feature (516)..(516): n is a, c, g, or t
  misc_feature (520)..(520): n is a, c, g, or t
  misc_feature (571)..(571): n is a, c, g, or t
  misc_feature (642)..(642): n is a, c, g, or t
  misc_feature (673)..(673): n is a, c, g, or t
aagctcancgtggacgggctcctgctctacttcccgtaccnctacntcnnccccgaccncttcncctncntncnggacncaancccccnctggncnccnagggtcntggactcctggngatncccncnggccccgggnagncagtntccctgttggccctgatcatggcntnccngacancatatccnctggaggtgnccnnnctcntctnctgctcnannactgtnccagacattgagaaggtgattgangancttcganagttgctccncttctatcaanngcnggagggcgnnnngctgccgtttctgggactggctctcacctcccgccnnnacttgtgtnttccccctgcggtgccccccctgcnctttgggaaggacgtcgatggganntgccncnncctcnccncctcctctgtgcgggcgccgtncccgcntgncaccngcctgccccnctgccgcttctntgaggnatttgatgcccatgggcgtgnggtgcccctccccgctggcntctnccacctggctgacctgcaggccctggggcggcgccagggctggtgcccatncttccttgctcgatactcaatcctgcatgccaatgtggtggtttatagctaccactacctcctggaccccnagattgcagacctggtgtccaaggaactggnccgcaaggccgtcgtggtcttcgacgaggcccacaacattgacaacgtctgcatcgactccatgagcgtcaacctcacccgccggacccttgac

SEQ ID NO: 685006 - DNA, 327 bp, Homo sapiens
  misc_feature (285)..(285): n is a, c, g, or t
tggcgaagtgcaatggctggttcaaactcctggctcaagtgatttgtccacctcagcctcccaaactgctgggattacagatgtgaggcacggcgcctggctttttttttttggaggcacggtcttactctgttgcccagttgggagtttagtggtatgatcccagttttttgcagtcttgacctcctccagcctcatttttggtttttaagtagagacaaagtctcactattttgcccagttgggtctcaaactcctgaactcaagtaatccccatgcctcagnctcccaaaatgctgggataaaagctgagccattgcactccgg

SEQ ID NO: 685007 - DNA, 408 bp, Homo sapiens
tgatttgtggcaccaagtacaggtaccatatacatcagagaaaggaaagccaattccagacctgtataaggcagttgtaatactaagaaggaggatctccttagtgacacataacttaaaagactttttaatagcttctactgcctatgccagattgtcctgggtagactcgtcgatttccatgtcctggtcatcagacgactcatcttctcctaggacatttgcagaattctggtttccgaattagaaagaatagaactgtccccataagggctaatcaccgttcatggcaataaacactggacttcggtcactctctgatatctgagttttccctttccaggcaaggttatatgtagagatttccaatgaagatgctaaattgcagaagtgcccagaaaatccaac

SEQ ID NO: 685008 - DNA, 1769 bp, Homo sapiens
  misc_feature (765)..(765): n is a, c, g, or t
  misc_feature (1353)..(1353): n is a, c, g, or t
  misc_feature (1525)..(1525): n is a, c, g, or t
ggtactattatgcatggtcgacccctaccgtgttcttctgacattgccggtcgcacggctgagacccatgaggactcgcggtcgtcctgtgttgagtcgtgtaatggcggaccagagggttcctgaaagacagtgcagtaaagacttgttcggtgacatctgagcacgtggagcaggaataggcattcggattgataagggattctcgtggcattgtcaactagggaatataatatcctagggggatcttaatacgttgtcaatgacggatggcagcacttgtcgcacggtcggccccactagataggcaacctagcgcttaggctgacatgttccttatacctcgtagcgcgcgcagccacatagttatcgcacacgataggaagcaaaaactttgcaatgacctaaaaatggcaaattaccagggagtttcacttagtgaaccaagtacgtatagcttctcaaatagggaccacacacactgggcctcggagtagtctcacaagattcgaggcaacaaattcgcgatttgccccgaagggtcttatgtttcccaccttcctttgaacaagccctcggtccccttagaaagggaccgctttggaacgcctttggcgttggtgagcgacattttgggggcttcgaaaatgggcgaattgtttcgtcgcttagattgcaatcggggccgagattaccgattggcaccagcatgaacaatgtggccaacttcgccaactttccaattcaaccggtaaggaggcagangcgtcaccccagtcgcggcgcatagcccgccccatcacagcgggcccgatatctacccacgtggaacaaacatttggcagagcagcaacggcacccgtcgcaagagcatctaggatagggaccaagggtgagatgaccaaccttcgaaaatttcacgggcaatcggaaaacctctcgttcagagttagccagagaggaatttccggccataccgtacaatccggtactagccgcagaacacgtgatagcttaagatatcgagcattaacttcccatttctcaaacaccacaaatcgcaacaggaaaagatacagaactggatgcccgacatactaccatctaggggtaaggagcagttccgaaatcgagagattgcgaacaggcgaggcacgcggcaaaccagttgcgaataagagtacggaccacaaagcctgagtatatagacagtatgcacagggtaggcgggtaaacattttctcctctttgagcaggaaacacattgccgctgtactacaaagttggatgggcgactcacattccccgaggcattatgaggccaagagggaccaactatcccccgattcattntaaggcggaggcattttcggcaaacatgtggagaagggaaaatgcacccaatctaggacagtagaccacacggagatcaccaggcaaaatagtgaggcccccatacagagggacctatgcagagaaacatatggccaaaggcagggcgctacagacaggaacagtagacgantgggaacacacacatgagcagacaaacactggaagcacaagcgacgttgcaaacagggcgtaaaaccccagagcgccagcgtgtcgcacagatacgccaatgagaaggacacacatgtagacagaaacccacgcataggcagaagagaacaaaataccaacagagacaagaacaacagcagacaccactaacaacagcaaacgcgagccacaaaacgcaaacagatggaatagagacacgggca

SEQ ID NO: 685009 - DNA, 168 bp, Homo sapiens
tatggcatcctcccactcaggctgctggagtggcagaattaacacgtacagagccccaagccccaggcaggcaccagtcagcgcttgacgccgaggggtccgagagtggccagccagccacggtggacagggcgccaggggtggagtctaggccattcaacgcctccg

SEQ ID NO: 685010 - DNA, 926 bp, Homo sapiens
  misc_feature (28)..(28): n is a, c, g, or t
  misc_feature (30)..(31): n is a, c, g, or t
  misc_feature (83)..(83): n is a, c, g, or t
tccgaaaagcaacagctccttaacaagngnntgcatggccacacattacttgctctaccttcacatcagtatgcaaattcttnggaaccctagtaaccttagtcattttcttttctttttggataaaggaatgacaagagacatgaccatttttccctagcctggaaatgctctgcgtctatgttgaggccaggatgggtcatcacctgttcccaaggggcagtgccctggggaccaggcagggaagacaaggaccctgcatctctgccactccttccattcagcatagccattgtgcagtggagccccttttcagaaaacaggggaggtttctcaggtttattcatcatgccctcacttcgcttttcacccatttatccatcttcatatctcatttcctctggtgccttaattctgctccttatccaaattcgctctcagaaatggatcttaaatcaatggttttcgtgagtgtttgtgtagtgtgcatcttcttccaggggtttgtgtgtctaagcctttcacaaacgcctcctcctctataaaggaattttagtcaccatcaagcaggtaagggaggtattttgatggcaccacctaactgccagcttagagcggtggaaacttcctaggtgtgcagtattaagaagggtttcctgtttttaaaacaaaactgagtaacaggaaacttttccaggatgaaaacagaatctattggtttgtgtcactctaaattactatccagtctttgtcacacatgcatattttcattgttgtggccgctgagggtagactaagtagtatgacaccaccacgtaatttcatgtacctatgtcttttattgacatagagtcacgcacctgcttctggttttggccattgtcaaattgtctgggttttcatttttcataaacagtgctgctttg

SEQ ID NO: 685011 - DNA, 193 bp, Homo sapiens
gatggtggctgtgtatactgtatcagactttggaggcaggcgggtgatcacgagtcaggagtcaagagagctggcaacatgtgaaaccctgttctactaataaagtacaaaaatagctgggtgtggtggtggatgctgtaatcccagctactcagtggaggctgaggcaggagaatcgcttgaacccgggagg

SEQ ID NO: 685012 - DNA, 179 bp, Homo sapiens
ggctcggtaccccttcgttaagctgaacggcacgcgggggtaccgacatgatgcaacacctttttgttaaatatatcaatcatgcaactgcatgggtgtgagtcaatccgaaacgctctttactgtcaagctggccccgtcgtgctctacgttggagcgtcatggccgtttttggggca

SEQ ID NO: 685013 - DNA, 843 bp, Homo sapiens
aatacctaggctccatcctacctgaagtggaacatacgaactgagcaccacagtctaggtatcatgcactgtgaattaatcaatagtagaatccacaggagtgcctaatcctgtgatcttgatctagggatgtcatacatagtatttgacaacataacttgcctctatgtattggtgtagaaaatgtgatcaccttaatctaaagtgggagaagatacatacacagatggaaatggataaaatatgtggatcaatacttttacaagtagaaaagctatccattttatacaatcactgatacagtctatgtcacaaaaaccaacagaccattattcctcttgaagttagttttgatttatctttgtatggttgtctacaatttgttttcctgtaaatgcagatagttacaaatctaaaggatagaatgctttcctaaaacagaacattagcctttaaggttcacatagactttacattgtatctaagttaatctttataaagcactagaatttttggtccaaacgtcaacaatagtattagacctattgacaaattatttgatagctttcataatctcagctttttttgaacttccaccaatttttggaatatgtcataattttttttccctgtttcacaatgttgtcagagcgaacatagaattgtaaaacatcaacaaaaaaaaatttgcgtacataaaatttcctggacctatgtttagtttacttggatctggcacgttttaccaattttggccttacacaggtttcatttgaacacttcaacgggctctttaaaaatgaaaccaactcatatacttttaacatcacttttaagcttata

SEQ ID NO: 685014 - DNA, 611 bp, Homo sapiens
  misc_feature (430)..(430): n is a, c, g, or t
ctgcgcctactactaccatttaaaaaaaaaaaagttaaaatcctctgaagacacatgcacatgtgtttctggtttactggcagcactatttacaatagcgaagacagggaaccaacccacatacccatcaaggatagacgggataaagaaaatatggcacatatacaccacagaatactatgtagccataaaaaggaatgagatcggctcggtgaggtgcacttggggaggctgaggcaggcagatcacctgaggtcaggagttggagaccagccgggccaacatgtagaaaccctatctccaccaaaaatacaaaaccagccaggcgtggtagcacatgaccgcaacccgggccactcgggaagctgaggcaggagaatcgcccgaacccgagaggggggatggcttgagcccaggagttccagaccgncggggcaacatagtgagaccatgtctctaaaaaaattttaaaaattagccaggcattgtggcacatacctggggtcccagctactggggaggctgagcagtagatttctggagcccaggaggtcgaggctgcagtcaggcatgattgaccagtggactctagcctgggaacaagatgagat

SEQ ID NO: 685015 - DNA, 473 bp, Homo sapiens
taagcgtagggtggaataatttcttaatgtagaggtgcacttgctcttcctctctctggtggcgggtcatctgttgtactcactgctctgattacattctctactgattaaatagaccatgacctgtcatggtctggacgtgtggctaattatacttatctcctcatctcgtcttataaaaaagactgatctcagattcttattaccaaaggacgttggcctcctttgtagagaatactttgggaaggatccttctgtggagtttgatcctggggactctgactttagagttcttgctgatctttcctctccctttaagggtaaggattagtatatctgcagacatctccaagcttaagcttagttattgtgggcttatgggcagcagcttagcaaccatttcaaggcactcagctgtctcatgggtctgtctctgcttgtcactgtcccctcttgccctccttctccaccct

SEQ ID NO: 685016 - DNA, 148 bp, Homo sapiens
tagacatgatacgactcgagtcggtaccccgggtgtgtcatgcactgctataaagaattacctgagactgggtaattatttataaaactcaggtttaattgggtcatggttccacaggctgtacaactgaggagtagaggaggggggg

SEQ ID NO: 685017 - DNA, 316 bp, Homo sapiens
tgcgcttagttctctctttatacaaactctggttctacaaactcgcctgcacccgctggctggaccatcacacgctgacggggtccgcctatttacacgcccattgcgggctgtaccttgtgcacctcccggcacggtgctcatctgtgtcgccaaattaaattagggacggccgggtggggctcggcgggaacggcgtctgtacacacaagtgctgggggctcggggcctcaatactgtcgaaggccggggctgtgaacatggtcggggcggccctgcccacccctagtggtcggttacgagcggaagcacagca

SEQ ID NO: 685018 - DNA, 426 bp, Homo sapiens
tcacaggcagcactgtatacattcgtatggacagatgtactcaataggtcatgaagttgaatgtctagttgtcatcttcagtgcgaatactggcatcatgtactaggatatgactctctgtggactctcctaggagtgtcagtgctacaggtcacggtccggtgagcagccatcatatactcacatcgagtgactgttagcttctgacataccggtcttcgtgagccagtgaagtctgtgaccaagtgagcagcgtggctgatgtgaccagctgtatgtgctgcgatgtcgtatcagaggcctctgtccccagctttggcagatgtcaatagtagcactcattgtcctctgcaaacagatcagtagggcagcagacattctcatcaaagcccggtttaatagggctgcaaatcagcaacaggtcgc

SEQ ID NO: 685019 - DNA, 525 bp, Homo sapiens
cccctttttaaccccatttaaccatgaaaaaaaggtagtaggtaggtccagtgtgtgaaacctccaaacaagaagcccttttatccatgaaaatcttttcccaaggacgggatttaaaatcggaagggatcggttggattttttttttaaaaattccagttgagcggcggttttttcccacccaaaatggaaaacccaattgggaaaaaaaaaagtgggtaaaaggccccccctacaaaaaaaaccaattccagggtttggcagccaaaaaaaaaaaaatttaaatggcccggattttatttggaaaagggagaaccaatcatttttttttaagcggtaagggaggaaaaaaagggctttgggcattttaaaaaattggggttcattttttccccaaggtcaaacttttgacccagtggggtttttcaaaagtaccctagttcaggaccacccgaatgttaaaaaaaacggggttttaagtttggggtggcaaaaccaaagggaataaccttgaattgggcccca

SEQ ID NO: 685020 - DNA, 674 bp, Homo sapiens
atttttaaataaaaaaaaaaaaaaaaaaaaaaaaaaaaaaaaaaaaaaaaaaaaaaaaaaaaaaaaaaaaaaaaaaaaaaaaaaaaaaaaaaaaaaaaaaaaaaaaaaaaaaaaaaaaaaaaaaaaaaaaagaaaaaaaaaaaaaaaaaaaaaaaaaaaaacttttgggcccctttggcccaagggatttttaatttgggccatttttttcttggggcccaaatttgggcctttttggccaattcccccttttggggggccttttaaaattaacgggcccggtttttaaaacggtgggattgggaaaaccctgggggtccccaatttaaaccccttggaaaaaaacccctttttcccaggtggggtaaatccaaaaaggccccccccgaggggcttttccaaaagttggccaccctaaatgggaaagggaaattttaagcgttaaatttttgtcaaaatccgggataaatttttggaaaaaactgcttttttttaaccaattggcccattttcgggaaaatcccttttaatccaaaagaaatcccccgcaaatagggttaaggggttcttccccctttgtgaaccaaaggccccctttttagacggtggccctccacctttagaggggcaacccttttataggggggcgcccctttttgtgggcccttccccct

SEQ ID NO: 685021 - DNA, 156 bp, Homo sapiens
ttttagaccagcctgagcaacatggtgagatccgtgtctctacaaagaattcaaaaatgggctgggcatggcggtgtgcacttgtggtcccggctactcaggaggctgaggtgggaggatcacctgagcctaggaggccgcggctcccgcacgcca

SEQ ID NO: 685022 - DNA, 104 bp, Homo sapiens
tctagaaggatccccgagctgttcttcagagcacaaacaaatcagtaacaaacaattgaacagcaaagctgctactatgagtaggcagagagacttgtgcatac

SEQ ID NO: 685023 - DNA, 295 bp, Homo sapiens
ccacgctggagtgtaatggtgcaatcatggttcactgtagcctcaacctcctgggttcaggtgattctcctgcctcaaactcccaagtagctgggattacaggcatgcaccaccacacctggctaattttttgtatttttagtaaaaacggagtttctccatgttggtcaggctggcctcgaactcctgacctcaggtgatccacccaccttggccacccaaagtgctgggattacaggcgtgaaccactgcgcctggctgaaataaattgtttcaatttaattaagtaacaaag

SEQ ID NO: 685024 - DNA, 396 bp, Homo sapiens
  misc_feature (156)..(156): n is a, c, g, or t
ccccctcctttccgcctccggggataagggccctggccccactttaaaagccccatcccccctgcccccgggcgatccctgctgtgagccgaagctctccctgcccccccctggccatgtggttgtgttggggacaaaccctatttgtgtgggtgntggttccccaaaaccgggggccccccccaaaggccccttcccaaggaccctacctgggggtcaggcctgggccccccccgttcccggttggtcctgggaactgccccccccgtcccctcagaaccttggaagctgctgctgctgcttacagaattatattttttttttttgaaaagttttaaaaagttgtaaccttttgtgtcttgtcctgtcagagaataaattaatttttttagtaga

SEQ ID NO: 685025 - DNA, 174 bp, Homo sapiens
  misc_feature (69)..(69): n is a, c, g, or t
  misc_feature (112)..(112): n is a, c, g, or t
gcacatgcacatatgtgtatgcatgtatacgtccatacagacatgcacacacagactctactccatagntatacatatccctccctcttcacaaccccctgtcacatatccnttcaaggagggtgacacgttgtcttaggttgtcatctatcccagacacatcgtgcctctggg

SEQ ID NO: 685026 - DNA, 441 bp, Homo sapiens
taaggggtgacacgggagtaatctacacagcggggaacacgaaggccacgattaaggattcacctagctttacagcagtacaagcgcgattgagatcttctggtccatgtgcttgacatgcatgtgttatgcctgggaatttctttttaatgggatccttggagctcgcatagatcattatactttgcagaggtgctagttctggtgcccacaaaaaaaacatcaactcttcttttctggattcttttgtttcaagagcttgcatcatacaaagcatagcgacaatcttttgcaggaagcattcccacaaaatgcttgaaaggatcagttatggttacaccaacatctccaaccaagatctcttggccttcttctacaatgatgcacttttcgtctgcactgagacaaaaaatgacagccttctttcttttcttgatttct

SEQ ID NO: 685027 - DNA, 489 bp, Homo sapiens
ataaaggatcccgcctgttatcgcccaacacgcctgacctaatttttgtatttttagtagagacggagtttcaccatgtaggtcaggctggtctcgaatgcctgacctcgtgatcctctatgcttgggctcccaacagtggtgggattattaggacttgaaccatcgcgcccggctgagaggagcactcttacagctgcttctgcactctccaagacatctgctctggttttgaagataaaatcttcagtttggtctcccagctttccttttcaaatttccttcctctcgagtcccaagacacagcttctctaatgaaatatccagatatacttacctcatttttcctaggatatctagaggaatcatatattaatgttttataaacctttgagagctgattgttaacccttatatgatctttgtccttaaattgtaagtgaaagaaagaaggcaatcttttccctttttcatgggtgttgggcgataa

SEQ ID NO: 685028 - DNA, 176 bp, Homo sapiens
  misc_feature (10)..(10): n is a, c, g, or t
agtatctctnatttctgaagatgtacaaaaaaatatagacttcatatatctggaatgagcactgagccataaaaggttttcagcaagttgtaacttattttggcctaaaatgaggtttttttggtaagaaacactcatttgttcttatgtattgaggagtgtcttttatatatgat

SEQ ID NO: 685029 - DNA, 386 bp, Homo sapiens
aatttacaggcaatgcaattcactcattgagctgtacaattcaatagcacagaactgttgtcagtctatcaccacacatcccattttagaacatttcttatcacctctaagagaaattctgcccttctgagacatcactgtcagtcctcatttccctggataaccactcatctactgtttctttttctttttgttttcttagagtctcgctctgttgtctaggctgaagggcgggggctctctctcggctcactgcactctgcggcctcccgggttctagcatttctcctgattcagcctctcgagtagctggggctataggtgtgcatcaccatatccagctgattgcggtatgtttcgcgaagatggagtttccccaggtcggc

SEQ ID NO: 685030 - DNA, 178 bp, Homo sapiens
tcaccagtatgttactaaatggcagttacctaatggactgtcacctaaatggctgttacctaaatggctgttacctaaatggctgtacctcaaatggctggtacctcaaatggcaactcgtgcatcgccaacatccagcggccattaaggtaacagccatttaggtagggtacctgtt

SEQ ID NO: 685031 - DNA, 104 bp, Homo sapiens
atcccgatattcagttctctccagcctggggtaaatacactgagcaatcacatctcggagttttttccaatggcaacattggaatcctcggctccattctcatg

SEQ ID NO: 685032 - DNA, 1296 bp, Homo sapiens
  misc_feature (1010)..(1010): n is a, c, g, or t
gtgttccacccctctcttttgttatgtgattgtgttctggtgacatcattgtgtggtgctaggcctatcttgtgtacgcccgctaggggtgttttggcagtaatgctccaacacccagggcgcttttggggcgctctttcgtggtgggctctgatacatcctctgttgggtcttcggtgtgcactcctattgtactagcgtttgtgtttttcctcactaactgtggctgtgtagcgtatatcgtgtgaccctttcttctctcttcttgggtgccaattcttttcccttctctctgtcgctctacctggggggtctactcgctcacctttttagtgtcgccaatcaaggtggagccgccttcgccttcttttatatgtgtgtgcctcgttttagacttgtggggttccttttttcatgctgccttctacccttcttctttttttttgcaccgtggtcgcacaaatgtctattatccctctgcttctttggtgtaccacatcatctattcatctttgtctgtgtggttgacccaccaccagcgtggtgtcctcttttgtggggtgctttctgttggttctccactctattgtaccccccctcttggtgatgctatacccacactcttcttgtggaggaagaaagttttgttggtcctctggtgactccgtgtcttgatatagataagtggcacccttgttctcccccgttcgtcttttcttttttatggtggtcgccgcagaagtattcacacacttacctgcgctgggtgttgcgtgctcgctggtagataccccccttcgtgtaggacccccccccacccacgcgccagaactagggtcgtttttcttctgactgtagcacacacacacacctctctctgtcgcccacctccacaccaagagaggattatattaatattgaggcgatatattaaaataaataaggaggggtgataagaagagaagtgacctctttgtggggtcggggccccacacacacacacccactcngagataagagagccacctcatagatatatttttccccaccttttgttattgaaacttctacggcagtggcgccccaccatctcgtgtagatagcggtctggcgctcttcaacgtagggcaacgggtcactttgcgaatagtagtggtgcccccccaaaaagagggggcagatacctcccccccggctctggggaaaacgacacacttttggggggtccccccaaaaagggcgcccctttttttaaaaaggggtcccacccccccctttatttttttctttagggga

SEQ ID NO: 685033 - DNA, 179 bp, Homo sapiens
aaggcccaggggtggggcccatggggtttttgcattttcagttgtttgtcccaagtcctgctcctttttgcccagcctgctcagcaggttgaatgggttttcagtggtccccttcctcaggtcaggtgggccactccttttcaccccccccatggagacaataaacagctgaaccatga

SEQ ID NO: 685034 - DNA, 227 bp, Homo sapiens
cgaacggagtgatgcggttggtgagtggtgggggttggctatacgtccagtggtggaagcactgtgagccccgttgacatctggcctgggagggcatgacaagggacgagggtcacgctaggtcttgcttggtgctctgtggcgctggagtataggcacatgacacagtggtacactccgctctcaaaaaaaaaaaagcccacccggcagtgtagcacagtggcagg

SEQ ID NO: 685035 - DNA, 363 bp, Homo sapiens
aaaaaaaaatgggtgatttattttttaaaattaagattggcggaatacagaaaattattttttttacctttacatatttattggtaaggcccaagcaaagggtaacaattagaagaactcttttcaaactaccaaaatgttttcttttggggaaattattcaagtcacaaatgcttagtaaataaatgtacttcaaaatacgtgaagggtaaaacaagtttgaaaacagggatcttaaacaatggattcctttcacaaaaactaccccacaaacaagaagcaaaaaaaaaaggttgtcaggtttgaccgaaaaaaataaatcaaatgttttgttggttgggattgttaaactaaaatctttaa

SEQ ID NO: 685036 - DNA, 401 bp, Homo sapiens
gatgatacacacacacacatacacacacacacacaggtatagacagtcttcatccattaacaaagcagcgacgtgatgctagaacagtgggggggtgcatgaacttgcgtctgcgccgacgagtctactctagaaggcacctgtccaactataaattataaaagaacattctaaaaatacccagtgaaggaattaggtgtgtactggaacatacggcgctatgacagagccaatcacggttttgcgtagcacaaacaaccaaagggagaacggtttctcaggagaggactctgactacgcaggatattttttcatcgtgtggggatctggatctgcttgagcatcagacaagcgtggtatcttctgaggacggtgcccgagagcagcaggggaagacagga

SEQ ID NO: 685037 - DNA, 116 bp, Homo sapiens
gaccgtgtcgcatgtggtgactgcaacgctccattggcagaagaaccggagactacttgtgtgtgacaacgtagatatggactccgaaaggacaccccagggtgttgtcacaacac

SEQ ID NO: 685038 - DNA, 995 bp, Homo sapiens
  misc_feature (152)..(152): n is a, c, g, or t
  misc_feature (593)..(593): n is a, c, g, or t
ttttgactgctgagaagtttctatgtacaaaacttcatttaaaaggtttttctactgaatccaggtattctgaagatcgaagcctgtgttcaaatgcttaccaaattggccaaaaagcaacgaatcaaaccagttggatttttgactttccnagaaaaaaaaacaaaaagtaaaaaaaaacaacttttgtgggcgcgcgcgcctcggcgccctcggaaaaagtttttttaaacaccatttgcgtgtttgggcggcggcgggccccaatagggtaagtgggactattgggcctatagctgtggtccccaaggaaacacccggggcctcggactaggtggctggggtttctcccacaatataaaaaaaacgcgccgggggcgacaccggacgctgttcctggacaaatccccacataggggcgtccggcgcagccaaaaccggggatcataccaacagagggattccaaaggcgagcgctgcagatatactaattaaaaccgccccgggtcggtgtggaatacagatctaacgaagcatgctaccaagccagcaatccagagattcaacaagacacatgtaggagatgatggatngaaattacaccagacgagagaagacaagacatcaagctaaaacaagacatagcatagaggcgacacatagcactaacaactaaccagacacggtgagatatcgcgacgccaagcgaggccgacagagaagcgcgaagaagaacacaacaagaagagacgagagatgaggcagagacaaagggagagacagcaagaaagagatcggaacgaactgcagagagcgggcacagcagacacggagacggtgatgaaagcaaagaggcaagagaagcgggaggcatatcgtcgcaggatcggatatgaggggaggcggggaggtatagacgggggaaggagcgcaagaagcaggcggacgggggctggcaacgctagcaggatagatcatgctttgacacgagcctc

SEQ ID NO: 685039 - DNA, 1083 bp, Homo sapiens
ccttttttggcccccccggtgtggcgcccaattcccgggggctcacgcccgggagccccctggggccccccaaccgtgtggtccccccggcgcggccccctttgttgcgtccgcccaagatgggaaaggagccctccgtgggagcccgggtaaactttcgcccaacagccaaggaaacaaggtggccccattgggggggaaaaggaaacttgctccccagaaaaaagaagaaaagggtggttcaatagacaccatgccccccccgcgacgagtgaccacaaggacttgtccaggttccgccccttaaaaggaagttaaggggggtaacaccagaatctcttgggtaatttgcaagaaggtggaataatagttgtaccaaacccaagggcaaccagtgatccccccgtttggaccaacccccttaaagtgttccgagcattctctgggccagcgaaacacctgtgttcacccccttacccacggtccactcgccttgaggaccccaagccaccgcgctgacccacgagaaatgggctatccccacgccactttcgttaaaaccccacgccttgtgtggccgcgaatatagttctgagactaggtttataaggaggactcggccgcaatagcttctgcccacaaccacaatctgtggaatggagaaagcacccacctgtggctatactgtgagagagggaatgaatgtaatgaatgaaagttcccacgagttcttgttggagagaaatttctgaatgaggctttccccggaatggaggccaaactggaattggagtccaactttctggaagaataaaacacctcggaagagaagatttactggggagactgcttatatttataatattatgactcgcttttttaagagaaatattttgtttatggatcttgatataaatcttagatctcttaatatttttaagccccagccccttggaccacatgccagctctttttccagtttttgcttataccaccaattccattcttttgccagctaattaagcccgaagaagcctggggatccagtttgaaaccaagattaataaagttctttgcctagta

SEQ ID NO: 685040 - DNA, 332 bp, Homo sapiens
  misc_feature (67)..(67): n is a, c, g, or t
  misc_feature (286)..(286): n is a, c, g, or t
  misc_feature (311)..(311): n is a, c, g, or t
  misc_feature (323)..(323): n is a, c, g, or t
aaaattatatctcccttctactactgcagctggcaagtcttgaaagcatcacttcctcgctagagcncaatgaactcaagccactacagcaactcagaacaactctgccccagagaaggagaatacaacaggtaattctaccacctgcacaccctagctaactagaggtcctgagtctatccttgtgacaacttcactgctaacataaccagcattcaagaaaaccagtgcactaaattacaaccaagggactcccacagagtccactttactcccctgccacctncatggggtcaggttctggttatccntgggttggggantccttaggg

SEQ ID NO: 685041 - DNA, 867 bp, Homo sapiens
gtttatcagtttggacactgacaggagtggaacagtagacccacaagaatggagaagggcctggacaacaatgggatttaggttgagtccccaggctgtgaattgcaattgcaaaacgatactggagcaatggaaagatcacccttcgacgactacatcgcctgctgcgtctaactgagggctcttacagacagcttttcgaagacgggatacgtgctcagcaaaggtgttgtgaatttcccagtatgatgatttcattctaatgtgtcatgagtgttgaaatcaagaggaagctgcaatgaggtgtaatcaacgattccaactggagctcgttcctttgcttgtgctctaggccttcggtagatatgtataaggtgacatcacgactttgtcttaacagctgttgtaaagtgtattactttatgtacaagatgaagttagtgaagtttggataatgaaattcttggaactttaattaagatctagtctgtgacaccatttagaactttccctgagtcatgatcagtcatgcttattttctgctaaaatctatgtaaatttcagtatgcaacagttcaagtcgccattatttatttttcatgtgtgaggggccttacaatgtaactcagactacggtgttaactttccctctgctacaaaagattttcccacattaaacttaggtgactgcctaaacgccctggctgattacccgcaaaggtttccggaacccggcgggtaccctgaaagttgaacggcctaaaccgggtatgggggacatctgggccgccctggttttagacggaccctaatcggttacacataaaaaaaggcaaggctgtaccctttgcgggcacactccctctc

SEQ ID NO: 685042 - DNA, 155 bp, Homo sapiens
  misc_feature (69)..(69): n is a, c, g, or t
gatcccgatcacgtgcattgtgggtctctgtggatatgcgggtctctctgaatctgctgtgattcaggngctgccaatttgagaatcatacatagctcaaactcctttaggctgggcacggtggctcacggcctaatttttgtatttttatgaga

SEQ ID NO: 685043 - DNA, 279 bp, Homo sapiens
  misc_feature (29)..(29): n is a, c, g, or t
  misc_feature (66)..(66): n is a, c, g, or t
  misc_feature (78)..(79): n is a, c, g, or t
  misc_feature (86)..(86): n is a, c, g, or t
  misc_feature (151)..(151): n is a, c, g, or t
  misc_feature (257)..(257): n is a, c, g, or t
ttaccagcagacggtatgttgggccacancatccggagttgcacaacctctgtggtcgcgtagagnccatcatgaggnnggccctnggaagaatttgccattttcagtggaaaacaagtggtcgttactagctaagatgtgtttgtacttnggatctgcatttgctacacccttccttgtagtaagacaccaactggctaaaacataaggagtttgcagttgcctccatttaacagatatgaagagcattttaagangtggcagcctctggaagtggat

SEQ ID NO: 685044 - DNA, 317 bp, Homo sapiens
acttagcccttgaactttaaaaagttatttccaaaggtgtaaataggccgggcatggtggctcccccctgtaatcccagccctttgggaggccaaggcagggggttcctttaggtccaggagttttagacgcctgggccaaaatggtgaaaccctgtttttcccccaaaaattagctgggggtggtgatgggggcctgtaatccccagctactcgggggggtgaggcaggccagttgctttaacccgggcaccaaaggttccagtgagccgagattgtgtccctgccctccagcctgggggccagaggaaggctcca

SEQ ID NO: 685045 - DNA, 185 bp, Homo sapiens
gtctctagaggacccctatgtgacgtaaaccttactacaatagaaaattcacatggaaaagaaaccctacaaaaggtgaagaaggtggcaaagcttttaagtgggtcctcaaaccttacggaacataagaatattcatacggaagagaaaccatacaaatgtgaagaaggtggcaaagcttttaa

SEQ ID NO: 685046 - DNA, 1566 bp, Homo sapiens
gtgttccctgcctgaggccagccgcactcctgtgacgtgtgccgagggagccaggccgtcctcccaccagaccaccccatccgcgaacagccgaccagtacctactgcggtaccgccgggatggacgtacctgaccacctgacccgacctacgaccatgcaccgtgacctgcccatatagcctggcacctgtcactgactgacatccagaacacacagaccacgtgagcgccgtggatattgcaagctgctaccaatgtacggactatgacgacgcagctgcatataatactaagtgtgcagaccgactgatacatcgagacgctatactatacactatacttgcggaccttggaccccgtgacggatgtgccgagacgcgagtaatgagagtagtagagccacaaaccattgggcagcagagagccaaagcaatcagagaactcatctgatagatcacccataggacacggggcacacaaactgcattggaggcccgagagcaaagatacatagaaaaatgcgggcgcaaagcaatccaccagccacagcacagagccacctgaggtagaaacctttggtaagaacggggcacgcggagtaccccggcgagaaggccacgattacccccgtaagtggggcggtacgtccgaggatgggatggaagggcgccaaactacgacccgaccagctcgattcacccggtggcggatcgtcaaatgtgggcataactgagccagcggactccacgcaggacacaaggcccaccaaaggccagggccatggacacagtggcctaacgagcaagccccaaccgcggagcccctcggcgacaaaacccgaggccaccaagagacaacagagcaaacacaacacaccaggaccggaggcccaaggactgggaaccaccatggagaaacccacctcctattgaccattcacaacagccaccaccaaacaacaccgggactcgggggctcaaacagagacttcccacagcacgcatggatctgcagcaaacccagctgggaacaacgagcatcgggcacacatgagcgacagcacaggcacagagcaccacgacataacaacagaggacaagggagccaggagcgccagcagaagggggagcaagacagaggcggcatatagacccacccgacgacgaaaaccgccacacacacacagtcacccaccaaaaccaaagcgccaccgcaaccagacgcagcacacctgccaaaaacacacacaaaggaggacggcacctcacccgagacgacgacccgacaacccaaaggcgggagaggacgggccacgcaggaacacccaaaacggacaacgccaggggaagatgagcacgccaccacctgagccgcgccggcagccagacaccagcagcaacaggaacaccgagacgaccggaacgaagacgacgggcccacacgccagccacgacccatccaacaggagcagacgaagacaacgcccgccacgacccgaaagaaaagaaagaagagagacgactgtcggacggacaacaccgactagtcagacaacagacaacaac

SEQ ID NO: 685047 - DNA, 894 bp, Homo sapiens
ccgccgagggaggacatgcggggcctggcgctggcgccgagacgccgcttagcggccgccactggagacactccctcccgcctcccgggtctcctggcggcggccggagtgatggctgacagctggggaacctggtgagacccctcctgccctcccccgcggtggcatgcgggcctgatcccctgcgctcctggctgctgatgggactggcctgcgatgctgctctggcctgagtgttaccctggccctggcccttcctcgcttccctcgactattccacttgctgtctcctgctgccccggctgtcatcctgctgagtccctctgactggtgagtggaacgattgggcttgcactggggatgcttgtgcaagggactgatgcattgtggccccagcatgtgcctgagtgatgtggctcgtgccctgtgctttgcgtgggacacagttgcttctcggtgtctgtgcctacggggctttcttgctgtcaacctgaatgcttgtgtgccttctgaccttgtgggtgccttgtggagcctgaaactggggtacccccggcttggtggttgatccttgggttggggcactttggctgctgctcgtggtgcttgcttgcttgcttgttctctatgcatagtgagcttaccgagctgtgggcacggctgggcaatggcaggccagggcggcccctgcaaaaaaagcgggaagagaggccctgccccacgacaaaggcggggggaggggatggcctgggttagggcctgttgcctgggcctgggcggcccccacggaaagaccttggggcattggctggaagaaaatataccgggaaggcgaggggaacaacgaaacgaaagcaaggaaccgggaaggacaacttggcggagaaggtcaaa

SEQ ID NO: 685048 - DNA, 113 bp, Homo sapiens
taaaaaacttgctctgtaacaaaagggaatggttaatttaattttattttatttttttttcgagatagagtctcgcactgtcgcccaggctggagtgcagtgggcaatctcgg

SEQ ID NO: 685049 - DNA, 192 bp, Homo sapiens
ccgttgggcacgcccgttgtaacaaacatgtagtggctgggcgcggtggctcacgcctgtaatcccaacactttgggaggccgaggcgggtggatcacgaggtcaagagatcgagaccatcctggctaacaaggtgaaaccccatctctactaaaaatacaaaaattagccaggcacggtgcgttggcccaa

SEQ ID NO: 685050 - DNA, 230 bp, Homo sapiens
gcccccttttgttttgggtttttttggggggaattaaggaaaaataagggggggcaggtttggaaaactgcttcccggggatagtttataaaaatcctgcccaaaggagggcccccttttctgttgggataaccaaagggccctttggggggggggggggggcccctttccccctgggggtttttttggggaaggttctccccgaatttcaataaaccgggggccggtga

SEQ ID NO: 685051 - DNA, 171 bp, Homo sapiens
  misc_feature (53)..(53): n is a, c, g, or t
  misc_feature (82)..(82): n is a, c, g, or t
  misc_feature (98)..(98): n is a, c, g, or t
  misc_feature (153)..(153): n is a, c, g, or t
  misc_feature (168)..(168): n is a, c, g, or t
agagaacccaccatggtgctgtttcctgccgacaagaccaacgtcaaggtcgnctggggtaaggtcggcgcgcacgctggcnagtatggtgcggaggncctggagaggatgttcctttccttccccaccaccaagacctacttcccgcacttngacctgagccacggntct

SEQ ID NO: 685052 - DNA, 170 bp, Homo sapiens
aacagaccaacatagagctgctacaactactcaaagtagctgtgcggactattgtagatgctgtcccacaaccctatttggtcccattactgagccgtacgcacgaccatgcagcaagtgaacgctgacctccgcactcagcgcattatggttgactactttagtactcc

SEQ ID NO: 685053 - DNA, 663 bp, Homo sapiens
  misc_feature (87)..(87): n is a, c, g, or t
  misc_feature (91)..(91): n is a, c, g, or t
gtttctttaataaacagcttaaaagagcaaggctagactgggaagagggtcaactcttgctattgttatgctataatgctcaggtcnaagnaatcaatgaagtctaacagtgtctacatatagcagtgataggtgtagtattagacatatagatgtatagatatataaagtacatggtatgaaaagcatgccgtgctaatatgaacagatataaagtatgtcacttctcgtgtactaccatcataaagatcgatttccagtatgcctgtcgcctggcatcattaacacactcctcatatggtctatgttgaccatgaatcatcacccggtgatgccaggagactccgcatatgtgtagattcagcgcctagaggtccgccctaccctgtgtgctgtgtgttaccatgactccagaaataatgaatcgcaacctgcattattaagtccacagctgagtgtcaaatctgactagccacagtagcagcagaggcacatgacgcggcagtttgttataatagcaacaagatttcttataatgcttccagttcaagtcagaattaaggtgacattaggtcccagcagcttaacagagttgtgaatgttatgctgttgttctttcaaatgtacccatcctaaagtaacttgaaactttgtaagatgtac

SEQ ID NO: 685054 - DNA, 355 bp, Homo sapiens
gttagctcttcacaaagattagcttttctcacataaaaccatttcagaatcctaatcctgaggccgggcacggtggctcgcgcctgtaatcccagcactttgagaggctgaggcaagtggatttcttgaggtcaggagttcaagaccaacctggccaacatattgaaatcctgtctctactaaagatacaaaaattagccaggtgtaggggtatacgcctgtaatcccagctacttgggaggctgaggcagaagaataacgtgaacccgggacgcggtgatcacaccattgcactccaaccccgggtgacagtgcaagactctatctcaaaaaaaaaaattgatgttagtgagaa

SEQ ID NO: 685055 - DNA, 341 bp, Homo sapiens
  misc_feature (263)..(263): n is a, c, g, or t
cacctagaggaaaaacggcgcctatcgaagctatctgttgtttatcgccgccaccaaccaacaagattctcaaggtcactcaataaacacttgttgacttgagcgaccttgagaaacttgttggctggtgggagagtttgacgcgccccaagattttttaaaattacaatgaaaaaatatattagaaaataaaatacctaatagaagtcattaagagaaatcttaatcactaagaggaaggagcctcacagcactccattgantttttgccttctctcatattgcctaattttaggaaagaatatcatcacccacaattcttaggaaaaatgaaatgggct

SEQ ID NO: 685056 - DNA, 98 bp, Homo sapiens
tttttttttccaaaaacttgggctttaggggtagttcccaaataatgaattttccccggatgggcagaagtcttgtaaaaaaaagcatgtaaagtgta

SEQ ID NO: 685057 - DNA, 161 bp, Homo sapiens
tgctagccatatgaagtacatgactaggaactgttgttggtgtgccatgtcagtcaatatactctgtcagcctatatgttgggaaacgtataagtgatcacatgattactatggggtatagttttgtaggtacgaggtgaggtggggataggagcggtagg

SEQ ID NO: 685058 - DNA, 540 bp, Homo sapiens
gagctctccaggtctcccagcaccaggttcctgttctgagggaaaaacccaaaagggtcaaaagcagttcttgcaaaagagagaagacccccaagtgccctcccctagaagagcggccaaagacaaacacaaagacgaagattcggagctggttggtgtttacgcctggagaaagggacaagctctggtgaggtcgctgcttgggccccctcccgtcctccgcaggcaccatagcaaggatccctcgagagacccggctctcaccgtggacttaggagacagcgagaaagtcatagctgccaaggtgctcaccggtttgtgcccagttgcccgatgccacctccgcccacagtgaccagcaggtgtctgggaacacacccagcctggcttccttcgaccagccagcgaccatacagacggccatggccatcctacaagacctgcgccagcaaatccaggctgggctggagctggcccaggcccgcaagggagggcaagagctcgggccatcaaagcggaggctgcaggacgtggcaggga

SEQ ID NO: 685059 - DNA, 363 bp, Homo sapiens
gtcagtaacctcaatggaacccccgtgctggaaatcacccagggattgggctttcctgcattttgtatcctgggcagaggggtcctgatcattttttcacaggacttggggtttttttcacctacctggaaaaatagattcctccctgactttggtgtcctaatagttcccatgggagcccctttgaccatttggggttcatttatcccccttgagcttctcgggggaattatttttgggggaggggtgttggatcaaataaaccgaaggagggcctgctatgccaggctgcctttcctaaaaatccttgaaaaatttttggacatcagtttagaatcagaatacaatccagccctttcctga

SEQ ID NO: 685060 - DNA, 928 bp, Homo sapiens
  misc_feature (928)..(928): n is a, c, g, or t
aggagaggactggatgcgcctgcagggatcggaagccgtgtagctgtgtgagaggtctactcgcatctcaggggagatccttcaagcaatcactatgtcaatagacacaggtgtgacccttccttcatatgaggaatgactcaggcatcaaaattcattcgatgcgctaaagaggcaccatgtcgaacccgttgtaatagcgggtttggccagcaagtgttgcatatgggtgatattgatgctgaagagctgggtgaaatagctcaggaatgtccatttcatcgtgatccacatgctgtgtgggagggccagtgcgcttgtggtaggagcaatgagtgtggtatgggctatgccatgtatcgggaatacgtagagtgaaaactagagaccttaagactgaagaggatgctgtcgttggtcctggttggagaggagcttgaattaagtgaagatgtctgattatgtaagttgcctattatttgttgggcaataagactattttgtatgggtgtaagatggttacatgggattttgtagtatggggttccatatcttgcagggtttgatttgctgtgggggaccgagttatgagtgaatagtttagtaaacaaggtcattcagggaagtcaggtgagtaaactgttcctaaatgcacttgagggttgtggccttgctacctcgtaaattttagatgacctggctaaggaaaataacgcccaaccgtaggtatcccgttgcggggcagtggaaatgggggcgcaaaggccatatgccggataccttgtgcggtttgagggtgcgcttgtaaccgccacagaggataaaggggcccagggattttgtttaccccgtgaacagggattaaacggaaatcagtggattccaaaacaaatactcttttcctatgtaagtattacattatatattn

SEQ ID NO: 685061 - DNA, 199 bp, Homo sapiens
gattcggcacgcggagagaactaatgctgccacttcacatccactcaccacatcccacctacagactaccaccttcgagatcaggacaacctggaaaatgcagagttggtatgctttcagcattgatttggcagcacaaccctgagggccgtcagctggttagtttctactactcgagtgtccccctgccccacagatt

SEQ ID NO: 685062 - DNA, 965 bp, Homo sapiens
acatcaacgcacgggcgaggaggatgtggagcctgagtgcatcatggagaaggtggccaacggcttcaggtgccacactacagctttcatcaaggagagtggccgcttccaggacgtgggaccccaggccccagtgggctctgtgtaccagaagaccaatgccgtgtctgagattaaaagggttggtaaacgacagcttctgggccaaagcacgagaaggaggaggagaaccgtcggctggaggaaaagcgggggccgaggaggcacaagcggcatgcgtggcagcaggagccgccgggagcgtgagctgcgtgaggctgcacgccgggagcagcgctatcaggagcagggtggcgaggccagccccagaggacgtgggagcaggagcagaagtggtgtccaaggaaccgaaatgagcaggagtctgccgtgcaggcgagggagatcttcaaggcaggaaggaggagggcatgtcaacaactgcattatccagtcctcaggcctggaagctgaggagccccttctgcagaaggagtcaaccaaccagagacccatgtttggcaagaggagccagctgctgccagtctccagggccgagggcagatcttccctgctgaggagctgggccaaagggagtcctcccatggctgctggcagcgcgaaggaaaggggctgagtattgagcgaagcttcaagaggccgaaaccttgtaagaagaagccccaatggtggcaagcagcacgtggtgggtcttgcgtcaaatttggccacacccttcggggcatgggctcaggggaggggtcttgcccggcctgacactacaggcagcgagaacaagattctttaaccgagaaccacaaggcaagagaagaacaaagaggggatgaaagacggatagcaagagatcccacacaggagctcatgcgcgaaacagcccacacaagacactacacacgagagaaatc

SEQ ID NO: 685063 - DNA, 218 bp, Homo sapiens
  misc_feature (132)..(132): n is a, c, g, or t
ctaattggttcttcgatgacgtctgtttcattccactgcccttcaatttaatgaccctgagttcagtggtagaattgtagaattcaaagtcaaagggttagcattgtggattcccagccattcattatgganttgctttttgtatcctaacaacttctttttcagaaaaaatttattataattgatttacagtgttgcgtcatcgaagaaccaattag

SEQ ID NO: 685064 - DNA, 347 bp, Homo sapiens
  misc_feature (45)..(45): n is a, c, g, or t
  misc_feature (50)..(50): n is a, c, g, or t
  misc_feature (61)..(61): n is a, c, g, or t
  misc_feature (68)..(68): n is a, c, g, or t
  misc_feature (82)..(82): n is a, c, g, or t
  misc_feature (107)..(107): n is a, c, g, or t
  misc_feature (232)..(232): n is a, c, g, or t
  misc_feature (328)..(328): n is a, c, g, or t
  misc_feature (339)..(339): n is a, c, g, or t
cattttcccccagtgtgtgtctcccaaacacttgggaatggtgcntgctntttagtttatnccctggnccgaaagccccacngccaaatttgtatcatgattagggncagcagagaattgtgccctccactagggtagccacagatggccatggtgcacttgaaatgtggctagtgtgactgaaaaactgaattttaattttattttaattttaaaagtgatgtttggctanacacggtggctcgcacctgtaatcccagcactttgggaggctgaggctgacagatgcttgagcccaggagtttgagaccaccctgggcaacaaagnaaaaactcatnaccaacaa

SEQ ID NO: 685065 - DNA, 404 bp, Homo sapiens
gtaatataagtgtagttacttctgctggtttgcagcattgcacttgcatgagatatatttttccacgccttcgctttccatctaagcatgtccttgccagtgaagtgcagttcctctttggcaatatacagttgggtcttgtttatttgtttttttaaatagattaatccactcagtcttttcattaaataatttcatacatttactttccagttaatgactgacaggcaatggcctgctatggacattttgttaagaatttttgcatctatgttcatcagggatattggtctgtagtttttcgtcgtgtaacgtccttctctggctttggtatcagggtaatactggcctcctaaaatgagtttagaagtatttcctcctctttagttttttagaagagtttg

SEQ ID NO: 685066 - DNA, 115 bp, Homo sapiens
  misc_feature (3)..(3): n is a, c, g, or t
tgntatattggtgagctgattggtaggggtgctaggaacttgtaattagtattaggaggggggttgttagggggtcggaggaaaaggttggggaacagctaaataggttgttgtt

SEQ ID NO: 685067 - DNA, 1117 bp, Homo sapiens
tggtataaaaacagatccatttctgggtaatcaaagcacatttgttgggtcttcctccaacccttggcatttgatttctaaacattccttcatatgcctttaatggaaagccagcaattaatcccaggggccctacttggaatttatctggaggcagctacagattggccctgcaagatgagttttgggagataaatgaaatacctgggacacacactcacacaagtaacaccacagcaaaccctcggagtacgtgctaaggtataccgtggtgctcaaactccgcacaggactcaatatagcaattaactctctggagtgtatgcaatgtgcccattggataataattatttaacagagcacactaataattggataatacgacttactactatattcaagaactcctggggatagtggatttatacaccattcctccccagtgggggcaacaccttccttccccttccctaggaagggcgaaacctgcgaacacaataaaacacgcctgcaggccggacagaccttgggcatctcccactcatagcgaacgccaccctcctaaaacaaccacaaacgctgaacaagaacgcgccccagcggcgctgaatttctcacccatggcgtcgcccaagaaatccacaggctactaaccaggctcggcactggcgcacacgtcgcaccgctcaacacgtagcagagtaactcccatgggtatcccacagacaggagcccactcaaaaactacccgtggaacctggacctaatctaacgcctatacaacaagaggttgcacgactcatcaccccgaggacaaacacatacccttctagcccccccgtgtgtctaaaacaacctcccaaaaaactacaatcaaccgccccacacataatacacgaaacaaactctccacgacaaccagacagatacccaccatcaaccacatccaaccagggcatcagcaaccagctactacataaccacccacatagcggcatagtacataccaaacccccaaatacaaccagagcgcatatcaaccaacgtcgcgcaaacaacacaaaaaaaacacaaaagaacaagacagcgggtcccccccaccgacgaaagaaccccc

SEQ ID NO: 685068 - DNA, 580 bp, Homo sapiens
  misc_feature (331)..(331): n is a, c, g, or t
  misc_feature (426)..(426): n is a, c, g, or t
  misc_feature (478)..(478): n is a, c, g, or t
tctttcaggggacaggattgggcaacagtatagggtgacttcataggttctgtttcttatgccaggaggggatgtccacgtagttagttacttgatgataaaactttatttatttatttatttatttatactccagcctgggcgacagagcgagactccatctcaaaaaaaaagaaaaataaccttggctagaaataggtcatttgattcttggctaattggcaactctacagtttttgatatacaatgttcaatctgatgtgcaaggcaattgtatctcgcaaagaatttgagaatttgaaatgtcgcacacattttaccacacaaacangtgaattaaacttttacagaatagtaaaaaagcattgttgagcaaaataaattaaatgaaaagacataaaggaataactagtgatgaaatagcantaagaacgggaaacatgaaagagctgcttttaaagcaatgttagaagcacanaataactgattttttagaatcgtactggagtccaaatcacttttaccacatctaatttacatagtgaaagattgtaaacggatcatgatgcacacttgcacg

SEQ ID NO: 685069 - DNA, 317 bp, Homo sapiens
gggtatacggtatttaagctctaggagatacctatagaggctacatcctatgcgtcaccgccacatagtgaggaggtctaggtattgacgcaaagcggacgctcgaaatggtgagcctatttaaaagcaaagatttagaagaaaagaaagaagaaaagatactctatgtgactgatccacaaaaaggtgcccacgaaagtgaactctttgctagtagcactatctgtacttacaaaagaagcatgactgtgcgactaatgccagagaacagtgagaacatatccaaaaagtgttatctcctgacagccaaacggaac

SEQ ID NO: 685070 - DNA, 302 bp, Homo sapiens
  misc_feature (282)..(282): n is a, c, g, or t
  misc_feature (289)..(289): n is a, c, g, or t
aaatatgattcacataccattcactttatttattgaaatctgcaattcagtaggttttagaatattcacagagctgtgcatcgatcaccacagtcacttttagaacctttcattaccctatagagaaatccataccccttagccactacctcctactctccccacctaccttcacccccagccttaggcaaccattgattaatttttttgtcactataggtttgcctaatctgggacaaataggaattgtacaatatgtggatcctttgtgggctttttttncctgttnggacagtgttttc

SEQ ID NO: 685071 - DNA, 423 bp, Homo sapiens
ccaagcaaaggttacgggggggcctataaaatggcaaaaggtttaaaggtctaagctcccccgttggggcgagaataaaaaaaacggcccctggggcaaataaccccccccccccccggcccatgggctggggccttgtctctgggaaataaatatttaaaaggacggcatgggcctcaacctccccttaaaggcctttaaaaccaaaggaaaccgaaattctttccccccccgtggagagttttccaggaaactttttttcccttaaggacattccccgtgagcctttataaaaaaagggttttaggtcccccccttttcccccccccattttcattgggactttcagttttcctttttaaacccccccccctccccttagccatgttttttgggaagtaaaaaacttggtttagggccggg

SEQ ID NO: 685072 - DNA, 160 bp, Homo sapiens
actggctcaagtcatgaaagcaggcattcagcaaacaaacaccaaacaccaaaaccagtcaaacagcaaaaggccccaagcagcagccaacagcatcaccttttgcaatcagcaggttccagcaccagcagcacatcagcaacaacccaccacatcagtg

SEQ ID NO: 685073 - DNA, 259 bp, Homo sapiens
gtactatgtctggactgtatgtcatggtgaccctgtcactgccctgatttacagaaataaatttgaaaaatcggcagtctgatcaataaaatattgtgataaaaaagagccccaatatgggctctttttttgacctttttgccatttaggcagtcaggcttttacggatttcatcttcaatgatactgatttcaatctggctaaatttgcggatttcgccttccgcatgtttttccagcatgccgccgacctaatggca

SEQ ID NO: 685074 - DNA, 228 bp, Homo sapiens
ccaattaaaagacttggacttggcaaattggataacgagtcaagactcatcagtgtgctgtattcaggagaccctatcttatgtgccaagacacacatagggttcaatataaaggggtggagggataatttaccaggcaaattgtaaagcaaaacaagggccagggattgacatcctagtcttcgaacacaccagcacttgaacccaacacaggtccaacacggacaa

SEQ ID NO: 685075 - DNA, 476 bp, Homo sapiens
  misc_feature (173)..(173): n is a, c, g, or t
  misc_feature (182)..(182): n is a, c, g, or t
  misc_feature (197)..(197): n is a, c, g, or t
  misc_feature (202)..(202): n is a, c, g, or t
  misc_feature (210)..(210): n is a, c, g, or t
  misc_feature (213)..(213): n is a, c, g, or t
  misc_feature (216)..(216): n is a, c, g, or t
  misc_feature (218)..(218): n is a, c, g, or t
  misc_feature (223)..(223): n is a, c, g, or t
  misc_feature (228)..(228): n is a, c, g, or t
  misc_feature (231)..(232): n is a, c, g, or t
  misc_feature (234)..(234): n is a, c, g, or t
  misc_feature (236)..(236): n is a, c, g, or t
  misc_feature (250)..(250): n is a, c, g, or t
  misc_feature (430)..(430): n is a, c, g, or t
aggaattttcttgaagatggagaaagtgatggctttctaagatgcttctttcttaactctgggtggattttaagtataaattttgttctattggtgatggtattggtttggatttgttgtgtaactgttgctatagctgtggagcagtatgtttcttttgaaagctgagtatntatggtganttggagtttatgaangaaanaaagttanaanagnanatcangtttnttnntntngtggttgttagatntaaaactgaagatcatgaagaagcagggcctctacctacaaaagtgaatcttgctcattctgaaatttaagcatttttcttttaaaagacaagtgtaatagacatctaaaattccactcctcatagagcttttaaaatggtttcattggatataggccttaagaaatcactataaaatcnaataaagttactcaaatctgtgaagactgtatttgctataacttat

SEQ ID NO: 685076 - DNA, 287 bp, Homo sapiens
agtgatgacgagcccggccgctctacgttcctccccgaacgaaacgaaagcctgccgccatgagcgcaaccgccacagccacgcctacagacggccgcgccgtcggtacggccatcgcctgctacaccctgtgggggctgctgccgctgctgttcatggccatggccgctcatgggttcacggcgcctgagatattggcgcaccgggcggtctggtcggtgttcatcgccgccatcgtcctgctgctggcgggccagtcggccgaggcgcgcaaggccctgtccaat

SEQ ID NO: 685077 - DNA, 473 bp, Homo sapiens
gctcggacccactttccgagtagctattatactagcgtttaccatctcacttctaggaatactagtatatcgctcacacctcatatcctccctactatgccaaggtggggataagtgtggtttccaagaagatataaaatatgaataatactatcgctggtcattatagctactctcataaccctcaacacccactcccttttagccaatattgggcctattgccatactaatctttgccgcctgcgaagcaacggagggcctagccctactaatctcaatctccaacacatatggcctaaactacgtacatagcctaccccttccttggactatccctatgaggcataattataacaagctccatctgcctacgacaaacagacctaaaatcgctcattgcatactcttcaatcagccacatagccctcgtagtaacagccattctcatccaaaccccctgaagcttcaccg

SEQ ID NO: 685078 - DNA, 468 bp, Homo sapiens
  misc_feature (219)..(219): n is a, c, g, or t
  misc_feature (267)..(267): n is a, c, g, or t
  misc_feature (353)..(353): n is a, c, g, or t
  misc_feature (365)..(366): n is a, c, g, or t
  misc_feature (369)..(369): n is a, c, g, or t
  misc_feature (372)..(372): n is a, c, g, or t
  misc_feature (383)..(383): n is a, c, g, or t
  misc_feature (399)..(399): n is a, c, g, or t
  misc_feature (401)..(401): n is a, c, g, or t
  misc_feature (410)..(410): n is a, c, g, or t
  misc_feature (449)..(449): n is a, c, g, or t
ttggtagagccaaaaattcaacaagggagtaaagaagttcctccaaggtgggttttgctcaggacaggcagacatttcttgtggctagaagtgagtggcaacaggtcctccggcagtgatgagctacctggcctcaggagcattcaagtagaccgaaggccatgggaggttccagaagctggagcaacaggccaggcttggatcattgtgaaggccttnctggggcagcaggtgtacactctgcttcatgagaagaaagtccctgangggagaagtgagttttgtccaaggagtttggaagagaaaccttcagggacagaggacagccaacaagtttacttctgaacttgggntcgtttgaaaannttnaanggccaaagccnttcctttttattgccncntttgttttnagaaaaaaggggccttttttgggccccaaaaaccggttnttaaaaaaaaaggcttggg

SEQ ID NO: 685079 - DNA, 166 bp, Homo sapiens
  misc_feature (16)..(16): n is a, c, g, or t
ggggtccccaagggcncccgggccccccaaagggttttgggttttttttttttccccccttgggggaaggggggggggggggcccccccccccccccctggggtccctttttttggggggggggggcccctttttttttttttttcaataaccctgggggggggga

SEQ ID NO: 685080 - DNA, 889 bp, Homo sapiens
ggccaccgtcggtccgctaagtctgagtcctgtgctttctctctccccgagtacagcatgagcttcacctactcgtctccaccttctccgtcaagtaccggtccctgggctctgtccaggcgcccacgttactgccgcccggagcgggttccagcagctgcggggcccgctgtctatgctaaggcgctggggtgctcgtggttcccggattctccgtgtcccgctccggcctggcttcagtgggtcgggatggggtccggggggcttggtcgcgctgggatagcgcgggggtctgggcggaattgggatgcgtccgagcaatgatgataggagagcatgtcgagccttggtcgaacgactggccctctttcactctaggacaggagtagaccggagcctggcagaccgagaatcggactggctcggagagcagacagactctccgggagcactgttggagaaaggacagggacccacagggtctactagactgggagaccattagcttctgagatgctatgcagagtggacactagacgggctcaggatctatctgccaagagtaactgtaggacagatagtcctcggcatcagtaccttgcgagcattgtagtggagccctgtcttgcatgctggatgagattccatggagtcccgtcatgagacatgaactggccgatgcgccagatctgtggacgagctgacttccatggtggtccgacataggatcgtggatgatgccaagtgtcatacgagtgaagctggaagacagacgaatcgcggctctcaaggaggagctgctcttcattgaggaagaacccgaagaggacgtaaaaagggggtaagaggccaaaatggcaggtctgggttgaccggaaggaagatggcc

SEQ ID NO: 685081 - DNA, 386 bp, Homo sapiens
ctccaaaattcaaaaaaaaaaaaacctcaaaagttgggacctggtattatccattccattccacctattctatttcaatcaataagggattccctgagcaccaacggggatggcaagcacggtgcttaagtgtcgaggataaaaagagaacaacactttctggccactaaaagaaagccttatagtccagaacaagaaatgagactttttccctttcccatgtccagtccctaggattatctttaatattttctcttttcccaattcttttttcctgggtggggggggcagggtctggctggtttcacccagtcgggagtgcaggggagagatcagggctcacggtagccttgacctcctaggctcaaaggatcctcccaattcag

SEQ ID NO: 685082 - DNA, 524 bp, Homo sapiens
attctcagaagcattcttgctggcatgtccatggctgtcatcctggcactctgctcactagtggtggactccttcagcagagtagtagatgatgttggacagatatgtattcttgagtaatttatgcagacacgtcagaaatcaatatcagtcataagatactcatagctgtcagcaacttgcaactggtattaagggcaaaagatgggcttttcttctcgtcttataggcagcatgacagacctagaattcattaacagatgatggagccttcatcaaattcatatccagaatttagtaattcaagggcaatgactgacgcatctccaatagtggggggctttcttcccacttccttgaatgccaccagaaactggtcagaatgagtcctataaagtatgcctctgatatagtcaccaattccaacaagcatcacttctttcccagctgctgttagtgtagcaaactcgctaatccatctgttaagcaatggaggaatgaatagaaccacacagtcctcgatc

SEQ ID NO: 685083 - DNA, 907 bp, Homo sapiens
tgtagtggctcacacctgtaatctcagcactttgggaggccgaggccggggatcacctgagattaggagttcaagaccagcctgaccaacatggagaaaccccgtctccactaaaaatacaaaattagccgggcgtggtggacattcctgtaatcccagctactcgggaggctgacgctggagaatcgcttgaacccggggggcggagggttgcaatgagccaagattgcgccattgctctccagcctgggcaacaggaggcaacaaacctctgtctcaaaaaagcgcagagtaaggcctcaaatataacagggccattattcctctatgtcttctgtatgaaaggccacaaaggaaactgcttaagaagttcaggacctctattttacatcaagaatcttatacattttcaatcagatgcagtaccggaatctgcgaaacagtccgtgaatcccacatgccaagagatgttgagaagaaccgccattcaaatgtggcacacggattgaaacagacacttctcgggagacgacattatggagccacaaacaatgaaaaagctccacttacctgattcatcagagaacatgccaatcaaaaccacaatgagatacatctcatgccagtagaactgggccttattaacacgtcaaggaccatgatgctgtgtaggcgtgacaactcgactgtttaacccgtggtggtaaagttataatcaccctgtgagcagaatgcaaccacaggttgacccgaatcactggccaacaccctttggttttccaggaagatcttccttataatcacagtggatcgcatcacaacattccaccgcctgtaggtaaaggcttcaacggtcgcacaaagagttggtggagagcaccaccacacatcgtaaaaacatgtgctc

SEQ ID NO: 685084 - DNA, 5097 bp, Homo sapiens
actttagctctctggccggcgcctctgttgcccggaagggaggcaagcccccttagagttgccagtaacggacatggctgcggcccccggaggaggggacgtgaagtgaggagggggttgggaggggagaggacgcgggcgaggaagaccagccccggggccccgatgttgtgactgtgacagactcactggggtttgtacatgctggggaggagccttcctttcaggggtgaccacattcatctgggcatgcctgcagtactcttggcccatggacctgaaggagaagcacctgggcgagcctccctcagccctgggcctgtccacgcggaaggccctcagcgtcctgaaggagcagctggaggcagtgctggaaggacatctcagggagcggaagaagtgtctgacgtggaaggaggtgtggagaagcagcttcctccaccacagtaaccgctgctcctgcttccactggccgggggcctcactcatgctactggccgtgctgctgctgctgggctgctgcgggggacagccagccgggagccgtggggtggggctggtgaatgcctcggccttgttcctgttactgcttctcaaccttgtgctcatcgggcggcaagaccggctgaagcgtcgggaggtagagcggaggctgcgagggatcattgaccaaatccaagatgccctcagggatggcagggagatccagtggcccagtgccatgtatccagacctccacatgccttttgcgccatcctggtccttgcactgggcctacagagacggacacctggtcaacctgccagtcagcctgctggttgaaggagacatcatagctttgaggcctggccaggaatcgtttgcttctctgagggggatcaaggatgacgagcacatcgtcctggagccgggagacctcttcccccccttctcccctccaccctcaccccggggagaagtggagagagggccacagagcccccagcagcaccggcttttccgtgtccttgagacccctgtgattgacaacatcagatggtgcctggacatggccctgtcccgaccagtcactgccctggacaatgagcggttcacagtgcagtcggtgatgctacactatgctgtgcccgtggtcctggccggcttcctcatcaccaatgccctgcgcttcatcttcagtgccccgggggtcacttcctggcagtacaccctcctccagctccaggtgaatggcgtcctgcccatcctccccctgctctttccagtcctctgggttctggcaactgcctgtggagaggcccgtgtcctggcccagatgagcaaggcctcacccagctccctgctggctaagttctcagaggatactctcagcagctatacggaggctgtctcctctcaggaaatgctgcgctgcatttggggccacttcctgagggtgctcggggggacatcgccaacgctgagccacagttccagcctgctgcacagcctgggctctgtcacggtcctgtgctgtgtggacaaacaggggatcctgtcatggccaaatcccagcccagagactgtactgttcttcagcgggaaggtggagccccctcacagcagccatgaggacctcaccgatggcctatccacccgctccttctgccatcccgagccccatgaacgagacgccctcctggctggctccctgaacaacaccctgcacctttccaatgagcaggagcgtggcgactggcctggcgaggctcccaagccccccgagccctattcacaccacaaagcgcatggccgcagcaaacacccatctggctccaacgtgagcttcagcagggacaccgagggtggtgaagaagagcccagcaagacccagcctgggatggagagcgacccctacgaagcagaggactttgtgtgtgactaccacctggagatgctgagcctgtcccaggaccagcagaacccctcctgcatccagtttgatgactccaactggcagctgcacctcacctccctcaaacccctgggcctcaatgtgctgctgaacctgtgtgatgccagcgtcaccgagcgcctgtgccgattctccgaccacctgtgcaacattgccctgcaagagagccacagcgccgtgctgcccgtccatgtgccctggggcctctgcgagcttgcccgcctcattggcttcactcctggggccaaggagcttttcaagcaggagaaccatctggcgctgtaccgcctccccagtgccgagacaatgaaggagacatcgctggggcggctctcctgtgtcaccaagcggcggcctcccctcagccacatagatcagcctcttcattaaagacaccaccaccagcacagagcagatgctgtcccatggcaccgctgatgtggtcttagaggcctgcacagacttctgggacggagctgacatctaccctctctcgggatctgacagaaagaaagtgctggacttctaccagcgagcctgcctgtctgggtattgctctgccttcgcctacaagcccatgaactgcgccctgtcctctcagctcaatggcaagtgcatcgagctggtacaggtgcccggccaaagcagcatcttcaccatgtgcgagctgcccagcaccatccccatcaagcagaacgcccgccgcagcagctggagctctgacgaagggatcggggaggtgctggagaaggaagactgcatgcaggccctgagcggccagatcttcatgggcatggtgtcctcccagtaccaggcccggctggacatcgtgcgcctcattgatgggcttgtcaacgcctgcatccgctttgtctacttctctttggaggatgagctcaaaagcaaggtgtttgcagaaaaaatgggcctggagacaggctggaactgccacatctccctcacacccaatggtgacatgcctggctccgagatccccccctccagccccagccacgcaggctccctgcatgatgacctgaatcaggtgtcccgagatgatgcagaagggctcctcctcatggaggaggagggccactcggacctcatcagcttccagcctacggacagcgacatccccagcttcctggaggactccaaccgggccaagctgccccggggtatccaccaagtgcggccccacctgcagaacattgacaacgtgcccctgctagtgccccttttcaccgactgcaccccagagaccatgtgtgagatgataaagatcatgcaagagtacggggaggtgacctgctgcctgggcagctctgccaacctgcggaacagctgcctcttcctccagagcgacatcagcattgccctggatcccctgtacccatcccgttgctcctgggagacctttggctacgccaccagcatcagcatggcccaggcctcggatggcctttctcccctgcagctgtcagggcagctcaacagcctgccctgttccctgacctttcgccaggaggagaccatcagcatcatccggcttatcgaacaggctcggcatgccacctatggcatccgtaagtgcttcctcttcctgctgcagtgccagctgactcttgtggtcatccagttcctttcttgcctggtccagctgccgccactcctgagtaccaccgacatcctgtggctgtcctgcttttgctaccctctgctcagcatctctctgctggggaagcccccccatagctccatcatgtctatggcaacggggaaaaacctccagtccattcccaagaagacccagcactacttcctgctctgcttcctgctcaagttcagcctcaccatcagctcctgcctcatctgctttggcttcacactgcagagcttctgtgacagctcccgggaccgcaacctcaccaactgctcctccgtcatgctgcccagcaacgacgacagggctccagcctggtttgaggactttgccaatggactgctgtcggctcagaagctcacggccgccctgattgtcctgcacactgtcttcatttccatcacccatgtgcatcgcaccaagcccctgtggagaaagagccccttgaccaacctctggtgggccgtgacagtgcctgtggtgctgctgggtcaggtggtccagacggctgtggacctgcagctgtggacacacagggacagccacgtccactttggcctggaggacgtgcccctgctgacatggctcctgggctgcctgtccctggtccttgtggtggtgaccaatgagatcgtgaagctacatgagattcgggtccgagtccgctaccagaagcgacagaagctgcagtttgaaactaagctgggcatgaactctcccttctgagccactggctgtggtggctgtagttgcccccgtccctggggctaaagccagacccatttctgaacaggggagtttgtatcatgaatgtttccaggtttgctcctgcacccgtggcactggaaacccagctccccgtgtcagaccccgctgtcttcctgagccctggggctcactgtggaggagctgacggcctgggcccttggccagtcctggctcttccctgggcctcaccagggacactcttgaatgtatggcctcaggcgctccctagagggggcctaaaccccctcacctgtgagctaccccctttagggatcccttgcccccttggagatcccttgccccccagtgcctctgctcgtgggtccctggacacggccttgaagccaaccttctttggaggagcaacagcagcagccttggccgacgcgtccaactcccaaggctgccgtggagggcaggggggtggtgcttgcctggatgtggccccgagtgcctcccctccctccctctgtgggggagtctcccgcctgaacctgaagatggagcagggcccccgcttcgccctggagcctcttcctgtgcctggctcaagctggctgcctgtcagtcttggggaatctggcccaggtctcctcagcctctgccccagttctgggagaagtttctactggtgtatattttttactggaaatgagccttttaggaatgaatgtagactggtttgtattaaaatgtgtcaattgctaagaaa

SEQ ID NO: 685085 - DNA, 864 bp, Homo sapiens
attagtcccctggacccaatccgtcatctactctacgcatggctttgcagggcacactgcatcagagcgctaatgctcgcactgattgtttgacctgagtaggcctgaagaaataaacatgctagcttggattgccagtattctaaccaaaagaataaacgcctcggttccgacaggaaggcgggcatcagagtatttccatcaggcaagcaagcgcatccagtaatccctttctagtatgctatcctcttcaacaatatacgtctgccggacaaatgaacgcagtaagcaatactaccagagtcgaatacgtcatcatctaataatcatgaatggctatagcaataaaactaggaagtagccgcctttcacttcggacgtcccagaggttacccaaggcagcccctctgagatcgcggtctgctacttctcacatgacaaaaactagcccccatctcgaatgcatatgaccaaatcgtctccctgcagtaagggtaagccttctcctcactctctcaagcttatccatcatagcaggcagttgaggtggattaaaccaaaccgagttacgcaaaatcttgagcatactcctcaattgacccacataggatgagtaatagcagttctgaccgtaacaaacctaaaaataatcattcttaatttaacgtattatattatccgtaactactaagcggattcctaataactcaatataaatcagcaccagacctataatattcgactgaaaaagtaaaatgattacacctattcgtcacttcttcctagaggcggccgtaacggtttgccagggcttgaaatccaaaaaggttttcccattaaacaaaccttaccatttcaaagata

SEQ ID NO: 685086 - DNA, 584 bp, Homo sapiens
  misc_feature (20)..(20): n is a, c, g, or t
  misc_feature (28)..(28): n is a, c, g, or t
  misc_feature (65)..(65): n is a, c, g, or t
  misc_feature (77)..(77): n is a, c, g, or t
ccaatccctccttcctcctngggggccntgcccggccccttgtttaaggatctttgccaacctgnactttattctcntgccccaccagggtccgagtccgctaccagaagcgacagaagctgcagtttgaaactaagctgggcatgaactctcccttctgagccactggctgtggtggctgtagttgcccctgggtccctggacacggccttgaagccaaccttctttggaggagcaacagcagcagccttggccgacgcgtccaactcccaaggctgccgtggagggcaggggggtggtgcttgcctggatgtggccccgagtgcctcccctccctccctctgtgggggagtctcccgcctgaacctgaagatggagcagggcccccgcttcgccctggagcctcttcctgtgcctggctcaagctggctgcctgtcagtcttggggaatctggcccaggtctcctcagcctctgccccagttctgggagaagtttctactggtgtatattttttactggaaatgagccttttaggaatgaatgtagactggtttgtattaaaatgtgtcaattgctaagaaa

SEQ ID NO: 685087 - DNA, 147 bp, Homo sapiens
tttgggggcccccccctatgggacccggggtcgaaggggcctgtaccctttgtcatttcctttttagcccctgcatttcccacaagtccaaggtgacagctggtgctaggggggtggggttaataaatggcttttccttttctccca

SEQ ID NO: 685088 - DNA, 101 bp, Homo sapiens
gcactctgcccattgatgagtcaacacatccacttgaaggtgattgagcagcggccagaacctccggtggcccaggagtatgatgtacctgttttacaaag

SEQ ID NO: 685089 - DNA, 832 bp, Homo sapiens
  misc_feature (740)..(741): n is a, c, g, or t
  misc_feature (761)..(761): n is a, c, g, or t
  misc_feature (763)..(763): n is a, c, g, or t
  misc_feature (766)..(766): n is a, c, g, or t
  misc_feature (772)..(772): n is a, c, g, or t
  misc_feature (776)..(776): n is a, c, g, or t
  misc_feature (784)..(784): n is a, c, g, or t
acggctaggtacgaggctgggtgtgaatcggccgaggcgtaagtgcttcctcttcctgctgccataggtggcatgccgagcctgttcgataagccacctatggcatccgtaagtgcttcctcttcctgctgcagtgccagctgactcttgtggtcatccagttcctttcttgcctggtccagctgccgccactcctgagtaccaccgacatcctgtggctgtcctgcttttgctaccctctgctcagcatctctctgctggggaagcccccccatagctccatcatgtctatggcaacggggaaaaacctccagtccattcccaagaagacccagcactacttcctgctctgcttcctgctcaagttcagcctcaccatcagctcctgcctcatctgctttggcttcacactgcagagcttctgtgacagctcccgggaccgcaacctcaccaactgctcctccgtcatgctgcccagcaacgacgacagggctccagcctggtttgaggactttgccaatggactgctgtcggctcagaagctcacggccgccctgattgtcctgcacacttgtccctggtccttgtggtggtgaccaatgagatcgtgaagctacatgagattcgggtccgagtccgctaccagaagcgacagaagctgcagtttgaaactaagctgggcatgaactctcccttctgagccactggctgtggtggctgtagttgccccgtcctggggnnaagccgaccttctgacgggngntgntctggntgtnccggttgncctgccggctggacctcccggttaccctttctctcccgggcctggggc

SEQ ID NO: 685090 - DNA, 981 bp, Homo sapiens
cctcctgagaccctgtagatgtccaggacccagcaccccaaggctgcaggcctcaccttgagtcggccaaattcacaggccaggtccaggggcgtcttcttggccttgttgaccaggcatgggttggactgatgctggaggagcatttctgacacctcataatgtccatactgtgcagccaggtgcagggggatctgtccgtccagcgaggcggcattgacagccgcagaggcgcgcagcagcagcctcacaggctccagccggccctgccaggctgcgtagtgcagcgggcgcatgccattgctgtccttgatgtcaacagtggcctgagcctctagcagcaaggctatgagctccaggctgccccccaaagcagcgtggtggagggcagagaatccatcagcatcctggtagttcacgttgagcctctttgtggagcccaggagctttgtcttgtggccttgaccttcgccaccagtttctgcacaccggtcacatctccattcttgacggcgaggatcaggtcctgttcacgacccatactggctcctgggctgagctctacactcaggagtccagggcaaaggcaggcaacgggtccaagctggggcgtcagggcgccatgccacagccccttggagggctcccggttccgggggagcaagtctggtgtcccaggcagtgggctcctcgtcaggtactgagggatactcccaaaggtgctccgtgaactgccaccacacgaaggaaagctaatctttgagggggtgaaggctacatggaaatctggatggatatcagcttgtggcttccgacagctccaggatgggctgggactgggcacaccaatcttcccggcttggctgtggaacaccagtgcccacccagagagcagccagcattcccttgggcctcaggcagcagcggtgcactggtctcagggctctctcccgccgcccgccgggtccggctgcctgctcg

SEQ ID NO: 685091 - DNA, 221 bp, Homo sapiens
ttacatatacgactcgagctgtagtacccctcggatagggccaataagatggttattatagcttgtattccatatgtgccatgagattaagtagagacatgaaaagtattttttagaagactgaaaatgggccgggtgcagtggcgtcatggctgtaatcccagcactttgggaggccgaggtgggcggatcacttgtgaagctatattggccttatcgag

SEQ ID NO: 685092 - DNA, 826 bp, Homo sapiens
  misc_feature (782)..(782): n is a, c, g, or t
  misc_feature (804)..(804): n is a, c, g, or t
  misc_feature (812)..(812): n is a, c, g, or t
acacactctcagctgtctccgtctcttctctcctcttctctctctctctcttttcaccctccccgcttcgagggaggtgttggaagttcttgcagctgactgcttgtggctcagactctggcccatgctctttaagcaggcagagctatggatgccccatcagggcaaaggcaacaaaggcgagcctccctcagccctgggcctgtccacgcggaaggccctcagcgtcctgaaggagcagctggaggcagtgctggaaggacatctcagggagcggaagaagtgtctgacgtggaaggaggtgtggagaagcagcttcctccaccacagtaaccgctgctcctgcttccactggccgggggcctcactcatgctactggccgtgctgctgctgctgggctgctgcgggggacagccagccgggagccgtggggtggggctggtgaatgcctcggccttgttcctgttactgcttctcaaccttgtgctcatcgggcggcaagaccggctgaagcgtcgggaggtagagcggaggctgcgagggatcattgaccaaatccaagatgccctcagggatggcagggagatccagtggcccagtgccatgtatccagacctccacatgccttttgcgccatcctggtccttgcactgggcctacagagacggacacctggtcaacctgccagtcagcctgctggttgaaggagacatcatagctttgaggcctggccaggaatcgtttgcttctctgagggggatcaaggatgacagcacatcgncctggaacccggaaaacttttncccccttntcccttcaacctta

SEQ ID NO: 685093 - DNA, 380 bp, Homo sapiens
gcatccctggcacctgtgtctgcatctgtagttttgagagcttgcaccctgcctcccttccttaagcatttacatcacgcccttgcaaaaagctcccctcatcccaacattaaaataaaaaaaaaaagacacaggcttgtggggggagataaaagcctgtcctcctaggctgggctcccaaataacctcccgccccctccccacccccgctccctctttttattctgatcactcgccttttcttcaaaggcctcctttctggaagaggaattgtgcatactttgtctcaaacatgctgtattttttgttaacagcagcactgcaccaaaagagatcaaatggggggcagggaaaaaagaaaaaagaaccccccccccaca

SEQ ID NO: 685094 - DNA, 10133 bp, Homo sapiens
actttagctctctggccggcgcctctgttgcccggaagggaggcaagcccccttagagttgccagtaacggacatggctgcggcccccggaggaggggacgtgaagtgaggagggggttgggaggggagaggacgcgggcgaggaagaccagccccggggccccgatgttgtgactgtgacagactcactggggtttgtacatgctggggaggagccttcctttcaggggtgaccacattcatctgggcatgcctgcagtactcttggcccatggacctgaaggagaagcacctgggcgagcctccctcagccctgggcctgtccacgcggaaggccctcagcgtcctgaaggagcagctggaggcagtgctggaaggacatctcagggagcggaagaagtgtctgacgtggaaggaggtgtggagaagcagcttcctccaccacagtaaccgctgctcctgcttccactggccgggggcctcactcatgctactggccgtgctgctgctgctgggctgctgcgggggacagccagccgggagccgtggggtggggctggtgaatgcctcggccttgttcctgttactgcttctcaaccttgtgctcatcgggcggcaagaccggctgaagcgtcgggaggtagagcggaggctgcgagggatcattgaccaaatccaagatgccctcagggatggcagggagatccagtggcccagtgccatgtatccagacctccacatgccttttgcgccatcctggtccttgcactgggcctacagagacggacacctggtcaacctgccagtcagcctgctggttgaaggagacatcatagctttgaggcctggccaggaatcgtttgcttctctgagggggatcaaggatgacgagcacatcgtcctggagccgggagacctcttcccccccttctcccctccaccctcaccccggggagaagtggagagagggccacagagcccccagcagcaccggcttttccgtgtccttgagacccctgtgattgacaacatcagatggtgcctggacatggccctgtcccgaccagtcactgccctggacaatgagcggttcacagtgcagtcggtgatgctacactatgctgtgcccgtggtcctggccggcttcctcatcaccaatgccctgcgcttcatcttcagtgccccgggggtcacttcctggcagtacaccctcctccagctccaggtgaatggcgtcctgcccatcctccccctgctctttccagtcctctgggttctggcaactgcctgtggagaggcccgtgtcctggcccagatgagcaaggcctcacccagctccctgctggctaagttctcagaggatactctcagcagctatacggaggctgtctcctctcaggaaatgctgcgctgcatttggggccacttcctgagggtgctcggggggacatcgccaacgctgagccacagttccagcctgctgcacagcctgggctctgtcacggtcctgtgctgtgtggacaaacaggggatcctgtcatggccaaatcccagcccagagactgtactgttcttcagcgggaaggtggagccccctcacagcagccatgaggacctcaccgatggcctatccacccgctccttctgccatcccgagccccatgaacgagacgccctcctggctggctccctgaacaacaccctgcacctttccaatgagcaggagcgtggcgactggcctggcgaggctcccaagccccccgagccctattcacaccacaaagcgcatggccgcagcaaacacccatctggctccaacgtgagcttcagcagggacaccgagggtggtgaagaagagcccagcaagacccagcctgggatggagagcgacccctacgaagcagaggactttgtgtgtgactaccacctggagatgctgagcctgtcccaggaccagcagaacccctcctgcatccagtttgatgactccaactggcagctgcacctcacctccctcaaacccctgggcctcaatgtgctgctgaacctgtgtgatgccagcgtcaccgagcgcctgtgccgattctccgaccacctgtgcaacattgccctgcaagagagccacagcgccgtgctgcccgtccatgtgccctggggcctctgcgagcttgcccgcctcattggcttcactcctggggccaaggagcttttcaagcaggagaaccatctggcgctgtaccgcctccccagtgccgagacaatgaaggagacatcgctggggcggctctcctgtgtcaccaagcggcggcctcccctcagccacatagatcagcctcttcattaaagacaccaccaccagcacagagcagatgctgtcccatggcaccgctgatgtggtcttagaggcctgcacagacttctgggacggagctgacatctaccctctctcgggatctgacagaaagaaagtgctggacttctaccagcgagcctgcctgtctgggtattgctctgccttcgcctacaagcccatgaactgcgccctgtcctctcagctcaatggcaagtgcatcgagctggtacaggtgcccggccaaagcagcatcttcaccatgtgcgagctgcccagcaccatccccatcaagcagaacgcccgccgcagcagctggagctctgacgaagggatcggggaggtgctggagaaggaagactgcatgcaggccctgagcggccagatcttcatgggcatggtgtcctcccagtaccaggcccggctggacatcgtgcgcctcattgatgggcttgtcaacgcctgcatccgctttgtctacttctctttggaggatgagctcaaaagcaaggtgtttgcagaaaaaatgggcctggagacaggctggaactgccacatctccctcacacccaatggtgacatgcctggctccgagatccccccctccagccccagccacgcaggctccctgcatgatgacctgaatcaggtgtcccgagatgatgcagaagggctcctcctcatggaggaggagggccactcggacctcatcagcttccagcctacggacagcgacatccccagcttcctggaggactccaaccgggccaagctgccccggggtatccaccaagtgcggccccacctgcagaacattgacaacgtgcccctgctagtgccccttttcaccgactgcaccccagagaccatgtgtgagatgataaagatcatgcaagagtacggggaggtgacctgctgcctgggcagctctgccaacctgcggaacagctgcctcttcctccagagcgacatcagcattgccctggatcccctgtacccatcccgttgctcctgggagacctttggctacgccaccagcatcagcatggcccaggcctcggatggcctttctcccctgcagctgtcagggcagctcaacagcctgccctgttccctgacctttcgccaggaggagaccatcagcatcatccggcttatcgaacaggctcggcatgccacctatggcatccgtaagtgcttcctcttcctgctgcagtgccagctgactcttgtggtcatccagttcctttcttgcctggtccagctgccgccactcctgagtaccaccgacatcctgtggctgtcctgcttttgctaccctctgctcagcatctctctgctggggaagcccccccatagctccatcatgtctatggcaacggggaaaaacctccagtccattcccaagaagacccagcactacttcctgctctgcttcctgctcaagttcagcctcaccatcagctcctgcctcatctgctttggcttcacactgcagagcttctgtgacagctcccgggaccgcaacctcaccaactgctcctccgtcatgctgcccagcaacgacgacagggctccagcctggtttgaggactttgccaatggactgctgtcggctcagaagctcacggccgccctgattgtcctgcacactgtcttcatttccatcacccatgtgcatcgcaccaagcccctgtggagaaagagccccttgaccaacctctggtgggccgtgacagtgcctgtggtgctgctgggtcaggtggtccagacggctgtggacctgcagctgtggacacacagggacagccacgtccactttggcctggaggacgtgcccctgctgacatggctcctgggctgcctgtccctggtccttgtggtggtgaccaatgagatcgtgaagctacatgagattcgggtccgagtccgctaccagaagcgacagaagctgcagtttgaaactaagctgggcatgaactctcccttctgagccactggctgtggtggctgtagttgcccccgtccctggggctaaagccagacccatttctgaacaggggagtttgtatcatgaatgtttccaggtttgctcctgcacccgtggcactggaaacccagctccccgtgtcagaccccgctgtcttcctgagccctggggctcactgtggaggagctgacggcctgggcccttggccagtcctggctcttccctgggcctcaccagggacactcttgaatgtatggcctcaggcgctccctagagggggcctaaaccccctcacctgtgagctaccccctttagggatcccttgcccccttggagatcccttgccccccagtgcctctgctcgtgggtccctggacacggccttgaagccaaccttctttggaggagcaacagcagcagccttggccgacgcgtccaactcccaaggctgccgtggagggcaggggggtggtgcttgcctggatgtggccccgagtgcctcccctccctccctctgtgggggagtctcccgcctgaacctgaagatggagcagggcccccgcttcgccctggagcctcttcctgtgcctggctcaagctggctgcctgtcagtcttggggaatctggcccaggtctcctcagcctctgccccagttctgggagaagtttctactggtgtatattttttactggaaatgagccttttaggaatgaatgtagactggtttgtattaaaatgtgtcaattgctaagaaatacctgtggctggtctgtaaggccactccagggtctgcccacccccggcggtggctggcaaagggaggcctaaaccttcctccatctacgcgggtgggtccctcaggtctggctcaggcgagacccctagggtcaggggtccccatgtcacagaggcaaacacacagcccagtcacgtggaatggtgttttcattggtgttagttgggggaagaggttaatggttacagagccagggcctgggccaatggggtcaggctctccctgccctcaggtgggcagtcggggctcctgctgtggtccgaagcccctcccccattgtgtcctctcaggcagttgatagaataaattccatttaaaatatatgcatttctctctgcttagaaaataacatttacaattgaaaagttaggacttgtgggatctgttaaccccactgcctcccacccctgctagccctgcctcagtgagggaaggcgggggcaggagctgcctgggcaccaccgctgtgtatttacatgtcctctgtacacctacggagagggggcccggccagacacacgcctcctccagcctctcagggcctgggcaggatggtgggtggcaagaggcattcccttggcacaacttgggacatgggctggggggtacagagaaagcacccccaaagccccacccctacttcctccctgaggagagagctcttaccagggtccctgtccaggagcagggctgtcctgctcaatcgatcaaaccctgggaggggctttgctgagatgcagcggaggtccctcgctagtcaggttctaaggtgggctgccccacaagagctgtggtgcccacagccgcgggctgagtgggaaggggccctgctaggaggggcacttcagcctgaccagcccttggcccgtccctagggtggcaggggcctcttctgtgctggggcaaaggcagtggacttcggcaggtcacagtgggcactgctggagggctcagtccagcatggcgtccagctggtcagccagggcgtcgaacatggtgctgatgtcatccagaatgtgcttggtggaggcgctgggggtgccctcttgctccttggtgccaatgctcttctctgcggctctcagtgcagctgccagggacgagctggtctgctccagtctctgctgggcctggcctgggcccacagtcccagtgctctcaggccgtggaggaggcactgggcgggggccgagccggggcgctagcttagggccagaaaatgccagctgggtgcaggccaccgacacaggcttgggggctgttcctgctccgggcaccttgaggagggcagcaggggcggccgggggttctgtctccccattccaccgactagctgctgagctttccagacctggccctgggcagggcggcactggaggctgcatggcggggctgggagcaaggggggttggaactccttgggctggaaggctgctgggctcgggctggggaaggctagaagctggaggagactcgccaggagttggggaaggcagtggggcagcggggccaggcgtggcactggccactccgaaggccagcagtgcggtctgcagtggctctctctcccggcacttgggcctccgcttaacagtgtctgattccgtgaggttgaaatcgaggccggggggcacgggtgtctctcggggcggggggccagcgggcttcgggcgctgtttgatggtcaggttcccttcctctgcaaacggcagcccttccccagagctgccccgagatgggggcgtcccctcagggcctggctcctcctcctccgtgtctgacgcgggcccagccggggcaggtgggccagggggctctgaggggccagcaggttcactcagtgttcgccttcggggccctgtggccccttccttgggccctgggctcccatctagtggaggtggctccgggctggggccagagacggagctgaggcgcttggggggcgggggcggggggcctttgcgccgggcccgcagggcaaaggactggctgcgaggagtcccccgagctggggttggggtcacgctaggactggtccggacaagggcactgcgtcctggccgccgggtaagggtagcataactgcctagggtgctgcccactggcccttcggcctccccctcagcatccccctctgtgggccaggcggcttaggctgtgggaccggcgcttaggtcgaggcgggtctgggggagtggcagggggcccggccaagtaggagaaggcccagggtgcgccaggaggtggccctggggccgggctagagggtgagccctgggggtacataaaaacatagggtgggggtccttggccaggaagtgaagaacaaagcttaggggccgctctgtgccctctgggaggttcctctcctggggggggctgggatctccaccgctgggctgtggggcaggctgttcctgtgagtggccagacccccgtgagcgtgccccgatgctctcctggctgggagagcgggcaggtgggagggggagtggttcagggccaccccctgccatggccgcctgtagctctgggcttagttcgctgccctggaaggtgaggagccgtgggccagctgtagctgggccttctccgttctccagtccctcgatggccatcagctccggacccttggccagccggcgcccgccttcgctgagggcctccccctgcagcaggccccgccgaagctccgccagccgcttcacccccagcatgagcttcttctgatgcccgagcttgttgaccccaatctcctgcagctcctcccaggtgaggtcggccaccagccccatggagtcgtagccgctgctcaccagctgcttgtggtactgtggcagccccagtgcacacagccactccagcaggtccgttgggatgtagctgggcagccactcggcgatgctgagctgagcgatctctgaggcgatcttcttcctgtgcccaggcttggtcaccccgatggccgtcaggtcctcaggtgtcatgcggctgatggtaggcacatcatagccggcctgcagaaagtgggcagtgtagccctccagctggaactcgcttagccagttatgaatggcctgcgcgtccttcccctccagcagctgttctggccgcacgtcctgggtgaagatctgctccccagagcggcagttggccagagggcggtggctcaggttgtctgccagggacggcgggtggagtcctggcagcacctggtcctctccagcagagggcagtggctgggcgttctcaatcaggaggccagggccatggccattagtgccctcagagctctgcccgctgccggcactgcggatgctgcccacgctgccctcactgcccacactattcctgtcacctgctgggctgtctgggctgaggcccacccgaggaagctggctgtaggtaagagggtgcgggggttcttcggcaggaggctgcggtgtccgggagaagcctgggcgcaggggggtgggtgcggaggggaggcgggctgcagggatgcccacccgcttgctgaccacctcgacaatgcccggggggaagtagcctatgcggtctgtgcccctctggctctcgtggatgtggcccttccagcggccgtcgggatgctgttctagcaccgtgatgacatcccctgcccggacattgagagcagtgggatcgtggaggttccagaaatccttgagcgctcggaccttcaggatccctgaggcctcccgcagtagctgcttgatttcccggctggcctgggaggtggtgaactgattcactatgtccagcgccgtctggttatacgtattccggatgttcacgtccacacctccctccagaagcagccgcaccacctcggtcttgccatacagtgcggcctcgtggagcgccgtacccgtcttggtctggcggttgatctcgatcccagctctcaggagctgcctgatgacttctctgtggccattcttggcagccaagtgcaggggcgtggtgtagttggggtcacacgggtctttggcctcaccctccagcagtgccacacataagtggctgttcagaagcagctgggccaccttgagtcggccaaattcacaggccaggtccaggggcgtcttcttggccttgttgaccaggcatgggttggactgatgctggaggagcatttctgacacctcataatgtccatactgtgcagccaggtgcagggggatctgtccgtccagcgaggcggcattgacagccgcagaggcgcgcagcagcagcctcacaggctccagccggccctgccaggctgcgtagtgcagcgggcgcatgccattgctgtccttgatgtcaacagtggcctgagcctctagcagcaaggctatgagctccaggctgccccccaaagcagcgtggtggagggcagagaatccatcagcatcctggtagttcacgttgagcctctttgtggagcccaggagctttgtcttgtggccttgaccttcgccaccagtttctgcacaccggtcacatctccattcttgacggcgaggatcaggtcctgttcacgacccatactggctcctgggctgagctctacactcaggagtccagggcaaaggcaggcaacgggtccaagctggggcgtcagggcgccatgccacagccccttggagggctcccggttccgggggagcaagtctggtgtcccaggcagtgggctcctcgtcaggtactgagggatactcccaaaggtgctccgtgaactgccaccacacgaaggaaagctaatctttgagggggtgaaggctacatggaaatctggatggatatcagcttgtggcttccgacagctccaggatgggctgggactgggcacaccaatcttcccggcttggctgtggaacaccagtgcccacccagagagcagccagcattcccttgggcctcaggcagcagcggtgcactggtctcagggctctctcccgccgcccgccgggtccggctgcctgctcg

SEQ ID NO: 685095 - DNA, 10085 bp, Homo sapiens
actttagctctctggccggcgcctctgttgcccggaagggaggcaagcccccttagagttgccagtaacggacatggctgcggcccccggaggaggggacgtgaagtgaggagggggttgggaggggagaggacgcgggcgaggaagaccagccccggggccccgatgttgtgactgtgacagactcactggggtttgtacatgctggggaggagccttcctttcaggggtgaccacattcatctgggcatgcctgcagtactcttggcccatggacctgaaggagaagcacctgggcgagcctccctcagccctgggcctgtccacgcggaaggccctcagcgtcctgaaggagcagctggaggcagtgctggaaggacatctcagggagcggaagaagtgtctgacgtggaaggaggtgtggagaagcagcttcctccaccacagtaaccgctgctcctgcttccactggccgggggcctcactcatgctactggccgtgctgctgctgctgggctgctgcgggggacagccagccgggagccgtggggtggggctggtgaatgcctcggccttgttcctgttactgcttctcaaccttgtgctcatcgggcggcaagaccggctgaagcgtcgggaggtagagcggaggctgcgagggatcattgaccaaatccaagatgccctcagggatggcagggagatccagtggcccagtgccatgtatccagacctccacatgccttttgcgccatcctggtccttgcactgggcctacagagacggacacctggtcaacctgccagtcagcctgctggttgaaggagacatcatagctttgaggcctggccaggaatcgtttgcttctctgagggggatcaaggatgacgagcacatcgtcctggagccgggagacctcttcccccccttctcccctccaccctcaccccggggagaagtggagagagggccacagagcccccagcagcaccggcttttccgtgtccttgagacccctgtgattgacaacatcagatggtgcctggacatggccctgtcccgaccagtcactgccctggacaatgagcggttcacagtgcagtcggtgatgctacactatgctgtgcccgtggtcctggccggcttcctcatcaccaatgccctgcgcttcatcttcagtgccccgggggtcacttcctggcagtacaccctcctccagctccaggtgaatggcgtcctgcccatcctccccctgctctttccagtcctctgggttctggcaactgcctgtggagaggcccgtgtcctggcccagatgagcaaggcctcacccagctccctgctggctaagttctcagaggatactctcagcagctatacggaggctgtctcctctcaggaaatgctgcgctgcatttggggccacttcctgagggtgctcggggggacatcgccaacgctgagccacagttccagcctgctgcacagcctgggctctgtcacggtcctgtgctgtgtggacaaacaggggatcctgtcatggccaaatcccagcccagagactgtactgttcttcagcgggaaggtggagccccctcacagcagccatgaggacctcaccgatggcctatccacccgctccttctgccatcccgagccccatgaacgagacgccctcctggctggctccctgaacaacaccctgcacctttccaatgagcaggagcgtggcgactggcctggcgaggctcccaagccccccgagccctattcacaccacaaagcgcatggccgcagcaaacacccatctggctccaacacccagcctgggatggagagcgacccctacgaagcagaggactttgtgtgtgactaccacctggagatgctgagcctgtcccaggaccagcagaacccctcctgcatccagtttgatgactccaactggcagctgcacctcacctccctcaaacccctgggcctcaatgtgctgctgaacctgtgtgatgccagcgtcaccgagcgcctgtgccgattctccgaccacctgtgcaacattgccctgcaagagagccacagcgccgtgctgcccgtccatgtgccctggggcctctgcgagcttgcccgcctcattggcttcactcctggggccaaggagcttttcaagcaggagaaccatctggcgctgtaccgcctccccagtgccgagacaatgaaggagacatcgctggggcggctctcctgtgtcaccaagcggcggcctcccctcagccacatagatcagcctcttcattaaagacaccaccaccagcacagagcagatgctgtcccatggcaccgctgatgtggtcttagaggcctgcacagacttctgggacggagctgacatctaccctctctcgggatctgacagaaagaaagtgctggacttctaccagcgagcctgcctgtctgggtattgctctgccttcgcctacaagcccatgaactgcgccctgtcctctcagctcaatggcaagtgcatcgagctggtacaggtgcccggccaaagcagcatcttcaccatgtgcgagctgcccagcaccatccccatcaagcagaacgcccgccgcagcagctggagctctgacgaagggatcggggaggtgctggagaaggaagactgcatgcaggccctgagcggccagatcttcatgggcatggtgtcctcccagtaccaggcccggctggacatcgtgcgcctcattgatgggcttgtcaacgcctgcatccgctttgtctacttctctttggaggatgagctcaaaagcaaggtgtttgcagaaaaaatgggcctggagacaggctggaactgccacatctccctcacacccaatggtgacatgcctggctccgagatccccccctccagccccagccacgcaggctccctgcatgatgacctgaatcaggtgtcccgagatgatgcagaagggctcctcctcatggaggaggagggccactcggacctcatcagcttccagcctacggacagcgacatccccagcttcctggaggactccaaccgggccaagctgccccggggtatccaccaagtgcggccccacctgcagaacattgacaacgtgcccctgctagtgccccttttcaccgactgcaccccagagaccatgtgtgagatgataaagatcatgcaagagtacggggaggtgacctgctgcctgggcagctctgccaacctgcggaacagctgcctcttcctccagagcgacatcagcattgccctggatcccctgtacccatcccgttgctcctgggagacctttggctacgccaccagcatcagcatggcccaggcctcggatggcctttctcccctgcagctgtcagggcagctcaacagcctgccctgttccctgacctttcgccaggaggagaccatcagcatcatccggcttatcgaacaggctcggcatgccacctatggcatccgtaagtgcttcctcttcctgctgcagtgccagctgactcttgtggtcatccagttcctttcttgcctggtccagctgccgccactcctgagtaccaccgacatcctgtggctgtcctgcttttgctaccctctgctcagcatctctctgctggggaagcccccccatagctccatcatgtctatggcaacggggaaaaacctccagtccattcccaagaagacccagcactacttcctgctctgcttcctgctcaagttcagcctcaccatcagctcctgcctcatctgctttggcttcacactgcagagcttctgtgacagctcccgggaccgcaacctcaccaactgctcctccgtcatgctgcccagcaacgacgacagggctccagcctggtttgaggactttgccaatggactgctgtcggctcagaagctcacggccgccctgattgtcctgcacactgtcttcatttccatcacccatgtgcatcgcaccaagcccctgtggagaaagagccccttgaccaacctctggtgggccgtgacagtgcctgtggtgctgctgggtcaggtggtccagacggctgtggacctgcagctgtggacacacagggacagccacgtccactttggcctggaggacgtgcccctgctgacatggctcctgggctgcctgtccctggtccttgtggtggtgaccaatgagatcgtgaagctacatgagattcgggtccgagtccgctaccagaagcgacagaagctgcagtttgaaactaagctgggcatgaactctcccttctgagccactggctgtggtggctgtagttgcccccgtccctggggctaaagccagacccatttctgaacaggggagtttgtatcatgaatgtttccaggtttgctcctgcacccgtggcactggaaacccagctccccgtgtcagaccccgctgtcttcctgagccctggggctcactgtggaggagctgacggcctgggcccttggccagtcctggctcttccctgggcctcaccagggacactcttgaatgtatggcctcaggcgctccctagagggggcctaaaccccctcacctgtgagctaccccctttagggatcccttgcccccttggagatcccttgccccccagtgcctctgctcgtgggtccctggacacggccttgaagccaaccttctttggaggagcaacagcagcagccttggccgacgcgtccaactcccaaggctgccgtggagggcaggggggtggtgcttgcctggatgtggccccgagtgcctcccctccctccctctgtgggggagtctcccgcctgaacctgaagatggagcagggcccccgcttcgccctggagcctcttcctgtgcctggctcaagctggctgcctgtcagtcttggggaatctggcccaggtctcctcagcctctgccccagttctgggagaagtttctactggtgtatattttttactggaaatgagccttttaggaatgaatgtagactggtttgtattaaaatgtgtcaattgctaagaaatacctgtggctggtctgtaaggccactccagggtctgcccacccccggcggtggctggcaaagggaggcctaaaccttcctccatctacgcgggtgggtccctcaggtctggctcaggcgagacccctagggtcaggggtccccatgtcacagaggcaaacacacagcccagtcacgtggaatggtgttttcattggtgttagttgggggaagaggttaatggttacagagccagggcctgggccaatggggtcaggctctccctgccctcaggtgggcagtcggggctcctgctgtggtccgaagcccctcccccattgtgtcctctcaggcagttgatagaataaattccatttaaaatatatgcatttctctctgcttagaaaataacatttacaattgaaaagttaggacttgtgggatctgttaaccccactgcctcccacccctgctagccctgcctcagtgagggaaggcgggggcaggagctgcctgggcaccaccgctgtgtatttacatgtcctctgtacacctacggagagggggcccggccagacacacgcctcctccagcctctcagggcctgggcaggatggtgggtggcaagaggcattcccttggcacaacttgggacatgggctggggggtacagagaaagcacccccaaagccccacccctacttcctccctgaggagagagctcttaccagggtccctgtccaggagcagggctgtcctgctcaatcgatcaaaccctgggaggggctttgctgagatgcagcggaggtccctcgctagtcaggttctaaggtgggctgccccacaagagctgtggtgcccacagccgcgggctgagtgggaaggggccctgctaggaggggcacttcagcctgaccagcccttggcccgtccctagggtggcaggggcctcttctgtgctggggcaaaggcagtggacttcggcaggtcacagtgggcactgctggagggctcagtccagcatggcgtccagctggtcagccagggcgtcgaacatggtgctgatgtcatccagaatgtgcttggtggaggcgctgggggtgccctcttgctccttggtgccaatgctcttctctgcggctctcagtgcagctgccagggacgagctggtctgctccagtctctgctgggcctggcctgggcccacagtcccagtgctctcaggccgtggaggaggcactgggcgggggccgagccggggcgctagcttagggccagaaaatgccagctgggtgcaggccaccgacacaggcttgggggctgttcctgctccgggcaccttgaggagggcagcaggggcggccgggggttctgtctccccattccaccgactagctgctgagctttccagacctggccctgggcagggcggcactggaggctgcatggcggggctgggagcaaggggggttggaactccttgggctggaaggctgctgggctcgggctggggaaggctagaagctggaggagactcgccaggagttggggaaggcagtggggcagcggggccaggcgtggcactggccactccgaaggccagcagtgcggtctgcagtggctctctctcccggcacttgggcctccgcttaacagtgtctgattccgtgaggttgaaatcgaggccggggggcacgggtgtctctcggggcggggggccagcgggcttcgggcgctgtttgatggtcaggttcccttcctctgcaaacggcagcccttccccagagctgccccgagatgggggcgtcccctcagggcctggctcctcctcctccgtgtctgacgcgggcccagccggggcaggtgggccagggggctctgaggggccagcaggttcactcagtgttcgccttcggggccctgtggccccttccttgggccctgggctcccatctagtggaggtggctccgggctggggccagagacggagctgaggcgcttggggggcgggggcggggggcctttgcgccgggcccgcagggcaaaggactggctgcgaggagtcccccgagctggggttggggtcacgctaggactggtccggacaagggcactgcgtcctggccgccgggtaagggtagcataactgcctagggtgctgcccactggcccttcggcctccccctcagcatccccctctgtgggccaggcggcttaggctgtgggaccggcgcttaggtcgaggcgggtctgggggagtggcagggggcccggccaagtaggagaaggcccagggtgcgccaggaggtggccctggggccgggctagagggtgagccctgggggtacataaaaacatagggtgggggtccttggccaggaagtgaagaacaaagcttaggggccgctctgtgccctctgggaggttcctctcctggggggggctgggatctccaccgctgggctgtggggcaggctgttcctgtgagtggccagacccccgtgagcgtgccccgatgctctcctggctgggagagcgggcaggtgggagggggagtggttcagggccaccccctgccatggccgcctgtagctctgggcttagttcgctgccctggaaggtgaggagccgtgggccagctgtagctgggccttctccgttctccagtccctcgatggccatcagctccggacccttggccagccggcgcccgccttcgctgagggcctccccctgcagcaggccccgccgaagctccgccagccgcttcacccccagcatgagcttcttctgatgcccgagcttgttgaccccaatctcctgcagctcctcccaggtgaggtcggccaccagccccatggagtcgtagccgctgctcaccagctgcttgtggtactgtggcagccccagtgcacacagccactccagcaggtccgttgggatgtagctgggcagccactcggcgatgctgagctgagcgatctctgaggcgatcttcttcctgtgcccaggcttggtcaccccgatggccgtcaggtcctcaggtgtcatgcggctgatggtaggcacatcatagccggcctgcagaaagtgggcagtgtagccctccagctggaactcgcttagccagttatgaatggcctgcgcgtccttcccctccagcagctgttctggccgcacgtcctgggtgaagatctgctccccagagcggcagttggccagagggcggtggctcaggttgtctgccagggacggcgggtggagtcctggcagcacctggtcctctccagcagagggcagtggctgggcgttctcaatcaggaggccagggccatggccattagtgccctcagagctctgcccgctgccggcactgcggatgctgcccacgctgccctcactgcccacactattcctgtcacctgctgggctgtctgggctgaggcccacccgaggaagctggctgtaggtaagagggtgcgggggttcttcggcaggaggctgcggtgtccgggagaagcctgggcgcaggggggtgggtgcggaggggaggcgggctgcagggatgcccacccgcttgctgaccacctcgacaatgcccggggggaagtagcctatgcggtctgtgcccctctggctctcgtggatgtggcccttccagcggccgtcgggatgctgttctagcaccgtgatgacatcccctgcccggacattgagagcagtgggatcgtggaggttccagaaatccttgagcgctcggaccttcaggatccctgaggcctcccgcagtagctgcttgatttcccggctggcctgggaggtggtgaactgattcactatgtccagcgccgtctggttatacgtattccggatgttcacgtccacacctccctccagaagcagccgcaccacctcggtcttgccatacagtgcggcctcgtggagcgccgtacccgtcttggtctggcggttgatctcgatcccagctctcaggagctgcctgatgacttctctgtggccattcttggcagccaagtgcaggggcgtggtgtagttggggtcacacgggtctttggcctcaccctccagcagtgccacacataagtggctgttcagaagcagctgggccaccttgagtcggccaaattcacaggccaggtccaggggcgtcttcttggccttgttgaccaggcatgggttggactgatgctggaggagcatttctgacacctcataatgtccatactgtgcagccaggtgcagggggatctgtccgtccagcgaggcggcattgacagccgcagaggcgcgcagcagcagcctcacaggctccagccggccctgccaggctgcgtagtgcagcgggcgcatgccattgctgtccttgatgtcaacagtggcctgagcctctagcagcaaggctatgagctccaggctgccccccaaagcagcgtggtggagggcagagaatccatcagcatcctggtagttcacgttgagcctctttgtggagcccaggagctttgtcttgtggccttgaccttcgccaccagtttctgcacaccggtcacatctccattcttgacggcgaggatcaggtcctgttcacgacccatactggctcctgggctgagctctacactcaggagtccagggcaaaggcaggcaacgggtccaagctggggcgtcagggcgccatgccacagccccttggagggctcccggttccgggggagcaagtctggtgtcccaggcagtgggctcctcgtcaggtactgagggatactcccaaaggtgctccgtgaactgccaccacacgaaggaaagctaatctttgagggggtgaaggctacatggaaatctggatggatatcagcttgtggcttccgacagctccaggatgggctgggactgggcacaccaatcttcccggcttggctgtggaacaccagtgcccacccagagagcagccagcattcccttgggcctcaggcagcagcggtgcactggtctcagggctctctcccgccgcccgccgggtccggctgcctgctcg

SEQ ID NO: 685096 - DNA, 10271 bp, Homo sapiens
actttagctctctggccggcgcctctgttgcccggaagggaggcaagcccccttagagttgccagtaacggacatggctgcggcccccggaggaggggacgtgaagtgaggagggggttgggaggggagaggacgcgggcgaggaagaccagccccggggccccgatgttgtgactgtgacagactcactggggtttgtacatgctggggaggagccttcctttcaggggtgaccacattcatctgggcatgcctgcagtactcttggcccatggacctgaaggagaagcacctgggcgagcctccctcagccctgggcctgtccacgcggaaggccctcagcgtcctgaaggagcagctggaggcagtgctggaaggacatctcagggagcggaagaagtgtctgacgtggaaggaggtgtggagaagcagcttcctccaccacagtaaccgctgctcctgcttccactggccgggggcctcactcatgctactggccgtgctgctgctgctgggctgctgcgggggacagccagccgggagccgtggggtggggctggtgaatgcctcggccttgttcctgttactgcttctcaaccttgtgctcatcgggcggcaagaccggctgaagcgtcgggaggtagagcggaggctgcgagggatcattgaccaaatccaagatgccctcagggatggcagggagatccagtggcccagtgccatgtatccagacctccacatgccttttgcgccatcctggtccttgcactgggcctacagagacggacacctggtcaacctgccagtcagcctgctggttgaaggagacatcatagctttgaggcctggccaggaatcgtttgcttctctgagggggatcaaggatgacgagcacatcgtcctggagccgggagacctcttcccccccttctcccctccaccctcaccccggggagaagtggagagagggccacagagcccccagcagcaccggcttttccgtgtccttgagacccctgtgattgacaacatcagatggtgcctggacatggccctgtcccgaccagtcactgccctggacaatgagcggttcacagtgcagtcggtgatgctacactatgctgtgcccgtggtcctggccggcttcctcatcaccaatgccctgcgcttcatcttcagtgccccgggggtcacttcctggcagtacaccctcctccagctccaggtgaatggcgtcctgcccatcctccccctgctctttccagtcctctgggttctggcaactgcctgtggagaggcccgtgtcctggcccagatgagcaaggcctcacccagctccctgctggctaagttctcagaggatactctcagcagctatacggaggctgtctcctctcaggaaatgctgcgctgcatttggggccacttcctgagggtgctcggggggacatcgccaacgctgagccacagttccagcctgctgcacagcctgggctctgtcacggtcctgtgctgtgtggacaaacaggggatcctgtcatggccaaatcccagcccagagactgtactgttcttcagcgggaaggtggagccccctcacagcagccatgaggacctcaccgatggcctatccacccgctccttctgccatcccgagccccatgaacgagacgccctcctggctggctccctgaacaacaccctgcacctttccaatgagcaggagcgtggcgactggcctggcgaggctcccaagccccccgagccctattcacaccacaaagcgcatggccgcagcaaacacccatctggctccaacgtgagcttcagcagggacaccgagggtggtgaagaagagcccagcaagacccagcctgggatggagagcgacccctacgaagcagaggactttgtgtgtgactaccacctggagatgctgagcctgtcccaggaccagcagaacccctcctgcatccagtttgatgactccaactggcagctgcacctcacctccctcaaacccctgggcctcaatgtgctgctgaacctgtgtgatgccagcgtcaccgagcgcctgtgccgattctccgaccacctgtgcaacattgccctgcaagagagccacagcgccgtgctgcccgtccatgtgccctggggcctctgcgagcttgcccgcctcattggtacaggtccccatggcaggggatggctggctggacccgcctcctagaagaggcccagtaccaactcctcacgggacttaatggacctggcagggtattgccagggcatggccctagttcctgttccccgccctgcaggcttcactcctggggccaaggagcttttcaagcaggagaaccatctggcgctgtaccgcctccccagtgccgagacaatgaaggagacatcgctggggcggctctcctgtgtcaccaagcggcggcctcccctcagccacatagatcagcctcttcattaaagacaccaccaccagcacagagcagatgctgtcccatggcaccgctgatgtggtcttagaggcctgcacagacttctgggacggagctgacatctaccctctctcgggatctgacagaaagaaagtgctggacttctaccagcgagcctgcctgtctgggtattgctctgccttcgcctacaagcccatgaactgcgccctgtcctctcagctcaatggcaagtgcatcgagctggtacaggtgcccggccaaagcagcatcttcaccatgtgcgagctgcccagcaccatccccatcaagcagaacgcccgccgcagcagctggagctctgacgaagggatcggggaggtgctggagaaggaagactgcatgcaggccctgagcggccagatcttcatgggcatggtgtcctcccagtaccaggcccggctggacatcgtgcgcctcattgatgggcttgtcaacgcctgcatccgctttgtctacttctctttggaggatgagctcaaaagcaaggtgtttgcagaaaaaatgggcctggagacaggctggaactgccacatctccctcacacccaatggtgacatgcctggctccgagatccccccctccagccccagccacgcaggctccctgcatgatgacctgaatcaggtgtcccgagatgatgcagaagggctcctcctcatggaggaggagggccactcggacctcatcagcttccagcctacggacagcgacatccccagcttcctggaggactccaaccgggccaagctgccccggggtatccaccaagtgcggccccacctgcagaacattgacaacgtgcccctgctagtgccccttttcaccgactgcaccccagagaccatgtgtgagatgataaagatcatgcaagagtacggggaggtgacctgctgcctgggcagctctgccaacctgcggaacagctgcctcttcctccagagcgacatcagcattgccctggatcccctgtacccatcccgttgctcctgggagacctttggctacgccaccagcatcagcatggcccaggcctcggatggcctttctcccctgcagctgtcagggcagctcaacagcctgccctgttccctgacctttcgccaggaggagaccatcagcatcatccggcttatcgaacaggctcggcatgccacctatggcatccgtaagtgcttcctcttcctgctgcagtgccagctgactcttgtggtcatccagttcctttcttgcctggtccagctgccgccactcctgagtaccaccgacatcctgtggctgtcctgcttttgctaccctctgctcagcatctctctgctggggaagcccccccatagctccatcatgtctatggcaacggggaaaaacctccagtccattcccaagaagacccagcactacttcctgctctgcttcctgctcaagttcagcctcaccatcagctcctgcctcatctgctttggcttcacactgcagagcttctgtgacagctcccgggaccgcaacctcaccaactgctcctccgtcatgctgcccagcaacgacgacagggctccagcctggtttgaggactttgccaatggactgctgtcggctcagaagctcacggccgccctgattgtcctgcacactgtcttcatttccatcacccatgtgcatcgcaccaagcccctgtggagaaagagccccttgaccaacctctggtgggccgtgacagtgcctgtggtgctgctgggtcaggtggtccagacggctgtggacctgcagctgtggacacacagggacagccacgtccactttggcctggaggacgtgcccctgctgacatggctcctgggctgcctgtccctggtccttgtggtggtgaccaatgagatcgtgaagctacatgagattcgggtccgagtccgctaccagaagcgacagaagctgcagtttgaaactaagctgggcatgaactctcccttctgagccactggctgtggtggctgtagttgcccccgtccctggggctaaagccagacccatttctgaacaggggagtttgtatcatgaatgtttccaggtttgctcctgcacccgtggcactggaaacccagctccccgtgtcagaccccgctgtcttcctgagccctggggctcactgtggaggagctgacggcctgggcccttggccagtcctggctcttccctgggcctcaccagggacactcttgaatgtatggcctcaggcgctccctagagggggcctaaaccccctcacctgtgagctaccccctttagggatcccttgcccccttggagatcccttgccccccagtgcctctgctcgtgggtccctggacacggccttgaagccaaccttctttggaggagcaacagcagcagccttggccgacgcgtccaactcccaaggctgccgtggagggcaggggggtggtgcttgcctggatgtggccccgagtgcctcccctccctccctctgtgggggagtctcccgcctgaacctgaagatggagcagggcccccgcttcgccctggagcctcttcctgtgcctggctcaagctggctgcctgtcagtcttggggaatctggcccaggtctcctcagcctctgccccagttctgggagaagtttctactggtgtatattttttactggaaatgagccttttaggaatgaatgtagactggtttgtattaaaatgtgtcaattgctaagaaatacctgtggctggtctgtaaggccactccagggtctgcccacccccggcggtggctggcaaagggaggcctaaaccttcctccatctacgcgggtgggtccctcaggtctggctcaggcgagacccctagggtcaggggtccccatgtcacagaggcaaacacacagcccagtcacgtggaatggtgttttcattggtgttagttgggggaagaggttaatggttacagagccagggcctgggccaatggggtcaggctctccctgccctcaggtgggcagtcggggctcctgctgtggtccgaagcccctcccccattgtgtcctctcaggcagttgatagaataaattccatttaaaatatatgcatttctctctgcttagaaaataacatttacaattgaaaagttaggacttgtgggatctgttaaccccactgcctcccacccctgctagccctgcctcagtgagggaaggcgggggcaggagctgcctgggcaccaccgctgtgtatttacatgtcctctgtacacctacggagagggggcccggccagacacacgcctcctccagcctctcagggcctgggcaggatggtgggtggcaagaggcattcccttggcacaacttgggacatgggctggggggtacagagaaagcacccccaaagccccacccctacttcctccctgaggagagagctcttaccagggtccctgtccaggagcagggctgtcctgctcaatcgatcaaaccctgggaggggctttgctgagatgcagcggaggtccctcgctagtcaggttctaaggtgggctgccccacaagagctgtggtgcccacagccgcgggctgagtgggaaggggccctgctaggaggggcacttcagcctgaccagcccttggcccgtccctagggtggcaggggcctcttctgtgctggggcaaaggcagtggacttcggcaggtcacagtgggcactgctggagggctcagtccagcatggcgtccagctggtcagccagggcgtcgaacatggtgctgatgtcatccagaatgtgcttggtggaggcgctgggggtgccctcttgctccttggtgccaatgctcttctctgcggctctcagtgcagctgccagggacgagctggtctgctccagtctctgctgggcctggcctgggcccacagtcccagtgctctcaggccgtggaggaggcactgggcgggggccgagccggggcgctagcttagggccagaaaatgccagctgggtgcaggccaccgacacaggcttgggggctgttcctgctccgggcaccttgaggagggcagcaggggcggccgggggttctgtctccccattccaccgactagctgctgagctttccagacctggccctgggcagggcggcactggaggctgcatggcggggctgggagcaaggggggttggaactccttgggctggaaggctgctgggctcgggctggggaaggctagaagctggaggagactcgccaggagttggggaaggcagtggggcagcggggccaggcgtggcactggccactccgaaggccagcagtgcggtctgcagtggctctctctcccggcacttgggcctccgcttaacagtgtctgattccgtgaggttgaaatcgaggccggggggcacgggtgtctctcggggcggggggccagcgggcttcgggcgctgtttgatggtcaggttcccttcctctgcaaacggcagcccttccccagagctgccccgagatgggggcgtcccctcagggcctggctcctcctcctccgtgtctgacgcgggcccagccggggcaggtgggccagggggctctgaggggccagcaggttcactcagtgttcgccttcggggccctgtggccccttccttgggccctgggctcccatctagtggaggtggctccgggctggggccagagacggagctgaggcgcttggggggcgggggcggggggcctttgcgccgggcccgcagggcaaaggactggctgcgaggagtcccccgagctggggttggggtcacgctaggactggtccggacaagggcactgcgtcctggccgccgggtaagggtagcataactgcctagggtgctgcccactggcccttcggcctccccctcagcatccccctctgtgggccaggcggcttaggctgtgggaccggcgcttaggtcgaggcgggtctgggggagtggcagggggcccggccaagtaggagaaggcccagggtgcgccaggaggtggccctggggccgggctagagggtgagccctgggggtacataaaaacatagggtgggggtccttggccaggaagtgaagaacaaagcttaggggccgctctgtgccctctgggaggttcctctcctggggggggctgggatctccaccgctgggctgtggggcaggctgttcctgtgagtggccagacccccgtgagcgtgccccgatgctctcctggctgggagagcgggcaggtgggagggggagtggttcagggccaccccctgccatggccgcctgtagctctgggcttagttcgctgccctggaaggtgaggagccgtgggccagctgtagctgggccttctccgttctccagtccctcgatggccatcagctccggacccttggccagccggcgcccgccttcgctgagggcctccccctgcagcaggccccgccgaagctccgccagccgcttcacccccagcatgagcttcttctgatgcccgagcttgttgaccccaatctcctgcagctcctcccaggtgaggtcggccaccagccccatggagtcgtagccgctgctcaccagctgcttgtggtactgtggcagccccagtgcacacagccactccagcaggtccgttgggatgtagctgggcagccactcggcgatgctgagctgagcgatctctgaggcgatcttcttcctgtgcccaggcttggtcaccccgatggccgtcaggtcctcaggtgtcatgcggctgatggtaggcacatcatagccggcctgcagaaagtgggcagtgtagccctccagctggaactcgcttagccagttatgaatggcctgcgcgtccttcccctccagcagctgttctggccgcacgtcctgggtgaagatctgctccccagagcggcagttggccagagggcggtggctcaggttgtctgccagggacggcgggtggagtcctggcagcacctggtcctctccagcagagggcagtggctgggcgttctcaatcaggaggccagggccatggccattagtgccctcagagctctgcccgctgccggcactgcggatgctgcccacgctgccctcactgcccacactattcctgtcacctgctgggctgtctgggctgaggcccacccgaggaagctggctgtaggtaagagggtgcgggggttcttcggcaggaggctgcggtgtccgggagaagcctgggcgcaggggggtgggtgcggaggggaggcgggctgcagggatgcccacccgcttgctgaccacctcgacaatgcccggggggaagtagcctatgcggtctgtgcccctctggctctcgtggatgtggcccttccagcggccgtcgggatgctgttctagcaccgtgatgacatcccctgcccggacattgagagcagtgggatcgtggaggttccagaaatccttgagcgctcggaccttcaggatccctgaggcctcccgcagtagctgcttgatttcccggctggcctgggaggtggtgaactgattcactatgtccagcgccgtctggttatacgtattccggatgttcacgtccacacctccctccagaagcagccgcaccacctcggtcttgccatacagtgcggcctcgtggagcgccgtacccgtcttggtctggcggttgatctcgatcccagctctcaggagctgcctgatgacttctctgtggccattcttggcagccaagtgcaggggcgtggtgtagttggggtcacacgggtctttggcctcaccctccagcagtgccacacataagtggctgttcagaagcagctgggccaccttgagtcggccaaattcacaggccaggtccaggggcgtcttcttggccttgttgaccaggcatgggttggactgatgctggaggagcatttctgacacctcataatgtccatactgtgcagccaggtgcagggggatctgtccgtccagcgaggcggcattgacagccgcagaggcgcgcagcagcagcctcacaggctccagccggccctgccaggctgcgtagtgcagcgggcgcatgccattgctgtccttgatgtcaacagtggcctgagcctctagcagcaaggctatgagctccaggctgccccccaaagcagcgtggtggagggcagagaatccatcagcatcctggtagttcacgttgagcctctttgtggagcccaggagctttgtcttgtggccttgaccttcgccaccagtttctgcacaccggtcacatctccattcttgacggcgaggatcaggtcctgttcacgacccatactggctcctgggctgagctctacactcaggagtccagggcaaaggcaggcaacgggtccaagctggggcgtcagggcgccatgccacagccccttggagggctcccggttccgggggagcaagtctggtgtcccaggcagtgggctcctcgtcaggtactgagggatactcccaaaggtgctccgtgaactgccaccacacgaaggaaagctaatctttgagggggtgaaggctacatggaaatctggatggatatcagcttgtggcttccgacagctccaggatgggctgggactgggcacaccaatcttcccggcttggctgtggaacaccagtgcccacccagagagcagccagcattcccttgggcctcaggcagcagcggtgcactggtctcagggctctctcccgccgcccgccgggtccggctgcctgctcg

SEQ ID NO: 685097 - DNA, 10223 bp, Homo sapiens
actttagctctctggccggcgcctctgttgcccggaagggaggcaagcccccttagagttgccagtaacggacatggctgcggcccccggaggaggggacgtgaagtgaggagggggttgggaggggagaggacgcgggcgaggaagaccagccccggggccccgatgttgtgactgtgacagactcactggggtttgtacatgctggggaggagccttcctttcaggggtgaccacattcatctgggcatgcctgcagtactcttggcccatggacctgaaggagaagcacctgggcgagcctccctcagccctgggcctgtccacgcggaaggccctcagcgtcctgaaggagcagctggaggcagtgctggaaggacatctcagggagcggaagaagtgtctgacgtggaaggaggtgtggagaagcagcttcctccaccacagtaaccgctgctcctgcttccactggccgggggcctcactcatgctactggccgtgctgctgctgctgggctgctgcgggggacagccagccgggagccgtggggtggggctggtgaatgcctcggccttgttcctgttactgcttctcaaccttgtgctcatcgggcggcaagaccggctgaagcgtcgggaggtagagcggaggctgcgagggatcattgaccaaatccaagatgccctcagggatggcagggagatccagtggcccagtgccatgtatccagacctccacatgccttttgcgccatcctggtccttgcactgggcctacagagacggacacctggtcaacctgccagtcagcctgctggttgaaggagacatcatagctttgaggcctggccaggaatcgtttgcttctctgagggggatcaaggatgacgagcacatcgtcctggagccgggagacctcttcccccccttctcccctccaccctcaccccggggagaagtggagagagggccacagagcccccagcagcaccggcttttccgtgtccttgagacccctgtgattgacaacatcagatggtgcctggacatggccctgtcccgaccagtcactgccctggacaatgagcggttcacagtgcagtcggtgatgctacactatgctgtgcccgtggtcctggccggcttcctcatcaccaatgccctgcgcttcatcttcagtgccccgggggtcacttcctggcagtacaccctcctccagctccaggtgaatggcgtcctgcccatcctccccctgctctttccagtcctctgggttctggcaactgcctgtggagaggcccgtgtcctggcccagatgagcaaggcctcacccagctccctgctggctaagttctcagaggatactctcagcagctatacggaggctgtctcctctcaggaaatgctgcgctgcatttggggccacttcctgagggtgctcggggggacatcgccaacgctgagccacagttccagcctgctgcacagcctgggctctgtcacggtcctgtgctgtgtggacaaacaggggatcctgtcatggccaaatcccagcccagagactgtactgttcttcagcgggaaggtggagccccctcacagcagccatgaggacctcaccgatggcctatccacccgctccttctgccatcccgagccccatgaacgagacgccctcctggctggctccctgaacaacaccctgcacctttccaatgagcaggagcgtggcgactggcctggcgaggctcccaagccccccgagccctattcacaccacaaagcgcatggccgcagcaaacacccatctggctccaacgtgagcttcagcagggacaccgagggtggtgaagaagagcccagcaagacccagcctgggatggagagcgacccctacgaagcagaggactttgtgtgtgactaccacctggagatgctgagcctgtcccaggaccagcagaacccctcctgcatccagtttgatgactccaactggcagctgcacctcacctccctcaaacccctgggcctcaatgtgctgctgaacctgtgtgatgccagcgtcaccgagcgcctgtgccgattctccgaccacctgtgcaacattgccctgcaagagagccacagcgccgtgctgcccgtccatgtgccctggggcctctgcgagcttgcccgcctcattggcttcactcctggggccaaggagcttttcaagcaggagaaccatctggcgctgtaccgcctccccagtgccgagacaatgaaggagacatcgctggggcggctctcctgtgtcaccaagcggcggcctcccctcagccacatagatcagcctcttcattaaagacaccaccaccagcacagagcagatgctgtcccatggcaccgctgatgtggtcttagaggcctgcacagacttctgggacggagctgacatctaccctctctcgggatctgacagaaagaaagtgctggacttctaccagcgagcctgcctgtctgggtattgctctgccttcgcctacaagcccatgaactgcgccctgtcctctcagctcaatggcaagtgcatcgagctggtacaggtgcccggccaaagcagcatcttcaccatgtgcgagctgcccagcaccatccccatcaagcagaacgcccgccgcagcagctggagctctgacgaagggatcggggaggtgctggagaaggaagactgcatgcaggccctgagcggccagatcttcatgggcatggtgtcctcccagtaccaggcccggctggacatcgtgcgcctcattgatgggcttgtcaacgcctgcatccgctttgtctacttctctttggaggatgagctcaaaagcaaggtgtttgcagaaaaaatgggcctggagacaggctggaactgccacatctccctcacacccaatggtgacatgcctggctccgagatccccccctccagccccagccacgcaggctccctgcatgatgacctgaatcaggtgtcccgagatgatgcagaagggctcctcctcatggaggaggagggccactcggacctcatcagcttccagcctacggacagcgacatccccagcttcctggaggactccaaccgggccaagctgccccggggtatccaccaagtgcggccccacctgcagaacattgacaacgtgcccctgctagtgccccttttcaccgactgcaccccagagaccatgtgtgagatgataaagatcatgcaagagtacggggaggtgacctgctgcctgggcagctctgccaacctgcggaacagctgcctcttcctccagagcgacatcagcattgccctggatcccctgtacccatcccgttgctcctgggagacctttggctacgccaccagcatcagcatggcccaggcctcggatggcctttctcccctgcagctgtcagggcagctcaacagcctgccctgttccctgacctttcgccaggaggagaccatcagcatcatccggcttatcgaacaggctcggcatgccacctatggcatccgtaagtgcttcctcttcctgctgcagtgccagctgactcttgtggtcatccagttcctttcttgcctggtccagctgccgccactcctgagtaccaccgacatcctgtggctgtcctgcttttgctaccctctgctcagcatctctctgctggggaagcccccccatagctccatcatgtctatggcaacggggaaaaacctccagtccattcccaagaagacccagcactacttcctgctctgcttcctgctcaagttcagcctcaccatcagctcctgcctcatctgctttggcttcacactgcagagcttctgtgacagctcccgggaccgcaacctcaccaactgctcctccgtcatgctgcccagcaacgacgacagggctccagcctggtttgaggactttgccaatggactgctgtcggctcagaagctcacggccgccctgattgtcctgcacactggtgagagggctccctgggagggcgtggatgatggtgggaaaggagccccactgtggaagtctgacccccacatcgccccaccttccccagtcttcatttccatcacccatgtgcatcgcaccaagcccctgtggagaaagagccccttgaccaacctctggtgggccgtgacagtgcctgtggtgctgctgggtcaggtggtccagacggctgtggacctgcagctgtggacacacagggacagccacgtccactttggcctggaggacgtgcccctgctgacatggctcctgggctgcctgtccctggtccttgtggtggtgaccaatgagatcgtgaagctacatgagattcgggtccgagtccgctaccagaagcgacagaagctgcagtttgaaactaagctgggcatgaactctcccttctgagccactggctgtggtggctgtagttgcccccgtccctggggctaaagccagacccatttctgaacaggggagtttgtatcatgaatgtttccaggtttgctcctgcacccgtggcactggaaacccagctccccgtgtcagaccccgctgtcttcctgagccctggggctcactgtggaggagctgacggcctgggcccttggccagtcctggctcttccctgggcctcaccagggacactcttgaatgtatggcctcaggcgctccctagagggggcctaaaccccctcacctgtgagctaccccctttagggatcccttgcccccttggagatcccttgccccccagtgcctctgctcgtgggtccctggacacggccttgaagccaaccttctttggaggagcaacagcagcagccttggccgacgcgtccaactcccaaggctgccgtggagggcaggggggtggtgcttgcctggatgtggccccgagtgcctcccctccctccctctgtgggggagtctcccgcctgaacctgaagatggagcagggcccccgcttcgccctggagcctcttcctgtgcctggctcaagctggctgcctgtcagtcttggggaatctggcccaggtctcctcagcctctgccccagttctgggagaagtttctactggtgtatattttttactggaaatgagccttttaggaatgaatgtagactggtttgtattaaaatgtgtcaattgctaagaaatacctgtggctggtctgtaaggccactccagggtctgcccacccccggcggtggctggcaaagggaggcctaaaccttcctccatctacgcgggtgggtccctcaggtctggctcaggcgagacccctagggtcaggggtccccatgtcacagaggcaaacacacagcccagtcacgtggaatggtgttttcattggtgttagttgggggaagaggttaatggttacagagccagggcctgggccaatggggtcaggctctccctgccctcaggtgggcagtcggggctcctgctgtggtccgaagcccctcccccattgtgtcctctcaggcagttgatagaataaattccatttaaaatatatgcatttctctctgcttagaaaataacatttacaattgaaaagttaggacttgtgggatctgttaaccccactgcctcccacccctgctagccctgcctcagtgagggaaggcgggggcaggagctgcctgggcaccaccgctgtgtatttacatgtcctctgtacacctacggagagggggcccggccagacacacgcctcctccagcctctcagggcctgggcaggatggtgggtggcaagaggcattcccttggcacaacttgggacatgggctggggggtacagagaaagcacccccaaagccccacccctacttcctccctgaggagagagctcttaccagggtccctgtccaggagcagggctgtcctgctcaatcgatcaaaccctgggaggggctttgctgagatgcagcggaggtccctcgctagtcaggttctaaggtgggctgccccacaagagctgtggtgcccacagccgcgggctgagtgggaaggggccctgctaggaggggcacttcagcctgaccagcccttggcccgtccctagggtggcaggggcctcttctgtgctggggcaaaggcagtggacttcggcaggtcacagtgggcactgctggagggctcagtccagcatggcgtccagctggtcagccagggcgtcgaacatggtgctgatgtcatccagaatgtgcttggtggaggcgctgggggtgccctcttgctccttggtgccaatgctcttctctgcggctctcagtgcagctgccagggacgagctggtctgctccagtctctgctgggcctggcctgggcccacagtcccagtgctctcaggccgtggaggaggcactgggcgggggccgagccggggcgctagcttagggccagaaaatgccagctgggtgcaggccaccgacacaggcttgggggctgttcctgctccgggcaccttgaggagggcagcaggggcggccgggggttctgtctccccattccaccgactagctgctgagctttccagacctggccctgggcagggcggcactggaggctgcatggcggggctgggagcaaggggggttggaactccttgggctggaaggctgctgggctcgggctggggaaggctagaagctggaggagactcgccaggagttggggaaggcagtggggcagcggggccaggcgtggcactggccactccgaaggccagcagtgcggtctgcagtggctctctctcccggcacttgggcctccgcttaacagtgtctgattccgtgaggttgaaatcgaggccggggggcacgggtgtctctcggggcggggggccagcgggcttcgggcgctgtttgatggtcaggttcccttcctctgcaaacggcagcccttccccagagctgccccgagatgggggcgtcccctcagggcctggctcctcctcctccgtgtctgacgcgggcccagccggggcaggtgggccagggggctctgaggggccagcaggttcactcagtgttcgccttcggggccctgtggccccttccttgggccctgggctcccatctagtggaggtggctccgggctggggccagagacggagctgaggcgcttggggggcgggggcggggggcctttgcgccgggcccgcagggcaaaggactggctgcgaggagtcccccgagctggggttggggtcacgctaggactggtccggacaagggcactgcgtcctggccgccgggtaagggtagcataactgcctagggtgctgcccactggcccttcggcctccccctcagcatccccctctgtgggccaggcggcttaggctgtgggaccggcgcttaggtcgaggcgggtctgggggagtggcagggggcccggccaagtaggagaaggcccagggtgcgccaggaggtggccctggggccgggctagagggtgagccctgggggtacataaaaacatagggtgggggtccttggccaggaagtgaagaacaaagcttaggggccgctctgtgccctctgggaggttcctctcctggggggggctgggatctccaccgctgggctgtggggcaggctgttcctgtgagtggccagacccccgtgagcgtgccccgatgctctcctggctgggagagcgggcaggtgggagggggagtggttcagggccaccccctgccatggccgcctgtagctctgggcttagttcgctgccctggaaggtgaggagccgtgggccagctgtagctgggccttctccgttctccagtccctcgatggccatcagctccggacccttggccagccggcgcccgccttcgctgagggcctccccctgcagcaggccccgccgaagctccgccagccgcttcacccccagcatgagcttcttctgatgcccgagcttgttgaccccaatctcctgcagctcctcccaggtgaggtcggccaccagccccatggagtcgtagccgctgctcaccagctgcttgtggtactgtggcagccccagtgcacacagccactccagcaggtccgttgggatgtagctgggcagccactcggcgatgctgagctgagcgatctctgaggcgatcttcttcctgtgcccaggcttggtcaccccgatggccgtcaggtcctcaggtgtcatgcggctgatggtaggcacatcatagccggcctgcagaaagtgggcagtgtagccctccagctggaactcgcttagccagttatgaatggcctgcgcgtccttcccctccagcagctgttctggccgcacgtcctgggtgaagatctgctccccagagcggcagttggccagagggcggtggctcaggttgtctgccagggacggcgggtggagtcctggcagcacctggtcctctccagcagagggcagtggctgggcgttctcaatcaggaggccagggccatggccattagtgccctcagagctctgcccgctgccggcactgcggatgctgcccacgctgccctcactgcccacactattcctgtcacctgctgggctgtctgggctgaggcccacccgaggaagctggctgtaggtaagagggtgcgggggttcttcggcaggaggctgcggtgtccgggagaagcctgggcgcaggggggtgggtgcggaggggaggcgggctgcagggatgcccacccgcttgctgaccacctcgacaatgcccggggggaagtagcctatgcggtctgtgcccctctggctctcgtggatgtggcccttccagcggccgtcgggatgctgttctagcaccgtgatgacatcccctgcccggacattgagagcagtgggatcgtggaggttccagaaatccttgagcgctcggaccttcaggatccctgaggcctcccgcagtagctgcttgatttcccggctggcctgggaggtggtgaactgattcactatgtccagcgccgtctggttatacgtattccggatgttcacgtccacacctccctccagaagcagccgcaccacctcggtcttgccatacagtgcggcctcgtggagcgccgtacccgtcttggtctggcggttgatctcgatcccagctctcaggagctgcctgatgacttctctgtggccattcttggcagccaagtgcaggggcgtggtgtagttggggtcacacgggtctttggcctcaccctccagcagtgccacacataagtggctgttcagaagcagctgggccaccttgagtcggccaaattcacaggccaggtccaggggcgtcttcttggccttgttgaccaggcatgggttggactgatgctggaggagcatttctgacacctcataatgtccatactgtgcagccaggtgcagggggatctgtccgtccagcgaggcggcattgacagccgcagaggcgcgcagcagcagcctcacaggctccagccggccctgccaggctgcgtagtgcagcgggcgcatgccattgctgtccttgatgtcaacagtggcctgagcctctagcagcaaggctatgagctccaggctgccccccaaagcagcgtggtggagggcagagaatccatcagcatcctggtagttcacgttgagcctctttgtggagcccaggagctttgtcttgtggccttgaccttcgccaccagtttctgcacaccggtcacatctccattcttgacggcgaggatcaggtcctgttcacgacccatactggctcctgggctgagctctacactcaggagtccagggcaaaggcaggcaacgggtccaagctggggcgtcagggcgccatgccacagccccttggagggctcccggttccgggggagcaagtctggtgtcccaggcagtgggctcctcgtcaggtactgagggatactcccaaaggtgctccgtgaactgccaccacacgaaggaaagctaatctttgagggggtgaaggctacatggaaatctggatggatatcagcttgtggcttccgacagctccaggatgggctgggactgggcacaccaatcttcccggcttggctgtggaacaccagtgcccacccagagagcagccagcattcccttgggcctcaggcagcagcggtgcactggtctcagggctctctcccgccgcccgccgggtccggctgcctgctcg

SEQ ID NO: 685098 - DNA, 132 bp, Homo sapiens
taaggtcagatctagaggcccccgtacattccagcgtatgggttctagtttaatgttcttagaagctatacttgaggagggtgacgggcggctgtgtacgcgctgtcacggcacctgtacaactaaagcact

SEQ ID NO: 685099 - DNA, 985 bp, Homo sapiens
ggttttatatgataattgttgtgatgaaatgatggccctaataaatcggtgcccccgatatggcgtccccgcataaacaaataagcttctgactcttacctccctctctcctactcctgctcgatcgtgctatagtggaggccggagcaggatcaggttgaacagtctaccctcccttagcaggaaatactcaacaccctggagcctccgtagacactaaaccatcttctcacttaaccgtagcaggtgtctcctctatctttagggggccatcaaacttcatcacaaaccaattatcaatataaaaccccctgtaaatagtcgccaaatacacaaaaagccccatctacgacgtgaatcgcgtcataaataaaagggaagttcgcttatttcttggtatatctccagttccatagtgttggttgtcactatacttataaagagagccgtgtgactctacaagaagagagcgttcttggaaccccgaacggaagaaggagaagctgagtttgtattagcaaaaggatatttgattttgaggacaacctgtgagttgtatattcgtagtttacaagggttgtgaaagtaagtctagaattgttagttgagtagtcagggaaagaaaggaaacatatggaagaaatagggatgtggcgggaactagctacagatgggtgctagagtacggggtggaaacccaatatgtaaacgaaggactaacgtgagtagagagagactgaaacttcggaagaaaagttatagagcacaggtcggacaggaatatgagctacagccaaagaacactgaggcagtgacaagcagccaaagatcaatacacacagggagagaggacagaacacagctaagatagcacgcacgaaggtggcaaccacctagagagagcagaagccagtccaagacagacacacaaaaactgctgaacacagaaggaggaccacctagttgtggataatcaacactttcc

SEQ ID NO: 685100 - DNA, 9083 bp, Homo sapiens
acggagcaagactccgtctcaaaaaaaaaaaaaagaacacctctttcccttcctgcccctgagagagctggcccttcctgcccagggaatggccgtggggccagggcagcccttcccttccctcctccccaggcccggagctcaggagccatctgtgtggtccgctccttcccaggtgaatggcgtcctgcccatcctccccctgctctttccagtcctctgggttctggcaactgcctgtggagaggcccgtgtcctggcccagatgagcaaggcctcacccagctccctgctggctaagttctcagaggatactctcagcagctatacggaggctgtctcctctcaggaaatgctgcgctgcatttggggccacttcctgagggtgctcggggggacatcgccaacgctgagccacagttccagcctgctgcacagcctgggctctgtcacggtcctgtgctgtgtggacaaacaggggatcctgtcatggccaaatcccagcccagagactgtactgttcttcagcgggaaggtggagccccctcacagcagccatgaggacctcaccgatggcctatccacccgctccttctgccatcccgagccccatgaacgagacgccctcctggctggctccctgaacaacaccctgcacctttccaatgagcaggagcgtggcgactggcctggcgaggctcccaagccccccgagccctattcacaccacaaagcgcatggccgcagcaaacacccatctggctccaacgtgagcttcagcagggacaccgagggtggtgaagaagagcccagcaagacccagcctgggatggagagcgacccctacgaagcagaggactttgtgtgtgactaccacctggagatgctgagcctgtcccaggaccagcagaacccctcctgcatccagtttgatgactccaactggcagctgcacctcacctccctcaaacccctgggcctcaatgtgctgctgaacctgtgtgatgccagcgtcaccgagcgcctgtgccgattctccgaccacctgtgcaacattgccctgcaagagagccacagcgccgtgctgcccgtccatgtgccctggggcctctgcgagcttgcccgcctcattggcttcactcctggggccaaggagcttttcaagcaggagaaccatctggcgctgtaccgcctccccagtgccgagacaatgaaggagacatcgctggggcggctctcctgtgtcaccaagcggcggcctcccctcagccacatagatcagcctcttcattaaagacaccaccaccagcacagagcagatgctgtcccatggcaccgctgatgtggtcttagaggcctgcacagacttctgggacggagctgacatctaccctctctcgggatctgacagaaagaaagtgctggacttctaccagcgagcctgcctgtctgggtattgctctgccttcgcctacaagcccatgaactgcgccctgtcctctcagctcaatggcaagtgcatcgagctggtacaggtgcccggccaaagcagcatcttcaccatgtgcgagctgcccagcaccatccccatcaagcagaacgcccgccgcagcagctggagctctgacgaagggatcggggaggtgctggagaaggaagactgcatgcaggccctgagcggccagatcttcatgggcatggtgtcctcccagtaccaggcccggctggacatcgtgcgcctcattgatgggcttgtcaacgcctgcatccgctttgtctacttctctttggaggatgagctcaaaagcaaggtgtttgcagaaaaaatgggcctggagacaggctggaactgccacatctccctcacacccaatggtgacatgcctggctccgagatccccccctccagccccagccacgcaggctccctgcatgatgacctgaatcaggtgtcccgagatgatgcagaagggctcctcctcatggaggaggagggccactcggacctcatcagcttccagcctacggacagcgacatccccagcttcctggaggactccaaccgggccaagctgccccggggtatccaccaagtgcggccccacctgcagaacattgacaacgtgcccctgctagtgccccttttcaccgactgcaccccagagaccatgtgtgagatgataaagatcatgcaagagtacggggaggtgacctgctgcctgggcagctctgccaacctgcggaacagctgcctcttcctccagagcgacatcagcattgccctggatcccctgtacccatcccgttgctcctgggagacctttggctacgccaccagcatcagcatggcccaggcctcggatggcctttctcccctgcagctgtcagggcagctcaacagcctgccctgttccctgacctttcgccaggaggagaccatcagcatcatccggcttatcgaacaggctcggcatgccacctatggcatccgtaagtgcttcctcttcctgctgcagtgccagctgactcttgtggtcatccagttcctttcttgcctggtccagctgccgccactcctgagtaccaccgacatcctgtggctgtcctgcttttgctaccctctgctcagcatctctctgctggggaagcccccccatagctccatcatgtctatggcaacggggaaaaacctccagtccattcccaagaagacccagcactacttcctgctctgcttcctgctcaagttcagcctcaccatcagctcctgcctcatctgctttggcttcacactgcagagcttctgtgacagctcccgggaccgcaacctcaccaactgctcctccgtcatgctgcccagcaacgacgacagggctccagcctggtttgaggactttgccaatggactgctgtcggctcagaagctcacggccgccctgattgtcctgcacactgtcttcatttccatcacccatgtgcatcgcaccaagcccctgtggagaaagagccccttgaccaacctctggtgggccgtgacagtgcctgtggtgctgctgggtcaggtggtccagacggctgtggacctgcagctgtggacacacagggacagccacgtccactttggcctggaggacgtgcccctgctgacatggctcctgggctgcctgtccctggtccttgtggtggtgaccaatgagatcgtgaagctacatgagattcgggtccgagtccgctaccagaagcgacagaagctgcagtttgaaactaagctgggcatgaactctcccttctgagccactggctgtggtggctgtagttgcccccgtccctggggctaaagccagacccatttctgaacaggggagtttgtatcatgaatgtttccaggtttgctcctgcacccgtggcactggaaacccagctccccgtgtcagaccccgctgtcttcctgagccctggggctcactgtggaggagctgacggcctgggcccttggccagtcctggctcttccctgggcctcaccagggacactcttgaatgtatggcctcaggcgctccctagagggggcctaaaccccctcacctgtgagctaccccctttagggatcccttgcccccttggagatcccttgccccccagtgcctctgctcgtgggtccctggacacggccttgaagccaaccttctttggaggagcaacagcagcagccttggccgacgcgtccaactcccaaggctgccgtggagggcaggggggtggtgcttgcctggatgtggccccgagtgcctcccctccctccctctgtgggggagtctcccgcctgaacctgaagatggagcagggcccccgcttcgccctggagcctcttcctgtgcctggctcaagctggctgcctgtcagtcttggggaatctggcccaggtctcctcagcctctgccccagttctgggagaagtttctactggtgtatattttttactggaaatgagccttttaggaatgaatgtagactggtttgtattaaaatgtgtcaattgctaagaaatacctgtggctggtctgtaaggccactccagggtctgcccacccccggcggtggctggcaaagggaggcctaaaccttcctccatctacgcgggtgggtccctcaggtctggctcaggcgagacccctagggtcaggggtccccatgtcacagaggcaaacacacagcccagtcacgtggaatggtgttttcattggtgttagttgggggaagaggttaatggttacagagccagggcctgggccaatggggtcaggctctccctgccctcaggtgggcagtcggggctcctgctgtggtccgaagcccctcccccattgtgtcctctcaggcagttgatagaataaattccatttaaaatatatgcatttctctctgcttagaaaataacatttacaattgaaaagttaggacttgtgggatctgttaaccccactgcctcccacccctgctagccctgcctcagtgagggaaggcgggggcaggagctgcctgggcaccaccgctgtgtatttacatgtcctctgtacacctacggagagggggcccggccagacacacgcctcctccagcctctcagggcctgggcaggatggtgggtggcaagaggcattcccttggcacaacttgggacatgggctggggggtacagagaaagcacccccaaagccccacccctacttcctccctgaggagagagctcttaccagggtccctgtccaggagcagggctgtcctgctcaatcgatcaaaccctgggaggggctttgctgagatgcagcggaggtccctcgctagtcaggttctaaggtgggctgccccacaagagctgtggtgcccacagccgcgggctgagtgggaaggggccctgctaggaggggcacttcagcctgaccagcccttggcccgtccctagggtggcaggggcctcttctgtgctggggcaaaggcagtggacttcggcaggtcacagtgggcactgctggagggctcagtccagcatggcgtccagctggtcagccagggcgtcgaacatggtgctgatgtcatccagaatgtgcttggtggaggcgctgggggtgccctcttgctccttggtgccaatgctcttctctgcggctctcagtgcagctgccagggacgagctggtctgctccagtctctgctgggcctggcctgggcccacagtcccagtgctctcaggccgtggaggaggcactgggcgggggccgagccggggcgctagcttagggccagaaaatgccagctgggtgcaggccaccgacacaggcttgggggctgttcctgctccgggcaccttgaggagggcagcaggggcggccgggggttctgtctccccattccaccgactagctgctgagctttccagacctggccctgggcagggcggcactggaggctgcatggcggggctgggagcaaggggggttggaactccttgggctggaaggctgctgggctcgggctggggaaggctagaagctggaggagactcgccaggagttggggaaggcagtggggcagcggggccaggcgtggcactggccactccgaaggccagcagtgcggtctgcagtggctctctctcccggcacttgggcctccgcttaacagtgtctgattccgtgaggttgaaatcgaggccggggggcacgggtgtctctcggggcggggggccagcgggcttcgggcgctgtttgatggtcaggttcccttcctctgcaaacggcagcccttccccagagctgccccgagatgggggcgtcccctcagggcctggctcctcctcctccgtgtctgacgcgggcccagccggggcaggtgggccagggggctctgaggggccagcaggttcactcagtgttcgccttcggggccctgtggccccttccttgggccctgggctcccatctagtggaggtggctccgggctggggccagagacggagctgaggcgcttggggggcgggggcggggggcctttgcgccgggcccgcagggcaaaggactggctgcgaggagtcccccgagctggggttggggtcacgctaggactggtccggacaagggcactgcgtcctggccgccgggtaagggtagcataactgcctagggtgctgcccactggcccttcggcctccccctcagcatccccctctgtgggccaggcggcttaggctgtgggaccggcgcttaggtcgaggcgggtctgggggagtggcagggggcccggccaagtaggagaaggcccagggtgcgccaggaggtggccctggggccgggctagagggtgagccctgggggtacataaaaacatagggtgggggtccttggccaggaagtgaagaacaaagcttaggggccgctctgtgccctctgggaggttcctctcctggggggggctgggatctccaccgctgggctgtggggcaggctgttcctgtgagtggccagacccccgtgagcgtgccccgatgctctcctggctgggagagcgggcaggtgggagggggagtggttcagggccaccccctgccatggccgcctgtagctctgggcttagttcgctgccctggaaggtgaggagccgtgggccagctgtagctgggccttctccgttctccagtccctcgatggccatcagctccggacccttggccagccggcgcccgccttcgctgagggcctccccctgcagcaggccccgccgaagctccgccagccgcttcacccccagcatgagcttcttctgatgcccgagcttgttgaccccaatctcctgcagctcctcccaggtgaggtcggccaccagccccatggagtcgtagccgctgctcaccagctgcttgtggtactgtggcagccccagtgcacacagccactccagcaggtccgttgggatgtagctgggcagccactcggcgatgctgagctgagcgatctctgaggcgatcttcttcctgtgcccaggcttggtcaccccgatggccgtcaggtcctcaggtgtcatgcggctgatggtaggcacatcatagccggcctgcagaaagtgggcagtgtagccctccagctggaactcgcttagccagttatgaatggcctgcgcgtccttcccctccagcagctgttctggccgcacgtcctgggtgaagatctgctccccagagcggcagttggccagagggcggtggctcaggttgtctgccagggacggcgggtggagtcctggcagcacctggtcctctccagcagagggcagtggctgggcgttctcaatcaggaggccagggccatggccattagtgccctcagagctctgcccgctgccggcactgcggatgctgcccacgctgccctcactgcccacactattcctgtcacctgctgggctgtctgggctgaggcccacccgaggaagctggctgtaggtaagagggtgcgggggttcttcggcaggaggctgcggtgtccgggagaagcctgggcgcaggggggtgggtgcggaggggaggcgggctgcagggatgcccacccgcttgctgaccacctcgacaatgcccggggggaagtagcctatgcggtctgtgcccctctggctctcgtggatgtggcccttccagcggccgtcgggatgctgttctagcaccgtgatgacatcccctgcccggacattgagagcagtgggatcgtggaggttccagaaatccttgagcgctcggaccttcaggatccctgaggcctcccgcagtagctgcttgatttcccggctggcctgggaggtggtgaactgattcactatgtccagcgccgtctggttatacgtattccggatgttcacgtccacacctccctccagaagcagccgcaccacctcggtcttgccatacagtgcggcctcgtggagcgccgtacccgtcttggtctggcggttgatctcgatcccagctctcaggagctgcctgatgacttctctgtggccattcttggcagccaagtgcaggggcgtggtgtagttggggtcacacgggtctttggcctcaccctccagcagtgccacacataagtggctgttcagaagcagctgggccaccttgagtcggccaaattcacaggccaggtccaggggcgtcttcttggccttgttgaccaggcatgggttggactgatgctggaggagcatttctgacacctcataatgtccatactgtgcagccaggtgcagggggatctgtccgtccagcgaggcggcattgacagccgcagaggcgcgcagcagcagcctcacaggctccagccggccctgccaggctgcgtagtgcagcgggcgcatgccattgctgtccttgatgtcaacagtggcctgagcctctagcagcaaggctatgagctccaggctgccccccaaagcagcgtggtggagggcagagaatccatcagcatcctggtagttcacgttgagcctctttgtggagcccaggagctttgtcttgtggccttgaccttcgccaccagtttctgcacaccggtcacatctccattcttgacggcgaggatcaggtcctgttcacgacccatactggctcctgggctgagctctacactcaggagtccagggcaaaggcaggcaacgggtccaagctggggcgtcagggcgccatgccacagccccttggagggctcccggttccgggggagcaagtctggtgtcccaggcagtgggctcctcgtcaggtactgagggatactcccaaaggtgctccgtgaactgccaccacacgaaggaaagctaatctttgagggggtgaaggctacatggaaatctggatggatatcagcttgtggcttccgacagctccaggatgggctgggactgggcacaccaatcttcccggcttggctgtggaacaccagtgcccacccagagagcagccagcattcccttgggcctcaggcagcagcggtgcactggtctcagggctctctcccgccgcccgccgggtccggctgcctgctcg

SEQ ID NO: 685101 - DNA, 332 bp, Homo sapiens
gaatacttaagcactttgaaggctccacattacaatgccaaatcctatcaaagggtattggctgcctgtagtgctttagtgcagattatgaggcctacttgaggctctgagaaaatagaggagttctgagattgactactaatgtctgccatggaagtgagaggagcagttatggtacgagtgtcatatttttgccagttctgactgaaggctctgacttcaaagcccaggatctttctagcctctacccagtgtcactgactttctagctcattgccctagtgaaattggcttgccaaaatatattgacaaaagtcattgtaaaaaaaaaa

SEQ ID NO: 685102 - DNA, 116 bp, Homo sapiens
  misc_feature (11)..(11): n is a, c, g, or t
gtgtgagactntggggctttcagttagtggaagagctgcggtccctccagctacaaggtgggcaccatggcggagaattttgactgccactactgcagggatcccttgcaggggaa

SEQ ID NO: 685103 - DNA, 231 bp, Homo sapiens
gtactggttgctcggctctatctgtgtctctcggtctacctttatctcgggtctaccttgtccctcggatcttgcttgtgtctcggctctagcttgtctctcgcgctctaacttgtctcgtcggctctgaccttgtgtctcgggtctaccttgtctctcgtgctcgaccttgtctcccatgacgaagggcactccgcaccggaccccggtcccagacaaggtagagccgag

SEQ ID NO: 685104 - DNA, 582 bp, Homo sapiens
  misc_feature (484)..(484): n is a, c, g, or t
  misc_feature (526)..(526): n is a, c, g, or t
  misc_feature (528)..(528): n is a, c, g, or t
gattgtgaagatggtcagcattgacttgatcggagaggcccacggagtcatggaatcagggggtcccagtgtttgggttacttttaaggcagttgtgagctggtcagggcatcgaggggtatgggtatcgtaaaggcggcgaggtatctgaaagatgtcgctgtacaggaacaggtgtgtagcgttccgcggttacaatggtggagttggcaggtgtgcgcaggtcaagcagtggggctggctcaaggtcggtggcccaaagagagtgatgaatttgtgctgcagatggttataaacgcagagagtgatgctgaagttaagggtttagatgtagattgtggggtgattgagcagattcaagtgaacaaagcgcctaagatgcgccggtgggcctggagagctgatggtgggattaacccatacatgagctctggctgccgcattgagatgatcgtttcggggaaggaacagtttgttcgtaaancagaagaggaggttgggcagaagagaagggtgtgggaggagntnttgcagccccacttctttcctgccccagctccactaaattccctcctgcctaga

SEQ ID NO: 685105 - DNA, 120 bp, Homo sapiens
  misc_feature (52)..(52): n is a, c, g, or t
tatcggtccccctaggctgggaactccatataccacaagtgaggccctaaanaagcagaaaaaatgttatcaacttaagagagctatattttgggagttcccactgtggctcagccttct

SEQ ID NO: 685106 - DNA, 260 bp, Homo sapiens
  misc_feature (63)..(63): n is a, c, g, or t
cgggaatgttgggcttttgtttggttttagttggaaaaaaggttttatgtaaaaggcctgttnctgttaatttaaaaaattccaaaaatggcccctactttatgttgtgttgtgacaaatttggctatatttttagtccattgaaaaatgaaactttaaaagtttgtttttaggtaatccaaaagaaaagtgtttatactttttaatatattagccccagcccaaataaaaattttttttaagtaaacctttttccggga

SEQ ID NO: 685107 - DNA, 391 bp, Homo sapiens
ttcgagctcgtacccgaatccggcgatgggattacaggcacccgccatcatatctggctaatttttgtttagatgggatttcaccatgttggccaggccagtcttaaactcctgacctcaggtgatccgcctgcctcggcctccaaaagtgctgggattacaggcgtgagccactgcacccagcctgttacagtgcttttaatcactagtatttctctttgattctttcttagaatttccatctctctgcctgcattatccatctgtccttgcatgttgtctcctttatccattggagtccttagcatattaatcatagttgttcccagaatgataattccagcacgcctgccatttctgactctggttctgatgtttgccctgtctcttc

SEQ ID NO: 685108 - DNA, 247 bp, Homo sapiens
  misc_feature (126)..(126): n is a, c, g, or t
  misc_feature (130)..(130): n is a, c, g, or t
  misc_feature (243)..(243): n is a, c, g, or t
cgcgtaccgaatctttaaagaacatcagataatcaatgtgatcggtgtacaacgaatcctgaatgctcttctgatcatcatacaaaacgaaagctgttttcggtgccacatggctgcccctaaatntagnacctttccggcacatcaaagctgacaccgccactcagcagcgttgtcaatgagcccatctccacacgcatcccctgctgacgtcagatcaaccggcaattgccactaatcttnccaa

SEQ ID NO: 685109 - DNA, 238 bp, Homo sapiens
ctctagaggatcttgaggagtcactcaataaacaaactgatgcagaccctggaaggacactgtgttcgtgcatgcgggccttttgctaacattgctcacggcaactcttcagttgttggcttgataaaatttgcctgaaactgggttggttgaagaagggatttgtacgtgaccggaagcttggcctttggtcgctgacactcggaactggagaaacttcttcaaccatcaacgtgcc

SEQ ID NO: 685110 - DNA, 260 bp, Homo sapiens
cccatacagaggtatgtctcaatacatcatccagcagctcggggtatctcaccgaagaagctctgactaaagtgaagaggtttagaattggggcttataagctagagacgtgacaccataatctctgctcaaggaatgttttgaccatcttaaagtcaatgaggaaatggcacctgtcccccctatttggctgcgaagatgaaaatcaatcaaagtgatatttattaaacaacttcagaattcttggaatttcagaagga

SEQ ID NO: 685111 - DNA, 817 bp, Homo sapiens
  misc_feature (344)..(344): n is a, c, g, or t
ataacaactttaactacgggaaaggactggacgaacctgaagctgcgtgagacctccgaccacctcctgaatagtgggagactgcacccagagccctgaagcttggttccttcggtcattaggaattctctgagggcagggcagcaggctgcctttggcttcgctattcaggtcatgtacggcagaatacctagcctccccgtatctgctagttaaggccctgatgaatacagggccctacgggggaagccactcgaagtaaacgcctttactggcacgtgctaaccataccaaatgctcggattactgttctatacggtgaggagtttggccatctgttatcncttggtgctgcgtgcagagatgcgtctatcacggcaaaggcacagtagatggaccacgggtcttgccgtctaggtattcgatcggatagagacctatcaacgggtctggaagctagccccctgcgaaagaggctatgtcgatcggaactttccctcgtcaagtttgactaagacgacattgtccgtactgtgctacaaagcataattgtctccgtcgaagatgttaatcgcttttccaggggcgaaacttttcagagggagaccgggggtttaaaatggtgcgaaataaagggacttctttatgaggtcaagggtttattgtgcaactattcgattaaagagggttgccaaattcggtctacgagcgttggggaaacgacgtacgtgatgaagtggactgtcttctttgtacaagacttggagtaggcaggatgagcaagcttacacacattttgaaagcttgatttattaac

SEQ ID NO: 685112 - DNA, 139 bp, Homo sapiens
gtgtcgaacatacagaattgagtgtgcatgtaacataacttattgtaccactttccctgaagttcgtcagagcacctggatcagaactccgatcttctgaattgagtaattttctagaataggttatattaacagttga

SEQ ID NO: 685113 - DNA, 226 bp, Homo sapiens
cttgagtgatccccagcacatgaggatggttgacatgcacatgaggaggttgctcagtgcctgtaatcccagcacttctgtggaggccaagacaagagtgatcacttgagtgctgtaagtttgagacctcctctgtgctgtcaacctcctctgtgctgtccagctcctctgtgctgtccacctcctctgtgttgtctatgtgtccaacctcctctgtgcttgtcca

SEQ ID NO: 685114 - DNA, 347 bp, Homo sapiens
gtatctatctacactatctcagttaaacaacgcaagctcgtactttgacatctaatccatgaattctccctcccaataagatagagaggtagggttccaaagactgagaaagtttgcatcacataaattttcatataactgtaacaataagcatccgtcttctattctctatcaaaccctgtcgaatccttttacctttggtcacattcatttaatacctgagacttcatccaatttgcttaattaagccatcccaaatgtaaatcaataaatgatgacagtgtgtaagatggcataaagaaactcttgagcattagcatagatcactggcagaattctcactacag

SEQ ID NO: 685115 - DNA, 114 bp, Homo sapiens
gtatggtagtctgagtttggcagggcatcaaaacatttgaagaaaacacttctacatcacatacccccttaatcccacccaactacttacatacttccagacgttcttgcaaga

SEQ ID NO: 685116 - DNA, 1225 bp, Homo sapiens
  misc_feature (231)..(231): n is a, c, g, or t
  misc_feature (1225)..(1225): n is a, c, g, or t
aaaatggaatgtgatttcataacctatagattatgtgtaaattgtcattccactcagattacataaatggacagattctatcatcgagcaagtcattatctgaatctcaccgctagcgaatcttaacttgtacaacatcgtgcgtgctcttcaatatggcaccatagtcgatactacgagtagtactgaacacactaatctagttacaggaatagcgattgcgattgatanaccgatatatcgctaccgtgctccattactcggtcttcgagcaatacatcatgtgacatgaaaggcttggacgaatgtgtcatgcggtcacactctgactctgatggtagcaacgtcctggatcaagtggtaggaaaattgtcattcaatgagtatcagaacctggaagttctgtgccttttgctttctcttcaaagattgaggaggttagtcagacacagttcactttgctgaagtgtgcgggtgtcatctcatcctaatgtgaactgtgatccttcgtgtttatgcaatcatcttatattcaccacttcctaatttacaaaaccacatttaactttttagaagagttaacgcaatctacgttgtagttgatgtagtacatagagttgtcgaatgcagtgctcctaattagggtcccaacatctatgggtacgactttcgtttattagcatatttatgctacgattattattcattgcataaaatagtgtgccgtgcaccgtagaccagggtaggaaagcgacttgctggcagttgtaagttcactaggtaaaggctctaattgaaacttcttctattgcttgtacgcgacctactggtggccccgtagacagcattggatatttacttgacgcgtacagttgagcatgggttctaacgtgtaggtcacccaatggcgcctcttgttttgaaccagcgagtgtccttgtagcaatttgaacagtgagcgctataacatgtgttccctttaaacttttggtgaacctccactccggggtgcgcctttttagtgggaaagtaatttgccccattggcgagccattaaacagatttgtgtggcgtttagaggtgcggactgactccttcagaagttagcaatgtgaaccacccttttttccttccctgtgaaggacatgtgttcaactagcccgataagacagcttcgtgcgcagtgattgaacaagctgggggtgtaaaggaaatatcactcagn

SEQ ID NO: 685117 - DNA, 322 bp, Homo sapiens
ggagtgaaccttgattatgatagttgatatagaggatcccttggtaggacactagtgattagttgagtatctgtgcataacatagttactagtggtgggcaaagtaataaaccccaacgcaccaattgtcatgtactatgttacacagcacaattacatatgaagggggaattacgagtgcagatcacattactgttgctcatcagatgagcttaacacaagattatcctggagtatctactgagagcacatgtaattaccagcatcctttacaaacctgtaagagggacgtgcgaaggtttacgaaacacgagacggtggg

SEQ ID NO: 685118 - DNA, 382 bp, Homo sapiens
gacctctgtgacagcaaatgctcttgtgccctcctcaaatctttcaagcacacccttatgccacacttggaaaactactaggttcctggcccctgggatccttgacagtccacccttcctggtaaaggctccctcaatgcccacctggaaaagcatgtcgtccaggtaatagtccctcgaaatgatactctttggcagttagagtctcacctatctctctgaactccaaagagtctctcccgcgcttcaggctctctgtgtacagatatgccttccacttcctccctcgtgtcttgctcagggagtatagagagtgctctggcatcgtctgtgttcttcagctcccccgcggcacagcacatcgccgtgtcccgagtgtgcg

SEQ ID NO: 685119 - DNA, 164 bp, Homo sapiens
tgtagatttcagatgagtctgcagacgcgtggggtacccctgagaatgggtcggccctgggtccccgaaatcccaagtcccagacttgcggggggtgtggggatatccagaattggttgcaaatacgatccatatttgatgattaaacacaaacagtcctcaga

SEQ ID NO: 685120 - DNA, 797 bp, Homo sapiens
  misc_feature (120)..(120): n is a, c, g, or t
  misc_feature (129)..(131): n is a, c, g, or t
  misc_feature (136)..(136): n is a, c, g, or t
  misc_feature (142)..(143): n is a, c, g, or t
  misc_feature (161)..(161): n is a, c, g, or t
  misc_feature (193)..(193): n is a, c, g, or t
  misc_feature (224)..(224): n is a, c, g, or t
  misc_feature (226)..(226): n is a, c, g, or t
  misc_feature (232)..(233): n is a, c, g, or t
  misc_feature (315)..(315): n is a, c, g, or t
  misc_feature (332)..(332): n is a, c, g, or t
  misc_feature (359)..(360): n is a, c, g, or t
gacgagccctcaggcgaacctctcggctttcccgcgcggcgccgcctcttgctgcgcctccgcctcctcctctgctccgccaccggcttcctcctcctgagcagtcagcccgcgcgcggncggctccgnnnatggngacccnnagccctggcgtcgtgatnagtgatgatgaaccaggttatgaccttgattnattttgcatacctaatcattatgctgaggantntggaanngggtgtctattcctcatggactaattatggacaggactgaacgtcttgctcgagatgtgatgaaggagatgggaggccatcnacattgtagccctctgntgtgctcaaggggggctataaattctnngctgacctgctggattacatcaaagcactgaatagaaatacgtgatagatccattcctatgactgtacattggatctagactgcacgagctacttgtaatgaccagtcaacaagcgggacagtaaaagtaattggtggcagatgatctctcaactttaacgttgaaagaatgtcttgatcgtggaagatatcctcgacactggcatataaactgctacttagcttaaccttggtcaggccctgtaatccaaagaataggtcaagacgcaagctgtatggcgaaaagggaacccaccaagtgtcaggatcatgaccagacatcgaacgacgcagaaaacttgcagaacagttagatgaagcattagccctggactattcactgaaatcgtcacggacattggaaccacggcacggaacaataaccgaactgggaaccc

SEQ ID NO: 685121 - DNA, 1350 bp, Homo sapiens
  misc_feature (1)..(1): n is a, c, g, or t
  misc_feature (542)..(542): n is a, c, g, or t
  misc_feature (572)..(572): n is a, c, g, or t
  misc_feature (1020)..(1020): n is a, c, g, or t
  misc_feature (1024)..(1024): n is a, c, g, or t
  misc_feature (1026)..(1026): n is a, c, g, or t
  misc_feature (1056)..(1056): n is a, c, g, or t
natccccttctctcttgatgttgtattggtatgtgctgccgcgccaaattttatatccaattgacccctcttgtatgggtgtgtgcgaaaaagcgaacgaagacgccggggatttttttagggggggggacacccccttatgagagggaaaccctcttggaagggggattccccccccccacgaagggtttggtcgccccaacgaaaaatacctccagggccgttgtgtgtttataaaacctgtccctggtgcctcttctctttgttaccttgaatttttaccccggcggttcccccctataaaggggtttctcctcgtagaggcccccctcgtgggtttgtgcccgaaatttttctcgggcgcatcctctagagccctcaagaaaaattttcaagagaagatttctcacccggggaggatttctccacaccaagagagagcacacggagctgtggcgccccctctatgggaatagcgaccctagtttgggtgttttttgtgggagagcctcccacgcgcgtttctgtgtcgacacgctgtnaatagagagagcgcccaaaaaagagagggnctctgtgatatagagacaccactgcggacactctgggtaaaataaatatgtgggtgaccccacacaataaaaagagtgtgtgttatatatgtgtgtctctaacaatatcatagagagatatatatagagatagagataaataagtagtgtaaaagagaggtggttaactcttagtagaataggcgcaccccacactgggcgacacacactgtcgtctcttagagcccctcacacatacaccgtctctccttatattgtgtggggtaaagagagatactccacacccctctctcactactgtgtgtgtgtgtgcctcttgtgtgtgtgaaaactactctgtgtgttttagaggggtacacacagagataagagagtctcacttgtgaaatattttgtgagagaataacacttctctttgtatacacacctctccacctttgtgtggggngttntnttgtggagagaagaggttaactctcacaanaaattctcacagggaagagcacaccaccacttttataatattatttgttgcttctggagagtggctggacaccccacagtgggataccctgggcacacaaggtacaccacacccgaggagagtgtttaagacggttccagagtggaaggtgggggtgaaaaagagttacatacacctgttccagaggtttgtgtggttacaccccccgtaaatgggggaccaaaagtattgttgggaaatattttgggaccttttatgaagttaaaatttattaacaccagaatttttcaccca

SEQ ID NO: 685122 - DNA, 124 bp, Homo sapiens
ggatttgctggtgcagtacaactaggcttaatagggatagggatcgaattcgaggctcgaattcgagctcgaattcaagcttctaacgttagaagccttgaattcgagcggggaggtagtgaca

SEQ ID NO: 685123 - DNA, 761 bp, Homo sapiens
  misc_feature (264)..(264): n is a, c, g, or t
ggggccaaggggacggggtaagcataggacgaagaccaacgtgtgctgtcaaagcaatagcggggccctgtcggacgagaagaccggagggtgatgggctcaggagggtcgcgtggtcacaaagaaagcaaggcaaatacgagatgcagccgtgagggaacaccgcgcaacagaggacccgtgcgaaccccatctcttcttggaaagcgccacatatactagtggcaacatgtggtgagacccatcgtttgtgtggaataatcnggacaacatgcgcgcagatcatgtattcggtgtagcttccaagccttagtgaccactgcgttgactggggctagctaaggaatgcagaagccgctcctcaaatatgacgattctgagctaggaccctggcttcacggtctagcgcgatttggctcttgtaacaagccacaacttggacgaagtactgctaggcatgcgaatagagggccgtacgcctggagtctagcaggcacgctgtcaagcgggacgccaagcagcttatggaacacgcacgtgtcggttctctgccagaagatgctgtgcgcagtgaccgtggtctctgaagagcacgacaagcgcaaccagcccgctaggactgctgctggagcatggagcacgtcctacttaaggaaaatgcattttaatcagcgtatctctttgctacttaatgtggaaagacacgcctatgtcccccgtcggccaactctgggggcctggaaatgctgcagtggggatat

SEQ ID NO: 685124 - DNA, 127 bp, Homo sapiens
  misc_feature (60)..(60): n is a, c, g, or t
  misc_feature (76)..(76): n is a, c, g, or t
  misc_feature (114)..(114): n is a, c, g, or t
aggatgccctaaagccccacccagtccggggggaatgggagcagttccaagaccaccccncccctttttgtaaatnttgttcattgtaaatcaaaaacagcgtctttttcactntgaaaaaaaaaaa

SEQ ID NO: 685125 - DNA, 480 bp, Homo sapiens
agatcggaacatcggttaaagtctatgcacgtttataatgtctgctgtccatgtaagagtgcaataattattgattttgttacaaatagcattttatcaagtaagtaaacttacaagtacagaatacacaaataatgaagatcaattctgtgttagtgtatgtgtaatgtacagttaaacatatacatgtatatatatatacatattcgaatgtgcacaaaacattcgttggctggccaggcgcagagacacacatctgtaatcccagcactttgggcaggctgaggcaggtggatcacctgaggtcaggagttcgggaccagcctgaccaatatggtaaaatcccatccccactaaaaatacaaaattagccgggcatggtggcgcatgcctgtaatcccagctactcgggaggctgagacaggagaatcacttgaacccgggaggtggaagtcgcagtgacccaagatcgtgccattg

SEQ ID NO: 685126 - DNA, 659 bp, Homo sapiens
tatagttaaaagttaaaggtagtccccaaatacttttcatattgacaatcttacattaaatgtcccaaaacacaggggcgtaatctcgtgggacccgtcactagcgggctaagggcttaaaggcagagacgtggtgactggggtctctcgggaggggcctctgggttctccccggggctcagggctggctggggggctgggggcgccaggggctcgggcggacctagagggtggtgggacggcacacgctgcagggagggccttctcttaaccctccgagaggtggggactgggagaagattccctctggaatgtcccaaagagagggcccggtggcccagggggacctcctcctgggcctcccaggtgggggtgggtggcaagctgggctctgggccatggctccagggctcgggtggggcccaggggtgtgccactccagtgtgctgcgtgcttgtgaacactggcctgttctggggaccagccccggggctcttccaccagagtattgggggggggtcccccttgtggctctcaagagaagccccgtgtgccctggaatggtccgtggggggcagggacccctgtggctggggaagggtttgccacagggggaacccgtttgcgcctggtgcctgatgatggtaacccgtgtacgg

SEQ ID NO: 685127 - DNA, 561 bp, Homo sapiens
tctggcttttgggataagactaatgtccatgtcaaaatgattcttgataaaagcatcctagatgttaaatatttattttaagctaaatgttctacttctgagaggttaaaaaacaaatgcctttccatgcagagccttttgccagtcaatgtttgagtttctttaggcttttttatttggctctgcagcagctagctaaccaactgcattcctgagatgagctgacaaggaggcagaaatgaagaaataaacaaaaagccatgttaatttcaagcttcagtaggaatacaaagagaaatattaacatttgctgaatgacaaataatgaaatggctggaaaattttaatgcttctagcatgcttttataagctctcctggaattttccccccatcaggtattgcacatttataaccagcagtgcaccatgtaaaggcagttcgataggttgtttaatttaaagattggtatttctgagcatatagtgttcctaatgcaattcctaagcccatttacacttctctgtctacccgaagtacccacatcttcttagcataatctt

SEQ ID NO: 685128 - DNA, 925 bp, Homo sapiens
  misc_feature (176)..(176): n is a, c, g, or t
  misc_feature (180)..(180): n is a, c, g, or t
  misc_feature (191)..(191): n is a, c, g, or t
  misc_feature (209)..(209): n is a, c, g, or t
  misc_feature (214)..(215): n is a, c, g, or t
  misc_feature (250)..(250): n is a, c, g, or t
  misc_feature (253)..(254): n is a, c, g, or t
  misc_feature (285)..(285): n is a, c, g, or t
  misc_feature (308)..(308): n is a, c, g, or t
  misc_feature (313)..(313): n is a, c, g, or t
  misc_feature (317)..(317): n is a, c, g, or t
  misc_feature (319)..(320): n is a, c, g, or t
  misc_feature (335)..(335): n is a, c, g, or t
attgtaattgcttagtgcttggctaatttccaaattattgcataatatgttctaccttaagaaaacaggtttatgtaacaaagtaatggtgttgaatggatgatgtcagttcatgggcctttagcatagttttaagcatcatttttttttttttttttggaaagtgtgttagcttntggntactcaagggntaagacagacaataatanttcannggaatataataatcttaactagttaacctcctcgngtnntggccaccggataaggggatatctttccttnaagggaccctaaatggttggaantttangatntnnttcaaaaacttattncatttagggcacatcggtttggcggtttggagcaggggtgcagttaggggtccatggataatatcttggacccacttggtgtaacactctggagttggccaatatttttaaatctctttagaaaatataccaatttgttgtttggacacgctattcttattgggattaggggtctcatacaatatgggggttcaggactcttacaaaaaacctctggggctatctattaaattcaattaccctttagaggggtatggtattaagtagggggttcctggacctgggaggatgttggaacggttaaaattggattgtgggtacccaagggacggattaggggtcttcctatataaaccaaggttttcttagtaacctagatggcaagtacagggctgtttgttgtaggactcagtacaaaaggttggtttttaaaaattacttcccagggtgaattggtcaaattcgtgttacgaactgtatttttggggaggttggtcttttaacaggggaattttaaggaggattatttggattaattacgggctaaacatttgggggattgaggattgggggtttcctcaggttaagga

SEQ ID NO: 685129 - DNA, 584 bp, Homo sapiens
tcggacaggaggtaaggacaccatcaaggaacggtataagcctataagagcagagggaaccaactacagaacagtttaagataaagcggggcaggcagagggacaagtgaaagaaggttaccagtctcatcgtgacaccatcgtgcttttatgtaagccagagcctgagctgaaggctgccatcccttctgctaatccagcaaagaccaggcagggcagggaggtggtaaatgtcttaaaatccttatggtcaaatctggatgaagtaaagaaggaaagagagggtcgggagaatgactggaaatctgtgaatttggacatgacaagcaagttttggacagcccgtggctcaggagggtgtgataaatgaagaagctctttcggtaactgaactagatcgagtctagggaggtcttacaactaaagtccaagattctctaaagaaaggggagggacttcttaaaaatatgcaggtctcagatcaggaatttgcgaaaatgaaacaatctaataaggaagctaacttaagagaagaagttgggaagaatttagctagtgcatatgacaagtgtggtgaacttgta

SEQ ID NO: 685130 - DNA, 286 bp, Homo sapiens
ctcggtcctgtattgtggaagctgatatgcagcggcgggattaaatctacggacgcgtttgtttaaacaatcgtcggtgcaaagaacatttttgcctgacacttattgagcacccacaccagttctgcttcccgccaggaaggcaacagcggcacggaaactgcaccgattttcaggcatgcaagatagataacggtaaattcacaccagccaggcagttgaaatgcgatgcgatcgcctgattcaatacccttcgctaacatccagtttgccagacagctcgcgg

SEQ ID NO: 685131 - DNA, 316 bp, Homo sapiens
  misc_feature (251)..(251): n is a, c, g, or t
  misc_feature (285)..(285): n is a, c, g, or t
  misc_feature (309)..(309): n is a, c, g, or t
acgtgaaaaaatgctcaatatcactaatcatcagataagtgcaaatcaaaactgcaatgagttaccatctcttaccagtcacaaagttggagatggtggtgagcctgcagaggaaaagaaacagacactgttggtgggaaagcaaacttgttcagccgctatgggaaagcagtttgggagatttctccaaggaacttaaaataggaactaccattcaagcctggcaatcccactactcggggatatatccncaggggaaaggatttcatttttttcccaaaaggncacctgcacccatttggttcattncagtggc

SEQ ID NO: 685132 - DNA, 271 bp, Homo sapiens
cgacagtcttgcctttatgacctaatcaccttccagagcccccacctcctaatgccctcactggggggctaggtttctccatatgaattctgggggggacacaaacattcagaccatggcaggcgttctctttccctcaaccgagtggctggctctacaactacaacaacacggcccatggctcacttccaaggagactttctgtggagtgtgtccttggacacagaggttgcatccggcctcagtgtttagttgcataggttcaccctac

SEQ ID NO: 685133 - DNA, 1130 bp, Homo sapiens
gggcaaaatacaaacatagactttattaaatgctgctcaatcccccaatgaagatctttcattacaaaacagttttccacacaacgtgcaagtttaagaaatgtggaagtggtactcgtgattaacaaaagagtgtgtgagaaatacttgaccaagttaaaaacattacaagaaccctctattttaggtcaacctttttcagagcttcttacagaaggaagcctacgtggagtttcctttaaattaaagccaggcaggtgacaactagtgtgcctcgtgttttcaccacacgtggtgggacctcaaagccctccatcccgtgggttcaggaggggaccttaggtgtgaacggaacaggttgtggtgaggaccgtggaaagggcccgtgccttcagcctttgtgaaaggaaagagagaggacattgaattgtgaaacggcaaagcgtgggataattcaccgtgagcgtgccttcttacccattcttgtttaccacttcgtggaaaatttgcgaagaggaaggggggaatattcagtgaggaacaactctgaaaaattttgggggttaccttctcccaagactttaatttactattttgggaggcttataaaagagcctgggagaatttagagcggtttgcgcgctaaaattttccagaagttaacaggtaaggtggatttcaatgtgagggcaagggggatcaaggggccagggttaaattccgcccccaatcgaatatttccccggagggctgatggaccaaacggagcaacggggtacacggcgatgacttaccctataggctcatcacatctcagggaaacgatatatatcactacccccttagggaattgttacaccctacaggggtttcggcccccacgtgcttgcaacaaaaggccccactttttcttatcaccaagggggggaacacccaattttatcacgagcgagcgacaactatacccgaactatcctactgggtgcgaccaccccaatggtcatacaagaagcaaacctatcacaccgtgctataaagtgcgttaaaacacatcccccgataattgatcagctgcgccacaatcacccagcaaggcagaaaacaaatcaataaatacgtggcagaaacat

SEQ ID NO: 685134 - DNA, 875 bp, Homo sapiens
ggtcatctactctaccatctttgcaggcacactcatcacaggcgctaggctcggactgattttctacctgagtaggcctacaaataatgatgctaccttggattccagttctaaccaagaaaataaacccctcgtaaccacaggaagctgccatcaaggtattctccgtcacggcaatctgaccgcatcccatcaactcctctccaaatatctatccgtcttcaacaatatcactcgtccggagcaactgaaccagtaatcaatattaccaatccaatatgtcatcattaataatacataactggcatatatcacatagaacactaggcaatagccccctttcacttctgcagtcccacaagtttaccctaaggcaccccatcctgcatcgatcacgcgtccatgcattccttcctcgacgattgtacaatagaactagcccccagtcgtcatattcatagtaccacaagtcgtctcccctcactaaactgtaagccttctcctcacgtctctcaatcttatccatcatagccaaggcgagtctgagcgtggcctaacaccaaacccacgcctatccaaaatcttatcatactcctcaattacccacataggatgaataatagcagttctaccgtacaacgcctaacataatccattcttaactttaactatttatattatcctaactactatcgcattcctactactcaacttaaagtccatgcatcctaacctactactatctcgcacctgaaacaagctaaatgactaaaccttaattcatcacctcctctcctagaggctgccgcgtaccggttttgcccaatggcatatcaaaattccaacaatagtctatccacattacccatactcta

SEQ ID NO: 685135 - DNA, 162 bp, Homo sapiens
cagaaatgtttgaaaaagtggctggacgcggtggtgcacacctgtaatcccaacactttgggagcgggaggtggcttgatctgggagggggaggtgggtggatcgcttgagctcaggagtttgagaccagcctgggcaacatagtgagaactcatctctgtt

SEQ ID NO: 685136 - DNA, 161 bp, Homo sapiens
ggactactggttaacgaaattaccgaatgctgagggtgctccccgatttaacccctgtgtctgtgcgacacctttatccttaatcctttcactgggtgttaacttccacttactattaagatgtcgggagagatctttggaaatccatactcctgtgttcg

SEQ ID NO: 685137 - DNA, 100 bp, Homo sapiens
tggcgacggaatttgagtgtcctagtcgcaagtccaggtgtgttagcttggagacaagtcacttggtctggtgaggccaggacggcaactgagggatggc

SEQ ID NO: 685138 - DNA, 911 bp, Homo sapiens
ggtctgtattacacggcttaccaaacggttaccacgttcgtgttaacagaacctatgtttgttgcggcttactatataggcgcagacagtcccccttctgggtaaaagccccttgtgccgtcatccctctgttggaacttgtcctgcagacattcttctcggtgtgggatctgctgttgccgcgcagcaccgtgtcaggacattctgagagacttttgcgaaaaacacgagcacgaatactcagggcatttttcccggccgcgccctgtgacaggagttctgtacgggccacctatacttcctgcacgaggtggtcgcgcaagacagcaatggaccagcatggtggggtgggttgtacacgccaccccggctcgagcggagccgccaaactgggttggcttgttcagaaggaaaatcgacacagagcttgggagggacgaaagagtttttatgcagctaactgctgcacccacgcctgtcgcgtctcaatactctcccgctggtggtagggatgtctctttctccaactcttcccaccaggacgcctgtttggtcctcactccgctccctcagaaatccgggggaaaaaagccggctgtgcggacgacaataagaccaccaaagcgtcgtccgaacacttccagaggtaaccaaaattcctcctccaattgctgccaaataattaaccttaatgctggatacttgagggggtaaaaatttgtaaaccaatagactgtcttgtgagacaccgagcatccaacacgcctttcgtccaagatgttgtctgctcataatacatcttttcaagaagaccacgttgggcatggcgatacacggcttggtttgtcatcgcgccgccccaaaaaaaagtctttaggggggaaaaaaaaaatgaaaacgcccacaaaaac

SEQ ID NO: 685139 - DNA, 938 bp, Homo sapiens
cttaactatacacagaaatacttgcaaatcacatatataccactaaacccatactaagcacatccccagctcatctttgtctttagcctgatttcaaacatgcccacagctattccagcaccacctaacagaaaacaagtcagagttgacagaaaataaacaactacaaattatcaaaatatcttgcaaatttcacaaaaacctatcaccatgtgaagataccattggggaccttcccaggatgttgggagagacccccctagcttaaacagagaaaatccacctttacccatctgctttccactttccaacactttattgaaaccatctgtcttctgtcatctcctctatcccacatccttaaggtattacactgttttatgcttttactgttattttagagaagtttcaaaaaaatagactcatgttcacatcatacttacctacaagtcttcattttattcagccttttggtatcaattccaattaattccataatatgtacaataacttttatcattaaactactgacctcatttcattataactatcaattgcaccttgtttttaaaacagtataaacaggtatctacaaaagtacaatgttcattcaaggactaagaagtttactagtggccctttacccacacaagtatagaatctttacctctcccacaataagcttctctgtctgcaaaataatctgtatacccatacctgaggagggcttggggtaggcctccgttacatttacattcatcctttcaccattacgaggtgggcaaacagactaatcttctctcagtctaagtaatatgatctagacaacgctcacctccagccaccttgtgagccccaagccgtgagacattcgcgcggcactgactctcgtgtatactgtccagccctcaccacccagaggtacacgataatcatac

SEQ ID NO: 685140 - DNA, 323 bp, Homo sapiens
tcagccatggtgatgctagtatagtacgggtgccagtattgcccagagtggctagtattccacagactagccagacattgcacaggtacccagctatggaacagataatagcattgcacacgtatccagtacttataacatatgttaagcctgtcccctctggcatctccatcacctcatttcttaggataatgagaaagtgggacacgagtcccatactgcattttatgaccttttctgaaacacttgcctgacttctaacacagccttattttggtctcatgttctcacattggcactggatggcttttcgacctgagaag

SEQ ID NO: 685141 - DNA, 494 bp, Homo sapiens
gggtctcataaacaaaggggaatggatcttcttggatcatttatttggtccttggcactaaatttcatctttatacttaaggttatttaataaaataatcagctatttaaggggaaacaattataacataagctatacatggcaggtagcaaggaataatcacataactacagatatgaggaagaccgtatggtctcagaagctggattggggctcagagatataagcagcatataaaacccatttctcagaagccggtgtacactaaagcagagatcccaaacaagggaaacagtttttttctatttaaccctaataaggatatccattccagcagatccttagggaaatctaccagaaaaaactggctcatcaaatccgggtggggtggaaagtgatactggtggggggcacatacagggctcttttacatcccatggagccgtgaggtgggctcagattcatcacaagaccctggtctggtcattcacctc

SEQ ID NO: 685142 - DNA, 164 bp, Homo sapiens
cacgagggaaatcaatatgaaagaaaacgtgacaaggcaccaaagcttaccgtgacaatcagagctttgttgcacaacctgaaggaaaagatcgcccttttgaaggacttattgctaacagctgtgtcaacacatcagataacacagctttgaaggggaccgaa

SEQ ID NO: 685143 - DNA, 151 bp, Homo sapiens
gtattaccgcacggtgctaagaacttaccactatttaagactctcataatggctggtgaaataggtgggcttattagttaccatattacagatgaggctgtattctagctgtcactgctacttcctctgtctatgctgttcttctccctct

SEQ ID NO: 685144 - DNA, 426 bp, Homo sapiens
  misc_feature (190)..(190): n is a, c, g, or t
gcgcgcagtgcttggccgttactttggttgtgggccttcgttctttgtgttatgcccaagttgccgtgtagtggggcggcgctgccttggcacgtcagtcggctggatgtggcctccgccccagcgcctgttctttggtacggttccccggagggccttcgtgtgtggtttccccaccgttagctcctcngagtggtcgtctgacgcgccctcgcgcctcggctgtcttcgtactatggtcccacgcctcctccccctcccgttgagttgttcccccttcggatcccggcctttccgacttccgcggcaccgatcgtgacgtcaaaggcaggccgtgtggtatcgcccgcggaccgttcttgttgttgtttgtccggcgtgtgtgttgggtcatccttgatgtgtgttgctccgcaccgaacaaga

SEQ ID NO: 685145 - DNA, 442 bp, Homo sapiens
  misc_feature (12)..(12): n is a, c, g, or t
  misc_feature (70)..(70): n is a, c, g, or t
  misc_feature (72)..(72): n is a, c, g, or t
  misc_feature (81)..(81): n is a, c, g, or t
  misc_feature (96)..(96): n is a, c, g, or t
  misc_feature (156)..(156): n is a, c, g, or t
  misc_feature (159)..(159): n is a, c, g, or t
  misc_feature (168)..(168): n is a, c, g, or t
  misc_feature (184)..(184): n is a, c, g, or t
  misc_feature (187)..(187): n is a, c, g, or t
  misc_feature (189)..(189): n is a, c, g, or t
  misc_feature (217)..(217): n is a, c, g, or t
  misc_feature (226)..(226): n is a, c, g, or t
  misc_feature (257)..(257): n is a, c, g, or t
  misc_feature (265)..(266): n is a, c, g, or t
  misc_feature (273)..(273): n is a, c, g, or t
  misc_feature (312)..(312): n is a, c, g, or t
  misc_feature (323)..(323): n is a, c, g, or t
  misc_feature (330)..(330): n is a, c, g, or t
  misc_feature (344)..(344): n is a, c, g, or t
  misc_feature (346)..(346): n is a, c, g, or t
  misc_feature (353)..(353): n is a, c, g, or t
  misc_feature (406)..(406): n is a, c, g, or t
aggggtgaattncacggtgtaaacaaaaggtatataaataaatggaggcttcctctgggttagggtgggntnagctaagcngtatccccctctccntgggccaagctgctcttgtgggagtaaagtggtggaaggctactagggagagagggatcnctnggccctttntagtgtaggagggtcnctncnccagtggctgagatggagggcaggaggngcccaaggnacatgacagggttgggggagggagttataanggaggggnnagggtgnattctgcacccgagccaagaggtggagaatggacctgtntctatttgtcnctttcancctctgttcctgcncnagaaatncagggcccagcctgcgcgccatcttgacctggtacaaggatggggtttatgangctagttatactctggaggtgcatcacacagcatta

SEQ ID NO: 685146 - DNA, 655 bp, Homo sapiens
taacccctctttagttttttgggctcaaaaacacaatttaaacccccccccccttgtaaggggggggcaggaggacaaaaggaaagagaaccgcacagaacgccaggcggggaagaccaacacaggttcggtgcccccggacaaattaatctcgcgcccgtgagtgggatttggggttttcacatttcttgcccctgtgtggggcgtgggagtgagaagttgagaggggtggagacgccctcagtgggagggagcaagcggggcccaagtgtggaggccccctttgggggagacagagtctctgaagagagggggtgagagtgtgggggagaagagcgcccaactgtgtctcgcggacgcggaggatctctgcggggggggacacagccggtgggtgtgggtctctcacgagagaaaaatgtactcgagagagtgagggcgagaaagggggagggttgttggcgggcagagggggtccctcctcaacgagggtttgtccacgggagagtgggtggtctccggggaggccccacagagaagaggggcgtctgcctcggggtatgggcacctagaaaggttgggccgcggagagggagaaaagaggggccaaccgggttgttggtaaccacaaggaggtgtccccaccaaggcaggg

SEQ ID NO: 685147 - DNA, 119 bp, Homo sapiens
gttactgaaagttcgtgatccagcaaaccctcagtctagacaaaccagcactgttgatccccctacctgcctctgtgcccatatgctcaggctagcttgtttgtttgttcatttgtttg

SEQ ID NO: 685148 - DNA, 368 bp, Homo sapiens
ggaaatactgtggttgtggttgtaagtagctaagatgaggtcatactggagcagggcaggcccttaatccaatatgactggtgttccttataaaagaagatagggcggggatggtggctcacgcctgtaatcccagccctgtgggaggccaagccaggcaaatcgcttgaggctgaggagttcaagaccagcctggccaacatggcgaaaacccatctctactaaaaataaaattagccatgcgtggggcttgtaatgtcagctacccaggagtttgaggcccaagaatccctcgaacctgggaggtggaggttgcgagatcccccccctgccctccagtgtgagcaacagaacgagactctgtctca

SEQ ID NO: 685149 - DNA, 148 bp, Homo sapiens
cccctcacaaacctgttaaattccgagatcaacgaatcgtagcgcgtcaggttggtatggccgtagacggcagaagcaggaggcataagcaggaagcagaagctaggaggcaaaaccaggaggcagaaacaggaaacagggtctggtg

SEQ ID NO: 685150 - DNA, 264 bp, Homo sapiens
  misc_feature (38)..(38): n is a, c, g, or t
acgacccccacacaacccggggcgcatagggaaccggntaaaaaaccaaaaggatagatccattaatgaggaacaaatgtggcctcatgttgggacagaacaggcccaaatggaaaagaatgaaagagaaagacagatagtcacacacacacacacacacacacacacacacaccctgcctgggcaactagggcactgatttcttacagcaaaaattagtttctcccatttcagaacttcatataaaagcacgcaatgtgtatt

SEQ ID NO: 685151 - DNA, 231 bp, Homo sapiens
  misc_feature (80)..(80): n is a, c, g, or t
atacaaagattaactcaaaatggatcatagacctaaatggaaaaacataaactataagatttttagaagaaaacataggncaaaaaaaaaaaaaattttatgcccgggtctaaggcaaggggtccttagataagacggcaaaggcttgatcctttacacaggaaaacggataatttagactcttcatccaaattttaaaactcttgggtcttggtgacaagaccttgggtt

SEQ ID NO: 685152 - DNA, 351 bp, Homo sapiens
  misc_feature (9)..(9): n is a, c, g, or t
  misc_feature (43)..(43): n is a, c, g, or t
  misc_feature (96)..(96): n is a, c, g, or t
  misc_feature (107)..(107): n is a, c, g, or t
  misc_feature (175)..(175): n is a, c, g, or t
  misc_feature (181)..(181): n is a, c, g, or t
  misc_feature (260)..(260): n is a, c, g, or t
  misc_feature (280)..(280): n is a, c, g, or t
  misc_feature (301)..(301): n is a, c, g, or t
  misc_feature (323)..(323): n is a, c, g, or t
ccaagcccngaatcccatgaaggcatgcaattaaatgaagggnctaacagcttaagttagttaaagtgtagggttaaaatatttaagcgatcaaanagattaaccgnagggattaaagccttgaatccatgcccaggagattgcgtcttttaaacctagttacgcatttactaancgcagncgaaatggaaagattaattgggagtggtaggatgaacaatttggagaagatagaagtttgaagtggaaaactggaagcngaagtccgggaaggcgaagnaaagaatagagaagatagggnaattagaagataaaaacatacntttagaagaaaagataaatttaaacctg

SEQ ID NO: 685153 - DNA, 334 bp, Homo sapiens
tttacagggtggaccgtaacagggtggaccataacagggtggaccgttacagggtggaccgtagcagggtggaccataacagggtggaccgttacagggtggaccgttacagggtggaccataacagggtggaccgttacagggtggaccataacagggtggaccataacagggtggaccgttacagggtggaccgtaacagggtggaccgttacagggtggaccgtaacagggtggaccataacagggtggaccataacagggtggaccgttacagggtggaccgtaacagggtggaccgttacagggtgaccgttacagggtgggtcgacgc

SEQ ID NO: 685154 - DNA, 595 bp, Homo sapiens
atcaggcgaatagtgtggcatgcgctgatatgctttatggtgccgagtcccatatccgaatgattaagagtgggagaaagtggcatgatagtttgcgcgggcttcttacaaaaaacaaccggatggacttgggtccagtctaatgcacgcctgctttatagaaatggaagaccagataatatcattgtaactcagagaccactaacagatgaggccggcacagagcatttacgaaaacgaaatacgaagtttgcttttatgtatgccactggagacgctgtgttgttctgaggcaaaccaaaccttctcctgccataatggctcccttaccactagggactagaaatggctctaggtggaaccgactctgctaccacatccagtctaggcaaggactctctcaatcctagttccctccggggtgccatgatgccaacgagatgagtctatttatctctatccggctacaagtagttcaggtaccgcaccttttgaaaacaactttttcaaccgaaatctatgcatgactgcagatattggcaagataatactgcaccgatgggacatgaactatactgtaacatgagcaaattgc

SEQ ID NO: 685155 - DNA, 749 bp, Homo sapiens
cattaccctcactaaagagcattgagcagctccgctaagatgctaactgggcagtctgtatggtcacctgagaaagtcttagcagagaatttttggattcccacccagaagccctctcagccactcaaatgcctatcttctccagtctacaagttacatggtccccacccagcattacagttcttgaacctgttatttctccacttactggtttaagttggttttagtcactggataagtattataatagagttacttagctgtggttttaatacccttctgttaacaatttggcaggcaaattaatggccttttctaacatagtacaacccaccaaagacctcgacaccatcgttaccttgaaaccgattatggatcatgcccacaaggatccaagccaatggctgcatcgaggtaaggggtgaagggtctgtgctagatcaaaaggcacggggtggcgatgtggcaaagaagttgcttgtggggagaccttgcttttaacaggcttctggaaaagctagggaatagtggttgcccgctttccccctttccctccccttcaagcaccgcttgagatttgggctttattattaagagctctttaaaacagctggttaattgtaagagaagccatggttctccagcttcttcgatgctcccccgaagagggttgggcgtctcttacataaatggggggtgctttctggctagtataggtttgctctcccgaggcggttcctagccggcta

SEQ ID NO: 685156 - DNA, 1191 bp, Homo sapiens
gctgctgcctgcctgcttctgggaccctgactggtgcctgcgcctcttgtcagcctgcctgacgacccaggcctgtgccgtgcccccaaccatgcatgccctgatggtcttcttgcaaccagattttcataaacaatgaatggcactgatgcctgtcagcaggaaaacattccccaccgtcaatcctgtccactggatgaggtcatcttgtcagtgtacgctagaatgtgtggacaatggaatgattgtgtgacaatggcagttgaagtgcctgccctgtggcctgccttccaagctggtgctcacctatggacgccgcatggactgcatcacacgagcgggcctggcttgcttgaacctgccatgtgcctgatcttgatctgagcagtggcacctgtgaccataccaaggctgtgccttgtgagcacacctggacaattggacaagccctaatgtcatactccactaacctaggatggattttgagacataggtacctacaaactgctctcctgagtattattgcccggcttggtgcttgataacgtagccacggcgacacaaccatccccatttgaccggatgacttctatcagcatacacactgccatgaacctcgtgcgcacgagtgtgcagggcaagatcatacctgttgcgacatttcccgcatccttgatgcaatgcattggaacgctgggcccaagacctttcggcaacctggcaaacctgctgcatgtagactagacaccgccagcctcgacccaagaacaaccacctcaacgagcactctactgtggccaaaccttactcacaacggacgactcgactataccccacttgtagtgccccacacactagcagccactggcacacagcggcacccacagacactgaggacaccacaacaaatgcactcaccaagaacgcactaccgcacaacccggcacacaccacgccacacccacactgcaacactggccccggccaccaacccgacgacaagcagggcaccaaactacaccccacaaccaacaacacccatcaacacgcgaccacaccaaggccagagacaaccaagcaccaccacaccaatgcaaacacgcacacaacaaacacccaactccaccacaccaccaacacacccccacaacaacccaaagcacccaaagcaaacaccccacaaaccgccga

SEQ ID NO: 685157 - DNA, 194 bp, Homo sapiens
ccattccattccattccattccattccattcctgttcattccattcgatgatgattcctttcatttccattcgatgatgattccatttgtttccatccgatgatgattccatttgattccgttccatggttattcccttcgggtcccttgggacgatcccattcgattccattcgatgatgattgcattcgagt

SEQ ID NO: 685158 - DNA, 358 bp, Homo sapiens
agccctgggcggggcgggtgggcaggaaggtgtgccttcggtgagaggcaagagtgtgtgttgggtttgtgtagcccactggggttgcacctcctcctaaaggttgggcttcttgcctctgctgccaccatcctgtttgcgccggggtctgcctggaaaatgggcaccctcctcagtattgtacttgtggaagcttaagctggagctacctcagtgcacggatgggaccggcccttccagccctgggtgggctggtgacccagcaaggggtgagcagggacgatcacactcccagcttcaggtcagctttttatacctcagattttatttgcaataaagatcctatagccaccctgca

SEQ ID NO: 685159 - DNA, 695 bp, Homo sapiens
  misc_feature (32)..(32): n is a, c, g, or t
  misc_feature (90)..(91): n is a, c, g, or t
  misc_feature (173)..(173): n is a, c, g, or t
  misc_feature (244)..(244): n is a, c, g, or t
  misc_feature (278)..(278): n is a, c, g, or t
  misc_feature (294)..(294): n is a, c, g, or t
  misc_feature (345)..(345): n is a, c, g, or t
  misc_feature (376)..(376): n is a, c, g, or t
  misc_feature (405)..(405): n is a, c, g, or t
  misc_feature (434)..(434): n is a, c, g, or t
  misc_feature (437)..(437): n is a, c, g, or t
  misc_feature (461)..(461): n is a, c, g, or t
  misc_feature (485)..(485): n is a, c, g, or t
  misc_feature (599)..(600): n is a, c, g, or t
  misc_feature (676)..(676): n is a, c, g, or t
caaatttttagtttaagttaaattaatcacgncaaaaacgttgtggcatctgatcccttcttcgttcaatctgaagacgtgaattgggcnncccctgttgatggagacttcaagtgctgcgaggtgagtttctaccaagggttcatgtgtcaggtactatggtgctggtaagnggacactaagaggtctgcgtggctggaggctctgggaggtcctacagagagtgcctgcgcgagcaaggggntcattctggtcttcgatctccaggatctgtctcngaaaggcctcaaagcncatagctgccatcattctccggcgagcccctcaggtagctgcccatctccnggtttgcacccctcaagtttcaccccctggnaattgatgcattcttcgagctcctgcgcncagcgtctggatgcaggttgtgggtggcnggntgagaaaatccaaaaaagtcagcnccagctggaagcaggttaggcatnagtttccccatagtagtgcttatagtcctgagcagttctgcatgacaagcatctgcagaagagctgacaatggcattctgggggtcatcttcaggaacaatttcaaactgaggnngcacaccaccatccttgatctgacaggtatatagacacttctggtctgggcacttcatgctggcatatattcgagnactgcaatagcccacgggg

SEQ ID NO: 685160 - DNA, 469 bp, Homo sapiens
  misc_feature (55)..(55): n is a, c, g, or t
  misc_feature (355)..(355): n is a, c, g, or t
  misc_feature (362)..(362): n is a, c, g, or t
ttgcgggggagcacagacagcccgggccctcccggctgcaggtcccgggctttcnccgcgcggttgccggctccgcccagaggagccgcgcccggcggaggggtaagaaaggcagggtcgcggcgtcaacgcggcggccgtctcgagtccagggcccgcgtcctccccgacctcccgacgccacctcacggcctcagggggactgggctcccgggaaaccgccggccacctggcggacgaacacaggcagtggcgggcagtggagacgccagggaccaccgcgctgagagcgatcactcatccgccagccccgccccgcgagccccgccccgcgagccccgccccgccccgcganccccgcnccgcgaccccgcaccgccggccccgcaccgccagccccgcgagccccgccccgccccgcgcgctcctcgcattggccgagtccccgcggccacaccccctaccagat

SEQ ID NO: 685161 - DNA, 506 bp, Homo sapiens
  misc_feature (55)..(55): n is a, c, g, or t
  misc_feature (392)..(392): n is a, c, g, or t
  misc_feature (399)..(399): n is a, c, g, or t
ttgcgggggagcacagacagcccgggccctcccggctgcaggtcccgggctttcnccgcgcggttgccggctccgcccagaggagccgcgcccggcggaggggtaagaaaggcagggtcgcggcgtcaacgcggcggccgtctcgagtccagggcccgcgtcctccccgacctcccgacgccacctcacggcctcagggggactgggctcccgggaaaccgccggccacctggcggacgaacacaggcagtggcgggcagtggagacgccagggaccaccgcgctgagagcgatcactcatccgccagccccgccccgcgagccccgccccgcgagccccgccccgcgagccccgccccgcgagccccgccccgcgagccccgccccgcganccccgcnccgcgaccccgcaccgccggccccgcaccgccagccccgcgagccccgccccgccccgcgcgctcctcgcattggccgagtccccgcggccacaccccctaccagat

SEQ ID NO: 685162 - DNA, 143 bp, Homo sapiens
cgacggcagtgcaccttgattctgcaggtgactctaaggacccctgcgcgcaagaaccgcccaggcgaattcgagtgtttaattaagatacaaagcattcgtcgaaggccctggggacggagtgtttgacagtctgatgttga

SEQ ID NO: 685163 - DNA, 626 bp, Homo sapiens
  misc_feature (212)..(212): n is a, c, g, or t
  misc_feature (244)..(244): n is a, c, g, or t
tctccaaaatctttcccagaatatcccatctctatgcgtggtttccgcctccatgtgatactcgaattgctagcaaaagatgtccacccacactcttggattcccctttcaagcatacttttctgacaggaatatcctacttttaatgtctttataatatagaagcctgagaattgtcaaaccaccaaggtcttggctctatttttgcttancaattctttccctctgtctatttcttccctcnagcattgtaatatacccagcaagaagaaatcagtccacatcttcaacacttggctgggaaatctccttagctaaatatccaagcttatcccttataagttattctatccatctagctctaggacaccattcagcaaaaatttctgccactatataataaggatccactttcctcaagtttctgatattacatttttcatttctttctgagtttttatcatctgtgcctttaatgttcatatttctactaacagtcttcatgattctttaaaacaatacagtctcatctgtcatactcctcctttctttttgaggtgtcgctagcaaaatcattaatatctgcatttctactaacagtctgctcaaggcaatctaggcttttt

SEQ ID NO: 685164 - DNA, 246 bp, Homo sapiens
ctccccgtatatgctcagcaatgggcatcaatgagagagagcagaggagaagttaagagggaatggagtgggagggtgtagatcatgagggcctcaggccgcttaagatagctgggattacaggcttcccaccaccacgcccagctaatttttgtatttttagtagagatggggttcaccatgttggccaggctggtcttgaactcctgaccactactcctgagtccagtactcctgagtccacta

SEQ ID NO: 685165 - DNA, 1607 bp, Homo sapiens
  misc_feature (1009)..(1009): n is a, c, g, or t
  misc_feature (1280)..(1280): n is a, c, g, or t
gactcctcccgttcgacacagacacgctagtagagagccagccaagagaggacaagaacagcgaacagtgtgtttctgcttgtctactctcggagttgtgtcgttcttcccttttgtacacgctcttttttgaagtacaccgagggttgtgttcactcccctcctctcctgtggggctatttgtttctgcctccacacatgcggttgcctcccccttttgactggagtagtaggtctttcgtgccctattctttcgccccgtctctgcctctgatgatatcttcgtggtgtcttctacttttctcgtcttcgatgggccgccgtaacccactcgtcttgtgtgggggcaccagcaatgggcagcctctcttctgtggtgtgccccactttatttgctgctgtggacttctgttctgcgcacccgcgtgctggtggtgtgtgatagcttatatcttggttttttggggacatcgctgtgtccccacgggggaagatgttgccccctgtgttgccacaggtcgccacagtattgtgtgtccaggtggtgcgtttctgcagggcccccatgttgccgcccttgaggttgtgtcgctccaggttccctttgggaagcccccaacttgtgggggtcccatcactgtcgtgtccccaatggccccctttgtccctttcttttttgaaccccaaggtttttgggaatgcctcctctcgcgggggttggggccatagtggaataatatgggcccccaatacgtgcgcatcttactcgcccgagaaaatcgcatgtgccccttgtttggccgggcgccctccaaggccaacatcacaccagtggttatccagagagggtggttcacagagagtatattgtcccccgggcgccttttgggtgtgttctccgggtccaatttgcgtgaaatgtggagggagaaatctcccaaaaatgttggcgtctaatatattgccgcaaaaagcccttgtggccccccttgtgggctcactctcaccncagtccaatagagatgaggcctctctctctctcctcgtggctcggccaacccactgcgagagccccccttcgggtggaatatactctctctctttctccgcactagggggatatccgcgcgctctttaagagaaaatatattcgccgcgcttatagggtttctttctctcgcgatagccccactcggggacacaagaccaccctccagcgagacccaggcaccagaattatattccagatgaagactggacccaaataccaaatgggcccncggggaatgtctcggtggctgtgccaggacccaagaggtccaatacccgcacacaatattgtccaccttcactgatatgctggccatacccaccacatcatagcccaggaccattggtgcaccagaagacttgacacccagttccggagccctcgatagtacttctggggagactttaagatttgagaaagaagaaacctcctccagaccccgagtggaagagtggccgtccctagcccccctttgtatgagaacaccgcttttttgtaaaagggatcccagcacccctcccccggtttttttttccaataaaagtttagaaagata

SEQ ID NO: 685166 - DNA, 761 bp, Homo sapiens
  misc_feature (125)..(125): n is a, c, g, or t
  misc_feature (152)..(152): n is a, c, g, or t
  misc_feature (503)..(503): n is a, c, g, or t
  misc_feature (511)..(511): n is a, c, g, or t
gtaattcgagcccgggtacccggaaaatgtagccgacgctaggcgtatacttcaccctcctccaagcctcagaatattacgaagcaccattcacaatttccgacggagttgtatggatccacttnctttgtggctacagggttctcacgggnttgcacgtaatcatcggatctactttcctagcagtatgcttactacgacaactaaaattccacttcacatccaaccaccacttcggctttgaagccgcagcctgatactgacacttcgtagatgtagtttgactattcctttacgtatcaatctattgatgaggatcctactcttttagtattaagcagtacaattgacttccaatcaatcagtttcggtaaactccgaaaaagagtaataaatattatactaacactattcacaaacgtaaccctagcctccctactcgtactaatcgcattctgactaccccaactaaacacatattcagaaaaaacaagcccatatgnatgtgganttgaccccatagatcacaccctcccattctcaataaaatttttcctagtagccattacattactcctttaagatctagaaatcgccctcctccttcccctaccatgagcatcccaaacaaacaatctaaaaacaatacttacaatagcactattccttcttacctactagcagcaacctagcatacgaatgaacccaaaaggctagaatgagcagatatgatattaggttaaacaaaacaatgattcgaa

SEQ ID NO: 685167 - DNA, 730 bp, Homo sapiens
  misc_feature (125)..(125): n is a, c, g, or t
  misc_feature (152)..(152): n is a, c, g, or t
gtaattcgagcccgggtacccggaaaatgtagccgacgctaggcgtatacttcaccctcctccaagcctcagaatattacgaagcaccattcacaatttccgacggagttgtatggatccacttnctttgtggctacagggttctcacgggnttgcacgtaatcatcggatctactttcctagcagtatgcttactacgacaactaaaattccacttcacatccaaccaccacttcggctttgaagccgcagcctgatactgacacttcgtagatgtagtttgactattcctttacgtatcaatctattgatgaggatcctactcttttagtattaagcagtacaattgacttccaatcaatcagtttcggtaaactccgaaaaagagtaataaatattatactaacactattcacaaacgtaaccctagcctccctactcgtactaatcgcattctgactaccccaactaaacagattcgaaataaacctattagcaataatcccagtattaataaaaaattttaacccacgagccacagaagcagccacaaaatatttcctaacacaagccacagcctccataatactaataatagccatcatcatcaacctcctatattctggccaatggaccattacaaagatatttaacccagtagcaataacaataataaccatggccctagccataaaactaggactctcacctttccacttctgagtcccag

SEQ ID NO: 685168 - DNA, 570 bp, Homo sapiens
  misc_feature (125)..(125): n is a, c, g, or t
  misc_feature (152)..(152): n is a, c, g, or t
gtaattcgagcccgggtacccggaaaatgtagccgacgctaggcgtatacttcaccctcctccaagcctcagaatattacgaagcaccattcacaatttccgacggagttgtatggatccacttnctttgtggctacagggttctcacgggnttgcacgtaatcatcggatctactttcctagcagtatgcttactacgacaactaaaattccacttcacatccaaccaccacttcggctttgaagccgcagcctgatactgacacttcgtagatgtagtttgactattcctttacgtatcaatctattgatgaggatcctactcttttagtattaagcagtacaattgacttccaatcaatcagtttcggtaaactccgaaaaagagtaataaatattatactaacactattcacaaacgtaaccctagcctccctactcgtactaatcgcattctgactaccccaactaaacaggccccgaaaaaactggctacatggtccatgtctatcaagtgctcattagttacagaaacaaaaattctgtcatttgccagaaccacaaatatcg

SEQ ID NO: 685169 - DNA, 1110 bp, Homo sapiens
tgcataactagaggtcaaatatgtggtggaccccgagtgaaagttctgtgaggaaacgactcaatcgccatctgtgtggaagccttctcctggtctgcaggtcgaggcgggctcgagtatcctccagagaatatgaacgaagacacatgaccggccgaataacgtgatcagactgtctcagatccaggaaaagatggccagagagaagcttggcatgaaataggattggggtgacattttggggttatattagaagaagggttacgccacagagtgtgaatagtgtgaaaaaccttcagcatatggaaactgaatgatcttcgtgacctgacacaattgtgtgtacctatggtgcttagtttggagaagttcacaaagcgctctggaagacgggagcaggagactgtcgtaggggatcctcaatgccaaccccatgaagcccaaggatggttcagaggaggtgtgtctactctatcgatcatcctcagaaggtcttaattatgggtgaagctcttgacctgggaacctgtaaagccaagaagaagaatggagagccgtgcacgcagactgtgaactatgcgtgactgtgagtactgtcagtaccatgtccaggctcagatacaacgacagctcagtgcaatgctgtgcgggatctgcagttcaagctatctctgggagcaacgaattccacaagacagttggcccgcagaaggcagccagacatcaaagaactggatgtgccaagcatggcttcacactacgagacggcagaatacattacatgcactacggaattgcagaatataaattggcttcacggcatgatgtgttccttaatcaaaggtacggaatctaaaaacacactgttgtggaacaaaccagggagtctcacacggagtctcaagacgttgatactccacgggctaaacgtcgctacaacattcctgtaatgtaaccccgtagaaaaacactgtaaaatgacaaccgagaacgagccttcagcttgaacacatgaatagacagtgccccaacgtttgtgtggatcagcgaaaacaaacaccacagcctatggatcgcgtcacctcaatacagtgggtcgtaaccacatcc

SEQ ID NO: 685170 - DNA, 83 bp, Homo sapiens
aatcgctaatcctaaccgaaaatacccaacaaccagtgggcagtatgtcgtaatgggcaactcatgcagaggaaacaactact

SEQ ID NO: 685171 - DNA, 171 bp, Homo sapiens
caaaagggagggcaaggcggcgaacaaggcgagatcaaagggagacacgacggccaaagccacagcgcgccggcgaggagcgaacgagggcagacaaagcgacgaggcgaacagaggacagaaagaagaaaacgagcacaggaggacacatgtggacgcgcgcactaggga

SEQ ID NO: 685172 - DNA, 142 bp, Homo sapiens
atacatttaatgtgcggctgccaggaatctagaccagcctgggaacttggtaccaccttctctctacaaaaaatatttaaaaattagctgggtgtggcggtgcacacctgtggtcccagctacgcaggaggctgacgcaggg

SEQ ID NO: 685173 - DNA, 252 bp, Homo sapiens
ctctacggcttcatccatttcactatcatattcatcggacgtatatctaatctattcgtctccgcacaacactttctcgagcctatccggtaatgcccctgatgtatcgtcggtagctacccctgatgcatactccacatgaaacatcctatcatctgttggctcattcatttctcttacagcaatagtattaataattcccatgatttgagaagccttcgcttcgaagcgaaaagtccagaatagccccta

SEQ ID NO: 685174 - DNA, 394 bp, Homo sapiens
  misc_feature (135)..(135): n is a, c, g, or t
attctcttgtctgactctcttttcagactcagccgcctgcaccaggtgaaataaacagctgttgcccacacaaagccgttggtggtctcttcgcaggacgtgagtgaaatttgggtgccgtgacttggatcaggngaacctcccttgggagatcagttccctgtcctcctgctcttggctccataagaaagatccacctatgacctcaagtcctcagaccgaccagcccaaggaacatcacaccaattttaaatcaggtaagtggcctctttttactctcttctccaacctctctcactatccctcaacctctttctcctttcaatcttggtgccacacttcaatctctcccttctgttaatttcaattcctttcattttctggtagagacaaa

SEQ ID NO: 685175 - DNA, 383 bp, Homo sapiens
agcatagaacattgaaaacattacataagtgtttaacgggtccttctgcataaaaaagttgatcaagatatagatattaagctacaacagcttgaatacattctgagatgttgtctgcaggtcacatcaatgtgagtacttacattttcccattttgtagctcactcatcccttcattgcatgtccattgtctgtgtctaataacactcttaacatgctagaggtatttcatttgatatttagcttctgaaagccctttgttataaagggacgtgattttctaaatttggtagcagcttgaaaacaagcaccacaaatgtaaaattgcatggttcttattttactaatataatttttaagccaagttatgtgctagcaaaatg

SEQ ID NO: 685176 - DNA, 494 bp, Homo sapiens
  misc_feature (442)..(443): n is a, c, g, or t
  misc_feature (457)..(457): n is a, c, g, or t
caatgattgtcagtgcatcaacttgtggtgctaagaatttacagcaatttgaaataatgagttttgattttaagcaagcagcgacagttaatgttaagtatgttgatacaaaaggtaatcaaattgctcaaggtgaggttacttatccaaatggcgctaatgttaatggtacttatactacaggacaattagaaatttccaattataagtttgtaagaatggatgatggtactgccactggagcaaaaagtttgccagcgacgggtactctaacaaaagctggagataatgggacggttatttatgtctatgcagaggatgcaccaacagtcacaactgaaagcaagacagttaatgagacattcattatcaaggcgctggtaatcaaactcctgctgatcacaccgctcaagtgaccttgacgcgtcaggctcactgacgnntaactggggaaagncgtatggtccttggtcagcagatcaaagctttgacgc

SEQ ID NO: 685177 - DNA, 139 bp, Homo sapiens
gacccaagtcggcggaccttcctctcctcccacctcccataagataggtatccataaagcagagatttctaagcagtgcgagacttcagtattttagattagattctgggttataatagaataagatcattagtagtag

SEQ ID NO: 685178 - DNA, 460 bp, Homo sapiens
ccgcctactactactactaaattcgcggccgcgtcgacgtgcctccaagatgacaaagaaaagaaggaacaatggtcgtgccaaaaagggccgcggccacgtgcagcctattcgctgcactaactgtgcccgatgcgtgcccaaggacaaggccattaagaaattcgtcattcgaaacatagtggaggccgcagcagtcagggacatttctgaagcgagcgtcttcgatgcctatgtgcttcccaagctgtatgtgaagctacattactgtgtgagttgtgcaattcacagcaaagtagtcaggaatcgatctcgtgaagcccgcaaggaccgaacacccccaccccgatttagacctgcgggtgctgccccacgtcccccaccaaagcccatgtaaggagctgagttcttaaagactgaagacaggctattctctggagaaaaataaaatggaaattgt

SEQ ID NO: 685179 - DNA, 464 bp, Homo sapiens
gaccacgcgtcgggacgcgtgggtcgacccacgcgtcgccacgcgtcgccacgcgtcgaaagaaaagaaggaacaatggtcgtgccaaaaagggccgcggccacgtgcagcctattcgctgcactaactgtgcccgatgcgtgcccaaggacaaggccattaagaaattcgtcattcgaaacatagtggaggccgcagcagtcagggacatttctgaagcgagcgtcttcgatgcctatgtgcttcccaagctgtatgtgaagctacattactgtgtgagttgtgcaattcacagcaaagtagtcaggaatcgatctcgtgaagcccgcaaggaccgaacacccccaccccgatttagacctgcgggtgctgccccacgtcccccaccaaagcccatgtaaggagctgagttcttaaagactgaagacaggctattctctggagaaaaataaaatggaaattgt

SEQ ID NO: 685180 - DNA, 235 bp, Homo sapiens
catgtccgtcatgcatgtggatggttgtatgacagaagctatttccttagaggaccagataatacacagcacaaattctcagctgggcacagtggctgacacacacacatacacacacacacacacatcacagacgaggcgtttgcgagtagaatataccgtgtgtgtatcgtgtcttttatatgctcaagtgttctctctctggtgtgtcgccagtgtatgagctgcgtgcggg

SEQ ID NO: 685181 - DNA, 860 bp, Homo sapiens
  misc_feature (54)..(54): n is a, c, g, or t
accaaagaacaacccatggcagtgatgaggccgtgcggctaagcgggcacgagngccaagatgacaaagaaaagaaggaacaatggtcgtgccaaaaagggccgcggccacgtgcagcctattcgctgcactaactgtgcccgatgcgtgcccaaggacaaggccattaagaaattcgtcattcgaaacatagtggaggccgcagcagtcagggacatttctgaagcgagcgtcttcgatgcctatgtgcttcccaagctgtatgtgaagctacattactgtgtgagttgtgcaattcacagcaaagtagtcaggaatcgatctcgtgaagcccgcaaggaccgaacacccccaccccgatttagacctgcgggtgctgccccacgtcccccaccaaagcccatgtaaggagctgagttcttaaagactgaagacaggctattctctggagaaaaataaaatggaaattgtacttaaaaaaaaaaaaaaaaaaaaaaaaaaaaaaaaacaaaaaaaaaaaaaaaaaaaaaaaaaaaaaaaaaaaaaaaaaaaaaaaagggggggggcataaaaaaacgccaggagggcgcaacaacgcacagacaacccgcctaggagaaaaaggggaccacaagagagggacaatacaagcaacgaaagccagaccagaaaacccccccacgaggaaaacaacgcgcccgaaacacacgagagaaaaccaaaccccagagagggagcaaacaaaggagcacacacacaacgacagacacaacacaacagaagcacaacaccaccaggagagcacaggaaaaacaagcgaacgccgccacacaaaaagaccagaaaaaaaaacaaatcgg

SEQ ID NO: 685182 - DNA, 859 bp, Homo sapiens
  misc_feature (464)..(464): n is a, c, g, or t
  misc_feature (468)..(468): n is a, c, g, or t
  misc_feature (470)..(470): n is a, c, g, or t
ccgcctactactactactaaattcgcggccgcgtcgacgtgcctccaagatgacaaagaaaagaaggaacaatggtcgtgccaaaaagggccgcggccacgtgcagcctattcgctgcactaactgtgcccgatgcgtgcccaaggacaaggccattaagaaattcgtcattcgaaacatagtggaggccgcagcagtcagggacatttctgaagcgagcgtcttcgatgcctatgtgcttcccaagctgtatgtgaagctacattactgtgtgagttgtgcaattcacagcaaagtagtcaggaatcgatctcgtgaagcccgcaaggaccgaacacccccaccccgatttagacctgcgggtgctgccccacgtcccccaccaaagcccatgtaaggagctgagttcttaaagactgaagacaggctattctctggagaaaaataaaatggaaattgtaaanaaananaaaaaaaaaaattgggggggggccggggccgaaaaaagttaaacaccactgggggggggggggggccccaggggaggtgaaaccgtggccaaagcggtcccagagaaaacccgggccagaacagagggcgggggttcctcccacaaaaaaaaacgcgcggcggggaccggaggggttttggaaaaaaacccagagagggcggtcgggaggcgctacggacctaccaaaaggagccagggacggaataaacacgccccgcggagcgagggaagaacaagacaacgaactaaacgaaagacgaagaagaaagcaggagacaaaagcaagtcaaagtgaaaacacaagaaggaaacagagagaaacaccaagagagagagaacagataacac

SEQ ID NO: 685183 - DNA, 962 bp, Homo sapiens
tacgtcgcccttacacgccggcgggtttagccgacaagtgctcggtgccgagagctacggaagggtgtctaaaacggagaaatgggccgaatcaaattgggaggggttcttaacgccaccttcacggcggttaaaatcttggggcctccccgaacccggcgaaataaggcccttgcgctttggagggaaacaaatggtcccgggcatcaagaccacaatacggggggggttcctttacccttaggcgcgaggaccccccagatgatccgtcggaacagaatccccccacggggcttcctgaacatgattaaataaccaggtcccccctgcgtagggtcacaatcacacgccaccacaccaaccgccggggttctaaaatgagggtccttccgcaaaaagctctttgggtaaaaacagtcgggggggcccccccacccaaacagggagcaccacccgcgagtaatatttaattctttgtggtccacaggcgatgcgtccaaccgatggagagatcgagcacccacacaggctctcggggggactaaccggaggagaaaaatcgtcaatcacgtggtgtcacacaccacacgcacatggcgaactggggagatgaataggcaacccacccccaggtgggtttatcatgtggaggtgagtcccccggcgaggagcgatcacccaaaacggttccacccaactgactccaaataggatgcccacgtgcgcagaattattacccccccacacgaggggggaaaaccaaggcgtcgtcccacttgaaacgacatcaatcgacaattgtgagtacgcaatcccactcgtccagaaagcaggtctcacaagcgatacatgtcttagtgattggccaagagcccctgcaagggagagaagacgtggtggggcgtccccagaaaagtattttgaggttcccttacaaaaaaattctcttcccaaaaataaca

SEQ ID NO: 685184 - DNA, 567 bp, Homo sapiens
attcgcggccgcgtcgaccttcagcatgagcatcaaccagtatccttgtcaggtggcccccattcctctacattcctggatggtttgggatcccacagaactctaatgattacataagaagagtggcccgtcctctctccggtccgtgcctccaagatgacaaagaaaagaaggaacaatggtcgtgccaaaaagggccgcggccacgtgcagcctattcgctgcactaactgtgcccgatgcgtgcccaaggacaaggccattaagaaattcgtcattcgaaacatagtggaggccgcagcagtcagggacatttctgaagcgagcgtcttcgatgcctatgtgcttcccaagctgtatgtgaagctacattactgtgtgagttgtgcaattcacagcaaagtagtcaggaatcgatctcgtgaagcccgcaaggaccgaacacccccaccccgatttagacctgcgggtgctgccccacgtcccccaccaaagcccatgtaaggagctgagttcttaaagactgaagacaggctattctctggagaaaaataaaatggaaattgt

SEQ ID NO: 685185 - DNA, 953 bp, Homo sapiens
attcgcggccgcgtcgaccttcagcatgagcatcaaccagtatccttgtcaggtggcccccattcctctacattcctggatggtttgggatcccacagaactctaatgattacataagaagagtggcccgtcctctctccggtccgtgcctccaagatgacaaagaaaagaaggaacaatggtcgtgccaaaaagggccgcggccacgtgcagcctattcgctgcactaactgtgcccgatgcgtgcccaaggacaaggccattaagaaattcgtcattcgaaacatagtggaggccgcagcagtcagggacatttctgaagcgagcgtcttcgatgcctatgtgcttcccaagctgtatgtgaagctacattactgtgtgagttgtgcaattcacagcaaagtagtcaggaatcgatctcgtgaagcccgcaaggaccgaacacccccaccccgatttagacctgcgggtgctgccccacgtcccccaccaaagcccatgtaaggagctgagttcttaaagactgaagacaggctattctctggagaaaaataaaatggaaattgtgtacttaaaaaaacaacatttgagatggcatatgccaagagaattttgttggcgggccgaggggcccgaaaaggttctaaagacaaccttagtgggcgtccacggccggccctaactgggttacgtggcaccggtgtcccaacgcggtgcccagaggagaaactggtatctggaaagagggttgggagtgtccaccaccaataaagaaaggccgggcgccaccgcgacgtcgttggaaagaaacaccagggggggatcaggagggcacaacgggtacttcaccaggggcacgaggaggcgaaaatgagacggcgcgggggacaaaagcacaaacagacaccaacaaaggcatcagaggagcagacagaccgagaaaggacacaaaa

SEQ ID NO: 685186 - DNA, 978 bp, Homo sapiens
ggagagagagaactagtctcgagtttttgggttttttttttcccggttgcggcgccgcgcgggaggttgtctattccacgctcgaagccatgccgtccaaggttccgttgcatcggtgcaggtcttcggacgcaaaaaaacagcgacatttttggcgcattgcaaacgcggacaatggtctcttcaaggtagaacgggtggccctttgtgagatgattgagccgcgcacgctacattacaagctgctggacgccagtttctgcttctcggcaaggacgcagatttgctgttgtagacattccggtgttccggtgttaaggggttggttggctcacgtttgcccaaattttagtgcatagtcgcgtcagctccactcttccaaagcccgtggttggcctattttaccagaaattttgtggatagaggtttccaaaaaggagatcaaaggaatttcctatatcacagttattgaccggaccccttgcgtggatagcttgaccctcgttcgttggcgagttccaaaacagttttgagcaggcccctttgttgccccgtgcctcgtttaaccgagaaaattccttaccggatataagcccaactcgcttgacctctcaaaaatctccacttgtgtttttatctaagcccagttctttgcgagggggaacttttaccacataacatcaacacataacagcaactacaactatacaccctctgcgggcgcactctcttaatgactacggggtggtcgtctgccagcaaacaacgcgggggtctttttcacacatagtgttggcgccatcgtggtgcaatctattcatgcgtctgtctctcccttgtacaccccgagttttctcgtggcacctaacgttgtgtataaaaatttctccggcggtgtttcccacacatatatagatgaggcgtagtataataaattccgctatatcaccacgcgttgtaaaaccggctgattaagag

SEQ ID NO: 685187 - DNA, 780 bp, Homo sapiens
gacatcttcctcaaaaatgattgcaaagcttaggtaggctacgaggtgacaccaagagaatcagcccaaatgatgggcccctgacatagatgagaccaaatcactataaatctatccctgaacatcaattatgttgtgtaaaagataatgaattaactggctggggacccatagccataattttacccgatacctgcatttatatctgtattctatatacctataacacgtatttagatctatttagttcacaatctcagaatcagatggtcgagacatttaaagattaagctaatacaaacttgtcctctggacaaaagagaaaactggagccggcatgtgcttcgtattgtatcacgataccgctaatatctagaaatggaaagccaacacattatcttacatattctaatgttgcctcgttatatactaccagtgtcagtgctcctatgtattttgtagtacttctcttcaatatggtgtgtagaaagaaaatgtgaagccccgagtttaattcaattgtaacctgggattgacccggaaaaaccatgtgttgcaatcccaatacacaaggagggtcatctggggtgtgccatgtgcatttggatggacatactggttactatatgttgctgctacatgctgatttgcactcagtcgtgtaggagagaagaatggagttatattaaatttctagagaatgagtcaaattaagagatggacattgggagtcagatggttggtgttgcatgtttatctttagtatatatgggtcatatt

SEQ ID NO: 685188 - DNA, 360 bp, Homo sapiens
agccgtacttagagtatcccccccgaaacacgctatgatcttcacggaccaatgcctagtgagtggagcaacagctatatcagctctcccatagaccagttccccaaccatgccgattccatattttagtctctggatcccttgcaccatatatcccgtcaccaacgatcgacaatttgtatttgactccttacatgtgtggctatttcataggctaagtctacacaatagccttcatatcgtccatgtccttccagttgctcatgggttccgcttgtacatgacatatggtgattccgagaatggtagtcactactatggtccgattctctgaggatgccctgtcataactttttcctg

SEQ ID NO: 685189 - DNA, 440 bp, Homo sapiens
  misc_feature (8)..(8): n is a, c, g, or t
aagaattncgcacgagggtgcctcccaagatgacaaagaaaagaaggaacaatggtcgtgccaaaaagggccgcggccacgtgcagcctattcgctgcactaactgtgcccgatgcgtgcccaaggacaaggccattaagaaattcgtcattcgaaacatagtggaggccgcagcagtcagggacatttctgaagcgagcgtcttcgatgcctatgtgcttcccaagctgtatgtgaagctacattactgtgtgagttgtgcaattcacagcaaagtagtcaggaatcgatctcgtgaagcccgcaaggaccgaacacccccaccccgatttagacctgcgggtgctgccccacgtcccccaccaaagcccatgtaaggagctgagttcttaaagactgaagacaggctattctctggagaaaaataaaatggaaattgt

SEQ ID NO: 685190 - DNA, 782 bp, Homo sapiens
  misc_feature (12)..(12): n is a, c, g, or t
  misc_feature (68)..(68): n is a, c, g, or t
  misc_feature (127)..(128): n is a, c, g, or t
  misc_feature (132)..(132): n is a, c, g, or t
  misc_feature (137)..(138): n is a, c, g, or t
  misc_feature (172)..(173): n is a, c, g, or t
  misc_feature (183)..(183): n is a, c, g, or t
  misc_feature (226)..(228): n is a, c, g, or t
  misc_feature (236)..(236): n is a, c, g, or t
  misc_feature (276)..(277): n is a, c, g, or t
  misc_feature (290)..(290): n is a, c, g, or t
  misc_feature (295)..(295): n is a, c, g, or t
  misc_feature (343)..(344): n is a, c, g, or t
  misc_feature (351)..(351): n is a, c, g, or t
  misc_feature (375)..(375): n is a, c, g, or t
  misc_feature (397)..(397): n is a, c, g, or t
  misc_feature (404)..(404): n is a, c, g, or t
  misc_feature (409)..(410): n is a, c, g, or t
  misc_feature (422)..(422): n is a, c, g, or t
  misc_feature (442)..(442): n is a, c, g, or t
  misc_feature (447)..(447): n is a, c, g, or t
  misc_feature (662)..(662): n is a, c, g, or t
  misc_feature (669)..(669): n is a, c, g, or t
  misc_feature (677)..(677): n is a, c, g, or t
  misc_feature (687)..(687): n is a, c, g, or t
  misc_feature (691)..(691): n is a, c, g, or t
  misc_feature (703)..(703): n is a, c, g, or t
  misc_feature (721)..(721): n is a, c, g, or t
  misc_feature (776)..(776): n is a, c, g, or t
tcccatttttcnttcattatttaattttttatctctttttatgctcatttcttcagctgccccaagcngccagactgtccctttttctcttccattccctttctctttcttttattttatttttctnncagntcttnncatggaggagaagatctgctgcagggcctctctnnggaggggttngccaagtaggcattcaccatcttcatgatctcttccacctttnnnctcttcantattatctttctctctcccaccctcaattccatttttttnnggcccattatctngcagncggccacatttccatatctgacactttggatgggctccgtctcccctnnccggganagggacatggcctttgctcccaancccaggcacagcttctttttancaccccnaccannctccgttctcanctccagaacttcatacctancatcncctaaccccgtacacttctcctccatttccatttattcttccatttcctcatctcggcccatgccccgtagccgcttccagccgcccagcacggcagctgccgtgccggcgccgcctcctccctcgcgggcaatgcttcccgcagtgcggccggccccgccgcgccgggcccgctccgcccgcctcttggccaggcccgggctccagagcgcccnggccagnagggcagnggaagggggnggcntgggggtcgggncgggcgggtcttcgcgcngcggggccggggcgggacagggcggtccacgcggggcaggggcaccgtcggaganaactcc

SEQ ID NO: 685191 - DNA, 803 bp, Homo sapiens
  misc_feature (560)..(560): n is a, c, g, or t
ggccagatacttctgagtcttaaaagcataataggccgggcgcggtggctcacgcctgtaatcccagcactttgggaggccgaggtgggtggatcacaaggtcaggagttcaagaccagcctggcccaaatggtgaaaccctgtctctactaaatatacaaaaattagctgggtgtggtggcgggcacctgtaatcccagctactcaggaggctgaggcaggagaatcgcttgaacctgggaggtggaggttgtggtgagccaatatcatgccactgcactccagcctggtgacagagtaagactccgtctcaaaaaaaaaaaaaggctataatattttattacttcccaattttttaaaatttggagtgccttggcagtggggagggtccctaaaatgggtatagatttagggcccagattggtggtgtaggtcctgaatctgctctaaacatacagggactgtctgtttgggacattatgaggcataagtagccagtatctatagtgagaatctacaaggcctcctttgtggcccctgtagactagaaatatactgtnatgtggcggccttcgagtgtatctctacgggccaaaggtgctgttcaagccacattcagaatacgggtggaccattctttgtccatccctggggggtccatgtacatttcattaattacgtccaagcacatacgaattaaggaaaggactgccttaaagaaagagcgtcacggcatgagagaaatttaacatctctcggtccctctgtctcaacgtgtcccaaagggcttggcagaatggggc

SEQ ID NO: 685192 - DNA, 471 bp, Homo sapiens
  misc_feature (54)..(54): n is a, c, g, or t
accaaagaacaacccatggcagtgatgaggccgtgcggctaagcgggcacgagngccaagatgacaaagaaaagaaggaacaatggtcgtgccaaaaagggccgcggccacgtgcagcctattcgctgcactaactgtgcccgatgcgtgcccaaggacaaggccattaagaaattcgtcattcgaaacatagtggaggccgcagcagtcagggacatttctgaagcgagcgtcttcgatgcctatgtgcttcccaagctgtatgtgaagctacattactgtgtgagttgtgcaattcacagcaaagtagtcaggaatcgatctcgtgaagcccgcaaggaccgaacacccccaccccgatttagacctgcgggtgctgccccacgtcccccaccaaagcccatgtaaggagctgagttcttaaagactgaagacaggctattctctggagaaaaataaaatggaaattgt

SEQ ID NO: 685193 - DNA, 1048 bp, Homo sapiens
attcgcggccgcgtcgaccttcagcatgagcatcaaccagtatccttgtcaggtggcccccattcctctacattcctggatggtttgggatcccacagaactctaatgattacataagaagagtggcccgtcctctctccggtccgtgcctccaagatgacaaagaaaagaaggaacaatggtcgtgccaaaaagggccgcggccacgtgcagcctattcgctgcactaactgtgcccgatgcgtgcccaaggacaaggccattaagaaattcgtcattcgaaacatagtggaggccgcagcagtcagggacatttctgaagcgagcgtcttcgatgcctatgtgcttcccaagctgtatgtgaagctacattactgtgtgagttgtgcaattcacagcaaagtagtcaggaatcgatctcgtgaagcccgcaaggaccgaacacccccaccccgatttagacctgcgggtgctgccccacgtcccccaccaaagcccatgtaaggagctgagttcttaaagactgaagacaggctattctctggagaaaaataaaatggaaattgtacttaaaaaaaaaaaaaaaaaaaaaaaaaaaaaaaacaaaaaaaaaccggggggactaatttgggggggggggaaaaagggggtatagaaagggcgcacagtgtggacaaaagcagtatttacatgagacccagattttttgtgtgtacccacggggggaaaaatcgaggcgggtcccctaatataggaggacgccgcctatataatttcacataaacccgggtgtaacccgggcggtatataatacgtgtgcggtagacaaacctcagcaatgcaagccgccgctaatgacagagccggacagagcgtagcgatagcgcgtatgagagagacagggggatgagccgacaaccagtagtatctgctacgcagagcaacaaagccgcgtggcacgtaaagtacgagcacgcaaggatctcatacactggtactatgtagaccagccatataatccaagcgagcttctttcttataggcagag

SEQ ID NO: 685194 - DNA, 233 bp, Homo sapiens
cctaagtagaagctgctccgggtacatgatgccagcgtgggagtttgacgggtgcgtatacacctgtcaaacgcgataacgcacttttgctaaggcgagctcagggaggacacgagacctcccgtggagcagaaggggacaagctcgcttgactcttggttagcagtacgaactacagaccgtgaaagcgggtgctcacgatccttctgacctttcagggtaggaggcaggac

SEQ ID NO: 685195 - DNA, 451 bp, Homo sapiens
ggcttctgcttctgccctctctccggtccgtgcctccaagatgacaaagaaaagaaggaacaatggtcgtgccaaaaagggccgcggccacgtgcagcctattcgctgcactaactgtgcccgatgcgtgcccaaggacaaggccattaagaaattcgtcattcgaaacatagtggaggccgcagcagtcagggacatttctgaagcgagcgtcttcgatgcctatgtgcttcccaagctgtatgtgaagctacattactgtgtgagttgtgcaattcacagcaaagtagtcaggaatcgatctcgtgaagcccgcaaggaccgaacacccccaccccgatttagacctgcgggtgctgccccacgtcccccaccaaagcccatgtaaggagctgagttcttaaagactgaagacaggctattctctggagaaaaataaaatggaaattgt

SEQ ID NO: 685196 - DNA, 187 bp, Homo sapiens
gttctcacgatgtctgcatgggtggtccttcactccctcaggtcctggcacagcagccccttccagaagcaccctcttgaaatctgcaggccctgaaggtgggtgactccctggtaccgttcttcgcttatctgtttctcgtctagcatttcagacgttctaacatcacccagagttatgcccactc

SEQ ID NO: 685197 - DNA, 228 bp, Homo sapiens
gatgcagcaagagtctcagaaggaaatcagtgcataggtcctgatgagcatgggtttcactgatgaacaggacaccattattaaaggggctatgggccttggtaaggagtttcttctatgttaggaatgcactgtaggggtgcaagagcataagctaggtgaccagtgtagaggctattgtgggagtccagaccagaggtcatcctaatctttaagattaaggtatag

SEQ ID NO: 685198 - DNA, 294 bp, Homo sapiens
ccccccctaggggttcctttgaaaggggggttttccccccggttggtcccgtgttgggaattgtgtccaagggccaagattactttttaaaaaccgtcggggtttccatgtttttggacccgcctattaaaaaattaattttttttgcctttttaattggggggggtggggggggcccccctttttttttagtggggagctttgcccccaaaaattttttaaaagctttttttttcccggtttttttgttttttttttttttttttggccaattaaattttaagggccctgcca

SEQ ID NO: 685199 - DNA, 247 bp, Homo sapiens
ataaagtatttattaagacagaaccggtagacagttatttgttgttccagagagggagcctcgccggagccgccggactcctgttcctctcgtccggtgccagagcaaccggggacaactcagcgacgggtgtatcccgggcaatgttgttgactgcgtggacctgttgagccacgttcttctggacaggattccgtaccaggtccgtctatttgatgttagatgttgtcgtcttgacagacttcca

SEQ ID NO: 685200 - DNA, 224 bp, Homo sapiens
ctctttttcagtaactcatttctaattcagtaactcatttctctcttttttttttaaactgagacagggtctcgctctgttgcccaggctggagtgcagtggcaccatctcggctcactgcaacctctgcctccaggctccagagattctcccacctcagcctcccgagtagctaggaatacaggtgtgtgccaccaccctcggctaatttttttatttttggt

SEQ ID NO: 685201 - DNA, 290 bp, Homo sapiens
tgtttatcgatgccacctccaccagaacgggtgatagtatccacagatgagagacccaaagatggttcacatcacaggactctgtgcagacaacccccagtaccagcctggagctgagtagactcactgggtggctagacctagaagagaatcaacaattattgagtttagctcacaggaagccacatccaagaaaagtgggagaaaactacagcaatgtccattaacagaggaattgactaataccttgatgtacattcccacaagagaatgtggcatcgataaacacc

SEQ ID NO: 685202 - DNA, 394 bp, Homo sapiens
  misc_feature (75)..(75): n is a, c, g, or t
cccccccccccccaggagtgggtgtattccccctcctaaggaggggggcccccccacccttggggttcccccccntttgttgtttaaaaagcgtgtcccttttttgttcccccctacccccctcaccttagaaccctggggcctgggggcaattttaacccccttcccctttttgggggggcccccaaaaccttggcccctgggaaggccaaattgttttttcctttggggcctggggggaggtttctcccctgcccccccccccgccccctccttttttagccatttaaaagccccttttttaaaaaaaaataagcataaaagacaaaaaaaacaataaaataagatcaagacaatacactacagactgggcaaaaaaataaaaatatataaa

SEQ ID NO: 685203 - DNA, 381 bp, Homo sapiens
gatggattccttctttttgccgctgctgtgcccacggcaaattacgtttttggctaaagcagagtattttaatggcacaacgctggtgggtaggctgcagaaatggttttttactagtagcgggtcgcgcccggttaatcgcacatccgccagtgctgggcaagacgctatgaatacggcggttgaggtgctgaacgatggcgatcttttcgggatttaccctgaggggacacgttcgcccgatggtcgcttgtataaagggaaaactggcgtggcgcgcattgcgttggcgtctggcgctcaggttattcctgtggcgatgatcggcacgggagacgtcaacccgattggcacatggtttccgcgtccgggtaaggtgcg

SEQ ID NO: 685204 - DNA, 178 bp, Homo sapiens
  misc_feature (72)..(72): n is a, c, g, or t
  misc_feature (125)..(125): n is a, c, g, or t
tgctctcattaaccttaaaaaaacctagatatagataaaagactgaaacactaaaaatgtaaaagtgatggntataagatgataaaaatgctgttcttcattgtccagattttcactcctgaggnaatagttcttttataataaaaaagcaatatttttcatattaaaaaactacctc

SEQ ID NO: 685205 - DNA, 114 bp, Homo sapiens
tgaggatcccataaatcatatggaaacacatatttgtacctgttacagccccaaagctgaaagcattaaagaataaacacatacagcaagctacgaggtgcgactgtttaggaa

SEQ ID NO: 685206 - DNA, 593 bp, Homo sapiens
atctcaacttagtattatacccacacccacccaagaacagggtttaaaaaaaaaaaataaaaaaaaaaaaaaaaaaaaaaaaaaaaaatgtgtgtggcgggcgcgcgccgcgggcccccgcgaaagaagctttcacagaaaccacattcgcggtgggggcgcgcgggggcccaccagggaggtaaaggcggaaaccgggggccacaagcgcgtggttccctagcgggaaaccgcgggcccagagaacaagagggcggcggggagattctctctcacccaaatataaaaaaagcccgcgggggggaaacaccggagagcggttctgggagaacacaaactcccgagagagggagagttcgcgagagaggggcacaatacgggggggactctatatctaaacgcggaggagctcacaaagggaggagcgccccagagaatcaaaaatattataccgccccggttacggggggtgacaacgaaaacaacaaaacacaacagagaagaaaccaaacacaaacacgtacagagagcaactaagcacaacggaaaaagcgaagcacaaaaaacaagcagaaaaaaaaacagaaacatcg

SEQ ID NO: 685207 - DNA, 692 bp, Homo sapiens
cacctccggacaaggactggaggccttcccggaggagctcaagcacttcgaagccccaatcgagaagcacaacccctacccgaagccagctggagattgcgccacgagaactgaggcaccccagagagtgtgggcgacggcgagcgtgtgagcccccaccccgcgagatagcaccccctgctggaggggcggacccaggagctgggctacacggtgaagaagcatctgcaggacctgtccggcaggatctccagagctcggcaccacgaactctgaaggcactggggagccccagcccggcagggaagaggccagcgtgaaggacctgggctcttggccctggcatttccgtggacagcccgccgtcagggtggctggggctggcacgggttcgaggccaggaaggattgtttctggtgactgcagccgttgccgtcgcgacaccgggcttggtggtggtagccatttgggtctgagatcggccccagctctgactgaaggggcttggcttcccactccagcatccagcgtggccagtcaccacccccgtgaggacctcgaagtccagctgctgtcaggtttgatagtcctctgctaaaaccacacgatttacattaaaaattttacacatctgcccccggagaataccatgcacagagtcctttaaaaatagagtgcagtattttaaccca

SEQ ID NO: 685208 - DNA, 283 bp, Homo sapiens
aacattattttctaagtacttaactatgtattgtatatttgctaagcatgtgatagctattgtctcttgtatgtgctggcctccagttgccttattatatattaatctccagaggtattattattgaggaactcgaagctttagaaagatttaagatttgtacagctaagccaggtgcggtggctgacaccagtaatctcagcactttgggaggccgaggcaggcagatcaccaggtcaggagattgagaccatcctgggcttaacacagtccttgtctctac

SEQ ID NO: 685209 - DNA, 996 bp, Homo sapiens
  misc_feature (227)..(227): n is a, c, g, or t
  misc_feature (235)..(236): n is a, c, g, or t
  misc_feature (240)..(240): n is a, c, g, or t
  misc_feature (242)..(242): n is a, c, g, or t
  misc_feature (283)..(283): n is a, c, g, or t
  misc_feature (300)..(301): n is a, c, g, or t
  misc_feature (318)..(318): n is a, c, g, or t
  misc_feature (376)..(377): n is a, c, g, or t
  misc_feature (407)..(407): n is a, c, g, or t
  misc_feature (414)..(414): n is a, c, g, or t
  misc_feature (451)..(451): n is a, c, g, or t
  misc_feature (496)..(496): n is a, c, g, or t
  misc_feature (501)..(501): n is a, c, g, or t
  misc_feature (503)..(503): n is a, c, g, or t
  misc_feature (513)..(513): n is a, c, g, or t
  misc_feature (517)..(517): n is a, c, g, or t
  misc_feature (520)..(520): n is a, c, g, or t
  misc_feature (537)..(537): n is a, c, g, or t
gtttgaaagtcccctggacagtgggcaggggtggcagaggacacgagcagccactgcccgtaccccctctcctctctgtaagcccatgccctgtcttcccagggacttgtgagcctcttccctcgacggtcctcttctctccttccagtcctctccccctgctgtctgcagcccctccccggggagttggtgctttcttttccttttttttttttcccaggggggangggaggannaggnanggagggggatcagagcgtgtcccaaagaagggaaagcgggnaggttggaggaggggcnnaaagcagggccggcaanggtggtaccttcataagggggtagtggggggtgggggtcaggcccggaacatcgtccnnactggagaatcggtcaggggaaaaagtcanggggacnaggaggaagagccaggagggccagaggcagagaaganagggagtctaaggggccagggtgagcgaggggtccagggcctaanggtgntnccggggggcngggngantgcagccagggtccccntccccttttcacaccccagatcacagcccgggtctgggctttacatccctctgtcccaaggacagaaagaagttgtggcccgggccaggtcatcagtgatcatagtgtcccttggattgtaccacaacttacaccctgccttatgcgagaacgcattccaccaacatttaccaacacaaacacatagaagacaaagacaacacaaccacacaacccaacgaccacacacaacgccgggcggccaaagaaaccgcagggggcgcacgaacgacgaccacaacggcacagacagacccccaagaaggccacgcaccggcgagggagcgcgcataaaaccgaggcagaacagaaaggaggcacgtgaaaagaacaacagatgggcaccaagcacacacccaagacgcggcgaagaacagcgtcggccacaacccgccccagagcgccgatgaactacaagaa

SEQ ID NO: 685210 - DNA, 435 bp, Homo sapiens
  misc_feature (72)..(72): n is a, c, g, or t
  misc_feature (81)..(81): n is a, c, g, or t
  misc_feature (129)..(129): n is a, c, g, or t
  misc_feature (215)..(215): n is a, c, g, or t
  misc_feature (375)..(375): n is a, c, g, or t
  misc_feature (386)..(386): n is a, c, g, or t
  misc_feature (389)..(389): n is a, c, g, or t
agaagacaatccaattttttaatggacaaaagatttgaatggacatttccccaaagaagatatataaatggntaataagcncaacaaaagatactcaacattgttggccattagggaaatgcaaattanaaccacaatgagatgcttccatacatcctctagaatggctgcaatcaaaaagataggcaataccaagtgctgatgacaatgtagancaactggaactttcatccactagtagtgggaatgcaaaatgctacagccacattggaaaatagcttggcagtttcttatcaagtaagataaatacttaaaatataacacagcaattctattcttagctatttacctaagagaaaggaaaacatattcacncaaaaagttanacncaaatgttcatagtaactttataatattaaaaaagtagaaacaaca

SEQ ID NO: 685211 - DNA, 732 bp, Homo sapiens
gcaatcagataggcatttgtctcacgtgaggagagggatgactttaaattctgtctgttcacaaggaatttccttgtgagcaaattgtgagggaggtatatagctttgtaaaaaatctttgtagttatcttatttaggaatagaacaggaggcaggtttgtcctgcccagcttgacttttcccagcttgacttttccctttggcttagtgattttggggtcgcgagatttttttttttttttttttttaaattttccccccttttaaaaatccttcaaaaaaacgctttttagaagaaaattgagcccttgggcctaaggttggtctgatctcctcagggacataggatgcttaatccctacattgattaggccccgtgtttttaggaaagctcatgttaccaggtttgtgaagttcatgtcctatgaagagaaacgggggaggcaaggggaaaagggccacaacaaacaagaacattccctgggaaattctcttttatgggccattattatctcctgaagtcccatgctagtgaattagcgccgtttataacaagtggcgtcggactgtttttgtaacaagagggggcgcgggaatattcctctctggatagttggtctagctctccagtttggcaggggtttgaaagaaagcgccccagttttaatttttcacaggggaattttacactcgaggggcacacatgtgcggggcaacaaacaggaaagcgaa

SEQ ID NO: 685212 - DNA, 3136 bp, Homo sapiens
tattggcggtctctcattgagtgcgcttaacctatagtgagtgttattcgtagcaggtactgatataatggaacagagaatgccggctccagatatgtctataagaccatcatggagcagttcaaccctagcctccggaacttcatcgccatggggaagaattacgagaaggcactggcaggtgtgacgtatgcagccaaaggctactttgacgccctggtgaagatgggggagctggccagcgagagccagggctccaaagaactcggagacgttctcttccagatggctgaagtccacaggcagatccagaatcagctggaagaaatgctgaagtcttttcacaacgagctgcttacgcagctggagcagaaggtggagctggactccaggtatctgagtgctgcgctgaagaaataccagactgagcaaaggagcaaaggcgacgccctggacaagtgtcaggctgagctgaagaagcttcggaagaagagccagggcagcaagaatcctcagaagtactcggacaaggagctgcagtacatcgacgccatcagcaacaagcagggcgagctggagaattacgtgtccgacggctacaagaccgcactgacagaggagcgcaggcgcttctgcttcctggtggagaagcagtgcgccgtggccaagaactccgcggcctaccactccaagggcaaggagctgctggcgcagaagctgccgctgtggcaacaggcctgtgccgaccccagcaagatcccggagcgcgcggtgcagctcatgcagcaggtggccagcaacggcgccaccctccccagcgccctgtcggcctccaagtccaacctggtcatttccgaccccattccgggggccaagcccctgccggtgccccccgagctggcaccgttcgtggggcggatgtctgcccaggagagcacacccatcatgaacggcgtcacaggcccggatggcgaggactacagcccgtgggctgaccgcaaggctgcccagcccaaatccctgtctcctccgcagtctcagagcaagctcagcgactcctactccaacacactccccgtgcgcaagagcgtgaccccaaaaaacagctatgccaccaccgagaacaagactctgcctcgctcgagctccatggcagccggcctggagcgcaatggccgtatgcgggtgaaggccatcttctcccacgctgctggggacaacagcaccctcctgagcttcaaggagggtgacctcattaccctgctggtgcctgaggcccgcgatggctggcactacggagagagtgagaagaccaagatgcggggctggtttcccttctcctacacccgggtcttggacagcgatggcagtgacaggctgcacatgagcctgcagcaagggaagagcagcagcacgggcaacctcctggacaaggacgacctggccatcccaccccccgattacggcgccgcctcccgggccttccccgcccagacggccagcggcttcaagcagaggccctacagtgtggccgtgcccgccttctcccagggcctggatgactatggagcgcggtccatgagcagtggcagcggcacgctggtgtccacagtgtgaggacgctgaccccgggcagccgctgctctgaagagcttccgcgccttccccctggtctcgtccgttttcctcctcagctctcgctggtttgttcttgggttgtttttcttttccacctgccccatgccttttggttggtgaccccagactctgtgatcccccagggtccatggtgctgctccatccgccccccctcccctgtgtttacgcgccccatcctgtgtgtcccagccttttgagcagaaactgccaggcaggacctgctgggccgtgcggggcaccctcggcctcaccctgcagtgtctgtggcactcactgcttttctaaggctcgccgtgagccaggtctaaagtttgaagaaaaagaaaaatcttaaaaaaaaaaaaaaaaaaagaaaaaaagaaaaacaggaaaaaggactttttttttcctgaaaaacaaaaaccgatctgcatggactccggtgtgcgctgttatctcgcatccgacttccccggtgcgatggcctctgtccggacagggaaggtgctggggtccctggccgccccggcccctgtggaggggtgcacagagaaagggggctcgtgccaagctcgaggggcctcctgaggaagccggccgctcctgtgagggaggccgggcccgggcacctgagggcttctccctctggacactgcgggccaggtgtacatagagcagcgcggcacagtggcctcacctcccgtcgggcactggcgggagcaaggtcgggggcaggcgctgcccagctggccgcacacggacattccaaagacctccagagaccaccccacccccacattcctttgaccagccttgtgagggcatcgatgctgccccgggctacctggctgctctgggcagggtgtgcgggccgggcccggctgggggagggcagctctgggcacgccgcacccacgccccccacctgggggaaacaggcggttcctgcccggttcttcctaaacgctctcgtctttttgtgtgtcttggtgactttagaaacaaacacagtggactcagtggctactggtattgtctcttcccacactgaactctggggaattgagtgcagggcacagcccggctcagcctgcccgctggtgggagcccctgggaagctgcggcgctcctttatctgatgtggtttagtaaaagcctcccacacacctccccgtggcctgggacgtggctggtagtgtttgtgtgggaagcagctcaagacgcggaccgcgtgacattaaggagagcgcaagggcggaccgggccctgtgtagagacccttccgcgccggcgttcccgctccgctaaagatttcaaatccaggggattccatgctcaatggatgaatgtagacacaaaacagcaacacttgtatgaagatgtaaagtgctgaacatatttttttcctgtttcctttccttttttttaaaaaatctgaattgtgccctgtactgcagttacttgtttgaataaaagttttatttattgcaaaaaaaaa

SEQ ID NO: 685213 - DNA, 382 bp, Homo sapiens
  misc_feature (8)..(8): n is a, c, g, or t
  misc_feature (314)..(314): n is a, c, g, or t
ttaggaanctcctccccgggcccgctcttgtcgggcggaaaattcacacagtggttggtgcggtgccctccctcaccttaccccgaactgcaaagaaatccccaagcacaggccgggcccggtggtttcatgccctgtaatcccagcactttggaaggctgaggcaggcggatcacgaggtcaggagatcaagaccatccctggccaacatggtgaaacctcgtctctactaaaaatacaaaaattagctgagtatgatgcatgcgcctgtagtcccagctacttgggaggctgaggcaggagaatcacttgancctgggaggcggaggttgcactgagccgagatcttgtcactgcattccagcctgggcaacaggcaaga

SEQ ID NO: 685214 - DNA, 106 bp, Homo sapiens
cgctcctgcttctgctgctcctgcttctgccgcttcctgcttctgccgtcaacacaaagtttaaaacttccagtgatgtagggcatggtttcctaagttacggcag

SEQ ID NO: 685215 - DNA, 2813 bp, Homo sapiens
  misc_feature (29)..(29): n is a, c, g, or t
  misc_feature (32)..(32): n is a, c, g, or t
  misc_feature (43)..(43): n is a, c, g, or t
  misc_feature (48)..(48): n is a, c, g, or t
  misc_feature (107)..(107): n is a, c, g, or t
  misc_feature (126)..(126): n is a, c, g, or t
gacgtaaagaggacccttaccaaaagggnttnttggttaccanacaanacaccccccccgcgccgttttattctttaaaaaaccggacggcagtactatacggtctnaggtacgaggctgctgaantgaccactccttgacgggcaatcccggtggacgggtggtctgagtcctgctgtggagggtctgcctgaggccggtaggggctcagcccaagtacatcgacgccatcagcaacaagcagggcgagctggagaattacgtgtccgacggctacaagaccgcactgacagaggagcgcaggcgcttctgcttcctggtggagaagcagtgcgccgtggccaagaactccgcggcctaccactccaagggcaaggagctgctggcgcagaagctgccgctgtggcaacaggcctgtgccgaccccagcaagatcccggagcgcgcggtgcagctcatgcagcaggtggccagcaacggcgccaccctccccagcgccctgtcggcctccaagtccaacctggtcatttccgaccccattccgggggccaagcccctgccggtgccccccgagctggcaccgttcgtggggcggatgtctgcccaggagagcacacccatcatgaacggcgtcacaggcccggatggcgaggactacagcccgtgggctgaccgcaaggctgcccagcccaaatccctgtctcctccgcagtctcagagcaagctcagcgactcctactccaacacactccccgtgcgcaagagcgtgaccccaaaaaacagctatgccaccaccgagaacaagactctgcctcgctcgagctccatggcagccggcctggagcgcaatggccgtatgcgggtgaaggccatcttctcccacgctgctggggacaacagcaccctcctgagcttcaaggagggtgacctcattaccctgctggtgcctgaggcccgcgatggctggcactacggagagagtgagaagaccaagatgcggggctggtttcccttctcctacacccgggtcttggacagcgatggcagtgacaggctgcacatgagcctgcagcaagggaagagcagcagcacgggcaacctcctggacaaggacgacctggccatcccaccccccgattacggcgccgcctcccgggccttccccgcccagacggccagcggcttcaagcagaggccctacagtgtggccgtgcccgccttctcccagggcctggatgactatggagcgcggtccatgagcagtggcagcggcacgctggtgtccacagtgtgaggacgctgaccccgggcagccgctgctctgaagagcttccgcgccttccccctggtctcgtccgttttcctcctcagctctcgctggtttgttcttgggttgtttttcttttccacctgccccatgccttttggttggtgaccccagactctgtgatcccccagggtccatggtgctgctccatccgccccccctcccctgtgtttacgcgccccatcctgtgtgtcccagccttttgagcagaaactgccaggcaggacctgctgggccgtgcggggcaccctcggcctcaccctgcagtgtctgtggcactcactgcttttctaaggctcgccgtgagccaggtctaaagtttgaagaaaaagaaaaatcttaaaaaaaaaaaaaaaaaaagaaaaaaagaaaaacaggaaaaaggactttttttttcctgaaaaacaaaaaccgatctgcatggactccggtgtgcgctgttatctcgcatccgacttccccggtgcgatggcctctgtccggacagggaaggtgctggggtccctggccgccccggcccctgtggaggggtgcacagagaaagggggctcgtgccaagctcgaggggcctcctgaggaagccggccgctcctgtgagggaggccgggcccgggcacctgagggcttctccctctggacactgcgggccaggtgtacatagagcagcgcggcacagtggcctcacctcccgtcgggcactggcgggagcaaggtcgggggcaggcgctgcccagctggccgcacacggacattccaaagacctccagagaccaccccacccccacattcctttgaccagccttgtgagggcatcgatgctgccccgggctacctggctgctctgggcagggtgtgcgggccgggcccggctgggggagggcagctctgggcacgccgcacccacgccccccacctgggggaaacaggcggttcctgcccggttcttcctaaacgctctcgtctttttgtgtgtcttggtgactttagaaacaaacacagtggactcagtggctactggtattgtctcttcccacactgaactctggggaattgagtgcagggcacagcccggctcagcctgcccgctggtgggagcccctgggaagctgcggcgctcctttatctgatgtggtttagtaaaagcctcccacacacctccccgtggcctgggacgtggctggtagtgtttgtgtgggaagcagctcaagacgcggaccgcgtgacattaaggagagcgcaagggcggaccgggccctgtgtagagacccttccgcgccggcgttcccgctccgctaaagatttcaaatccaggggattccatgctcaatggatgaatgtagacacaaaacagcaacacttgtatgaagatgtaaagtgctgaacatatttttttcctgtttcctttccttttttttaaaaaatctgaattgtgccctgtactgcagttacttgtttgaataaaagttttatttattgcaaaaaaaaa

SEQ ID NO: 685216 - DNA, 3006 bp, Homo sapiens
gcgagtcgagtattctcccagcttgtctgggcaggagacagggttgggcctgtgtgacgtatgcagccaaaggctactttgacgccctggtgaagatgggggagctggccagcgagagccagggctccaaagaactcggagacgttctcttccagatggctgaagtccacaggcagatccagaatcagctggaagaaatgctgaagtcttttcacaacgagctgcttacgcagctggagcagaaggtggagctggactccaggtatctgagtgctgcgctgaagaaataccagactgagcaaaggagcaaaggcgacgccctggacaagtgtcaggctgagctgaagaagcttcggaagaagagccagggcagcaagaatcctcagaagtactcggacaaggagctgcagtacatcgacgccatcagcaacaagcagggcgagctggagaattacgtgtccgacggctacaagaccgcactgacagaggagcgcaggcgcttctgcttcctggtggagaagcagtgcgccgtggccaagaactccgcggcctaccactccaagggcaaggagctgctggcgcagaagctgccgctgtggcaacaggcctgtgccgaccccagcaagatcccggagcgcgcggtgcagctcatgcagcaggtggccagcaacggcgccaccctccccagcgccctgtcggcctccaagtccaacctggtcatttccgaccccattccgggggccaagcccctgccggtgccccccgagctggcaccgttcgtggggcggatgtctgcccaggagagcacacccatcatgaacggcgtcacaggcccggatggcgaggactacagcccgtgggctgaccgcaaggctgcccagcccaaatccctgtctcctccgcagtctcagagcaagctcagcgactcctactccaacacactccccgtgcgcaagagcgtgaccccaaaaaacagctatgccaccaccgagaacaagactctgcctcgctcgagctccatggcagccggcctggagcgcaatggccgtatgcgggtgaaggccatcttctcccacgctgctggggacaacagcaccctcctgagcttcaaggagggtgacctcattaccctgctggtgcctgaggcccgcgatggctggcactacggagagagtgagaagaccaagatgcggggctggtttcccttctcctacacccgggtcttggacagcgatggcagtgacaggctgcacatgagcctgcagcaagggaagagcagcagcacgggcaacctcctggacaaggacgacctggccatcccaccccccgattacggcgccgcctcccgggccttccccgcccagacggccagcggcttcaagcagaggccctacagtgtggccgtgcccgccttctcccagggcctggatgactatggagcgcggtccatgagcagtggcagcggcacgctggtgtccacagtgtgaggacgctgaccccgggcagccgctgctctgaagagcttccgcgccttccccctggtctcgtccgttttcctcctcagctctcgctggtttgttcttgggttgtttttcttttccacctgccccatgccttttggttggtgaccccagactctgtgatcccccagggtccatggtgctgctccatccgccccccctcccctgtgtttacgcgccccatcctgtgtgtcccagccttttgagcagaaactgccaggcaggacctgctgggccgtgcggggcaccctcggcctcaccctgcagtgtctgtggcactcactgcttttctaaggctcgccgtgagccaggtctaaagtttgaagaaaaagaaaaatcttaaaaaaaaaaaaaaaaaaagaaaaaaagaaaaacaggaaaaaggactttttttttcctgaaaaacaaaaaccgatctgcatggactccggtgtgcgctgttatctcgcatccgacttccccggtgcgatggcctctgtccggacagggaaggtgctggggtccctggccgccccggcccctgtggaggggtgcacagagaaagggggctcgtgccaagctcgaggggcctcctgaggaagccggccgctcctgtgagggaggccgggcccgggcacctgagggcttctccctctggacactgcgggccaggtgtacatagagcagcgcggcacagtggcctcacctcccgtcgggcactggcgggagcaaggtcgggggcaggcgctgcccagctggccgcacacggacattccaaagacctccagagaccaccccacccccacattcctttgaccagccttgtgagggcatcgatgctgccccgggctacctggctgctctgggcagggtgtgcgggccgggcccggctgggggagggcagctctgggcacgccgcacccacgccccccacctgggggaaacaggcggttcctgcccggttcttcctaaacgctctcgtctttttgtgtgtcttggtgactttagaaacaaacacagtggactcagtggctactggtattgtctcttcccacactgaactctggggaattgagtgcagggcacagcccggctcagcctgcccgctggtgggagcccctgggaagctgcggcgctcctttatctgatgtggtttagtaaaagcctcccacacacctccccgtggcctgggacgtggctggtagtgtttgtgtgggaagcagctcaagacgcggaccgcgtgacattaaggagagcgcaagggcggaccgggccctgtgtagagacccttccgcgccggcgttcccgctccgctaaagatttcaaatccaggggattccatgctcaatggatgaatgtagacacaaaacagcaacacttgtatgaagatgtaaagtgctgaacatatttttttcctgtttcctttccttttttttaaaaaatctgaattgtgccctgtactgcagttacttgtttgaataaaagttttatttattgcaaaaaaaaa

SEQ ID NO: 685217 - DNA, 3031 bp, Homo sapiens
  misc_feature (2)..(2): n is a, c, g, or t
  misc_feature (4)..(5): n is a, c, g, or t
ancnngtggttcgggtccgctttcgtctccgtcctgctgccgttaccgccgctgctgccgccgcttgcgtcccccgctccggtctgtggtgcagccgggacccaggaccatgtctctgtctcgctcagaggagatgcaccggctcacggaaaatgtctataaggagacgttctcttccagatggctgaagtccacaggcagatccagaatcagctggaagaaatgctgaagtcttttcacaacgagctgcttacgcagctggagcagaaggtggagctggactccaggtatctgagtgctgcgctgaagaaataccagactgagcaaaggagcaaaggcgacgccctggacaagtgtcaggctgagctgaagaagcttcggaagaagagccagggcagcaagaatcctcagaagtactcggacaaggagctgcagtacatcgacgccatcagcaacaagcagggcgagctggagaattacgtgtccgacggctacaagaccgcactgacagaggagcgcaggcgcttctgcttcctggtggagaagcagtgcgccgtggccaagaactccgcggcctaccactccaagggcaaggagctgctggcgcagaagctgccgctgtggcaacaggcctgtgccgaccccagcaagatcccggagcgcgcggtgcagctcatgcagcaggtggccagcaacggcgccaccctccccagcgccctgtcggcctccaagtccaacctggtcatttccgaccccattccgggggccaagcccctgccggtgccccccgagctggcaccgttcgtggggcggatgtctgcccaggagagcacacccatcatgaacggcgtcacaggcccggatggcgaggactacagcccgtgggctgaccgcaaggctgcccagcccaaatccctgtctcctccgcagtctcagagcaagctcagcgactcctactccaacacactccccgtgcgcaagagcgtgaccccaaaaaacagctatgccaccaccgagaacaagactctgcctcgctcgagctccatggcagccggcctggagcgcaatggccgtatgcgggtgaaggccatcttctcccacgctgctggggacaacagcaccctcctgagcttcaaggagggtgacctcattaccctgctggtgcctgaggcccgcgatggctggcactacggagagagtgagaagaccaagatgcggggctggtttcccttctcctacacccgggtcttggacagcgatggcagtgacaggctgcacatgagcctgcagcaagggaagagcagcagcacgggcaacctcctggacaaggacgacctggccatcccaccccccgattacggcgccgcctcccgggccttccccgcccagacggccagcggcttcaagcagaggccctacagtgtggccgtgcccgccttctcccagggcctggatgactatggagcgcggtccatgagcagtggcagcggcacgctggtgtccacagtgtgaggacgctgaccccgggcagccgctgctctgaagagcttccgcgccttccccctggtctcgtccgttttcctcctcagctctcgctggtttgttcttgggttgtttttcttttccacctgccccatgccttttggttggtgaccccagactctgtgatcccccagggtccatggtgctgctccatccgccccccctcccctgtgtttacgcgccccatcctgtgtgtcccagccttttgagcagaaactgccaggcaggacctgctgggccgtgcggggcaccctcggcctcaccctgcagtgtctgtggcactcactgcttttctaaggctcgccgtgagccaggtctaaagtttgaagaaaaagaaaaatcttaaaaaaaaaaaaaaaaaaagaaaaaaagaaaaacaggaaaaaggactttttttttcctgaaaaacaaaaaccgatctgcatggactccggtgtgcgctgttatctcgcatccgacttccccggtgcgatggcctctgtccggacagggaaggtgctggggtccctggccgccccggcccctgtggaggggtgcacagagaaagggggctcgtgccaagctcgaggggcctcctgaggaagccggccgctcctgtgagggaggccgggcccgggcacctgagggcttctccctctggacactgcgggccaggtgtacatagagcagcgcggcacagtggcctcacctcccgtcgggcactggcgggagcaaggtcgggggcaggcgctgcccagctggccgcacacggacattccaaagacctccagagaccaccccacccccacattcctttgaccagccttgtgagggcatcgatgctgccccgggctacctggctgctctgggcagggtgtgcgggccgggcccggctgggggagggcagctctgggcacgccgcacccacgccccccacctgggggaaacaggcggttcctgcccggttcttcctaaacgctctcgtctttttgtgtgtcttggtgactttagaaacaaacacagtggactcagtggctactggtattgtctcttcccacactgaactctggggaattgagtgcagggcacagcccggctcagcctgcccgctggtgggagcccctgggaagctgcggcgctcctttatctgatgtggtttagtaaaagcctcccacacacctccccgtggcctgggacgtggctggtagtgtttgtgtgggaagcagctcaagacgcggaccgcgtgacattaaggagagcgcaagggcggaccgggccctgtgtagagacccttccgcgccggcgttcccgctccgctaaagatttcaaatccaggggattccatgctcaatggatgaatgtagacacaaaacagcaacacttgtatgaagatgtaaagtgctgaacatatttttttcctgtttcctttccttttttttaaaaaatctgaattgtgccctgtactgcagttacttgtttgaataaaagttttatttattgcaaaaaaaaa

SEQ ID NO: 685218 - DNA, 1003 bp, Homo sapiens
  misc_feature (2)..(2): n is a, c, g, or t
  misc_feature (4)..(5): n is a, c, g, or t
ancnngtggttcgggtccgctttcgtctccgtcctgctgccgttaccgccgctgctgccgccgcttgcgtcccccgctccggtctgtggtgcagccgggacccaggaccatgtctctgtctcgctcagaggagatgcaccggctcacggaaaatgtctataagaccatcatggagcagttcaaccctagcctccggaacttcatcgccatggggaagaattacgagaaggcactggcaggtgtgacgtatgcagccaaaggctactttgacgccctggtgaagatgggggagctggccagcgagagccagggctccaaagaactcggagacgttctcttccagatggctgaagtccacaggcagatccagaatcagctggaagaaatgctgaagtcttttcacaacgagctgcttacgcagctggagcagaaggtggagctggactccaggtatctgagtgctgcgctgaagaaataccagactgagcaaaggagcaaaggcgacgccctggacaagtgtcaggctgagctgaagaagcttcggaagaagagccagggcagcaagaatcctcagaagtactcggacaaggagctgcagtacatcgacgccatcagcaacaagcagggcgagctggagaattacgtgtccgacggctacaagaccgcactgacagaggagcgcaggcgcttctgcttcctggtggagaagcagtgcgccgtggccaagaactccgcggcctaccactccaagggccaagggcggaccgggccctgtgtagagacccttccgcgccggcgttcccgctccgctaaagatttcaaatccaggggattccatgctcaatggatgaatgtagacacaaaacagcaacacttgtatgaagatgtaaagtgctgaacatatttttttcctgtttcctttccttttttttaaaaaatctgaattgtgccctgtactgcagttacttgtttgaataaaagttttatttattgcaaaaaaaaa

SEQ ID NO: 685219 - DNA, 120 bp, Homo sapiens
acagcttgagtagcttggagctgattttacacattgcagctattatgcctttgaacaatgtcaatcaacagaacaatttacagtgccctggtagttgcaggaatcctgcaggcggagaaa

SEQ ID NO: 685220 - DNA, 2277 bp, Homo sapiens
  misc_feature (2)..(2): n is a, c, g, or t
  misc_feature (87)..(87): n is a, c, g, or t
  misc_feature (103)..(103): n is a, c, g, or t
  misc_feature (110)..(110): n is a, c, g, or t
gngcttcgctcaatccactgtattcacccatccgggcaagccctgcgtcccccgggtgcccgttctgggcgtttctgccaggggganaccttatgacgcttanagcccgntgcgaggactacagcccgtgggctgaccgcaaggctgcccagcccaaatccctgtctcctccgcagtctcagagcaagctcagcgactcctactccaacacactccccgtgcgcaagagcgtgaccccaaaaaacagctatgccaccaccgagaacaagactctgcctcgctcgagctccatggcagccggcctggagcgcaatggccgtatgcgggtgaaggccatcttctcccacgctgctggggacaacagcaccctcctgagcttcaaggagggtgacctcattaccctgctggtgcctgaggcccgcgatggctggcactacggagagagtgagaagaccaagatgcggggctggtttcccttctcctacacccgggtcttggacagcgatggcagtgacaggctgcacatgagcctgcagcaagggaagagcagcagcacgggcaacctcctggacaaggacgacctggccatcccaccccccgattacggcgccgcctcccgggccttccccgcccagacggccagcggcttcaagcagaggccctacagtgtggccgtgcccgccttctcccagggcctggatgactatggagcgcggtccatgagcagtggcagcggcacgctggtgtccacagtgtgaggacgctgaccccgggcagccgctgctctgaagagcttccgcgccttccccctggtctcgtccgttttcctcctcagctctcgctggtttgttcttgggttgtttttcttttccacctgccccatgccttttggttggtgaccccagactctgtgatcccccagggtccatggtgctgctccatccgccccccctcccctgtgtttacgcgccccatcctgtgtgtcccagccttttgagcagaaactgccaggcaggacctgctgggccgtgcggggcaccctcggcctcaccctgcagtgtctgtggcactcactgcttttctaaggctcgccgtgagccaggtctaaagtttgaagaaaaagaaaaatcttaaaaaaaaaaaaaaaaaaagaaaaaaagaaaaacaggaaaaaggactttttttttcctgaaaaacaaaaaccgatctgcatggactccggtgtgcgctgttatctcgcatccgacttccccggtgcgatggcctctgtccggacagggaaggtgctggggtccctggccgccccggcccctgtggaggggtgcacagagaaagggggctcgtgccaagctcgaggggcctcctgaggaagccggccgctcctgtgagggaggccgggcccgggcacctgagggcttctccctctggacactgcgggccaggtgtacatagagcagcgcggcacagtggcctcacctcccgtcgggcactggcgggagcaaggtcgggggcaggcgctgcccagctggccgcacacggacattccaaagacctccagagaccaccccacccccacattcctttgaccagccttgtgagggcatcgatgctgccccgggctacctggctgctctgggcagggtgtgcgggccgggcccggctgggggagggcagctctgggcacgccgcacccacgccccccacctgggggaaacaggcggttcctgcccggttcttcctaaacgctctcgtctttttgtgtgtcttggtgactttagaaacaaacacagtggactcagtggctactggtattgtctcttcccacactgaactctggggaattgagtgcagggcacagcccggctcagcctgcccgctggtgggagcccctgggaagctgcggcgctcctttatctgatgtggtttagtaaaagcctcccacacacctccccgtggcctgggacgtggctggtagtgtttgtgtgggaagcagctcaagacgcggaccgcgtgacattaaggagagcgcaagggcggaccgggccctgtgtagagacccttccgcgccggcgttcccgctccgctaaagatttcaaatccaggggattccatgctcaatggatgaatgtagacacaaaacagcaacacttgtatgaagatgtaaagtgctgaacatatttttttcctgtttcctttccttttttttaaaaaatctgaattgtgccctgtactgcagttacttgtttgaataaaagttttatttattgcaaaaaaaaa

SEQ ID NO: 685221 - DNA, 686 bp, Homo sapiens
  misc_feature (2)..(2): n is a, c, g, or t
  misc_feature (4)..(5): n is a, c, g, or t
ancnngtggttcgggtccgctttcgtctccgtcctgctgccgttaccgccgctgctgccgccgcttgcgtcccccgctccggtctgtggtgcagccgggacccaggaccatgtctctgtctcgctcagaggagatgcaccggctcacggaaaatgtctataagaccatcatggagcagttcaaccctagcctccggaacttcatcgccatggggaagaattacgagaaggcactggcaggtgtgacgtatgcagccaaaggctactttgacgccctggtgaagatgggggagctggccagcgagagccagggctccaaagaactcggagacgttctcttccagatggctgaagtccacaggcagatccagaatcagctggaagaaatgctgaagtcttttcacaacgagctgcttacgcagctggagcagaaggtggagctggactccaggtatctgagtgctgcgctgaagaaataccagactgagcaaaggagcaaaggcgacgccctggacaagtgtcaggctgagctgaagaagcttcggaagaagagccagggcagcaagaatcctcagaagtactcggacaaggagctgcagggctggccactcgagggaaggtggtacttcaggttcctcgagggagcggcttcggtgctgttctctcaccgtcacgccggcgtcaccg

SEQ ID NO: 685222 - DNA, 370 bp, Homo sapiens
  misc_feature (2)..(2): n is a, c, g, or t
  misc_feature (4)..(5): n is a, c, g, or t
ancnngtggttcgggtccgctttcgtctccgtcctgctgccgttaccgccgctgctgccgccgcttgcgtcccccgctccggtctgtggtgcagccgggacccaggaccatgtctctgtctcgctcagaggagatgcaccggctcacggaaaatgtctataagtcaatcaatgcaatgcttccatatgtggccagtgcacagttcattctacctgtgagagtataagagttgagatattttttaataccagtgagctggtattgcgcgtcactttctggacctgccatgatttcaatctgtcaaatccgcaaattccgcgagctggtgtccgtcagggaatgtaacactctctgatccgggtcgagctgc

SEQ ID NO: 685223 - DNA, 945 bp, Homo sapiens
  misc_feature (945)..(945): n is a, c, g, or t
gacattttgtatgctagtaggtaccacagccattgtccaggagttttatttgtacctgacaataattgagatgtaatttaaattttttgttgttggttggttggttggttttgacttttcaagacaaggtttttctgtatagccttggttgtgctggaattgttttatagaccaacctggtcttgaactcagagacattcaagcttctatttctggaggcctgggattaaaggtatgtgctactaccaccaacaggattttttgttttatggtctttgctttttgttgttttgagacaaggtctctttatctagctagacctggctgtactggaacttgctaagtcagtggttcccaaccttctgatgcaatgacactacccataaaattatttgttgctacttcataactatagtttgctactcttataaatcataatttagataactgatatgcaagtccaaaggtgtcatggccctcagattgagaactaccatgctaagtagactccaggctggtctacagagtgagttccaggacagccaggctatacagggaaactctgtctcgaaaaaccaaaaaaaaaaaaaaaagatttggtggtatacttccgagttcgggataaggattatcctttggggttttctggaccaagtggttgggtaatcttccagaggggtaccctacttccagcgccctatgtttattaccgtggccgggagcaacgggttggggtactggaagctccaacccaggggaaattccgtgggtgtcaacccatatgggatcaggggaaaggagcccactgcgccataatatagagagatcagggagaaggagaagcaaacaggagatagcccacagagcgaaaaagcgaagcgggacaagagcaacagggcgagacaacaaagaacacgcaagcacacaccgacccaatatcacccn

SEQ ID NO: 685224 - DNA, 367 bp, Homo sapiens
tcaggtcctcaatgaggatcaggtcatttccgagaccgccatgaccaacgggtgggcaccggaggccgaccttccgttggattgcctgagcgacttcgacctggacgacgaagactcgatcgacgaggagctcgaaggactggtcgtcgtggagcaggacccggagcgcgtgtactacggacacgaggtcaaggtccaggccaagttggacgtcgcgcggctgggctatcggttgtttggcgaggtgcaggtgcgcgtcatccatgccaagctcaagtggggcggcgccgatgacgacgaggacactccgccgcctgtgcccatgaaccaggctctcgccgatctgctggggttttctgtcgaagag

SEQ ID NO: 685225 - DNA, 583 bp, Homo sapiens
tacagcttacaaaacataattttatttaaatttgtatagataaaaatctaccaaaatttaaacaaaaattttatccaaatcctttcccacaacaaaatgggacatcatggaaaaaaaaaaacactttcaaatagggtccccatctttctaccataaacgggtagattctggggaggatgaggagtaagagagaaacgaggagagaagatagtgatactaaacacaatttggatcttcagttggtggtctcatcttgaaatatcttaataacagagattcccataagaatcaggattcatttttggacacaaaaattggaagcttccactcccaaaatcacaaataagggcttctgggtattccttattaagtggtgaggtaaacagttattttcaatattagggcaaatgggtaaaaaccactatggatgggttatattaatgcagattattccattattaaatataattggggaatactcacggattttccaaccttttgttagatttagaaccctgtaaaatctgcagaagtgtgtaatagctattggctgaatgtctaagcatgcctttaagtactatag

SEQ ID NO: 685226 - DNA, 356 bp, Homo sapiens
  misc_feature (45)..(45): n is a, c, g, or t
  misc_feature (61)..(61): n is a, c, g, or t
  misc_feature (104)..(104): n is a, c, g, or t
  misc_feature (115)..(115): n is a, c, g, or t
  misc_feature (132)..(132): n is a, c, g, or t
  misc_feature (135)..(135): n is a, c, g, or t
  misc_feature (164)..(164): n is a, c, g, or t
  misc_feature (168)..(168): n is a, c, g, or t
  misc_feature (205)..(205): n is a, c, g, or t
  misc_feature (247)..(247): n is a, c, g, or t
  misc_feature (253)..(253): n is a, c, g, or t
  misc_feature (271)..(271): n is a, c, g, or t
  misc_feature (279)..(279): n is a, c, g, or t
  misc_feature (288)..(288): n is a, c, g, or t
  misc_feature (323)..(323): n is a, c, g, or t
tggcttttcaaccccttttgttaaaaacagactagcaccactgtnacgcgtgccaagaganaccaagacggcccagtcacagaggaaaaacccgaacacgacanaaaactgaggngagtccaggcctgggcnggngggggccacacccgcgggccccggttgcngggnggcatggggctcaggcctgggcgcctcgggccggggnctccgggcctcacttggccggccgcgtgaagaagcgcgttgngaagtngaacaggtcccgattgancttgcgcnggttgcgcncctcgtcctccagccccgtcacacggacgcgcacnggtcctggccgccgagcacgcccttctccatgg

SEQ ID NO: 685227 - DNA, 904 bp, Homo sapiens
  misc_feature (23)..(23): n is a, c, g, or t
  misc_feature (72)..(72): n is a, c, g, or t
  misc_feature (90)..(90): n is a, c, g, or t
  misc_feature (98)..(98): n is a, c, g, or t
  misc_feature (124)..(124): n is a, c, g, or t
  misc_feature (126)..(127): n is a, c, g, or t
  misc_feature (129)..(129): n is a, c, g, or t
  misc_feature (131)..(131): n is a, c, g, or t
  misc_feature (133)..(133): n is a, c, g, or t
  misc_feature (198)..(198): n is a, c, g, or t
  misc_feature (204)..(204): n is a, c, g, or t
  misc_feature (330)..(330): n is a, c, g, or t
  misc_feature (369)..(369): n is a, c, g, or t
  misc_feature (390)..(390): n is a, c, g, or t
  misc_feature (420)..(420): n is a, c, g, or t
  misc_feature (479)..(479): n is a, c, g, or t
aagcgacccattgaaaacaggancctcattctacccagtgtcacgagaaatgaaacaggaccctatcaatgngaaatacaggaccgatanggtggcanccgcagtaacccagtcaccctgaatntnntntntngtccagacctccccagaatttacccttcattcacctattaccattcaggagaaaacctctacttngtcctnttcgcggactctaacccaccagcagaatattcttggacaattaatgggaagtttcagctatcaggacaaaagctctttatcccccagattactacaaagcatagcgggctctatgcttgctctgtncgtaactcagccactggcatggaaagctccaaatccatnacacccaaagtctctgccccntcaggaacaggacatctccctggccttaanccattatagcagccgtgatgtcatttctgtatttcaggaagactggcagacagttgctntcattcttcctcaaagtatttaccatcagctacagtccaaaattgctttttgttcaaggagatttatgaaaagactctgacaaggactcttgaatacaagttcctgataacttcaagatcataccactggactaagaactttcaaaattttaatgaacaggctgatacttcatgaaattcaagacaaagaaaaaaacccaattttattggactaaatagtcaaaacaatgttttcataattttcctatttgaaaatgtgctgattctttgaatgttttattctccagatttatgcactttttttcttcagcaattggtaaagtatacttttgtaaacaaaaattgaaacatttgcttttgctccctaagtgccccagaattgggaaactattcaggagtattcatatgtttatggtaataaagtc

SEQ ID NO: 685228 - DNA, 105 bp, Homo sapiens
tggaagagacaggcgggatctcattctgtggtccaggctggaatgcagtggcgtgactatggcttactgcagccctgacctcttgggctcgggtgattcttccac

SEQ ID NO: 685229 - DNA, 309 bp, Homo sapiens
tttggaacgagaaacgaggtgattttctcggcgagaacgagacttatgagttgatgcggtgtctggaggacttgacgtcgaagaagacgctgtgcatggagaatctgatacgcgagcgagctcgcgggatgatgacgatagagacgcgcgaaggtggaaatgctgagactttcgtctggcgggaaatcttgctcggggaattataagagaaggctcactggaaggttcctgagaactgcttgaatgtggtatgtttgtatggcaatgtatatagattttttaaaagaataaatgttgttttgcaaatgt

SEQ ID NO: 685230 - DNA, 153 bp, Homo sapiens
tgggtcactctagaggatctaatcggtggtcaactgtatccgtatttgggggctgaggcggtgatacgaggtcaggagattgagacatcctggtacatggtgaaaccgtctctattaaaaaaatacaaaaattggcaggtgttgtggcaggcg

SEQ ID NO: 685231 - DNA, 81 bp, Homo sapiens
  misc_feature (78)..(78): n is a, c, g, or t
tggaggagtacgcgcgagaccttgcccatgggaacttgtggatgactgtggtggggcctttacgatgggtaccattangtg

SEQ ID NO: 685232 - DNA, 175 bp, Homo sapiens
ggagctcggcctcttgtcttcgtgtgctccgagccatggtgacgatgacacaccctggtggcatgccgatgtatgttggtttagcgttgtctgcattgttctagagtgcaaccggtgtcatggctgtcactcgttcacacaaatttttaatacatgatccccttagggtgtctcc

SEQ ID NO: 685233 - DNA, 275 bp, Homo sapiens
  misc_feature (204)..(204): n is a, c, g, or t
ggcgcgtgacgtccccgctcagccggacgatgctgcagcgccaccagccgccgtagcccatgtaccacgtcccgtcctatgcgcgccacacctgctggtcgatcggctgcgcgccgttgtgcacgcggtcgatcaggggcctgccgagcaggtccttgaacggcccatccggcctgtcggctaccgcgacgcggacgccgcccnccacgcggtcctgcgaccactcgcccttaagctggatgtcgttggcggcgaagaagaagtcgtagcggccg

SEQ ID NO: 685234 - DNA, 202 bp, Homo sapiens
aggtggttggggtgtcacacgcctatagatcccagactagtggaggcgggggcaggagaatcgcttcaactccggaggcagagttggcagtgagccgagatcgtgccactgcactccagcctgtgtgacacaccaatgactccgtgtcaaaataaataaataagataaaaaccaatacaatgtacaatagcttcataaaaga

SEQ ID NO: 685235 - DNA, 101 bp, Homo sapiens
agaccctgtcccagccacccaccccccactcccaggacttgcggtctgagcctttttggataattaataaatattttacacactaaaaaattaaaaaaaaa

SEQ ID NO: 685236 - DNA, 838 bp, Homo sapiens
tagatcgagctaccctctaaaagcagtgttagagtggtacaaaaagaaaaaaaaacacaccaaaggctcggagccacaaaggggatggaaatttcttctgggacatcctcgtggttctcccggtaactggatcggtctgggtccctagaagtccttcgtgaagctttttattcctaaggaggagaaaatcagtcaccgggcggaaatcggtgctggattacaggagctggggcatgggaattggggagactggactggcctatgaattggctaaacttaaaagcaagcgggttctctggggatataaataaggcatgggactgggaggggaaacagttggccaaattggcaaggggatctggggttgccaagggttcataccttgggggggtagactgggagcaacccgagaagatattacaggtctgcaaagaaggtgaaggcacgaatttgggagatgtgcgtattttaggtaaataatggctgggtgtaagttctatacaatcaagatctggtcgtgctacagcaaagatccctcagatggaacacagagctttgggaaagtcacataggtacctggccactttcggggacctaccaaagggcattttctctcgtgccagtgaacgaagaatcaaccgtggggcctatggtcactcgtggtttcgcgcaagcggggaagtgtctcgggtcccctttcgtaactggggtactggtgcacgcaaatttggctcgcaccggcgggtccccatcacaactttgagccgagtgaactcggtgggcctaccattacggggtccaacaaccttgtccgggtccaaatctgaaaccgtgctta

SEQ ID NO: 685237 - DNA, 811 bp, Homo sapiens
ggtaaatcggtggagtcgagagatggggctcggacggggcgcctgcaccgcctcccaggcgcacctcccccggacagcgacgtccccgagaaccgtgattggccgagcacccggaagcaacaccaggagaagaagagaaaaaaaacagaagacagagagaaagagaaaaagaaagaagataaatgaacagcacaacaagagaaaaaagagaaacagaacaagaaaaaaaacagaagaaaacaacaaaaaaaacaaaaacaggaaagaaaggaaaggagagaaaaggcgagaacgaggaagaaaagacggagaagggaacggaacagaggaagagagggcgcgcagcgaggaggcgagaggcgggaagaacgcagagagggcgcaagagacacagcgagaaaggcaacacacagagagcagccagcaagcgacaacagcagagacgtcagagcacaaggagcgaagggaggggaggagagaaggaagaagaagaaaaaagagaaaaagaagaggaggagaagagacaaagaagaagagaggggaagaaaaagggaaagacaaaaacaagaaagaggaagagaagagagcaaaaaagaaacagagggaagaggaacacaaggagcggaagagaagaagaggggaagcgaaacagaccaagcgaagaaggaggaggagagagaaagaggaggagaagaagccagaaaaaggggacgaggacaagaaagagaaacggaaaaagagcaggaagagaagaagacaagagaaaagaagacaaagagagaacggaggagaaaagaggaaagaaaaacgt

SEQ ID NO: 685238 - DNA, 101 bp, Homo sapiens
gtatccttgtctataattgtaatagtaatttaaatcatctttctttagcaccctagagagcaggtatctcctgataattttgtttttagaactttctgggg

SEQ ID NO: 685239 - DNA, 110 bp, Homo sapiens
  misc_feature (69)..(69): n is a, c, g, or t
  misc_feature (77)..(77): n is a, c, g, or t
aggggaggagaatgtattagactaaatacaaacttgcgggggttgtaaggaagtctaaaaacctcactnaatccttnactccagtaaatggcactgctcacttcctgcct

SEQ ID NO: 685240 - DNA, 100 bp, Homo sapiens
aagatcatgccactgcactccagcctaggtgacagagcaagaccctgtctttaaaaaacaaacaaaccaaaagaaaaaaagatttccatgaatccagtgg

SEQ ID NO: 685241 - DNA, 423 bp, Homo sapiens
tttattcttttattaatcctctcaggagaactctatgcagaagagaaacagtgtgattttcctaccgtggaaaatggaaggattgcccaatattattatacgtttaaaagcttttacttccccatgagctgtagacaaaaaactatcattcttctgtttggctggctatgcaaccgaaagtgggaagcaagaagagcaaatcaggtgcacagcagaaggctggtctccaaacccaaggtgctacaagaaatgtctgaagcctgacctaaggaatggctacgtctccaatgacaaagtactgtacaaacttcaagagaggatgagctacggtttgctcttcagggatacaaaaccacttgggggaaaggacgagggaggtgggtccactgtctttctgcaggggtgggtctttctcaaccggtc

SEQ ID NO: 685242 - DNA, 428 bp, Homo sapiens
ccccaggactctgttctgcagagagcaaaagcaaacccagatcacttctattgcctgagaactctggatcccttacaggcccagtgctgccaaggttccctcctcccccagacctcacagtctgcatgggtaaggggctaggggccgcctttcaaaatcacattcgaactggacttgcgtgtcaaagccagactggccatgttggatcaaggattctgtgctggaacagtgggatcgcacctgcctgttcctgtgtagcataggaaggaaagggggaaagagaggagacaccccctgaatgagtgactcaagggtggtggggtccctacccctattccagagctcctaagttttgtatatatccctttgtacacatattgggacattggccttactacaaagcaaatagaaccaggtctcttttgtaa

SEQ ID NO: 685243 - DNA, 413 bp, Homo sapiens
ctgcgccggcgccgccgggaagcgctaggcctggtccctcttcctaggatagcgttgcgcgcatgcgcctttgacgagtgagccggggagccatggacaactgtttggcggccgcagcgctgaatggggtggaccgacgttccctgcagcgttcagcaaggcttgctctagaagtgcttgagagggccaagaggagggcggttgactctgcataccctctgagcgtgccaaaggctgcatagggggtcctctcccccggaggcgccccacctagagagacagacgggcagacgggcccgcagcgcgtttttccccgagagagagaagagagacccccaacccttagtgcttccttcagcacaatagctgcattcatggactactactcaagtcagtagtgggagatatattca

SEQ ID NO: 685244 - DNA, 156 bp, Homo sapiens
tactctgattagttgaggatgacgatgacgatgaggaggggactctgaagaagaagctatggagactacaccagccaaaggaaagaaagctgcaaaagttgttcctgtgaagccaagaacgtggctgatggacgaaattcgggatcctctaagtca

SEQ ID NO: 685245 - DNA, 292 bp, Homo sapiens
cagagatcgcgccactgcactccagcctgggtgacagccagactccgtatcaaaaataataataataatgaaaatacttggaatagcgccaaatagatatagatacagtttggaaaaatacaaatgtcaaagttataaaaagatatctaaccatacttataattaaagaaacacaaattatagcttctgtaaagattcagagtgggtacttgtaggcggtaggacgccaggaatgctcactcatatttttcagtgcttcttaaccccgagctggtgtgcaaccccgagctgg

SEQ ID NO: 685246 - DNA, 159 bp, Homo sapiens
attcgcggccgcgtcgactgtccgccgtggaccgcaactattacctgaaccggtcggtgtcgttcgacttcagtgcggtgaatctggagttccagaacatagagcgcgacattaccctacgtgtctgacagtttagaccggtggggcagatcatgcgtg

SEQ ID NO: 685247 - DNA, 104 bp, Homo sapiens
agaagatataaatatgattagttctgtggctgtgaatgttacaggcgttcagtggaattaaacccaacacaaaaagatcttgtgtgaagatgcagaatgctttg

SEQ ID NO: 685248 - DNA, 959 bp, Homo sapiens
  misc_feature (546)..(546): n is a, c, g, or t
gaggtgacgcgggcggcgtcccaagatggcggcggcggcggctcccggataggccgcggcggcgttcccggctgcttaaggtgggccccacgtcggctggcagctggacaggctcggtacctacggtcggtaggacgggcggtagccgcctctgcgcggagccggggctgggccgtgcggtggcagcggcgccgggggatgctcttgcgggggcctgtgcctctcccttctcaacttagtggctggcggcgggcccgcgcccctggctcccggggccatggcgctgagggagctcaaatgtgtgtctgctcggggataccaggtgtaggtaaatcggagtatcgtgtggcaggtttgtggaagacagttttgatccgagaatcattaatccaagaataggggcagtcttgttatgagcaagagtgtgcagtacgcaagaatgaggctagataagttcctaatctgggatacaggtggacaagaacgattcgtggcttaggaccaatgtactatcgagggtcggtgcagctatatcgttaggatatnccaaagaggagacattttcaacattagagaatggggtgacagaggttcgacagatggccagctaatattgtacgttgccatttgcaggacatagctgtgatccttatcggatggtagagaaagtcagtggagagagatgccaggactacgccgagtctaattcatgccactctttgtggagacccagggaaaaaacgcgataaaattagtggaatcctttgttaaggaattaggtcggagaaatttccttccattggaggccaacttggggcattgggggggaagcgggtttacaaatcccgaagaaaagggtttaaaagccaaaggggagtgttggttgaccgaaactcagaggtttcagaattgtgagtgcagtgaggtggcctcggagataacaggaggggtgggagccg

SEQ ID NO: 685249 - DNA, 477 bp, Homo sapiens
  misc_feature (26)..(26): n is a, c, g, or t
  misc_feature (46)..(46): n is a, c, g, or t
  misc_feature (51)..(51): n is a, c, g, or t
ttaatatgattaatttgtgtaaaatnccctctaggaacaggcacangttanggatgcccacttttactactcttattcaaccctttaagagtactggaagtccttgccagaacaatccaggtaagaggacaaaatgaaaggcttcaaaattggaaaacaggaattcagttattcttgtttactgatgataagatcttatacctagaaaactccaaagactcgactgaaaaaaaaatcttagatttgataaatgaattcaggaaagtcttaggacacaaaattaatgtacagaaattaggatttttgtatatatacaaatagtgatcttgctgagtaccaaatcaagaagaaaatcccatgaacaatgctacaaaaaaaaaaaacacaataaaaacactagaaatatacttaaccatggaggtgaaaaatctttataaggagaactacaaaacaagatgaaaggaattgcagatgaca

SEQ ID NO: 685250 - DNA, 899 bp, Homo sapiens
tggtacggcgggagtattgtacggctgcgctggctgggataggactgaccgagcgttggatctgactgcccagatctgactgatggggagtgccgagaggattgcctgggccgaggacatgttcagactaaacgtctcaccagtggaacgttcacgaacatgagactgacaggtgctaaggagaatgtagcgacaagttccctctatcggttccagccgagcggtggatcgtggcttgggacgtggacggacatccaagtggacttgttgatgcatatgccgtgtcgaggcatgattaggctgatagacagccctggattggctcagtaagactgaccatgcccgggaccaatgcagttctggggtcccaacctgggtggaaggtctgaactgatgacccacccaggctgaccaggccagcccagctcactgacctcctgacccctgacctcatcacctgtgcagccatggagaagatgtcccgtgtgaccacagtcctgggtggcagcgtgctgacaggccgtaccatgcactgccacctggatgctcccgccaatgccatcagtgtgtgccgctgacgcatgcccaggtggtcgtggcaggccgtagcatcttcaagatctatgccatcgaggaggaacagttcgtggacacagctgaacctgcgtgtggggcgcaagccttcgcttaacctgagctgtgctgacgtggtctggcaccagatggatgagaacctgctgggcacaggcagtccacaatggcgtggtggtcacgtggaacctgggcggccatcccgcaacatgcaggaccagctgttcacagaacacgagcgcacggtaaacacaggtctggtatccacccaacgaagcccacgtgctggtacagtgggtccaggattg

SEQ ID NO: 685251 - DNA, 108 bp, Homo sapiens
cgcatagtcttggagactggtcgtcagtgcacagctgacactacgtcctacctacgtctcctgcacggggtcgactgggactagatctgggcaaggactgtcacaagc

SEQ ID NO: 685252 - DNA, 1607 bp, Homo sapiens
  misc_feature (983)..(983): n is a, c, g, or t
  misc_feature (1136)..(1136): n is a, c, g, or t
attctctgtgtcgctggttgtcgtctcgtgtgctcgctttctgtctgctgtgttgctgttgactgttagttgtcgtggttgtggtgtgtctgtgtggggctgtgcgttgcgttggtgcgcgcgtgttgtgcttgtcttttgctctccgcgcctggtcggtggtggtgtgtttcttaaccggaatctcgtatttttgtgtgcgccctctccggatgttgccccttgggtgggcgcccctcatttcccccacccctggtgttgtgggccccctccccgattgtggagagacttcgccccggggggtcccggatgtccccagcctctccccggcgtctttttgtacgctttacggcccccccgggggcgccggggttcacccgaatggcgtgcccacccacacgggcaacccagcgctttgttgccgccccttgtagccgccctcatttttttaggggcgaacccccctttttttgtgggcaacccacacgggtgtttgtgcaccccccgataaattcgtccccgggccgtggggttatccacccgggtgtccctcggggagatttttctccccgcgggggatttattctcgtgcccggaaccgccccacacgtgccggtgttctctggtggggcgcccatttaatgtgacacgatgttggttggggccttgtccccgcaaagagaagccctgtgccctcaggggagcgcccacgtaaaaggcatattgggtcgaccaacaaaatcgccaaagagtttttgccgtggacacgctctctctttggagagcccttgtcgcgcacacaccgggggcacacccatggtacacgccgccctgttgcgtcgccacaagcgccacaaagtcccaggggagtcctccacctggtaggttcacccccgtgtagaggacccacagggccgcacagtgccactctcacacctctgttgaaacattgtgggatatgccccctcttagaaaggggaganccccattatgagagtggccccttctgagagaaccgccccacagatagtgcgcgtgtgagatacttgtgagaagagagagactttttgtgccccgtcttgagaagcctgcgctatatcctattccccacagagcacacctatttgtgcccgccncctgcaccaggagatgagagagattcactagagaatatatgagaagagagaggagaatatggcgctctgttcacacctctttctgttgagattactcccacagagccctgtcctctacacatgtgtataagatggcgacctctgaccactctgaagagttgcccacacctcaccacggagaagctcgccttggagaaggcgacagagaggaagcacggagttttctttctgccttctttcccaaactgtttcctctccctcgagaccctcgagagggagaactcaattctggattcacctccccttctggttgatacccacctccaaaaggacacactttctgattaagaccgcgttgaaaactagagatggaccacggttatcacacgacaaactttctcagcacttcaccgatgaccctctgaattaaaattgcacaccctccgtgccacccatatattaccccccaga

SEQ ID NO: 685253 - DNA, 198 bp, Homo sapiens
acaatatctgcgtgcagcggtcacttctatgcgctggagttaattcaacagttgcgactgcaggactgcggcgacgtgctgcgcgtcgggatgatgcattacaatacccagcaagaaattgacatgctgtttgaagtgctcgccagcgaaaggtagcggagcatcatacgcaaaaagacttctgtggtaccgagctcg

SEQ ID NO: 685254 - DNA, 1002 bp, Homo sapiens
cttcaagggaatttcccgggcccattgtttcaccgtctggaatgggatttagccccaccccagttaataccggttatggtgaagaggtgtgatttcggtgaaagcaccgtgggggcgtccaacacaggttatgcacgccctaatgtgggaggtctcaccgcccctggccaccgcgtatagtggtgcacccccaggattgtagtggggttagttttcccccgcccaccacacttgtcttctatagtgataccctgcacactctataggtaattctctgtctgtggctttaagtgtgtacccccttacctggtaaaatttgctccccggtttgctccctcgggagagggcacactttagtagatgtgcacgctggagtaaatagtgccccctcccccctatgagatgtcactatggggagggagagttttcttctctaaattttttgagatgggagacaatggagcacactcttgagaggtatagtgaggctttaagccactaaagtgtatactcctcgcgttgggagaatgtttgtgggctatagcccagcgtatggagaaacacactcagattttctggtgtgccctcatagtaagagttaatagagctcggcacttagtgtggctcacattctcgactcttcactcgggaggaagtttaatatcccacccctgttagacccaggggctgaactgaagagtgaaatagggtatatgtgttctctgccgacaaatattaaaatttgatagttttcagaccatttagagccgccgcggatattctttcctcgcttagggggctccagagctcattttaacaaacccaactaatttcccaccatcatcccttgacccatgggggatattttgtctgggtttgtaacccaccccaatgggttggctgttggaccctccaccatccaaagagtttgtagggtggtggggaatggggggttttccatggttatttttaaattaaattaaataaaggtttctgacattt

SEQ ID NO: 685255 - DNA, 200 bp, Homo sapiens
  misc_feature (173)..(173): n is a, c, g, or t
  misc_feature (192)..(192): n is a, c, g, or t
ccagaataggagaggataatagatgggcagccatttctatgtctttccaagtgctgtctggaagtcaatttatgaccacttcttgtcaagtcattagtctgcagcctctcgggtcatgatttccatcatcttcttccggattgggcggacctgatgggtgctgagtcataagnaggtcttccgctatctgangttgtcgc

SEQ ID NO: 685256 - DNA, 300 bp, Homo sapiens
tgtaattcatcagccagcaggtggataaagataatgtgatatatatgcactatggaatactaagccataagaaggaatgaaataatggcatttgcagcaacctaaatggagttggagaccattattctaagtgaagtaactcaagaatggaaaaccaaatattgtatgttctcactcgtaagtgggagctaagctgcgaagatgcaaaggcataagaatgatatagtggactttgaggactcaagggttgaaggatgagactacacattgggtacagtgtgcactgctggctgatgaatt

SEQ ID NO: 685257 - DNA, 399 bp, Homo sapiens
  misc_feature (62)..(62): n is a, c, g, or t
  misc_feature (92)..(92): n is a, c, g, or t
  misc_feature (104)..(104): n is a, c, g, or t
  misc_feature (109)..(109): n is a, c, g, or t
  misc_feature (125)..(126): n is a, c, g, or t
  misc_feature (130)..(130): n is a, c, g, or t
  misc_feature (134)..(134): n is a, c, g, or t
  misc_feature (268)..(268): n is a, c, g, or t
agggctttatgcagacaacctaccatgggtccaagtgccggccccgggccctcaacaacaangcctaacaagatgctctggcctaagatgangttccaatgggntttcngtcctgagatgtgcanncaancccnggctatgcgcattgaggatggaaaaaaaaaaaaaacggccaggctcattttagtcccacccttctgtgtccagatttcctgttcccccatcacagaatttcacaatggccctgaaaaaccatgcagcaggagcnttttatgcagagagataaggttctctaggttggtttcagttgaacacagtgctgattcattggagttttcacattagatattagtgacctccttaagagctcctgtatgaagtaaacattggttattcata

SEQ ID NO: 685258 - DNA, 179 bp, Homo sapiens
gctgatattaaccaagatggtctcgatctcctatatgtcacgtgctactaaccccttgactaatttttgtcttttaagtagagacgtgggttttgccatgttggccaggctggtactcaaactcctgacctcaagtgatcctcttgccttagcctcctgaagtgttggggatcccatca

SEQ ID NO: 685259 - DNA, 215 bp, Homo sapiens
gttcggcccgggggcaatggagcgagactccatctcaaagaaaaaaaaataaataaaaggaaataataataaaatggagcaagcggagacggaccagcggcctcagccaggcgggcaaatccagggcggatgggatgggacatttcttccggtagatgtcatagtcctcgggaaacggtaaaaaatcaaataagcgtgaggggataatattatag

SEQ ID NO: 685260 - DNA, 320 bp, Homo sapiens
cctagagttccaggcaaaactcctacggagcccaggtgtcattatggggttgcagagcagctgttaacggcgaatttgtagactgagctcagagactggtggaggcacgactgcgggcacagcaggagaagataagaggaggtccaccctgaatctttgcagcaaggcacagagcttctggcttgcatctcagaaggggggcagacgcacagcgcccaggaaccaccgggctcctagggcttgtgggcttccgagttgtccctggtgacctgtgaaagccctgaaggggaggctggaaagcctgactacaggatgcccgg

SEQ ID NO: 685261 - DNA, 219 bp, Homo sapiens
acgaagtgcgtgaccgacgctgtgtgttcagtcccactgacagtaggagcagcagggcgtcggcttttgaggtggcttttcctcgggggcaacccaggaagggccccaagagggacaattggattcttggaactcggcccagttgggtagctgtctgtagcagcccccgtctggggctctcacggggagtacaaactagtttatgctcggtgctcgtgt

SEQ ID NO: 685262 - DNA, 252 bp, Homo sapiens
aactacatcatcttcatatagccttataactcatttgtgctattccattttcctctgttccttttattttcacttcccttgtaatgttagtctctttgtactgatttctgaagaggtcatttatgattaaacatggtaacattttggccagaattgccaaaaaggtttttcccaatccatttaccaagggggtttaatttttgggtaatacagaagttgtatattgaaatataatcttgttctgttttatga

SEQ ID NO: 685263 - DNA, 889 bp, Homo sapiens
ggaagccggttggagtgtgagaggtttgctcgctctagggagattcttcaagcagtcactatgtcaacagacacaggtgtttcccttccttcatatgaggaagatcagggatcaaaggagtcattcgaaaagctaatagaggcatcattcgtacccgttgaatagcgggttttgcagcaaattgtggcatatggattatataaagggtgaagagcaggggaaatagctaaaatgtccattcatctgatccaatggcgtgtgtggagccaaggatttgttgtaggagcaatgatgtggtatgggctattccatgtatcgggaatctgggaaaactaggccttagaagaaggagatgctgtcttggtcgtgtggaggagctggctttagttagatgtcttattattaaacgttacctattatgtgttggacataaatcgtaatgtgtatgggttgagatggtaactggatttgagtatgtggcttccttgcttgcaggcttggttgcttgtgtgaccgaattactagtgactagtatactaatctagggtcattcaggaagtcaagtgaacttaaaacattgtcactaaatgcagttgatggtgttgataggttcaacttctaaattggtaagatgactagttccaggaagactaccggcagctgaggaccatcggagctgcgaagtcgaattgggtgtcgtaagagcatattgccaagtacaaattgtgtgcgtggaacggtggatgtaacatgtggacaaggggggacaacgtgaggtccacaggcagattgttgtcccaagagacagggggcgtttagaggaagaaggtgatgggaatggcgaagaggaattaagattgttcatatttattgatcttattataaataa

SEQ ID NO: 685264 - DNA, 770 bp, Homo sapiens
  misc_feature (2)..(2): n is a, c, g, or t
  misc_feature (75)..(75): n is a, c, g, or t
  misc_feature (141)..(141): n is a, c, g, or t
  misc_feature (143)..(143): n is a, c, g, or t
  misc_feature (159)..(159): n is a, c, g, or t
  misc_feature (207)..(207): n is a, c, g, or t
  misc_feature (222)..(222): n is a, c, g, or t
  misc_feature (351)..(351): n is a, c, g, or t
  misc_feature (361)..(361): n is a, c, g, or t
  misc_feature (366)..(366): n is a, c, g, or t
  misc_feature (372)..(372): n is a, c, g, or t
  misc_feature (375)..(375): n is a, c, g, or t
  misc_feature (407)..(407): n is a, c, g, or t
  misc_feature (421)..(421): n is a, c, g, or t
  misc_feature (432)..(432): n is a, c, g, or t
  misc_feature (445)..(445): n is a, c, g, or t
  misc_feature (451)..(451): n is a, c, g, or t
  misc_feature (453)..(453): n is a, c, g, or t
  misc_feature (456)..(456): n is a, c, g, or t
  misc_feature (460)..(460): n is a, c, g, or t
  misc_feature (464)..(464): n is a, c, g, or t
  misc_feature (468)..(468): n is a, c, g, or t
  misc_feature (475)..(475): n is a, c, g, or t
  misc_feature (479)..(479): n is a, c, g, or t
  misc_feature (487)..(488): n is a, c, g, or t
  misc_feature (491)..(491): n is a, c, g, or t
  misc_feature (494)..(494): n is a, c, g, or t
  misc_feature (497)..(497): n is a, c, g, or t
  misc_feature (502)..(502): n is a, c, g, or t
  misc_feature (504)..(504): n is a, c, g, or t
  misc_feature (506)..(507): n is a, c, g, or t
  misc_feature (509)..(509): n is a, c, g, or t
  misc_feature (521)..(521): n is a, c, g, or t
  misc_feature (530)..(530): n is a, c, g, or t
  misc_feature (533)..(533): n is a, c, g, or t
  misc_feature (536)..(536): n is a, c, g, or t
  misc_feature (539)..(539): n is a, c, g, or t
  misc_feature (543)..(544): n is a, c, g, or t
  misc_feature (546)..(546): n is a, c, g, or t
  misc_feature (549)..(549): n is a, c, g, or t
  misc_feature (552)..(552): n is a, c, g, or t
  misc_feature (554)..(554): n is a, c, g, or t
  misc_feature (556)..(556): n is a, c, g, or t
  misc_feature (562)..(562): n is a, c, g, or t
  misc_feature (565)..(565): n is a, c, g, or t
  misc_feature (567)..(567): n is a, c, g, or t
  misc_feature (583)..(583): n is a, c, g, or t
  misc_feature (590)..(590): n is a, c, g, or t
  misc_feature (594)..(594): n is a, c, g, or t
  misc_feature (605)..(605): n is a, c, g, or t
  misc_feature (618)..(618): n is a, c, g, or t
  misc_feature (636)..(636): n is a, c, g, or t
  misc_feature (639)..(639): n is a, c, g, or t
  misc_feature (679)..(679): n is a, c, g, or t
  misc_feature (681)..(681): n is a, c, g, or t
  misc_feature (689)..(689): n is a, c, g, or t
  misc_feature (706)..(706): n is a, c, g, or t
  misc_feature (757)..(757): n is a, c, g, or t
cnttccccgctcaggctctggcccccccccagccttcagagcccacaagccgactgtacaaagtcaatgatttangacccaaaccctgggcacagtgcctgggagtgtcagggtcacccactcccctgaggtgagccactntncatgtgcatcttctgncgggcggggccggggcgggggccgggggcgggggtgggggcctggggnccctgggccgcagcnaccccctcccctgcctccccactgtcccctggggcttggggggggcagactgcgcagaggggatgacctcaacagatgagtggaacaataaatagccccggtgggaagagggaaaataaagggggtaanaaaatatatnaaagngttggnggngggtaaggatagagtgggagggagggagaggnggaaaggtattganttgtgtgttangggagtgaaacgnagaaanangangganttcngggnggggggngggnttgggaanntgnganggnggttngngnnangggtgggacggncgttggggnggncgnctncggnncncgncgncncntggggngtntngggttactgtttactncccgggncggngggaactcgancggtgagtatttngaacgactgcacttgtgnttnaactgtaacgaggggaccgagttacttgggcactccacgngngggtacancggggtacggggtcatnactaacacgggggtggaggacacagacgggtctcgtacgggtatgggggantaaccggaatgga

SEQ ID NO: 685265 - DNA, 233 bp, Homo sapiens
tcgtagcggtcgtggtggcgcacccactccatcgtgtagctcaggcccgcctcgtcgcgtcccctgggcgtcaggtcgatgaggttgtaggtccccatcatcacttcgacgccgcgaccgaaggtcgagtaggtgtggaagacctggccggcctcgtccctgcagaagatgctgatgccgggcgcctcctcgctcgggaagggcgtcatgtggaagttgtagaacacctcgcc

SEQ ID NO: 685266 - DNA, 125 bp, Homo sapiens
  misc_feature (115)..(115): n is a, c, g, or t
gacggacgtccagctgagatctcctaggcggactccctctctctcaatttaaggtttctgaggtctgtctcctgtcatgtaaaaagaggaccactagaagtcttttttttttttnaacaaatttc

SEQ ID NO: 685267 - DNA, 459 bp, Homo sapiens
tttcaatttatacatagctaaatcaggggacctcctgggaaaggaacgggttaagagttggggtaaagaacatgattattctaggtgcaggggggggcgagtgggcaggaggggggcaaatagacaaccaaagggataaaaagcaaaatctgggggtgggactgggtgatagtacagataaacaggttaaaggaagacagtcatttctggggtcaacaatattaatggagtcacttggcatgggttagatacggaagtaaactctggagaatcaaaagcataaataaagcagagcccctatcttcagggagcttagagtgtcaagggagaagaaggcctacaaaccagattttaatcttaaaggcaactaacactttccatttataaccaggcgggcaattagtagataatcaagaaaggttttggaataattgattcagtttcccagcacaagaacca

SEQ ID NO: 685268 - DNA, 330 bp, Homo sapiens
caagttgttctaaagaagtaagtgatgtgcttcatcatcaaagcccctctgacaaattgctacgtatttctaagggcttataatcttgacagaggtcaatccagcttatgctgtgtttggtttgggtggccaaatgccatgtagaatccaatcttggcatcttccacttttttttgggcatctgtgggttgactgaaatccttgtccacattcacgccctactcagtaagtgcctcagcgtccgcccactttgccttctactttgataagctcaaagtcaacgtctctgcgctccatatctgctacagtgagcgcggcattcacagcact

SEQ ID NO: 685269 - DNA, 146 bp, Homo sapiens
cgccttctcgtatagagtgaaacgtgaacgactagagtatactttggtatctggatatgaggaaggaggcagagtcaaagattattcttagatcggttatgtggatagactgatgaattatggtgccctttataatgttagagata

SEQ ID NO: 685270 - DNA, 435 bp, Homo sapiens
cagcatgtaggttgtgtggtgttgcttttcgaggtggtttgtgatgcttggaggaccctgcaggttacctgggccccaccaggtcatcaggagcatctcccatctcaagattcatcaccgagttccctatgcagagtccctggtgcggtgtaagcaagcaatccacaggttccagcgggtggggtgtggacatcaggcatgcgtgttcttccaagcttgcaaaagttacacaaatgtatgccatgagggttagaggtgaggacataactccaaagcagactccaggtcttcccaggccacacattctcttcccatcattaattggaattggaattcgtttttgtgccatagcgtatgtttcaaagtcacgttcaggtgaatcattaaatgctaccaaccatagacaataaaataataaaatctaaaagatcaaaa

SEQ ID NO: 685271 - DNA, 239 bp, Homo sapiens
tatattatactgtgctttctagtagggtaccagcttgattgaagcggcttgagaatgacgattcaaagtactaagtagctggcgcgagacagcttgctgatgctgcgtctgagtggcttgagttcctgcagcctccggctgctgtgccttgaccccagactacagtcgcccatccaggctgcaacagacgctggattgttatgaatctgatgtgagccaaggcgttgtgtgagtcttgg

SEQ ID NO: 685272 - DNA, 684 bp, Homo sapiens
  misc_feature (52)..(52): n is a, c, g, or t
  misc_feature (100)..(101): n is a, c, g, or t
  misc_feature (183)..(183): n is a, c, g, or t
  misc_feature (219)..(219): n is a, c, g, or t
  misc_feature (239)..(239): n is a, c, g, or t
  misc_feature (378)..(378): n is a, c, g, or t
  misc_feature (395)..(395): n is a, c, g, or t
  misc_feature (418)..(419): n is a, c, g, or t
  misc_feature (432)..(432): n is a, c, g, or t
  misc_feature (440)..(440): n is a, c, g, or t
  misc_feature (447)..(448): n is a, c, g, or t
  misc_feature (457)..(457): n is a, c, g, or t
  misc_feature (459)..(459): n is a, c, g, or t
  misc_feature (481)..(481): n is a, c, g, or t
  misc_feature (504)..(504): n is a, c, g, or t
  misc_feature (514)..(514): n is a, c, g, or t
  misc_feature (532)..(532): n is a, c, g, or t
  misc_feature (558)..(558): n is a, c, g, or t
  misc_feature (575)..(575): n is a, c, g, or t
  misc_feature (577)..(577): n is a, c, g, or t
  misc_feature (586)..(586): n is a, c, g, or t
  misc_feature (596)..(596): n is a, c, g, or t
  misc_feature (666)..(666): n is a, c, g, or t
ggcgggattcctgggtcccattttcagcgcccagggtcacagatccacagtnggaagttctgtgggacacattggcactgagccacaaagaaggtgtggnnagaacaacttgggctcctgctgaccaatgtcctctagggcctaggggacagaggaacacagagtcacagcttcaggggccgnatgaccctggcggccttcctgagagaatatgccccnccacgaaactcagcccagtngacaccatcctggtagcggcttcggtagtggccgccgtggtgccacacaccgttgaggttggcgtgggctcaggcctggtcccccccgcctccccgctggtcccgggcccagttacccgaataggggtctcggtccctntccacggtgctgaaggncttgtcattgtgccaggtaaganngtctcccgcctcnccctggtnctggccnngccgcaggntnagtggtcgctctcgggttccanggagaagccatcataatgggcangtgctccacngcccccccagtcctccangagaaccagccgctcatggtccccanggctggtcagctgatanangggttcaangcccagccanttttctccgtctggccgcccaaagcccgccttatagtgctgccaggtagtgaagaagttgactgaaccancttgcctccgctggatca

SEQ ID NO: 685273 - DNA, 773 bp, Homo sapiens
  misc_feature (129)..(129): n is a, c, g, or t
  misc_feature (204)..(204): n is a, c, g, or t
  misc_feature (220)..(220): n is a, c, g, or t
  misc_feature (233)..(233): n is a, c, g, or t
  misc_feature (271)..(271): n is a, c, g, or t
  misc_feature (285)..(285): n is a, c, g, or t
  misc_feature (383)..(383): n is a, c, g, or t
  misc_feature (521)..(521): n is a, c, g, or t
  misc_feature (552)..(552): n is a, c, g, or t
acctggtcacatgcacagtcacaatcttaccatctaaatacaatcaatattcagagtaggggtcatcagcccctatctaaaagagaagtcagagagactttaaaactagccttaagggcgggatggggntcacacctgtaatcccagcactgtgggaggccaaggcaggtggatcccttgaggtcaggagtttgagaccagacnggccaacatggtgaanccccgtctctacnaacaatacaaaaattagctgggtgtggttgcgcctgcntgtaaatcccagcnactggggacgcagaggtgagagaatcacttgaactcgggagatgaaggttgcagtcagcagcgatcgcgtcactgcactccagccttggggaaagagngagaccccgtctctgaatgaatgaatgaatgaatgaatgaatgaatgaatgaatgaaagaaacttgcctttagtcaaataagggacaaaacaaattttaactaatccatgttctttttctctacaccatccccccaancactctagccactgcttcttaatttcttggntggattcctatcctgttacaccttaaatgttaatattccttatagtttttattttttaatttttttatcttttatttagagactgctaattgtttgccccagggcgggcatgcacagggcgcatcccataggcgaactgcgccacaatgcaccctccaaatccctgggcccacggaaccttcctgcctccagtgtcccaacactgggaataaggacacaac

SEQ ID NO: 685274 - DNA, 360 bp, Homo sapiens
agtctacgtatttttaatacatttaaaatatggaaccctagaagacagaaagatcccgacgataaaaatagcatcatttatacaatttctagtgaagcttaaagggaagaaggaagtgatagaaagccattggtattactttaccaattcaatagacgcagctcagaatcaagcagggttttcacgatcacacatttagtacaggcacctcgcccactctctccccacaatccccatccccttccctttctaggtctcgtttaccatactgattttatgtgatagtttcccctctagtcttggctcattttaaaagcacaaacgtgctacttttaaatactatatattattcattctaac

SEQ ID NO: 685275 - DNA, 574 bp, Homo sapiens
gcacgagatttgtttgcatattcagagagtagataattaacacccttgtattttttaagcataatttttaaatatctaatgtgttgatctacaaagaattgcttaatatatggtactgagcagaagatataaattggtattccccccaaaaagatgactgttggtgctagaatcacattcccactaagctgaaaatgctttctttgccatgtgtactgactcatacgtatcatgggttgtttgaggcacatccattttgtaccatcaaagttctgtctgctcttgtgctggtatttcacttattcactacctatttatgacttagaaaaaccacagacttttttattttgaggcagagtctcactctgttgcccaggctggagtgtagtagcatgatctctgctcactacaacctccgcctcccaggttcaggcgattctgctgcctcagcctcccaagaagctgggattaaaagcacccgccaccaccatgcctggctaatttttgtatttttagtagagatgggattttaccatgttggctaggctggtctcaaactcctgacctcaagtga

SEQ ID NO: 685276 - DNA, 279 bp, Homo sapiens
cacgtcccttgggctcccgactcgcacgacagctgccggcgtgtgtagccctggattttgctgacgtctgggtgaccagcgccggttggtcaccccagctcctcgaaacccgggaagggggacacaggtctctgttgagacatcccatacccggatagcagcatccacggagtaagctgagagcagtcgccccccactgggggcccaaggccaagctggtaacaggtgtatgcccagggtgagacagcacttgggcacagccagaagtgcgcctgggtg

SEQ ID NO: 685277 - DNA, 289 bp, Homo sapiens
tctattctcttgtggtccatgctttcctaagaatttttcatcgtctctcagttcttttgccacttactagtaagggttaatatgagggccctctgagagaaaaatataagtaccctcattataatatctttttcatggtctggactagttttcattcttcctagaatttagacatctaccttcttcaaaaaccttgtcccaactgtcccaaacaagccattaaaacactgaattaagcatcagctgacaagacatttgcagacctcacacctttgcacgctctttctca

SEQ ID NO: 685278 - DNA, 414 bp, Homo sapiens
ttaagcacttgaggtgaaatgctaaaccctgagaggatgagactatggagaagctatgacatgtgctgactgccatgcagtctgcttggcagaacgcgaccatgcatcgtattcactaggggaactgttgcatgtgtacacactagttagtctgatcgcatttgctgtgagctagagtggtacagctgctatctgcgcctgactctgtgatgagtaagttctattgaaccttgtgcagactactgacttattcagacaacatgaaggtgctttgacaggtatgcgatgactcttagacccaggctgagagatcgggacagttatccaggacagagccagtgacttcgctagattccactaccctgagaccgctatgacggacaccacacagccgagacacgactagcatcgtct

SEQ ID NO: 685279 - DNA, 268 bp, Homo sapiens
  misc_feature (80)..(81): n is a, c, g, or t
  misc_feature (86)..(86): n is a, c, g, or t
  misc_feature (89)..(89): n is a, c, g, or t
  misc_feature (184)..(185): n is a, c, g, or t
ggtagcagttctcaggtcggcgggctgtggaggtgatcagagtgggagtcaggcgttctaggccggacccttttggaggnnttttntcnccggtttttagccccccctccgactgttcaggaatttcctcctccgcccgtcagagagagaccccgcgtcctttttagtccgactcgctacgcgnntcttgcgagatatctggccgcctctgccgcagctgtaggtgcatctggagaagcgcctgatgtcctacgagattcacacccgt

SEQ ID NO: 685280 - DNA, 935 bp, Homo sapiens
  misc_feature (39)..(39): n is a, c, g, or t
gccggctcctgcaaggaaacagtagtccatgtgaaagcnatttgacgtatgacccctcagatgacccttattgttcatgtcgagagttaaggtctgtctttttgaaagaagggtgatagtaccttcatgtgatcattcatagaagatctcaagatgtggtggcaggccgtagcagggaaggggacggaagtatatcgaatgctctaggcacgggcgttgtgtccagggaaaagtgttcagcagcagaagggaaggcatgagataaagcatgtgaagaagataagtgagccagaaaaatcaggaaaagctgtggttgttgcgaatgatgaattaacaaacgaggaggagaagaaaggttctgatataatgccataaaaattgattgattatgagaagcgaggagatctttagaactatgaggaaaatgtcactattatcatcagacaggcaaataggaggagacctaattcatcttgattggtccagagaactgtggacagaatgaattgtgtcagaggtcatgaacaagggaaaaggagcgttatggtctgaagttcgtcataacaaccaggagtaggcgagaccaagaagtagcggtaggattaccactttgtatcgggggaagcattcgaggcagtgcttagccggtgggagttcattggggcatggtggattgagaaagaagtgggtggaaggaggcttgattcttggtggtggggtaattgggcaaagaggctataaggagtgagcaggagtgagagatctggatgattggaaatatgtgtaggagccagagagagaggtgggtttggaaggggagtgatatggagggagtatgggagataagggaaggggagatggagtggtaggaggagagtaaaaggagcagtggaagataggggatggcgtagggggtttggtgtttttttgatata

SEQ ID NO: 685281 - DNA, 300 bp, Homo sapiens
ccaaggtcgcctgtgtgctagtcacgaccattaggatccgaagaagagatgatgactaccctaaaagtaaggtctgtgaacagcctgtaatgggacgtgagctgcggtattaaaaaaatcaagaatggaagcgttcctcaattgtcgttgagaatcataccaacacggcagatgcaaccatgaaaaacgcagctgcgtatcgcgcgtttttcatggttcgcatctgccgtgtatgcaatgattctcaacacacattggagtcacgcggcctgcgtaagagtatgaaggtcttcctgtaaa

SEQ ID NO: 685282 - DNA, 439 bp, Homo sapiens
  misc_feature (412)..(412): n is a, c, g, or t
ctccataatgtgagcccatgcttgtgtcctgaatggtatcgcctaggttttcttctagggtttttatggtttttaggtctaatatttaagtcgggaatccatcttgaattaatttttgtataaggtgtaaggaaaggatccagttttagctttctacatatggctagccagttttcccagcgctatttattaaatagggaatcctttccccatttcttgtttttgtcaggtttgtcaaagatcagatggttgtagatgtatggtattatttctgagggctctgttctcttccattggattatctctctgttttgggaccagtaccatgctgttttggttactgtagccttgtagtatcctttgaagtcaggtagcatgatgcctccagttttgttctttttgcttaggatgngcacacattatggaggggtaccgagct

SEQ ID NO: 685283 - DNA, 290 bp, Homo sapiens
  misc_feature (60)..(60): n is a, c, g, or t
caaggagcggatcgccctggaggaggacgagcgcctggagcgcggcctggaacagcggcnccgcaagctgagccggcagttgagccggcgggagcgctgcgtgctgagctgaggccgccggcccgggtggcccataacttctcgcgtccccggcgtccgccgccgccccgggcctgcgctgcggacgacccggccgtcccggaggccgcgcgcgtgtccgctaggggccgccggcgcccttccccgtatagggcagggcggatccccgaccccacgggcggggcggccgc

SEQ ID NO: 685284 - DNA, 207 bp, Homo sapiens
aaaggaccttacgctatcaggaggcagaactggaatttttgctgggtgcggtggctcacgcttgtatcccaacactttgggaggctaaagtgggaggactgcttgaggacaggaattcaagaccagcctgggcaacacagacctcgtcctttttttcgagacagagtctcactgtcgcccagactggagtgcagtggtgcaatcata

SEQ ID NO: 685285 - DNA, 186 bp, Homo sapiens
aaggctgtggtggccaagtccttcttgcccattcctttaattcttcctacgaagaatctcgaaatggttgcagatgttattgaagatgttcccatatatgttagcatttaagaagggggatctcgatgtgtggtgtggtttcatgggttgtaaagatgaacgtggaggccggtgcgctggtggcag

SEQ ID NO: 685286 - DNA, 1206 bp, Homo sapiens
tggtgttccaacaaaatctttatttacaaaaacagggaagcaggcactgttgggccctcagactggtaatcttccccatcatctactctaaatggatactcagatgaccgggctggcctgagggggctggtgggccctgtctggattctctggtgagatgggaaaccactctagggtaccccggggtgcgcgtgaggcgtgtacacaccggcagaaacgagggcacgggcgtggggaagttccggaccaagggggtgacagcagcagggcaaaagcgtgaaggcgtgtgcgtggaataaggcgtgaaccttccttcataagcaacaccaacgtgcttaatctccaggctcagggccaactcttccgccagtgatacatacagtggctcccgggcgggcacgtgtccttactgggcccctaggagttcccgtgcgtgtgtggccagtgaccaccagacccatctcgtgggtgagtggcccagtggttaagatttcttcgcgggagtccaaagtgctgcttccaagcgggtgacctcagaggttctcatgcgggatgatagaagttttacaaaccctcattcacaggccaagattgaagacaaattccaggactcctttagcagcctggctgccaaagagacaggaaaccatattatcgggccttgcagagccaatggtacgaaaggcctagaccgaatgctacctaagtcccaggttcactcctgggcgaagcccctcgatattaccgaggagaatccgtgcaagcccgccggagacacctcacgccgggggccccaggggcccgaccagctcaacgaggatgacatggagggagcacatctacacgaggacctataggacgcccgacaagaaacccaggaacaagaccaccagggcaacatacgtgtccacctcggacagaatccaaccaaaagggacacaaggcatggccaacacgtgggaaacgcccacaaagccggaaacagcaaagcccaacggcgggaagtaatacccaccaaacgtaattgcccccgacaccaggcagtgcacgcaagacaccacgggggacccaacacaagaataggtacggacaagagacagataaaaagcgccagcaaccaagacaacagaacgctatacgacgaaagcaacaaacagcaagtagatggaacacataaaaacaaaacaaacaacaagcgaacagcat

SEQ ID NO: 685287 - DNA, 227 bp, Homo sapiens
cctgacagtctatcacgtatcgctaacgactccagacagcaggtatgaagacgtggttacagtcaaaggaattcaaccctgtgactgtcaatagtcttggagtattaaataggtgcacaactatttctctctacactaaggacgcactgaggacagtctgccctgcaaggggccgcgagtctcatagccaaatcactgtacaacaaagctgcatataagaggatagc

SEQ ID NO: 685288 - DNA, 101 bp, Homo sapiens
  misc_feature (3)..(3): n is a, c, g, or t
ccntggctctgattagggactgacagaggaggatcaggaaggcagaaagagaaccagaacaatgttgtgtcataaaagctaacgagaagaatgtccagaag

SEQ ID NO: 685289 - DNA, 957 bp, Homo sapiens
tggccaaaaacaaatctaaagcaagtgccttattgttaagaaacaagggattcttcaagaactccgtgctacacgagttatttcacaatgtcaaagagggcccaagaattcaggaccaccttaaagacaacgtgacaagaagagtgtgctcagaagcccagaggccaacctctgtgcgataagattgaagcgcaggcaggcacatgtgactctccattttctatattctgtagatataagcggaagacaagaagaaagaggcattctctcagaaccagagatgtgaaaaaccaaagggcgtgggtgtccataaaaaaacacagaattgtgggcttctcaaagaaaaacaccatagaggaaagaacccacgagagagcgcgtgatatttagattttatagtataaaaattaactcattatgtgcccaagcgaggggaaatgtggagaccccacttctcataaactccaatgggctatgtgaactctcaattcttcttttcagaaatacttgggataagggtggctcaaagcttgtggtgtttaaataagtatactttttcaccgtggtctctgggggccaaaaagagctctttctcttatactctttgggggcccatatagggtgggggcgatactccaggtttcctctcccatttttttataatgtggtggtttcccaaaaaccaaactcctttttttttaccttgtggacctttcaacaaaacccaagggggggccagttattaaaaccaccaaaaggttgtgcctgcaaatagtggggggactcttataatcaccgcattataaattacccaaagatttttttccccaatagcttttctaaataggggcataaaaacggaaaggggtttctcacaaggaaattttattaaacgcgggtttatcccccaaattttttcttatacccttataaggggggcgaagtgtaaaccacacc

SEQ ID NO: 685290 - DNA, 411 bp, Homo sapiens
acacagttgtatctttctgggagaaggtactttctttacatggctcatgtattattctttgtcctatttttttttcgaaataatgtaactgtaaccaacctggagtgtcttcttagcttaaacttttcaccgtgctgagcccggtgctgacgactttaactaagcaattgaggccacagaagtaaaacacttggggccaggcgcggcggcacatgcctgtaatcccagcactttggtaggccgaggcaagcagatcacctaaggtcgggagttcaagaccagcctgacccacacgtgaagacaactccatctctactaaaaatacaaaattagctgggcgtggaggcacatgcctttaatcccagctccttgggaggctaaggcaggagaatcgcttgaacccaggaggtg

SEQ ID NO: 685291 - DNA, 240 bp, Homo sapiens
agttcagaggatccccttatcactactttattgcttctgtaatgtgtgtatggtaatcatatgtaacgaggttagattgattagtcatatgtgggtggtgattagtcggtatgttgatgagatatttggaggtggggatcaatagagggggaaatagaatgatcagtactgcggcgggtcagagcctcaggcattgtggcgggccaatgcaatgcaagcgaacagattttcgtccatttt

SEQ ID NO: 685292 - DNA, 272 bp, Homo sapiens
  misc_feature (44)..(44): n is a, c, g, or t
ggccccattagactggtttgcagggggcatcactggctttcccncctgacaccctcacaactaaagcaaaaattgggtctttggtcttttggaaattaatagaggggattttggggtatcccagatttgtgcaggatgcaaaacttaaggctggtctttgatgcaaacttaagaacccacagaaaatgctttttaaaatgcctgttttaagatggaattgttgtttttataatttgattttagtgctaaataaatgattggctttgtacatg

SEQ ID NO: 685293 - DNA, 342 bp, Homo sapiens
gctcgacgagggagtgaatagaattgatcccagaacagaacaaggataatcggacgggcatggtggttcatgcctgtaatcccggcactttgggaggccgaggcaggtgaatcacctgaggtcaggagttcaagactacctggccaacatggtgaaatcccgtttctactaaaaataaaaaattagccgggcgtggtggtacatgcctgtaatcccagctactctggaggctgagacaggagaatcacttgaacctgggaggcggaagtggcaatgagccaaaattgtgctattgtactccagactgggcaacaagagtgaaactttgtctcaaggtcgacg

SEQ ID NO: 685294 - DNA, 140 bp, Homo sapiens
tgtgcgccagaacgcttagcctagccacacccccacgggaagacatgcagtgattacctttgccaataaacgaaagtttatacttagctatactaaccccagggttgttccatttcgtgccatccaccggtctcacgact

SEQ ID NO: 685295 - DNA, 773 bp, Homo sapiens
  misc_feature (1)..(1): n is a, c, g, or t
  misc_feature (275)..(275): n is a, c, g, or t
  misc_feature (339)..(339): n is a, c, g, or t
  misc_feature (636)..(636): n is a, c, g, or t
ngtcccaggggtgtttctctatcctacggggatattttgtatgaggcctctttcatcttgtttttgtggtgggggtcttggttgtggggtggtgatgtagggtggggggggagaatattttgtggcggcccacacacgcggccgaacaattatgccgccaacaaagttttttgttttttgtcgttgtgtgatcttttcctcactcttcttgttggtcctcacataacgaccttcttttgagggggtgttgtttttttttgagcccccaacgcgtnttctagggttatttggtgggcgctctgtgtcacataaccccaccactctccaacaccccctcgnggggagccctctcaccctgcgtggttctctttctctctttccacggcccttgagcctcgcgtggatacccacgcggtgtgttgttgtttgaatttgagggtgtgtgttgtgaggggtttcacagattgtgtgtggaagaaatatttggtggcgcccccgcacaatgtgtacacctgagactgccttctacaaaggtttggcccattctctgtgggcgctttataaaaaacctggggcccagaacccaagatagaggcccttgggttcctggattttgggtgtggtggccgcgaccanccacccaccagagattttagatttcggatattcattttcaaaaaaaagtgagggttgttacaagagggttccccaatttaaaaaaaaatgactttttggccagtgtgaaaaaaatatatataacaattataaaaaaa

SEQ ID NO: 685296 - DNA, 826 bp, Homo sapiens
caagcatcatatggtgaaggagaaggagacacagatgtgatgcagcaggagacagttacagttcctgtaccttgttagaataccaaacagtctaaagattgttttgtgatacgactcaagaggaaagaaacgaggttgccacctagacgctggaaaagaggaattatcatagagactgatgtttcttgtaaatcgttatgccgaagttatggttactctgatcatcgttgtttgttttttatggtgtgttagagtttttaacgttcgatgatttggtttttgtgagtgatcgctgtcgtgtttgtgttatatcatgggctatcattttgtgttgtttcttgtgtgttttaattttttgattctatggttgttgggttttgttttttttttatcgcttgtggaattgtttgttttcagtggctgggttgtttttttttgcgtttgtgggggctatttgttatattttgttgtctttggtatttgagaatggtgtttttgttggtgtaaagtttttgctatattattattattattttagtatacgtgatttttgtttttttatttagtatgtggagcgcgttgatgcgaatgtcgggctatattttgtgcttatgctagtcgttatagattgttgtggaatgttgtagctatctatgtcgaattagctgttttaggagtagttttaggaatatgtgatatattatgacttgtgtaattctgtgatatgctattattttggttattgccgctgcatcttcgtttcttgtaacgtttatcgtttattttgctgttgatttttttatgtgacgtgtttatggtggtcctt

SEQ ID NO: 685297 - DNA, 348 bp, Homo sapiens
  misc_feature (3)..(3): n is a, c, g, or t
  misc_feature (12)..(13): n is a, c, g, or t
  misc_feature (19)..(19): n is a, c, g, or t
  misc_feature (25)..(25): n is a, c, g, or t
  misc_feature (45)..(45): n is a, c, g, or t
  misc_feature (62)..(62): n is a, c, g, or t
agnaaaacgcannaagagnaaagangatatagttttttctccccnaaaggagcaccaagacncgccagcccgttgcttataaacaaaaggagagccccacccaccttaagcttttttttgaatggttttttctgcactcattatgtaccagacactatgtaagttactgggatctaaagatgagttacactgatcctttaaggaattcaaagactagtgaggatgctgttaatgaatgcttatagtacagtgccacgggtgccataacagtagtgcaaatgctgagaagtgtcagcaaatcagttccgccgtctaaaaatataaaaaaacaaaaaaatgaattcttgt

SEQ ID NO: 685298 - DNA, 111 bp, Homo sapiens
acaggcatgagccatcatgcctagctaatttttatatttttcgtagacgatgaggtttcactaatgctggccagtgctgactattgaacattcttgaccgcaggtagatcc

SEQ ID NO: 685299 - DNA, 780 bp, Homo sapiens
  misc_feature (358)..(358): n is a, c, g, or t
tggcattatagttttataactggggggagggggacaaaaaggagggagaagtctaaaaaacaaagggaggggggccacaggaattggtcagaaagtggaggcttaggctgtccatacaggattcagcaagtactgggggactgcgactagaagaagccaggggtggggaataagtagctgaggaggagagggagctgatgtggaggagagcaagggcaacttcaaggaacaaaggggaagctgcaaggcaccagctccattaatttaagcaaacatttcctgtgtctgtattgccattgccagggtcctgtggtcctagtggttctctccaggggggtacgctagaaactgtgcccanacagacagggaacgagacagaagccaaagcaaagaattccgtaaaggtagccggccgtgcgtgccaaaccggggcacaaacgtgtagtggaggcgcagcgtgtggtgtagccagaacccgagttaaaacctaggtcccacccgggccggtctgactccacggctctcataggggtgggtggggcaaagcgtgtgagggctgaaggcgctaaccatcaaagatggaggtcgggtggcaaaagatggggtggaaggcagagcagtgagtacagcgaagggggcctcaagggactaagaaaactccagaacttgcgggaaaggcctgagcccgcatgggacgctcgggggtgaccacatcggacacgggtaccgggagaccccgcctccccgcgcccgcatacaacaggcgcagaacccgaaaca

SEQ ID NO: 685300 - DNA, 881 bp, Homo sapiens
  misc_feature (60)..(60): n is a, c, g, or t
  misc_feature (103)..(103): n is a, c, g, or t
  misc_feature (108)..(108): n is a, c, g, or t
  misc_feature (114)..(114): n is a, c, g, or t
  misc_feature (119)..(119): n is a, c, g, or t
  misc_feature (125)..(125): n is a, c, g, or t
  misc_feature (129)..(131): n is a, c, g, or t
  misc_feature (135)..(135): n is a, c, g, or t
  misc_feature (143)..(143): n is a, c, g, or t
  misc_feature (151)..(151): n is a, c, g, or t
  misc_feature (159)..(159): n is a, c, g, or t
  misc_feature (162)..(162): n is a, c, g, or t
  misc_feature (166)..(167): n is a, c, g, or t
  misc_feature (169)..(171): n is a, c, g, or t
  misc_feature (184)..(184): n is a, c, g, or t
  misc_feature (258)..(258): n is a, c, g, or t
  misc_feature (713)..(715): n is a, c, g, or t
  misc_feature (717)..(717): n is a, c, g, or t
  misc_feature (719)..(720): n is a, c, g, or t
  misc_feature (728)..(728): n is a, c, g, or t
  misc_feature (733)..(733): n is a, c, g, or t
  misc_feature (740)..(740): n is a, c, g, or t
  misc_feature (745)..(746): n is a, c, g, or t
  misc_feature (751)..(751): n is a, c, g, or t
ttctgggtacatttgatctgactggaattcctcctgctcctcgtgggtcccacagattgnagtcacctttgagatagatgtgaatggtattcttcgagtgacngctgnagacangggtncagggnacannnattngttcacantccccggnggccagantcncttnnannntgaagaaatcganaggatggttaatgatgctgagaagtttgctgaggaagacaaaaagctcaaggggcgcattgatactagaaatgngttggatggctatgctttttctctaaagattcagattggagataaagaaaagctgggaggtaacttttcctctgaagataaggagaccatggaaaaagctgtagaagaaaagattgaatggctggaaagccaccaagatgctgacattgaagacttcaaagctaagaagaaggaactggaagaaattgttcaaccaattatcagcaaactctatggaagtgcaggccctcccccaactggtgaagaggatacagcagaaaaagatgagttgtagacactgatctgctagtgctgtaatattgtaaatactggactcaggaacttttgttaggaaaaaattgaaagaacttaagtctcgaatgtaattggaatcttcacctcagagtggagttgaaactgctatagcctaagcggctgtttactgcttttcattagcactcgctcacatgtctttnnntngnngggagaanaaganttggccntcttnnaaagngggtaaaaaacctgggttcgtccgcgtgttcaccttctaaatgttggaatccacaattgggtcaagcgcatggggcctagtaaggttttttaaccacaagtgacaccaataaatgtatgtcattttaaga

SEQ ID NO: 685301 - DNA, 880 bp, Homo sapiens
  misc_feature (60)..(60): n is a, c, g, or t
  misc_feature (103)..(103): n is a, c, g, or t
  misc_feature (108)..(108): n is a, c, g, or t
  misc_feature (114)..(114): n is a, c, g, or t
  misc_feature (119)..(119): n is a, c, g, or t
  misc_feature (125)..(125): n is a, c, g, or t
  misc_feature (129)..(131): n is a, c, g, or t
  misc_feature (135)..(135): n is a, c, g, or t
  misc_feature (143)..(143): n is a, c, g, or t
  misc_feature (151)..(151): n is a, c, g, or t
  misc_feature (159)..(159): n is a, c, g, or t
  misc_feature (162)..(162): n is a, c, g, or t
  misc_feature (166)..(167): n is a, c, g, or t
  misc_feature (169)..(171): n is a, c, g, or t
  misc_feature (184)..(184): n is a, c, g, or t
  misc_feature (258)..(258): n is a, c, g, or t
  misc_feature (713)..(715): n is a, c, g, or t
  misc_feature (717)..(717): n is a, c, g, or t
  misc_feature (719)..(720): n is a, c, g, or t
  misc_feature (728)..(728): n is a, c, g, or t
  misc_feature (733)..(733): n is a, c, g, or t
  misc_feature (740)..(740): n is a, c, g, or t
  misc_feature (745)..(746): n is a, c, g, or t
  misc_feature (751)..(751): n is a, c, g, or t
ttctgggtacatttgatctgactggaattcctcctgctcctcgtgggtcccacagattgnagtcacctttgagatagatgtgaatggtattcttcgagtgacngctgnagacangggtncagggnacannnattngttcacantccccggnggccagantcncttnnannntgaagaaatcganaggatggttaatgatgctgagaagtttgctgaggaagacaaaaagctcaaggggcgcattgatactagaaatgngttggatggctatgctttttctctaaagattcagattggagataaagaaaagctgggaggtaacttttcctctgaagataaggagaccatggaaaaagctgtagaagaaaagattgaatggctggaaagccaccaagatgctgacattgaagacttcaaagctaagaagaaggaactggaagaaattgttcaaccaattatcagcaaactctatggaagtgcaggccctcccccaactggtgaagaggatacagcagaaaaagatgagttgtagacactgatctgctagtgctgtaatattgtaaatactggactcaggaacttttgttaggaaaaaattgaaagaacttaagtctcgaatgtaattggaatcttcacctcagagtggagttgaaactgctatagcctaagcggctgtttactgcttttcattagcactcgctcacatgtctttnnntngnngggagaanaaganttggccntcttnnaaagngggttgccattttgggttacggcccctcccccccttcccgggccccctccctggattgccttaaaagagggttgtgttggaagttttttaaaccataaataacaccaataaatgtttgttatttaaaaa

SEQ ID NO: 685302 - DNA, 522 bp, Homo sapiens
aagaaaaacaaattttcctttgttttatggtatgactttatagattcttgttctctgtaactagtaacttcaagtattctgttttgtctaaaaggtactgcgaaggtcatgagacgcctgagaaggcctgaactacagctgtctgggcacctagtgaaggttataaggcaaaccagtgcaaggctcttttgagcaaaacctagataacagacatctaggttgcaaagcaacagtcatgtgtaatcccgagttatgaactgtcacaatttgattaattgttctccctctgtatctctgctttcatgccactgtaagcctacatcaagttagcccaccccttttggaacgtgtgtatgaaagtcaagtgctgtctttgttggggcccaatctctggatgttaagtcagctgagtctgagtgcactcaataaagatatcctcctgtatacaccccaaggtctctctctggtactcctgattcctgcaaaaagatgtcaatttataaacaatatacaggacagatg

SEQ ID NO: 685303 - DNA, 1438 bp, Homo sapiens
  misc_feature (210)..(210): n is a, c, g, or t
ggagagaactagtctcgagttttttttattgttttgtttttacggggcaccaatgtgggtttaaagtggcattcaagacccaggaggttcacacgtttatgtatctgggtgtggcaacgtcttataggggtgaggggtgtgtgggctccattgcggcccacaaagcactttgaagaattgggagtgccgcgggtcctcaccacgtttttntcacggctccctctcccccaggtgagaacaataaagacttaaaacgggatgtgtcgccgtgtactgaaccgaagattcctcagataggcggcgccgggggcgtctgcatgacactcgcatgggggggcctgttacaaatgatttccggacccaggggctgttggggcgtgttcccccgctacgaggcgagtggggcccccctgggggcgttggagctccccgtgagagatagcggggtgacacctcaggatgtgtgttgggcacgcggagggctctccattgtctcccatgaaacctggtgggggcgccctcctgtggggaggggggggccattcctggttctgtggggggaggcacatcctttaaacagtaaggacacatggtggagaaagcgctctggaccacaaagggggacattgtgactaccctacagcggggaagtattttagccaccgggagaaaacggacattgtgcggcgtcccccgtcggggattgttaaccaaccaggccgtggagagactataacgacgagttttggcgcagttgtgcggcgaacaacaaattctagggccgtgaacaagggggaaaagttgttcgctaaagaggggggccaaaattatatgcggcggccgcagaagcagggtttcatgaaaaacaaccaacgagataaaccagcacttatcgccgttttgttatatacccacaaagagactgggcattcggtgaaaagcaacctcttcctcggaggacaccacagcatgaatgtggtggtgttcgacaccacctacgcacttttttttgtgccaaccgagctgtgagaacacttgacacacgggatactccctttctttaggggccaccctaaattagtgccgcagagcgcgttgggattttcccccattgggacggagggagcgttcttccactcatcaacaaacacggcggggaggtgcacccttattatattcacacaattttggtcgccaagatagattatgcggcctccccgctgtgggggaggccaccaggtcggttatacaaaagaaaaacggtgcttctagtaggagcagaaagagggactcttcacatgagttatgggagacgacggagcaacgcgcggcccccccccaccgagtgtggcaaccatctgtttaggtgagaaaaccaacgtttgcttctcatcatccatgctgtaatatcatcagtaaacgaaagtgtcttctgtca

SEQ ID NO: 685304 - DNA, 770 bp, Homo sapiens
  misc_feature (60)..(60): n is a, c, g, or t
  misc_feature (103)..(103): n is a, c, g, or t
  misc_feature (108)..(108): n is a, c, g, or t
  misc_feature (114)..(114): n is a, c, g, or t
  misc_feature (119)..(119): n is a, c, g, or t
  misc_feature (125)..(125): n is a, c, g, or t
  misc_feature (129)..(131): n is a, c, g, or t
  misc_feature (135)..(135): n is a, c, g, or t
  misc_feature (143)..(143): n is a, c, g, or t
  misc_feature (151)..(151): n is a, c, g, or t
  misc_feature (159)..(159): n is a, c, g, or t
  misc_feature (162)..(162): n is a, c, g, or t
  misc_feature (166)..(167): n is a, c, g, or t
  misc_feature (169)..(171): n is a, c, g, or t
  misc_feature (184)..(184): n is a, c, g, or t
  misc_feature (258)..(258): n is a, c, g, or t
ttctgggtacatttgatctgactggaattcctcctgctcctcgtgggtcccacagattgnagtcacctttgagatagatgtgaatggtattcttcgagtgacngctgnagacangggtncagggnacannnattngttcacantccccggnggccagantcncttnnannntgaagaaatcganaggatggttaatgatgctgagaagtttgctgaggaagacaaaaagctcaaggggcgcattgatactagaaatgngttggatggctatgctttttctctaaagattcagattggagataaagaaaagctgggaggtaacttttcctctgaagataaggagaccatggaaaaagctgtagaagaaaagattgaatggctggaaagccaccaagatgctgacattgaagacttcaaagctaagaagaaggaactggaagaaattgttcaaccaattatcagcaaactctatggaagtgcaggccctcccccaactggtgaagaggatacagcagaaaaagatgagttgtagacactgatctgctagtgctgtaatattgtaaatactggactcaggaacttttgttaggaaaaaattgaaagaacttaagtctcgaatgtaattggaatcttcacctcagagtggagttgaaactgctatagcctaagcggctgtttactgcttttcattatgccgtttgctcacgatctctctgtgtcgaggtaggagaagcttacaggggtatccgagtctcgatattcgctaactc

SEQ ID NO: 685305 - DNA, 699 bp, Homo sapiens
  misc_feature (60)..(60): n is a, c, g, or t
  misc_feature (103)..(103): n is a, c, g, or t
  misc_feature (108)..(108): n is a, c, g, or t
  misc_feature (114)..(114): n is a, c, g, or t
  misc_feature (119)..(119): n is a, c, g, or t
  misc_feature (125)..(125): n is a, c, g, or t
  misc_feature (129)..(131): n is a, c, g, or t
  misc_feature (135)..(135): n is a, c, g, or t
  misc_feature (143)..(143): n is a, c, g, or t
  misc_feature (151)..(151): n is a, c, g, or t
  misc_feature (159)..(159): n is a, c, g, or t
  misc_feature (162)..(162): n is a, c, g, or t
  misc_feature (166)..(167): n is a, c, g, or t
  misc_feature (169)..(171): n is a, c, g, or t
  misc_feature (184)..(184): n is a, c, g, or t
  misc_feature (258)..(258): n is a, c, g, or t
ttctgggtacatttgatctgactggaattcctcctgctcctcgtgggtcccacagattgnagtcacctttgagatagatgtgaatggtattcttcgagtgacngctgnagacangggtncagggnacannnattngttcacantccccggnggccagantcncttnnannntgaagaaatcganaggatggttaatgatgctgagaagtttgctgaggaagacaaaaagctcaaggggcgcattgatactagaaatgngttggatggctatgctttttctctaaagattcagattggagataaagaaaagctgggaggtaacttttcctctgaagataaggagaccatggaaaaagctgtagaagaaaagattgaatggctggaaagccaccaagatgctgacattgaagacttcaaagctaagaagaaggaactggaagaaattgttcaaccaattatcagcaaactctatggaagtgcaggccctcccccaactggtgaagaggatacagcagaaaaagatgagttgtagacactgatctgctagtgctgtaatattgtaaatactggactcaggaacttttgttaggaaaaaattgaaagaacttaagttttgaaagtcacccgaataaaacacctcatggtgcagcaggaaatgctatagtttaaacggttgaatgctgctgttgttatcccgcc

SEQ ID NO: 685306 - DNA, 184 bp, Homo sapiens
cccctttgggttttttccctttattaaaatccccagcttttattaccgcccctttaaaattagattaaaatgggttgggaatttttttggtttcttaaagggtaatttcttttttgttcctttaatggcccccctttttagcctgtccttttaggtttttaatccttcctgtccttctgcctta

SEQ ID NO: 685307 - DNA, 674 bp, Homo sapiens
tacaagtttgacaagatggtgtgagctgtgcccagtcgcttgacctccggttgccctcagacagcctgtcttgtagtagtagactacttccacctcgtgcgcccaaggcaagtgtgcgataaccgtcatgggtagttatttcgctggagagccacattgtgtcgggcctgccacatcttggctcaacgtggtggcaagctctcagctagtgaaaatatcctctttgtacttaggatttccgcccgcgcagaggaactaccttgcgtatttaatatactacttttttggacaaaccaaggttctaccttgaactgtgtcgcactcaccccatctgaagaggtctcctggtccacgtaaggcccatggagggcatggacagtaggaactatattttggacgccccttatactagagtcaccaattacccctgaagtgcgcttaggttggtgtcaacactccataattgggccgaagatggcacaatgctaggtacctagtttattatcctttcattattatggggcaaagaagatatctacttcgtcgttggcgccaaggagaaaagatacatagaggaattggactacgtagttaaattatacggacgaggatgcctccctaagcgtaacacggtttgagaagacaaataaaggcctaatatggaagacctcaat

SEQ ID NO: 685308 - DNA, 208 bp, Homo sapiens
tgcccccccccccccccggggaaaaaatgcccttttcaatggggcccccccccccggtagttggaacagccccggcccggggggcacccttttccttcagcgccgggacaaaaccaagggttgtttgccccccctgttttttgtaggggatgggatggggggcttccccgtttttttcccccataaaaaaaaaaaaaaggtttgttta

SEQ ID NO: 685309 - DNA, 559 bp, Homo sapiens
aaagaatgttagctaagtcccgaaagcaactgtaacaaaacaaaaatgacaggtaggactaattaaactaaaaagtgggagatagcaagtgcaacaaaaaaaaaaaaaaatttggacaggtaggacctaattaaaaggggatttcttcagttaaaaataaattggtagaattatgggggactggttaacttttcaccacataactaaaaactatgtgtatatgcacacacatacagaaaacacacggggtggaaatttccaaaggctggattataaacccagcttttagctaaaatccaatttaggagcaattttaaaaatccgggtagtggtcagacacagatgaagtatgatgaagtctggaaactatcatctctatcctctaggtccattatccctacagggcatggtgctcgggcccacatgtaatacatgaggtctcataaaagaagcatccagggcttgatttacccaaagggagagctatctcggataatgaaagggctcggatttaatggtctggatactcacctcactggtggtctccagaggtaggggc

SEQ ID NO: 685310 - DNA, 216 bp, Homo sapiens
gcgaggatcccctcttctccgaagcacatgtatcatgggttctgaaattatttttaacgaggcatcatagggtccagtttataccatactttctagccattatttgcactattattctaagacttctgttatttcacagtagctcttatagtttgtcaaacatgtttctaattttccatcctcaattattgcttgcccccagatcatttatttagt

SEQ ID NO: 685311 - DNA, 1067 bp, Homo sapiens
gagtcgggaggtcccggcgccagaagcgcgcccgcgcccaggcgcacgtccgcaatctcgaggcctatgtccgcgaacccgctagtcgttgcgtgttcgcgcgaggcggcgacgggtcgcgaacgatccaggcagcggcagcctggacgtgcggcgggtcgatggacgccgctcactgcctagctctgtctgccaggttcggtcagcaagaactcgctgcaaggactgcgtggccaggggctgggcgccgtcggggttcacggcacttttctggatcctgagcgaaagcagagaccaagtgtctactttatagctgagtgcgtcctttccaggaggcacccatgcttggatcttccaggtcaggaagtactcgtctggtgacgtgagatgtatggatcttccagtccacatgcgtgccgtgaaaccgtcgatgctacggagacgagacgagggtgttgcgacgacgctctgacctcctccctgggatacctgctaaacagggttatgtgccccaccaatggggtcatgccatgatggaaaggcgtcagtggggtacgaccaatggattgccaggagacccctggtttgccccacttgcgcagtctagagcgtagacaacaaacggggtgaacacccgtggggacaaccattcccagttcagtacgtctgcatgggccctctacgttcgattccgaaggtaccgaaagcccgcagaacctccaccagagaatggctggagatctttcctcggggacaaacttactacgtccagttctaaaaaagtttccgtgttccctttgtaggggggctgcctgaaggttcgacagcgagaattgggaaagggaacaggacttggtcgtcccccaggggacacagaaccaggtttatcccgcacatagagcaaatttgaaggcccccgggcacctggctagggggaccagttcaagggcaggaaggcctttgcctggtgctccaacaggggggactggcccgggggcgccttggtcccgagaagggaagccgaaggagggcacaggaggctcctggaccacggcggggaacaccaa

SEQ ID NO: 685312 - DNA, 169 bp, Homo sapiens
gatcccgcaggagagctgccctcataatgatatttggcctcacgggaggacatttcctatgaatggctgttgtctattcgttgcaacgccgcgaggactattgccgcatttttcaggttttctgagcttgcagaatctgattccgttaactactatggccctcgtcccg

SEQ ID NO: 685313 - DNA, 130 bp, Homo sapiens
gggggggggggccccccccccccccctgtttgggggggggggggggcccatattttgtccccgccggggggccccctttggggttccttttgggggggcctggaaaaaaaaaaaatccctttttggggga

SEQ ID NO: 685314 - DNA, 799 bp, Homo sapiens
taacccctccttagcctttatgcgctcaaaaaccaaattaaaccccccccccatgtaacaggggggaagtgacaaacagcaaaaacgcacaaacccgagctggttgaacaacacaaagttactgcccccctgccatattactccgccctgatgggattttgtgttttaacactcatgctccctgtatcgctgtggcgctaagagataagatggtgtgagaccccctcctatgtggaggagaactgtggcacaactgtgatcgcccccctatgtgaaaagaacgactcataatggagagaagctggaaataacaggtccatgtgtatcgcgagcccgtggctatatctgtgggtgcaccacgtgtggctgtgtgtctccccccgagaaaagtctccttgaatgagtgacgatcaggtggagtgtggtttggtgacaggggtttctctccctatcgagagtgtgtttcaagtgaagtggggtttgatctctcgggtagtgtccacatacagggtaagggcgcgggactcactgtgggggattggcgcccctatggacgccgcttttagcggtcccgttgcagacaggttgagtgaatttggggcgcactaaaaccatcggtttttgttcgataacaccaacatgagtgggtgttcaccaccaatccaagatagcctttggcgcggccaaacatggtgatagtagccctgcccattctcaccggaccaacacttttattggatatgtggaataccacctatcacccccatcattatccactcactactgtgtgaaccatttt

SEQ ID NO: 685315 - DNA, 693 bp, Homo sapiens
gtagcaaaatagtgggaagatttatatggtagaggcgacaaacctaccgagcctggtgatagctggttgtccaagatagaatcttagttcaactttaaattggcccacagaaccctctattaagtccccgttgtaaatttaactgttatgtccaaatgaatggaatcagcgtctttggacatctaggaaaaaatccttgtggagagagtaaaaaatttaacacccatagtaggcctaaaagcagccaccaattaagaaagcgttcaagctcaactactccactacctaaaaaatcccaatacatatagatctgaagctcctcacactccaagttggcaccaagtctatcagccctatagaagaactaatgttagtataagtaacatgaagaacattctcctccgcataagcctgtcgtcagattaaaacggctgaactgacaattaacagcccaatatctacaatcaaccaacaaggtcaattaattacgccaaaaaaaaaacaacaacataagaaaggtagaaaaaagcaagacaaccgaaaaaagaaagcgatacagagcatcaacaacacaatacctaaaaaagatcgcgcgggggtataactgaactcctcacagcggaggggacccagtctatcagcctatagaagaatgaaaggggcctcagtaacctgaagattcatcctcggatg

SEQ ID NO: 685316 - DNA, 155 bp, Homo sapiens
gagttggcgataatgaacagcgctagtattatcttctaggcatagtagggaggatatgaggtgtgagcgatatactagtattcctagaatgctgagatggtaaatgctagtgataatatttatgtacctgaggggccagtcgaaagccccaagcg

SEQ ID NO: 685317 - DNA, 364 bp, Homo sapiens
actcttagaggatccccctgcaatccacgcatggtcagtcagtgaagagggcccgagagaacctagaagaatgagagggatatggaggagcatcaagaaatagggcatggtgcgccctagtttcaagtacagacccggtgttgtgtcgatcctcccagcttcttcttgggccttgcgggcttcacttcctactatctgtaagcattgatagcgaggtgatgtgctgagagaccatgcacagggcagaggtctgcatcaccaccaccatcaccatcaccatcaccaccatcaccatctatcgtcaccaccatcgttatcaccaccttcaccactgcctctcccgccgccttgcgtggatcgcctg

SEQ ID NO: 685318 - DNA, 294 bp, Homo sapiens
aagaccaatgcaacagaaccagaaccaagtgtaaatccacacatttacggccaacccatttttaacaaaggccccaagaacatccaatgggcaaaggacagtctcttcaataaatggtgctgggaaaaccggataaccatacgcagaagaatgaaactggacctctatctctcactatatacaaaaaaatcaaatcaagatggattacagacttaagtctaagacctgaaattatgaaactactagaataaacattgaaaaccaggtgtggtggctcatacctgtaattccagc

SEQ ID NO: 685319 - DNA, 658 bp, Homo sapiens
gaagaagagattgttgctagaaatatggatgttaaaagcaattctagtgagggctcagatggaagtgatgagaatggttgagaaagcttctataatcttagagaatatatataatcatatatatagaaagaatgttgctagcaaataggaacattaaaggtacttctggtgagaccgtagaaagaaatgaggaacatattactggaaactgagcaaaggtgattcttataaggcgtcagagaacttggctgctgtgggcaaaaagcagaattcaagttggatgtttagctgaggagatttctaagcaaaatatggagggtgcagcctagtttctccttattgcttacagtgaagtgcaagaggaaagagataaattgaggaaggaattgttaagcacaaaggaaccagtactttatgatttgggaggttcttggtttctctgttgagaaagcacactgtggagagagctccaaagctgtggctggacaacattttgcaaagagattaggtgtgtgactcatgattccaatcagccatcacagtagaagccaggaatagaggtggggttaatcaggaagtatctatggagaatgctcggctaatgagtgtatcaccctggcatacacaggagacccaaattttgggatttttccaatgg

SEQ ID NO: 685320 - DNA, 226 bp, Homo sapiens
atgttgtccaattgctttgctggtaagggagggatcgttgacctcgtctggatgtaaaggatgcgtagggatgggagggcgatgcggactaggatagatgagcgggcaggatagttcagacggtttctactttcctgacgcgtctgacactgttagtattacgttacgttcagtctgtgacgtgtacggacacaccgggacctacaaggaactaggacagcagact

SEQ ID NO: 685321 - DNA, 565 bp, Homo sapiens
gtgtctaaatgtataatgtggtactgagtgctgtggactaggaatagggaactttactatagggccggtgatggattcttgggaaaataaaatgaagggcaaatggaagcaaaagacaatataatttgcttctgttttaagggaacttttaaaaagttaattcttaacattttatcaatttacaggacttcgtcaagaacaccatcgacttaaatcatcattgagtttaaccctaacaagcatcagatctttcagtctgctgtcatgaggaaatacaagtttctttctgctttctattcatgattgtagatttgcatgagcgtgttttaggttaggctgtgttatgctgtggtaatacataccaccaacatcctcatgatttaacacaataaaaaacttctgctcacaccaagtctgcttgagggctcattggccccgtggaaactgatctccatgtccaggccagtttggtcttgtggccgtccgttttagggcagtgcttagggtcaggagagcaaaacaacaggctggagagttaagcacaggcaactaaatgcttcagcat

SEQ ID NO: 685322 - DNA, 483 bp, Homo sapiens
ggcgaagatgcaaacgattacaggcagtagacatgcaccagccgttaaggttaaaagcgcaaaacaagtgaaagcagtgtcaaatcggggaaaagtgagaataggatgcattcgtggaaggagcgcaaccaagcatgaagagcaggcaagacatttataaacaggtgcagacagcatggggacttgttcgaaagactcaagaggtagactatgaatacagactacaaacgtagatctagaaaatctgaaccagaccagatatgaaacaattgaaaaaccgttaaaggagtagtgacaagaacgaggcgaatagaaaaaacacgtaagccattaccaaaaagagacgtctagaggtaaaaataataaaaaccgctctctctctctctctctctctctctctctctctctctctctctctctctctctctctctctctctctctctctctctctctctctctctctctctctctctctctctctc

SEQ ID NO: 685323 - DNA, 406 bp, Homo sapiens
  misc_feature (187)..(187): n is a, c, g, or t
  misc_feature (348)..(348): n is a, c, g, or t
  misc_feature (354)..(354): n is a, c, g, or t
  misc_feature (365)..(365): n is a, c, g, or t
  misc_feature (387)..(387): n is a, c, g, or t
tcgagacagggtctcactctgttgcccaggctggaattcagtggcgcgatctcgactcactgcaacctcaacttcctgggtttaagcaattctcctgcctcagcctcccaagtagctgggattacaggcactcgccaccacacccggctaatttgtatatttttagtagagacggggtttcactgtnttggtcaggctggtcttaaactcctaactttgtgatctgcccacctcggcctcccaaagtgctgggattaaaggtgtgagccaccgtgcccagccgataactgaatatttttaactactgtctacaggattcatttccaactgatcaataggctagatttncttttntgattcggagntttaaactttcctggactcctntttacttatgcattccttg

SEQ ID NO: 685324 - DNA, 192 bp, Homo sapiens
taaattttttcccaacctttcaaaatatttttggtggggtttaacggctcctgggagctaaaaaccccttttttcgtttttcccccggggtgggaaaccctcccggtttagggagggatatacctcccgtaagttccccccttagggaagctcctaaataaaaaaagggggtttgccccccttggtttccca

SEQ ID NO: 685325 - DNA, 1094 bp, Homo sapiens
ggggacccggggacaagtttaccggggactatgtcgaaccagcgtcgattaccattacacttctaggaatactagtatatcggtcggacctcatgttcctccctactatgcctagaaggaataatactatcgcgttcattctagctacttctcataaccctcaacagccatccctcttagccaatatagtgcctatgcgcatactagtcttgccgcctgcgaagcagcggtgggctagccctactagtctcaatctaccaacacatatggcctagactacgtacataactaaagctactccaatgctaaaacttaatcgtcccaacaattatattactaccactgacatgactttccaaaaaacacgtaatttgaatcaagcagcaacccacccacagcctaattattagcatcatccctctactatattttaaccaaatcaaacaacaaacctatttagctgttgccccaaacttttctccgaaccccgcataaacaaaaccgccctgcgtaaataataaaactacctgacttcccggaccctcacgcaatacctgggccagccgaagcgccgacgtatatccagtggaagccccgtatcgaggaagagaaaactctacacgcgtcgtaaagctaataatccctaaaaagtcgtccgttaataatcaccatcacaagacgacaggaaaacacactatatagacaatccgtgtacgtcgaacaccacgcgaataatacgcacagctggagggataattcacaccgaggaggacaacaggcacggaaaagcgatgaaggaggagcaatacagacaagctaaaaccgtaagaaggacaccataaccatactacacgaggatacttaaacgacagaaaactaagtcaggaaaattataagaccaagctgcaaaacatacagaccaggccaaaataatgacgagaaagagaaaaagaagaagtaacggagcaaggaccaagcaagcaagcaacgagacacgacgagaacaaacagaagaaccgaacaaacacgagaggcgagacgagaacagaaactaccaaaatataaagggaacaaaagcacagagaagagaaaaa

SEQ ID NO: 685326 - DNA, 244 bp, Homo sapiens
  misc_feature (28)..(28): n is a, c, g, or t
ttccatcagcaatatatgagggtccaantgtttttttttaatgcatcctctctaacacttgtataacctgtgttcttaataacagccatcctgttgggccccattcaactcttagatcacatgtacctgtgtttaatcattgtgacttctgtgtcctggcctttaataaaagtgatcctggtctgactggctgccttctgtaattggctcattgccatgctcatgttcactcatcttggtattc

SEQ ID NO: 685327 - DNA, 211 bp, Homo sapiens
accgttcgtacgggaataaagcccaaatagaaaagcgggcatgaagatggatagtgatatttgaacaactatgtgaatgtacttaatgccatagaactatatactttaaaatagttaaaatggccaattttattatatgtatattttaacacacacacacaaaatgtttaggcctggcatgtttggcgcatgtcacgtactcccacgcact

SEQ ID NO: 685328 - DNA, 429 bp, Homo sapiens
agcgggaactcctctcgcatccctttcttttttttcgcaagacacgtagacatacaggctagctggggtttcccttttacttacttctggttcttcccacttgcatttaacatcctaagccattcttaaatctttctgtacaactccattgcatattcatattttacgaataacaaattacactatttttgttttacttagttaacaaacacacttcaaacttacataactcatctcattcttgcctcattccacttttgcccacctcccaccgaaacacggccatactgctctttccttctcgtacccttcaaataactgcttttcccttcccttccccttccaatattttctcccaagagctgcgttttttacaaatcctcgaccggccctcctttttccgtccaccaccccatcatccgttgcccc

SEQ ID NO: 685329 - DNA, 101 bp, Homo sapiens
tgtcatacgtacgatcagtttcatgaaggagctcatgcagtggtacaaggaccagaagaaactgcaccggaaatgtgctaccagattctggtacaggtcaa

SEQ ID NO: 685330 - DNA, 173 bp, Homo sapiens
  misc_feature (115)..(115): n is a, c, g, or t
  misc_feature (131)..(131): n is a, c, g, or t
aagacgacaacggtgacggaaacactggtgggatttctgatgtacaggaagcaggagagcactgttccagagctcaaggaggtgtcattgttgatctgtgtctggacgaatttcntttttaaaactccacncttattgacgatgtaattaatactgccttgtaacgtcatcca

SEQ ID NO: 685331 - DNA, 169 bp, Homo sapiens
acttgtaccggtcagccagctggtcaggcgagctgtacctgctggggtcctcgggagcatttgaagtccaggtcatacttcccagacctgaagaactcggaggccgcatacgtccattgccgcataccacctttatcagctgtagccagcatttcccaagtagtcagtc

SEQ ID NO: 685332 - DNA, 560 bp, Homo sapiens
aatgcaggcactcaggttcgagtgactgtgtttccctcaaagactgtagctcagttattcgggagtaccttggcggatcatcctagtggctattctcgctgggatctggatgcttgctttattacgcgtttagtactatggaagtgtggattctttaaacgctctaggtacgatgacagtgttccccgataccagtgctgtaagggatcccggaaagaagagcgagagatcaaagatgaaacagtgatattgataagccttgaaaaaaaaacagtgggatcacaaagtgggaacgaaaattgaaagctacgtcatagcgggggcctaaaaagaaaaaagcttcagcaggtacccaaacggctttttgccaactcagaaattcgaattggatttaaaagccggcttcaatcccctgaggactggatttcagagtggactacacgacaggtacggaacctacaggttttaactggtgggatactggttacggtagcctaagggctccgtgtttgtgcacagggcaaagtttaaaacctggtgggaactggattttccgttta

SEQ ID NO: 685333 - DNA, 425 bp, Homo sapiens
gttgtttactggattagaccatatcatagatgtcgatatgttgccggggctaatctctgtgcaactctacatgcagctagctgaactgatgtcagacctttgtctgcttattgatgaacatgaccatagtccctcagcgttgacgccgcatactatgacgcagaccgagccccttgtgaggcgatgattgattagagcatcatgaggatgaggatcgaatatcgcagataatgttgtgctacatcgtagagcagatcctaagattactatctgcttgatagtcgaatccgtattgacctcatcgattaaggagaggtgatgagcttaacgatgccgaccgccattagcctgcggctagctcatcctagacatttgacatgctatctaggagacctacttgggagatgatcactgagacgcttctt

SEQ ID NO: 685334 - DNA, 870 bp, Homo sapiens
  misc_feature (444)..(444): n is a, c, g, or t
gtaaactcaactgtattggtcacggtcagcccattcaatgacaagggtgtctgtctggcttcaccttcaggctattttagtgtgcagctataggaggcagaggaaacgtgggtggtgtagtttctaaaacacgctgacttgctgattgataattcagggttattagtgtaacaaagcgtagtggaaactcctactcctgctgcaccatacagttacagaccctaccatactcttggtctcatttaaggaaccattaacaccttcactgctgaaaagaggatttataagcataagtcatccacctctaaatattttaacatttaaaatgcctgattcaaaagatacagttttgttgtttttaactagttaaaaataaatcctaagaaaatatatttaaatattgcaaatgccacttctaaaccaaaatacctgagaatatttttngtctttttaataacgattttaccattcattttatttaaaaacatttctcagcatagcagggcactgtatggtctctgatgcactactcaaccctctagttgtagtagagggagccacagacagtacataaatgcattgggcagagctatattccagtgaaactttatttaccaccataggcatgggatttggcccatgggttgtagtttgccaatccctgacacagaccaacatagactgggggctggatgaaaaacaaataacgatgtgtcatttctttctttaacataaaataaattcaatatggctcacctgatttttggaagtggcgaatgtttaatgccaacgttctcccaagtttttattttacttcgatttaaattcggcctaaaggcgtgacctgaggaaaattatataggttctccc

SEQ ID NO: 685335 - DNA, 280 bp, Homo sapiens
  misc_feature (28)..(28): n is a, c, g, or t
  misc_feature (125)..(125): n is a, c, g, or t
gttgcagtgagccaagatcgtgccagtnaactccagcctggcggcagagcaagactctgtctaaaaataaagtaaaataaaataaattaacagtgcatttaaaaataactaagaggataattggntttttgtaacacaaaggataaatgcttgaggtgatgggtacctcatttaccctgatgtgattattatgcattgtattcctgtatcaaaatatcttatgcaccccataagcatatacactatgtacccaagaaagttaaaaatttaaaattaaagg

SEQ ID NO: 685336 - DNA, 901 bp, Homo sapiens
ggcgcttctctctggcccgagccagtatgatccgctgggcccccagcgcatctcctggaagagcccactcaccctggacgagctcttcggtacgcctcagaccgtccttgaagagcgatgactgagacattactgggccacgcgctgtgtgtcgtgctctctggggcaactgtcatcattgacaataatgcgctacctcttcatccaggaaactgggggagggtgggttcaggttatgtggacctaatggaagggttacatgatggacacttctacgccctgaagctgaatcctgtgtcgctagcagcaggaccgaggaggaggcccgatcgatgaagcctgatcatgtcatcgcgctcttctaatcacacccaacatctcttcagcgcatcgctggcttactgtctgagggaacggggtgctaatgcatgaggcctggactgctgctaccattacttcatacgtagcacttgacatggcccaccaagtgatagttgctctcggaggatgagggcgcagcgcacgcttatttaattaggcatcattgggggattcccagttgacatttcagacgtcgactcgcgattaccattgtagcgcagagagctccacgtctcaatggcacttctgaagaccctgccaaggcatcgtgggcgcacgctctcaagccgtgtagctagccagtactctcgtaaccgtagaccacctagaggcgactttctgctgttgcagaagtcaactgtgttcatcgaatgaagcggacgtgattgtctaggtccctaaggcttgcgttgctatatgccatgactgttgggggaaggcccttatgacatggttgttccaaaagggtgacagtgtgggccttgctgtgcagaaaacaactcagcatccacaaaagcca

SEQ ID NO: 685337 - DNA, 196 bp, Homo sapiens
  misc_feature (150)..(150): n is a, c, g, or t
cccccaagcagttaatacagactcaacgacgataaataatgtacactgacacagatattatgcttttcagtctgctgagggtccaggcagcttacagactcccaggagagtgccataaacagttgcaacctggggctgtactcgctggcncttccggggcttttattcacgcacacgttaacatgacaaacagttt

SEQ ID NO: 685338 - DNA, 397 bp, Homo sapiens
tgctacaagtattcttgtacaagctatgctgcctactgattttagaccttgggcaagttactctttgttctggtcttgtttccctcatttataaaatgaagtgattggaatagagcatttattatgtgtcttttgattctaatactatgattcttgacagtatggaagctctgctggagttgatgtaactggttaattgggtcatccaagaagaagatgttcacacagtatcagatatgcaagagatttattagaggaagatttctgatggtaaatgagggagggaagctggggaggctgagaaaactattattttgtggactcatgctacatgccaactgctttatatacattatggcatataattctcacactctatatgatgatgtggtagcat

SEQ ID NO: 685339 - DNA, 180 bp, Homo sapiens
cagtggccactcagcacacacacgagagtacagcacacaaacgcacagcacacgcacatcatcacacacagcacactgcacacagtcacacacacaaagacacagcacacacattcacacacggcacacacacgcgaacacatgcacacactgaacacagtcacacacatgcacactaca

SEQ ID NO: 685340 - DNA, 172 bp, Homo sapiens
aagtatcttggaccatgaggcaatgtgctactatggcaaaacagccatataggagaagctgcttgacaacttgtggagctgctataccagtcctgaaatgtctacctctgaacttgaaacaaacaaatttctgggctgggtgcagtggttcatgcctgtaatcccagctact

SEQ ID NO: 685341 - DNA, 103 bp, Homo sapiens
catggatttgctggtgcagtacaactaggcttaatagggacatgagatttgggctgggacacagatccaacccatattggaaatgtaaatgcctttcaaaaaa

SEQ ID NO: 685342 - DNA, 317 bp, Homo sapiens
  misc_feature (19)..(19): n is a, c, g, or t
  misc_feature (110)..(110): n is a, c, g, or t
  misc_feature (129)..(131): n is a, c, g, or t
  misc_feature (134)..(136): n is a, c, g, or t
  misc_feature (138)..(138): n is a, c, g, or t
  misc_feature (151)..(151): n is a, c, g, or t
  misc_feature (153)..(153): n is a, c, g, or t
  misc_feature (164)..(164): n is a, c, g, or t
  misc_feature (169)..(169): n is a, c, g, or t
  misc_feature (185)..(186): n is a, c, g, or t
  misc_feature (198)..(198): n is a, c, g, or t
  misc_feature (202)..(202): n is a, c, g, or t
  misc_feature (225)..(225): n is a, c, g, or t
  misc_feature (229)..(229): n is a, c, g, or t
  misc_feature (317)..(317): n is a, c, g, or t
gtcagaaatcccccagtgnaacttaagacaaacagagagaagtcaccttcctcttaggaccctccctgggttagcagaaggaaagaacccagaagccttcagtaccacancccgcttcggcatctcccnnnccnnncnccgcacccccagncnttctccctgcnggganggagtctctctaaaanntggatatttccngganaaaagtatgaatttggggtttantttntggtatgaggtgggtgaatacagggagtaagaatttattttgattagagatggagaagggtggaaggaggggggagggggtttggggn

SEQ ID NO: 685343 - DNA, 464 bp, Homo sapiens
tgttgttgttgttgttttagatggagtctcgctctgtcgcccaacaaagatcaaaagagacaaagaaggggaatatattatggtaaagggttcaatgcaacaagaagagctaaaataaatatatatgccaccaatacaggagcatcccgattcataaagcgtgttcttagagacctacaaagacacttagactcccacacaataatagtgggaggttttaacactccattgtcaatattagacagatcaatgagacagaaaattaacaagaacattcaggacttgagctcagctttggaccaagtgcacctaatagacatctacagaactctccaccacaaatcaacagaatatacattcttctcagcaccatatagcacttattctaaaattgaccatgtaattggaagtaaaatattcctcagcaaatgcaaaagaatggaatcatgtttacgcggccgcga

SEQ ID NO: 685344 - DNA, 173 bp, Homo sapiens
gcagccacgggagtaatgattttgtacaaatcactatacgtaggacattcttacgaggaccccttcttcggctttgacggaaaatttttaaatttggaaaacccccccttacccggggggccaaaaatgggaggcccccccccttccccacatttggaggaaccccaaaaaaa

SEQ ID NO: 685345 - DNA, 276 bp, Homo sapiens
ttggaggatgatggcaagccaatgatcaaagaggccatggaagaggcagtggtagaatccatgatggtgcatagacacatctctaagactgatggtcctcatactcatagcccctccatgtcagggcttcatagtaccttcctagccatggacacggaggagggggtataggtgtgggttgtgaatgatgctccgtttcggtaccacgggaagtgccttcgtggtgctactagtgagaggattcagacctgtgttcgagccgctgtgtgctggttg

SEQ ID NO: 685346 - DNA, 397 bp, Homo sapiens
  misc_feature (64)..(64): n is a, c, g, or t
  misc_feature (70)..(70): n is a, c, g, or t
atcagactccattaggtatttaatgatactcagtaataaggctttagaaatgagtcagaatttncttttnaaacatgagccaaaacttcagttaaaagggtacctcctgaaaaataaaaaagaaaataaaaataatcaaaaccaagttttagaagacacagtcactaacgcggtatgtgtgtgtagaattcaagtgggaccaaaggtgaagctgttggctgagacggggctacccctgctgcagacactcctagtaacacttgctggagctgtaagccagtggcagatgctatcatccccactgtctccagagagggaaataggggggaaggcctgccacacccaaaggggcagacccaaggggtcgattttgtcctgtgtggccacaaccagctgg

SEQ ID NO: 685347 - DNA, 125 bp, Homo sapiens
catggatttgctggtgcagtacaactaggcttaatagggacatgagaaggatcgagacaaagagaaggaaaaggaacaggacaagaaaaggaacgagaaaaagacagatccaaagagatagatga

SEQ ID NO: 685348 - DNA, 1323 bp, Homo sapiens
agcggacctatcatggttgaccccgacctgcgctacccctcggtcctcgatcgaggactactacaattatccgtgaatgtcgatgccctccgacacctgctagcacagtccagaatgagtcttactcatgtaacatacctgtagactgtcaatcagctgttctgtgtgtataccattgtgaggtcgttgtagccgagagcactcatgctagcaatgatgagatccctgcgccttaactattgtctgctaagcgcctcgtgagttactcttgtgcgtgatgaattcttctcgaccgtgagacttatgtcaacaaccagaccattttacagtgatcgcctcctttaggacctgaacgcttatctatatatggttgactcttaccgcatggttcggaaggcctcttgactagtcggcatgtgcgtatgggacgaattgatactcgcaatgtcctagtactgagtgcgttgcacatggctctttcactgaagttgtactttcacgtaacgaagtgatttaaactataggcgtttgtagcacattgttgcctatacatcgaataacatattcctgagaaggagcacggatttacccagccataaatctcgggagctcagagcgtagtgcccgcttcatgctaagtgcgcgatagattcgtttgcccaggcttcgagggggataaccgtgtggaataggaatatctttatccttactgggtaagttgacttgctggctaagtatttaggactggccagggtatagccgcatttgtgaggccccgagcatggcccatttgaagggccctggtcttctatactagttggcgcccaaacctacatactgctggtcaatacctgggagggaccaatgaagcgtcccagcggtggtaatatgtcggcctaagaaatctgtggggacaaccccatgtgaaagaaagcctcacccttttactaataccgatcctatgcaccgaaattctgatgcccaatccataatcggtcgttggggacctcatgtgcatgtgcgagaccaaactatgaaatattccgccatgaagccgcacagtgtttgtagccagcggtccaaataccgtcggttgagaaacgggagagtatacaagcctttgacccacacgggctcaaaatttccaggacatcgatgtaattccattgcctgaacataccaaggctcttcgcaacagggaaacccacctcgtgaagccaaggaaaccactattgatgtccgaatgcatggacacataagtggacaatatattagcgatagaaagttatgtcgcatagtgttcacccgcgtgtttatatggca

SEQ ID NO: 685349 - DNA, 118 bp, Homo sapiens
catggatttgctggtgcagtacaactaggcttaatagggacatgagaattctaataaaattcaatagatagctaaatcaagaggtaagtaggaagagattaagaaggccaaattagaa

SEQ ID NO: 685350 - DNA, 116 bp, Homo sapiens
catggatttgctggtgcagtacaactaggcttaatagggacatgagaacgaaagagttgtgtttaaatcacaaaaagagctgaaattcagggaaagatggaagatcttccagaaca

SEQ ID NO: 685351 - DNA, 731 bp, Homo sapiens
ctagttggcagacgggcccctggaacgcaccatcccaccagccccggcttgcttgtctggcctcacgtgtctcagattttctaagaaccaaaaaaaaaaaaaaaaaaaaaaaaaaaaaaaaaaaaaaaaaggggggcccctaaaatttccccggggggccccatgtacccatttttttaaaagggggccccttggactttatgccctgaggaacggggcgccgctgtttcaaacaacgtctccgtctcgggaacaaccttgctcaactgtggggaaatcttggggaaaagaaaccctatattggtgggggtgggaacactaattggggaccaaccttacccctgaacgagtttttaaagcctcttcttgaagataaatatttttacacacttccaagcgtgttataatcgttgttaaaccccaccggcgcattattgccttggcggcctgggaaaaatttctggcctacgcgagatttttgctttttactgaacaacattttttaaccccgagaggacttgcttgtaaataagagctcggtaagttcctcacaactgcattcaatcagctctgcagcatcctgcctcacactgacccataattagctactactcactactatcgatacaagcataacgctgatctgaatacgcttgtctgactctctcattcatcctccaacagcttcatatcctagtgtgattgatagcgcttcaccggatacctctcaa

SEQ ID NO: 685352 - DNA, 1073 bp, Homo sapiens
ctaattcgtgggcacatgttatccttattgtatttatcctcgtgccatggttgtcccattttccaagcgcccctgtacttgtccttggtggggtctcgattttttctagaatcctcgggacggttcactttttttcttgaacaaggcacaatcgatatgcacgggatggaaaaggataaagcacactttgcatttgagaaaattgagctgtgcaaataacttgcaatggttcaggaataaaccgtgtaaagatttttgtgaaaaatgggctttctaggtgtatgctgcatttaaatcctagtgctactataaaatgtagctattgaacttgtacatgtgagctctcttttcttgtatacgactttgttgcccggtcagctttaaactaccttagaacacattgagtcttactcttgtctgtaagtccactgtgtaaaataccttaattcaacttgttcacgtgtaaaatagtacaattacgtcactgcgttagcgatacataacattagtaacgcaaccttgattactacttttcacttctctctactatagtacttcagttttccgtaccctactagttacacaacagaaaggtaatagcacaaagactcttaagctaaattttggccagtcctaggtctttaaattgcaatagttcctggtagttacttctacaatgccagaagtttttttcgagtaattcgtagctcttgcaataaaattagtgaacgttcttcttagctgtaattggtgaccaatgtcaccataatgaatcgactatctgagacaagtgttaacagatacacgctacggatctctcgtgacgcactgctgactcgcaaggaccttaagactagttcagtataccatgtagtcgtttttttcattgctgctgactaactataacgcatcgatcttgcttaatgcatttttgatgggaagaaaaggtacatgtttacaagaggtcttaagaaaagaataaaaattgacttcttgcttgtacatataggagcaatactattatattatgtagtccgataacactacttaataactacggggtctcttggttg

SEQ ID NO: 685353 - DNA, 354 bp, Homo sapiens
  misc_feature (166)..(166): n is a, c, g, or t
  misc_feature (168)..(168): n is a, c, g, or t
  misc_feature (237)..(237): n is a, c, g, or t
  misc_feature (243)..(243): n is a, c, g, or t
cttaagggaaataaggggagttccccagtaggaagctaaagatgagcgaagtatgaaactcttaaaactcgagaactggttgaatttgccacctgacgtgatagccacactgtgtatggacaacatgatccagatggcttactcttcacagaggaggctccatctnanccaaaacaaatcatcggagcatacagagtgactcagaggcaaagggtgctgttgtcacaagcactgtgngtggcntgcaggtctctgctgcacttcgccatttttctataggtttggtctaccctagggtaaactccacactctctgacagtgagagacgagacacggagcatcccttgttattca

SEQ ID NO: 685354 - DNA, 108 bp, Homo sapiens
catggatttgctggtgcagtacaactaggcttaatagggacatgagaaagctatggtgaaaagtataaacatcagaaaatgtcatatctaggtatttacagcaaaaaa

SEQ ID NO: 685355 - DNA, 157 bp, Homo sapiens
gcccccggagccaagttactcacgggagcggagagaaaccatggagggaaaagggggctggaggcagcgctggctcactaaccgcgccctcgcgcgtgcctgcactgcgcttaaaccggcgaccggcgcggcagctgctcggctccactgcggcccc

SEQ ID NO: 685356 - DNA, 362 bp, Homo sapiens
catggatttgctggtgcagtacaactaggcttaatagggacatgagaaaacttcagttaaaagggtacctcctgaaaaataaaaaagaaaataaaaataatcaaaaccaagttttagaagacacagtcactaacgcggtatgtgtgtgtagaattcaagtgggaccaaaggtgaagctgttggctgagacggggctacccctgctgcagacactcctagtaacacttgctggagctgtaagccagtggcagatgctatcatccccactgtctccagagagggaaataggggggaaggcctgccacacccaaaggggcagacccaaggggtcgattttgtcctgtgtggccacaaccagctgg

SEQ ID NO: 685357 - DNA, 1118 bp, Homo sapiens
  misc_feature (717)..(717): n is a, c, g, or t
ctgtaatatttttgtaaaaaaaaaaaaaaaaaggaaaaaaaaagaccagctaaaattttcgacttgactttattaacttaactcatgaattaattaaagcaaatgaaaagatttaaacagctgctgacttttccctcggagcatatttgtacgcttttaggaaaggctgatgatggctataaagttggctcattaagaaaaaaagaccaagcgctagatttccgacagcagagcttgctattgcgacaataacaagtgatcaccgtgttcgtttatgtgactctcccactgaaccttgcagacattatttttataccacattgctaaggaagcccactcatctaactctgtagcccgtggaaacccttctttggcccctgatatgttgttcccaggttataggatctgggtccattagtgggattttggacagcaagtgcctctgatgagttttagccaacattccccgttgcatcctgctcattggttcacactcctctgacttgaggaaagctgccttcaccttgatcttgtaacctggtcttccttgcatataacggtagcacattccagatcacttcggtgagaaaagacctctgtttccgacgaggcaaactttcttacaattggtccacaatcaacactttaaaaaacttaaaaactctattccaacacttgacaaaccttaaaattcatggcatacctttttgtgcgccnctgaagtttggaaaagccttgacctaaaatgccttaacctctcaccacaccactacgcttattgtgggtataccccagtttttttattagaccttgtcaacgatgccatttataccgcgtattaacatgagaacaacttttctcaaaattggggtgggaacgatctgtcccgttacgagttgtttacaagcttccttaaagtgttgctcacgcctaatatgatcaatctctatgtgggcgtaaaagtaccagactatggggaaacatataatgatatagcagaacacttcacaagatgggagtagagaatatacagggatgacagtcatatcttcgcgtgttgtacactctccgtttcctatcttctcatcccctcctacatgggaaggggagggagggtc

SEQ ID NO: 685358 - DNA, 147 bp, Homo sapiens
atcgaacccgcagagctatatcatacacgaacgcctgagccctatctattacactcatcgctacctccctggacaagcgcctatagcgacacgaataagttcattctcaccctaacaggtcaacctctgcttccccaccacatacta

SEQ ID NO: 685359 - DNA, 1358 bp, Homo sapiens
  misc_feature (318)..(318): n is a, c, g, or t
  misc_feature (462)..(462): n is a, c, g, or t
gattccggatctccgtgtggtctcagactgccgtgcctacattcgatattgtaccatgtacactcgggggtgacccaggaaggaccaggtcaacacccgtcagatgacacgaatctttcgccttgcttctactagaccaagggttcccggtctcgctagagacgcgactcgacgataacttaccattgtctaggacgcatgcgacttgtcgcgaagcgctgcacttggcacggtcaccagcaaagacagcgcctcaggatatggcttgggcttcccttggtgacgagagctagcctgcaactacatctctgactgcgngcgaaacgtggaggaacagctttcgtggggcgtcgctaggcggaggtagacggcgtagagaaggtcgtagtgcaagggcagtggatgccttgtagtggtaaaacaactcggcgaggggcgacctgggctagcgtacgcgtaccnttctcggcaggacctccataggtcattgaccgaggattggcacaatcgaaatctcagaacggagcggtcaagccattgacccgacttgtgagagacaacggccgacgtttgtgatgttccctctgggacactcccattggcaatagagaatgggtccgacgactgggaccccggacctgtgagggagctttaacacaccagagggcggctctgagaacagtctgggggacgtgtatcttgcgcgcgttgggtacaacgggctggaaaaggtaccgacttgcttggaaatccaataccatatccgtcggtcctaggttgcactattccactttacttatttggaaattggaagcgaaggaaaattctccagggacgaaagccctcgaactacgctgtctccataggacctccttaccagtgaaatttacccagttccatcgactgcgctgtggtgtaaggtcccaggtcgaggatcccataaacaaagggccggaattgcgccctgtccggagcgagttggggactgagggcggcactccaaaatttgcttttgaacaggggcacctctgtcgtcggcaaacaaggttgtccacattgggaacttacatttggacctaaattcacgggggaggcggcgccaggtgcggttccttagaatataggcaatcgaaggattaggaccccacaatggctaaacagggagagacacttcgaataaagatcaataaggacaggggggacaggtgcaatgaaccagtgtgcaagttccccactggtgaccaccggtttgtcgacccaatgcccatgcaagcggaaggtgacattggtaccacccatatagaggacgggtggtacttacacatacccaagagacatggtggtacaagacacttcct

SEQ ID NO: 685360 - DNA, 770 bp, Homo sapiens
  misc_feature (2)..(2): n is a, c, g, or t
  misc_feature (71)..(71): n is a, c, g, or t
  misc_feature (74)..(74): n is a, c, g, or t
  misc_feature (100)..(100): n is a, c, g, or t
  misc_feature (160)..(160): n is a, c, g, or t
  misc_feature (162)..(162): n is a, c, g, or t
  misc_feature (172)..(172): n is a, c, g, or t
  misc_feature (178)..(178): n is a, c, g, or t
  misc_feature (185)..(185): n is a, c, g, or t
  misc_feature (211)..(211): n is a, c, g, or t
  misc_feature (229)..(229): n is a, c, g, or t
  misc_feature (236)..(236): n is a, c, g, or t
  misc_feature (254)..(254): n is a, c, g, or t
  misc_feature (260)..(260): n is a, c, g, or t
  misc_feature (268)..(268): n is a, c, g, or t
  misc_feature (292)..(292): n is a, c, g, or t
  misc_feature (362)..(362): n is a, c, g, or t
  misc_feature (371)..(371): n is a, c, g, or t
  misc_feature (375)..(375): n is a, c, g, or t
  misc_feature (381)..(381): n is a, c, g, or t
  misc_feature (395)..(395): n is a, c, g, or t
  misc_feature (422)..(422): n is a, c, g, or t
  misc_feature (427)..(427): n is a, c, g, or t
  misc_feature (446)..(446): n is a, c, g, or t
  misc_feature (561)..(561): n is a, c, g, or t
  misc_feature (620)..(620): n is a, c, g, or t
  misc_feature (638)..(638): n is a, c, g, or t
  misc_feature (695)..(695): n is a, c, g, or t
  misc_feature (698)..(698): n is a, c, g, or t
  misc_feature (701)..(701): n is a, c, g, or t
  misc_feature (747)..(747): n is a, c, g, or t
tnttcatcttccaatggcggcctcatccttgaggcgtatcctctggcgagagatgcctttctcacgcgccnccncgctccctgactgggctaagatagtncagattgatcttaggtcaatggtaagacctatgttgttcatgaagtcttggcttttcggngntgggtcgccnaaagcngagtggngagggatagagtggtggctcccagantcccggagaacataagcngtgagancgagccctggcgcatacncttgtntccatggnaaccatcagcacaaacacactgcnaaagacctggaccatcaggtacacaagatccattctcaggacacatttctgggtccccagtgttattgcnaaggttctnttgnccttgngagagttggttgtntatgtgagaggtgatagtgttccaggnattgnttcctccggggcagtgganatgttgtggcagtgtcagagtgtggggctgggtgaagccacggaaggtgttggccaagtcacctttgggggggtttgcttgcgggtctatgatggcagtggtatgtgcctggtgngagtgtggaccagggtgctccagagaacagtgctggagatccagctccaagatggtgcncttctgattcaggcagcnacgggcatgcagcattagctctcgtgtcgttttacaataaaaggccactcttgacanatnttngcacgctccctggacattgggtgcatatctcgggttagcgccaganccctttccacgcccagagcgagg

SEQ ID NO: 685361 - DNA, 748 bp, Homo sapiens
gcaatgaccctaggagacgcctatgagtatgggtggacgtgagagacttctgacctgaagagcatcatttgtcaccacctccaacaaccacatcgaggtgcgggctgagaagctggcggttgacggcagctgtggcgatgaacacgcttcgctcacaagtgccatgctgccggaggacgtggagcccgacgtcggtgaccctcggtctctgcggggaggactggcaggctcacatatactccggggcacgtggtcgacccgcatacagaacacgtcccagctagactcttccggacggagatcaaaatctagagtgcctctcgccttcccgttgtcccgtgtccccccgccaccaggccttgccagccaaagcctcgctaatcgcattacaacagctccaggacgatctcagcccaggttctagcccccacgcatccgcgagagccctaggtggaccgatcctccccaaactaggggcctcctactcatatccaggcaggccaggactccctggcctgacacatgatgcccagatatcacgattatgggctccggcagcttaatgccagagtacaggggctggggtcagggaaggaagcatctagagaaccactgtggggcagggaaatgggagcagcgaggacgtatgcggcaagctactgaggacagacagacgagacagacccctctgatctatgaaagtctctcgagcgccattgggaccagggactggaaccgccttggccaa

SEQ ID NO: 685362 - DNA, 269 bp, Homo sapiens
aacaggcttttattaaaaaacagaaacgaaactttagacagatatgacaaatcgcagcggaggacacgaggtcatttcagtatgagatcggatatttcgtaaaactagtgcacgtgtgctaatatcatcactctagttgtgcgcatagtcgcgtgagcaccgggggtactatgctctaaactgagcttcaaatctcagcttatgatcctgtcgggacagtgtcaattcatgcacattgcgagcgagtcattctccttcaatctaatata

SEQ ID NO: 685363 - DNA, 206 bp, Homo sapiens
  misc_feature (123)..(123): n is a, c, g, or t
gggtagggctgtgtggcgcaaaaaatccctgggtttcccccgggggatttatccgaatggcgttcgaaaaagcatttgggggggttcaggcaagtgctcaatggcctatagccaacacaaggntagagattagcggctgagaaggggaagggaggagagaggagaagagaacggaagagacgcgagaaggaggatcaaaggagggc

SEQ ID NO: 685364 - DNA, 254 bp, Homo sapiens
cagatgtggctccacagttgcccataagcgatctgagtataatcatttgctggaatttcgccagatatatatactccttgctagtctaatgagttaaatctaagatggtggctgtgaccctacgagcagcttgacgtgcgtgtgtgatgctcttgtccagcctttatggccagacagcccatttgcagcttgcagtgaaacactgaaaaaacaaagcaggccaggcgcggaggctcacgcctgtgatcccagca

SEQ ID NO: 685365 - DNA, 1310 bp, Homo sapiens
  misc_feature (238)..(238): n is a, c, g, or t
  misc_feature (276)..(276): n is a, c, g, or t
  misc_feature (507)..(507): n is a, c, g, or t
  misc_feature (642)..(642): n is a, c, g, or t
  misc_feature (818)..(818): n is a, c, g, or t
  misc_feature (982)..(982): n is a, c, g, or t
tatcattcgagatataaagttctggacggagttgcggctggtccactgccatgatggtccgctagactattgggtaacgttgattgggtctgagatcgatggctggcgtgaagaatggttgtacacagctgctcggttcctatagctatagacacagtgcacaaatacatttacacgcggcgactagtggctcgtgttcgctgcagctcatggaagctcgcctacgtatagcatacgngggaaggcctgcaagctatgtgagtaatcgctctgaanccccacgagatgagcatgaaggatggtgagatgaggtccattgattctgacagccagcttgacatcatccacaccatgtagggacaatgagttgagaacatcgcgatctctttacccatatcacataccggagttgattttcttgcaggaaaaagtcccccttgtttgcgcgtatcagttcttatgtcctttatgaatgtgatgtctgataactgtaacgcacaaagcctntaaggagtcgggtctctatacatgacactgtagacgagccaacatataaggggcctcaaccagtgagagttttacacccctctgtctgagcttcctcatatgaaatacataatacaaatagaggctatatatacngagccctaagcgtatgtcacatatgactaccggtgtaaaattactgcagataggtaagaaaaacgacaaaagtgctaagacgtgcaccccaaattacaccactatatttgagatgcgtctggttgcgaagggcggaattttaaaatctatacaccctatatgattagatatgccanggggaggcgaagcgcttacagaccgcggtaggggagaagagaaaatccctcaatcagggaacgggcggagcagcgcaaaaagcattgtatcgcatgtaggtataacgcaccaagcctttttgtgggctcctcgtgggcagaatagaaggggggagacctcaacncaaattacggaggggagaggcccccagagaatgaaaccttaggggagttcactggtttggggggcccgcctcgcgggagcccttgggcccgattgtggtctttaggccccacccgtgtggtctgcttgtcccctgttgggggggagttcatcccgtggggacaccaccctggtggggggggacagccgtggtcgggaaagcgggaggggtgggtccgctgtgcccatttccttcggccagggcgtgtggctgacacggcgtaaaacgtgtttcgcgccccgtaggggcgtattcccccgtttggtggtctcacgcacttttttgtaca

SEQ ID NO: 685366 - DNA, 177 bp, Homo sapiens
gcatctcttatcatatcttctgctcatccaataagcatgctgttgccctactgtgatagattttccaaacaaaaataccgtgagacagcatatttagtaaaatatgccttcagtggcattcaacaaagtggagtttcccctagcacagttctgtaagactgtgcgtgtgagacgtgt

SEQ ID NO: 685367 - DNA, 368 bp, Homo sapiens
  misc_feature (271)..(271): n is a, c, g, or t
  misc_feature (325)..(325): n is a, c, g, or t
  misc_feature (328)..(328): n is a, c, g, or t
  misc_feature (331)..(332): n is a, c, g, or t
  misc_feature (343)..(343): n is a, c, g, or t
  misc_feature (348)..(348): n is a, c, g, or t
acacatattacaagagcaggctactaggaactaactgaattcacaaagaaacagtgtttcagttcgttaaaacgttgctctatcttgaataacaagcttattacatgcgaatcctattgggaacctattcaattcaccatgatacgtggattctgttccttaaaatgttgctcgatattgaaaagcaaactcatacaagcatgtcccattgggaactcattgaattcgcctagaaattttgattccattcgtgaaaatttttctatatccngaacagtccacttattactactgcggcctattgggaactaaccgaattcaccanttnctnnattcggctcancaaanttttataaatctttaaaggt

SEQ ID NO: 685368 - DNA, 397 bp, Homo sapiens
ctctggatgcaaagtgtcagatcaagatttggtaacttctgtggcctctctccttggctgcagatggctgccttcttcctgggtcttcacatggcctttctctgtgtacatataaccttggtgtttcttttatgtgtgtcctaataacactttataataaggacaccaaccacgcagattagattagggaccaccctaatgacctcgttttaacttaatcacctctttaaagaggctgtctatctccaaatacagtacagttctgtggtcctggggggttagggcttcaacatataaattgtgtaagaggtggcacaactcagcccacaacatcttgtcaccttgctcccttcatgccttgctgcctccctttttggtttctttggtgtcttgtttt

SEQ ID NO: 685369 - DNA, 416 bp, Homo sapiens
cacgaaagtaccccaagtgtgaactccaactcttgtggagggctcaagaaacctatgaaaagtgggcagcaaatgtgtgtgaacattctgaagcaaaaagaatgcgcctgtgcagaagacatatctatatcgcggtcctgaaccacgtatgtgtggtgcatgagcgccagtaagtgaaagagtcaccaaatgctgcgacagaatccttggtgaacaggcgacacatgcttttcaactctggaagtcgatgaaacatacggtcccaaagagattaatgcgtgaaacattcacctttcatgcagatatatgcacactctttgagaaggagagacacaatcaagaaacaaactggacttggtgagcttgtgaaacacaagcccaaggcgacctgcggctgaccatgagaccccgtttgg

SEQ ID NO: 685370 - DNA, 371 bp, Homo sapiens
  misc_feature (21)..(21): n is a, c, g, or t
  misc_feature (35)..(35): n is a, c, g, or t
  misc_feature (48)..(49): n is a, c, g, or t
ccagccaagtcccatcattgnctatacaaatgaantatagttaggggnngaaaagcagatgcatgggttagctgaggtttcatggggccacagggcacaatggttcattcaataattaaactaattttccccacattcaattaacaaaacaatacatggttataacatattacataccaaagttgaacagtagtcaagtaaaacatgataggattttcatagatcaaaggatccaccagtgaattacagcaaaatattctaatttccctagctgatacaaactctggcttggtcaatgagtccattatctttattttttgcagagttgtaacagagtagtgtagtaaagaaggaattaagcccagcctgag

SEQ ID NO: 685371 - DNA, 250 bp, Homo sapiens
ccccgctcagccccgcaagacgccacggttcccgtcccaccccgttgatcatcgacacggaatcgtgctgccgatggtttggatcgcaatgcgcccccttatctagagccttccccggtcatctacaggcaggatgcgcgctgggaaaaagacaactggaatttctcgaaagttgatggtccgcacggttgaggattctacgtggattctcttgggttccccctggtgtgtgttgtgtctggacgcgagg

SEQ ID NO: 685372 - DNA, 140 bp, Homo sapiens
acgtagtgcacaaaatctcaaataagtcttttatctccagtaattattactctgcttaaggcacaggacttgcaactccaggccaagcccgagtgttgtaagtacctaacactggacagggtacgactatggaagttcta

SEQ ID NO: 685373 - DNA, 239 bp, Homo sapiens
ctgtgcacctccagcaggtcgtagagggtgcggggctgggagctgaacagatgcatcagcggcgaatgcgccgccggggccgacagttgcgccacctgggagccgcggccctgtcgagtgtcgaagatgccccgcgcccgcagcagtttcaggccctcgcgcagggccgtgcgcgaaaccccgagcttggccgtcaggcgccgttccgagggcagcaactggtcggtcttgaatacccc

SEQ ID NO: 685374 - DNA, 394 bp, Homo sapiens
ctgcatcatggaaatggtctagcacctattcatgtcacttgagcatgattcttccaccacgcctctgccagagaagcatctgtattcccacaggtaaacgatcacctttagcgtcttaagtgtcaaatacgcaattctacgtgactggcaccagcaagtttcagcacgtgctcttaacgcgcagtgatgtataaaccctgcccagcgagctgtcagcacataccttcgcagagacttgcgcttctcaactccataacagaaactgtattgatactgcctaatgaaacaatagaactgtctctatacgtttttaacaatctcctagtgctgtgagcaaagccagatgcacatgatgtgtgcgagttggtagctcacaaatggtagtccattacac

SEQ ID NO: 685375 - DNA, 1011 bp, Homo sapiens
  misc_feature (455)..(455): n is a, c, g, or t
  misc_feature (1011)..(1011): n is a, c, g, or t
agcggaggcagcgcggcagcccaagggccccggcgccaggggcggcggggaaccccaaacgcaaccgggtctggagggatccccgcgccgagccagcctgccgtcacctgcctccgctgcctgcccctgcgaggcttgtgcatggcgccctggcgcgcccgcacgtgcgccctggctcgccggcttccctgcggtcccacccgtgagctcgccggcccgtcgcccgcttctgccattgcaaccagcctgtccggccttcgcggcgctgtaggcagcctcgccggtcagggcctatgccttgccccttgcttcggcccggctgcttcctttggcccgcctgctctttgcctctgctttgcctggcctcgttccagcgtgcttgtgtgcccgccgggacgtgctgccccggtggctcattccctacgcggggttggccccttcgcaagttggccgtntcagggttcgaagctgcccggttccagttccggtcggggaaacagtgaggcgcctagtttcggtctcccccggtctgtggccttttgccttcgggcccttcggtgtccgtgttactccccctgggtggcctcctcgcctcggtaagttcggtccccgggtggccccccggcagctgtacggggccctgtcgcctggggcctgctgcctcgtgcctgggctcctgccccttgtttgcgccaatgctcctgtttcagggcgctgctgtgccctatggctctgtgtcctcgggtatttggctcttgggagtgcgctctttttccggctccgtttggcgcactatcccggggttttggctcgtctactttttgtgtggcgtgctgcccctggggtgtccccctgcggtccgtgctgtggacgcgcctatttttttcccctcgatatggcgtttttgcgcccggagtaatcgccccgtttttaaccctgttgggcctctttcccagttgatgccaggttgccgcagaatgtgctccagcacacctgacggacgtgggtcan

SEQ ID NO: 685376 - DNA, 165 bp, Homo sapiens
ctctcgaggattacaggccgtagtcagtgcagtagcagggtagtgccatccccagcttcttcataagtgtaataggcaacatctatgaacaagtttagctccaatgtacttgtatatatctaatcaagtcaatagacttatgcaacagtcacaccatctaaatgt

SEQ ID NO: 685377 - DNA, 301 bp, Homo sapiens
  misc_feature (11)..(11): n is a, c, g, or t
  misc_feature (83)..(83): n is a, c, g, or t
  misc_feature (94)..(94): n is a, c, g, or t
  misc_feature (217)..(217): n is a, c, g, or t
tggaggaagtngtatcccctccatgtgttagtccagaagtgaatgaattattgatggaagcccagttgttccaggtatccttncttgaaattcnggaactttaccagactttacttgcaaagccaagccttgttcagcagattgaccgaagttcaccagtgagacccagcagtgagaagaatgactgttgccgagggaagcgagatggaattaacantcttgagagaaaactgaagagacgcctggaaagagaggcttctccagtgagcggtgggaacgagttaagaaaatgcggaccccc

SEQ ID NO: 685378 - DNA, 368 bp, Homo sapiens
aagtcaggacgagaccatcctggctaacacggtgaaacctgtctctactaaaaatacaaaaaaaaattagctaggcgtagtggttggcacctatagtcccagctactcggaaggctgaagcaggagaatggtatgaatccaggaggtggagcttgcagtgagccgagaccgtgccactgcactccagcctgggcaacacagcgagactccgtctcgaggaaaaaaaaagaaaagacgcgtgcctgcggtgaggaagctgggcgctgttttcgagttcaggtgaattagcctcaatcccccgtgttcacttggctcccatagccctcttgatggatcacgtaaactgaaaggcagcgggagcagcaaag

SEQ ID NO: 685379 - DNA, 102 bp, Homo sapiens
cgctatcatcggcacctcgctattcatcggcaccattagctctagaggtccatgcatacttatattatactataattcaatacgggtgccgataaatagcga

SEQ ID NO: 685380 - DNA, 609 bp, Homo sapiens
  misc_feature (142)..(142): n is a, c, g, or t
  misc_feature (210)..(210): n is a, c, g, or t
  misc_feature (346)..(346): n is a, c, g, or t
  misc_feature (543)..(543): n is a, c, g, or t
agaggatcccaggtctttccctcaagctgattctgtctctatttcttctctcctgatttatgtatcctggtttctgatcattccctaaatggtaaaactggtatctgaaaaattagaacataaataaaataaagttaagtcncaaatttatcttactctgtttatgtgtgaaaagatttgaagaaagctaaaacttagaaaataaactanattcaacttcccaagtattccttctcccaattctgtttgaataataatagctaacatgaattgaacgtgtgttataatcccaacgattattctaaatgattttacatatactaacttgtctaattcttacaagtcnatgagcaagacagcatttattattcccattttgtatatgaggaaactgagtcacataggagtaaactggtctaagttaaaaactgccaaactggcaaagttaggattcacatctaagtaatctggatctgagtctccattcttgcgtacacccatagacctacatatacgacaaaactctctagccatagtcttcantgagaaaccaaaattactgaacacaggtttatatacctttaccatacgtagctacatgacatatat

SEQ ID NO: 685381 - DNA, 183 bp, Homo sapiens
ccccccccccccaaaccctcccttaaggggggaaattggaaaaagcccccctttgtttttttcaaaaaagggggggggggggttttttcccttttttttttttaaaaaaaatccccaccgtttttttttttaatttaaaaaaaaattttggtaaccccccggttttttttccccgggggggga

SEQ ID NO: 685382 - DNA, 436 bp, Homo sapiens
ccgctacggacgcctaataagtggttactttaacctctccacccttatcacaacacaataacacctatgattactcctgccatcatgaccgtgggccattatatgatttatgtgcacactagcagagaccaaccgaaccggtttcgagcttgaataaggggagtccgaactagactcaggcttcaacatagaatacgccgcatgccccttctccctattcttcatagccgagtacacaaacattattctggtgtgcaccctgagcgatacaatcttcctaggaacaacatatgacgcactttgccctgaacattacacaacatattttgccaccaagacccatacttctaacctccctgctcttatgaatacgaacagaataccccctattccgttacgaccaactcatccaccttcctatgaaaaaactttctac

SEQ ID NO: 685383 - DNA, 506 bp, Homo sapiens
tctattaataaatggatcctactctctacaaacacttattacaaccccaggaacacatatgattacttctgccagcctgacccatagccataatatgatttatctcaaccctagcagaaacaaaccgggcccccttcgacctgacagaaggagaatcagaattagtatcagggtttaacgtagaatacgcagccggcccattcgcgttattctttatagcagagtacactaacattattctaataaacgccctaacaactattatcttcctaggacccctatactatatcaatttaccagaactctactcaactaacttcataatagaagctctactactatcatcaacattcctatggatccgagcatcttatccacgcttccgttacgatcaacttatacatcttctatgaaaaaactttctacccctaacactagcattatgtatgtgacatatttctttaccaatttttacagcgggagtaccaccatacatataaaaaaaa

SEQ ID NO: 685384 - DNA, 172 bp, Homo sapiens
cgactctgaggatcccgaattcggctctcttgggggtctggctgacagactggcggtctcactccatgagttttcttccattcgtgtccggccggcgcggggagcccgcttcatcgcagtgggctacgtggacgacacgcagttcgtgcggttcgacagcgacgccgcgagc

SEQ ID NO: 685385 - DNA, 353 bp, Homo sapiens
  misc_feature (243)..(243): n is a, c, g, or t
tagccagtgtgctggagcagaaaaagagtctttaacattcctagcaaacctccttggagcaagtgttcaagaatactttgttcgcaaatccaatgcaaagaaaggcatgtttgccagtactcatcttatactgaaagaacgtggtggctcctaaatatgaagcctgcaaagaagtggaatttacctgccgttactatagcttggctgttggagactgcctagaacggggaaagagagcagacngaaaggccattttctgattgaaaattcaactaaagaagaaccgaagtttgggaaaccagaaataaccaaatggaatcaatctaaattcagatactgcagagcatccctgg

SEQ ID NO: 685386 - DNA, 379 bp, Homo sapiens
ggaggcccaaggtggggtactcggagccgaaagactgatgccgactcccctcccccaggggagttggccctgcttggtcttgtatctcctcggttgctctgactcttcccgtttgtttgtgaagataaaagctggaatccttttttaagtgtcctgagaaatggagcacctccacaaagttcagttcatgtccgattggagatttatttctatatgtacagtttgtcagagaaaaaaaaaatcttatccacgcttccgttacgatcaacttatacatcttctatgaaaaaactttctacccctaacactagcattatgtatgtgacatatttctttaccaatttttacagcgggagtaccaccatacatataaaaaaaa

SEQ ID NO: 685387 - DNA, 120 bp, Homo sapiens
aggcaattgctttgccgagggcatcccggagctgccagctgtggtccctcgggagcccaggaggctgtcggccccgctgacaggcggctgtgtggctggagacgccgccgtactgtggct

SEQ ID NO: 685388 - DNA, 379 bp, Homo sapiens
cccttttttttttgggggggggggcaaggtgtccccctcccacaacaccgcatgggcccctttttttgtggggggacgcagactacaggcggagacagacctgcagctccctggttctctgtggggccacctcacctaaataacccaggtgggtcccggctctttggtagatggggagggccattcctgactgggtataaaggataattatgaaaagcagttctggctggtgggccttccagatcctctccggggctgtgttacgagccagcaggtagcctgctggttttatctgagtgaaatactgtccaggggaaaaaaagagatcttattttttttcttatacttggcgttttttgaataaaaaccttttgtctta

SEQ ID NO: 685389 - DNA, 500 bp, Homo sapiens
acttacgtacacttacattgcgctgttgccgtttgaaactcggtttcgtcccgctgtgcccatgtgagacgcatgcgtggtccgcactgtgtgccttcccccgggggggctgcagctgccggactggacggagtgtgagctctccggctacggcaagcatgaggccttgtctcctttttattcggagcggctgaaggaggctcatgtcagactgtactcatccagccgttgcacatcacaacatttacttaacagaacagtcaccgagaacatgctgtgtgctggagacactcggagcggtgggccccagggcaaatttgcacgacgcctgccaggggggattcgggaggccccctggtgtgtctgaacgatggccgcatgactttggtgggcatcatcagctggggcctgggctgtggacagaaggattcccgggtgtgtaccccaaggttaccaattacctagactggattcgtgacaacatgcgaccgtgaccagga

SEQ ID NO: 685390 - DNA, 111 bp, Homo sapiens
gtgatgggtggtgggacaagttttgtcataggaggtgtgtgagtgggtcgtagcggaatcgggggtatgctgtgtcgacattcatgagtaacagagcaggttagacagtag

SEQ ID NO: 685391 - DNA, 141 bp, Homo sapiens
catcctattctttctttctttctttctttctttctttcttcctttctttcttctttcttctttcttcctttctttctctctcttctttcccctccctccttccctcctttctccctttgtatctctccttcctctcctctc

SEQ ID NO: 685392 - DNA, 185 bp, Homo sapiens
gatctgcggtgcccgggagtagtctcttccctcggcagcggaaatactgattccgactgctcctgcctctagggtgcagtgccgtacctgctggagcctgggcctccttccccagccagcattgagaaacttgggaagaagagagaacctcaagctcccaaacagcacgttgcggttgaagaatg

SEQ ID NO: 685393 - DNA, 377 bp, Homo sapiens
  misc_feature (38)..(38): n is a, c, g, or t
  misc_feature (97)..(97): n is a, c, g, or t
  misc_feature (251)..(251): n is a, c, g, or t
  misc_feature (294)..(294): n is a, c, g, or t
ctgtcggccaggctggagtgcaatggtgccatcttggntcaccgcaacctccgcctcccgggttcaagcgattctcctgcctcagcttcctgagggnctggtattacaggcatgtgccaccacacctggctaattttgtattttgagtagggacggggtttctacatgttggtcaggcaggtcttgaacccccgacctcaggtgatctgcctgcctaggcctcccaatgtttcttcattttttaacctttnctatgagactttcaccctctccactccattggcacagctcttntcaaggtcaccaatgactttgactttcctaaatgcaatagtggattccccagtcctcatcttacttgctccatcagcagcact

SEQ ID NO: 685394 - DNA, 1165 bp, Homo sapiens
agcgggagttaggccacgataccgacaaatatactgcatgccaaaatgtcgaggtggcatgagtgatcagacgagaagggaaacgtggcaaatggtccaaggggaagcatcactcttgcacgcttcgctatggtacaagaaccgatctctccgatgatgtgtccacgtctacgattccgacaaagttgagttgccggtataggcgacctgcggagcttgtgtggtgaacattgcggtagtgcaagacccgaaagacgacgtcctatgtaagtaacgaattccggctgggaattccacttgaccctcttgttggaactaatgacgatacagaatcaatcccacgagaatataaggtggaacatagcgaactatcatgcatccagctcaaatgatgagatgcatctgcggtagaataacgtgcaagagaccatatactctgtggattctattacaacaataccttaggcaggactcgagttgtatatatacaccttgaagggacaatctccgtccaattatgtacacaccgtgttgacaatacaacatgacctgtctccatattggagtcaccccattaagagtcccgtgtacaaaggtatgagcactttccaataataaggtttgtccccgcaggtgacctgtgtctactgggtacatttaaagccatgtgccaagtttgtgcctctacggccttgggtcgtcacgtgattgcctttttctgcccgagaaggcacgaacggccattgatctggaacctcctctacaaggatctagtatgaccccagggtcgacgtagggggacactctgccgacttggttcacttcgtcagaagtcgtattacacgggggataaacggctccaggctccacaaaggcccaacaatatgcggggctactgggacccccccgagaggaatatggcctattagcaccagtagtttgtttacctacgaaatatttgccacctgtgcatatgtcccggaatgggacaacccgacggttctgtaacctttgagtaagcaacaccaagggaaatttagggtcctaagaggtcgtctatatacaaaaatcgataacctcaccgtaatcaaaggtacacatgggcactctcccaaggggcgataaactgcctgtgtggcaatgagagactaaatccgagtgttag

SEQ ID NO: 685395 - DNA, 477 bp, Homo sapiens
actactgattgacatatgatcatcagttcagaccctcactgcatacagtgatggtctagaactgatatcctatcacccggattgagggggattttattttggagaaatatagggcccccccatttttgtccccccaaatttcggaatttcaggtggcaacagacacatcggctaccggtggagactatcagtgttcccccaggggtataagggggaactcatatccaacatcacaggcttaaaccagagtttgttgcccacaatcaaggttcccggcacaaaaatgagggataatatataaaagccgtttatataataaaataatatataaaaaatacataagaggagcaaaacgaaaacgcgagtcacataccaccattattttgtaaccataacccacacaaatataatcagtcaataaaaaaaaaacacaaatatatctcgccaatataatataaatacaacacaagcaaatca

SEQ ID NO: 685396 - DNA, 365 bp, Homo sapiens
  misc_feature (105)..(105): n is a, c, g, or t
  misc_feature (356)..(356): n is a, c, g, or t
ggatttagaagtttgagtgcaaggaaggtgtttcctgcccatgcctaaacctactgccccaagattaaaagaaaaaaagtggcgggccacgtgaggtggccttanaccctgtaatccccagcagtttgggaggcccaagacaggtggatcacgaggtcaggagatcgagaccatccctggctaacgtggtgaaaccccatctatactaaaaatacaaaaaattagctgggcgtggtgcgggcgcctgtagtcccagctactcgggaggctgaggcaggagaatggcgtgaacccgggaggtggagcttgcagtgagccgatatcacgccactgcactccaccctgggcgacagagncgagactct

SEQ ID NO: 685397 - DNA, 475 bp, Homo sapiens
gtggcccttccaataaataaagattattaccatggcggcatgagagttgctttatttatttatttatttattgaggactgagttcactcttgttgcccaggctggagtgcaatggcacgatatcggctcactgcaaacttcgcctcccgggttcaagcgattctcccgcctcagcctcccgggtagctgggattacaggcacatgacaccacgccctgttaattttgtatttttagtacagacggggtttctccatgttggtcaggctggtctcgaactcctgacctcaggtgatctacccagctcagcctcccaaagtgctgggattacaggcatgagctaccgtgcctggccaaatctgcttgatttaaagagaaaattagggcctttagtttaattagatcccatttgtcaattttgtcttttgttgccattgcttttggtgtcttggacatgaagtccttgcccatgccta

SEQ ID NO: 685398 - DNA, 575 bp, Homo sapiens
cgcggtggctcacgcctgtaatcccagcactttgggaggccgaggtgggcggatcatgaggtcaggagatcgagaccatcctggctaacacggtgaaaccccatctctactaaaaatacaaaaaattagctgggcgtggtggcaggtgcctgtagtcccagctactcgggaggctgaggcaggaggatggcgtgaacctgggaggcagagtttgcagtgagccgagatagcgccgctgcagtccggcctgggtgaaagagcgagactgtctcaaaaaaaaaaaaaggaaaagaaaaaaacaaggaattaggctttttccaaaaaggttttatttttataaaaaaacacagaataggtcacggtgtggtgcgctcaagcctgtaatcccagcaacttgggaagcgctagaggagggtgtatggtcagacgctcaggagctcaaaaccagcctaggcaacatggttgaaacccgcatctctccaaaaaatacaaatttggccaggccttggtggcgcacgcttgttagtcccagccatacagggcgcttaaggtggaggatccttgagcctgggagt

SEQ ID NO: 685399 - DNA, 1437 bp, Homo sapiens
ggtaagtgagtctggggtcttccccagttttctcagccaggcggcggtggcgactggcaatgtttgtgcctcaaaagaaactgcggtaatcgtgactcaacactcatactgtgcgggtgggcctggcttggtggtgccaggaatgccggctggctgccaaccactgccctgtgtgaatgtggcgaccttctttgtgcgtaccgtgacggacacgtgacggccatctgcgacctgtgcagagcagactagggagcgacggagcgatgtgccagggacagcaggagagaacttggcagagaaggcacgccggcgcgcaaaagcacaacacaggtaccaagcaccgtcacagcgcccaaggaactcccccctgggacgcggctcagcagctgggcacacgcgccgagcacaacttgggccagaaccagaagcgctcacaccggagagccatcttcaaaccgcggacggaacacacccacaggcggaatgcgattgggcattatcatacctataccgccgggcccccaacgcacgtccctgtcagtccgtacgcgacccgtagcattatgaccatcagtcaacttgcgaaaggcccaccaggtgcaccaggcgatggaacgaacccaaatcaaacttgcggctcgcaccgcctgcacacacgatggtggaatactcttcgggctcccggcgcgctatagccagaacacccccctcgcatagtctccttacattccaggcgcacactgcccagcacgcctcggtgacttgcgcctcccttcggccacggatcagtcgtcttgggcaccctaaacggagtacagcggagacgcaaaattcactctggacaccaatcacacaccccatccaaatagacataaccagcggcaacagtaggcgcatacaaccattaagccccgcgttcagcaaacgggacagctgcagccgtccccactccaacaccacagcgccacgacaagctgcaacgttgaacaggaaaggcactaggacacccgcggagaatagtctaccgccaattgcagacaaccactatcaatactgcacacatacagaggataacaacccattcatcagctacgcaatgcactactggaccaaagctccggggaactaccacaaggtacgaacaccaacgcagaatgactcccacactgtggtgtaccacagtgacctccatgagagtgacccaacaccccagagtgcacgtcggcacacgatgcctccctcatcggtcagcacacaccatctacgaagatgcgcggagctctgagcgaaatgtgtagctgtgtaacacatgccaacacacaccgacagacatgagactatctccacacaagagaacaagtgacaatatacggcaagacacacggtggacgcacactcgacacagaaccgacacagaacaccaatgctcgacaacac

SEQ ID NO: 685400 - DNA, 465 bp, Homo sapiens
  misc_feature (5)..(5): n is a, c, g, or t
  misc_feature (179)..(179): n is a, c, g, or t
  misc_feature (182)..(182): n is a, c, g, or t
  misc_feature (184)..(184): n is a, c, g, or t
  misc_feature (187)..(189): n is a, c, g, or t
  misc_feature (191)..(191): n is a, c, g, or t
  misc_feature (207)..(207): n is a, c, g, or t
  misc_feature (236)..(236): n is a, c, g, or t
  misc_feature (239)..(239): n is a, c, g, or t
  misc_feature (246)..(246): n is a, c, g, or t
  misc_feature (251)..(251): n is a, c, g, or t
  misc_feature (261)..(261): n is a, c, g, or t
  misc_feature (266)..(266): n is a, c, g, or t
  misc_feature (271)..(271): n is a, c, g, or t
  misc_feature (274)..(274): n is a, c, g, or t
  misc_feature (278)..(278): n is a, c, g, or t
  misc_feature (286)..(286): n is a, c, g, or t
  misc_feature (291)..(291): n is a, c, g, or t
  misc_feature (302)..(302): n is a, c, g, or t
  misc_feature (313)..(313): n is a, c, g, or t
  misc_feature (323)..(324): n is a, c, g, or t
  misc_feature (349)..(349): n is a, c, g, or t
  misc_feature (359)..(360): n is a, c, g, or t
  misc_feature (414)..(414): n is a, c, g, or t
ccccnacgatggtcctcagctcgagaccagcccggttaatttttttgtatttttagtagaggcagggtttcatcgtgttagccaggatggtctcgatctcctaacctcatgatctgcccgcctcggcctaccaaaggaggcattactgtaatcaaggattacaggcatgagccactgtnccngnccnnncncagctaattttgtatntttgtagagatggtgtttcaccatgttgntcnaggctgntctcnaactcctganctcangtganccncccnccttggcntcccnaaatacaaggnttacaggcatnagccaccacnncctgcctattttccttagttttcanagaacctttnngtcccctgggtgttctagcccagtatatctcaaacttgctgcactgaggacctngttgaaatgcaggttctcatctgggaggctcagtgggccagcaaatctgca

SEQ ID NO: 685401 - DNA, 139 bp, Homo sapiens
gcgcacactggactgcagcggtgcaattacagctcacgcagtcttgacctcctgggctcagaccatcctcccacctcagtgtcctgagtagctgggaccataggcgcctccatgcccagctaattattaaactttgtct

SEQ ID NO: 685402 - DNA, 336 bp, Homo sapiens
ggcggctgtggaggcggctgagaaggtggggacagtttctgagacagtaggagcatcttacagggaggtcagctgtgttgattcccaggaaggaagatcagctgagccagggccaggacgagctgtcaggttacgtcggatgccgtgttggttggagcgcaggatacgcaagagagtgaggaagaagaaaggtgagcagaaagggccggccaggtgaaccctagagccacgtatgtcagtgttttcagtggcaggattcttcccatttctcccgccgagaaacgtccatgagcacagcgaagctcgtcatgtggtttgcactggggagggctagga

SEQ ID NO: 685403 - DNA, 580 bp, Homo sapiens
actgcacctccactcctggggttcaaatgattctcctgcctcagcctcctgttatttctcttctaatcgagtctaatcaacaattagcagaaagtccttgaagtttccactatctggcatgtggttgcccttcctagtaactagtgctgatgcatggtggcacttctgtttaactgcattgtcggaggaagtggggtgacagacacctgctgatatggtttggatctgtgtctccacctaaatctcatgtccagttgtaatccccagggttggaggtggggcctggtgggagcgtgattggatcatgggagtggatcctttattaatggtttagcaccatcctctctgtgccattctcatgatagtgagtgagttatcatgagacctagttgcttaaaagtgtgtaacacctccccgctctcttccttcttctctggccatgtgaagtgccggctccctgtttgccttctgccctgattgtaagtttcctgacgcctccccagaagcagaagctcctatgcttcccgtatagcctccagaaccatgacccaattacacctcttctattcataaattacac

SEQ ID NO: 685404 - DNA, 259 bp, Homo sapiens
cctgctcggtaacaaccctggggtgtttttggccaggacgagaatatgtgtttctccttgggcaacgacgctagggacctcaggctgctactcttcctctgaccctggaatactacgtatactgagggtccactacccagaactcctggcagaatggcagaagctctcctggcagggctggcctggtttgaccctgtggggggctttagatctgttaagctggacacactttcactgggcaaggccatgttatcttcaa

SEQ ID NO: 685405 - DNA, 282 bp, Homo sapiens
gtcatgtatcaacgctgttttgataacgccagtgaaacgctgtttgtcgccggtaaaacgccacggctttcacgttttgcatttagcgatgatccaaaatgggagtccggacatcacgttcatgacaatgaaaccgagttgatttacgtcaagaaaggggttgcaaggtttaccatcgattcttcgttatatgtcgcacatgcggatgacattgtggtgatagaacgcggcaggctgcatgcggtggcctctgacgttaacgatccggcaacgacgtgtacc

SEQ ID NO: 685406 - DNA, 391 bp, Homo sapiens
ctgagctgcaatcatgctggatatgttgtaaaacagcacgtcagtccttatagaacagcatctggtgctgaggcttgacgttaaaagtggtgcttaacttcggcaaatcctggcaggctcatgttcttcccattttgcaccgtccagtccgtcaggctcttcatctcaacactgttcattgttaaacgacgttttcgttgaccctctaggcttgaacagagcagaccggtctgctcgactccaagccatcatcgtggccccttggctccacctcggctgcgtcctgagatgtaagactgcccgcactgttcgttctgccttcgggccatgactcgctcagcataatgcactgctctcaagccaccgtttagagtcccgccctgcatcccaa

SEQ ID NO: 685407 - DNA, 181 bp, Homo sapiens
atcgtgtgctgtaatagtatcacatcgtgcacatacacacaaatctactattgtctatctcaagtatgcagttagcgtttatattcctgaaatggatttgactcagcatagaaaagttcccacaacaactcatttcgagaccatttcaaggtctgcctatttaatgtagttcaaatcctag

SEQ ID NO: 685408 - DNA, 455 bp, Homo sapiens
tagagacctgctttacaaggttggcccttgattggcatctgggaacttggagttcagggggcttccaccattcccagaactgatcaaagtagcttactatatctaaactgtaaaacaatatagtttctcctgaacacctgctttccttctgggagtctggaattttggtatgtgccaggcagagactacctttgtgaccagctcccagtaaaaaccccaggcactcagtctctaacaagcttttctggttgacagtgtttcacaagtgctgttacaactggttgctgggagaattaagctcatcctctgtgattccactggcggaggattcttggaagcttgcacttagtttcccctgacttcaccccatgtgtcttttttcctttgctgattttgttttgtatcctttcactgtaatcacccatggccgtgagcagaactgtaaaaaaaaaaaa

SEQ ID NO: 685409 - DNA, 378 bp, Homo sapiens
ccccatatggccatcctcatgacagctgcctgcggcctgcctgcagcactgcctggcgtactggccctgtcacagctttggtacatacttgaagcggaccttctccgtccatgtccatggcgcggatcctgtagtgatagaggctcaccatgctcgctccatgcactgtctgcctgcacagtgaagtccagcagcttctggttcgtgagccttacactcctgcaagatgtcatcttcatccattaactcctgcagcgtcacatgctccttgtccagcagcttgtcaacatgggacgtggtgtacaagtcaaacttccagaacatcgtgacggccgcagagctgcaaacgagggcaaaggggtcacgtctctcaccctt

SEQ ID NO: 685410 - DNA, 981 bp, Homo sapiens
ctttccgctcggtgtttcctgcgcaggagccgagggccgtaggagccatgggccagccggaatggatggtcttgaagccccattccacaaggatgcaggcgcgtgccactgtgttcaccagcctgcccgaaagatctgcagacgtagtgccggaagccagggcgcgcgttcgttcggcgccccggtgtggtgtccccttcggggccccttcgtgcgcttgccccagggtttcggggcccacacgagggttggccgcgggccggggttttcaagctgggagggccgcctacagggggggcgggttccaacggagggttggccgggacccttcggcattttcgttgtggactcccggggcgagggcgggaacaatgtcccaggggattgtccttgcagggccaacggtgcacagcggtttgacagagcattacgcgcccaaaattcattctttttcccaaaggaagccctttgggccccaagaagggcaccaggttctggttgaagaacttgaacttggccaccaagttggcggggactgttaatgcacggccggaaccgtctattaagacagggagaagtccgagttcatcactttgggcgaccgacacgcatttcaaaaggcttcggaaagtcatccagaatggcgggtgcaaacgccggggttcctcgggattcgggcaaaagagcaaggacggggagacatggttgtggaagaaaaataagggctctggcgttgatcggcggacagcatggtgggccccagggttgtctggaacactgggccgggcagggctaccgggtgagaccactgcaggattggtggttttaaaaaacgcaccccgtaagtacctttgttgaaccccgggtgagcgacacacacgacttgcgcaacagaggacgagcgtttcaagcgaagggcagcacactggcgcgggctaacacaaaaccactgctgtgctgtacgtgatctatagcatggtg

SEQ ID NO: 685411 - DNA, 425 bp, Homo sapiens
cattcatacacaccagccacatagtaatgagtaataagtccccaattcatacctgctgactgttgtttctatgatctaatatttttccacggacccgcgaaggaacatctgtataagtctctctcctaattgcctccccatggaatcctaaatactacagctgtacacagatataccacactgtacatctgttcaggaactgggatcttcgagagaggccacaaatcactgtaatgcctaagtatttacacccttctaccaataactaattttcactcccttgtcgcgagatatcgccctcactgagaatgcatgttctgatgtatggaaagaaacccagaaaaatgaattccaaatttggtagctgtggggagctgatgaatggggagaaagggcaacggaactcttaacgaccgtatccgcag

SEQ ID NO: 685412 - DNA, 167 bp, Homo sapiens
  misc_feature (162)..(162): n is a, c, g, or t
gctggcaggtaacaacactatttctacgatatctacttataaatataattttatgttaatatgccattctccgtcaccataatcaccataatgttcaaatatcaacttttgtatttcatttccgaatgtttgcatggtagaaaacccaactaatctattacntttca

SEQ ID NO: 685413 - DNA, 935 bp, Homo sapiens
aggagaaaaaaagaaaaaaaaaaaaaaaaaaacaaaacggcaagagacacgagagagaaccaaaaccagaaagcaaaatacacaaataaggagagaaaaacagtgatatagaagagacacacagaagacaacgagtacgatacgtataaagaagcaagcgagaaaagatagacacaaacaagaaacaaaatacacaaggaagagacataacaagggagaacaaagagacaagaacacgggactacaagacacgagaatacggaaaacacaacagcaactaccaaaacgaacagaataaagcagaaacagacaagaagaacagaaacgaagcaaaaccatagagaagaaggaggacaaaaaagaggaaaaggatgaacaggacgaaagaaaagaaagacagagaagggagaagaaggcacgcgacagagacagaagcagacgcagcgagaagggagaaagagagaagaatagggaagcggcggccggacgggacgggagaagacgaaggaaagagaaaaaaacgacacaccgggaccaggcaagaatgactagacaagaaatagaaagagccaaatagaagagaagtaataacagtgaggaataaaataagaaaagtacagtaagacggagcgagagcgaggagagtaatatatagagcatagacagtagaagcaagaagagaagaagacaggtcagaagtaagcagaaaggcagaagactccataatcaaagtcacgaggagacgaatctgatcaatacgaagcaagaaagtacagctacagaatgatacgacgtatagtagagatgaaggataggatgtcactgaaaaaaataagaagtagaacaatggcagaagagacacgaagaggaagaagcgtacagactgctgacggaaatgtatagtagcagagtgactaatatctgcactgaacata

SEQ ID NO: 685414 - DNA, 406 bp, Homo sapiens
agtgcaccagtcagatgcggtggctcatgcctgtaatcccagcactttggaaggccgaggtgggtggatcacctgaggtcaggagttcaagactagcctggccaacaaggtgaaaccacgtctctactaaaaatacaaaaaaagtagcctggcagcccggcgtggtggctcatgcccttaatcacatgacagtactttgggaggctgaggcgggtggatcacctgaggtcaggagttcgagaccagccaggccaacatggtgaaagcccttctctacaaaaatacaaaaaaattaactgggcgtggtgcacatgcctataatcccagctacttgggaggctgaggaaggagaatcgcttgaacccgggaggcagaggttgcagtgagctgagatcacgctgctgct

SEQ ID NO: 685415 - DNA, 120 bp, Homo sapiens
tcccggcacgacgacacgctggagcagtggggcgagcgcatgggcgccagcgcgcgcacgctggcgcggtgcatgaaggacgagaccggcatgagctttcacaactggcgcttgcaggtg

SEQ ID NO: 685416 - DNA, 846 bp, Homo sapiens
  misc_feature (31)..(31): n is a, c, g, or t
  misc_feature (189)..(189): n is a, c, g, or t
  misc_feature (377)..(377): n is a, c, g, or t
  misc_feature (389)..(389): n is a, c, g, or t
  misc_feature (411)..(411): n is a, c, g, or t
  misc_feature (416)..(417): n is a, c, g, or t
  misc_feature (430)..(430): n is a, c, g, or t
  misc_feature (440)..(440): n is a, c, g, or t
  misc_feature (457)..(457): n is a, c, g, or t
  misc_feature (473)..(473): n is a, c, g, or t
  misc_feature (475)..(475): n is a, c, g, or t
  misc_feature (479)..(479): n is a, c, g, or t
  misc_feature (481)..(483): n is a, c, g, or t
  misc_feature (486)..(486): n is a, c, g, or t
  misc_feature (489)..(489): n is a, c, g, or t
  misc_feature (493)..(493): n is a, c, g, or t
  misc_feature (497)..(497): n is a, c, g, or t
  misc_feature (510)..(510): n is a, c, g, or t
  misc_feature (515)..(516): n is a, c, g, or t
  misc_feature (521)..(521): n is a, c, g, or t
  misc_feature (524)..(524): n is a, c, g, or t
  misc_feature (541)..(541): n is a, c, g, or t
  misc_feature (547)..(547): n is a, c, g, or t
  misc_feature (552)..(552): n is a, c, g, or t
  misc_feature (556)..(556): n is a, c, g, or t
  misc_feature (559)..(559): n is a, c, g, or t
  misc_feature (582)..(582): n is a, c, g, or t
  misc_feature (617)..(617): n is a, c, g, or t
  misc_feature (626)..(626): n is a, c, g, or t
  misc_feature (637)..(637): n is a, c, g, or t
  misc_feature (660)..(660): n is a, c, g, or t
  misc_feature (667)..(667): n is a, c, g, or t
  misc_feature (679)..(679): n is a, c, g, or t
  misc_feature (684)..(684): n is a, c, g, or t
  misc_feature (688)..(688): n is a, c, g, or t
  misc_feature (702)..(702): n is a, c, g, or t
  misc_feature (738)..(738): n is a, c, g, or t
  misc_feature (743)..(744): n is a, c, g, or t
  misc_feature (746)..(746): n is a, c, g, or t
  misc_feature (750)..(750): n is a, c, g, or t
  misc_feature (770)..(770): n is a, c, g, or t
  misc_feature (839)..(839): n is a, c, g, or t
aaggggcgcctcccatcccctcccacaacanacaggacagaagcccctctgggccggcaggggaaggcccagcctcaatccttcttgctcccgtgccgctgactgtgaaacttgtggtgcacaaccctcagggtggtgaagaaattgccgaggaaaaggagaaggaagggaaagccgcacataagcacntgttactctcttgcactgagtggtcctgggccaggttgaacaacgtcagcgcgtaaaaaagctgccagaagtgtccaaagaaaagaaaaggcagcaggaaggtgaggccccgccacatccaggactggaagccctccacagtgaggtccatggtgtgccgctcgcccagcgcctctgcaggcggttantaggcagccgcnctggtatgtagtacttggaganactgnncgaagctctggtncatggaaaangagaggaattggttccngaatttctggtacatnanaacntnnnccnatntcancatnactcccgacaggnaggtnnacacntanactgcaacacccatcancctttnatccnccanccnttgttgatgaggatgctctcccngatggtcagggtgcagtagtaccagaccagcaggnagttgaagncagcatctgtnaccctggagttgagcaggaagcngcaagtnaaggagaagagnatgangatnatggtgaggtagancttgaacttctcatactcgtccttgtaggcaaactnagccnncntgcncaggaccgtgacgttgacgnccccagaaacaggctcaggtacaatccattcttcttacgcaaataggcctccatgtcaaagaagaggcnttgcccc

SEQ ID NO: 685417 - DNA, 171 bp, Homo sapiens
ccgtccgatgtgttgcgcgtctccggcaagacgggtgagggcgtgcgtgagctgctcgacgaggtggtgcggctgatcccggcgcccgtaggcgatgcggatgcgcccgcgcgggccaagatcttggactccgtctaagacatctaccgcggcgtggtgacctgcgtgcgc

SEQ ID NO: 685418 - DNA, 247 bp, Homo sapiens
ctcggcccgtgttgacatataatcccagcactcaggacgctgaggcaggagaattgcttgaaccccaggaggcagagcgttgcagctgagccaacgaacacgccactcgcactccagccctgggcaacagcacacaagaccccatctcaacaacaacaaaaagagactgtctagacagaaagctgcgactgttctccaggcttttatagacctttattaaaacagaactccttacttgcccgtgact

SEQ ID NO: 685419 - DNA, 893 bp, Homo sapiens
  misc_feature (71)..(71): n is a, c, g, or t
  misc_feature (142)..(142): n is a, c, g, or t
  misc_feature (198)..(198): n is a, c, g, or t
  misc_feature (224)..(225): n is a, c, g, or t
  misc_feature (228)..(229): n is a, c, g, or t
  misc_feature (235)..(235): n is a, c, g, or t
  misc_feature (240)..(240): n is a, c, g, or t
  misc_feature (259)..(259): n is a, c, g, or t
  misc_feature (263)..(263): n is a, c, g, or t
  misc_feature (274)..(275): n is a, c, g, or t
  misc_feature (280)..(281): n is a, c, g, or t
  misc_feature (308)..(308): n is a, c, g, or t
aggctggtactggcctgagatttatggataaaaaaaaaaacaagatgacgacgacaaccacaaaaaaaatngacatcagatgaaatgaaaaaaaaaaaaaaaaaaaaaaaactaagggaaggaaaaagctgtaaaaatcacnggcattcgtggggccatccccacccaagctccacgttgttgtccgtctgtgctccntggcctctgggggaccagctggggannatnnaacttngtctngccaggcccccgtcgcgtngctngaacgggtgtnnagttnngtaggtaacgcacacaccccacacctnaaggtgtctgcatcctcctgccaacgcatgggctccacgtggtgtgctcgcttgagatgtcgtgacttgtcagctgtctctggggagggtgctgttgtggggcccgatgggatagcctacattacccgctaagttgtgcctgagagtacgctgttagtacctgttttcccttcccttcctttacatcccttgaagggtctaggctgatagggattaaccacgttagccgcggaatattcccaaaaacaaacccagatagggaaacaaaccattatcgtgacgaaagacactagtgaagggtacacaaatcaccccaccagggacataatgggaaaatgatgatagttcacgagaatcccctgagggcctattaataagaaagagcgccgctataaaaaagcccacagagggactccaagaaacatgagtacacatcaacggggagggccaccaaacggttcgcaaaaaaaagaggagcaaaaaggcactaaataattagggagccatagacggccacgaaagaacagacaaagagcaacacggatatgaaaaacgggaacaagaaaaagaacaaggacgtgagca

SEQ ID NO: 685420 - DNA, 1001 bp, Homo sapiens
attttcaaaaccttttttttcaggctgaagaaaaaggtttgaaaatgttttctgtagtttgttggttctaaacaacaaataggttttaatcactcgaaatggaattatattgtgtattcattgaataaattcttctgtcagcttaacaaaaccaaacaaaaacaacaacaacaacacaacacacaacacacacaacacaccaccacaaaccaacgagacgaagcacccaccgacaacacaaaaacaccaaacgcgaacccccaccccacacccaaccccacccccaccgcacgggcgcggccgcccccccccccccccccccccgcgccccccggccccccccccccccccggcgccccccccccccctgatactaaccattagacgacaccacgccccacctccgccaagcacgacacaccgcctcgaacaaacacgcccccgccgcgaaaatctaccagccaagacgacaacacacacagcacgagtcggcaaggatatgaaagggacaaccccaccgaacacaatatggctacgcccaaagaaagtacaccacgcaagcactgagtgctgaaacaaccaaacccgcacgacctccaccgcaaacaccccacgccctcacacccacacacaacaacacaacaaaacaccgagccgcggacactaacaacatcagcgactaccacacgacgaccaccaaacgaacaccacacgaacacaaacacacgcaacagcaccaaacgcacagcgagcaccccacacccacagaccagacaagcgcagaagcacccacccacgcaaccaaacgagacacctacaccgtacgacccaacaccggccacacccagcaccacagcacacacaacacacacacacaacaacaccgaccgcacaaaggaccacaaggaccaacccaacacacagagaacaacccacagcaggacaaagaacgaacacacaacagcaaactactaaagcagcaaccaaaacggcgagtcaga

SEQ ID NO: 685421 - DNA, 250 bp, Homo sapiens
ctctatgaggatcccccattaacccgtctcacgaaaaatacaatagaatcacaaataatatatcacatatactgggatgtgtccctttctttgtaggcagattactttaccatttactaaatttgagcttcagaaacattaagcatgctacacaaactttgctggaaatgaatactgaaatggaagtttgaattcctagatgatttcttttgaatcccatgctaatgctcttgaaacttctaaaactagg

SEQ ID NO: 685422 - DNA, 588 bp, Homo sapiens
gccaacaccaaggtgaactggcccatgttccctgagagctttggcaactggggacaggacaatgagctgctggaacctctgtcaggtgtgcttcctgccaaccggaatgtcccattcaaattgaagctgcatggtattgccaaagtcctggtgaaggggcaggacacatggcccctgaccctgaaccacgagggctactgggagggaagctgcagcacagctggctgccaggaagtctatgtcatggtgctggagaatgccaaccacaatttctactcctacatcctgaaatacaaagtgaatgcccagtgagggctgtgccccggtcttaccctcccaaagggccaaggccagacctccccagggagggctcgaaggaagtgcagggagccctggacaccactgagtctgcatgaaatcccttctaggcctctgcctcagtgtcccacctctgccacaggagctgtgatctttgtgttctgaaggcttcactcaggtgtggctgtgactgagggggcagaggcagtggctctttagaaggaaaaggtgctatgtaaatctaaggtattttaaactgtaaaaaaaaaa

SEQ ID NO: 685423 - DNA, 358 bp, Homo sapiens
  misc_feature (21)..(21): n is a, c, g, or t
ggatgccatacttatatgtanttttggccttttgattgagtattcacaaatcataagtgttcccgcttaggagtacttttaaaaagtgaaaaaagggctggaccctggtggctcagacctgtaatctcagtactctgggaggccaaggtgggcaaattacttcagcccaggagtttgagagcagcctaggcaacatggcgaaatgccatatctacagaaaaaatacaaaaattagctgagtgtggtggcatgctcctacagtcccagctactcaggaggctgaggtgtgaggatcacttgaccctgggagaagctgaggctgcagtgagtcatgattgctactgcactccagcctgag

SEQ ID NO: 685424 - DNA, 352 bp, Homo sapiens
ctcatctgtttcagggtatcctcattcccactgtgtgtttccgggcggagcttgcacggtgaactcactgacttgattgtctatagcccccgtgaatgatgatggcttaagcttccactttggcttcctactttacctagagttcgcctatattcatgagtccaggctaaactctatacgaacaacctatcgacctgaatcatattggtgaggagcattacatgcctagcttcgtaatgctataggaccagggctacctgctattgatagttaacatgactagatcctgtccacacgactacttccatacagtaccagctgtctgtgtcacaacagcaccgcagaactgcct

SEQ ID NO: 685425 - DNA, 166 bp, Homo sapiens
cgctcgagcggatcccataggcgaagactgtggactcagggctgctgtggcagcgccatgagccgaagaatggagactgaaattgaagctgctgataaccttgcatgatttagaaaagcacctgcgtgaaacggccctgagatcaatgaggaaggcccaagtgtcc

SEQ ID NO: 685426 - DNA, 451 bp, Homo sapiens
  misc_feature (430)..(430): n is a, c, g, or t
  misc_feature (445)..(445): n is a, c, g, or t
tggactaatacactaaattggtacaggtagagtcaagtgctcctgtaaagatacccaaaaatgtggaagcaactttggaactgggtaacaggcagaggttggaacagtttggagggcttggaagaagacaggaaaatgtgggaaagtttggaacttcctagagactagttgaatgggcctgaagcaaaatgcctgatgataatatgaacaatgaaatccagactgaggtggtctcggacagagatgaggaacttgttgagaactggagtaaaggtgactcttgttatgtattagcaaagagactggtgagtttggggccctgtcctagagatttgtgaaactttgaacttgagggagatgattaagggtattttggggaaaaagttttttacgcccaagcattcaaacctgccccttggggtgctgtttnaaagccatatgtatncgaaaa

SEQ ID NO: 685427 - DNA, 466 bp, Homo sapiens
gaacggattctgcttctcagtgatgcctggaaagtggatttctgctctgctgctgctgtaaataagttgctgcttcagcatctgtgaaatgtgggacagtgtatggtagtgggcgatggaattcagtcattggatgaacataaaaataatactggatgaactggtacagagaggccatgaagtcactgttctgagagcttcagcttactatgttcttgatcccaaacaagatcacctggccttaagtttgaaacttttcctacatctgtcagtaaagacaatctggaaaattttttcattaagtttgtggatgtgtggacttatgaaatgccaagggatacatgtttgtcatattctcctttactgcaaaatatgattgatgaattttctgattatttctaagtctttgtaaagatgttgtttcaaacaaagagctcatgaaaagctacaggaatccaagtttgat

SEQ ID NO: 685428 - DNA, 1125 bp, Homo sapiens
ggtgagcactagcattggacgcttgagccatgaacaagagcgaccgttatcaatggtgcggcgaataccgggtcccccatggaacgcaagagctcgcggttgactctccactctacctagagtaggagagttggatagtgagtgcttacagctccgcgtggacatatgtacgaggtagtcatgacaatatcggatcccacagcgtcgatccctcaccggcaccgaaggaatctcgagatcttgaatctgattggctcgtcatgggcctccgcctgatgatgtaggatgatcggaggtcatcgcctgagtactgccagcaattcgatgcacaggttgctgatagtagcagagaagtctcccaaagtcctgtatgtgacagtgagagaacatggctttcatgggacctcatatcaacgtgtcccttcggatctattcgttcccgactgactcagtcgggagtacttagaagcggcggtcgaaatcacaccagggtagtcgccttcacatggatttccacacaaacacaattgtgggcagaaccaaaaaattggactctggcaaacgccatcgatcgttttggtaatgcgtcgacagggcacttaccctccggaattggagatttccaccatttcggacgtaagccgaattctttagatgcccgtcgattggttggggcggtgacgatgcttggaacaagagatcggacccaaccgagaatgcgaggtactacccgtggagaatggattggcttccgtgtaattggcgttcaaagataagcgcatacccaaaggtacgccgggactaattgtacgccagtgtagatggagagggaatggcactttgggagacttgtaccattgtaaaccccctgaaggaagggcgatgggcgaatgaagcgtgaggacttgtagcccttttggaaggaacacgccaaagtgttggcgattccagggttgaacaagttttggatatatgcgccaggtgaacccaggtcgagctttgggacctacaatatggcaaccattaaggacatagagaaggggccattttgttcccacaggtggcttagttcttgatcccgttctttccccagttggaatggttcctgtcgggtttcaggaacaa

SEQ ID NO: 685429 - DNA, 245 bp, Homo sapiens
gtctaacctgcagctctctctgatgctcttggagggtctgatggggccttctgaggctggctggtagtggtgagtgagaagtgacatctcctctgtatcctcccaacatctgtctgtccagaatagtgtcccctcctctctgtggaggatcccgccgtgacccaagaaggtaaggccaggttacgttgccgtttggctgtcttcgttccttcctgctgtgttcgctgcgagatacagtctgtggc

SEQ ID NO: 685430 - DNA, 458 bp, Homo sapiens
  misc_feature (9)..(9): n is a, c, g, or t
  misc_feature (21)..(21): n is a, c, g, or t
  misc_feature (39)..(39): n is a, c, g, or t
  misc_feature (192)..(193): n is a, c, g, or t
  misc_feature (327)..(327): n is a, c, g, or t
  misc_feature (450)..(450): n is a, c, g, or t
ggggccatncccctcttcccnaaactgctctgaggaaantggggacccagcaacaggtgtaagattcatgatgaaaaccctgagggttccctctagactgagtgactcagccagttacaaaaagacaaatagtgtgtgattcccatttatatgaggtacctagggtagtcaaaatcggccgggcattggttnncacgcctgtaatcccagcactttgggaggtggatgcgggtggatcacctgaggtcaggagttccagaccagcctgaccaacatggagaaaccctgtctctactaaaaatacaaaattagccaggcgtggtgcanatgcctgttatcccagctactcgggaggctgagggaagagaatcactcgaacccgggaggcagaggttgtggtgagccaagatcacaccattgctctccagcctgggcaacaagagaaaaccntctgtctc

SEQ ID NO: 685431 - DNA, 294 bp, Homo sapiens
  misc_feature (39)..(39): n is a, c, g, or t
  misc_feature (175)..(175): n is a, c, g, or t
ccgtacaaggaccttctggaccctgcacggtggcggatntgatccagcagttccggtacgacaactaccgactacaccagctgggaaacaattctgtgttcaccctcaccctgcaggctggcctctcagcaatcaagacaccacagtgctacaaggaggacggcagctccaagancctgactgccctgtgtgcagccgctccctgaacaagctggcgcaccctggcccatggccactgtgccaactccccgcctggtctgcaagatttctggcgacgtgaatgaacgagaacaa

SEQ ID NO: 685432 - DNA, 116 bp, Homo sapiens
agcaacccatgttcgacgggtttttttttggccctgctgcggcaataaattgtgacccaatttgggaggtgttgtttggaaaaaactataacgaggaaaagaaacgaggccccccg

SEQ ID NO: 685433 - DNA, 270 bp, Homo sapiens
gtggacgaaaggcaccaaatacaattctgaagttgttgataaaaagatagaagagtttcttatctagctctcgatgatgcaagcatgagaacctcattgatgaggcattcaacacccagatcacagctctcatcatgctgtatgaatgtgaggatacccaccttggggaggaggtggataggaactggaatgcatgtggcttacacagcagtacctctttgaccgccttgcccacgagattgaagcactgaagtcattctcaaaatcaga

SEQ ID NO: 685434 - DNA, 161 bp, Homo sapiens
tgtggctcagattcagtccctggtccaggaacttccatgagccgtgggtgctgccattaaaaaaagaagaagaagaagaagaagaagaagaagagaagtatcctcgcactctctggtggcagggcgagtggtggacggggaacaacgaagcaataggatga

SEQ ID NO: 685435 - DNA, 159 bp, Homo sapiens
cggacgcgtgggtgcaactctcccaaaatccaaataaaacatatgtctgatagtagtcgactgaaacaataaaataaaaaatgttattttcctaatttagtaaatcttttctatttgcattcagatagctctggagtcttcactcccctttttgccttg

SEQ ID NO: 685436 - DNA, 267 bp, Homo sapiens
cggcctcggcctcccaagtagcggggactacgggtgcatgccaccactcacagctaattttggtagagacaaggtttaatggcccaggcgggtctggaactccggggctcaagcaatccacccacctcagcctccgaaagggctaggtgtgagccacaacacccagccagggccaggtctggacccagcggtttctccagggcctagcactattctaggggacggggggtttgggtagaccagagactggtaaatgcagatgtaacg

SEQ ID NO: 685437 - DNA, 1143 bp, Homo sapiens
  misc_feature (408)..(408): n is a, c, g, or t
attagagtcaaagggtgatggaggagagagggtgaacaaccagccccagaaacaggtgcagatgctacccctgggcgctgggtgtggctatcactggctctgctgcattctcagtggattgcagtgcgcgacgtactgaactgggtgaaacatgaaactgaaaacaagctcggtcccattacactctgaggaatcggtgactacctcataaatgggatgtatctatagtactgtaatttcaataccttgtgggcagggacatgtagcgtttataatttatacatcgtattaagttctggatatttagagcattacttttgtttgtaattgggccgagaagatctgcagaatcccaaatctgtactttattattctatcgtaaagaagaaaggttccgtgtagtaagcntcatagaaatgagttttgcaagatttagagcaggaattcatgattaaagattcctaaaaatataattctgatttatgtaagctggcgcctgagaaatagaaatgtgtacttagctgatgagaaaattcgagcatctcaggaggtggtatgaggatgactgtgtgaagccattaccttttagaagccaactgtggacccttaccatgctggactgctataggcccagacttccaccttgttctgtggcccttttcttcctccttgaagctccaagtattcttttccttttcccctctaaagcgggtttctgagaagtggatctccaagcaagttcatggcttcagtccgatgttactaagggggggaatacctaaaattgttacacccatgtcccacatcagtagcttaggaaggtgcaagtgggccattcaaaagctctgactccgtacacaggggggggccccctaaaaagacccatgagggaaaacacacacccacggacatggcactgaaacggagccttagaaacagggcgaacagcgcaaaccacagacgacaaggaagcaacaacactgacatagcaccaacagaggaagccagagaggaggagacagagaaacgagacgcagacagacaaaaacagcaccagcgacgagagcaagagaagaaacaatggggcagcacaccaaacaaacgcacgagaagacaacacaagcaccgacagacgcacacgct

SEQ ID NO: 685438 - DNA, 322 bp, Homo sapiens
tgctctcgaggattccacaacttcgtccattgcgatttgctcagtttggatactcggcgtgtgcagcaacaacttcgtccaccgtgacttgatttcaagaagtgtgtggaggctcggcgtgtgcatgcacacgccgaagacccaaactgcacatgccgaatgcccagactatcctcaactaggggaccctatagttccccgttgccttgaggacctcattctatcaagatgtttcaggtactggatctccgtggtatcagggaaatccgcgcgtagcttgtagagcctcgtggcagcttttccagctgcttcggagctcacc

SEQ ID NO: 685439 - DNA, 309 bp, Homo sapiens
caagttcatattttatttccaataggtttggagctttgctgatttttgcctttttgtaaaaaaggaaaaagttttcacttaattcattgaaagccctttcttgctgagcccaagggggagcctgggccaagaccagaccctctcatccctcttgttcctaccgcaaacacccggtgctgggggtgcggctgttccccttcgcccactatgacctcccgcccctgctggatatttctttgtccagaacactctttaaaatggaagctgagacacagtatacactgggcaggcgcacacacacgcacacat

SEQ ID NO: 685440 - DNA, 82 bp, Homo sapiens
gggtttttttttttaaaaaaaaattaaaagggaaaacaaaaccaaaaaaaaccagaaaccccgaataagaatggaaatgcca

SEQ ID NO: 685441 - DNA, 1719 bp, Homo sapiens
  misc_feature (993)..(993): n is a, c, g, or t
  misc_feature (1018)..(1018): n is a, c, g, or t
ttgctcgtgacaccccccctctcgtgttagatactagcaccatcgcgtggggggaccgtatactccgtccacatggagtggtgttgactaacaagggcgtgaacagatgatacactcgtgtgctcgcgcactctcaaattgtggagggaatccttttcttcctccctgtgggcgcacacaagggttgggtcccctccgagaggaggtagcttgttttcctacactcttgtcgttgacggcagcctattttgggcccccccgtccccgccccgcccgggtgggtcccccactcgttccccaccaccggcggtcccttttggacccacaacagaatgttttgcaaccacaagaggtttttgctgcaaacacccctgtccgttgacaaagaggaatacaaaactaccctcccattttctcccccggtgtgaggggatttttgtccccccagcttcctaagtgaggccaaccgcgtgttccacgtgttcgcgatcatgttgtcttattgataagaataactaacagtgttgggacgagttctctgtgtgtgtgtcccccacaccgtgtgtaccacggcggcagatcttcctttgggcgttgtacacccatcatgaaaggtgcagagtctctttgtgtgtttgtccccccgtcgttatcgtgggaaaacccagattgggggtttcttccttccagagtgggagaggccccccccccgcgggggaccggactctgtgctctcagggccccccttgtcctgggggcgcaccccccggctttcttcgggttggcggccacattgttgccaccacccccccctctccctagggggggtctttctagcagagcttatcaccttggacgccccccccgccggttgggggagccacgtggccaaaacaacagcccccttgtttcctccaccagcacttctgtgagcctccgcgaactagtgttcacagctatggccacaacagagtgccctactgctgtgccccncccctacttgtggtggtggtgcggnacaataaaagttgtcacaccacaccgggcggtggtcaacaacaacaacagcagagcgggggcggccgccccccgctggggtgctaccctcccgcccctctgtgtctcgagaagcccacaaatggcgctctgtgtttccgcgttttgcgcgcccacatctgttctctgtgtacgcgtcttgatatatggtgttcatacgtgtttatacatagatggaggtgccaccacacggggtgatctctgtgtgtatctagcacgcttccacaagccgtctcacgagagagaccagcttcccttgagcactgcatttgggacgcaccacagagggggagacctcaccattcgcgccacacacgccgaaggcgcgacacaccccagtcaccacagtcctccacaagggcacacatgccacacaagccgccctcgccgtgagagcctgtgtgcacttccgggcaggcatgtctctctcgagaggagcggctttcgctctgtgggagacactggcggcccactacgcccgcggaactccacgagacctcccacgaaacccttccccatgccttactctccctcggagtgatcggcccggcttctctatagcacacagggctaacatagggaaccccccttccacaccaccagcctaccatttagatcccccccactcttctatcccttcacgaaaataaaacaaaataaaga

SEQ ID NO: 685442 - DNA, 749 bp, Homo sapiens
gagattctccccagacgccgagatgcgggtcatggcgccccgaaccctcatcctgctgctctcgggagccctggccctgagcgaaaccgagaccgaggtatttctatcacccgccgtgtcccggcccggaccgcggagagccccggcttcatcgaccagctgggctacgtggacgacacgcagtctcgtgcaggttacgacagacgacgcgcgcgagtaccacctgaggggagccgcatggcgccgtgggatggcagcaggatgggggccgagagtatagcggaggaccgggagacatcagacacgtacaaagcgccaggcacagacttgaccgatgtcgagacctgacgggacaatctgcgtcgcgctactacaaccgagagctgaggccggggtcttcacatcctaccagaggatgtattggcttgctgaacctggtggccctgactgggcgctctcctcccgcgggtataaccagttcgcctacgacaggcaaggattacttcggcctgaatgaggacctgaagctcctggatcgccgcgggacaaggcggctcagaatcacccaggcgcacagtgggaaggcggccctgctagaggcggcagcagcggacgaggctacctggagggcacgtgcagtggcagtggtccgtagataccctggagaacgggagaagacgctgcagcgcgcggaacacacaaagacgacacgtgagcaccaaccgtctctgaccatgaggcccccatag

SEQ ID NO: 685443 - DNA, 577 bp, Homo sapiens
  misc_feature (546)..(546): n is a, c, g, or t
agcggccgcctttttttggaaatgagtctcactctgtcgcccaggctggagtgcaatggcacaatctcggtgcactgcaacctccgcctcctgggttcaagcgattctcctgtctcagcctcccgagtagctgggattataggcgccccccaccacgcccggctaatttttgtattttttgtagggacaaggtttcaccatgttggccaggctggtcttgaactcctgacctaaggtgatccacctgcctcggcctccaaagtgctgggattacaggcgtgagccaccgcgcctggcctgtgacttgcttctatctctgtactcccgtacttggttgtgtgtagccaataccctgaatgaaaaaaaacaaaaaggtaaaggttggcgggtggtgatgtaaggttattttcatttctgttgatgatagaagaaataagtataagcaccttcatttggccctggttccttttgcaaatgtattttaagaacataaacaggagtttctcaagctgggggcgaaggggtaattgcatgacagttctctgncagttggtgccatcgaggcagctggtgcttg

SEQ ID NO: 685444 - DNA, 101 bp, Homo sapiens
gcggccgcctactactactactgctcgaattcaagcttctaacgatgtacggggacatgtaatttgggtggtttattaatagattgcctttaggaaaaaaa

SEQ ID NO: 685445 - DNA, 913 bp, Homo sapiens
cctgacttccctaattccccccatccttaccaccctcgtgaagcctaacagaaaaaactcataaccccggattatgtagaaagtccatgtcgcatccacctttattataccagtctgttccgccacgaactaatattcagtgtgcctagaccaaggaagtgattatctcgaactgacactgagccacaacccaaacaacccaggtctccctaagcttcaaactagactacttctccatagatattcatccctggtagcagttgctgtcgttacatggtccatcgatagaatgctcactgtgatagtagtaaactcagacccaatacatttaatcagtttcttcaaatatctactcattttcctaattaccatactaatcttagtataccgctaggaagcaagcctattcccaactgttcatcggctcgagagggcgtaggaagtgtgatatcctgtcttgctgcatcagtttgatgatacgcccgagcagatgccaacagcaagcagccagttcaagccaattcctatacaaccgtatcggcgatatcggtttcatcctcgccttagcatgatttgatcctacgactccaacttcatggagaccatcaacaaatagcggccttctataacggctaatcgcaagcctgcatcccagctaactaggcctcctctctagcagcagataggcagagatcagcccatttaagggtctcccaccccttggagtccccctcaggcatagcaggggccccaaagaccaggctcagccctgatccactcgaagcaactattagtgacagaaggaagtcttctgtacagcttccggtttccacaccccctaggcagaaataggccagtaatcgaagtttaaacttggtaggggcgacaccctcctgtcgagacttgcccttga

SEQ ID NO: 685446 - DNA, 255 bp, Homo sapiens
ggagacgtagaggagtccgccgcctcaactgaggggagtagttctgtgggaatagtactgctcgtcgtgtacattaccagggatcattttactgtcgccataggtttgtctctggccaaaatgtcatatagttgcaatcatatagtatgtagccttttcagactgcctgatttcgtttagaaatatgcaattaagtttcttctatgtctttttgtggcttaatagctcctttctttgtagcactgaatagtattc

SEQ ID NO: 685447 - DNA, 424 bp, Homo sapiens
  misc_feature (46)..(46): n is a, c, g, or t
  misc_feature (121)..(121): n is a, c, g, or t
  misc_feature (311)..(311): n is a, c, g, or t
  misc_feature (325)..(325): n is a, c, g, or t
  misc_feature (385)..(385): n is a, c, g, or t
  misc_feature (399)..(399): n is a, c, g, or t
  misc_feature (423)..(423): n is a, c, g, or t
ggtggttgcctgcgggaggccgccgcgggtcatgtgaccggaaggnctcctcacggacgccgtccctcctcggcgcggcctgagccccggcccgaccccggccatggggtgctgctacagnaggatgaacgaggactcggaccaggaccgagaggagcggaagtgctgctggaccctagcagcccccctaccaaagctctcaatggagccgagcccaactaccacagcctgccttccgctcgcactgatgagcaggccctgctctcttccatccttgccaagacagccagcaacatcattgatgtgtcttntgcagactcacagngcatggagcagcatgagtacatggaccgtgccagggagttacagtacccgttttgggttntgttttaaggaagnaagcttgaaccttttgggaaggang

SEQ ID NO: 685448 - DNA, 165 bp, Homo sapiens
gaatctgtgtaccagatttctgaaaactcagttactgctcctaaccagtctacttaagtgaatatatttttgccagtgcatcaacgagtatagattcagtataagtggagtcagtctttgtcgttaacaccctatccctttgcctatatgagtagtccatctctc

SEQ ID NO: 685449 - DNA, 625 bp, Homo sapiens
cgtgtgctgaggacacctgtgccgcagtcgcctgggcctggccatcgctccccggacagtgggcacgtggccaagatgccagtgtgcactggtggggtgccgcctcggggcacgggaagcactgtacccaagtcatggggcgaagctggactgcggcctggcctgcaccaccaccgacactgtccaccaccacgtccaccacagcacagccctgtgcccaaggatgcaggtggaggcctgaggccaccctgcagtgcccagagcagcttcgcctggggcctggaaccacacatgccatgtgggcaaggtcccggagggctacctcagaggagttgtttgggcgggcttgccccccaaaacgggcccaatggttgattgggcccttcggccccagcaagttgtggacagggttggtgcgttggctgttgcaaaaggaaatgccaagaaggctgaggtcggcggaaagagcgccagcaaccgaggtttgccaggtgcctcggaaggaatgcgggagaaaaaccagaaaaattcattgcggctggatcatttgaggggggacaacgggagatcacgctggcaccgcagggaccggcgcacggggtctcggggggacgaaggaaagcca

SEQ ID NO: 685450 - DNA, 102 bp, Homo sapiens
cctcaccaagactgacaactatggcagaagcaggaatgcagagagatttaccatataatcttatggactttgaacatgtctgtccttttaaggcagaagcag

SEQ ID NO: 685451 - DNA, 413 bp, Homo sapiens
aagatagtctcattgggcagagggaatagagggtgtagtgaaaagtacgagtgttatagattctccggggctgagagtgtctgtatgggcagtcccacgtatgagtgattggacaaagggttggtaccaaatgttgtggtactgctgtgatgtggctctgacaaagaagaacataaggaagagcagaagaggaccctgtgtgtcactagggggacttgggggaggcagcagagtatagatagcatttgagccaaagcttaaaggagaaattggaatttttagggcagacaggctcaggaaatacattccaggaagagcgaagagtgcgggtaatgacatggagtcaaaaggctatattccagccaggcacagtgactatcatctcagcttctcggtaggatacagtagggaga

SEQ ID NO: 685452 - DNA, 306 bp, Homo sapiens
  misc_feature (99)..(99): n is a, c, g, or t
ccccggtgcaccagccctgaccaccaccccctcctcaaggagaaatgtggaatcaacaacccttaagaagaaatcctgagaagggaagacatgcgtganaaatcccattcaggctatgaatccacggctaatatttgcagtgcccaagcatctatcacatgtgcacctctaaagcgcccatctgttctgctggtaacactactactgtggcatttgcctcctgctgagggaaaacaatatgctcctatattaggggtcatttctgctctacagggtagaaggctctgtttctggccttttaaacct

SEQ ID NO: 685453 - DNA, 247 bp, Homo sapiens
ggtcgaccagagagcgagagagtaaggaggagagagggagcaagaggttaaggagaggagtgaggcagagagagataagttaaggaggggagtaagcatgggagagagaggggttgtggagggatggatgtgagtgggagaggaagagagagagaagaggaggagatagataagtggaatggcgatgagtgagaacttggcctcatgctgccctcctgactctgcaaaccgatcgccagcgtcgacg

SEQ ID NO: 685454 - DNA, 888 bp, Homo sapiens
gtgacgcgctgggtgcgggtgtgggccttggccagcatggagcttgtgatccagttccaggtgctgaaccagagctgcctctgactggcatggagccccccgatgctgtggactgccctgagcagcagcggctagctgtgctggctacgtgtgactgtgctccctgcgcatcttacagacgtctacccgctactggtcatggagctcaaagatgcacccaccaccctggtggcggctgaccactgttgccttctccacacgatggtacagactgtacctactactggagacaaggatgggctcgttggctgtgagccacccctgcacaggggacaacacttccgtgtgcttgagtgaccaccagggactccccaatctctaccatctagtgtcacgtgcacaagagtgtgacgacttagggagtggagtggcacagacctatgggcttggcttgccaagtggggaccatgacggtgtcacttctatctgtggcctcccgaactggcatgcgtgaaccaacatgtgacactatgtggacttggatgacgttcccaatgccatgcacaccactggaggtacaaccattgctcctgtgactacatggtggcgatgtgggaccaaggtaccacgatcacagcccagaacacgcaagcagtgcatggtgccttatggaagaacatacgatggcacacgatcttgacaccatcgcctagccacttcgcctttgaccctaatcctagacccgcttgaggacattatggctgccgcctccactatgcaatgcatacagctggtgactctccgcagtgtggtactcacccaaaggctcacggtgtgtatatcaattagcgctaacccctctgctccgagaacatacagtggatcgga

SEQ ID NO: 685455 - DNA, 346 bp, Homo sapiens
tgcccaatctttgccaacagttgaaccaagactctgaggctgatatgcaatgtcacttacaacattaatcagatactgcatttaagtacagacggggtttcaccatgttggccaggatggtctcaatctgttgacctcgcgatccgcccgcctcagcctcccaaagtgctgggattacaggcgtgagccaccgcgcccagcctgaactttccatttctctcccaagtctcctattctacatgctgaggatgccagagggtccccttaccaccactcctcaccaccccaaaccaccctcctccccatcactgtactagatctgaattaaacattaaatgaaataaaa

SEQ ID NO: 685456 - DNA, 441 bp, Homo sapiens
gatctaaataatcatttcttccctagtaaacaggaggggaaagtggcaataagccagagaaacttacaggcccaaaacaacaactcaacaaaggtatctaaaaagagtggaggccaggcacggcggctcacgcctgtaatcccaacactttgggaggccgaggtgggtggatcatctgaggtcaggagttcaagaccagcctgaccaacatggtgaaaccctgcctctactaaaaatacaaaaattagctgggcatggtggcaggctcctgtaatcccagctactcatgagactgagggaggagaattgcttgaacctgggaggcagaggttgcggtgagtcgagatcgtgccattgcactccagcctgggctgtagagcaagactccatctcaaaaataaattaataaaaatttttacaaaattaagaatgcagcagaga

SEQ ID NO: 685457 - DNA, 1600 bp, Homo sapiens
  misc_feature (711)..(711): n is a, c, g, or t
  misc_feature (934)..(934): n is a, c, g, or t
tggaaaaagtcatggaggccagggggttgggcttgaaaccagcttgggggggtccgatcccttcctttttggtctaaattttatgttatatacgggtttctctcgaatgtggtggtggataggggtggggggcatctccattattagctcacctccaggtttatagtggagggttctctcatactatttaggactttctcgctctcgaagcgaaggcttcctcaaactcagtaaaaatttatttaattatttacgtggcgtttatagaagaaacagtgaatgtgagccctacgagaagtgaataggagtgtttccagtggtgggtgtagtgccactcggggatagctccgagtataacgtctcggggcattcccggaaataggcccgagaaaaaggtgttgtggtgggaaagaaagagtgttagaatttatagcgcccggatgtgaaattattgaatagtgtgaacaatgtggatttgtggggccgtataggttgtggggacccatagggggtgtgtagccccgtggaggaaaaataggggggaacactcagcgagaaatttgaaagcgccctcctatatgtgagtgggccaaatctcaccggcctcctatattgggattagcgacccaatttaggtgggaacggtgggcgcataccaaacggttacgaaaccgggttgctcggtgataagaacacgaggaagggtcccanaagtgggaatggaaggttccgggcgtcaaataaccatatggggcccaggtccaggggcgccaacctaaacggggtggcaacacacgcaacacgatgggaaatcccctaaagggggctccaaaagaagccactggggcaggcaagaatcccattcccaaaaattgcggtctcccccggggggacgctggctgggacagaatggttccaaggattcaatatattnatccttctttgaggagcgccccggggtgagagggggaatagaaggacgaaaacgaaaaccatgggcggcaacacgcggcggggcgggcggcaacataattggcccccgagggtgtgcgccacaacagtattttattacccccataactgcgcgggcactcttattttcgcgcgccgcaacctcccgctgtttttaaaaccccccggcgcgggggagacgccccccgtgatgcaggcccccgccgcgctgataatgcccgcccggggacaaacaacacggcggcggcacgccgtgtagaagcccacccaaatatcttccctttaaaaaaaaacacccggcgagagtgcgcgcgtgcacaccagaagtggcgcggagtcgacctacctgcagcaaaggttctaatcatgtcggtggaggcgcccacacacgatggtggggcccaccacacgagttgaccgcgacaagaacggatgtgacctcccctcgagcgaaaagaagcatgcgagtcggtgctcaggcaacaccacaccgacgaacccacgctctctcacggcgacggcacacaccactctgtgtgcaatcccgctcagccgacagctcaagtaggtcgacccgcaccatcacgcgatggaatcgcaccaacgacagcggcagcgacgcacacga

SEQ ID NO: 685458 - DNA, 101 bp, Homo sapiens
agccatatacaggtcccgtatttcacgaacaagtcattattctacctttgcacggttcgggtaccgcggccgttaatcatttgtcgggtaccgagtctcga

SEQ ID NO: 685459 - DNA, 716 bp, Homo sapiens
cacactgccacgctggctaattttttttcgtattttagtagagacgggatttcaccatgttgcccaggctggtcttgaattcctgagctaaggcaatccgcctgcctgggcctcccaaagtgctaggattacaggcgtgagccacccacgccactgtgcccggctgtagctatggtttcaaaagaatcacctagtatacctttttctggtggggagggagtctcactgtgttgcccaggctgaagtgcagtggcacgatcttggcttctcggctcactacaatccccgccttccgggttcaagcagttctcctgcctcagcctccggagtagctgggactacaggtacatgccaccatatctggctaattttaggtatttttagtagagatggggtttcaccatatgggtctggctggtctccaactcctgacttcaggtgatccacctgcctcggcctcccaaagtgctgggattacaggcttgagccaccgtgcccaattctagtatactcctttttatatggtagctgaaaggtatcgtaggtgcctcagaagggaacaggttgtaacagagtcaagccgcttggacagcccatgttcaaccacgctaacttctaacatgctggatagcacctttttcccactatcgcacaatctacgcacctcctatcacacacttggacataccttacagtcccccacaataaggttgtca

SEQ ID NO: 685460 - DNA, 446 bp, Homo sapiens
  misc_feature (5)..(5): n is a, c, g, or t
  misc_feature (21)..(21): n is a, c, g, or t
  misc_feature (214)..(214): n is a, c, g, or t
gccangtaaaaattttgaaangcccaaaatatatgtaatatcccagttataatattgacaagtagccttcctcagatcacagattttaaataactcaatttagtgagatcctaaaaattttatttaaagtataaaaactgtggctcacacctgtaatccccagcattttgagaggctaaggtgggaggattgcttgaggcccaggaatttgagnccaggctgggcaacatggtgagaccctgtgtctgcaaaaaaataaattaaaaaaataggtggacattgtggcatgctgctgtagtcctagctacttgggaggctgaggtgggagggtcacttgagcccgggaaatcaaggctgcagtgagctgtgtgaagccactgcatcccagcctgggtgacagagtgaggccctggctcaaaagtaaaataaataaataaaaagtttta

SEQ ID NO: 685461 - DNA, 136 bp, Homo sapiens
aagaccaaccacaacctcaaaccaaaaaccacaaacgcacaaaccaagcacaaatactcgacaactccgaatgacgtcatataggcctgcttagagcgaacgacgagcgccagcgaagtagtgagcgaggaagcgg

SEQ ID NO: 685462 - DNA, 495 bp, Homo sapiens
  misc_feature (344)..(344): n is a, c, g, or t
  misc_feature (357)..(357): n is a, c, g, or t
  misc_feature (391)..(391): n is a, c, g, or t
  misc_feature (432)..(432): n is a, c, g, or t
  misc_feature (473)..(473): n is a, c, g, or t
tactaaaaaaaaaaaaaaaaaaaaatatagccaagcttggtggcgtgcgcctctataatcccaactacttgggaggctgaggcacaagaatcgcttgaaccctgcaggcggtgaacagagattgagccaccgcactccagcctgggtgacagaccatgaccctatcttcaaaaaaaaaaatgcttttgtagatcggaaacagaggtttcagagaggttcggtgcctccaccaggtcacccggctggaagtgacaaagctcctgccacaacagatctctctcttgctgttatttcccagcctctggggattggcctccctagaggaataaccccagtgcacccanatgtcatctcgangtggatcatgttcttcttgcagcctgtaggctanagcatggtgcctaagccagtgtgctgtgcctctgggttgcnttttgcgtggtctcgccatgagtccgccctcgagcacctcntcctcaggtcactgggctgggg

SEQ ID NO: 685463 - DNA, 102 bp, Homo sapiens
accgtatgtgggctgactggcattgtattagcaaactcatcactagacctcgtactacttgacacgtactaccgttgtagctcacttccactatgtcctatc

SEQ ID NO: 685464 - DNA, 302 bp, Homo sapiens
  misc_feature (13)..(13): n is a, c, g, or t
gggtgactgcacngctctccctctgtgccctgggaagttacagggccccctgagctccacagcatgttggtgacatttgtccacaacacaccgatgtgacttgttcccaagtccgtctccctggcagaccccgacctcctatggggtgacagctggggtcttggacatgtcccattcctaggcttgctcagctgcctgggggcacctgtccaagtttgaagtgacagtaatggtggtggctcctgtgtcaggaaccatttgtgatacagcaagcctggggtgggtgagagcgtaactcctcg

SEQ ID NO: 685465 - DNA, 102 bp, Homo sapiens
ctcacgagtgagtgtggggggtgagctggaaagcacagatcagacagcactgtggtgtggctggtgtacctgggcccaaagggggctggaggctccatggtg

SEQ ID NO: 685466 - DNA, 290 bp, Homo sapiens
tccctttcgcaatagacccagtctttgtcctcgaggctcccaagggcggctggtcttcattcccagctctatgtgttctgtctggggtaggttctccactgccttcttggcaaaaaggttggccagaaagctacttctatgtacttcagcttctgggccgcctgggtgttggcaccaatctgcagacacccaatctactggttgtaccctggccagtgtgccaacccttccccattggggttcccattgcgagcccagttgggccagaatttcatcaccatcttgctaag

SEQ ID NO: 685467 - DNA, 459 bp, Homo sapiens
tgcactgaccatcacttggtccttctttccctgtatcccaaatgaagcttttaatcaagaaatcctttcagccaacatgtgcctaggattgtcagagccttgtccctagcccctggggcagatactgtaactctgcctgctacaggagaagttatgtgtgtggaggaactaattttgcatgtgatgcaatgtaagaaggcccttcttgtcccaagacccagggtatgctggctcctgtggacagttggaagtttgcttagggaaactttaagcaaggagactttagaaacccccaggatgactcatagcaaaacagatatttttcttctacttttagaattttaaagagcattttacaaaagcaaaactcaaagtgtagacatgtcattggcagtgtgataagagtattttcactattctctaccctaaacactactgccagatttttaaaatcttctt

SEQ ID NO: 685468 - DNA, 431 bp, Homo sapiens
  misc_feature (17)..(17): n is a, c, g, or t
  misc_feature (27)..(27): n is a, c, g, or t
  misc_feature (55)..(55): n is a, c, g, or t
  misc_feature (86)..(86): n is a, c, g, or t
  misc_feature (139)..(139): n is a, c, g, or t
  misc_feature (148)..(148): n is a, c, g, or t
  misc_feature (176)..(176): n is a, c, g, or t
  misc_feature (194)..(194): n is a, c, g, or t
  misc_feature (301)..(301): n is a, c, g, or t
  misc_feature (342)..(342): n is a, c, g, or t
  misc_feature (389)..(389): n is a, c, g, or t
cttccaaaaggattttncccaagggantgagggaaagttgcaaaaattcaagaanggctgtggttgagattggcaaacaactttanccctgggtgtggatgtggatgacattgagtaattccctagagggggttccctnaggaattgnctaatgggttgctgttggaactggaatnggagtgcatagctgaagnagaggtaaagaaaaagaaagtgcaggagaagggaaaaaaagaactcccaagaatactcacagtgatgggtttagcagaagcttcttcagactccaacaagctccttnagaagtctgaaaacatggaccccaaaactgaaaggttttcnctaatagagaggaaagttcatggtgcattatctgcctacaagcaaanccaggattcaaaaaaccctttgagctggagcttcaaagcaca

SEQ ID NO: 685469 - DNA, 188 bp, Homo sapiens
agcagtttgtgcctcccagtctttcacacaccatggttcttcccaggtccatgtcatttagtgctttgcttcagcagccatcttgcacagcacttcaaacaagtgtcaataggccatggtttcaaacattttcacaccattccaagtcaggagcacaatcatttccatgctagtacagcagcattcca

SEQ ID NO: 685470 - DNA, 390 bp, Homo sapiens
catagaaaatacacgaattggtccttggccccagaatgagattaaaaactggctgggaattgatcttaaccccaaaaaactcagacgggtgtcgggaacactagagagggcgggtcagtacccactcgggagcatttctcatcagtagtccacattacaattcatccatccttggccattagtgtcattccttcacagtgaacactcaggggcccagggcattttattgggcattacctcccaggggtggcaccaagctaggtgctattggtcatcggctctgtgtcacaccagagaaccaggctacaagagaaaaagcagaggccaggagttggagggagaattagtcgggtgaagaacccggtatccataaagacccggattccatta

SEQ ID NO: 685471 - DNA, 1449 bp, Homo sapiens
  misc_feature (1331)..(1331): n is a, c, g, or t
tggaacttaacagatactttattggtcacctttcacacaaagcacacctccagtcctttaatgtgcccagtgaaactaattccacagtcagaaacatggctagacactttattggaagaaattacttgtaatagagatagtttgcaatgttgtatcaagtatgcatgttggtgaacatgaggattcaccttagaaacatatgtcgaagaaagtttacttacttagaggagacacctttccgtacactattgagagtaaaccaagtataatgtatgtggtgtgtttgtggtataaaatgatattctccaatggggcactatcggtaccaaagcagcagttacgtgccgcccgcggatttgacattttagtgaccagcggtggtgaccttaaggaagtggaaaccttttaagagggtaaagagtctcgcaattataagggtgtagaccttcgttcgtggcagaaaatagtgcagcgaaatcttcaaggatagcgcgcttaatattgggggttgaagtgggacaatacatgggaatccataagtgctgcaaactcctggaaaaagcctttggaacgacggggccgaataatcacgatatagcatggatctcatgaacatagtcgaagattaaaagtgtgtagaagctaataaggtacgatgttcagcgctattaagagttaaaggtatatgggaaatttgcgtgaacgtgacgcgtgggtaatccgagtctgaagagaacaaagatttccttcccttgtataactcgtatagttttttaagcttggaagattggggctcaggaaagagaaatgggggaaaggcgaaaaggtgtggcgatgaatggccatggaggtttaaattaacgccacgtggggctgtcagacaaatgtaacccaacgggttaaggcagcggcgttattagacgacagggccacccacaggctaatgtgcgggaacagcgggacacaacaaggccgctctacacaaagggctatagaccaccaacatgttggaggaaaccgtcgcagagaggagacccgcccaaccaacatggcgcggcgccgacaaacaacaagagaacccggcgcacaacgtagagatctaaaccatgtcgctccgcacagggaaaccctactcgaagacgagaagaaccctgaaggggggcagagacccctgacaaccggacccaccggtcgcacacacagcgcgccgcgggcgccgcgcgtcagagaggggaacacaaaacacactcgtgtcaccaaaacaacaagccacacaacacacaaaagaagacgacaacgcggccgcgacacaccacgagaccgacagaaancgatgacatgacgacgagagataaccacgagccaccggaagacagcccaggccgcaatcgctcgaacaactccatgcacgcagcgagagcagaagcgagacgacaccaaacacaacct

SEQ ID NO: 685472 - DNA, 1409 bp, Homo sapiens
ctttctggtttgtttactgtgtgtgcttctcctcctttgtcctctttgttgctcccttctgtgttggcgctttctgtttctgcctcgtgtttttctggtccgtgcgtattgtcttggtttcttcgtggcttacttgtgtcgtttgttttttgttgtttcttgttggtgtctcttttcttttcttccttgtccctctcccttctatttctatgtctaggtctgctttctggtccttctgctcgtctattcccctgtcttcgtgggtgtctttgtcttcactgtcttgtctctctttctttgaattgtggtctttcctctgctccatcctttttctcttgttcgatatacctctgtccccttcggtgtgcttgttgcacctctgtctgtttgtcctgtatgtcctccctattcttcttggccccctgactgttctgggtgtctcttccctgttcctatgtcttttccgtgcctcctctcattggctctctttaatctctcttcttctgtctgtgttgtcctctcgctgtccctttttctcgctttcttagttcatctatgtcgcctctcctcttgtgtttcttcctctgtgtttcgccttctttagggtccccgtacttgtgttggaccatgtctcgtctggcagcttctttgctcccatgcccccgtggtattggtcggcttctcagctgttgtgcaaccattccctctctttgtctgggattagatgatgacctgtactatctggtacgtgcagttttgatgcctccgtgtactctttacgataagtacatctagggatcttctctgtgagctcaaagtcgatggtctctcctatggactctccccacctctctgttgtactagtgcctgtccccctattgttcttcttgtctcctattgaagtgtcatgcggccctcccatcactggaatgtctgtctagtggggtgtctctggggttggattagaacactaagacggtgaacatgtatgagctgtgtgcacgcgtgtgagtgtgcatgtgtgtgtcgtgtgcaaagctccatgccaccccgtcctacagcccgcaaggtggtgtctggcgcatttgcctgacacaccagccccctctcctcctgagccattgtgggggtcgatcatgaatgtccgaagagtggccttttgccactgtagtcccatgcgccccctttctagtggctggatggggagacaggtcagggccctccaccctctgcagcgcttgcagacaaatgactactgcacactggacagcatcctcttttctagaagtctatttatattgtcattttataacactctagccactgcccttattgggggacagatggtactgtcttgcggggtggcctaggcagaaccactgccagaagaaccagttcctgcatacccg

SEQ ID NO: 685473 - DNA, 215 bp, Homo sapiens
ccgactctgggcttggaggtaagctgggcaggtcagtggatgcgaggtggttgatcccattctgtggcatgtggcacctcctccacgttcccgactgaccctaaaagcttcttgcaagggcagtggcgccatcattctccagattggttgctgccagccacaaagaccttcagggccagaggcttgccttgtgccctgcatttccggtgactttc

SEQ ID NO: 685474 - DNA, 677 bp, Homo sapiens
tgtggaagaaagggtctcactctgtcacccagggctaaagtggcgggggaacacttatggctcactgcagcctcaatatctcaggctcaagcaatcctctcacctcagcctcccgagtagctgggaactacaggtgtgtgtggcaccaccatggccaattaaatttttgtgattttatggaatgagacaaggtctcgccatggttggcccagggctgggtctatgagctcatgggctcaagcaatcctcaccacctcggcctcccaaagtgctggggaccacaggttgtgtgagcatagagcacctataccgtggttaccttagtgggtggactataagcgatgaacctcccgaggggtgtataacccttcgaagatcaaatcacatggatacagggactctatcagagtgccctgggatccttctttccagcctcatagtgaaacagcatcaaagatccgggtagacgggaacagagtaacacaaaccgccataccccaaacggggaggcaatttgcacgaatgcttgagaatggtacacaacgcggcagcaatgggggaagaatcaagcgaagttctcccgggtagggcaatcgggggacacgatctcacatgaaggaaaccggactctcacatgggcctagactgggacacaaatgcacaggtatccttggatc

SEQ ID NO: 685475 - DNA, 213 bp, Homo sapiens
acgtaatccattgtccctgacatctaccagacatcccctgttgtcagagaagaaatggagaaagtataagctggagaaacgctatcagtcaatgaccccccggacgttctggacaggcagaaatgccttgttgccttggtgtacctccgacacgccaagtggttccaggccagagccaatgggctgaagtcttgtgtcattgtgatccgggtc

SEQ ID NO: 685476 - DNA, 301 bp, Homo sapiens
ttttataatatatttcaagcatgttcataactgcttattgaagcactgtcatgatgactcctttaaaattagtgtcaggacaaggtgccatgactcatgagtataatccaaacactttgggaggctaaggcaagaggatcgattagcaccaacagtttgagaccagcctggacaccatagcgagacctcaggaggatgaggcgggacaatcattcaagcccaggagtttgagaacatgctgtgagcaatgaacacatgccactgcactccagacctaggtgacagagtgagactctgtctc

SEQ ID NO: 685477 - DNA, 853 bp, Homo sapiens
  misc_feature (272)..(272): n is a, c, g, or t
ctaatcgctttgtggtagctgtttgtcgccgtggtggactctgtgttgcagaccccgggggtaggttctcgcatgtcccatggggagcgtgcgttcacgtgcgtctcggaatatttcccggtgcagtaggtccccccgccgtgctcggtgtttttcgtgggccccgccctgccctccgggtggttcttcagccccggtggggccccatcccacggtgtgggtaccccactcctcgtgtgtgtgtgtcctccaacaccggttgtgcgtgtcgncccgtgagtccacgcacctatttggtggcccgcggtttgtcatccgctgccgcctatttgagtgcccttggggtgcacccccccccccggtatagtctgccagattctccgtgcttctccgtgtggcctctgcgcatctatcttcatcaccagcatcactatcatgcagccccccggtttgtttcccgcccctttttgaacgccgggcaattttggcccggcaccacatggcgtcacattccgcgtagagtcccccccacccctttgaagagggttgatgccgcgggccgtatctaccgatggtccacaggatggtttgatgacctccgtcctgactcaacactggtggaaccccacttttcctatcccagaataccccacaattattgttgggccatgtttgcgcaatttcctgtaaatcccacggctatccccatgagcgctgatgcgcacagaatgaacctaccattggaccacccggaggcgcccgatctttccacctgatcccgacgattatgtgcccctggatactccacccctgggtgaccacggcccgcagacatcccctctccaaaaaaaca

SEQ ID NO: 685478 - DNA, 733 bp, Homo sapiens
tgtctcgactaaaaatacaaaaaattagctaggcgtgatggcgcatgcctgtaatcccagctactcaggaggctgaggcaggagaatggttgaacccgggaggcggaggttgcagtgagccgagatgcaccactgcactccagcctggccaacaagagcaaaactctgtctcaaaaaaaaaaaaaaaaattagccagggggcgggctcatggccggtaatccgggcccttggggagaccaagggggggggatcacctggaggtcaggagttcgaaaccagcctggaccaattgggtggaaaccccggtcctctatttaaatacaaaaattagctggggcgtgggtgggcacacaactggtagtcctagctactcaggaggctggagacagggagaatcactggaacctggggaggcggaggtggcagtggagccgagattatgccactggtactccagcctgggcgacagaggagactcccattcacaaaagaagaaacgccaacacaacaccacaaaaaaacttgtggggggcacggcaggggcccgaaaaaggttttcaaaacccactcggggggggcgcgggggccccaaggtatgaacggggccaccggggtcaaagaacactcggtccacgacacggcgggtgtccccaaaagaaaccgcgggacaggcgcgtcggaccacccgaggggtcggggggcgcgggtctcacaaggggcccagcggcatta

SEQ ID NO: 685479 - DNA, 827 bp, Homo sapiens
cgcacggcttgaaggactttctttgcgaaccattgcgcccccttggcagtcaaatgtagcggtttatttatgaaggggggaataaaccttattgagagttaccaataaaatagagaaccactgtggggaagaaccatttggacctcggaattttgagggacctttggaccttgttctggggtgaccgtgcaccactagggatgtgatccccctgtggccaggtacagcataaattaggagttaggctttagcataaatttctagcgcatctgagtctcctgggatgggtgctctttggctggttttggctccggatggtgagatcagagccagctctttcctgctgctggcccccgccaatccagttgttgggatgccccagtgccagatccactaagtagtaagattttaatccaaaccacgacccaggtcccgaaaagccaggtcatgagtgtgaaattttccaatttacataaaagtagaagtatagaccagtttaaccaatttggtattaaaggagaggaaattgtagcagcttttcacagtttccccgtcccccaatagagggccgttgagacccttgtacctggaccaaccccttttgcactccagtgctttctgatgcccttaggagaattgttttgtttcaccaaagctgggaaggaagaaggcccttctgcagctgttagatctgcctctcagggaaaagtactaacttgttctttttgttcctggctttcatccgtttgtgagatttctctattttttttaaatataattttatttctttccaccaatataaataaaaaaccactttgggaccatga

SEQ ID NO: 685480 - DNA, 235 bp, Homo sapiens
tttcgcgatgcacgacatgatgccgatgcagtctcaaggtggatcgggcggatccatgggcggcggcatgatggatgacaacatgcgcatgcagcagccgaaccagcccggccagacgggcgggacgggcggaatgcaaccgcaaggatcgatgggccagggcggcgcatccggtcagatgggcggcatgcccccgcaaggtcagagcggctcgatggggagcggcactgcgttg

SEQ ID NO: 685481 - DNA, 180 bp, Homo sapiens
aactgcgctccagcctgggcgacagagcaaggctctgtctcaaaaaaaaaaaaaaaaaggttatgggttttggggcaaaatcctaaaaaataaggcggggaacactggctcctgcctttaacccaaaatactcaggaggctggtccaggaggtttgtttgagcccaggagtttgaaacca

SEQ ID NO: 685482 - DNA, 205 bp, Homo sapiens
  misc_feature (42)..(42): n is a, c, g, or t
  misc_feature (70)..(70): n is a, c, g, or t
  misc_feature (78)..(78): n is a, c, g, or t
  misc_feature (104)..(104): n is a, c, g, or t
  misc_feature (140)..(140): n is a, c, g, or t
  misc_feature (147)..(147): n is a, c, g, or t
cgactgataaaggcatgaggatgtggcctgcatgctgcctgntcttcctagaaccggctgcacctgctgntctcttgnttatgcaaactggctgcacctgctantcctttgcttatgcccctacccctggctatcctaantccctgntctcctgcctcactattactgtattctctacttctaaataaaaataaaacaaaataca

SEQ ID NO: 685483 - DNA, 475 bp, Homo sapiens
gcattttacagagtgctgattggcgcatttacaatcctttagctagacacagagtgctgattggtgcatttttacagagtgctgattggtgcatttacaatcctttagccacagagtgctgattggtgcatttacaatcctttagctagacacagagcactgattggtgcattgttatagagtgctgcttggtgcatttacaatcctttagctagacacagagcgctgattggtgcgtttttacagagtgctgattggtatatttacaatcctttagctagacacagagcactgattggtgtgtttataatcctctagctagacagaaaagttccccaagtccccactcgacccaggaagtccagctggtttcacctctcactagtaggaggagattaaaaacgaatgccaatcaacataaattatagaaatctatcatggatatatagaagacgacttattatataagtagtct

SEQ ID NO: 685484 - DNA, 449 bp, Homo sapiens
  misc_feature (161)..(161): n is a, c, g, or t
  misc_feature (243)..(243): n is a, c, g, or t
ctcagagcagtatgtgcatgagatgtcatctctaggcacaatgcctcttctgatacctcgaaaggcctgcttgaggctgtttacagtactagtttttgttttgttttgtttgtttataagtagaaggggctggtgctgtggcttatgactgtaatccagcnactttggagctgaggcagaagatcactcgaaccaggagttcaatccagcctgggcaacttagtaagaccctgtctcaaacanaaattttaaaaattaacctggcctggtggtggcacctgtggtctcagctacttgggaggctgaggaaagatcatttgagcccaggaggtcaaggctgcaataagtcttgttcacaccactgcactccagcctggacacagagtagactatgcctctaaaaaataataaataggaaacactctagatacggttatattatgtatatt

SEQ ID NO: 685485 - DNA, 295 bp, Homo sapiens
tacaaagcagataacataatcatatacataaaaacacattaaaactaataaacacgtacagcaagactacaggatacaaaatacctacacaaaaatacagatgacagtactatatgctaacaatgaacaatccaaaaatgaaattaacaaaacaattccatttaaaatagtacccaaggaatacaatgcttaggaatacatctcaccaaggcagtgagacttctatcaacttaaactataaaacatagtataaaaaaattaaaaacctagggaggctgaggcaggcgaatggcgt

SEQ ID NO: 685486 - DNA, 295 bp, Homo sapiens
ataacgtcgaccaggtaggagtgcagtggcgtagatctcggcttactagcaactatccagctcctgggttcgaacgaatctcctgcctcagcctcccgagcagctgggactacaggcgtagcgcacaccatgcctagctaattatagtatatagtagagataaggtaacaccatataggccaggctggtctaccaactcctgacctcaggtgatccacctgccacgacctcacaaagtgctgggattacaggcataaaccactatgcccagctaacaaaatagagtacttaaact

SEQ ID NO: 685487 - DNA, 794 bp, Homo sapiens
gagagagagagagagaggagaatgctcccttcagcgctatccgtcgcctgccacactgaggggctactgcggggtcactgaatgttgcctgccatccaaaggggatgggcgggattggaagaatctgtggcatctcttttccctgttcacctccctgtcgtgccaggggaagcggcagggaccgcgctctgccaaggggccctcgtgtgtattccctttctctctgagggatatgtgaatattttgtgtctctggtgcagtgtatgggcgagatagtgttccctgacaccgatgtgtgtgtatttttaactctcacgcgtgatcgtcgtagaagaggtgaccacgaggagtttctgtcagtagccaagtgctattcttcatacgctagttgttgccgatcgtccctcgttgttgccgtgtgaacgttgacgtagagcaccaacgtcgtgtctgtcctctcccccggtgtgcactattattacccccttctccactcttcttcccaatctcggttgcccgttactacccacctctttgatatcgatagtgagatttgtgataaatcttcatagcctcgtttgtactcttgttgatagaagtagttgtaaacatttgtgtttcgtttcgtcgttgtagaaaccatctatacatttgtactattgcggacgggtaagagggatgtcgtccccatgttgcatcccgtgtgtcacctccccttttaatacgccaatcacgtgtctatgtttctgtgtacactcagtgttaaggtttggcgcctctcttgctccagtggc

SEQ ID NO: 685488 - DNA, 116 bp, Homo sapiens
  misc_feature (46)..(46): n is a, c, g, or t
  misc_feature (84)..(84): n is a, c, g, or t
gaaaagagtgataggacaagaccacgacttttcagaatccagtgangaggaggcgcccgcagaagcctcaagcggggcactgcnaagcaagcatggtgagaaggctcctatgaaac

SEQ ID NO: 685489 - DNA, 247 bp, Homo sapiens
tggcaccaggttgacataacaagaaactgctcgccgagaagactagaggccacagctgtaaaaatcaaaggacctggacggtgcttcatacccgctctagaggagccggttgctgtaatcgagtaaacccctgatcaagcctacaccgactctcttgctcagcctatataccgccatcttcagcaaaccctgatgaaggctacaaagtaagcgcaagtacccacgtaaagacgttaggtctacctgg

SEQ ID NO: 685490 - DNA, 1262 bp, Homo sapiens
ggttgtgtggaaaatccagtatgctcctcagaaaagatgatgcccgtggtgatcgatgacactacatacggcccgacagcaggatgagatgctggggcttcaagagtaagctacctagcagtcagaagccagcaagaggaagatctcgagcataatgaatgtgctctgatttcagtacgaaactgtccagaactgcaattgtccctcgcgacttctatgacctaatctatgtagaggcctagatacaaaattccctcagcgtttgatggtacggttatctatcgatgtggctacacaaaactagcggagtacacctgtgtgtgcgctcggagaccgagaatgacgggctgaacactcgtcgtgagggacgccatggtacgacaaccacgtatgaggacactggacgcgattctgctcgctcctacaaatcactatgactgtgcttcgagtatcatgatcccagatgaccatcgcatcgaaggttcttggaggaccatttgccgatgttgtcggtacaatctcctaggtaggccttagaaattttgggacagctaggggacatgggctagtcgctccgagggagtgaccaagctttcaagacgagcagctggcaagcgagcctgcctggaatcagtacattccgggagaactaggtggaaccaaaaaattcctgttcagcactgggccgaccaggattcccaatcctgggacagaacggaggaaactaccagggagtttagccaagaaagatggaccagatcatcgaaggtaacatgaaggccacgtttagttactggagtgatccagacaggaaacagttacttttcagcaatgtgtatgcgcctggaagatgatcctgagatgaaggtggagcgctacaagcgtcacctttgaccaaaaatgaggacgctagggttcactgaccttgaaaacagagggctttgaggcatggcttgggtccgcaatgggtagcagtgggttgctccaagggccagctccagcggtgatacttcctggagggctatgctattcagacagtttggaatgaaaggcaaagggccggagaagtttttttcctcacaacacctgtcccaagggtgtgcgaggccacaatgcactggcccgaaaacctggacacaacttctaaacctctggacgcgaccgggttagccaggtgtctatgcacatattgggaacttacatacaatgaaaacacaaaaacagggatgctacaataaacgagtccacacccataaggtatg

SEQ ID NO: 685491 - DNA, 919 bp, Homo sapiens
gctctctgtgtgggtcctgtagacccagagaggctcatggtgcactcgacccggctgggagagctggtgtgtggggaacatggcctgggcctccgagtgctcctgtctgctgcccctgcttctggctgctggctctgctggcctgcctgtgggccctgtgctgcccaagggaggacattctctgtccttctggccagactgatgtgtgacatgcccaggtcctccccagaggtgcagcagtctcgcccaatgcacgactgtccccgtgggagcctccgtcaacgtctacctgctccaccagcgggggcctgacgtgggatctacctgaggcagactctgggacacaggacccaagacatcatttagctacgaggacggaggtggttgcccactacaggacagacggaatccgtgggccacaatcgacttctacagggatcccagtgacaagcctgacttatcacgcatgcaacctgcctagcagctgtcggacaacttggcaccgtacaccatgccaagtgccatcacaggaggtcaatagtcataacgtgctaccgagcaacccatgggtcacgtgtgtgacaggaatagagacaagttcacgcaaagggaattgtgcgacaagaatagcttctggaacgacatcacaatacaaagtgtgacacatagttggcatgccaattcgcaactttgtcgcctaaaaaactggaaccaagaggtgatttacagggagcaccaatctcaccattgaaaaacatctggcagatgacatcaaagtggcgatactatgtaccccacggttatacgttagaaaaagcaccgtgcgaaatgaaaagagcctaatcaagcgccacgattagagccatgagtagtggacacaatgcggaacgaggcgacaacaacatgaagatataccctt

SEQ ID NO: 685492 - DNA, 707 bp, Homo sapiens
  misc_feature (548)..(548): n is a, c, g, or t
  misc_feature (597)..(597): n is a, c, g, or t
aaataaagtatttagtatttcttgtcagacaggtctggtgttgatgaaatccctcagcttttgtctgggaaagtatttctccttcgtgtttgaaggatatttttgctggatgtactattctagggtgttttcttccttcagcacttgaaacatgtcatgacactctctcctgacctgtaaggattctagtgacaagtctactgccagatatattggaaccccattatatgttatttgtttcttttctcttgctgcttttagggtcctttctttatccttgatgtttggcagtttgattattaaatgccttgagatagtcttatttggattaaactatcctggttttctgtaaccttcttgtacttgaatgttgttaagcttactacctctgtctctctctaccccctctttaaggccaataacttagatttgtcctgttgaggttattttgcagatcctgtaggtgtgctttattgtgttttactttttttttcttttgtctcctcaagttgtgtgttttcaaagagcctgtcttcaagctaattctntagcttgatcaattctattgagagattgatgcattctttagtatgtcangtgcgttttttcactctagaatttctgcttgattcttttaaattatctcaatctgttaatttatctatgattatagaattctgttcccggcaggtgctatgcttcaccct

SEQ ID NO: 685493 - DNA, 116 bp, Homo sapiens
  misc_feature (49)..(49): n is a, c, g, or t
gaccagcacgtgcctggcatgccccttctctgtgaaggtgacacgcganggccgggtgaaagagagcatcacccgcaggcgtcgggctcctttagtgggcaacgttggtagtcatt

SEQ ID NO: 685494 - DNA, 524 bp, Homo sapiens
agcgggcggtcctggacttcctcttgctgcaggacccggcttccacacaatctatacgagcacggcgtaactcaggcgctccgtacggcctgggtgcctacgccgccagtagcagctagggtcgtccagtagttatcccgtggacgggccttctggtgtcaagcttacggctgcccgtgcggagtgcctagggcctgagtcgctctcccagtgagccgtgcatgtacgccccgctgtttgtgcgtactggcgctctgattccgccttacaacatgcgcctccgacacccgttgcctggttgccccatgcgacactgccagacatcgcactagcgaccatctctatgttaatccactatcacccttgaccgaatccacaatcgctacgaccagtctttgttagcatcattaacccataggacaactcatcaaacagcaagatctcaaatatagagcgcgacacatgaatctttatgtaacataacgatcccatatcgatacgactctgatctgtctattataacg

SEQ ID NO: 685495 - DNA, 756 bp, Homo sapiens
acagggccctctggggctcagccctgagctggcgtcacctgtgcaggcctctggggctcagccctgagctggcctcacctgggttccccaccccgggctctcctgctcctgccctcctgcccgcctccctcctgcctgcgcagtccttccctaggcacctctgtgctgcgtcccaccaggctgagcagagtcctctcggggcctgtgcgcactagcctccctctcctctgtccccatagctggttgtttcccaccaatcactcgactaacagttacttcacaatataaactcaaagcaagctcttctcctcagcatatggggcagccatggcctctgtctcgtattagggaaaccaacgtcaggcggccgtcgcagacataccatctcggcgacctcggccccgtctcctgagcggtccttgactgtgtgacccggactggacccttgagcctacagccctgagaggccgctgcttgacacaaaacctgaatcccagaagccttcttgaagagtaacctcgccaaggcaggcgcatgagatggtcaactcacagaagccctcgcatcgactcacccggtgtgcttaaacccccgtcctggatccacatccacatccagcatctatgacgtcaggacttgcaccatgaaccactgaccaagtcccacaatcgcatgaccaccacgcgggaacgcagacttatacttgcaaacacaacagcaccacctctacccaaactacacacttatggaagtgct

SEQ ID NO: 685496 - DNA, 382 bp, Homo sapiens
acctcgtgcctccgggggtaataagcaattctcctgcctcagtctcccccgtccccgcccccgagtagctgggattacaggcacctgccaccacgcccagttaattttttgtatttttagtagagatggggtttcaccatgtcggccaggctggtcttggactcctgacctcgggtgatctgcccacattggcctcccaaagtgctgggattataggggtaagccaccgcacctggccgcaggtaagagtttttaaaggcaggagtcttgtaaagacagcaggggaaacacacacacagacacacacggaaaaggcaggggtaaatttcaggacagcagaggctacaggcaagaatcataaatcagtacaacctgccggtgg

SEQ ID NO: 685497 - DNA, 180 bp, Homo sapiens
  misc_feature (171)..(171): n is a, c, g, or t
caggactgtagtcactactacagaatctggtacagcaacatggtgctaccacaactttacacttgaaaagtgttaggtggtaggggggatgttgatggtgataatgaaagtgggccagccttatttgactgtttgcttagtaccaaggattttaccatgtgtgaactaccncacgtacat

SEQ ID NO: 685498 - DNA, 330 bp, Homo sapiens
  misc_feature (5)..(5): n is a, c, g, or t
ggaantggggaggtctcactcttgttaccattaggctgggagtgcagtggtgcggatttcggctcactgcaatctccacctctcgggttcaagtgattctcctgcctcagccctccaagtagctggaatgacgagcatacgccactaagcctggctaatttttgtatttttagtagagacagggtttcgtcaagttggccaggctggtcttgaactcctgacctcaagggatccacccgctttgacctcacaaagccctgggattacaggtgtgagcccaccatgcccaaccttaactttattttcatctaaaaagctttcaggcgaaaa

SEQ ID NO: 685499 - DNA, 392 bp, Homo sapiens
  misc_feature (325)..(325): n is a, c, g, or t
acaccacctggcatacctacctctacactgtgggtggattgcttacacacacagcagcacccacaacccacctcagcccctgtgcaatgctgtatggtagctggaggctagtgcactgtaggtctgttatttctactctagcaaagggaactagaaggctaaaggaagacagtggattcctactgcacagtgcagaatggttaggcaagacggtggaccttacaatgagttgccacctgaggtgtataactacttggggatccgtgcacgttaacgattactaggactatgcagaaaccagagagtttaagaataccgtattganaaaccccacatgaactactcccgtcttacccgacgctctcccctctattttctctttaagctgcgct

SEQ ID NO: 685500 - DNA, 796 bp, Homo sapiens
aaaaataaagaatcccgagagtttaattttgtatatctaaacagtccctcccgataagtatgccctgctggaaagcagttcttattgtcgctagaagcgtttttcccaacctgataacattaatacaggcaatgagctttcctctgccgtgggcctggtctcctagtaagcagcctaattgtttggtaattgttacccatagcaggagtgtgcgaaaaatgtgcatcgaggttatggtacagcgtatacacaatgggattgtatggttcattttcttccagtgtttaatcgcatgatctcgtgttaaccaaaggatatttgcagtatttgtgtacagtttcgtattacgtgcgatgtatcaagcagcgctatatagtgtgtcaaaacactcgaatacatagtcttggtcacgagcaattttatcttgtcaaggttgttcgcaacaactagctgcgcactattcgtaggagtcttagacgtcctacaacatatggagccggctcttgggattctgtcttggtgatctgatctacaggcgtcattctgtcatttggagtctcctagggtctcgcatcagatcacatgtctattttatgagactatagggcttctcagcaagaggttttgattattagagctattatatacaagagttgtgatcacagtattatgcatcagtcatcagaagcaggtgtattactcccctggtagtcgaggatgacatcctatattcttctgagtcgagtccacaagaatacaagcatatcgactccgatctgacaaaggacaatctctc

SEQ ID NO: 685501 - DNA, 508 bp, Homo sapiens
  misc_feature (441)..(441): n is a, c, g, or t
cacgaggggatgttgtcccacatcatgtcgacctggccggccagcagatcctggtgcgccggcgcgctgcccttgtacggcacgtgcagcaggttgaccttggcgagctgcttgaagagctcgccactgatctgcgggctggtgccggggccggacgatgcgaaggagtacttaccgggattctcgcgggcgatggtgatcagctcgggcacggtctttgccggcaggtcgaggcgcgtcatgaggaggttgggcaccgaccacagcatggcgatgccggtgaagtccttgccggcgtcgaacggcagcttggcgtagagcgtcggcgcgatggcgtggctggccacggtgtagaggccgatcgtgtagccgtcgggcggcgacttggcgatcgcatcggcgccgacattgccgcctgagcccgccttgttgtcgacgatnaactgctggcccgtcagctcggagagctgatggcagacgatgcgcgacagcgtgtcggtcggtccgc

SEQ ID NO: 685502 - DNA, 177 bp, Homo sapiens
gatgagccggtaccgaattcgacagttgtgcagggcaccgacagcttgatctacaagaatggtttcctcaacttggaccggcctttcttgggtttctctgaaccccttgccgcacctagtatgatggacttgctccaaactagactgtagtgatggcgcacagcttgttcgagattc

SEQ ID NO: 685503 - DNA, 395 bp, Homo sapiens
cccttttattcttttttcaactggcatggaattcagaaggtagcttttgttttaaagacaaaaattatttttgaagaaataatattatatacaatgttagtaatttttatttttgttagatgatgttatcaaattatgttttcatttaaaaaggaaagtataggtgggcgggtcacaaggtcaggagatcaagaccatcctggctaacacagtgaacccgcgaatttactaaaaatacaaaaaaaaattagctgggcgtggtggcgggcgcctgtagtcccagctactcggtaggcgtgacaggagagtggcgtgaacccgggaggcggagcttacagtgagccgagttcgtgccactgcactccagcctgggtgacttgtgagactccgtccca

SEQ ID NO: 685504 - DNA, 362 bp, Homo sapiens
  misc_feature (323)..(323): n is a, c, g, or t
ttatcaggaagatgatagtctgcccttcctcgggaagctctgtaccagtgaggtacgaacctgtgggcaatctgaacacacctataagatgtggtggaggcaagttgagaagtcttacctagtcaggacgaacaagaacagggatttgcttcaaaaaaaaaaaggtcgggccaggttttaatagagcagcggtgcggggcggggggtccactccagcccggggtccacctcagacactctgaagccctagggttgaaggggtggggtcacccaaacagcaaagatgacattctggtcctccccgggggagctctgactcgggnaggcctgagacctctgtcggccagagaccagcagtcagg

SEQ ID NO: 685505 - DNA, 502 bp, Homo sapiens
agcgctcagcaatagtacctctctcctctctatagcactcatcccttctgaggtgtcatttcaccagccacctgagtaagtgctccagctatccccagaaccagctagaaaacatcccaagccttggtcatgtatagcattcaatgtccagtgcatactcgagggctcagaaatcggtgggttagtaccactttttcccacttaccccctttatattccacaaggggactcacagccaagcaggttaactctcccctccctacccccaccaaacccgggaaaatcacagacagcctttttacagctcctctttctcggcccccttcttcgggaaggcagtcaggatgttaaagctcttcgggagctcctccttcttcccgtcactcatctggtccttctcaatcagccgggcgatccgtgtcatctctgatgctgggaagtcctcccctgggtctaagatcttccccatgatcttcaggtatggctcagcgctgggtaccga

SEQ ID NO: 685506 - DNA, 558 bp, Homo sapiens
  misc_feature (14)..(14): n is a, c, g, or t
  misc_feature (43)..(43): n is a, c, g, or t
  misc_feature (111)..(111): n is a, c, g, or t
  misc_feature (149)..(149): n is a, c, g, or t
  misc_feature (151)..(151): n is a, c, g, or t
gcgaattgccgagnagaagcgagggccggagcgtctcctcgantttcagaacgattcgcggggccgtgcactcttccaggatgtgcagaagccatctcaagatgaatgggntaaaaccccaggaggccatggaagctgccttggccatngntgaagaaccttgaatcaggccctcttggatctgcatgccctgggttctgcccgcgcggaccctcatctctgtgacttcctggaaagccactatctggataaggaggtgaaactcatcaagaagatgggcaaccatctgaccaacctccgcagggtgcggggccacaaccagcgcagactggcgcgccccaggggtctctgggcgagtatctctttgagcgcctcactctcaagcacgactaggaggcctctgtaccttccaaggggctcccccctctgctctgcaccagcccgccctgggacctccacctgaatgaacctctcaagccactaggcagctttgtaaccgccctggagcctctgtcaagtcttggaccaagtaaaaataaagctttttgagacagcaaa

SEQ ID NO: 685507 - DNA, 326 bp, Homo sapiens
gacgatccccttcgcggtatcataatggtaaacggggtttttttgtgtctctgtctcattcagttctgctctgatcttaggggagggcttgccttctgctaccttttgaatttgtttgctcttgcttctctagttcttttaattgtgatgttagggtgtcaattttagatctttcctgctttctcttctggacatttagtgctataaatttccctctacacactgctttaaatgtgtcccacagattctggtatgttgtgtctttgttctcattggtttcaaagaacatctttatttctgctttcattttgttatgataccgccaa

SEQ ID NO: 685508 - DNA, 354 bp, Homo sapiens
gagaaaccccatctctactaaaaatacaaaaattagccaggtacggtggcatgtgcctgtagtcccagctcctcgggaggccaaggcagaataatggcttgaaccggggagggaggttgcagtgagccgagatcgtgccactgcactccagcctggacaacacagtgacactctgtctcaaaaacaaagagaagaaaaaacttttattaggaatagaaatgttaacttggccaggcgtgtgtgctgaagcctgtaatcccagcactttgggaggccgaggcgggtggatcacgaggtcaggagatagagaccatcctggctaacacggtgaaaccccgtctctactaaaaatac

SEQ ID NO: 685509 - DNA, 184 bp, Homo sapiens
ccgggtaactgcactgaccttagggaatggcaggtcaagttcacttctggtggggatgagaagggagagagagctagagggacacagagaatgagaagagatggatgatctgggagagtctcactttggaatcaggaattggagatcacattctagtttatcacagccatacatgtacaggaca

SEQ ID NO: 685510 - DNA, 456 bp, Homo sapiens
ttttttttttaattttttgagattgacttttgctcttgtcacccaggctggaatgcagtggcacaatcgatcttggctcactgcaacctccacctcccaggtttaagcaattctcctccctcagccttctgaggagctgagattacagccatgcaccatcacatctggctaatttttctatttttagtagagacagggttttaccacgttggttaggctggtctcgaactactgacctcaggtgatccgctcgctttggtctcccaaagtgctgggattacaggcatgaaccaccgcgcctggcccccgttctccttactgggtatgttaaaattatttctttcaaaggaaaaggctggtcaaagtgcaacggtctttacaactaattgatcacaaccagttacagatttttttgttccttctccactccaactgcttcacttgactagcataagg

SEQ ID NO: 685511 - DNA, 155 bp, Homo sapiens
agtcgagtgttcgcagtgccggctccagcgcggggagcagctgggggcgttggggtgcctggcggctggggcctggttacttggtgacgtgcagcgctctctctggggggctgccgctcctcttggggggagctggcctcagatgcccccgtagg

SEQ ID NO: 685512 - DNA, 167 bp, Homo sapiens
  misc_feature (7)..(7): n is a, c, g, or t
  misc_feature (30)..(30): n is a, c, g, or t
  misc_feature (41)..(41): n is a, c, g, or t
  misc_feature (117)..(117): n is a, c, g, or t
  misc_feature (136)..(136): n is a, c, g, or t
  misc_feature (157)..(157): n is a, c, g, or t
ccttgancctggtccacggaccgtggggancgggggaaagnactcaaaatattggtcttggctcctcctgcccgtgcaggtccggacaggagcggcaggtagagcagctgcagcatngcccaccaggcatgaggcncggcagcagcaggctggtagnaggcggcacc

SEQ ID NO: 685513 - DNA, 403 bp, Homo sapiens
agatgtaaaatcagtgctggatcaagtcacagatgacattttaatcggcattcagaccgagataaacgaaaaactgcaaatacaggaagaggcctttaatgcacgaatagaaaattcgacaacggcttatggacttggtacaaggagagtgatgctaaccttcacagaaacacacaaaaccagccagaataacagactctctggcgcgtcgtgtctccatcacttagttgtgcaaggaaaaccaagctcaactttttatcttcctacgcacttcgacaagtcttggtccccacttcgccatctcccatcccacaccaccccctgactttattgcaccaactctaatgcgaacatttctgcatccacgagcttgaaaaatcacatctcaaaatccaattacacc

SEQ ID NO: 685514 - DNA, 504 bp, Homo sapiens
aattgatttctcagccttcctagtagctagaaaaataatttgacacaattctggtcaatgataaatgagttgaaatttgctgaatctaccctgtccccttccctttttttctaccttgaatgaagttctgatgtataggcctgaaaccaccatcttgtcaccatgaggtgacagccataaggataagaccaagaaaatctcagaaagtctagttcctaatatcatatcagatttaacatttttgtttcttttgatgtataggcctgaaaccaccatcttgtcaccatgaggtgacagccataaggataagaccaagaaaatctcagaaagtctagttctaatatcatatcagatttaacatttttgtttcttttttatttacctagcagttcatttatgcaccaagattcttgtccccaaggttgtaacttagcagatggagacagacattaagcaacagacatgataaacaacataattatacagaaaaaaaatagatgcagt

SEQ ID NO: 685515 - DNA, 197 bp, Homo sapiens
tagccatcccttatgtactcgatcgttagcaatccatgactatatattcccgacaggcagatcagtaataatatctgtgctaacccccaatttgtgatttttagtgagtaattttaccttaagaaatatgaaactctacctgacaaacatacaatgttttcttgttgccaacaaatatatagaagcataaatttgaa

SEQ ID NO: 685516 - DNA, 115 bp, Homo sapiens
ataaaatgcttaaagaggcgggtggagtggctcacgcctgtaatcccaggttcaaacaacctaaaaaaaagaactgaatttttttttaggagacagagcaagaccctgtctcttt

SEQ ID NO: 685517 - DNA, 179 bp, Homo sapiens
ggaacaaagaaaatgtacagagttatatgcgcttttttttggtatgggggacaagaaacacttaccaacaaaaatatttcaacaaccccaaaataacttactcacaaatatgcaaaattatctatggcatagtatttcgcactcgatgacatttagagataaaaaatcaaatggagctt

SEQ ID NO: 685518 - DNA, 118 bp, Homo sapiens
gcgacggcggcggcggctgaagggctggaggggtaggcttcctctcaccgctcgtcctccttcctcgctccgctcggtgtcagacgcgccgccgccgcgccggggcggacttctggcc

SEQ ID NO: 685519 - DNA, 117 bp, Homo sapiens
  misc_feature (28)..(28): n is a, c, g, or t
ccaaagtgctgggattacaggcgtgacnaccgcgcccggcatctgaactttgttttatttattttttttgagacagaatctcactcctgcctgggtgatagagtgacactccttctc

SEQ ID NO: 685520 - DNA, 543 bp, Homo sapiens
gcacgaaccctatgtaaatggtatgggccagagatctaggtgtgcactcctcctgagaatctaatgcctgatgatctgaggtggagctgaggcagtgatgctagtgctggggagcaagctgcaaggtacagatgaatgttagcagagaggtttgactccacagagaccataataatacatcagttgcttgcagactcatcagaactctatcagtgagtggcaagtgacaattagcctgcctctggtggcaggctttatagtggcaagtgagctgatgtacttcaattgtacagctgtatctggtggcaggctttaagtcagaatccaacacttatttcagtccgtgcatggcctgcccgttattttatttaccactgccatccacatctctttcccacactgtgtacttgtctcagccatggtttgggtaagcccacccaccaaccctagccaaaatgagtaaaaaccaaacgtcactggagagcttctttgaaaagggggagggacccattgatgagacagcagaacacgccaagactgaca

SEQ ID NO: 685521 - DNA, 488 bp, Homo sapiens
  misc_feature (129)..(130): n is a, c, g, or t
  misc_feature (133)..(133): n is a, c, g, or t
  misc_feature (137)..(137): n is a, c, g, or t
  misc_feature (145)..(145): n is a, c, g, or t
  misc_feature (148)..(148): n is a, c, g, or t
  misc_feature (162)..(162): n is a, c, g, or t
  misc_feature (168)..(168): n is a, c, g, or t
  misc_feature (174)..(174): n is a, c, g, or t
  misc_feature (178)..(178): n is a, c, g, or t
  misc_feature (184)..(184): n is a, c, g, or t
  misc_feature (193)..(193): n is a, c, g, or t
  misc_feature (208)..(208): n is a, c, g, or t
  misc_feature (219)..(219): n is a, c, g, or t
  misc_feature (324)..(324): n is a, c, g, or t
  misc_feature (331)..(331): n is a, c, g, or t
  misc_feature (349)..(349): n is a, c, g, or t
  misc_feature (388)..(388): n is a, c, g, or t
  misc_feature (439)..(439): n is a, c, g, or t
  misc_feature (479)..(479): n is a, c, g, or t
tcacggtgacagcagaggcagtcagtcaagcatcatcacatccggagaactcggaggaagaggagtgcaggccattcaccatccctcaggtgctgagaaccaaagtgcctagagaagggcaggaggagnntgnccangatcaggnagncgatgctgacgagnaggctnccaagnccgnccattntgttcaggnccctgcagtgctganagagaaggcanaagccaggcgcatggcctttctcgcaagaaagggtaccggcatgacagctcacagcagtggccggcagcccccgaggccatgggcagagccgtagacaacccatnaactcangaagaatgaaccaacaangtacaagaccaaccacaccggagaaccatggccgaccgnaagaggagcggcatatcccatcctgagacctgtcagggccagtggggcagnggaccagactcccaggccggctccatcgctggggcctctnactggggcc

SEQ ID NO: 685522 - DNA, 166 bp, Homo sapiens
cagatctaatcggccgcctttttttgctagactaaggtagactttgctgtatcttactgactacgttgatagattactccgaagtacttctccaagctctataagaaagtgtgacaaacctatgtaatatactaggattcagttataaccagaggaggacaaacac

SEQ ID NO: 685523 - DNA, 1226 bp, Homo sapiens
cggtgctgcaggaatcggcacgagaagagtctgaacgaccaacctgaaattgcagatgttggttctctgatgagtgcagaagaaacgaacaggatggttgacacagacagcagacacgaagaacgacttacgtgagaaacgcaccctactgcttcaacgcacagaagcgtaccacaacaagaccacaagcgccgcatcatgggacacgcagcaacagtccccggactgcagtcattcacgttaagttgcagtggagcttacaggtagatacatatcgtcattacaggcagccgatggaaccccagttgcagcttggcgtcaacgcatcgacctatgtgacgcatgctgcaacgcgactttcgtaccaagggtatgacatgcgcactccgagtagtggacataatccagacatgcgcgccgatacataataatatgagtcgccccactggcacggatatcatacgcctatagactgcatacttatgagctgttggacacacacaactgcaacacgcaacacaaggcaacgccattatgtcccaccattagtagtagttactgcgagcagctattatcgatacgcatatgggattacactaggtgcagagcagcctcaaatcaccctggcaatcatcattgaaactctccatatcagcaagtgggtaggtatgacctcgtgcgggatctttcgcctacctaaaccagtataccacgctaaaggatagttcggccaggcaccggcacgaagttattgccaacgacgaagtaccaggacagaaatccagggacacacgacatgcgctagacactctgattagttggaactgggcgggacgactaagagagaacctaccgacgcacaacatcctaattggagccggatctactaccgttagacggttggacatcactgagcaagacttccaactccggagcgaaggctgactcagcgtgttactggtccacaaatcatgcccctgtggactcaatggtgaccaccaggactatgtcacagaactgaagagaaccacaacaatcaattaatcactggtggactggccgggagaagtcgccttatgacactggacctgtataagtgcactaatacgccatgagatacgacaacgcgcagcacgtgacaacgtaaccaagcgtaccctgcaacacaggaacacgtgcctagtcaacaagggagtctccagtcatctattttatgcagcgtcccg

SEQ ID NO: 685524 - DNA, 552 bp, Homo sapiens
  misc_feature (193)..(194): n is a, c, g, or t
  misc_feature (197)..(197): n is a, c, g, or t
  misc_feature (201)..(201): n is a, c, g, or t
  misc_feature (209)..(209): n is a, c, g, or t
  misc_feature (212)..(212): n is a, c, g, or t
  misc_feature (226)..(226): n is a, c, g, or t
  misc_feature (232)..(232): n is a, c, g, or t
  misc_feature (238)..(238): n is a, c, g, or t
  misc_feature (242)..(242): n is a, c, g, or t
  misc_feature (248)..(248): n is a, c, g, or t
  misc_feature (257)..(257): n is a, c, g, or t
  misc_feature (272)..(272): n is a, c, g, or t
  misc_feature (283)..(283): n is a, c, g, or t
  misc_feature (388)..(388): n is a, c, g, or t
  misc_feature (395)..(395): n is a, c, g, or t
  misc_feature (413)..(413): n is a, c, g, or t
  misc_feature (452)..(452): n is a, c, g, or t
  misc_feature (503)..(503): n is a, c, g, or t
  misc_feature (543)..(543): n is a, c, g, or t
aaggtgcctctgcacccaggcgagagcctgccctaccacagtgtctactcgaaggatgagtacgatgacacatacgatggcaccaaggtgggcgccaatgatgcagactctgatgacgagctcatcagccgcaggccattcaccatccctcaggtgctgagaaccaaagtgcctagagaagggcaggaggagnntgnccangatcaggnagncgatgctgacgagnaggctnccaagnccgnccattntgttcaggnccctgcagtgctganagagaaggcanaagccaggcgcatggcctttctcgcaagaaagggtaccggcatgacagctcacagcagtggccggcagcccccgaggccatgggcagagccgtagacaacccatnaactcangaagaatgaaccaacaangtacaagaccaaccacaccggagaaccatggccgaccgnaagaggagcggcatatcccatcctgagacctgtcagggccagtggggcagnggaccagactcccaggccggctccatcgctggggcctctnactggggcc

SEQ ID NO: 685525 - DNA, 130 bp, Homo sapiens
taagactgccagaagtcagaggaggagatgacttcttcgttcctatccctaaatctggtatgttcatagtgtcctatagtcctctattcctggtagataacctacacaaccgacagttggaggtttacac

SEQ ID NO: 685526 - DNA, 749 bp, Homo sapiens
ggtggttctaacccggtcccccccccccccgggtgaggggtggtttttcctcgtcctccctccccgcgggcattgtgggggaggtataacgggcccctcccctcccccctccccggccgtattgtttttgtttcttctctgtaggaggaccgcgggtgtttgttattagttgtgcccgccgcgggtgtctttcaatctctctggtcgctctcccgtggtggccgcccctccctcctggggcctctccctccgcgtggggtggggggtaacaccggcggggtggtccccccccgcccccgcggcgcgaggaattttgtttgtcttggtccgcacaacgattatcttctcccttctgtttgtttttgggttaaatgggcggttgtttgttttgccccgccttgacgtgatgtgccgctgttcttatagaatccttcttgagctgatagatcgtctttttacatggagagatcgtctaagatgactatagtgatacagtggagaagaagaccccacgtgttcatataggtcttttgtctcttttttttttgggaggggagtagggaggaggagtggtagtagaaccacctcatgaatatattttttcctaccaggacacgttgagtctccctatatataatgatgccggtaagcttctgttggggcgaaccctctttgaaatttttttttttttttccccccccccttttttttgtccttcccaaaaatagggcccccccaaatttttgtga

SEQ ID NO: 685527 - DNA, 133 bp, Homo sapiens
ggatttgctggtgcagtacaactaggcttaataggctcgaattcgagctcgaattcgagctcgaattcgagcgaattcgaggctcgaattcgagtcgaattcagcttctaacgttagaagcttgaattcgagc

SEQ ID NO: 685528 - DNA, 283 bp, Homo sapiens
caactaacccccatcaagtgccagaccctcccagtgttccgagagtcatctccatgctaaacagcctgcggtttatatgatttctctacccagccaaaaaaaaaaattggtccatcatgtccgcggttatctagtcttaagttatattctggcttttttctcccactttattatggggcagaagtaagcctatcatgttcttagaagggtttttaagaggggtcctggagcccttgaatcactttagcatctggggtaggatgggccaccaggaggatttggt

SEQ ID NO: 685529 - DNA, 167 bp, Homo sapiens
tgcagatgctcaagttacagctgaaaaaaatctgaaacagctatagacccatgacagacagatacaaagagtactgcattgttaaaaaaatgataaaaaaactccacacacttactcggtacacacgggataccgacgctcgagtttcggtaatcattgggtcatat

SEQ ID NO: 685530 - DNA, 283 bp, Homo sapiens
  misc_feature (88)..(88): n is a, c, g, or t
  misc_feature (98)..(98): n is a, c, g, or t
  misc_feature (102)..(102): n is a, c, g, or t
  misc_feature (120)..(120): n is a, c, g, or t
  misc_feature (135)..(135): n is a, c, g, or t
  misc_feature (202)..(202): n is a, c, g, or t
  misc_feature (222)..(222): n is a, c, g, or t
  misc_feature (226)..(226): n is a, c, g, or t
  misc_feature (229)..(229): n is a, c, g, or t
  misc_feature (236)..(236): n is a, c, g, or t
cacagtggtaattgtataccattgctattcatgctttacattccatatgatgtgcctgtaagccaaggagttttccccgtttgtaaanagccattgtngatnattgcatgtttgattttngaaaggtcattagtntcctgttacacatttggttcgtctggttcttgtcgcttaccgggtgtaatattgttcttccaaatanttgatcctatggtatgtatngctnttntaataanagttgtgttctcacctgttaataaaaaaaaacaaaaaagggcggccg

SEQ ID NO: 685531 - DNA, 680 bp, Homo sapiens
ctcagactcttatgaagcaagaaggagagaaggagaaacagtattaacaggaacttgatagtgggattatattgggatggaagagcacccagaactccagcagtttcgtgggccagatgggagaagattgatttcgcagacacaggcaccaagtatgacaggaggttcagggtgtgtaaagcgagacctgctccttaccccaaagtgctggtactattatcggacgagaaacagtcaaacagggcccagacgagggcctggtgaaagacgtctgaatcggaaaatcgagatagaacggatcttgtttgtgttagttagtgctaggcaggatgaccttgtgattctccatgagcaagagtatgacagtgtgcttgaatctgtctgcaaaactgaattcctaagcctcttagcaaagcgtaacgaggagaagacccagaagcaactacctctgaaatacagcaatacgcttgaactgaagttgaaaaaggacaactggggcccctggagtgcagggggctcccggcaaagtgcagttccaccaagggtttggggacctggctgtcctcaagcccagtaacaaagtgctgcaggtcagcatcggacctggacgtgccaagaactcgcgtcctaccagaaaggacaatagccaaaataaaggtaatccagtgggactcaaatgc

SEQ ID NO: 685532 - DNA, 252 bp, Homo sapiens
gacaggatcttgctctgtcacacaggctggtatacatgggtgagatcatagctcactgtagccttgaactcctaggctcaaaagatcctcccatcttagtttctctcaagtagctaggactacaggcacacagcatctcaagatcctggcctcaggtgaatcgcttgaccccaggaggtggaggttgcagtgagccgagatcgcatcactgctctccagcttgggcgacaggaactgactccatctcagaaa

SEQ ID NO: 685533 - DNA, 895 bp, Homo sapiens
  misc_feature (883)..(883): n is a, c, g, or t
gcccggtactgatcattctatttccccctctatgatccccactccaaatatctcatcaacaagcgataatcaccacccaaagaatgactaatcaaactaaacctcaaaacaaatgataacatacacaaacataaaggactgagcctgatctcttatacgagtatccttaagtcatttgtatatgtgccataactaagctcctcggactggcctgcctcactcatttacaccaaccaggccaatatctataaactagccatgggcatccccttatgagcgggcgcagtgattatcaggctttcgtctaagattaaaaatgccctagccaaattcttaccaaaggacaacttaacacccccattatccgccatagtgagtataatcgaaaccatcagcctactcattcaaccaataggcctggcggtacgcctagccgctaacataagtggcaggcaccatactcaatgcgctaatggaagcgccacctagcgagtatcagccattacccttcctctaaacttataatctccacaatctaattctactgcctatctagaaatcgtgtcgctgaatccaagcttacggttccaacttctagtaaggctctacctggacgaaacacataatgacccacaatcacatgcctatcatatagaaaccacagccatgaccccaacagggaccattagctctatgcctcgcagcatgtgattcactcatccatagtcataaacagcataacaactaccttacatgggggagtgccgagaagctacagacaaccattaaagtgagggatatataccaatcgagagagatagaacagcaacaaggggaagccaacaaatcatacgacccccaacctataccactcgtggatatnccaacgacgcaa

SEQ ID NO: 685534 - DNA, 119 bp, Homo sapiens
cacacaaaaaaatgataagtaggtgaggtgatggatatattaactagcttaatttaatttttctcaaaatatcacattatacttcataaatgcattcaattattattagtcaattgcaa

SEQ ID NO: 685535 - DNA, 251 bp, Homo sapiens
cgtagggtatggtcctaaatagcccactgagagtcatgagcttggcctgtagaggctgactggagaaggttctgggcctgtagaggctgccgggaggtaggagcataatgtagaatcagtgtgcgtgttaagcttgttttcctgcaactggatggtcccacctgagcgtgatgggagaaagtaacagatcaataggtattagattctcataaggacagcgcaacctcgatcccttgcagcctgcacccgta

SEQ ID NO: 685536 - DNA, 122 bp, Homo sapiens
cttcttttagctgtttaaaaaaaatggaacatgatgggtcgccaaaaggtgtcaagaatgcttgcgctaacagaagtcattttcttgtgctctgtgacccatcatgttccattttttttagc

SEQ ID NO: 685537 - DNA, 934 bp, Homo sapiens
  misc_feature (54)..(54): n is a, c, g, or t
atacgggaaaaggtgtggaaaggatgcacattttgggcgcaacgcccatggtcnaccaccgggtcgtggtgcgttcggtagctcaggcggagcacgcctatatcggggaaacaacacgcttggtgggtgcgacgggcttgctaatgtgtttctttgcgcggagcacaaaagctggcggccgttcttttatatgagagtactttttctttgcatgcactaattgtttcgccttgggggaacgccgtcgactgtgcgtttgtatgaagcgggccgtacctgagcgttgttcgtcttccgtctggcaccagtcgtatggttatagtgcgccgcccaccgccctgttcgagcgttgctttttcgagaccaaccggcttgcctgctacggaacaatctgtcctacctctgtgtgaagaattgtcccttgttggttattagaaacacgaaaaaatgttcttttcgttattagctgtcaccccccagggtaactgctccatgtctatgccgccactaggatgtaccgctcgcgagcatactccccgcttcgcaccgagacggtcttttatgtgcgtcgttgggtaatacgcgcaatgagcaggtgtcttgcgtgctgatgcatgttatagaataacagtggccactgagtgtagcattctggttggtcgacatcgcatggtcggccttccacgtccccgcatgaacgaggtattaggaggggcgctcttgctcgttttttatcatcactgcagcatgggctgtgtggatagtgacaagatgtctataataatagtgcagcatatgggagtgtcagggtcatcaaataacggagagctatatctctgacagaatccgaggcgagtcgccgtctttagcaagcaatatcaacaattatttcatgtgcaccgtagggactttcttgggaaaaaaaccaaatgac

SEQ ID NO: 685538 - DNA, 119 bp, Homo sapiens
gctcgatctaggatacagagatctctgcagtgcgccctgcctccagggagcgactgaagaagcagactgccgggggaacacctggattcatgaaccaaagcagcctcaagttacatagt

SEQ ID NO: 685539 - DNA, 363 bp, Homo sapiens
atgacagtactatacaattctgatttaaaagatagaaaaaacaaacacacacaagttaactgtacagatgaactggtggcacaatcagcgggaagcagcgagaagtcaaacctcagcagctaggttggtccagtcagtgagtgtataaccttgagcaaagtaacttgagcttctctgtgcctcagtttagttacccgtaaagtagggctgataattaataactagcctcgtaaaagtttctgtgaagaactaaaagagataatgtaacatgtttgaaataagtgcctcgattgttcgtaatgtccgctgtgtataatagactaacgctggccttcatcttctacagatatgttgaagaaatgg

SEQ ID NO: 685540 - DNA, 273 bp, Homo sapiens
aatctaagcaattcttctgcctcagcctcctgggcaacaggaattacaggcgaagtgccaccatacccagctagtttactgtattttcttgtagagatgaggttttgccatgttggccaggctagtctcaaactcctggcctcaaatgactcgcccgcctcggccttccaaagtgttcaagtaccggagtgagccaccgtccctggcctaatcttagtatttgccttagagatgggttttcaccactttggccagtctgtgcttgaacacttt

SEQ ID NO: 685541 - DNA, 271 bp, Homo sapiens
gagaccaccacagggggcaagcagacccgaaccgagcaatgcatgctggactttgactatgtctgctcccgagacaacctgtgagtggctgtcatgatctaccctttcactgtgaaccacaagcacaagttttactgggggcacaccgtaaccctgatgcctgtcttcaagaacatggctgatgccatgaggaaccacccggaggtagatgtgctcatcaactttgcctctcttcgctctgcctatgacagcactatggagaccatgaact

SEQ ID NO: 685542 - DNA, 514 bp, Homo sapiens
gaattgagtacacgactattgcgtgaacacgaaatattgactactatcaagtgcttgatgctttgacacaacaattattggtgaaacgatgtcagaataataatactagtatacaaacggagaacctggaatctgtaaggtgattccaaaaaccaattacgtcgaagatccactggtgaaacctgacacattctacctctgcttcggagaatggctagtcatacaacgagttcagtcatcctgcaagatgtattggtagaggtgtgctctatacataagacttcatctcatttgtgcttgtgcagaatcatcccaatcttcccaagactgaatgggcagtcctgtggctttcttccttttccatattcccaacaaggctacgtgaagttcaactcttgatgagccgcttacaacagcagttccttaggagccaacatgacaggtgggtcagatttccctatgagaaacaaaactggccacctacagcaaaatatcaaaatgggtaagtccttcc

SEQ ID NO: 685543 - DNA, 557 bp, Homo sapiens
tactatgtcgaggctgcactttacgagtcagctgggagctttaagcagcgctaatttctgggtctcactcagattctcatgtagtcagtgtggcagattgtccagccatcgggattttaataaatgtatttctttggtgatttaaatgtgtagacctgcttaagaatgactctaaattttctgggaatggggttgttctgggggcaagttctgcccacaaaggttcaggtattgactttattttttttttggagacagagtttggctttggtggcccaggctgtactgcagtggcgcagtcttggctcactgcaacctctgcctcccagttcaagcgattctcccacttcagcctcctgaatagctgggattacaggcatgcaccaccatgcccagttaatttcatattttaagtagagatggggttactccgtgtgggtcaggctggtctcgaactcccaacctcaggtgatccgcctccctcggactcccaaagtgctgcgattacatgcgtgagccaccgtgcccgtcctaactgcagatcttactttggaatc

SEQ ID NO: 685544 - DNA, 455 bp, Homo sapiens
gattcaatcatgtcccaggttgttccgtaggtcacatgagctggtgctgatccaaggtcccgtgatccgggttgtactcaaggtcctgtgtggccaggatgtaccgtggtcgcttgactcgagagttgtagcaaggtcgctgacgccaggctataacaaggtccctgagacatcgaactgtcaagcgtcctgaccagaggctgatcgaactttccatgagccaggtgccagcaaagttccctgaggaaggatacaccaaagttcctgtgccagtgctacacaaaggtaccagagccatgtccttcaacggtcactccaggcccagctcagcagaagaccaagcagaagtaatttggtgcacagacaagcccttgagaagccaaccaccagatgctggacaccctcttcccatctgtttctgtgtcttaattgtctgtagaccttgtaatcagtac

SEQ ID NO: 685545 - DNA, 106 bp, Homo sapiens
ggcttccgtccgcgagcggctaacatccaacctcttcccgagtgcccctaccacttccgggcccccaggccgcgactcttctggtcggaccgttgactgagtgtat

SEQ ID NO: 685546 - DNA, 133 bp, Homo sapiens
cgttcctgagtaaaaaggataacataacttggttccaagatacattcctcagaaacagactgaggacatgcatgcctttgtcactgaagttggctacaaagtggagcttctgcaaattgaaaacatggttttg

SEQ ID NO: 685547 - DNA, 118 bp, Homo sapiens
ataaactaaagaatttatcattcaactctagtactcacataggtacattgtgatttatttaaagttttgtccattttccatgaaagacatactgcaataaaaatgctactctgtggag

SEQ ID NO: 685548 - DNA, 307 bp, Homo sapiens
gcctactactactactaaatttgcggccggtcgacgctcacacctgtagtcctagcactttgggaggatgaggcttgagccaggagtttgagaacagcctggacaaaatagtgagactttatctctacttaaaaaaaaaaaaaaaaaaaaattagccggggtggtggtgtgtgcctatagtcctagctactctggaggctgaggtagggggattgctggagcctaggagtttgagcttgcagtgagctacgatcttgcttgtacttcagcctgggtgacagagcaagactttaaaaaaaagtcgacg

SEQ ID NO: 685549 - DNA, 129 bp, Homo sapiens
ctgttgctgctatgatctagaggatcccttcttgcccgctatcgaggacggtcattagttccatgcagttgagcagtttggagtggagtcttttaatcttgcagtctagcttgatctgcactgtggtca

SEQ ID NO: 685550 - DNA, 308 bp, Homo sapiens
cgaggactctcagcatggcgtctgtgttgtaaacgagccagctggtctggtgtctgctgtgccgacattatgactctctcaatggatcatgtattgattccatatttatatgcgtctacttcctgtggctgggatcaggagttcctgaaggttccgtgggggtgcggggggttggacaggacactccttcttggaaggcaccaagttttcccagccccactcccattacacacacacacacacacacacacacacacacacacgacacacacacacacacccagtgacacagagggtagcgcgcgcga

SEQ ID NO: 685551 - DNA, 2497 bp, Homo sapiens
  misc_feature (34)..(34): n is a, c, g, or t
  misc_feature (94)..(94): n is a, c, g, or t
  misc_feature (119)..(119): n is a, c, g, or t
  misc_feature (154)..(154): n is a, c, g, or t
  misc_feature (185)..(185): n is a, c, g, or t
  misc_feature (187)..(187): n is a, c, g, or t
  misc_feature (224)..(224): n is a, c, g, or t
ttttagaaagtcctataatgtggaagaaacaaanagttgctaccaaagattcttcaaataaacatacaaataaatgtgtatatttaatgttttnttgttagcttctccaaaaaattgangcaaattctggtaataaaacttgcattttttcccnataacctggttaaaataaatacgccattggnantacttcataatgtaatggaattgtttggggaacactnactgtaccctcccatcctttttccaccttactgtgttaacttagtgacatttaatgcccaatatgtatgaatagatctaagccatttaattttttttccttaaagattggagtattttataattcaaggagcatacaaaacaatggttgggaacatatgccaattatggaataggctatgtatttaatattaatctctgccattaggatatctactcactgtataaacctcagtaaaaatagtgaagacatgcatcatggaatgagaaaatgagaaaggaatgagttgtctaacatcacagtgggatctgttttttgtgaggttcatttctgaacacattaggcatatgagcagatttccagtgaatctatttatgtttattttctgagtttcaacgctgaccttttcttgcattattgtttcattttaatgatagtgttacttgtcccactgttgttttcattgagtttggatttatattttaaatgttcgaatgaaagtatgattgtaaaagggagtgaattggtttaaaaatatatgtatattttaaactttgttgtgtgtaggaaacatgaaggcatgttaattcaatataaatgacctttgatttcatggaatattaaagttggtttaaagtccaatagttaaaccttagcaaaaatagctttttacttcatcagttgctaagatttaatactttggattcatcaaagtgtgacatgggcttgtttgacttctgtaagtggcatttaagttccacattcttattacttgaggtactttatactaacataagacagtgagagttagaggtattacaagttgctagtttataatgtcttactaatgcagaaacaaggaaaaaagcaaaattggcctgaatattctcttggggaaagagggcaccaaagaaaagggtaagtgcatctgagggccaaaagagatgtataagccttttagcccattccccatgctgggcctgctcacagagccacaggaagatcattcagaaactaggaaaggaggcccccacagctgatcctgccacagcacacctgactcactcggctctgttagtgtaaccttttaaatgtagcaacacaaaccctttccctcttgtcagttcactcatcctttggtttctttttaatcacctgtgtctgggcacagacaatcacaataaatgcagccctttattactgttaaggatcatactgttggtttggagttggaagggtactactctgtgattcaggtgtgttgtacccatatttataattaggctttattatcttcctaaatcaaggaaaggaaatcatccccagaccatttatgctgagctttggaatactattttaaactggattgtacttaaataatgaagctctgcatagaggaactagtcagaagtggggaaaacactgtctaatttttatcagtctggtataaagtattgatctaagagaactctccctgtgccccttggtctttattctcaattaagaaaaacagtcacatgtcacgacaaaccaatcaatctttatgagatattcctgtatccataccccagcttgtttgcaatttataaacctccccttcaaaactaaggagttgcagaaaaaaatggatttcacagagccttgtgtccctaaagttctgtcccagtcagcagtctttatagtccaaacagattataaaaaatgttttccatttgaactttacagtttgcaaaagtgcttttatacattttctaatttcagaaacaggataatataatttgttaagtgggtttcagtttgctaatagggattttttgtgttttgttttttaattttcagcatctcttgaagaatcttgctacagccaaatggcatctcactttttaaagacgtttgcaattattagttgattcacagtacagaacaaggtataaaggaaaaaaccctgctaggtagtgttataattgctagattaaaaatagactagaacaggttcattttaagatttacttggaagagcaaagaaggaaaaattatatttttaaagaaagagaatattcaggctttatttctggtatgaagtttatattttttaaaaaaatcctatattatcacaccagagattttagattcttttctggttagaaacattgctggtagttggattatatttttattgtattcatttatcttagggggaacattgtaaagaaacaaaaaggtccagatgaatgtatgctagaaataaaagttgaaagattcttaaaaaaaaaa

SEQ ID NO: 685552 - DNA, 177 bp, Homo sapiens
catttgtatcttgaaccttttcacttgtttttctcaaatatttcatttctgggccccatccattacagggtaccaggaggaaataatctacataaatatcacatgaaaatagtaactaaaaaagaaaaaaaggagtctaaaaatatctaaattacaaactaaatcaagagtataaga

SEQ ID NO: 685553 - DNA, 109 bp, Homo sapiens
gtatacaccgaaactgcgagaaaggtgaggtgtgtgacaaacccacagtgcctgagaaaggtgaggctgcgtgacaaaccctaatagtgctgagaaaagtgaggcatgt

SEQ ID NO: 685554 - DNA, 2497 bp, Homo sapiens
  misc_feature (34)..(34): n is a, c, g, or t
  misc_feature (94)..(94): n is a, c, g, or t
  misc_feature (119)..(119): n is a, c, g, or t
  misc_feature (154)..(154): n is a, c, g, or t
  misc_feature (185)..(185): n is a, c, g, or t
  misc_feature (187)..(187): n is a, c, g, or t
  misc_feature (224)..(224): n is a, c, g, or t
  misc_feature (263)..(263): n is a, c, g, or t
  misc_feature (284)..(284): n is a, c, g, or t
  misc_feature (305)..(305): n is a, c, g, or t
  misc_feature (312)..(315): n is a, c, g, or t
  misc_feature (337)..(338): n is a, c, g, or t
  misc_feature (340)..(340): n is a, c, g, or t
  misc_feature (354)..(354): n is a, c, g, or t
  misc_feature (359)..(359): n is a, c, g, or t
  misc_feature (363)..(363): n is a, c, g, or t
  misc_feature (372)..(372): n is a, c, g, or t
  misc_feature (376)..(376): n is a, c, g, or t
  misc_feature (379)..(379): n is a, c, g, or t
  misc_feature (385)..(386): n is a, c, g, or t
  misc_feature (388)..(388): n is a, c, g, or t
  misc_feature (394)..(394): n is a, c, g, or t
  misc_feature (401)..(402): n is a, c, g, or t
  misc_feature (405)..(406): n is a, c, g, or t
  misc_feature (410)..(411): n is a, c, g, or t
  misc_feature (413)..(413): n is a, c, g, or t
  misc_feature (417)..(417): n is a, c, g, or t
ttttagaaagtcctataatgtggaagaaacaaanagttgctaccaaagattcttcaaataaacatacaaataaatgtgtatatttaatgttttnttgttagcttctccaaaaaattgangcaaattctggtaataaaacttgcattttttcccnataacctggttaaaataaatacgccattggnantacttcataatgtaatggaattgtttggggaacactnactgtaccctcccaccccccccccccccccctgtgttcncccagtcacacccaatgcccnaaatgtatgaacagacccaanccacccnnnncctttcccctaaagattggacnntnttataagccaaggngcagncaanacaagggcngggnacnaaggcnnanaagggnaaaggcnnggnngggnngnggangggcggccattaggatatctactcactgtataaacctcagtaaaaatagtgaagacatgcatcatggaatgagaaaatgagaaaggaatgagttgtctaacatcacagtgggatctgttttttgtgaggttcatttctgaacacattaggcatatgagcagatttccagtgaatctatttatgtttattttctgagtttcaacgctgaccttttcttgcattattgtttcattttaatgatagtgttacttgtcccactgttgttttcattgagtttggatttatattttaaatgttcgaatgaaagtatgattgtaaaagggagtgaattggtttaaaaatatatgtatattttaaactttgttgtgtgtaggaaacatgaaggcatgttaattcaatataaatgacctttgatttcatggaatattaaagttggtttaaagtccaatagttaaaccttagcaaaaatagctttttacttcatcagttgctaagatttaatactttggattcatcaaagtgtgacatgggcttgtttgacttctgtaagtggcatttaagttccacattcttattacttgaggtactttatactaacataagacagtgagagttagaggtattacaagttgctagtttataatgtcttactaatgcagaaacaaggaaaaaagcaaaattggcctgaatattctcttggggaaagagggcaccaaagaaaagggtaagtgcatctgagggccaaaagagatgtataagccttttagcccattccccatgctgggcctgctcacagagccacaggaagatcattcagaaactaggaaaggaggcccccacagctgatcctgccacagcacacctgactcactcggctctgttagtgtaaccttttaaatgtagcaacacaaaccctttccctcttgtcagttcactcatcctttggtttctttttaatcacctgtgtctgggcacagacaatcacaataaatgcagccctttattactgttaaggatcatactgttggtttggagttggaagggtactactctgtgattcaggtgtgttgtacccatatttataattaggctttattatcttcctaaatcaaggaaaggaaatcatccccagaccatttatgctgagctttggaatactattttaaactggattgtacttaaataatgaagctctgcatagaggaactagtcagaagtggggaaaacactgtctaatttttatcagtctggtataaagtattgatctaagagaactctccctgtgccccttggtctttattctcaattaagaaaaacagtcacatgtcacgacaaaccaatcaatctttatgagatattcctgtatccataccccagcttgtttgcaatttataaacctccccttcaaaactaaggagttgcagaaaaaaatggatttcacagagccttgtgtccctaaagttctgtcccagtcagcagtctttatagtccaaacagattataaaaaatgttttccatttgaactttacagtttgcaaaagtgcttttatacattttctaatttcagaaacaggataatataatttgttaagtgggtttcagtttgctaatagggattttttgtgttttgttttttaattttcagcatctcttgaagaatcttgctacagccaaatggcatctcactttttaaagacgtttgcaattattagttgattcacagtacagaacaaggtataaaggaaaaaaccctgctaggtagtgttataattgctagattaaaaatagactagaacaggttcattttaagatttacttggaagagcaaagaaggaaaaattatatttttaaagaaagagaatattcaggctttatttctggtatgaagtttatattttttaaaaaaatcctatattatcacaccagagattttagattcttttctggttagaaacattgctggtagttggattatatttttattgtattcatttatcttagggggaacattgtaaagaaacaaaaaggtccagatgaatgtatgctagaaataaaagttgaaagattcttaaaaaaaaaa

SEQ ID NO: 685555 - DNA, 192 bp, Homo sapiens
tagggtataatagtctgggtcgactagacgtcggagatcctcttagcagtttgacctgtagtgcactgtaaagcttggtactgagccgagctcctaagcgacccagaacgattataccctagccgaaccccttaaatacccctccccggtacatgcaagacatgcaagacatgcaggcccggtacatgcaag

SEQ ID NO: 685556 - DNA, 873 bp, Homo sapiens
  misc_feature (86)..(86): n is a, c, g, or t
  misc_feature (143)..(143): n is a, c, g, or t
  misc_feature (228)..(228): n is a, c, g, or t
  misc_feature (239)..(239): n is a, c, g, or t
  misc_feature (253)..(253): n is a, c, g, or t
  misc_feature (284)..(284): n is a, c, g, or t
  misc_feature (291)..(291): n is a, c, g, or t
  misc_feature (296)..(296): n is a, c, g, or t
  misc_feature (318)..(318): n is a, c, g, or t
  misc_feature (332)..(332): n is a, c, g, or t
  misc_feature (357)..(357): n is a, c, g, or t
  misc_feature (377)..(377): n is a, c, g, or t
  misc_feature (397)..(397): n is a, c, g, or t
  misc_feature (433)..(433): n is a, c, g, or t
  misc_feature (454)..(454): n is a, c, g, or t
  misc_feature (545)..(545): n is a, c, g, or t
  misc_feature (562)..(562): n is a, c, g, or t
  misc_feature (586)..(586): n is a, c, g, or t
  misc_feature (606)..(606): n is a, c, g, or t
  misc_feature (657)..(657): n is a, c, g, or t
  misc_feature (680)..(680): n is a, c, g, or t
  misc_feature (682)..(682): n is a, c, g, or t
  misc_feature (686)..(686): n is a, c, g, or t
  misc_feature (697)..(697): n is a, c, g, or t
  misc_feature (706)..(706): n is a, c, g, or t
  misc_feature (761)..(761): n is a, c, g, or t
  misc_feature (766)..(766): n is a, c, g, or t
  misc_feature (769)..(769): n is a, c, g, or t
  misc_feature (793)..(793): n is a, c, g, or t
  misc_feature (799)..(799): n is a, c, g, or t
  misc_feature (804)..(804): n is a, c, g, or t
  misc_feature (827)..(827): n is a, c, g, or t
cggcccgacgcggaccgcttccctgcagtgccccgagtcccgggcccgcgccgccgccgcccggctccgctcgcggcccctctgtntgcaggcgtgccccggcggcggcggagagccgtcctcggccgaggaggctgggaaangcgaaacccaggcggcagaaaggcctcaacgccgttcctttcgccaccgccttttccttgccttgcgccgctgtgcatttctctncttttcctttntttttttggccccncgcgggtgtgggcattgttggttagcaaaantgcagcntcaanaaggctgaaggcaacgaggatnttcgggctgacganttgcctgggccagccttcgagagcnatgagttcatggagcctgcntgcaccgctgagcgcagacncacgtagccgttagcgacgggcgccaaaagttcgtntggggcggctacaagagtaancaagttagaggattatatgacttttatctgcctagagaagaactatggatctacaacatggagactggaagatggaaaaaaatcaacactnaaggtgatgttcctccntctatgttaggaagctgttctgtntgttttgacagggtgctgtncttgtttggaggacaccatttaagaggcaataccaataagttctacatgcnggatttaaggtctacagaaagantnttanagtggggaaanaattgattnccaaggaattcctccatcatcaaaggacaaacttggtgtttgggtatataaaaanaagtnaanattttttgggagggtatggatatntgcctnaaganaaagtattgggaacttttgaatncgatgaaacatctttttggaattcaagtaatccaagaggatggaat

SEQ ID NO: 685557 - DNA, 327 bp, Homo sapiens
caccattgtgatttgttcctgccccaccctaactgatcaattgaccttgtgacaatacaccttccccacccttgagaaggtgctttgtaatattctccccacccaccccacgcccgcacccccgcacccttaagaaggtattttgtaatattctctccgccattgagaatgtgctttgtaagatccaccccctgcccacaaaaaattgctcctaactccaccgcctatcccaaacctacaagcactaatgataatcccaccaccctttgctgactcttataggactcagcccaactgcacacagatgattaaaaagctttactgatc

SEQ ID NO: 685558 - DNA, 344 bp, Homo sapiens
  misc_feature (65)..(65): n is a, c, g, or t
aaaaagggctacctgggggccaggtatgttcaacatggaggctccatcttcccttttatttgttnccccatgtccaatacaaaaataggcaacctggtgccagtcaggtagagagcctctgcataataaaagattaaggtggagagtccagaaattccccccctatgcaaatggcccccctggtttgcccaatcttttgttcctatgtaaatcagaccccccctcaagctcttttgaaaaaaaacccctgcatttccccccggacccgaaaccccctggggacccatctctctgcagcaaaaaaagctattttcttgcttttgcctattaaacgtctgctctta

SEQ ID NO: 685559 - DNA, 283 bp, Homo sapiens
  misc_feature (4)..(4): n is a, c, g, or t
  misc_feature (31)..(32): n is a, c, g, or t
  misc_feature (55)..(55): n is a, c, g, or t
  misc_feature (75)..(75): n is a, c, g, or t
  misc_feature (137)..(137): n is a, c, g, or t
  misc_feature (150)..(150): n is a, c, g, or t
  misc_feature (163)..(163): n is a, c, g, or t
  misc_feature (172)..(172): n is a, c, g, or t
  misc_feature (178)..(178): n is a, c, g, or t
  misc_feature (207)..(207): n is a, c, g, or t
  misc_feature (214)..(214): n is a, c, g, or t
  misc_feature (227)..(227): n is a, c, g, or t
  misc_feature (237)..(237): n is a, c, g, or t
  misc_feature (240)..(240): n is a, c, g, or t
  misc_feature (256)..(256): n is a, c, g, or t
  misc_feature (264)..(264): n is a, c, g, or t
  misc_feature (267)..(268): n is a, c, g, or t
  misc_feature (271)..(271): n is a, c, g, or t
ggcncatttactgttttaggtctagcctatnnggattttttcctaacatacctangcaaacccaggtgtcaggantggtaatttcttattcctttcgttcaagttaaagtttttcccttcattcttgggcaactganagggataatgtgnaaactaaatgttnaacaatttnatggtnagtccttcacaaccgcagggattgtttcntagtttnaacttcattcatnaggcaaagcnttngagttaagaataaatnattgtcanttnngtnatgtccaaaaaa

SEQ ID NO: 685560 - DNA, 130 bp, Homo sapiens
cgtatcatgtattcacttccactccataactacaaaaacatatatatgaatttctaaacaaagtgaataccaaacgcccctcttcgtctgatccgtcctactgggcaccattgagcactgagtgaacgag

SEQ ID NO: 685561 - DNA, 85 bp, Homo sapiens
gcggccgcctactactactactgctcgaattcaagcttctaacgatgtacggggacatgtataaataaagctcctcgtggctccc

SEQ ID NO: 685562 - DNA, 301 bp, Homo sapiens
gtcgactttacattccaaccagcagtgtatgagagttccagtttatccacatcctcatcaacagttgttattgtctgtcttttttattatattcatctgtaatgtgaagtgtttatctcattgtggttttgatttacatttccctgatggttgatgattttcaacatcttttcatatacttattagtcattatgtatcttctttggagaatgtctgttcagatcctttacctactttataattggtttatctttttaatattgaactgtaatagttttaaaaaaatatatcctaaatacaa

SEQ ID NO: 685563 - DNA, 157 bp, Homo sapiens
actcacgaaggctgatcttccctcagtttgagaagtccttgtgttgggtgggtgtatggtagggggtgtgtgtgtgtgtgtgtgtgtgtgtgtgtgtgtgtagtacccaggtgcggggtcagagccaaacgatagtgatatatagagggagcggcgg

SEQ ID NO: 685564 - DNA, 323 bp, Homo sapiens
ccaaatatgtgatcaagcgatatatctacaatcataatgtatagccaggcacggtggctcacgcctgtaatcccagcactttgggaggccgaggcagacagatgacttgcggtcaggaaattccagaccagccagggcaacatagtgaaaccccatctctaccagaagtataaaaattggccgggtgtggtggtgcacgcctgtagtcctaaggcaggaggctaaggcaggagaacagcttgaacctgggaggcagaggttgcagtgagccaagatcacgtaactgcactccggcctgggtgacagagtgaagaccctgtcac

SEQ ID NO: 685565 - DNA, 137 bp, Homo sapiens
  misc_feature (35)..(35): n is a, c, g, or t
  misc_feature (53)..(53): n is a, c, g, or t
  misc_feature (124)..(124): n is a, c, g, or t
tctcttcaagcaacacatcagtttcaaaccaattngttcaaaacacattttcncgtcttcatttccatttctggtcaaccagttgcaatcatctgggctgtcctttttcatcacaggccagggngtcacggtcagct

SEQ ID NO: 685566 - DNA, 149 bp, Homo sapiens
atagggtacgtaacacatgcaccattactgttactaagttctgtacttgtgtcctgtgaaccttaagtataataataaaaaaatacattacagtaaagttaagtggagggctgggggctgtgtgtcatgcctgtaatcccagcagttca

SEQ ID NO: 685567 - DNA, 929 bp, Homo sapiens
gagtgtgggccataattggcccgttgtttagaccaaggccggggtggccaatatcggggaaagacacagtattgtttgagacctttcctggtgtaaaaataacgtttcgaaaataacttgattcttacacaaggtccactgggggaagaatttcacgaagagtttatggcaaggtgaattaacccccatgaggctcttagagaaccctggtgggtgccgccatctcttaacgagttttactcttaaactagtgtttgggtcaagcattatttatggcccttccacttgtcagccaatttccaaggccccttaggaatttaaaagtgaccgagcgccattttttgctgctgaaaacgtcccggtgagtttacgccacctacttttacattatcacggcccactagctcttaccaaggtaatcttttggctgaaatggggaccctcttctgacgctggagactcttagtgttcaattaatcgtgtgtaatctgtatgctatctaattgtcctgggtgcttctttcctattgcacccattttactaatgcttctaacagtatcttcgtttgcaatctttggggtaaaaccttttgtttatgacgtacttgtttctcttgaagattttaagcggtcacactttgccttcgttacatgccacactcgctggagagcttattatctggtggctaattgccacacggatgctcaacctatcgcgagtacttacctttgaggttgacgtcgccactacacacgagccactgtatgtttacttctcaccatttgagttgcccatcttgttttcacactacctcacattcttgttttaacgatgcctcttagtttgaaccgttcactttttacagtgctatttactgaagttatttgattaaaaaatgcccttaaatacgttgaaaaaaaaaaaataaa

SEQ ID NO: 685568 - DNA, 116 bp, Homo sapiens
gcgtgttagaggatcccgtctgagaagcttctccgtgctcctcctaccttggccttctccagctcctcttcaccactgagcttcttcagcttctccccattcccagcttgttcaga

SEQ ID NO: 685569 - DNA, 427 bp, Homo sapiens
ggagtggtgctcgggtccgggaggcttgggctgcgtgggagcccatggcgggtttggggggaggctcaggcatggcgggctgcaggtcccgagccctgccccacggggaggcagctaaggcctggcgagtcaagcacaacagctgctggcccagatgctaagcccctcactgcccggggcttgcaggcgggccagccgctctgaatgcggggccgcagagcccacacccaccaggaactggcgctggcccacaagcgccacacgcatccccggttcctgcccgtgcctctccctccacacctcctcgcaagccgaggcagctggctccggcctcagccagcccagagaagggctcccatggtgcagcggcagggtgaagggctcctcaagcacagccagtgggcgcccagggcgaggaggcacggag

SEQ ID NO: 685570 - DNA, 361 bp, Homo sapiens
  misc_feature (355)..(355): n is a, c, g, or t
ggcacgaggaaaaatacacaggaaataaaaatttctttgtgaattaaagtttaaggttagtatattttgacttcctgctgccttgaccttgatgaatgttataaaccatcaccacttgccataatgatgggtagttgaaatagaaagtctatttcatttgtttaaggtttcagtttctgactttaaaacctcacttctcctagagtatgtgtgtgtgtctgactttatgtctcagtactctgaagtttcacgtcttgtccaatgaggaactggatgtcagtggaactaattggggctcttcttgtggcgtggggtaccccggacatggccccactggctggctgatgttgtgganggcttt

SEQ ID NO: 685571 - DNA, 105 bp, Homo sapiens
ggtactttgggacaagtcttatagcttacataatgtgaattcatcaaaaggcagttaagaaacttacaggaatatatacacgtgaacccaagacccaaactgaca

SEQ ID NO: 685572 - DNA, 314 bp, Homo sapiens
tctgaccattcatgcaggctcacacttgacctgatgtgggttctgtctcctttgcttgagaattgaaaggcctgggagatgcaaaagctttaggctccagccatctccccatgtcaggtaggccttttgcctagtgtatccagttggtaatgctgcagagatgcatgaagctggagtcagaggccacctgtagtgctgccctgacttcagacctgagcccagcccagcagcagagagggggctgggagccagaggaggcctcacagtaacagcacagacaggtgggggcccacaacaggccacatgtgttcaaa

SEQ ID NO: 685573 - DNA, 455 bp, Homo sapiens
gaagcaagcctgggcaatggcgggctgcccctctgctaaccttgcttgccgcgcttgcagttttgatctcagacttgctgtgctagcaatcagcgagattcctgtgggcgtaggaccctccgagaccaggtgttgggatatagtctcgtggttgcaccagttttttaacgcttgtgtcttgtcaacagcgcaatattacgcggtctgcggagttgaccccgaatatttcccaggatctaatctgtaattgacaagcaatgaaggatctactttgacgcacaacaggctaaatcttgcgcaaataccctttgcgttggaaacacgcgtggcgacacgtcctccaatttgtcctttgcccttcttataatttctgcgacagttcacattcatgtcttcccaaagaatttctgagtgtcagccattttccattcgaatcccacgaacaaacactcggg

SEQ ID NO: 685574 - DNA, 170 bp, Homo sapiens
  misc_feature (39)..(39): n is a, c, g, or t
tggcgaggcagtctctacaaaaaaattaaaaataaacanttttcaggcacagcgacatgtgcctgtaatcccggttacttgggaggctgggatgggaccccgcttgagcttttggaggtagagattgcagtgagccgacatcatgccactgcactccatcctgagtgaca

SEQ ID NO: 685575 - DNA, 611 bp, Homo sapiens
  misc_feature (529)..(529): n is a, c, g, or t
  misc_feature (540)..(540): n is a, c, g, or t
cagggctgctccgtatgggggcatccaggcctggctgctgatgccctgtggctgaggacacctccatctgcatgagccagtttggaagtccagcttgccccccaggcagtggaggccagtaagggcttctccccagattgaccactcagatcaaattgatccaggtgttgagacagaattggccccattttctgctaatttccattctctgattgtgctgcctgctacaggagtcattttggatttgggctgacctggtagacttctgaaagacagtgctctgggttcaagttgtcctcagggctggatgatccatagcaaatatcccctgatggataagcattgtgctgagagacttgcctccatcagctgtgtaaacctcaggatgacctgcacacaggtatactaaggcacacagagaccagctcgtagtcagtgacaagtaacttgcccaaaagccgggtttaaaagcatgtctgcaaattcttggacactcttgtcatccagaaaatagagtctaactttcctnccttgaatacnggcttggcttcagtggtgggaatagacaatgtgtgaagtttgaggttgaataaaaaaggagaaacaaacct

SEQ ID NO: 685576 - DNA, 253 bp, Homo sapiens
ctgaactagatcatttgttaaggcaaatgatctagttcagaaggaagcaaaatcccttaatctatgtgcaccgttgggaccaatgccttaattaaagaatttaaaaaagttgtaatagagaatatttttggcattcctctaatgttgtgtgttttttttttttgtgtgctggagggaggggatttaattttaattttaaaatgtttaggaaatttatacaaagaaactttttaataaagtatattgaaagttt

SEQ ID NO: 685577 - DNA, 135 bp, Homo sapiens
  misc_feature (25)..(25): n is a, c, g, or t
tgcctatgaggactcctccccgacnagcccgacaggggttagttcctacctctgaccccagcttctctctggttcccacaggccccatgcatctccctgcctcactcccctcagcccctgtcgggctagtcgggg

SEQ ID NO: 685578 - DNA, 2318 bp, Homo sapiens
  misc_feature (1062)..(1062): n is a, c, g, or t
cggacgcgtggcgccagagtggcagttgtgcagcacgcgccctctgagtccgtggacaatgccagcatgccacctgtgaaggtggaattctccctgactgatatggctccaaggagaagctggtggacttcctcagcaggggaatgacacagttgcagggaaccagggccttaggcagtgccattgaatacaccatagagaatgtctttgaaagtgccccaaacccacgggacctgaaaattgtggtcctgatgctgacgggcgaggtgccggagcagcagctggaggaggcccagagagtcatcctgcaggccaaatgcaagggctacttcttcgtggtcctgggcattggcaggaaggtgaacatcaaggaggtatacaccttcgccagtgagccaaacgacgtcttcttcaaattagtggacaagtccaccgagctcaacgaggagcctttgatgcgcttcgggaggctgttgccatccttcgtcagcagtgaaaatgctttttacttgtccccagatatcaggaaacagtgtgattggttccaaggggaccaacccacaaagaaccttgtgaagtttggtcacaaacaagtaaatgttccgaataacgttacttcaagtcctacatccaacccagtgacgacaacgaagccggtgactacgacgaagccggtgaccaccacaacaaagcctgtaaccaccacaacaaagcctgtgactattataaatcagccatctgtgaagccagccgctgcaaagccggcccctgcgaaacctgtggctgccaagcctgtggccacaaagatggccactgttagacccccagtggcggtgaagccagcaacggcagcgaagcctgtagcagcaaagccagcagctgtaagaccccccgctgctgctgctgcaaaaccagtggcgaccaagcctgaggtccctaggccacaggcagccaaaccagctgccaccaagccagccaccactaagcccatggttaagatgtcccgtgaagtccaggtgtttgagataacagagaacagcgccaaactccactgggagaggnctgagccccccggtccttatttttatgacctcaccgtcacctcagcccatgatcagtccctggttctgaagcagaacctcacggtcacggaccgcgtcattggaggcctgctcgctgggcagacataccatgtggctgtggtctgctacctgaggtctcaggtcagagccacctaccacggaagtttcagtacaaagaaatctcagcccccacctccacagccagcaaggtcagcttctagttcaaccatcaatctaatggtgagcacagaaccattggctctcactgaaacagatatatgcaagttgccgaaagacgaaggaacttgcagggatttcatattaaaatggtactatgatccaaacaccaaaagctgtgcaagattctggtatggaggttgtggtggaaacgaaaacaaatttggatcacagaaagaatgtgaaaaggtttgcgctcctgtgctcgccaaacccggagtcatcagtgtgatgggaacctaagcgtgggtggccaacatcatatacctcttgaagaagaaggagtcagccatcgccaacttgtctctgtagaagctccgggtgtagattcccttgcactgtatcatttcatgctttgatttacactcgaactcgggagggaacatcctgctgcatgacctatcagtatggtgctaatgtgtctgtggaccctcgctctctgtctccaggcagttctctcgaatactttgaatgttgtgtaacagttagccactgctggtgtttatgtgaacattcctatcaatccaaattccctctggagtttcatgttatgcctgttgcaggcaaatgtaaagtctagaaaataatgcaaatgtcacggctactctatatacttttgcttggttcattttttttcccttttagttaagcatgactttagatgggaagcctgtgtatcgtggagaaacaagagaccaactttttcattccctgcccccaatttcccagactagatttcaagctaattttctttttctgaagcctctaacaaatgatctagttcagaaggaagcaaaatcccttaatctatgtgcaccgttgggaccaatgccttaattaaagaatttaaaaaagttgtaatagagaatatttttggcattcctctaatgttgtgtgttttttttttttgtgtgctggagggaggggatttaattttaattttaaaatgtttaggaaatttatacaaagaaactttttaataaagtatattgaaagttt

SEQ ID NO: 685579 - DNA, 1969 bp, Homo sapiens
  misc_feature (713)..(713): n is a, c, g, or t
tcctgatgtgatatatccccaagaggtatacaccttcgccagtgagccaaacgacgtcttcttcaaattagtggacaagtccaccgagctcaacgaggagcctttgatgcgcttcgggaggctgttgccatccttcgtcagcagtgaaaatgctttttacttgtccccagatatcaggaaacagtgtgattggttccaaggggaccaacccacaaagaaccttgtgaagtttggtcacaaacaagtaaatgttccgaataacgttacttcaagtcctacatccaacccagtgacgacaacgaagccggtgactacgacgaagccggtgaccaccacaacaaagcctgtaaccaccacaacaaagcctgtgactattataaatcagccatctgtgaagccagccgctgcaaagccggcccctgcgaaacctgtggctgccaagcctgtggccacaaagatggccactgttagacccccagtggcggtgaagccagcaacggcagcgaagcctgtagcagcaaagccagcagctgtaagaccccccgctgctgctgctgcaaaaccagtggcgaccaagcctgaggtccctaggccacaggcagccaaaccagctgccaccaagccagccaccactaagcccatggttaagatgtcccgtgaagtccaggtgtttgagataacagagaacagcgccaaactccactgggagaggnctgagccccccggtccttatttttatgacctcaccgtcacctcagcccatgatcagtccctggttctgaagcagaacctcacggtcacggaccgcgtcattggaggcctgctcgctgggcagacataccatgtggctgtggtctgctacctgaggtctcaggtcagagccacctaccacggaagtttcagtacaaagaaatctcagcccccacctccacagccagcaaggtcagcttctagttcaaccatcaatctaatggtgagcacagaaccattggctctcactgaaacagatatatgcaagttgccgaaagacgaaggaacttgcagggatttcatattaaaatggtactatgatccaaacaccaaaagctgtgcaagattctggtatggaggttgtggtggaaacgaaaacaaatttggatcacagaaagaatgtgaaaaggtttgcgctcctgtgctcgccaaacccggagtcatcagtgtgatgggaacctaagcgtgggtggccaacatcatatacctcttgaagaagaaggagtcagccatcgccaacttgtctctgtagaagctccgggtgtagattcccttgcactgtatcatttcatgctttgatttacactcgaactcgggagggaacatcctgctgcatgacctatcagtatggtgctaatgtgtctgtggaccctcgctctctgtctccaggcagttctctcgaatactttgaatgttgtgtaacagttagccactgctggtgtttatgtgaacattcctatcaatccaaattccctctggagtttcatgttatgcctgttgcaggcaaatgtaaagtctagaaaataatgcaaatgtcacggctactctatatacttttgcttggttcattttttttcccttttagttaagcatgactttagatgggaagcctgtgtatcgtggagaaacaagagaccaactttttcattccctgcccccaatttcccagactagatttcaagctaattttctttttctgaagcctctaacaaatgatctagttcagaaggaagcaaaatcccttaatctatgtgcaccgttgggaccaatgccttaattaaagaatttaaaaaagttgtaatagagaatatttttggcattcctctaatgttgtgtgttttttttttttgtgtgctggagggaggggatttaattttaattttaaaatgtttaggaaatttatacaaagaaactttttaataaagtatattgaaagttt

SEQ ID NO: 685580 - DNA, 251 bp, Homo sapiens
cacacagtcctagatgacgtcggaggtacagcacacccttggtgatggtgcgtcggcagagggcgcccgtgacaagggaatttgctggaagtggcctgtcactgtagcagccgtgaggtccagaacttccatggtggtgcttaccgtcaacaaggccctcatctatctgtgacaaacaagaaaaaaggaacaagagacgtaatagcagcactcacggaggaagggacctgggcccggtcagccgccatgat

SEQ ID NO: 685581 - DNA, 129 bp, Homo sapiens
ctgcgctgtcggacatacttctggtggcactgtgcggaaactgaggataaatcagtgagctgcatgcacttacaggcatggcctgtctcctcacttcagtgcatgtccatcgaccaaagccctgttctg

SEQ ID NO: 685582 - DNA, 1447 bp, Homo sapiens
aacctccttatctgctacactctgtcattcttcaaacacaagatgggctagtgtcatttctccttccttccttccatatggccagattgtatatgtattcacaaaacattaaatgtccatcctgtgccaggtactatgcagatgtcgacaggataccggcggctctggttagctcgtgactactctatcctgaatctaacagtgacttcatacactcagcgagacctgcattagcacccttacaggtctagctgtgtgtccgcaaattccactctgccaactggacaacttccactacttcagggctacgagctccgtgctccttaacacctacggtgctccctacatccacatgctcacaacgcactattcaccacatcaacaccgccaacctttatcacgctcactcctcctcacaaccctctgtccattcaatctcccggtcgactcccttctcgagcacacaggggccttcaaacggaacctactctcatgcgtccctcaccacacccacattggcgtacttgcataaagcaaacgttcacacttcactcgcataccacaccggcacacactcaaccctttggttcgactctccacctaactcggtcaccccaaggcgggcgccttcatacccttcctatgccacgagggaagaccacacacatgctttgtcccacaacgcgtatgagacacgatgcatatcctttagtccatcaacgctttcccacaatgagggggccatacacacattcactttccaccatcgtcagcggtgcaaccttgttcgcccctcactaggcatcgagccactatccatccctatcctaccagcagcacatactggacactccttcgcacactagccacggcataccccctctggcctcgcgcactagacacagcacacatagggcacaagcattctacagctcgaccgccccttgttaacacgacaaaaccagtatcgctccatctactgcgttcgatacacaactataccgacaaaacacaccagatgcacagctaccgcactaatcacacgtggtcgtcaatacaaccaggacataaatgcccaacggccaacacacatgcaccgcttcgtcgacccccctcacccaacgcaaccacaataaccccagcacaatctaccacgcagcaccagcacagcacaacccaccaaggcaaaaccaacaacgtgcgacaaaaacaccaccaccaccgcacacacacgacaccacgcacaagacacactaaccaaccacagcacaccaccccgacaccacaccgccaacaggaccacccaacaacaacactcgcaccagctcgcggaacacagaacacacactacacagccacctacacacgcacaaacacaccaacacacgacccgagcagccacccgcaacaacacaacaaccaccgcccgacacaacacaaacaacaa

SEQ ID NO: 685583 - DNA, 1768 bp, Homo sapiens
  misc_feature (512)..(512): n is a, c, g, or t
atatgattttaaaaaaaaaaaagtttgcaaaacttgtgcacctcggcaagccccggataacgttacttcaagtcctacatccaacccagtgacgacaacgaagccggtgactacgacgaagccggtgaccaccacaacaaagcctgtaaccaccacaacaaagcctgtgactattataaatcagccatctgtgaagccagccgctgcaaagccggcccctgcgaaacctgtggctgccaagcctgtggccacaaagatggccactgttagacccccagtggcggtgaagccagcaacggcagcgaagcctgtagcagcaaagccagcagctgtaagaccccccgctgctgctgctgcaaaaccagtggcgaccaagcctgaggtccctaggccacaggcagccaaaccagctgccaccaagccagccaccactaagcccatggttaagatgtcccgtgaagtccaggtgtttgagataacagagaacagcgccaaactccactgggagaggnctgagccccccggtccttatttttatgacctcaccgtcacctcagcccatgatcagtccctggttctgaagcagaacctcacggtcacggaccgcgtcattggaggcctgctcgctgggcagacataccatgtggctgtggtctgctacctgaggtctcaggtcagagccacctaccacggaagtttcagtacaaagaaatctcagcccccacctccacagccagcaaggtcagcttctagttcaaccatcaatctaatggtgagcacagaaccattggctctcactgaaacagatatatgcaagttgccgaaagacgaaggaacttgcagggatttcatattaaaatggtactatgatccaaacaccaaaagctgtgcaagattctggtatggaggttgtggtggaaacgaaaacaaatttggatcacagaaagaatgtgaaaaggtttgcgctcctgtgctcgccaaacccggagtcatcagtgtgatgggaacctaagcgtgggtggccaacatcatatacctcttgaagaagaaggagtcagccatcgccaacttgtctctgtagaagctccgggtgtagattcccttgcactgtatcatttcatgctttgatttacactcgaactcgggagggaacatcctgctgcatgacctatcagtatggtgctaatgtgtctgtggaccctcgctctctgtctccaggcagttctctcgaatactttgaatgttgtgtaacagttagccactgctggtgtttatgtgaacattcctatcaatccaaattccctctggagtttcatgttatgcctgttgcaggcaaatgtaaagtctagaaaataatgcaaatgtcacggctactctatatacttttgcttggttcattttttttcccttttagttaagcatgactttagatgggaagcctgtgtatcgtggagaaacaagagaccaactttttcattccctgcccccaatttcccagactagatttcaagctaattttctttttctgaagcctctaacaaatgatctagttcagaaggaagcaaaatcccttaatctatgtgcaccgttgggaccaatgccttaattaaagaatttaaaaaagttgtaatagagaatatttttggcattcctctaatgttgtgtgttttttttttttgtgtgctggagggaggggatttaattttaattttaaaatgtttaggaaatttatacaaagaaactttttaataaagtatattgaaagttt

SEQ ID NO: 685584 - DNA, 1764 bp, Homo sapiens
  misc_feature (508)..(508): n is a, c, g, or t
catcgcaacaaataccaacctaacacaaaacaaaaagacttacagtgacccgataacgttacttcaagtcctacatccaacccagtgacgacaacgaagccggtgactacgacgaagccggtgaccaccacaacaaagcctgtaaccaccacaacaaagcctgtgactattataaatcagccatctgtgaagccagccgctgcaaagccggcccctgcgaaacctgtggctgccaagcctgtggccacaaagatggccactgttagacccccagtggcggtgaagccagcaacggcagcgaagcctgtagcagcaaagccagcagctgtaagaccccccgctgctgctgctgcaaaaccagtggcgaccaagcctgaggtccctaggccacaggcagccaaaccagctgccaccaagccagccaccactaagcccatggttaagatgtcccgtgaagtccaggtgtttgagataacagagaacagcgccaaactccactgggagaggnctgagccccccggtccttatttttatgacctcaccgtcacctcagcccatgatcagtccctggttctgaagcagaacctcacggtcacggaccgcgtcattggaggcctgctcgctgggcagacataccatgtggctgtggtctgctacctgaggtctcaggtcagagccacctaccacggaagtttcagtacaaagaaatctcagcccccacctccacagccagcaaggtcagcttctagttcaaccatcaatctaatggtgagcacagaaccattggctctcactgaaacagatatatgcaagttgccgaaagacgaaggaacttgcagggatttcatattaaaatggtactatgatccaaacaccaaaagctgtgcaagattctggtatggaggttgtggtggaaacgaaaacaaatttggatcacagaaagaatgtgaaaaggtttgcgctcctgtgctcgccaaacccggagtcatcagtgtgatgggaacctaagcgtgggtggccaacatcatatacctcttgaagaagaaggagtcagccatcgccaacttgtctctgtagaagctccgggtgtagattcccttgcactgtatcatttcatgctttgatttacactcgaactcgggagggaacatcctgctgcatgacctatcagtatggtgctaatgtgtctgtggaccctcgctctctgtctccaggcagttctctcgaatactttgaatgttgtgtaacagttagccactgctggtgtttatgtgaacattcctatcaatccaaattccctctggagtttcatgttatgcctgttgcaggcaaatgtaaagtctagaaaataatgcaaatgtcacggctactctatatacttttgcttggttcattttttttcccttttagttaagcatgactttagatgggaagcctgtgtatcgtggagaaacaagagaccaactttttcattccctgcccccaatttcccagactagatttcaagctaattttctttttctgaagcctctaacaaatgatctagttcagaaggaagcaaaatcccttaatctatgtgcaccgttgggaccaatgccttaattaaagaatttaaaaaagttgtaatagagaatatttttggcattcctctaatgttgtgtgttttttttttttgtgtgctggagggaggggatttaattttaattttaaaatgtttaggaaatttatacaaagaaactttttaataaagtatattgaaagttt

SEQ ID NO: 685585 - DNA, 1787 bp, Homo sapiens
  misc_feature (531)..(531): n is a, c, g, or t
tttggtgtatttttttcttattgttttttttaatcgaagtcttctttttccttgtttcatagttatcaggtaccgataacgttacttcaagtcctacatccaacccagtgacgacaacgaagccggtgactacgacgaagccggtgaccaccacaacaaagcctgtaaccaccacaacaaagcctgtgactattataaatcagccatctgtgaagccagccgctgcaaagccggcccctgcgaaacctgtggctgccaagcctgtggccacaaagatggccactgttagacccccagtggcggtgaagccagcaacggcagcgaagcctgtagcagcaaagccagcagctgtaagaccccccgctgctgctgctgcaaaaccagtggcgaccaagcctgaggtccctaggccacaggcagccaaaccagctgccaccaagccagccaccactaagcccatggttaagatgtcccgtgaagtccaggtgtttgagataacagagaacagcgccaaactccactgggagaggnctgagccccccggtccttatttttatgacctcaccgtcacctcagcccatgatcagtccctggttctgaagcagaacctcacggtcacggaccgcgtcattggaggcctgctcgctgggcagacataccatgtggctgtggtctgctacctgaggtctcaggtcagagccacctaccacggaagtttcagtacaaagaaatctcagcccccacctccacagccagcaaggtcagcttctagttcaaccatcaatctaatggtgagcacagaaccattggctctcactgaaacagatatatgcaagttgccgaaagacgaaggaacttgcagggatttcatattaaaatggtactatgatccaaacaccaaaagctgtgcaagattctggtatggaggttgtggtggaaacgaaaacaaatttggatcacagaaagaatgtgaaaaggtttgcgctcctgtgctcgccaaacccggagtcatcagtgtgatgggaacctaagcgtgggtggccaacatcatatacctcttgaagaagaaggagtcagccatcgccaacttgtctctgtagaagctccgggtgtagattcccttgcactgtatcatttcatgctttgatttacactcgaactcgggagggaacatcctgctgcatgacctatcagtatggtgctaatgtgtctgtggaccctcgctctctgtctccaggcagttctctcgaatactttgaatgttgtgtaacagttagccactgctggtgtttatgtgaacattcctatcaatccaaattccctctggagtttcatgttatgcctgttgcaggcaaatgtaaagtctagaaaataatgcaaatgtcacggctactctatatacttttgcttggttcattttttttcccttttagttaagcatgactttagatgggaagcctgtgtatcgtggagaaacaagagaccaactttttcattccctgcccccaatttcccagactagatttcaagctaattttctttttctgaagcctctaacaaatgatctagttcagaaggaagcaaaatcccttaatctatgtgcaccgttgggaccaatgccttaattaaagaatttaaaaaagttgtaatagagaatatttttggcattcctctaatgttgtgtgttttttttttttgtgtgctggagggaggggatttaattttaattttaaaatgtttaggaaatttatacaaagaaactttttaataaagtatattgaaagttt

SEQ ID NO: 685586 - DNA, 256 bp, Homo sapiens
tccactgttaaaggaatttttataaaagcaagaatttaaaaacccaaattacgttccctggcccagttaccaattctgttactaaaaacagaactgaaattcggggctatcccccggtaaagaattacaaaattaaagaagggaaggcttaaaatttttgtactttgcggaaaatccttttccccggggccaaaaaaacataaatttgttttaaaatttcacaattttttggggtttttttgttttaaaaccaaaa

SEQ ID NO: 685587 - DNA, 2001 bp, Homo sapiens
cggacgcgtggcgccagagtggcagttgtgcagcacgcgccctctgagtccgtggacaatgccagcatgccacctgtgaaggtggaattctccctgactgatatggctccaaggagaagctggtggacttcctcagcaggggaatgacacagttgcagggaaccagggccttaggcagtgccattgaatacaccatagagaatgtctttgaaagtgccccaaacccacgggacctgaaaattgtggtcctgatgctgacgggcgaggtgccggagcagcagctggaggaggcccagagagtcatcctgcaggccaaatgcaagggctacttcttcgtggtcctgggcattggcaggaaggtgaacatcaaggaggtatacaccttcgccagtgagccaaacgacgtcttcttcaaattagtggacaagtccaccgagctcaacgaggagcctttgatgcgcttcgggaggctgttgccatccttcgtcagcagtgaaaatgctttttacttgtccccagatatcaggaaacagtgtgattggttccaaggggaccaacccacaaagaaccttgtgaagtttggtcacaaacaagtaaatgttccgaataacgttacttcaagtcctacatccaacccagtgacgacaacgaagccggtgactacgacgaagccggtgaccaccacaacaaagcctgtaaccaccacaacaaagcctgtgactattataaatcagccatctgtgaagccagccgctgcaaagccggcccctgcgaaacctgtggctgccaagcctgtggccacaaagatggccactgttagacccccagtggcggtgaagccagcaacggcagcgaagcctgtagcagcaaagccagcagctgtaagaccccccgctgctgctgctgcaaaaccagtggcgaccaagcctgaggtccctaggccacaggcagccaaaccagctgccaccaagccagccaccactaagcccatggttaagatgtcccgtgaagtccaggtgtttgagataacagagaacagatatatgcaagttgccgaaagacgaaggaacttgcagggatttcatattaaaatggtactatgatccaaacaccaaaagctgtgcaagattctggtatggaggttgtggtggaaacgaaaacaaatttggatcacagaaagaatgtgaaaaggtttgcgctcctgtgctcgccaaacccggagtcatcagtgtgatgggaacctaagcgtgggtggccaacatcatatacctcttgaagaagaaggagtcagccatcgccaacttgtctctgtagaagctccgggtgtagattcccttgcactgtatcatttcatgctttgatttacactcgaactcgggagggaacatcctgctgcatgacctatcagtatggtgctaatgtgtctgtggaccctcgctctctgtctccaggcagttctctcgaatactttgaatgttgtgtaacagttagccactgctggtgtttatgtgaacattcctatcaatccaaattccctctggagtttcatgttatgcctgttgcaggcaaatgtaaagtctagaaaataatgcaaatgtcacggctactctatatacttttgcttggttcattttttttcccttttagttaagcatgactttagatgggaagcctgtgtatcgtggagaaacaagagaccaactttttcattccctgcccccaatttcccagactagatttcaagctaattttctttttctgaagcctctaacaaatgatctagttcagaaggaagcaaaatcccttaatctatgtgcaccgttgggaccaatgccttaattaaagaatttaaaaaagttgtaatagagaatatttttggcattcctctaatgttgtgtgttttttttttttgtgtgctggagggaggggatttaattttaattttaaaatgtttaggaaatttatacaaagaaactttttaataaagtatattgaaagttt

SEQ ID NO: 685588 - DNA, 469 bp, Homo sapiens
agaagcggtaaccgaaacttacgcaggtccgccccggtataacggcggttgagggaaactgctattgacgcctagcgacacatacgctgactcataagacgaacttgtgtcagagctagaatatgcacaatgctgtagacgaggtctactggatgcataatgcactcgcaatatgctcaatttcaggtacaccgagatcgacatgcacctagacaccgcagggtgcatacatgctgactcggaccagtgtaatacattcttccgtagctttggcgacatgatctcgatacaatgggcctaagatatcaagctaacaatctcgagaacgctaggcttaccctaagtagtgcaagtgtatcgaatcccccttaagttcgctgacgtagtgccagtcgaattgcccatgtccactatcgacgcagcagccgcgacctagtgtcgagattttgacagacggacttacgggagc

SEQ ID NO: 685589 - DNA, 184 bp, Homo sapiens
cctgggttcaaatagttattgtggcccagcttcccaagtggctgggattagaggcgcatcaccacacccagctaatttttttattaagtagagaccatgttttgccatgttggccagactgtctcaaacttccagcaccaacctcagcctcccaaagtgctgggattatagtcataagccacca

SEQ ID NO: 685590 - DNA, 2582 bp, Homo sapiens
  misc_feature (1062)..(1062): n is a, c, g, or t
  misc_feature (2491)..(2491): n is a, c, g, or t
  misc_feature (2500)..(2500): n is a, c, g, or t
  misc_feature (2514)..(2514): n is a, c, g, or t
  misc_feature (2554)..(2554): n is a, c, g, or t
  misc_feature (2566)..(2566): n is a, c, g, or t
cggacgcgtggcgccagagtggcagttgtgcagcacgcgccctctgagtccgtggacaatgccagcatgccacctgtgaaggtggaattctccctgactgatatggctccaaggagaagctggtggacttcctcagcaggggaatgacacagttgcagggaaccagggccttaggcagtgccattgaatacaccatagagaatgtctttgaaagtgccccaaacccacgggacctgaaaattgtggtcctgatgctgacgggcgaggtgccggagcagcagctggaggaggcccagagagtcatcctgcaggccaaatgcaagggctacttcttcgtggtcctgggcattggcaggaaggtgaacatcaaggaggtatacaccttcgccagtgagccaaacgacgtcttcttcaaattagtggacaagtccaccgagctcaacgaggagcctttgatgcgcttcgggaggctgttgccatccttcgtcagcagtgaaaatgctttttacttgtccccagatatcaggaaacagtgtgattggttccaaggggaccaacccacaaagaaccttgtgaagtttggtcacaaacaagtaaatgttccgaataacgttacttcaagtcctacatccaacccagtgacgacaacgaagccggtgactacgacgaagccggtgaccaccacaacaaagcctgtaaccaccacaacaaagcctgtgactattataaatcagccatctgtgaagccagccgctgcaaagccggcccctgcgaaacctgtggctgccaagcctgtggccacaaagatggccactgttagacccccagtggcggtgaagccagcaacggcagcgaagcctgtagcagcaaagccagcagctgtaagaccccccgctgctgctgctgcaaaaccagtggcgaccaagcctgaggtccctaggccacaggcagccaaaccagctgccaccaagccagccaccactaagcccatggttaagatgtcccgtgaagtccaggtgtttgagataacagagaacagcgccaaactccactgggagaggnctgagccccccggtccttatttttatgacctcaccgtcacctcagcccatgatcagtccctggttctgaagcagaacctcacggtcacggaccgcgtcattggaggcctgctcgctgggcagacataccatgtggctgtggtctgctacctgaggtctcaggtcagagccacctaccacggaagtttcagtacaaagaaatctcagcccccacctccacagccagcaaggtcagcttctagttcaaccatcaatctaatggtgagcacagaaccattggctctcactgaaacagatatatgcaagttgccgaaagacgaaggaacttgcagggatttcatattaaaatggtactatgatccaaacaccaaaagctgtgcaagattctggtatggaggttgtggtggaaacgaaaacaaatttggatcacagaaagaatgtgaaaaggtttgcgctcctgtgctcgccaaacccggagtcatcagtgtgatgggaacctaagcgtgggtggccaacatcatatacctcttgaagaagaaggagtcagccatcgccaacttgtctctgtagaagctccgggtgtagattcccttgcactgtatcatttcatgctttgatttacactcgaactcgggagggaacatcctgctgcatgacctatcagtatggtgctaatgtgtctgtggaccctcgctctctgtctccaggcagttctctcgaatactttgaatgttgtgtaacagttagccactgctggtgtttatgtgaacattcctatcaatccaaattccctctggagtttcatgttatgcctgttgcaggcaaatgtaaagtctagaaaataatgcaaatgtcacggctactctatatacttttgcttggttcattttttttcccttttagttaagcatgactttagatgggaagcctgtgtatcgtggagaaacaagagaccaactttttcattccctgcccccaatttcccagactagatttcaagctaattttctttttctgaagcctctaacaaatgatctagttcagaaggaagcaaaatcccttaatctatgtgcaccgttgggaccaatgccttaattaaagaatttaaaaaagttgtaatagagaatatttttggcattcctctaatgttgtgtgttttttttttttgtgtgctggagggaggggatttaattttaattttaaaatgtttaggaaatttatacaaagaaactttttaataaagtatattgaaagtttcctgggtgtgacgttcttggcagtcttgtttccatagcagcgattgtcagaatcacccctaggctggggaaactgggtttggttctggccccatggagctgtgcaacaccctttcgtttccagtggaggaggcaaaagagctttatcagccagtgtgcaaagagacccggctnggagacaangcatcccccgcttngtggattcagccccacatgctcccgtgcttccatgggccnagccggagggtntttcccgctgtttggg

SEQ ID NO: 685591 - DNA, 360 bp, Homo sapiens
tcacggacgcaggatgatgagtacctcgagttcgttattctggttctctctactttagaataggctggcaaatttccataattaaaatttattttgggctggggcgcaggggcttacgcctacaatcccagcacttggggagctgaggcaggcgtatcacctgaggtcaggagttcgaggccagccgggccaacagggtgaaaccccgtctctactaaaaatacaaaaattagccgggcatgggggtgcacacctgtagtcccagctactcaggaggctgaggcaggagaatcacttgaacccgggaggcggagttgcagtgagctgagatcgtgccacggcactccagccgggacgaca

SEQ ID NO: 685592 - DNA, 205 bp, Homo sapiens
gtgcgcaaagatgagaagtggtgagagagctaacatccttgccttgttcctgagttttaaagagtttctagatgcgaacacacacacacaaaagtgtgcttccagaagatgctgctgggaaggccactgcatccctagggagccaaatcaaagcattttgtcctaatgtgaccggaattggcgggttcttggtcttactgacttc

SEQ ID NO: 685593 - DNA, 147 bp, Homo sapiens
attgcgacccgcaccaatgggtggacccgaacggatcagctcgaagcactagtgaggagaccccggtcacggccatgcctgccctactagctgcggctcctcccatgccagggctggaggctgcatggacatccttctccacttcct

SEQ ID NO: 685594 - DNA, 1185 bp, Homo sapiens
  misc_feature (13)..(14): n is a, c, g, or t
  misc_feature (22)..(22): n is a, c, g, or t
aggacccattagnntgatggtnggactagaagcgacctgctcgctgggcagacataccatgtggctgtggtctgctacctgaggtctcaggtcagagccacctaccacggaagtttcagtacaaagaaatctcagcccccacctccacagccagcaaggtcagcttctagttcaaccatcaatctaatggtgagcacagaaccattggctctcactgaaacagatatatgcaagttgccgaaagacgaaggaacttgcagggatttcatattaaaatggtactatgatccaaacaccaaaagctgtgcaagattctggtatggaggttgtggtggaaacgaaaacaaatttggatcacagaaagaatgtgaaaaggtttgcgctcctgtgctcgccaaacccggagtcatcagtgtgatgggaacctaagcgtgggtggccaacatcatatacctcttgaagaagaaggagtcagccatcgccaacttgtctctgtagaagctccgggtgtagattcccttgcactgtatcatttcatgctttgatttacactcgaactcgggagggaacatcctgctgcatgacctatcagtatggtgctaatgtgtctgtggaccctcgctctctgtctccaggcagttctctcgaatactttgaatgttgtgtaacagttagccactgctggtgtttatgtgaacattcctatcaatccaaattccctctggagtttcatgttatgcctgttgcaggcaaatgtaaagtctagaaaataatgcaaatgtcacggctactctatatacttttgcttggttcattttttttcccttttagttaagcatgactttagatgggaagcctgtgtatcgtggagaaacaagagaccaactttttcattccctgcccccaatttcccagactagatttcaagctaattttctttttctgaagcctctaacaaatgatctagttcagaaggaagcaaaatcccttaatctatgtgcaccgttgggaccaatgccttaattaaagaatttaaaaaagttgtaatagagaatatttttggcattcctctaatgttgtgtgttttttttttttgtgtgctggagggaggggatttaattttaattttaaaatgtttaggaaatttatacaaagaaactttttaataaagtatattgaaagttt

SEQ ID NO: 685595 - DNA, 967 bp, Homo sapiens
ggggctattgcaatagctcagcatggtgccagagggtgtctctatgatctgagacggaattgttgatgtctcgtgaccgcggtcactcggagatgatgattgattttgctgcgtgagatactacctcctgttgaattaggcccacgtatctctggtatgcctatgacgaccgcgccatgtgagagactttcatcccatctccgcaggtccggataactctgtgcatggtaaatatgtgacctcgagcgtacagcaccatcgtgggggtggtatctgtgtagccactctttcgtacaaaacacgatctctaagcccggaaagcactccgtaccacaatgtagtcctgggtggctcaggtgggctcatggctcctgactcctgaacgtgtcctcctttggaggtgcctcatggctttgagcacatgcgcccttggcagatcccactccgggcggctacgacggcatctctcctctcaacgtgcgcgtctcgcggccaagccttggcggagccgtgagaacaaggcgcatctgtcgaactccttccgttccagggcctcatcggaagcttggctagtcttgtgtgggacgcattgtcaccagctttccatggccacgggaagggtctaatttgccaccttactgcttgtaagcaaaactccccaaggtcgacccgtgtgtagtcacagggtagtacactccagtcacagcttggtctggggcgatacttaccctcgttttttttccctttccgttgaaaacgactcatttgcacacggtccctcattttcgggggcgaatttgtctttcctcagggcgattaaaactcaaggccaaaggcacttgtgggtcaacatttcgtgacgaggagcttcaagccacggggctttgattggaacccacgcgtgcggcatgggttacccgattcccgagccttagaagccaagggagtggtggttttgcaagggccc

SEQ ID NO: 685596 - DNA, 927 bp, Homo sapiens
  misc_feature (28)..(28): n is a, c, g, or t
  misc_feature (78)..(78): n is a, c, g, or t
  misc_feature (83)..(83): n is a, c, g, or t
  misc_feature (88)..(88): n is a, c, g, or t
  misc_feature (92)..(92): n is a, c, g, or t
  misc_feature (106)..(106): n is a, c, g, or t
  misc_feature (113)..(113): n is a, c, g, or t
  misc_feature (117)..(117): n is a, c, g, or t
  misc_feature (123)..(123): n is a, c, g, or t
  misc_feature (132)..(133): n is a, c, g, or t
  misc_feature (136)..(138): n is a, c, g, or t
  misc_feature (141)..(141): n is a, c, g, or t
  misc_feature (144)..(144): n is a, c, g, or t
  misc_feature (149)..(149): n is a, c, g, or t
  misc_feature (165)..(165): n is a, c, g, or t
  misc_feature (180)..(180): n is a, c, g, or t
  misc_feature (189)..(189): n is a, c, g, or t
  misc_feature (193)..(193): n is a, c, g, or t
  misc_feature (203)..(203): n is a, c, g, or t
  misc_feature (227)..(227): n is a, c, g, or t
  misc_feature (233)..(234): n is a, c, g, or t
  misc_feature (253)..(255): n is a, c, g, or t
  misc_feature (280)..(280): n is a, c, g, or t
  misc_feature (291)..(291): n is a, c, g, or t
  misc_feature (294)..(294): n is a, c, g, or t
  misc_feature (301)..(303): n is a, c, g, or t
  misc_feature (309)..(309): n is a, c, g, or t
  misc_feature (313)..(313): n is a, c, g, or t
  misc_feature (317)..(317): n is a, c, g, or t
  misc_feature (326)..(326): n is a, c, g, or t
  misc_feature (343)..(343): n is a, c, g, or t
  misc_feature (373)..(373): n is a, c, g, or t
  misc_feature (380)..(380): n is a, c, g, or t
  misc_feature (382)..(382): n is a, c, g, or t
  misc_feature (386)..(386): n is a, c, g, or t
  misc_feature (390)..(390): n is a, c, g, or t
  misc_feature (402)..(402): n is a, c, g, or t
  misc_feature (412)..(412): n is a, c, g, or t
  misc_feature (433)..(433): n is a, c, g, or t
  misc_feature (504)..(504): n is a, c, g, or t
  misc_feature (513)..(513): n is a, c, g, or t
  misc_feature (537)..(537): n is a, c, g, or t
  misc_feature (542)..(542): n is a, c, g, or t
  misc_feature (550)..(550): n is a, c, g, or t
  misc_feature (575)..(575): n is a, c, g, or t
  misc_feature (853)..(853): n is a, c, g, or t
  misc_feature (917)..(917): n is a, c, g, or t
ctggggattgcccctacctaggcttgcntgctggggctttgccacggggtccagttcacacttagcactaattaaatnctttnttgantaantacaataccaaacncaatgcnttcngatgcnttctgaagnngtnnnggnggnctttntgctcgggctaatggnaaacacaatagaggnggatatgcnagtntgggatagtngggtggttttgtgcggcacttatntctttnngtccacaagtgtattattnnntgatagggagcatctaatacaaccntttctacaganctngggaatnnntttctnaganaganagattttgngggccccatcttttatncccaccccaacagtctaactctaaaggggntagggcnantggntttnctcacgggggcncacggctggngtggctttgctatcggggtcngtgtttctgatccgttatgagcgttgggacgagattcagatattcccaaagggggaggcgcaatgcacgtngtgatcgcntattcagcgacagcgagcgctgcntccgngactctcntcccggggattggatgaggtcagcnacattcatgggcatctcctccactgtggtattgtagaaagtctcaatgtcacgaagaatcctcttgtcttcttcagtaacaaagtttatagccacacctttcctcccaaatcgaccccctctgccaattctgtgaatatagttttcacgattggtaggtagatcataatttataaccaaagacacttgttgcacatcaatcccgcgagccaacaagtcagtagtgatcagaacacgacttgaccctgaccggaattccctcatgataacatctctctncttctggtccatgtcaccatgcagagcagaaactgtgaagtctctggcatgcatcttctcagtnagccagttca

SEQ ID NO: 685597 - DNA, 1057 bp, Homo sapiens
cgagctcgttaccgaattcatcagccagcagtgtctgtctagttcaaccatcaatctaatggtgagcacagaaccattggctctcactgaaacagatatatgcaagttgccgaaagacgaaggaacttgcagggatttcatattaaaatggtactatgatccaaacaccaaaagctgtgcaagattctggtatggaggttgtggtggaaacgaaaacaaatttggatcacagaaagaatgtgaaaaggtttgcgctcctgtgctcgccaaacccggagtcatcagtgtgatgggaacctaagcgtgggtggccaacatcatatacctcttgaagaagaaggagtcagccatcgccaacttgtctctgtagaagctccgggtgtagattcccttgcactgtatcatttcatgctttgatttacactcgaactcgggagggaacatcctgctgcatgacctatcagtatggtgctaatgtgtctgtggaccctcgctctctgtctccaggcagttctctcgaatactttgaatgttgtgtaacagttagccactgctggtgtttatgtgaacattcctatcaatccaaattccctctggagtttcatgttatgcctgttgcaggcaaatgtaaagtctagaaaataatgcaaatgtcacggctactctatatacttttgcttggttcattttttttcccttttagttaagcatgactttagatgggaagcctgtgtatcgtggagaaacaagagaccaactttttcattccctgcccccaatttcccagactagatttcaagctaattttctttttctgaagcctctaacaaatgatctagttcagaaggaagcaaaatcccttaatctatgtgcaccgttgggaccaatgccttaattaaagaatttaaaaaagttgtaatagagaatatttttggcattcctctaatgttgtgtgttttttttttttgtgtgctggagggaggggatttaattttaattttaaaatgtttaggaaatttatacaaagaaactttttaataaagtatattgaaagttt

SEQ ID NO: 685598 - DNA, 653 bp, Homo sapiens
  misc_feature (39)..(39): n is a, c, g, or t
cactcgccaagaggtgaatgccgctcgtccccagtgtcntgtgggctttacaccttgccctttcccagcatgcggcggaagcacatagtagacgagaagcagcctgggttctacctaaactgcggtcacgttcacggctaccacaactggggcaaccgagatgcagagcgagatggaagggagggacgtgagcgtgaatgtcccatgtgtcgtgctcgcgggccatacgtcccgctttggctaggctgcgaggcagggttttatttagatgcggctccacccacgcatgcattcagtccatgcggccacgtgtgctccgaaaaaacagcggcctactggagtcaaatcccacttcctcatgggacgcacaccttccacgccgcctgtccttttctgtgcacagcagctcaatggcgagcagggatacatcagactaatcttccaggggccagtggactaagcacacctgcctttgaccctatttcacaaacattaatcctttttccaccttcagtgcgatttttataaagatttttctgcgctcccagactgtttttttcttccctttctggtttataagtgacctttatactgctttttccaatacagagagaaaaaaagactatatattttcaaataaaatgataaaagca

SEQ ID NO: 685599 - DNA, 273 bp, Homo sapiens
acatcacactcctgcgtacaggttgatccatcatgcgccctgccaattgtactccttacttatttctcaaatccactattttttccctacctccaccccactaccaccctcttccaatccccattatctctaaggccccaccaggtctttcctcattcacgcttgtcttctctaatacactctacacattagcctttcatggaggtaatatttagaaatagacatctggcacattacggcctcgcacccctacttaaaattcttcaggcttta

SEQ ID NO: 685600 - DNA, 130 bp, Homo sapiens
aatatgtattatgtgtatatacttgtttgcaggacattatttgttcatgccttagaggattgtagcatttatttcgtctgaaggtaatgatagctatacagcctgtccagttactcatcctcttccaccc

SEQ ID NO: 685601 - DNA, 151 bp, Homo sapiens
tcgcctgcccactgagccggcgtgcagtgggctgcgtaagagtacctggcgatggcgatatgatcggtgcgcgtgtgccggatgagagggtggctcctagactagtagaaacccgggcctgctccgggagccgaggcgctaggtgcaacat

SEQ ID NO: 685602 - DNA, 394 bp, Homo sapiens
tcagcagacacatcaaagattttcaatgagaaaatgatgtcaggattacgttattcgggaaattaagaacctgtacagggcaatttcaactaataatggcgactacctgctcaccatcttttggcagcaacgaagaagaaatgaatggtctgaacagacttagcccgacagagctgcccaatatagaggatgccaatgttaaagtgaccacaagaaatgtaacatctctttttaggagcagccctagataaggaaatcttccaactggtccttcaggagagtgtctaagcagtcttggatgagctacatcaacaggtctgcagaccacagagccagcaatcaggaaccacattccatgtagtacaaaatttagaggtttcccctttatcaataa

SEQ ID NO: 685603 - DNA, 845 bp, Homo sapiens
ggtggcgtgagaagccatgagcagcatggtctctcgcgactccctgtacgatgcggtgcgggaatgtccttcatcgggatatccagtgcaggttccgtaagtgcctggagacggtggagttgcagatcagcttgaagaactatgatctctccagaaaggtacaaagactgcgttcatcgggcgctacgcggtcatgagcattaagacgatcctacatcacacctgcactctacagttcctcttgtgatgctgtctcgtgcgtgagtactcatgtaatgcacttgatgcatctgaaggctttaatgcgcacgggtagtgatatcccactcgaggatgtgacatcgtacgtgcgactgatcatataaactctactatattggtcagctgggtcccgaatgctggccaaggaatgtctgatagccgtgttgttgggctcatgtacgtctccttgatcgaggcatgatttcatgagtcctcggccccggtgtaaagataatggcatggacaagttctccttaccctgactctagtacgtcgaaccgatacaaacataggttcgagccaaggagtgtgattgaagtgttgaacgtccacagttaaagttccaaattggagaaggtcgttatgtctggctgtggctgttggtcacgtgaagatgtacagacgatgagcttgtgtctaacattcacctggcttgtcaccttcttgggtgtcattgctcaagaaaaagctggctgaatgtccgggctttatatatccgagagcaccatgggctaaggccccagtcgcctatatttaatggcacattttgaatcagattctattaccagtgatatgcaatgcgg

SEQ ID NO: 685604 - DNA, 187 bp, Homo sapiens
  misc_feature (33)..(33): n is a, c, g, or t
  misc_feature (61)..(61): n is a, c, g, or t
  misc_feature (101)..(101): n is a, c, g, or t
  misc_feature (107)..(107): n is a, c, g, or t
  misc_feature (113)..(113): n is a, c, g, or t
gtgagagtatggaacaatggcccataaggactnctaagcgccgaagccaaggagcctcctnccttcctggttcaccccgcccaagggacctgcccccattnctgtgnccctgnccaggcgttccaatagtgtcagaagcaacttgtggctttgctgtgggttgtgagatgggtacattccaaaggag

SEQ ID NO: 685605 - DNA, 1075 bp, Homo sapiens
tgcctgttgttcgtcacaggtttgcgtcggtggtggtgctgtgttgtctctatgctaggcaccgggggtaggggccacttgttgccctcccccttttccttggttgcgcctttgaagaggtgtgtgcctctcttttccgcttgtgccctaaccgggggttgctcggcccgtttccattgtggctcccccctctctgtggtggtggggggccctttgttcggtcaatattgtccggggttacgccataacacagagtgggggcactaccttggcccgtgggttcttttcgtattgtggtcttcttctaccccgtatgtgccccacgtggcccgttgagttcctcaccttctgtggggctacatttcgccccccccctcccaagtcactggattccatggactcgagccctttgtgaggaggacgtctcgccctctggctggaactgatacctggtgcactccccgggtcatcctgggagctttcctcagcaccttcaccgttccctccccgtgtagcctcctgtccgtgggggctggacccttctgattcagaggtctcatgcctgcccttgccccagatgccccgggtcgtgccacttctttgggattacccgttccagtctcccaccgtttctggttttctgtccccctatgtacccgtttttcacgtggaccactggccccccccctgccccctgcacgccctgctgcacccactttcaccccgagcacccaaggggaagaacgccgacactcacggtgctgcacctcaccttttgtccccctcggggaagttggggaaagggacgaaccctcggctggaggggatatggaggggcttttaaatttatttctttttctcgttgaggcttccccctctctgagcccgttttcactttcttcctggtggcacttagcccctccctgcctctcacctccacgacccgttccccccactcggggaggtatggctgggaggccaaaaggagagggtgggagcccccttttgcgtggttggtttttattaattatctggataaccccccaaaaaactgtaaaattaagagagagagaga

SEQ ID NO: 685606 - DNA, 421 bp, Homo sapiens
ggggcaaactcattaaagtttttggatcctatagtactgaaatattactcaaaagttcaaatgggctttgatttatttatctgttttggaagcttcagacttttcaaaccattatggccgttaatgcatctgatacaagattggatgtgattataggaactttgagaacataaaacatactgcttttttgcatttctgaaaaattcttaccaaaaggaagaatttgacttctgtccagaaggagtatctgatttgtttggactctggataaactcgagctgtgcatatttggccaagagtttgatttgtggactgatcatcgagccgtgggcaagactcaggcttcagaaagcgatgtcagtgtcaagaatcccacatgaacattaaatatgcttctggacagataaacactcgagccaaa

SEQ ID NO: 685607 - DNA, 530 bp, Homo sapiens
gcccgcgtgctgcccggaagtctattgcgtttgcgacgccggagtggccggggagccgggacaagcgcaccctcgcctgcctgatccagaacttcatgcctgaggacatctcggtgcagtggctgcacaacgaggtgcagctcccggacgcccggcacagcacgacgcagccccgcaagaccaagggctccggcttcttcgtcttcagccgcctggaggtgaccagggccgaatgggagcagaaagatgagttcatctgccgtgcagtccatgaggcagcgagcccctcacagaccgtccagcgagcggtgtctgtaaatcccgagctggacgtgtgcgtggaggaggccgagggcgaggcgccgtggacgtggaccggcctctgcatcttcgccgcactcttcctgctcagcgtgagctacagcgccgccctcacgctcctcatggtgcagcggttcctctcagccacgcggcaggggaggccccagacctccctcgactacaccaacgtcctccagccccacgcctag

SEQ ID NO: 685608 - DNA, 232 bp, Homo sapiens
aatgaatgtactataaaaataatgaagcagctacttaccatcaggttacaacttaactttacaaagaagtgaagccgcacagagctgaaacagaaatgacatagagaaagagaggcggcaaagtccttgagtcccaacatgtccacctcaaagtacaaacatactacaagaacaaaggcccctaatccacctcctcaatggtagggcctgacccagaccctcccttgggacc

SEQ ID NO: 685609 - DNA, 354 bp, Homo sapiens
gcccgcgtgctgcccggaagtctattgcgtttgcgacgccggagtggccggggagccgggacaagcgcaccctcgcctgcctgatccagaacttcatgcctgaggacatctcggtgcagtggctgcacaacgaggtgcagctcccggacgcccggcacagcacgacgcagccccgcaagaccaagggctccggcttcttcgtcttcagccgcctggagggctccatccagctgtgcagtggggaggactggccagaccttctgtccactgttgcaatgaccccaggaagctacccccaataaactgtgcctgctcagagccccaggtacacccattcttgggagcgggcagggc

SEQ ID NO: 685610 - DNA, 257 bp, Homo sapiens
  misc_feature (45)..(45): n is a, c, g, or t
  misc_feature (76)..(76): n is a, c, g, or t
cccaaaagcctttaagcccctccctgtcccctcccttgtagtccnaatttttccaactttccattccccatcaagntgggggttttggtcacaaggttcagtttttttccactgtccatccctcctatcatttgtagagcaaagcacaggcagttgtgtgccttgggcccagggaaccctccatcaaccttagacaggactcagtaaatggtttttgggtaagccccaccaggtggaataaagggcccagattttga

SEQ ID NO: 685611 - DNA, 827 bp, Homo sapiens
gcccgcgtgctgcccggaagtctattgcgtttgcgacgccggagtggccggggagccgggacaagcgcaccctcgcctgcctgatccagaacttcatgcctgaggacatctcggtgcagtggctgcacaacgaggtgcagctcccggacgcccggcacagcacgacgcagccccgcaagaccaagggctccggcttcttcgtcttcagccgcctggaggtgaccagggccgaatgggagcagaaagatgagttcatctgccgtgcagtccatgaggcagcgagcccctcacagaccgtccagcgagcggtgtctgtaaatcccggtaaatgacgtactcctgcctccctccctcccagggctccatccagctgtgcagtggggaggactggccagaccttctgtccactgttgcaatgaccccaggaagctacccccaataaactgtgcctgctcagagccccagggctggctggcggctccgcgcagtcccagagggccccggatagggtgctctgccactccggacagcagcagggactgccgagagcagcaggaggctctgtcccccacccccgctgccactgtggagccgggagggctgactggccaggtcccccagagctggacgtgtgcgtggaggaggccgagggcgaggcgccgtggacgtggaccggcctctgcatcttcgccgcactcttcctgctcagcgtgagctacagcgccgccctcacgctcctcatggtgcagcggttcctctcagccacgcggcaggggaggccccagacctccctcgactacaccaacgtcctccagccccacgcctag

SEQ ID NO: 685612 - DNA, 493 bp, Homo sapiens
  misc_feature (24)..(24): n is a, c, g, or t
  misc_feature (35)..(36): n is a, c, g, or t
  misc_feature (138)..(138): n is a, c, g, or t
  misc_feature (265)..(265): n is a, c, g, or t
  misc_feature (334)..(334): n is a, c, g, or t
tttttttttttagtagagacaggntttcaccagtnnggccaggctggtcctgaatgattgacctcagttgatctgcccgccccagcctcccaaagtgctgggattacaggtgtgagccaccacacccagccacaaganaactttttatcagattttttttgtctctattcatattaactacaccaagatcaagttacaaaaagttgtcagccgggtgccatggctcacgcctgtgatcccaacactttgagaggccaaggcgggnggatcatttggggtcgggagttcgaggccagcctggccaacatggtgaaagcccgcctctactaaaaanacaaaaattagccgggccgtggtggcgtgcgcctgtaatctcagctacttggtagactgaggcgggagtatcgcttgggcccgggaggcggaggcttgcggctgggccaggatcgcgccactgcactccagtctgggcgagagagtgagaccctgtctc

SEQ ID NO: 685613 - DNA, 359 bp, Homo sapiens
ggcactttgcgtggaagagaacgggcaggagcagacgatgtctgagtgtgaggcggtcgcacatgagctgcagagggcaaagcgctctctggcaccagcataaggtcttgtgcatgcggacaacccagtaggctcctggaggccctggtcagcttgcttggaatccagcaggcagctggggctgagtgacaacatctgcagcaactgggcactggacagctttgccttctccagtgtctaccttcctcctcaagtcccagacatctgtataaacacaatccttggtactcccaaatctgagtcgaattactctattgcctccttcttaatgtcagtaaggatatgagcctttgcacagg

SEQ ID NO: 685614 - DNA, 323 bp, Homo sapiens
attgcgggagcatcgcaccgggcctgaggtatatttatataccgcaaaatttacccttttaagtgtccagctctattaattttgacaaatttatatatagtcatcataacttctaccataatcagcatgtaacatatttctttttctttttttttttgggggatggagtctcactctgtcacccaggctggagtgcagtggtgtgatctgggttcactgcaaccttcacctcccgggctcaggaaattctcctacctcagcctcctgagtagctgggattacaggtgcatgccaccatgcccagctaattttggtttagtaga

SEQ ID NO: 685615 - DNA, 170 bp, Homo sapiens
tagagtgcaatggtgagatccagaatgccgcgtaccgtaggctaagtcccatcgcgatcccgaccggaataccgaacaacaccgctgcaaatagcgccacgataatgcgcgtcagactggctgccagatgctgccacagcgtcgtccataaagccttgcgtccggcaatg

SEQ ID NO: 685616 - DNA, 202 bp, Homo sapiens
cacacataatcaggggaagtatgacggggagaaagctccccccagatatggtccacacgctccccgagggccgtctcacgacacatctccatctggcgacctcgcgcatacccccgcgctctaggccctccgctccccaccaggggatcgggcggcgcatttcccccccatcctcatccattgatgtggctgcgctgctacg

SEQ ID NO: 685617 - DNA, 1443 bp, Homo sapiens
gtccccgccccctgctgggcctctctccgcagccgcgagacccgcgcttggcgcataggccggttctaatttacaagaacaccgcggcctgaggccggagagtcccttcaacccgggaggcggcggctgcagggagccgagacggcgccattgccctccagcctgggcaaaaagagcgaaactccgtctcaaaaaaaaaaaaacatggccgaaaccaggaagctgcgcgatggcgccacggcccctcttctcccggcctgtgtccggaaggtttccctccgaggcgccccggctcccgcaagcggaggagagggcgggacgtgccggggccggagctcagaggccctggggccgctctgctctcccgccatcgcaagggcggcgctgacctgaggcctccccgcaaaggtccccgaggcggcggcggcggcgggctgtgagaaccgcagaagaacgctgggcgcgcagcgacccgtccacccccgcgaggagagacttccacagaggcagcgtttccacagcccaaagccacgtttctagggtgatgcagccccagtaagttcctggcggggaagctcacggctgtcaaaagaactcttcgctccagccggcgcacgaaggggaggagggcaggaggctgccgcccgcacaggtcatctgatcacgtcgcccgccctagtctgcttttgtgaatctccactttgttcaacccccacccgccgtctctccctccctgcgccttccctctaaccttaaagacccagctacctctacgcaaatggtagctacctctacgcaaatggtagctacctctgcgcaggtggaagttgagttcggttcacgcgggaccctcttccctgtggcaagctgctgaaggagacctgctgttactgctttagctgctgttctgcttaatctcagacagctggaaggtagtattccgccctcgcccagccacccgagtaaatgcccctttcttcccttgatctaagaaggttgctccggatctcgccatctggcctgcgttcaatcagcagaagcttcctggaggagcaggaggaggcactgtgctcgcatcacataccagtggccagaagttggcttcagggaagctcaggaaataggatgcgagaagccatgagacctccccaaactctgcagtaacagagtcaacaagacaatggcttaaagatggagagaccagttgatcggtcacacaagctgttccacgataattcttgtgtcagaaggggaggctgactaccaggaccactggccccacttccagcccctccattttgagtacacttcagagggctctggcagggtgagggggtcttggtggtgccacagagagtaaaggtttagcacacccattgtggagatatttcatggggacaacccagtgacttcacttgaagtaaagtgggattttccaacctt

SEQ ID NO: 685618 - DNA, 747 bp, Homo sapiens
  misc_feature (355)..(355): n is a, c, g, or t
gaaaacttcccatttccggtcagttgtttgatggacatggcacgtactgtgacacctgtaggctctcctttgggagcactgttgccgtcgtgttgtgcgctgtgaggatggcacctgtggacccgtccttcccagccagtccgcgtcactcctggaagcgtatctaatcgacctaatgtcaagaaacgacccgtagcataatatactctgttggtagccagggaaagcaatcccacgggtgtgctcggagttggctgctgaggcatgtatttcattcttactgattctttgcacatattggagagaattgcgcgccgtcactggtgatagccgagaagagccagtcctgcttcangactcctttctctatttccagtgataattgcctcactctgaatttccgatcaagcctgcagtgcttattgcatccaagtgacgggtgcatctggctgggcaatgggccctgccatctgcgcattctgttgctttgagggctgtatgacagtttgtccgagttagctcctccggcccgattggccacttgtgccaagtccgggtgtccagaggggccctcttctgtccctcatgcttcgctgttctgtggatggccgcgtgtccttgtaggtcacgccttcgttcggtccgggagggccttcatctggttctcaatatgaacctatgggcggaccgtggagcatcatggcaagcacgaatgtcgaagttgggggagtggatgggcagcctccg

SEQ ID NO: 685619 - DNA, 188 bp, Homo sapiens
gtgtagccagagcacacaaaatctgtatacacacggtctgtgattgaccacttcctgtcactccagctcggacgtgctacatctcccaatttcacctactgaaaataaacaccactaccaccaagatgcttttgaccccgggaaatacttgagaaagcagaacgaagaaagccctaaacatgttctga

SEQ ID NO: 685620 - DNA, 859 bp, Homo sapiens
  misc_feature (94)..(94): n is a, c, g, or t
  misc_feature (158)..(158): n is a, c, g, or t
  misc_feature (163)..(164): n is a, c, g, or t
  misc_feature (190)..(190): n is a, c, g, or t
  misc_feature (196)..(196): n is a, c, g, or t
  misc_feature (200)..(200): n is a, c, g, or t
  misc_feature (228)..(228): n is a, c, g, or t
  misc_feature (233)..(233): n is a, c, g, or t
  misc_feature (237)..(237): n is a, c, g, or t
  misc_feature (244)..(244): n is a, c, g, or t
  misc_feature (259)..(259): n is a, c, g, or t
  misc_feature (263)..(263): n is a, c, g, or t
  misc_feature (267)..(267): n is a, c, g, or t
  misc_feature (310)..(310): n is a, c, g, or t
  misc_feature (334)..(334): n is a, c, g, or t
  misc_feature (348)..(348): n is a, c, g, or t
  misc_feature (354)..(354): n is a, c, g, or t
  misc_feature (380)..(380): n is a, c, g, or t
  misc_feature (382)..(382): n is a, c, g, or t
  misc_feature (385)..(385): n is a, c, g, or t
  misc_feature (387)..(387): n is a, c, g, or t
  misc_feature (392)..(392): n is a, c, g, or t
  misc_feature (395)..(395): n is a, c, g, or t
  misc_feature (397)..(397): n is a, c, g, or t
  misc_feature (402)..(402): n is a, c, g, or t
  misc_feature (408)..(408): n is a, c, g, or t
  misc_feature (410)..(411): n is a, c, g, or t
  misc_feature (537)..(537): n is a, c, g, or t
ggttcctgctggggggcagccgcaagcgtgtgctggtgcgtgtggagcgggccacggtgtacagcgtggagcaggacaatgatctggagctggncgacgcctactacctggggggcgtgccgcccgaccagctgcccccgagcctgcgatggctcttncccanncggaggctcagtccgtggctgcgtcnaaggcntcanaggccctgggcaagtatgtggacctcangcggntgancacgacnggcgtgagcgccggntgcnccgncgacctgctggtggggcgcgccatgactttccatggccacggnttccttcgcctggcgctctcgaancgtggcaccgctcnactggncaacgtctactccggcttcggacttncnacngngaccncangnacagntgcccntnnctctactaccgggcgtccccggatgggctatgccaggtgtccctgcagcagggccgtgtgagcctacagctcctgaggactgaagtgaaaactcaagcgggcttcgccgatggtgccccccattangtcgccttctacagcaatgccacgggagtctggctgtatgtcgatgaccagctccagcagatgaagccccaccggggaccaccccccgagctccagccgcagctgaggggcccccgaggctcctcctgggaggctggctgagtctggcaccatttacaacttcagtgggtgcatcagcaacgtcttcgtgcagcggctcctggggccccagcgcgtattgatctgcgcagaactgggcgcgtcatgtgagccggtgtgcccgccttgagccaacccggctgggctaggtggggccgccggagctccgcggggcgccgggctg

SEQ ID NO: 685621 - DNA, 758 bp, Homo sapiens
ggctgtgctgtgttgtgcggtaggggaaccgtcgtgcggaaggatggtgtgcgacaaatgtgacaagaaattggtactgttatcatccagatacatggaaagatggtgctaggaataccacagaaagtggtggaagaaagctgaatgaaaataaagcttggattcaaaaaaagcaatgatttgatccatatggacagaataagttctccactgtgtagaattgcgtaaacagttctgtgcaccaaccaggttctcattactgccagggtgtgctaaaaaaaaagtgcatctggtgcgatgttgtgggcacccaacacggtttgggggaataccagaaaaactacaagcaaacattctggtcctaagattgtatggatggacatttccggggtttcctaaaatgatttaacctttctggccgttgaaattttccaaggggcacataagattgtcaaccttacaggaataacattgtttgacgatacatcacagttttcaacccatgaggaatttgcgatgtgttacctccaattttgtggctcctacaatgttctaaaccaagcaaaccagtgtaacctaagctcctttgcgttcgtcacactgggttattctatccttaataaggaattttaaaggaccctaacgtgggcaaatttccatggaacaaattattttcctcggggttcttgtatgccctttctttaacacttatcatatattattctccccccaaaaattcatttatagactacgccaca

SEQ ID NO: 685622 - DNA, 664 bp, Homo sapiens
cacgaggagagagatagagagagagagagagagagagagagagagagagagagagagagagagagagagtgagagagacagtgagagagtgagagagtgtgagtgtgagagtgtgagagtgtgtgtgtctctccctctctccgaccttccttttctctttgtctcttgcttctctccatctcacactgtccccgaccctttcttctctttcttctatttctctgtcgctgctcgcgatactcttattcttcaccagcctgcccccgccctccattatgtctatggcttattcgttctctatcgaccgctcccttacccaccctctcactttctttttgtttctgccctatctgtttgtttgtctcttcaatcaccccttcctcctgccttgtctttcattctggtttgcagacctctctttcacttacactctcttctatccatccactctcatttttttctccccccctgttcttgcaccctctatcctcattccccctcccccgttctttctttttttatttcccccccctcttttacccgacccatccctttcttgttttctatctttctctggctttgccccgcctcctttttctgtgttttctttctccagccagagctgccgccctttcttcttgctgattgacttttcttcccttcg

SEQ ID NO: 685623 - DNA, 377 bp, Homo sapiens
gatgatgacttttaaggaccctgggggctgtgctagggacctgcagtggcagaactgcaaagcttagccttggcagtggggggtgcttggaagcccccagccagcaagcattaatgggggtggtgccccctttcccctcagcagagctatgtttaaataaagagctcccttccccccagcacttttttaatattttgttcccccaagggccaggccaaagacccaggaaggcagcgaccccttgggatccctaacctggaggaaattgccagggacccaaagggagtgccctaatccaacctggggattttttaaaagcttcctaggaaaaaatgatttccgatgtgatgaatacgaataaaaggcccttaatggca

SEQ ID NO: 685624 - DNA, 1485 bp, Homo sapiens
aaaagcagctggtacggtcgggggttaggatccgcgctgtggctgtttcaccgctccccggctgggacttggagtcccttatctttccctggtttggtacatgaccctggaagcctcggctggccgttgcgtcatccatggcgccggcgcagagcgagaaggaggtgggaacgccgtgaagcaagagcggtcggcagagcggggaggcgaactgcagcagagttcttgctttccggcaggtgatggcgccccccgcggcctagaggtccagcgcccgccgcgagcagcggacagtcctcctgttgtgtccgaccgagagtcctggtgactttgaacatgctggtgccgctagccaagctgtcctgcctggcatatcagtgctttcatgccttaaaaattaagaaaaattatctacctctatgtgctataagatggtcttcaacttctactgtgcctcgaattactacccattatactatttatccccgggataaggacaagagatgggaaggagtgaacatggaaaggtttgcagaagaagcagatgttgtaatagttggtgcaggccctgcagggctctctgcagctgttcgtctaaaacagttggctgtggcacatgaaaaggacatccgtgtgtgtctagtggagaaagctgcccagataggagctcatactctctcaggggcttgccttgatccaggtgcttttaaagaactcttcccagactggaaagagaagggggctccacttaacactcctgtaacagaagacagatttggaattttaacagagaaatacagaattcctgtgccaattcttccagggcttccaatgaataatcatggcaattacattgtacgcttgggacatttagtgagctggatgggcgaacaagcagaagcccttggtgttgaagtataccctggttatgcagctgctgaggtcctttttcatgatgatggtagtgtaaaaggaattgccactaacgatgtagggatacaaaaggatggtgcaccaaaggcaacatttgagagaggactggaactacatgctaaagtcacaatttttgcagaaggttgccatggacatctagccaagcaactatataagaagtttgatttgagagcaaattgtgaacctcaaacctacgggattggactgaaggagttatgggttattgatgaaaagaactggaaacctgggagagtagatcacactgttggttggcccttggacagacatacctatggaggatctttcctctatcatttgaatgaaggtgaacccctagtagctcttggtcttgtggttggtctagactatcagaatccataccttgagtcccttttcgagacgtcccaccggtggaacaccctctagctttcggccacttggacgtggcccggttgctcccgagccagtccctgcaggggctccctttccatcccttcgcggcgccccggggccccgttgttccccccgtcc

SEQ ID NO: 685625 - DNA, 234 bp, Homo sapiens
tactttcacagggtgtcaaagaactggcaagtcctgcttcagttcctttgtgtacatacccagaagtagcattgctggctcacatggtaattctgtttaacttattttgaggaaccaccaaaccgtttttcacagtggttgcaccattttgcatacccaccaacggtgtacaagggttctaatttctccacatccctgacaacacttgttattttctgtttttttccttgatag

SEQ ID NO: 685626 - DNA, 392 bp, Homo sapiens
  misc_feature (1)..(1): n is a, c, g, or t
ngttgtttctggcccccgcgaatatgatgacagtcacatcgttaacgcagtggatccacttgcggcgttcatcgcgttggccacccgtgtcaaacttgtggaagttgccttgtgtccacttgaaacttggtctcaaagattccaagagtcagcacgcgacagcgaaccagttctgtgtctcgctcggcacatagtcagctggcttgatcacgtcgttctgtgtccagaaagttctgggcacagtcattcatgtggcactcgttgagagcgttcgtagcaggcgcgctctctttcatcctcccacagagccttgcgcatgctcatagaattcgagaggagagtcagagtcaggcgcgttcatcactctcagtgtgtagtcctctctgatgtgg

SEQ ID NO: 685627 - DNA, 469 bp, Homo sapiens
  misc_feature (251)..(251): n is a, c, g, or t
  misc_feature (385)..(385): n is a, c, g, or t
  misc_feature (426)..(426): n is a, c, g, or t
gggatttcaggtgcacaccaccatgcccgactaatttttgtatttttagtggaaacaggttttcaccacgttggccaggctggtcttgaactcctgacattgtgatccgcccgcctcggcctctcaaagtgctgggtttacaggcgtgagccaccgtgcccggtcttcatcatattattaactaaatgcatttgacaaaacttatatctttttggaagaaactgaaagatgtgggttgagtgatagattangtggatgatttatgtattatcctccagtgttaaccttttaatactttattatcttgggcttcaataacacttttataatagcactttaaaattttacattgggaagtggactagattggtcccttggaagtggntagaaaaagggctggggattccatccttggggttttcaacntgggaccccaaagggaccaaaatggcctttgggttaagggggg

SEQ ID NO: 685628 - DNA, 1210 bp, Homo sapiens
  misc_feature (617)..(617): n is a, c, g, or t
gaggcattgaggcagccagcgcaagggcttctgctgagggggtaggcggagctggaggaagccgcagatagaggtttctttctgcttgtgaagaggataggagattgtactgagcaacctagcttaaaatagagtatagtgaataggttactaagatattgcttagcgttgagtttttaacgtaagtattccagtagcttaagattttcagagaaatatatgaagacttaggaatgagtatgccgatgtagcgaaggtaataacgcatacaagacggtttctaacaagatgacggagggttgatgatgaaagtctttcttcatgggaggtaataagacatgtagttctaaagaagaaagattgagaggaaaggactaacagagtccccgatcttaataccaattcgaacggggcaactgctattctacgaattcatacaacgtgaaggttgacgtgtagaagacctacgctatacacagtttctcaggtcttaccaaagtatgtacggtcgcattaccccataaattccgaacggcagatgctcttgtctccaaggcatgattcaacacgcggaacagggtgcactttgaatatcacgacccgttggaagaggtccnattgaaccgcagcggagcaaatggtcgtcagtttagaatgctctaagattagatcgcacttttactttaagaacgccgtaccgaatgaatctggcacataggaagttaactttgcggacgtgggtacgcggatgaaaccaagttcctgggcagcatcgcaatcggaccggcttgggaactggcgcaaacaggagttggacatgggaccaggacacgttaccggcgacaggcgcgcaatggacacaagcaaaatcagcaagaaagcattgggggcacgacttgggacatgcactcatcaacctttacctttgcgcgacacgtaggcgagaggactccccttttgtcaaccgcctgaagaacgttcggaacgccagaaaggcactccacagcacctgggcctccggaatagcaccccacggttacaggggccaccaatgttacccgacacttcgagtaaagacgccatgttggtgacgcatatcaaacccacgtgtttacaaattgtcagcacctctttggccagactgtttccgcattacaacaccctggggacccggcccacgaaccagctttcttcccaacccttcacacgg

SEQ ID NO: 685629 - DNA, 220 bp, Homo sapiens
gaacagcatttcccccgcctccagcctttcccctttggcaggggcccccaggagatggaattccctgcccgccccggtccgggcccacctgtcctaggttgggcaggggggggggccccagcttgttttctgccttggttcccaaaagggggggccctgggggggggggtgaggggttttgtggaagtttgttaataaagctccgtgctttgccgcccca

SEQ ID NO: 685630 - DNA, 88 bp, Homo sapiens
ccgccgccaccgagccgccgctgtgctcactgatccgcctccagggtcaccgccatgtcgagccgcggtgggaagaagaagtccacca

SEQ ID NO: 685631 - DNA, 741 bp, Homo sapiens
taaaaaccgggagcttatttaatccatctaaaaatacaatgtcaggaatgggggggacccataggaaaatcctccacctctaacagagcgaagttactgggcttctggctggctccaagaatcccaaggcttgatgttgggaaggaattaatctggtgtcttcaataactcccagatactcagactataatgttacccccactatctgggcgagaagggttctggccctggctgaagctcagatggggacgctcaaggctattgggagaaaggagctatcaatctcagaaaaaatatgtatccaaatgaacaagctcgagtggcaacagtggtgggggcctatcccaggcaatgtggggctcctaggagtggcttctgggtggtaagccagaaaccctataacaatgtctggaggtctgggcctaaggaaagcccacccatgccagctctggtgagtttcagtcataacagtcttctctggggagtcatctataattataccatactattcaagccacaaaggcctctttgggggacgcaaacaggcctctaacagaagcgctctacatctataaaaaagcccctctgggtgggtctggggtatacaccataccaattatatatcttcgccttctttacccaaaaattcctgtggatatggtaaaagcccttctggaacgagtgtgttgatacattctggggggacaaagggatgttcaaagtacaaccctgggaagagtc

SEQ ID NO: 685632 - DNA, 1313 bp, Homo sapiens
gagatggacaggttatcaacgaaacttctctagttccaagactgacctttatctgaagtgtgctgcacacgtcatggtgcaagtcaatatagtataccagtcgaagacctaatcaaagaagagtccactatctgtaatagaaacagctgttcaacgttgcctatgctgcagatttttcaggagacgcatcgtactagatcaggacataggcaagtaagtctctacgtgcttaccataccgagcacgtcctacatagtattcacgaaacaaagttttacaagcactatatcatagttttacaggaaaaagtcgttgctgcgtagacataccttgtttaaacacggctagtgcattgacatacataattaaaaagctggctatgagtatatttatccagacaagctatccaaaccagactgggatctcatgcattacaactagaatctatgggaacacaacaataaataacaaaaaaacaataaacaaaataaataatagacaagggcggagagagaacgaacacacaagacaagcgacaaaactaccgcgcgagagggagcgtaccagcagagaaacaatgacgcgcagactcacacacccacgaccaatccctcaagagacaaaaacacacaagagtgaggaacaccaccgaaaaaaaaagcgagagagagccagagcatacaaaaagagacgacaccacaagaagaaccaaacgcgcagccgcccgaccacaacagctaagagaacacaaaaaacagtaacaagaaacaaacagcgccgagaaaacaacaaaacaaaggcacgccgacacaaaaacgacacgagaacgaaacagacaatcatccacatgagcggaaagaaagcaacgagaagcacacgaccaccacagacacaacaaacaacgagaagcgcacggagtagcgcaacacaacacacacacaaacccgcgcgagggacagacacacacaaaaccgcagtaagcagcgacagcacaagcacgagcatcaaccataataaaaagagccgccaacgcactcaagcgaaggcgacaaccacacaaatcaaacgaaagcaaaacacattccaacacaacaaggaaggcagctatatacaaagcaggaggacgtaaacaacacacaaacacagaagacagaacaacaaaaactacgacaccaaaaagcaagcagaaacaagaaaaaaaatacacgaaaaacgaagagcacaaaacaagagacggaaggaaccagaagaaagcagacggacagagcaaacaacatatcaaacaaaacacagaagaaataaaaaaagaaaac

SEQ ID NO: 685633 - DNA, 112 bp, Homo sapiens
tacttccagtagtagaggagcaagtagccacaaataaaataagtgaacatattaagtgaataaatgctggaagagggaaaataaacattttttccctttaaacctactctgg

SEQ ID NO: 685634 - DNA, 1144 bp, Homo sapiens
gtgtcaaatttaaccctttgacggactgtaattgcatttctgtgcctttcacgtgaaaaaaaaacaaaagaaagaaaaaaaaggctttaaaggcatatcatccagcactcaaaagcgcgggctcaaaccccattttttattctcacatacttaaaaaagtgagcctctacactattgccgcaacgtggtttgtgaggcaaaccttgcattgcacgccatgtggacacagaatcagacaagcctgctctagccactcacgaggattccggcacagccacaacctcatcacatgtgtcctaaaacacaaaaacaacaaccaacagataatacccccaactcggcccactttataccaaaaaaccactacgtgaaaatgatctggaacaattgtgcacattttagaggactaataaaccaaaaaagtcatctgacaaagtataatatatcaaacaaacattggcgataacagcaagtggcataatatctcctcatattacctcgtgtatcacaaatattcgaccatataaatataagcatttatttcaaacaaaagtagatacccacctcgaagaactacaaaaatctttgtaccttttatcataacaagcctattcctgaactttagactacaaacgcgaacaaacacaaaataggcgaacaaccactttcgacaatctactaaacccctccataaatatcatcaccaccaatatctagcaatctataaaaaagccaccaaggcaatattgataacaaattacggaacccaaatcaaaaaaacttacgttaacaccgttcctactttttgtataccacctcctggagcaccagaaaagaaaacaaccttaaacactttaataaatttgggacaatctaacatattaacatcccggggattcacatacagagtaaaaacacaaattatgtaacatacaaacttaagtcccttaacagagatctcaacccataaaggaatatctatcgactactctcacaactctccaactgcgttcacaataagtaattcttacacaatatacaaattaaacaccacaaaacaactaaataattatttgacttaatctaaattatacaatatgaaacatattaatccataccaatctacaaaactatctttattaat

SEQ ID NO: 685635 - DNA, 583 bp, Homo sapiens
  misc_feature (26)..(26): n is a, c, g, or t
  misc_feature (279)..(279): n is a, c, g, or t
  misc_feature (284)..(284): n is a, c, g, or t
  misc_feature (333)..(333): n is a, c, g, or t
  misc_feature (342)..(342): n is a, c, g, or t
  misc_feature (518)..(518): n is a, c, g, or t
  misc_feature (533)..(533): n is a, c, g, or t
  misc_feature (546)..(546): n is a, c, g, or t
aattccctattccctctatacaagancctttgctgaaacactttccacaaaggcagcagtgaattttcagaacattttacatttttccccctcagcaaaaaagataaatcacagtgtaaattatgttgttctgctgtcatctttggctggggttagacctagaagttggcgactagcaaaccatcatagagaaaaggtgccagtgcttctcaggcctttaagctacaaactcagcaaggaatgtttgcatttaatctctttaaggtaccaccgggggtngggtnggggtgggggttatgacagcattaacttccataaacttttatagaccanatgggaaanaatctaccaaattagctagtaatattacacagcaatacacactttttatactctacacaaaccaaaattcctgggtcttaatggcgagtagtaatttttgtttgagatctgtttagaggaatagagtgggacctaaagtcgagaaattccagtatttgcagtaggaagatgttggnctctggtgggcctantgtgatcgaggcntaggctggaaacctcttcactggctggcatgatggct

SEQ ID NO: 685636 - DNA, 884 bp, Homo sapiens
  misc_feature (4)..(4): n is a, c, g, or t
taangtagataagcgcacttaaataaccaagtattgaaaaacgtagaagaacagcacacgtgttgttttcttttggcctcatatagctccccttttgtcctgctttccccagccgagttaaaatggggttacagcaatacgcgtaattcggcacttccctgcgcgcgcctaatgtccgtgcacaagggacatgacccgttgaactctggccgtccctcgaattccccctgggttttatgtgtccaaaccgatcaaatttgtaaggcaacttccgcgtctaatttcaaggcgacattttccccacgaattcataaacccttaagccctcatttctctttccaagaattcggccaaatcctctcgcgttaaatatgctctggagaccccctgaaccatccaacctgccaataattaaaaggatttcttgcagatccccccttcttctctaggacaggtttctccaattctgtaccacactataaagtggtagagaaccaaaaactatagcgcaccacaataggacggacatccaccattctcgatactaatatgcaggctctattacccttggccaacagagggtggccaactaatatctgggcgcccagagaggttaataccaaaaatctgccgtccgcgtctccaaattctcagcgatggacccgcgtcatcattgaaattgatggcactcaacatacgttgtcctgccccgttatataatacgggtagaagttttttccaaaccagcgggcagctttatggggacattatcggagaacgtctgaacactttatcaagtaaccatggtgggatttttcatcgagccatccccctctgtcattctagccccccaagaaaatacaattcctctttcaatcaaaaca

SEQ ID NO: 685637 - DNA, 368 bp, Homo sapiens
  misc_feature (4)..(4): n is a, c, g, or t
  misc_feature (15)..(16): n is a, c, g, or t
  misc_feature (37)..(37): n is a, c, g, or t
  misc_feature (108)..(108): n is a, c, g, or t
  misc_feature (312)..(312): n is a, c, g, or t
  misc_feature (318)..(318): n is a, c, g, or t
  misc_feature (338)..(338): n is a, c, g, or t
gggntgcatggaatnnggcacgagcttggaagtccangtgatcctaaaataactgcttagccagagtctggggtgtccttttggaatagagatggaaacatgcttctnacccaagggtgctacagtctttcccccaagggaggccaggccggcccctccccggcccgaatgcccctggatgctggctctgggacagcaccttcagggcggtgacttgatcctgttctgggtgtgtttcctctgcaggctgtgtgtctctacaggtctgcctcgggccacacctgcagcccctctgtgggctctcttagtgtncatggntccaattgacccacaggggnagggggtccagccatgcccaagagacaaga

SEQ ID NO: 685638 - DNA, 930 bp, Homo sapiens
tctctcccagtcctagctgctggcatcactatactactaacagaccgcaaactcaacaccaccattcttcgatacccgccggaggaggagaccccatgtctataccaaatatctattctgattgtggcggtacagcctgaagttaatatcttatcctaccaggcttcggaataatctcccatagtgtaactttactactccggaataaaatagaaccagttggatacataggtatggtctgagctatgatatcaatggattcctagggttaatcgtgtgatcgacaccagtatatttactagtagggaatagacgtagacacacgagcatattctcacctccgctgaccataatcatcggtatccccacggagtcaagagtatttatagctgacctcgccacacgtaccaccggatagcaactatggagatgatctgctgcaggcgcttcctgagccctaggattcatcgttcttttaccagccgtaggtgggctgactggcatgtattagacagaactcatcaatagacatcgtacatacacgaaaacgtgacaaggttgtagctcacattccacctatgtccctatcaataggagctgtatttgcacatcataggaggcttcattcactgatatccccctattctcaggctacagcgtagaccaaactaggccacaatcaattgacatatcatattcactcgggtaatctagatgtattccagagccattatggacaatcggatgccgacgtaatcgtctacccggtgataccactgaactactatgtttgaggtcatcattccaacgcgaatacaaactgcagattgaagctggaagaagcatagtaaaacacaacggggttgggccccacatgaacgaaaatcaacgggacccatggtgccggccctacaaaaaaatggccgcacg

SEQ ID NO: 685639 - DNA, 198 bp, Homo sapiens
attgtatttgtagtagagatgacatgatatattttttaaaaaccaataagaaactggagctggaaagtacatgactgaaatagtggagttcattagaagagttcaacacccactacctaataaaatcccaaacatataactgaactcctcacaccctattggaccaattctatcaccctatagaagaatgttttcatg

SEQ ID NO: 685640 - DNA, 370 bp, Homo sapiens
  misc_feature (321)..(321): n is a, c, g, or t
aagaaagttactatggtatcagctaacattattaagctcgtgatagcattaaagagagtgttttaaatgttttgtaaagactgttctgggctgagcacagtctgcacgcctgtagtcccaacactttgggaggctgaggcgggtggatcacttgaggccaggagttcaggaccagctggcggacatggtgaactccgtctttactaaggatgcaagaattagccgggcatggtggtgcatgcctgtggtcccagctactcaggaggctgaagcaggagaatcacttgaatctgggaagcggaggttgtggtgggccaggangctgccactgcactccagcctgagcgacagagccagactctgtctcaga

SEQ ID NO: 685641 - DNA, 121 bp, Homo sapiens
tcgaatcgacggtttctcctgctgatccagagaagctttttatccagaagttacgtccgtgtttgcgtcctctttgactttgtttctgatccactaatgtgactaaatgtggcagggaggt

SEQ ID NO: 685642 - DNA, 136 bp, Homo sapiens
gcgaaagaaggtggatatgtctcacccaaataactccgtatcatctccgtatcaattggtctaggcttatgatgaccaggtcgtgggcttgtggcttgtgtccaccacttctttccgtagtcgatgcgtactgctg

SEQ ID NO: 685643 - DNA, 80 bp, Homo sapiens
  misc_feature (74)..(74): n is a, c, g, or t
aagggcctgagggttctctgtcactgttactggcagaagaaacacagcaggtgtttctgtgctcttggttttangtttcc

SEQ ID NO: 685644 - DNA, 810 bp, Homo sapiens
tccatttttaaccaagccacttaaatttggtaacttaaaatgtgcaatataaagtcaaaaaatccttgaaaattctcacctggctcttgtacaaagtgaggctaatgttctacactccttacagttcttacatctatcaggagggatacctaatttcttacattctgtgtcccatctggggaagggatcaggatacggaaatgtagacccagcactcttctttctagagtcatgccaaaagcgccagaaaatccaaaaccattataagtctccgttgtaaaaaaactctcggcttcttggaaaccacctgtggaaactcgtggtctcagctgtgggggaacacgtgctctaattacgcggggtctcaatgtgtgtgcaacaccaccaaccggctattgaacgggactctccaccaatcctccgagcgagtctccgtgtgcgcacagcccgcttttcgtaaaaagagggggggcctctcacaagcgcgcaagcgcgaaagaggagcgccacagtcgcgaagtctacaagagggcggaaactaattaccctcgaactctcccgcgtttcgacgtccccgcgtagtgtttccccccaaggatcgcggctcttaccgccctcctctgagtctctaatctatctcttacaccctcccccctgagtgatctatacatgcaaaatatttccaggaaacacaggaataataaaaccccccgcgataatataccagtcttaaagcaaaaccacaaatctttcctatacaacaacctcttacctctataataaagagaaaaaaaatttttactctaaaac

SEQ ID NO: 685645 - DNA, 476 bp, Homo sapiens
  misc_feature (311)..(311): n is a, c, g, or t
  misc_feature (476)..(476): n is a, c, g, or t
gtacgaatacagaccgtgaaagcgggacctcccaaccggggcctctagctacccactctggtattctcgggctgacggagatttgaattctccctgagatggagtgccctgggggaggcgtgggccgccatatttgatgttttggcaacttagccattccagcctttgggctttgaggagtcccagctgacttggggcggatatggccccccagcacagcacagctgctgtacggcatggccagactgcttctttgggtgggtcccggattcattcctcctcgctgtttgggacttcccaactggggcctncaaccggccccactggtgttctcctgctgacggtgatttcaattttttctgggctggagctccctgatggaggggcaggccaccatctttgctgcttttgcaacttagccacttcaaccttcagtctttggagtgtccggagaccagggggtgatgtggaccctn

SEQ ID NO: 685646 - DNA, 994 bp, Homo sapiens
gccgcctgagactcgaagcggttagtcttgttctaatatgttcttgcgagcggaagcctgatgcttgattcactcagcctcggccttctcgcaccaatagtacacgggcttccgtgtggcctctgttccaaggcgccctcggtacgtgcgcccgggcgcgtcgagcgagcgctcgccgaggcgctctactgcacggcgctgggcggctctgggttcctcggtattacttcgtgtccctgcatccaaccgaggtttcaagcgtgctgcgagcgattggcggtccagaggtgagccatgggcgacctggaagagtagccggcgggcgtctcggccagggatattgaggcatgggcatcctcataacagcgcatcaatggcagtatcactcgtggtaccgccttgtggcattcagcataccgtcctggagctcctgctgataacgcattgttgagcgctgatgtgcggacggagaacctcctaggcgcagaaactaggataaacctttgcaacgcgaattgcgatcaatgcgcaagagaatgccggggagaagcatcgtttgagagacaaccattggatgggacccccctgggggtcaaagcacgaactgaggggtgcgacctgaaaatttcgtaacgaattcattcggaattggatcccttaaagagcgctctaagaagttcgtatcggacctatggttacctagttcgggggccaaggtagctgcgcaaatgtggatgctgtgtgcacgattttcgaatcaacggtgcgccccgatcctttgtttttggcttgaattggaacctttatagtgaggtcccatggtacttgaggaacacggacggctgggccaaatggagatgcaaggtcctggtgggaggaaacggacattccccttggggcctcccgtcacaggcgcactttgagtgaacggtccaaatagttcatcaacggagatagtcatggctttggcacaccacgacaaaccgaaggggtt

SEQ ID NO: 685647 - DNA, 388 bp, Homo sapiens
  misc_feature (54)..(55): n is a, c, g, or t
  misc_feature (72)..(72): n is a, c, g, or t
  misc_feature (74)..(74): n is a, c, g, or t
  misc_feature (85)..(85): n is a, c, g, or t
  misc_feature (92)..(92): n is a, c, g, or t
cccagacgctgcccatggaggcgtccagcgagccgccgctggatgctaagtccnntgtcaccaaccagcttntngattttcagtngaaactnggtattgcttttagctcagacactttcagatctcttaagatatccttacgttgcagttattctaaaagtgtgccgattattcaggccaagtaaagaccacctgctttttaaatttacgggttcacagatttcagaatttctacagacagattcaaggggatttctgcagttatttaaacggggtgaagacggggtcttttgttgataaaattctataattctaaagacatggccctcactttgggcaacaaaactaaataaggaggggggatctatttaatgaaaaatgcactcat

SEQ ID NO: 685648 - DNA, 213 bp, Homo sapiens
cgtgatctgatagttatgaatcagtaccatcagcttgcaaggatacatggattcctccctgtcaaatacacaataagcccatgctcgcgagtgcagctgaaatcgatcaagaaccagctctgtacaggtcgtacaacagtcgtcgtgagtagaacgcgcgtgacgctatgtccaaactgggtcttcggcaggttacaggagttactagagtca

SEQ ID NO: 685649 - DNA, 537 bp, Homo sapiens
atgaaagtcatagccagagcaggtagataagagaaagaaataaagggcatccaaactagaatggagaagtcagaattgttctctatgcagtatgacatgatgttatatatataaaaagcaaagagctaaagactctagccaaaaaactcatagaactgagtaaatttagaaaagttagaagatagcataaattagtatacaaaaagtcagtaggcatttctatgcatgaacagtgaactagtctgaataaagaaatcaaggtaaccccatttataatagctgtgaaaaaaatctaggaataaattaaccaagaaggtagaatatttctagtacaaggaagaactacaaatacactgatgaaagaaattgacaggagatacaaacaaattgagcgacactccgtactcatgggttagaggaattaatatacttgttaagatgaccatgctacccaaagtgatctccagattcaattacaatttctatcaaaataagtgacattcttcacagaaattgccatcaaagaaaaaaagagag

SEQ ID NO: 685650 - DNA, 277 bp, Homo sapiens
ccacttattaggcaatcttgtgaatttcactcttactgtaggatctgatatattatacaataatgaagctacaaagttaaatgcagagcattcatagtaaactataaatacatttgtattagaaagaagctagggtaatacaaaaataggagagactctgaggagcaggcaatctgtaagaggctcagaatatcttatatgctaagtagtctgctgtcattcctttcaaagagcacacagcacatcaggcatagtcatcatctgtcttgttaacctc

SEQ ID NO: 685651 - DNA, 181 bp, Homo sapiens
ggggtgttcaggagtcctctctgtgctgtccactctgtgtagcagctcttctgttcttaggattcttaatgtcttccttagtaagacttcttgttcaaccccacctaagtagatctcccctaatttttgttttcgttaccgcaattccctttatttccctcacagtacaacctgccggtgg

SEQ ID NO: 685652 - DNA, 121 bp, Homo sapiens
cccggacgtacgcctgatcactaaacacccctcctccccaaaagtctcatcttgagactcaatgactattttatacaaaatattcctcaattatattataagaaagaccacttcagtatct

SEQ ID NO: 685653 - DNA, 81 bp, Homo sapiens
gagagagatgaagggtcttactactgtgcctgtgacccttccttcctacggaggcggggagagtacaccgataaactcact

SEQ ID NO: 685654 - DNA, 233 bp, Homo sapiens
agggggggcccccccccccctggggtgcccctgggggtttgggtgggtttggggtgggccccccattttcccccaaggcccggggggtcccagggggagtttttccaaatttttcaaaggtcccccttccccggggggggtttttttttggttttttttggtttttttttgggcgagaaaattgggtttttaaaggtgtttttttattgccattaaaccagcccggatggtca

SEQ ID NO: 685655 - DNA, 338 bp, Homo sapiens
ctcgaattcgacggtttctcatttgaaaaaatgaatggggccgggtgcagtggctcatgcccataatcccagcactttgggaggctgaagcgggcagatcatttgaggccaggagttcaagaccaacctgggcaacatggcaaaactccgtctctatgaaaaacaaaaacaaaaaccccaaaattggccaggcatggtggcatgcatctgtagttccagctattcaggaggctgaggtgggggtattgattgagcctgggagatcaaggctgcagtgagccataattgttccactgcactccatccggggcaacagggcaatgactctgtctcagaat

SEQ ID NO: 685656 - DNA, 248 bp, Homo sapiens
tgcgggttcttcgcacgcaccaggggctgctggataggggcctctcgtctatgctcacgcctgtaatcctagcactttgggaggccgaggcaggcggatcatctgaggtcaggagttctagaccagcctggccaacatggtgaaaccccgtctctactaaaaatacaaaaacttagctgggtgtggtgggcgcctgtagtcccagctactcaggaggccgaggcaggagaatggcatgaacccgggag

SEQ ID NO: 685657 - DNA, 518 bp, Homo sapiens
  misc_feature (215)..(215): n is a, c, g, or t
  misc_feature (475)..(475): n is a, c, g, or t
gaccgagtctcctcagagtctcctgacggccaggcccggcggcttcgggaggagggcgagttgctggggagagtttaccttagaaggcgacaccgaacagacaggcctttcaaagccacccagggctctgccccgaggcccggggctgcgtggaggggctggagaggcgcgaggctgcgagccccccggcgccacaggttccccggcgcgcggcnccgcccgactgccacaggtgggcggcgctccgcctctgggctcccgcgggagggggcgcgcggctctctagggactcgggggagggggccagggctaaggggtacgggggcggctctgccttaaggagggcagcgtgagacggaagctccgggttttccctgcctagttctcgttccctcggccgggtggctcgggctattcctcgcggcaggaggagcggtggagaggagccgtgggcacctcccaccggccgcccctngagcctcggcctcctccccaggcgcggttaagccgcgcggccg

SEQ ID NO: 685658 - DNA, 118 bp, Homo sapiens
tgtggtaggatcgtggtgtcactgggactgtggctgtcgatgggacctacggatggtcggtgggaccctggttattgatgtggccctggctgccgtaggtcctaccgacaaccacctg

SEQ ID NO: 685659 - DNA, 1265 bp, Homo sapiens
  misc_feature (322)..(322): n is a, c, g, or t
  misc_feature (339)..(339): n is a, c, g, or t
  misc_feature (457)..(457): n is a, c, g, or t
  misc_feature (518)..(518): n is a, c, g, or t
  misc_feature (531)..(531): n is a, c, g, or t
  misc_feature (543)..(543): n is a, c, g, or t
  misc_feature (554)..(555): n is a, c, g, or t
  misc_feature (573)..(573): n is a, c, g, or t
ccacagggacgccttccctcccctcccctccagcccacccctgccagaccctcctccttgcccgtttccccttctccctcctgctccaggcccagcgtgtggtttgccttctggtagcctagtcccctggactgagtcccccagggccttccttcacccgactatccaaactctatccttgataggctatcagtttccttactcgagaaatgagaaagctggaatcctggtccccagcaggagagcctagtccgtcccccagcccctccagccaccagggtgtcctctaggatgcagctgccagatccactcactctgctgnctccagcaggacccaangccactttcaactcttatggggttctccacctgccccagagcttcccaagggagggtaagggggcaccctgagcccacagtgacccctacttcacagctcacaggggcaggaggcagntcccctgcctccaggaccctgttgctatggtgacacagcgtttctaggacagaggggcctnccagtctcccccnaccacccgtgcncgacttccttnncacccccaggttccctgncgagatcgtcgtgtgtgtcctgaagtgtcctcgtatttggttctttggacgtcgctaagtcgtcttggttgtaccatgtgacacaccctgttgctctggtcgcgtgctccttcggtggctatccacccgttgtacaagtgatgcatccatgccatctgcactcccgagcgcacctcaccgcaagcacgagctcttggctggacttggacggagatgggagcgctagaacgcaccatcagccatacatgcatgtctgtggaccctcagacgattcatggtttcatcatcccgagttcaatcgtacccttcgcttctgcgacgctgttgtcaggtatttgcgtagccttttcccttgaactcactgtacgttcacccactccgttagggcccacaggcacctggggccccaatgaggcacgagtcactttccgcaagcccatggggttaacgccattccaggaccagagcctcctgttacccccgttcaccctagggttcaaacgctttcgccacttcctcaatcccatattgcccgtggggatccatcgtaagtacacgcgcgtctaactgttcacttggcaacacggactcgcagattgggttcgcgtacgagggaagcatgtggctttggaaggtaatcaacaaagggcttcccctgagggtcaataggcgcagccctggggatgccaccc

SEQ ID NO: 685660 - DNA, 293 bp, Homo sapiens
  misc_feature (2)..(2): n is a, c, g, or t
  misc_feature (210)..(210): n is a, c, g, or t
  misc_feature (212)..(212): n is a, c, g, or t
  misc_feature (215)..(216): n is a, c, g, or t
  misc_feature (221)..(221): n is a, c, g, or t
  misc_feature (257)..(257): n is a, c, g, or t
  misc_feature (265)..(265): n is a, c, g, or t
  misc_feature (276)..(276): n is a, c, g, or t
tngcccccgttcctactgctacctacgatacacggtactgcgcctacctcaacaagaacggccaaggaagccaagggaagccccaaggaatgctccgaactggcaaacccgtgctgctgggaaccaacggcgcgcgtgggcgtcgtctgccacccccaggcctcaggaacgccaggcaggctgcccgctgtccggtataaaggtggtttncncgnnggttnttttagggcccaaggggggggggcactgggggtgtncccggggncttccacccanacacaggaggggtaagt

SEQ ID NO: 685661 - DNA, 877 bp, Homo sapiens
  misc_feature (322)..(322): n is a, c, g, or t
  misc_feature (339)..(339): n is a, c, g, or t
  misc_feature (457)..(457): n is a, c, g, or t
  misc_feature (518)..(518): n is a, c, g, or t
  misc_feature (531)..(531): n is a, c, g, or t
  misc_feature (543)..(543): n is a, c, g, or t
  misc_feature (554)..(555): n is a, c, g, or t
  misc_feature (573)..(573): n is a, c, g, or t
ccacagggacgccttccctcccctcccctccagcccacccctgccagaccctcctccttgcccgtttccccttctccctcctgctccaggcccagcgtgtggtttgccttctggtagcctagtcccctggactgagtcccccagggccttccttcacccgactatccaaactctatccttgataggctatcagtttccttactcgagaaatgagaaagctggaatcctggtccccagcaggagagcctagtccgtcccccagcccctccagccaccagggtgtcctctaggatgcagctgccagatccactcactctgctgnctccagcaggacccaangccactttcaactcttatggggttctccacctgccccagagcttcccaagggagggtaagggggcaccctgagcccacagtgacccctacttcacagctcacaggggcaggaggcagntcccctgcctccaggaccctgttgctatggtgacacagcgtttctaggacagaggggcctnccagtctcccccnaccacccgtgcncgacttccttnncacccccaggttccctgncgatgttgtgggggcccagagagaaagttggttctttgaacgccaaggctttgctggacccagggacacaacctgggcgcctggccgttgcttcgggggtttcacccttggtaagggtgcttctggcttttgcttccaagcccttaaccaggataagttttgctgggacttggaaagaagggaagggaacccccccccccaatccatgctggctgggggcccctaattgggttaatttccccattccccctcctaaggcccaaaccggggccccccaactctccaggagggtttcctccgggct

SEQ ID NO: 685662 - DNA, 425 bp, Homo sapiens
atctctttggatccatgtctcatatccaaggccttgacgcagggggtgggctcccaaggccttgtggcgctcttcccctgtgatctacagggtaaagcacccacagctgctttcatgtggctgggagtttgagtgcttgtgagcttttccatggtgcatggtgggaagctgtcatgtgtatctacgcattctgggggtctagacggacatgttggcccatcttcccacatgtttccactacggcagtgtcccagtatgggactcttgtgttgggggctccaaattcgcacattttcacttgtgtgctggcctatagtaagacggttctccaatgaggggctctgcccctttgcaagcagaccttcttgccttggactatcccagtgcatttccattacattgctcttgaaactctacgtgtgggg

SEQ ID NO: 685663 - DNA, 1760 bp, Homo sapiens
atgagccctgagcatgcccacctgtcgtcgccggcctagttaccatcacaccccgggaggagccgcgagctgccgcagccggcccagtcaccagtcaccgcaaccatgagcagcgaggtcgagacccagcaggcgaccggcgccaccttggtacgcgaaggctgtcgagtagccgtcgactgcgctgagccgcgtcggagctaagtgtacacagacgcgcatgcggagccgtgtatgagcccgggagagtgtggccttccacattgcgggacgagagtgatctggcacgtccacgtgttgaccacgacagaggggctgcattgcgggcaacgcgaaggggcataaagtggaggaccacagacgatagacaaactggcggtcatccaagtgcgtagccgcgcaaacgtgcctattcattagcgtttaaacagttccacagccacaccttacctttagaaaacacctctatgcgacgcagacccgatgcgtcagaacgagggaatcacccaacaacttttgcccaatcaacccgtctatgcaaacaagtctagacgctccctctcatggtggagacaagcttgacccccatttgccagacgcaaagttttgcttaatgcgcgaacagccagttgtggctcaacatgtacatccgtcgtcatgaatgcgaccttgcaggacagtggcagacggacaccgagaagagctgtccgcaaataccacacggggactatccggaagcacaaaggcacacgtccccccacaacgctttattctcacacacgagtagttcccctatgggaacacgcgacaagatctaccagagctatataccataaagcgccaaagagtagaagccacattcttgccactgcgagcataagcgcacagggatacccacacccaatttatacatcagcaaacaccgcatataaaattggcacaaccgtgacatctgagtaagggggggacgccccctactccacagaaaggactagtagagtttatccccacgagtgagctaacacgaacagtttggtatcccagacactaccttgttacgcttgtcgacgacaaacggtccggcgagaagagaaaccgcaacgatcaatcgcagacggcgccgcaaccaccaacagagcaacaagaagggatgcactgcgccacggacgaacctgttcacacagcagctagccctcccaacacaggcagcacccgatcgacagagagtcaaccagccatatcccgtgagatcgcgagtagccagcataagagagttatagcacaattaaaagactaataagtaagctgttataagtattatgggtcagaagaggagataaagacgaatatatatgtgagagatcaagttatatatgagcacaacaacacagacattagttaagtcgcgtatacatgacgtatcaaatatgagtacatatcgtaggagaaaatgcataagtagaaatataggtgatcgaagattactatcagcaataagtaatacacgaagtagtgatgataacacgagcctaatatatcaagtgtgtagagtcatgctagtgaggtagcagtggaggcgagagatatattatacgtataatgagtgtgaagaatataaagacaaacagatatatataaagataatgtgaggcgagcgccctatagtcacacaagacgaggaacgtagtattagctagacaggagagcgggattcgtagtaagaatataataagaaaagatatctaaataacgacggagag

SEQ ID NO: 685664 - DNA, 139 bp, Homo sapiens
tactcagctcggtcctcccagtcttccttgatttagtccttaatcttttatgttctgagcaggaagggtaaagacaggaacctgcttcactgtattaactagtccacggttggctgtgttccagtggcatcgataaaca

SEQ ID NO: 685665 - DNA, 461 bp, Homo sapiens
gattgataatactcaactagtctctgctgtggacaagagtacggaaaaagagaacaagattactatacagtaatgacaagggccgattgagcaaggacgacattgaacgtctggtccaggaagctgagaagtacaaagctgaagatgagcacagcagagggacaaggtgtcatccaagaattcacttgagtcctcatccttcaacatgaaagcaactgtagaagcatgagaaacttcacaggcaagccattcacgcatgaggcacaaacagaagatactggacaagtgtaatgaaattatcaactggcttgataagaatcagactgctgagaaggaagaattagaacatcaacagaaagagctggagaaagtatgcaaccccatcatcaccaagctgtaccagagtgcaggaggcatgccaggaggaatgcccggggataggaggtagggtaccgagctcg

SEQ ID NO: 685666 - DNA, 242 bp, Homo sapiens
  misc_feature (161)..(161): n is a, c, g, or t
  misc_feature (185)..(185): n is a, c, g, or t
  misc_feature (237)..(237): n is a, c, g, or t
ggcttatgttattttaatgtaaatttctggtaaacaatttagaaactacctcttctttcttcctttaaaactcacttctaactgctgctaatcagagtatgttatgagggcaacttgaatctgtgcttcccagtggccattcgcaagttttgggctcaaanatactctatatttaattataaaanaattactattatgagtgaaagctgctataaatactcatgtacaggtctttgngtagg

SEQ ID NO: 685667 - DNA, 94 bp, Homo sapiens
agattagtaatatgattcatagttatataaaagaaatcgaagatctcagggcaaccatgttcttgccaaacaggttagggaattgggggtttgt

SEQ ID NO: 685668 - DNA, 256 bp, Homo sapiens
  misc_feature (186)..(186): n is a, c, g, or t
ggctggccttggtcttatttgctctcaattccctactgccgttcttactttgaacctggaggcagtctgcagccccatcccatctcctgccctctcctgatctgactccctgctgcatcgtcttgctctcattcgcttagacgtcctcccgcttttgaccccagttccttcatccatccgtgcacncccagtccccgcagccctaaatcctcctcttttgctgtcattagtgcatcctgtgtcttctcgagcccca

SEQ ID NO: 685669 - DNA, 359 bp, Homo sapiens
gccacatgttacttgctagccagacgtggaattggatgattatagactatgtacacctttggactcacttactgagttcagatgaaagaatgaggtggcgagtaactcatatctgtcatttgctgctgagcatcactgagaaggcctcagttgctaagccacctctggtctggctaagccatgaactggcttcctgccatgagcagacattacggtcaggggatatgcatatggctcagtcttttccccttgagggtctcttatagatgctactggtgacaaaggatcgtcgtatagtacaggcaccaagggatgctgtacatgacggaatgcggcttgaggccaactgtgaggcccgg

SEQ ID NO: 685670 - DNA, 347 bp, Homo sapiens
  misc_feature (163)..(163): n is a, c, g, or t
  misc_feature (254)..(254): n is a, c, g, or t
  misc_feature (295)..(296): n is a, c, g, or t
gaggtcgtctagaggatcccgatatgcgtctcaactatacttttgaagcttgcctatgttctatctattaaagcccatatagtttctaaggtcaaaatttccagttttaatattccattggaagggctgtctcacttctcccaaatatacttgttaaaaaccnaaggggccaggcacagtggcttacacctgtaatcccagcacgtcaggaggccaaggcaggcagatcacctgaggtcaggagttcaagatcnggctgccaacgtagtgaaaccacatctctactaaatatacnnaaattagccggtgtggtggcacgagcctataatccaatctactcaggaggc

SEQ ID NO: 685671 - DNA, 112 bp, Homo sapiens
tcggtccatgagacaggctgagagtagcctcgctaggtgttcaccatggcgacccaccagcacattgagggggaagagaagaaaggtggctgcatagagcactcgccggttg

SEQ ID NO: 685672 - DNA, 111 bp, Homo sapiens
gggagtcatactttacctaagctaacattaaaaatgaacttaccatttttaatgggtacagtttcagttctgcaagatgaaaaaagttctagagatgatggtggtgatggg

SEQ ID NO: 685673 - DNA, 1555 bp, Homo sapiens
tagttctagatcgcgagcggcgcccttttttttttttgggggttggtattaatttccttcttggacctgtgatggctctcttttccactttcttttacacaccttttctggctctttccttcataaagccacgtggataaggttgtgttctgctctcaagtgtcgtgtacttctcttatcttgtgatacgtgctccttttcacagcgaggatctttccacttctcagtgtgcaataggctattcctcctgtttctccaagtggcactattctcgtgggttccccgagtttctcagtgcagaagaggctcccacgttaagaggcctcgtgaaccacttctcgtggggggcaccaccacgtgcgagtggacactcgaagaagccgtgaattctatggacaacatagtggtccacccaaccaatcccgtggcttctttccaagggaaatatatttctctcaaacagagaaactctcctctcaaatcctttcgcagtgggaacctctcttcaattttctccaaagtggggcgaggggtgtgggaacacgtgcgaacttgtggtggcccagtgaattcccccaagagtgtgttcccgtgtcgtccgtggtccccctcgttgaaaaactcgcggtttccccagagttttctgcaaagaacacggcgtgggtgggaagcctccccagaggttccccagcggcgaagaaatatcgccgaccaaaaaagggcctttcggcggggcccggggttggactcccccgactgtaaaaacaaatcaacaaaacacgagaggggcggggggcacgggcacacatagagagagtacatcccgcggagaggggggcccccaagagactattagcgggctgataccccagagggcttttctcctcgtggtcctcccacgtgggtcgcggccccctaataagggggaacggccgcgagcatctataaaaaagcgggcgagagcgcaccggtggcacggcgccagggtttacaccaacccaccgcggcgcggcgtacatgctggggcacacaccagccggtgcacaacccctggggggcatcctcctgctggacaaggagaaccgacatacacctgccgcggcgggcggcggcacccaccaacttgttggcaccacagagtaaccccctacgagagaagatttacaaggggcccacaagggcgacacagtcaacaaacaattcatcaagcgtggtaataccaccgggtggtcacaccaaccaagcgcggcacatatgccctgccgcgcctcgaacaaaccttcgcgctcaccccggacgaatatcatatgaaaaattaactggcagggcagcatgcgacaccacttcagacacaccccaactagcagcgcaccgcgacaacgtacgaagaccctagcagcgcgtagcacagacgtcccgaagtagaccatacagcatgcaggacaatcactaaccatcaaatccaactcgacactaagccgcagcgaacagaccacgccctcacacatcatcatgaccatcacgtcgaccgtcaaagacaccaacgacgcagaac

SEQ ID NO: 685674 - DNA, 728 bp, Homo sapiens
agcggagtacgcggggataccgcgcgtgggagcagcacttacggcggcgttgcggccaggaagcctcgccagtatatctcagtgagggagagcacctgagcacgactggttatttttccaatcagtaaaaatattcccgctgactagggactaaagaaagccctgcggatagagccggagctccccaccgcagctgccccgagggagcccagacgcttctcaggggacgcttgctcccctcatcacatctggttgggggagggtgaggatgcgttagggagtaggcattggcctgtgtgggccagctaacaaaaggagggtttaggcattgaagaaagtgacaagtgaaggctccctcaccggaaccaccgacatccccattgccccggttcctaatcctgtagagctgctgtgataggcgtttacttttctcttcaacgtggaactggcctaagttactcctcaagagatgcttttcttttggtagattcttgaagtcctcaaggaaagaggatgttacacggaacttgacactagcctggggactgttacagggccagcccacggcttgtcaaatcacacctggtaccgtcaaacccagctgcaatctaagactcagtgtgcctggcagcgagtgcatttcagactttgcatttccactttaagactcaaataggccgaccagggcagatgatctgcagcgcttctcttaagtgcttcaataaaca

SEQ ID NO: 685675 - DNA, 1161 bp, Homo sapiens
ctctgtgtaaatggagtgctgtacgagatttaccgaggcaatgggtaataaccagttaaggctgatatgaagtagcaagataactcgcaataacggcactttcgtttggttagtcagcgattctttgaagctgctcttacagtgtagtgacctttatagaagcaatgcattactgtgtcggagatcagaaacttgctataccagccacaccgaagcttaagaacacggaagacaaaaaacagactcttcggctggaatttggtttccctagactgataacgatggtactgttcgtaaggagattgagtcaatgtgtgtggagaatttgattcaatgactggtgatctaaagtgtgtacagcataaggtcattggcatcttacagggaagggaagtgtggagatatcaccttataacgagcacaggagtggaaacttgaatacagttttacatggtgcggagagaattatgggggttcaatattgaagagttaaagggtggttcctatacagggggacaaaaaaccaagtaaaccaccattttaacaacagaactgataatgccagtattagccgcttgattgtgcgatttggcatttatttttgaccgtgttcttttcggaagggaagaacacagtactatgaagatctgaatacgttcgtaagcatctcacactgattgtacagggcctaaattaacttgaggaataatgcgtaagttccggaagcttttaacgcaaaatacggagcaacttggttgaaggcggggcccgttcttctatttgcaaggtatgcataataggggggtaccgagattgtccttgggttacccagggggggctcgatcttaggaaaacatatttcaagcaaattatcccaggttcagggaaatcacagcgcacggagagaataaaggacaaggaacaaaccatggagactgtaattttcccgaaacaataattggtgtacccaaagggggatttcacacgcgtaaagaaacacaaggatttaccatcgtataaaccaccagagaaataacgcacgaacatcatcgtggaaaaagaaatgataaaaaaaaaagaaataagaaaaaagaagagggagtaaaaaaagaagaaattagggaaaaaagaaatatgaagaaaaaattataaaaaatagag

SEQ ID NO: 685676 - DNA, 330 bp, Homo sapiens
tgagacggagtttccctcttgttgcccgggttggagtgcaatggcgcaatctcggcgcactgcaacctccgcctccggggttcaagggattctcccgcctcagtctccctaagtaggggggggtggattaaagggagatgggtaggcccccggggcatttttttttttttttaataagaaaggggtttcaccatttttgctaaagggtgccctgaaactcctgacctcaggtgattgcctgcctgggtctcccaaagtgctgggattacaggcgtgacccccacgccaggcctaataactccacttttaaagttttatgttgtttagatt

SEQ ID NO: 685677 - DNA, 100 bp, Homo sapiens
gaaatgttgatgacgtcgcggccccagtgggatttcccatgcgggagaggtggttttgacatgaatgctcctggtcggggtgggcgtcccatgcctccca

SEQ ID NO: 685678 - DNA, 306 bp, Homo sapiens
cccatcttcaagcctgcctgctaaagcttctttgccttcctgattgtgattatggtaacaatttatatcagacagttgtacttttgataacttagggaaacagaatgacttgacagggattgctgcctcactgcatttcagagatacaattttgtaaggacacacatagcagttgtgatattaaggtgtgattatcttcctgtcatgtgcttattgaagagatagtcacacatgatatatgaggatttgttattatagactatgtgaatcacactggactgttagactgtctgtgctgttatatat

SEQ ID NO: 685679 - DNA, 208 bp, Homo sapiens
gttatatccatactagttatatcggaaaccatcagcctactcattcaaccaatagcccgggccggtacgcctaaccggctaacattactggcaggccacctaactcaggcacctgaatggggaaggcgccaccctaagcaatatacaaccatataaccttcccttctacactttatcattcttcacaatttctaatttctactggact

SEQ ID NO: 685680 - DNA, 121 bp, Homo sapiens
ggtcccatttcaatgagacacttaaacagaagcttggcatttatgatgccatgaatattggcttagtccgacctggtactgctctggatgttgctggaagcccaagcagctactggcttta

SEQ ID NO: 685681 - DNA, 1184 bp, Homo sapiens
gcgactgttgcgatccgagccaaagagagtgattcgtacagtagccgatacacacagcgctgtattctaggccagcggatggagcgaggtacatgttttcctcacgcttgcactgtccggttgccggtatcatctgtgccgaccatgacgtgatagacctcgtgagtaccgtgacactcgggaggctgaccgagtccaggatagagtgtctacgcaccgggagcggagtcacggatacacggcctgcggatagtcatgcgatgcatcagtcagaggagtcaagcagtagataattgccggtctttctcgttagcacagagagttgtcagcagattaacgagggttgtgtgccgtgaaaagctagtgagggattgcaatccgggcgggagcaggtccccggagaagattccggtactaagcgcatatacatctatatgaccaccagtctcttcacgtagcgcttgaaagatttcatccgcgtggcaccgggggtaccttcaccagtatgcccagcctgtttaggggctgccaagggatcggaatgaagtcatcgatgtgcccgggtcattacaagtgcgatgtgctcgaaaccaagtttccactggaggtaagtttaggacttgtcgggcggcttggttggcacctgtgaatagagtcgcaggtagggtgaccaattagagtacttcggagcctcgtatatgggcgcctggagtcgggtcacacacgcatgtttcccgattttcctggcttgtggatgttgagactagcctgtccgagtactcacgtttgtggccactaagtcacaattcgggggccgccgtggccgaggctttacgcttcttttaataaacgttcgcagacgtacggatgagcacttcttagttggtctgggggtgtgcgggaaaggaaaacggaaggggcaaatggaccaaatggggcaacaattgggttccaataaggccttggttggtgcctagaagcctagagctgtttgctttgtaactaagggggtggggatagacatcttaggccggttcctcccttaatacggtgacgctcgtacttaaactttcggagtaacgcccagtgttaaacctggcagtatagataggcgcagaagacaaagcttctacaagggggaggccccctatagggggttatggcttgagggagatggtggcccg

SEQ ID NO: 685682 - DNA, 147 bp, Homo sapiens
  misc_feature (56)..(56): n is a, c, g, or t
  misc_feature (99)..(99): n is a, c, g, or t
  misc_feature (136)..(137): n is a, c, g, or t
gacgctctctgtggggcaaagcggtgaacggtggactgaagttggtggtgagctgncagctgtgtgtctaccttggacccagaggttctttgagtcctnttggggatctgtccactcctgatgctgttatgggcannaccctaaggt

SEQ ID NO: 685683 - DNA, 279 bp, Homo sapiens
tgcccagagccttccaggatgagagagatgctgctctgggtttccagcgggccttcgagcagtggccattgctggatccaagttccgggtgcaacacagccatgcgtagtccccccagcaccatcggggccccccctgctcacagtcaccaggtagatggagcagactccaggaacccacaagtggatggttgaaggactgatagctcggtggcctccatccgaactttgtactcacacctccgggttccctgcagtgacacgcatggtcaggcatgca

SEQ ID NO: 685684 - DNA, 422 bp, Homo sapiens
ctctcagggatcggagtcgtctgatcttcatacatgattacagcgataggggtagagagtgcttgctagattatgcagttgatcctatggtgctttaatattcaggccttcaaaaaccacttgtacagtgatgtgcagatttttaaacagttgaacttccttgtactacagtttttgtattgacagccaaatttgtctttcattcttcagattgtgaataaagtgatttttacagggcttccagcaaagtttttcctttcatctaaggcttgtagaaccctagcttatatagctgcttacatgagaaatgcaaaatctgtattcaccatgactttattaacaaaggtaaagttttttagtagtgccaaggcaagaggaacaatcttggtggtagtactaagttttgtcaatattgtggtttc

SEQ ID NO: 685685 - DNA, 287 bp, Homo sapiens
  misc_feature (48)..(48): n is a, c, g, or t
tgccactgcactccagcctgggggacagagcaagaccctgcctgccangtagctaggattgcttgagcccagaacttcacagatgagcctgggctcatatgagaacccatctatacaaaaagtttttaaaaattagcatggcggcacacatctgtaatcctagctacttggcaggctgaggtgagaagatcattggagtttaggaattggaggcggcagtgagccatgagtacgccactgcactccagcctgggggacagagcaagaccctgcctcaaaaggagaca

SEQ ID NO: 685686 - DNA, 252 bp, Homo sapiens
atagagagtgcaagtaggattgcagagaactgatgcctatcgctggtaccgttgtgaaaacagaggagggaatggcaagctctgtgagccgcgccctcaggtcatccatggagcctctaaactactcttcccctggggaattcatgaggaagttgtcaagatggaacctgaagatgctacagaggaaatcagtggatttctttgagctaggagaataagagtctggagactgggagccttcacttcggcctc

SEQ ID NO: 685687 - DNA, 522 bp, Homo sapiens
tgaaaggagtctcgctctgtcgcccaggcttgagtgcaggggcgcgatctcggctcactgcaagctctgtcctccgtgggtttcatgccattctccgtgcttcagcctcccgagttagctcccaggagttagctgggactacaggtgcccaccaccacacccagctaattttttggtatttttagtagagatggggtttcaccatgtgttactccaggagtggttttgactcctcctgaccctcgtgactccgcccgccttggcctcccaaaagtgctgggattataggcgtgagccaccgcccgggcaaattttggctatttctaagctacagaactggggttccaccgtgttggccaggatggctctcaatctgaccttgtgatctgcccacctcggcctcccagggttgctaggattacgggcgtgagccaccactcctagccttaatgcatattcttaattatccaacgggtagattggtccatgaccaatggcttgggggctctaataacctacctt

SEQ ID NO: 685688 - DNA, 645 bp, Homo sapiens
attggggcgttaaaggcccgtttcaccagttttcccgggtagccccttgtgcgcgggataacgtattctcccctctgggcgtttttttcccgccctcgtattgtttaggtgccccctataggggggtaatgtttccgtcgcccatgtgaccggttcatcagcatcaatttgtgtaagaacgcggcgcccgcggattcttctcaataggcgtcgaccgtataactaaacggttttctctctatagcggctcccgagacatatactcccgctgggagatttcggccacccacccggtccccggggaaatacggcatcaaactgtagtataattttccgcgcgaacatgtgtttaccacaccctctcccaaaggcactacattttgtgcgtcttcacaaataacagcccacgcggtttgttcgccccatactactatcctccccaaaaggaggataccttggctcccctcctcaattatttttaagcaaatccacccaacactcctaaaataacaggctctctcgaacacccctctgttaataaaactccccttttcgtgaacccgccaccacactctctcgcccccctggggagtttccccccccccggtgaaaaaaatattccgttctcttctaccaacaaaaaca

SEQ ID NO: 685689 - DNA, 985 bp, Homo sapiens
  misc_feature (21)..(21): n is a, c, g, or t
  misc_feature (63)..(63): n is a, c, g, or t
  misc_feature (92)..(92): n is a, c, g, or t
  misc_feature (130)..(131): n is a, c, g, or t
  misc_feature (133)..(133): n is a, c, g, or t
  misc_feature (145)..(145): n is a, c, g, or t
  misc_feature (169)..(169): n is a, c, g, or t
  misc_feature (173)..(173): n is a, c, g, or t
  misc_feature (219)..(219): n is a, c, g, or t
  misc_feature (222)..(222): n is a, c, g, or t
  misc_feature (228)..(228): n is a, c, g, or t
  misc_feature (241)..(241): n is a, c, g, or t
  misc_feature (261)..(261): n is a, c, g, or t
  misc_feature (282)..(282): n is a, c, g, or t
  misc_feature (292)..(292): n is a, c, g, or t
  misc_feature (300)..(300): n is a, c, g, or t
  misc_feature (303)..(303): n is a, c, g, or t
  misc_feature (305)..(305): n is a, c, g, or t
  misc_feature (309)..(309): n is a, c, g, or t
  misc_feature (314)..(316): n is a, c, g, or t
  misc_feature (324)..(326): n is a, c, g, or t
  misc_feature (331)..(332): n is a, c, g, or t
  misc_feature (337)..(337): n is a, c, g, or t
  misc_feature (340)..(341): n is a, c, g, or t
  misc_feature (373)..(373): n is a, c, g, or t
  misc_feature (378)..(378): n is a, c, g, or t
  misc_feature (386)..(386): n is a, c, g, or t
  misc_feature (399)..(399): n is a, c, g, or t
  misc_feature (418)..(418): n is a, c, g, or t
  misc_feature (426)..(426): n is a, c, g, or t
  misc_feature (464)..(464): n is a, c, g, or t
  misc_feature (516)..(516): n is a, c, g, or t
  misc_feature (537)..(537): n is a, c, g, or t
  misc_feature (561)..(561): n is a, c, g, or t
  misc_feature (628)..(628): n is a, c, g, or t
  misc_feature (636)..(636): n is a, c, g, or t
  misc_feature (661)..(661): n is a, c, g, or t
  misc_feature (665)..(665): n is a, c, g, or t
  misc_feature (669)..(669): n is a, c, g, or t
  misc_feature (675)..(675): n is a, c, g, or t
  misc_feature (684)..(684): n is a, c, g, or t
  misc_feature (688)..(688): n is a, c, g, or t
  misc_feature (721)..(721): n is a, c, g, or t
  misc_feature (724)..(724): n is a, c, g, or t
  misc_feature (740)..(740): n is a, c, g, or t
  misc_feature (777)..(777): n is a, c, g, or t
  misc_feature (814)..(814): n is a, c, g, or t
  misc_feature (860)..(860): n is a, c, g, or t
  misc_feature (890)..(890): n is a, c, g, or t
  misc_feature (916)..(916): n is a, c, g, or t
  misc_feature (974)..(974): n is a, c, g, or t
cgggcagaggcgtggtcaganccttcttgatcacagccccagttaggatagcagggtgagganggcgcttcctacagcttcagcggcctcancggcggctctgtgccgccaatggccgaaccagctgcanngncagccccatccntcctatgcttgctgattcaccagnctcntcatcttcagagccatgtccccttggtcagaaggaaccgaggatgnccngcttgnagaatccaggagnaagctgaggttcttgttggncttgacgataaagctagatgntgtcctaaangatttttnggntntttnttttnnntttttttnnnctttnnagctnganntgaaattttaggcaagttcttggccaacttcnagttntcccgcancccaggccatccntgtaccccatggttatctnacagatgnagatcccagcttgtcccatttattacaaccgttcacgnttgtatcccctgtcctcccagcgaactgcggtcccacacatgtctcaatganctgtgctctcattgagagtcnctccctcccatggttcaccaaagnacgtttgggttagccctgggccctccccccagggatatgtatccctccagggaaataaattttttgnagctatcntttcttgtatggggggcccatatcnatgnagcntgggcnttaagggcnatcntcgtttgttagggtggtctctacggtgggcgcntgnacaaaaggacaaaacntagagtgggcctcctgttggtgtaaattcctagtacntcggacatcccatttgttagaacaggtggggcagatnccttttttagattaaagaatgtttattagaaagattccacccccantcatggtggttccttgtttctaaatgtatncattttcttgccttttcccccccacnagcctcctggtgggccctcctcttgttaggagcccccctttatttttacgggcaattnaaggtacattg

SEQ ID NO: 685690 - DNA, 275 bp, Homo sapiens
  misc_feature (25)..(25): n is a, c, g, or t
  misc_feature (134)..(134): n is a, c, g, or t
  misc_feature (180)..(180): n is a, c, g, or t
  misc_feature (229)..(229): n is a, c, g, or t
gagacgaggttttgctcttgttgcncaggctggagagcaatggcacaatcttggctcattgcaacctccgcctcctggattcaagcgattctcctgcctcagctccagagtagctgggattacaagtgccttcnatcatgcctggctaatctgttgtcttaacagtcttcaaatgtacantatactgttatgaactatagtcaccatgttgtacaatagatctcttgancttactcttcctaactgaaattttgtatcccttctgtcgtcttctc

SEQ ID NO: 685691 - DNA, 618 bp, Homo sapiens
  misc_feature (187)..(187): n is a, c, g, or t
agtccttctgctgattggagctgagagcacactcacgacgttctgcaaggattctctgattatgattctgaaggcaaaagcgatggaatggacagcacagattgtaattttctttatcttgaattaaagaagaaagtatctaggacagaaatccacgtcaagtactttgaaccagggggtgtctcancccacggagacgttgacgtattgtctattgaagaagattcttaccttgttactggacaaggttttgtcagttctacggaactggattgtcacatgagactctacactaacattcacccacatggaaaagcatagaagatgatcttggaaccaacatcttgcgttagtgacattgtgagacttgtattttattcaccccaaccaaatacagtaccaccatcacttagttggtataataccgacattatctataagttccatacttcaccttctctatgatattttattccctcctccactttaacacaactttttcaatttttttactaaatcgaaatttcaagttatacctatagtttcctactctcttctccctcttctgttttctctattacttttttaatcagttttatctaaccttctcatcccctt

SEQ ID NO: 685692 - DNA, 219 bp, Homo sapiens
atatgcctatacattagaatgttaattattcagcagtaaaaagcaatgaagtacagatacgtgctacaacataggtgaaccttgacgacatgctcagagaaagaagccagtcacaaagtactgcacattatatgatttcatttatgtgaaatgcccagaataggcaaatccatagggacaggaagtagactaacggttgggggatgggaaggttagggg

SEQ ID NO: 685693 - DNA, 1208 bp, Homo sapiens
tctctcgttggtctgtattcatcgctcccttcacatattggttgtccatcaccttccgtggggtctccgggagccctcgtgaacgggggtcaccccaagttgtacacgctggtatgaaaccaaactcgtaacttctggtgttcgccctgtttgctcaacacggacaaacctgtgggggtcttttcccgtagcgttaaccaggcactagcggtaaactttgccacacagacttaaaaaaggaaactaggcagggtaaggaacctctccgggtaaagcctgcgcagataagagatggggccatataatattatagataaatgccaagtcgtgttttagacagtaacttttttgattgtaagaatgaatagttgtgtgtgttaaaaataaaaatggtgatgctattgttaaacatgtgccaggtggcaattctttatgtgtgaaactattgtgtgaacatgtgctcgaattttaccaggtacgatgttcaaatacaatcaataatgatagcttataacccccaagatacaaaggccctatgaaagccgctcaaatatatgtaagggtataataatgccttatgccaaaattttgagaactgctatttagagtaactggcgaataatttgagcacctatgaagggattttggccaaggggtggcagaagctcagaggacggcaggtggcacagatgctgactggaagtccagaatcaaaggggcacacgatgtggagatggaacacaacttggtagggacaggaagcgatcttcactgtgacaaacttctcaacggccaggacaacaaaggtggtataggctttgtggtgtgcatttggcattgttacttgaatgcaactgtccactcagcctcaccaggaaccccaggtagcactatgcctgcccatcagatgtttcctgacatcatgcaggctacaggtttggaactggagaccttttagaatcccactccccagggccaagcacggtggctcatgcctgtaatcccagcacctttgggaggtcgaggcaggtggatcacctgaggtcaggagttcgagaccaatctggacaacaaggggaaaccccatctctactaaacatacaaaagttagccaggcatagtggcaggtgcctataatcccagctactcaggaggctgaggcaggagaatcgcttgaacctgggagaagcggttgcagtgagccgagg

SEQ ID NO: 685694 - DNA, 203 bp, Homo sapiens
caattcgggataaggcgccgtcgcgtttctctgccggtcgcaatgggaagaagagatcgccgcgccggtcattgacaatggcaccggcatgtgcaaagctggatttgctggggaccactctccccgagccgtgtttccttccatcgtcgggcgccccattacaccagggcgtcatggtgggcatagggcaaaaggactcctac

SEQ ID NO: 685695 - DNA, 892 bp, Homo sapiens
tctctcgttggtctgtattcatcgctcccttcacatattggttgtccatcaccttccgtggggtctccgggagccctcgtgaacgggggtcaccccaagttgtacacgctggtatgaaaccaaactcgtaacttctggtgttcgccctgtttgctcaacacggacaaacctgtgggggtcttttcccgtagcgttaaccaggcactagcggtaaactttgccacacagacttaaaaaaggaaactaggcagggtaaggaacctctccgggtaaagcctgcgcagataagagatggggccatataatattatagataaatgccaagtcgtgttttagacagtaacttttttgattgtaagaatgaatagttgtgtgtgttaaaaataaaaatggtgatgctattgttaaacatgtgccaggtggcaattctttatgtgtgaaactattgtgtgaacatgtgctcgaattttaccaggtacgatgttcaaatacaatcaataatgatagcttataacccccaagatacaaaggccctatgaaagccgctcaaatatatgtaagggtataataatgccttatgccaaaattttgagaactgctatttagagtaactggcgaataatttgagcacctatgaagggattttggccaaggggtggcagaagctcagaggacggcaggtggcacagatgctgactggaagtccagaatcaaaggggcacacgatgtggagatggaacacaacttggtagggacaggaagcgatcttcactgtgacaaacttctcaacggccaggacaacaaaggtggtataggctttgtggtgtgcatttggcccttatcgagctcgataagggccaaggtggggataagtgtggtttcgcccaggata

SEQ ID NO: 685696 - DNA, 111 bp, Homo sapiens
ctaaatcaaaacgctccttgctcaagtcactaacacgttcctttattttcttcataacatctatcaacatctgagattctctttttgtttctcaattattgtttttctgct

SEQ ID NO: 685697 - DNA, 873 bp, Homo sapiens
  misc_feature (491)..(491): n is a, c, g, or t
  misc_feature (506)..(506): n is a, c, g, or t
aaatgcaggcttggttactgcctcctggaggtttacctgtgtgatctgtgatgctggagatgtgccatgatgcctggatggacctgatgcttggtgagtctggtgcccctgtgtgctgtgtgtgtgctgtgtgctgagctgtgctgccaagcatgatctttacgtgtgtgctggtggacgtgagcctggtggctgtgtgctgtgtgacttgaaagcgtgatgccctggtgaacgtgggctgtggatggtcccagtggtccctgtggttgggtggtgtgtggatgcatgcatttcgtctgccgctgtgtggtgtgccgtggactccggcctgcagtgtcgccgccatcactggacttcctgtgtggacaatgcgcactgggcctcgccgccatgaactgatgccgcatcctcgaaggtaccacttcctcatgatgcgaggcaggccgtggggatgttaccgtgaacactatcggagccgaaagcataagcgncgaagaagtcctccntggtcaagtagtagtgaccggacacgacggcgtggcgagaggacagctaccatgtccgttctcgaagcagttatgatgatcgttcgtccgaccggaggtgtatgaccggcgatactgtggcagctacagacgcaacgattatagccgggatcggggagatgcctactatgacacagactatcggcattcctatgaatatcagcgtggagaacagcagttaccgcagccagcgcagcagtccggaggaagcacaatacgtgcgtgaggaaggcgcagtcggacaatattagccgctcatcttctgatgaaatcgtaacaccattaggagaaggtgaccatcggccgaggttgtacaatgtgttgaaca

SEQ ID NO: 685698 - DNA, 129 bp, Homo sapiens
ggagggagggggccccacaggctccccaggaggctcgtgtcggcccagagccagccagtttgtccctgccatctactgtctgaggccatcgctgctacactttgtatttgtatttcatactgaagttgc

SEQ ID NO: 685699 - DNA, 270 bp, Homo sapiens
catgtaccatagcggatagctggaaagaactccatgtaagttgaatgttgcctttcttatcaagtgggtgcctccgggtacaatcttgtccacttcctcatctgtgaggctggtcacccattgtgagtgatgcagctccctgtgtggtggtcctcattggatgaaaccttgaggcttccatcgtacgaatgcaggcaaatgtgtgtatggaaatcacattcctcgaggtgtcctgtgcctgatcatgcattcatcccacaaactatggtt

SEQ ID NO: 685700 - DNA, 168 bp, Homo sapiens
gtggtggattcgccaagtgtgttggaggaggtgacatcaatccagatgagttgcaatgtgctgtgaacattctaacctgatattacgaaatgttatttgattggacttggatgtctgtattaaatgccgtaagattttgataatttaggctcaggttctataaaactg

SEQ ID NO: 685701 - DNA, 949 bp, Homo sapiens
agtcttcttgacactccttccctaagctcaatctgtagccgtctcatcttctctcatctgatcacttcatgttttagtttatgtgactgcctggatgacctgcacttctgtcaaattaaagcaggtaccttaatgttccattcagcacggaatggacaaatccttgaagcccatgctgatgtttgatgtaactgtggcaggtagtgtacaaaatacttatctgacgctagggcacctttccttggcgctggcttagtcagagtgcattctcccattcattagcatgctctgtaagcatcatgaattagcatatgtctttcagtggaactgtacaagagtccctttgaagatgataatcttggctcagtttgtataaactgtcaaattgtcaatataataggtagggggctttcactaggaaaatcatgtgctcagaagaggaaatgactcgtagtcaggttcacggagttagtggagtatctgcgactttggtactgctgtcttccaaggtacgctctaagttttgactgtgtgggcttctgagtttatattctgaaaggcaatacagcttcttgtgaacatccccagtaggttcttttccattgtcaatacggagcatcagccagtgaatctgttgcaggtttccatttctgcaagaactcctccaaagcatgtgctagtgggccagacagtggttcttatgatgtttccttacctttcctggtatgttctgcggtgggtccaaaggaaaagcgtaggccctaacatgggaatgataagcccgaacgaaaagaacctgtcttcacccgggtttctaaaaaagcgggcacacacccgttcttttggacccctttcacgacacgtcccaattaaagggggagacccatttcgggcgagatatataacacaattttagtccgaaaaatattctcacctacattaaacaccg

SEQ ID NO: 685702 - DNA, 132 bp, Homo sapiens
ccatgcacttagggtgagaaacgaaacgcagagacaaaagaaaagaagggaaggaaggaaggaaggagggaaaggaaggagagagggagggagagatagcaaaggggctacatcattgagtcggctgtgcag

SEQ ID NO: 685703 - DNA, 785 bp, Homo sapiens
aacttactattggaggcagtgggcagcgcaggacatggcccaggccgacgacctggcaactgactgtcaccagctggagggaagagctgagaatgaagctggagagcatcagacagaggagctggggaaactgtctgtgccagggccaaggctctaggaagtgggatttcttggaaataatgcaaagagagctggaccattcatccttggtccccgtctgggcaactcaccttgtgccaatgcatagtgcagttgttaggcgagtgaaaagatggcacgggatgcaacttcgtaatcaatgcttgaaaggaatcctggaacccatgcgcagggacgcagggggcggaacccaaagtgcattaagaaggaggccatggaaaagcacgcagtgacaaggggtcaaacgcatttgccttgcctttgcaccaccgcggaaggtaacctacaactttgacattgttcgtactctcacttgcgcacacatcgccatgtgaacatggggcggatgtgtgtgccaccgcgatgctcgaactaggagaccgcatacttccacagaggtggtatgccctgctagctccactgtgtattcgccactactctcgattactgaatgtgataatcatactgtgacacttctccagacggacctcgtgccacgtggggctctctacagcacacgtaatcttatccacgaaaaagtagtcacgcaactctcctgtgccctaacctgttactcactcttcgactcctcatggtcgccatagttgagtgccaccccagttagc

SEQ ID NO: 685704 - DNA, 426 bp, Homo sapiens
cttataccagtacgtgctgtatggtgactatggccttatagtatagtttgaaatcaggtagtgtgatgcctccagatttgttctctttgcttagtcttgctttggctatgcaggttcttttttttttttttggtcccttttaatttttaaaatttttttttctaattctgcaaaaaatgatcggtgttattagagatggggaattactttgaattagtaaattgctttgggcagtatggtcatttccacaatattgattctacccatccatgagcttggaatgtgctcccatttgtctgtgccatctataattccttacagcagtgttttgaacttttccttgtacagttctttcgaccccttagtcaggtatatccctaagtattctcttctttggcacttgtcgcaaaggggttggcttcctca

SEQ ID NO: 685705 - DNA, 523 bp, Homo sapiens
ggacctcttcaacatctcatttctaaactgtactaagccacagtaatcaaaacagcacatggtacctggcataaggatagctatatcaaccatgagaatcaaacaaagagtccaggggaaaaaacccagacattcgtggtcaactgatttttcaacaaggatatcaggaccactcaatcaggaaataatggtctcttcaacacatgaggatgggacaactagagtaccacatgcaaaaaagtggaccccctctggcagggcgcagtggctcacgcctgtaatcccagcactttgggaggccgaggcaggtggatcacgtgaggtcagcagtttgagaccagcccagccaacatagtgaaacccccatctctactaaaaattaaaaaaaaaaaaaaaaatttagctggatgtggtggcacgcgccttgtagtcacagctacttgggaggctgaggcaggagaatcgcttgaccctgggaggcagaggttgcagtgagctaagatccacaccactgcactccagc

SEQ ID NO: 685706 - DNA, 153 bp, Homo sapiens
gaagcatacgatcagtccatagatgctgtgacaaaattaactacaatcagtctgtgcaatgaacttgatgtggttggcgttctatgtgtgtggcatttcatgtagaaaacagatggtagtgctccataaaaatatttcttctctctagcttat

SEQ ID NO: 685707 - DNA, 385 bp, Homo sapiens
gtccagctgttatacggagatgtttaatgcatatctaacttattacatgtatctcatctcatgtttacaaattgtcacaagagtaccgttaatgctgcatgctgctgaactctgttgggtgacctggccttgctgctacagggctgtgggctcctctgtctctggcgagtctggtcatgtggaggtggggtttattgggatggctgcagaagagctgccaggaagtgtctattctgggccagtaaaataacaactgtcatagggagggaacttctcagaagtgacagacaactctaggttacctttttcaatgaagagtagtcagtcttctaaattgttcttataccacctctcaaccattactcacacttccagcgcccaggtc

SEQ ID NO: 685708 - DNA, 263 bp, Homo sapiens
cagaccatgaaggagatgggaaggaggtcatttgagcacattcagcgcatcgaccgggacgtaagcggaacattacggaagcatatattcttcagggatcgatgcggaaccaagcagcgagaactactccacatcctcctggcatatgaggagcataacccggaggcgggctactgcagggacctgagacacatcgacgacttgctcctcctctatcttgctgaggaggatgcactatgagcactggcgcagctgctgtccag

SEQ ID NO: 685709 - DNA, 485 bp, Homo sapiens
cgtgccgagtctccgcagggtcgagcttcaccgcgcggcgcgggctcaggcactgcccgcagtgcgggacacgcccaaggctcggatgggagccgacgctgagggagcggcacctgcagggagcgcccggagccgaggccgcggcaggaggggcgggcgcgggcgcggccggaggggatgcggggtcgcgggaggggcccgcaggccaggccggagctggggggggcccgaggcccgagctggccggcgagggtgggaagggcggacccgggtggggaccgcaagccccgggaacgagcgcgcgagcggcgggtcccggcggcactcaccgagcctgggcgccggggcggcggcggccggcgcgcggccctctcgcggggtcccctccctcggccacccgggctccgctccagcctcgcagtgacggcggccccgacagctgcgtggccgccctggaggggagggtgcgcctgcaacccgctact

SEQ ID NO: 685710 - DNA, 530 bp, Homo sapiens
  misc_feature (424)..(424): n is a, c, g, or t
ggtatcacatcccactcccgtctgtgtcggcgcgcgtgtaatcggtgagatcgagggggatgtatcgagatgacagtcgacgaaatagcctggagtggaggctgcctgtgattgatgacaaacataagagtggcagactggagtttagcgattgctgggcgagccaatgactgcttcgcctgttcgaagttttccgttagttcgtccgaagaacaaattacgtgtaacatacaggttaccaaagtgacccaggtagatggaaacatgcccgtcaggtttgccacagagaccacgtttcctagtggataagtatgaaattctgtaataccaagaagagggagctgaaaaggaaaattttcgagattaataaagaagacgcgaatgattgggtgaagagtttttgcccagatgtacaagccactgngagagcccttgttttctgatacaatgcacgattctactgggcgcaaggtagcctcgatgtcaccccatgtttcagtgtcacagagacattctttgataaggaaatg

SEQ ID NO: 685711 - DNA, 163 bp, Homo sapiens
tgatttaaggttttcccttccttccctccctcccttctttctttctttgttttttatttattaattaattttggagaccgactctcgatctgtcacccaggatggaatgcagtggcacgatctcggctcactgcaacctcctcttccagggttccagtgattc

SEQ ID NO: 685712 - DNA, 884 bp, Homo sapiens
gactatgttccccgaaccggaggctgacgtaatgtgcgcttgccgatagtgtctgctgcctggtctgctcattcgactcactataccgctactcggctggacaaacgatctacttgtgggactatgtgctctgcgcctaactacatcgtaggatctcgttaactctctgaataatgctccaagaactgggccaccagggtcccctgttgatacgtgacaatgtagggtccatggaacggaagaggagtttctactaggacaaagtgtttgcacaagtcatacactaaactgccggataaaagtgtgtgcactagtgagtgcgctgaaatcttgtggagctagtgtattgtggacccgttcctgtgattggttctttgctacaatacctaaacgctagacagcattgcgtccacgtcgcatgctccactaggttgtctaggatatagatggctattcacaagcgaccgaggggcgcattgatgctacattatcgcgtatgtgctacccgcatacttggcacattggcagattgtagcaacttgccaagggtagactcccaaattcaggctatgcgtgggtctgagtattgcggagaggaggggagccacgttgtgaaggtccatttgaaccatcagggagtccagaatgcggttgacttgtgctagacttcctgagcgcggttggccctttctcacgtacacatcaaagaagaatacactgtcaatctcggtagaaaggcttcccttgagaaccagcccaggcagtgaggcgccctgtggttgcgaagagaacgcagatgtgaccatgagaattgacattgtgtcctccctggagaaggcattttacacgaaaacaggattcataagcctgattaatgtgaacca

SEQ ID NO: 685713 - DNA, 431 bp, Homo sapiens
gtaccctttttttccttgtgttggcttccagtgaacgtcaagtcctcaagatgctgtacaatggccgggccttgatctgggtattggtaaacaggagtagggacggacgtagatgatcgcggaggcctggctacattctcctttccctttcctgtgaattccccattttctttcttcttcacctagagataaactagttaaggggatatcaaactatttctttggagtctacacaccggtggatccatattgggtattcggaacagtctataaaccggggcatccaataacacagttccagttaccaggaggaagaacattccctaaatttacaaggtcctaagtgggtttatttccaatagggttaactcagtagtttaaagacttttaaaagcaagggactttccggtagtgtggaaaaaaaaacacaa

SEQ ID NO: 685714 - DNA, 236 bp, Homo sapiens
aggggggaacaatcacttagcgggggacaatcacttagcgggggaacaatcacttaggggggaacaatcacttcttgagaaagagtagcaaaggtgaaagcatcattgatcagttgttattgtttgtcatagctagtttagtttctatgttagttagtggtgaattgattgttaagtgatggttaagtgattgtaaagggattgtgcaagtgattgttcaagggaatgtccccgcg

SEQ ID NO: 685715 - DNA, 212 bp, Homo sapiens
tgtaagagtctagaggatcccatttcttgcgccgacgaaccgggagagtgttgtgggggagattcaacatggctgcctggaagatgcattaggccgtcaccttcatataatgcgagcaggagtgtggacggataggaatgagacgcatttgaagcctctcgtgtaaaggtggtccagttcatgtcaagaagtgtatctgtgctcgctacatg

SEQ ID NO: 685716 - DNA, 152 bp, Homo sapiens
tccggacggactgaagactttcctaactggacgactgactgacgactagtgagctatgcacgtcgaaaaagaaaaaccacagatggttaagaagtccacactgaaagaaaagaaaagaaaatgtccccaaaccagaataaagggtacagtga

SEQ ID NO: 685717 - DNA, 482 bp, Homo sapiens
tccactccgttccatcggtctatgtgtctgtttttataccagtatcatgctgttttggttactatagctttgtagtgtatttggaagacaagtagtgtgatgcctttacctttgttctttttgcttaagattgcattggttattcagggttttttgttgttattgttgttctatacaaattttagaattattttttgacagatagctttttcattattagccctggctaaaaagtcccaggaaaattcttagtggatcttcaaattggccaaacttgggacatctgttgcacctcagcctcagggagtggatgtcgcataggaaagaggatctgtcccttgaagaagggatgagagaagccatatgatcggaccagccccccaaaaaaccctcttggcccttaaaaatgaaattaccagatggcccttggtcctgtagaccttatgtccttatgtcccaagaggagcaacaagatgaatcca

SEQ ID NO: 685718 - DNA, 229 bp, Homo sapiens
gcagaagataaagtcggaagtaggacagagaacgctccgaaggcggggttggtcgtccgagatcattaaaaatggctgaccctgacaatatggacaagagtagtgaaatgtaaagtaagagagtacaaacaaatttcctttttaaggtgcttttaagaaaaaaagcagggcctgggaagttggggttcttttttcctcccctgttgcaaattctcatggtttgggttgg

SEQ ID NO: 685719 - DNA, 277 bp, Homo sapiens
cacgaggctgatcgataccagtggcaccatccgcaccctgcgcagcgatctcaccggcgtctccggcatggccttcgacatctacacccgcctgctcgtctccgaccccaacaccaaccgcatcctccgcatcgatttggataccggtgtcgccaccagaatcgctggcggcaatggcgccggcttcacgggtgatggcggccccgccacgagcgcccgcatcaattcccccggtgacatcgccgtcgattccggtggcaacatcttcttcatcgat

SEQ ID NO: 685720 - DNA, 340 bp, Homo sapiens
aagggggggggggccccccaggggccccttttgcaaaaaaggggaatttttggtaaaacccttgtaaaaaggttttgcccccttttaaggttttaaactaagggaaacccggggcagggtgggggggggggttaaaaatttttttggttaaggccccttttttttttttgggcccctttttggcctaaaggggggagaaaaggcctaagggggttttttcccaaaaaatcaaaaagggggggggccccggttttaattttttggcctaaaaccaggtttttggggggtttttgggcccgtttttgggggctaaaatttaaaaaaattttttccccttgga

SEQ ID NO: 685721 - DNA, 183 bp, Homo sapiens
  misc_feature (36)..(36): n is a, c, g, or t
  misc_feature (74)..(74): n is a, c, g, or t
  misc_feature (110)..(110): n is a, c, g, or t
  misc_feature (139)..(139): n is a, c, g, or t
  misc_feature (148)..(148): n is a, c, g, or t
tcccgcccctcagcctgttggaagaggaggcagggnagggtggccaggacatgcccgaggccgaactcctcctnatggtggctggggaggtcaagagcgctctgggcctngagttgtccaacagcagcctggggccgtngtggccggncaggcggggcccacgctggcgggaacagctggcca

SEQ ID NO: 685722 - DNA, 243 bp, Homo sapiens
ccttttcgtattgcaggtgatttgtctgatgcagcaaatgcgcgtcaggttctttctgacaacggttcgccgacactgatctgcagatgttctcggttcttcggctatcgctacacctccgcggtaaacagtctgttctgttcaaagtaaacgagtccggtactgatgcgcttctgcgtgaaggtatagtggggcgactggaaggtttcaacatccacgaatccgcgcatgttaagaaacgcg

SEQ ID NO: 685723 - DNA, 703 bp, Homo sapiens
  misc_feature (9)..(9): n is a, c, g, or t
  misc_feature (403)..(403): n is a, c, g, or t
  misc_feature (414)..(415): n is a, c, g, or t
  misc_feature (422)..(422): n is a, c, g, or t
agcgggagngggggggtgggggtgaggggagaggcgagaggtttagcgtgtggagctgcctgcgctccgcccgggctgtcagtcccggctccagccgccgcgagaccttcccggagacgcgcgcacacacagcgcaccccctgcacaccgcacaccctcgctcccttgctcacacacacgcacacactcagcctggccgagcaggagccactgaccattttgcaagtgtcaggaccagctacagcgcggtgggcgcaaacatcccgctttccctttccgggatttagtctgggagacgacgacgagggaagaaggtgggctcggacgcagcccaggcgccgggcactggtcgggccgttttcctggcagagccgctccccgggacgggcgcgggcctcgggtnagagtagaatnnagaggancggccgcagccgccgcgcgaggaggatgggaactcccctatttccagctggggactcaggcaagaccaagacggtgacccgtaaaaaatacgaacggatcgtccagctcctcaatggctccgagtcgagctccacggacaacgccaaatttaaattctgggtcaaatcgaagggcttccagctgggccagccggacgaggtccgcgggggaggcggcggcgccaagcaagtgctctacgtgcctgtcaagaccacggtgagtgactcgccttcctctgtta

SEQ ID NO: 685724 - DNA, 385 bp, Homo sapiens
cagcatcccgagtagctgggagactcaggtgcacaccaccaatgcctggctagtttataaactttttgtagagacaaggtctcaccatgttgcccaggctggccactaactcctggcctcaagtgatcctccctccttagcctcccaaagctctgaattatattcataagccactgggcctggttgactcagcataatttttcttgagagtcttaatatgttgctacatgtatcagcaatttgcttctttttattgctgagtagtattccattgtatgaatacaccatggtttgtttatccgttttcctatgtatggacacctgggctgtttccagttcttagctattataaataaagctactctgcacaatcttaagtaaaaaa

SEQ ID NO: 685725 - DNA, 670 bp, Homo sapiens
  misc_feature (9)..(9): n is a, c, g, or t
  misc_feature (623)..(623): n is a, c, g, or t
  misc_feature (626)..(626): n is a, c, g, or t
  misc_feature (629)..(630): n is a, c, g, or t
  misc_feature (632)..(632): n is a, c, g, or t
agcgggagngggggggtgggggtgaggggagaggcgagaggtttagcgtgtggagctgcctgcgctccgcccgggctgtcagtcccggctccagccgccgcgagaccttcccggagacgcgcgcacacacagcgcaccccctgcacaccgcacaccctcgctcccttgctcacacacacgcacacactcagcctggccgagcaggagccactgaccattttgcaagtgtcaggaccagctacagcgcggtgggcgcaaacatcccgctttccctttccgggatttagtctgggagacgacgacgagggaagaagaaaccagaggagtcctgtctgggggtcccatcattattcgggatacccgccgccagcggcctgccttcggttacccacatccccctggaacggatatctgtttggggcactacaatctatcctgtagaactatggccaaatctccatcaatgctttgctaatttctgggacttaactcgtagaatctacatacagggctggaatttattcaaaatgcatctgaagaaatgacattttaaaccgttttaaaaaatatcttgataaaaaattctgtaaaacagaatttgataggtttaaaaacatgacagnagnctnncnctgcggccgggacctcgcatcctgcaacgtggccgggg

SEQ ID NO: 685726 - DNA, 196 bp, Homo sapiens
agatcgttggaacaggtcgtagtatgaacatagtatcagatagtcgatgcgcggcaaacccacataccatcactgggcaattttttagaataagaccccattattatctatggctataaacctagccagttctctggctcttctgtattttcctatttccctgccatcatctgctatggacacttctaaaactagg

SEQ ID NO: 685727 - DNA, 1099 bp, Homo sapiens
  misc_feature (9)..(9): n is a, c, g, or t
  misc_feature (403)..(403): n is a, c, g, or t
  misc_feature (414)..(415): n is a, c, g, or t
  misc_feature (422)..(422): n is a, c, g, or t
  misc_feature (1052)..(1052): n is a, c, g, or t
  misc_feature (1055)..(1055): n is a, c, g, or t
  misc_feature (1058)..(1059): n is a, c, g, or t
  misc_feature (1061)..(1061): n is a, c, g, or t
agcgggagngggggggtgggggtgaggggagaggcgagaggtttagcgtgtggagctgcctgcgctccgcccgggctgtcagtcccggctccagccgccgcgagaccttcccggagacgcgcgcacacacagcgcaccccctgcacaccgcacaccctcgctcccttgctcacacacacgcacacactcagcctggccgagcaggagccactgaccattttgcaagtgtcaggaccagctacagcgcggtgggcgcaaacatcccgctttccctttccgggatttagtctgggagacgacgacgagggaagaaggtgggctcggacgcagcccaggcgccgggcactggtcgggccgttttcctggcagagccgctccccgggacgggcgcgggcctcgggtnagagtagaatnnagaggancggccgcagccgccgcgcgaggaggatgggaactcccctatttccagctctggaaacaaatggatggaagtcctgaatggagcaactgctgacttcatctgcttggaaaaatagtccagaggaactcatatttggctactcagagcagtggagggggtgtccatgacgtggcagggggaaaatagacaactgaaacctcccgtgtgaactgcaaactgtgaccaagcaaggggaaaatgatctttctgtatatattttaatttcgtgcaaaggttttcaagcatctgtatcctaaacttacttctatgtcttgttcagcagaaaccagaggagtcctgtctgggggtcccatcattattcgggatacccgccgccagcggcctgccttcggttacccacatccccctggaacggatatctgtttggggcactacaatctatcctgtagaactatggccaaatctccatcaatgctttgctaatttctgggacttaactcgtagaatctacatacagggctggaatttattcaaaatgcatctgaagaaatgacattttaaaccgttttaaaaaatatcttgataaaaaattctgtaaaacagaatttgataggtttaaaaacatgacagnagnctnncnctgcggccgggacctcgcatcctgcaacgtggccgggg

SEQ ID NO: 685728 - DNA, 173 bp, Homo sapiens
tggaaatgggagactgtactgtgttgtgtactgggcttcttccagttcctttgatggagaaacatgtctgtcctgtaatgccacctcagttggggtctttctgtgcagcccagtgcaggtgcccctattaaactgagaatatggctcttaagaaggcgccccacatggccacg

SEQ ID NO: 685729 - DNA, 130 bp, Homo sapiens
gtggtcccagcgaacagggagactgaagcaggagaatggcttgagccaggggtcaaggctgcagtgagccatgttcacaccactgtgctccatgtgctccagcctgagcaacagagtgagaccctgtctc

SEQ ID NO: 685730 - DNA, 251 bp, Homo sapiens
ccccaggtttaagggccccggggggttctaacaagcccccatcagagtccacacaggccaggagggaaggaccagcgccccccctcgggttttgggtttcagcagtcttggggacccaggggggccgaaaggaggatttgtccttcctgttttttgcctccccccccccctttccaggacccgggatgaatccgttttggggttccttttccctcaatgcaaaagcccttgggggcaacgaaaaagcctca

SEQ ID NO: 685731 - DNA, 650 bp, Homo sapiens
  misc_feature (60)..(60): n is a, c, g, or t
tgtgtttcatcagcgatgtacaaatatacttgggagattgtcgggaaccaattcaccatntgtggaaactgacaaatgagggagaggcacccttgccctgcctttcctgtgggcaccattatccagatggccagacggacaagatgagcctctccctccagtgaattcatgacgaagccaccacgcactggaaaatcaccattttgctccatgaatctgtcgattcagatatcaagcaccaacgactgcggacggaggagctaccaccagacagtgcgtggctccctctgcgagcccccggccttgccaggggactggacccggatcccagcagtcccctggctccaggtgtccacttccaggagacgcagaggcctgcaccgaaagatgcagctccaacccaggcctcgggtacctccacgtgtccgagggccacttcccaggtgcttcagccatggcccctggtcctagtcaagattttgtaatcacagagaagaccaccctcggagctgccacaggaccctaaactcctgggcctcagtttcctcctcgtgaaggcagtggcctggtggcctggggtgcgtcatcagggtccccgtggcgggcgaagagtggtctcagcttcctctgcacagaggcccctcgtgccg

SEQ ID NO: 685732 - DNA, 710 bp, Homo sapiens
aggctaacgtcgaggtgggccaacggaacgccccttcaacgcaacgagtttaaacagtaactttttagaaatgaccgtctaatctaggaaggctccataagagaaattaaacattactattgcctgcagaaatagaataggcctcttgtcgaaggcatactttccagccctcaggatggctacagtcagaggatagcaaactccatttgccagcccccagccaatggaaagtccttaaaatccttcaccaagcttttcacttaggaaaggataagacctatcaatgtgctcagaattgttttcaggcaggaaagttctaaatggctagacatataacctctctagctcacttccaacaagaattaacacaactatcagaagcccaacccaggaaatagaaccacgtttatttaacccagaaaatgggtgttagtgaaaaatctcatctctccttccctaagacaagctgggaaggggcctacactgttcttctttcaaccccctttgcaataaaagttacaggaatcgaacttctgaatacatcacactcaagtcaaagcctgaagcgctgagggagcaacactaccagcccagaggaacgtcctgaatatcaatgtgaagaaataggagatcttaagctgcaaatcataaccaatacataatgagtgagggatactcattttactcagtcccattctacctcaccagat

SEQ ID NO: 685733 - DNA, 681 bp, Homo sapiens
gcggccagcaggcggcttttgacggagcaagacgaaatccgcacacgcgggatgaaaaacttccggcacatccaggctgatgaagctaagccattgactaggcaagggctaagggctcctgacaaccctccatatgataagggagccttcagaagcgaaatcaactgtccagcaaagtacccatccaaaccaccgaagatcacatgcaaaacaaagatctatcacccaaacatagacgaaaaggggcagggctgtatgccagcaattagtgccgaaaactggaagccagcaaccaaaaccgaccaagtgatccagaccctcatagcactggcgaatgacccccagcctgagcacccgcttcgggctgacctagctgaagaatactctaaggaccgcaaaaaatcctcgaagaatgctgaacagtaacaaagaaatatggggaaaagcgacctgtggactaaaatctgccacgattggctccagccagtgcgagccagaacccccgtgcagtgcaatcagacacccacgcaagcaggactgctggggaaattgacaatgtgccaccgccttggcgaaccgttgaggcacgatactaactttctacagggtgtcctaaacggtggccaagcgcaccctgcaaagaaaggatccatgtacggagcccctcatggcccctttgtt

SEQ ID NO: 685734 - DNA, 203 bp, Homo sapiens
  misc_feature (74)..(74): n is a, c, g, or t
  misc_feature (117)..(118): n is a, c, g, or t
  misc_feature (132)..(132): n is a, c, g, or t
cgctcacaacaggcacagccacaagttacaaggcaacagccggctgtcatgtacaaggtcaggaaccttggacngcttccatgtgggcatctgcccctcctcaagagcaaaagcaanngtggggggaagggnggtttcctcttattcaagccatgcaccctactctggcgggtaaaatcacgggcatgtggtgagcggggtac

SEQ ID NO: 685735 - DNA, 891 bp, Homo sapiens
  misc_feature (60)..(60): n is a, c, g, or t
tgtgtttcatcagcgatgtacaaatatacttgggagattgtcgggaaccaattcaccatntgtggaaactgacaaatgagggagaggcacccttgccctgcctttcctgtgggcaccattatccagatggccagacggacaagatgagcctctccctccagtgaattcatgacgaagccaccacgcactggaaaatcaccattttgctccatgaatctgtcgattcagatatcaagcaccaacgactgcggacggaggagctaccaccagacagtgcgtggctccctctgcgagcccccggccttgccaggggactggacccggatcccagcagtcccctggctccaggtgtccacttccaggagacgcagaggcctgcaccgaaagatgcagctccaacccaggcctcgggtacctccacgtgtccgagggccacttcccaggtgcttcagccatggcccctggtcctagtcaagattttgtaatcacagagaagaccaccctcggagctgccacaggaccctaaactcctgggcctcagtttcctcctctgtaaaatgaagctgatgagtcctgagtccgggagctggccctggccacagaccctccaaaccagctcctctgaaggtccacagccagcacatggcgggcagccggccctggggtcctggggtgtgaagcagagcttggatgtgcgacgggagccctgcacatctgttgctcctgctggcatcacttgggaaggcctcgtgcccaccctgagctctgtccaaccctcgggaatagcgctgggtggcgaccagggttgaatgtacagaagcccctgctggggtgactgaggagagggtttacccagcaccctaagtgtgaaccctataattgaccccattg

SEQ ID NO: 685736 - DNA, 479 bp, Homo sapiens
agtgtgagaagctctgccaactctgattttttttttaaagaacctttacgtttagagattttttttttttaagttgggggaggagagaataagcagatatagggccctttaaatcaccatctgctttactgttcagaggttaattatccaccagaaaattctccctagaaatttagggtcagttttaccaaaccaccaagccagatcgccaggggtgttggacaacgttatcataaactggtgagggtcacaaggtggtgaatgtgtatatgttgttgtatgcctatatgtctgatcatattccactggaaatattcatagtgtttggttactaattattgtgtgtctctggcattacttgtactttccatgagcaaagtaagtgaatgttttctgtaaacacataccatagaacttaagacaggcatacaaataagtcatatttttcttcttcaaaaatctggaattctttacaaaga

SEQ ID NO: 685737 - DNA, 121 bp, Homo sapiens
aaaaattaagagtggggtgatttattaatcttgttaagaactctgatacttagcacagtaaaaggccacaaacttgctattaggcggtgtggccgcgcggcctctttacaactgctgctac

SEQ ID NO: 685738 - DNA, 128 bp, Homo sapiens
caatatatgcatccggctgtcggatcagagggtccaccagacatcaggaaggccatgtagagcaacaggacacccaccacggacaggtagataacaatagatgatcctttatggtggttggtgctgct

SEQ ID NO: 685739 - DNA, 128 bp, Homo sapiens
tcaactgcaggcgcttcctgaggaccgcatccctgagaagagtggcgactaggaccgacagcgggccctacaaggcgcatctcgatctgctcctctgacagaccgacattgcctgtgacggcacgacg

SEQ ID NO: 685740 - DNA, 113 bp, Homo sapiens
gcgccctgcggaacttcctgcgcaaggagtacgggggcctggacgtgctggtcaacaacgcgggcatcgccttcaaggttgctgatccacaccctttcatattcaaggctgag

SEQ ID NO: 685741 - DNA, 596 bp, Homo sapiens
cgcagcgtagttcggtgcacgttttgaaatgtcaggttaaaagccagtggcctgtaattctcagagatgcccttttggacggaccctgagcagaggaagctgttttttgttgttgttgtttttgagacagggtcttgctctgtcacccaggccggagtgcagtggcacaatcacggctcactgcaaccgccacctcccgggctcaagcgatccttccgcctcagcctcctgagaagctgagaccacaggtgtgcaccaccatgcttggctttttttttttttattattattttttattatttggagacagagtctcgctctgttgcccaggctggagtacaggggtgcgatctgggcttactgcaaccttgcctccggggttcaagagattctccctgcctcagcctcccgagtagctgggattacagatgcatgccactgcgcccagatgatttggtatttttagtagagatagggcttccccctatcaagaccagccaagctggtcttgaactcctgcgctcaggtgatctgcctgccttggcctcccaaagtgctgggattacaggtgtgagccaccgtgcctggccccctaa

SEQ ID NO: 685742 - DNA, 867 bp, Homo sapiens
taacaatccaataattgccaattattcaataaatatatcaatgtagtccctgttactgatagaatgaacaggcttgccctgggtctactgacaaccatcttgagatcatgagttgacactatattaccagaaaatgatccctacacaaagcatgagtgcagagaggaagaaaacaatctcgaggacattattcgagtgctgtattaatgcgcattaaattacataggaccaataaataccttttctttcttaagcctgatgatataactgaaagcatcctactataatggctacaagataaaacatttttaaactaggcctatgttacttttttaactttacaaaaaaaaacaaacaaccatggcctccttgacctcaacggaggaactatgcgaacgataccctatattgagggttaattactgatcctcgttcactgactaactgaactcaatacgatcgattgaaaaaagcgtaatcatatcactcaaaagcggacatactgaaatacctaaacactcgagaacccgtatgaaaacaaatgtaaaacacatggaataaataacgccataaaaccacatactcgacaaatttcatatactaatatcatatcgatacgataaagttacaacaactagaaaactgatccaaaaggatagatgatgaaaaataccaacagaaatttaaacaatactaagaaattgacacacagaaaggtaactaaatataactaatctgaagacaatatcgacttatacaattatctcttgcaactctcatactttagaactccagcccgataactaattaactcaaactactactaaatcacagataatcatagataaactatacaaaatagaatgt

SEQ ID NO: 685743 - DNA, 2084 bp, Homo sapiens
  misc_feature (1149)..(1149): n is a, c, g, or t
gcttctgcttctttgagggttgttcggtctctctcttggttctctcgtttgggtgggttcctccttctccggtgtggtgttgtctgcttttgttttaactctagcctatatgagtgtacgttcgcccggtgtgtgtttgtttttttgttttatctctgagttgtctcgttgtctcgtatgacttgtattgctttgttgagtcttatagatgttgttggttgatgttttgggttcttttctgggtctgtagtttgttggtggtatccacctcatttcaccaggtgggttccactcgttgttggacgtctctccatagagtggcacccctctgtggccttggtgaatggtcttctttcctcagcggggtttccttcttctgtggtttgtcctctcacctctattctcgtctcctttgttctacaagttggggtgtggtctctcctttttcgttcggtgatgcgggcttctctctctttgttttcccttcctcgtgtgggttgataatatgtgtattatctcctccccctatcgtggtgttgatcaccacagaggtcgtttgtttattttgtgtccactcaggaataagaagatcattttggtgtggatgtggtgatatcttgttttgtttttccaatcaaggctcctaccatgatttatgtggtgttcttgtgtgtgttgtgttagtgttgaataatctacacgcagtcagctggatgtagattagttgtgctgtcttttgttagccaactcgactcccactctgttgtgtgttgttattttttctcgttggtggtggttctgctttcatttggggggccctccccttttgttgttgattctccatcttttagtcagtggttttctttcctctcccgtcttttgttttgtttatgatcatcttcttcgttggtgtggagtgagactcatccgattagttgtgcttctgtctctctctcatcttttcgacctacgtcgcttctggtggcggttccttctgtgggggtgttgtttgttttgctatctgtcaccatcatccatcatgctggtggtgttgtggtgtgtgtctacatatgttcttcttggtatggtttgcctctatcaggatagttgtgtggtgcccccgcttgtgtgtgacacatctctgttgtnttcgcgctggggtgtctgttgtgtttcttttgtgtttggtttcttttctctcttggtttttcctctctcggtggggcgttggtgtttattacactcgcgctctcttcgcggtgttggttgtcactccactttgtttgttgtgtgatgactccttctgttttttatagatatttgtatatgatatcgcactctttctacacagcaagacgtgttgttattagttatcactacttcataagagtgttgtctatgatgatgtatgttgtagagtactctgcgcgagacattctctctgtgagaggtagtgtggggggggtggtgggggcgtcaatagatcattctttcgacacacaataattgtggcgggcgtgtgagtcccccctcgcagctgtctctcgtcgaccacagcagagttgtgagagagatactcaacacacactacagcgcggtggctgtctatagagagtctttgagagaggggtggtgttggtggagatatattgtggccccacagtggcactgtgagaacacactctctcgagagagacacctccactcttttctctccacatcggggagaataacacacccacagtgtgttcttcacagcgagaggaatatcttccaacagggcacaaaggagagggtggttgtttggctgtgtttgtagatagagcgggaataccctcgccactaatttcccccgtggccacagttcccctccacaccctcttgggtgggcctctgcatccctgtgatgtgattgtttttctcacacccccttgttgtttgtggcaatgaaactcccagagacgtctcccccggggtgggatcgttatatacccttcttggggccaccccataaataataaatataaaaagaaaaaataaacttcgagcatatagctcggggtccgagaaggagtattatctct

SEQ ID NO: 685744 - DNA, 320 bp, Homo sapiens
  misc_feature (300)..(300): n is a, c, g, or t
tagacacagggacttttcaaaaatcttaaatcagtagaagcctggcttttgtacacactgctttggtggctgctgcttttggtgttgtcatgactggaggggcactttgagggttgttccaggctggagctaggaggaactcaatgaaaagtaatacagaagagagagagaggtgtctgtattacttattgagactcaaggtttcagagagaaagtaaagatgtttaaagttggaacagactattttttaggatcacctaaacgtgtcgttacatggccctttttccgtgggtgagtggngaaaattctgcccatctcaa

SEQ ID NO: 685745 - DNA, 92 bp, Homo sapiens
ggatttgctggtgcagtacaactaggcttaatagggactcgaattcgaggctcgaattcgagcctcgaattcgagaacaaagaaacaaaaaa

SEQ ID NO: 685746 - DNA, 1338 bp, Homo sapiens
cgcttctcttctttcgtctgttccctctctcttgtcgttcttttttcctgctctctctttcctctctttcgctctgcttctgcccgcgtctcggttctgctttctgcctgttgtcccgcttctccctccctttttcctacccctcgcctttcctctctgttctttctctgttgcgtccgtctgttgtgttctccttccgcgctcttcctagttctgtctctttgtgctccttctctctttcttgcctgctctgtctcctttcgctcgtttcttttccctcgtctgctcttcttccgcccgctgctgcggccgtgctcgcgctcttctttctctctgtttcttcttcggcttggcgttgctcttccctccttctcgtggtcgctttcttcttcttgtcttcctcttcgtttgtttcgctctgtgcgggctcgtgctcgttctgttgtcccccgtgtcgtgcttgccgtggcgctcgttggctcgtctgctgccgcgcgcgctctgtccgtgttctccctcccgtcgcctcctggtcgtcctcccgtgctggcctgtgcacaggaagagaagtattagacaaatagagatagcaacagagagggggtgaccccttcaatatggtcacgcagtgtttgccgacatcttttcccgcaatggtatgtcacagagcccctctttgaggcccaaaattccaggttttcacccgtcacccctgtgcaggtttaaatcctaagggtttccagaggccagcctgggctggtttcctgcgcactcaggaccggatccccttaattataaaagccaatttttgggcgcatgcaagcggtctgttggcagcactgttttgacttattgccgtataatttttgggattttttctgtaaaaatgggcggtaaatatttccttatacaggtatgtgaccaccaaagaagttgcctgcatgccggtcccaattggtctgtataaagatgctctttaaagagccccagaggtatcctaggaccctttattctgtttttatttgagaagttttaagtcacagtcccttagtaaaggccctagcacgtgggaaacacgtgtaactttttataaaaattggctggaatattaaatctcttggaaaatttttctgttaatgtgtgaagacacccaaagtatgggggagagacacgccatcccaaacctaactcttttgtagagtagccactttcattttcgtttaacctgtgttccacgcccatatggtagttctaccaaagagaatggtttttaggcctcccggtgttatacctttttgtttataataataataatattaaaagtaacctttacgtagg

SEQ ID NO: 685747 - DNA, 881 bp, Homo sapiens
  misc_feature (1)..(1): n is a, c, g, or t
  misc_feature (107)..(107): n is a, c, g, or t
  misc_feature (125)..(125): n is a, c, g, or t
  misc_feature (167)..(167): n is a, c, g, or t
  misc_feature (242)..(242): n is a, c, g, or t
  misc_feature (245)..(245): n is a, c, g, or t
  misc_feature (270)..(270): n is a, c, g, or t
  misc_feature (279)..(279): n is a, c, g, or t
  misc_feature (281)..(282): n is a, c, g, or t
  misc_feature (287)..(287): n is a, c, g, or t
  misc_feature (289)..(289): n is a, c, g, or t
  misc_feature (318)..(318): n is a, c, g, or t
  misc_feature (320)..(320): n is a, c, g, or t
  misc_feature (327)..(328): n is a, c, g, or t
  misc_feature (335)..(335): n is a, c, g, or t
  misc_feature (343)..(343): n is a, c, g, or t
  misc_feature (349)..(350): n is a, c, g, or t
  misc_feature (365)..(365): n is a, c, g, or t
  misc_feature (386)..(386): n is a, c, g, or t
  misc_feature (393)..(393): n is a, c, g, or t
  misc_feature (403)..(405): n is a, c, g, or t
  misc_feature (407)..(407): n is a, c, g, or t
  misc_feature (409)..(409): n is a, c, g, or t
  misc_feature (457)..(459): n is a, c, g, or t
  misc_feature (462)..(462): n is a, c, g, or t
  misc_feature (514)..(514): n is a, c, g, or t
  misc_feature (874)..(874): n is a, c, g, or t
nctcacggtacaagacaattgtatttaacattgttataaataaaagggcatcagatcaatcattatgggctccagagtgaacagcatcttcataacttccatgtttntcatctttactttctggntgtaatttaataagatcatcaattcgaagaatggtgattgcngcttctgttgcaaatttcaaactcttaactttaactatggttggctcttacacccctgcttgtctgtcgtctcgnggnttaccattgctcaaatcaagaccantccattttncnntttcncnttctgggttaacctgggcctcattatganangctcttnnttttgcnaccagatntgtggnnttctgggctgttttntttgctagtgttttgggaatnacaagangtggtcttgnnngntntgcaatcgcaaggggttcccgggggcccatgctggttgcgtagttttnnnggnatatgggaggggctgcttctacagcacccccaccggggaccacaggttttgngtccaaaagtgtcttcactacacaaagtgcatcatgtaaagagcgctccatctcatcacacatgagatcatttgcgccacgtaagagagtcgatgcagacgtacgagccttagtatttttgattaagatcagctcatcatcacaaattctctcctgtaccacttcttctgcctgtcccaacattgcagcttcaaaagtttcttcaccttccaaattggccagggttgacagaatagttgctccagaagctttggcaatgcgtttaaggtccctttttaaaactcttctaactgccatagcaccagcctccacaaaatacttcagacacatatcatcaattccaccagtggttagaataanattggga

SEQ ID NO: 685748 - DNA, 554 bp, Homo sapiens
tagttacttactattagcctggcctttcttaggggatctgatgttatctcgcttgcgccaccattttccctcggtttttgcctataatgggtattatactatacgctgggctcaatataagaatttgtcatacccgtctgcaacggctcgcctctttatcaccaatattgggggcaagtcacaaccaagtggttttgtcagaccatggataccgaccggggtggctttatacccttggaggttagcatattacggccaacaacaaaagtggtctagagctacatgcattgccgatcgacgactacctatggttagactcatcgtctccctccgcatgttggctacacgcgccacgtacagcggattgccacaataaaccaataagttgggactaccccttccccccccactggcgtatttatatggatgaaccccgataagtaattgtcagccccagggcaaacgtacccgccgtatatgacggtgcgcaccacaccatttctatgtagtgcccccttaacccccccctttaacccaccctctcccccccccaa

SEQ ID NO: 685749 - DNA, 1221 bp, Homo sapiens
  misc_feature (407)..(407): n is a, c, g, or t
  misc_feature (661)..(661): n is a, c, g, or t
  misc_feature (679)..(679): n is a, c, g, or t
  misc_feature (681)..(681): n is a, c, g, or t
  misc_feature (691)..(691): n is a, c, g, or t
  misc_feature (703)..(703): n is a, c, g, or t
  misc_feature (722)..(722): n is a, c, g, or t
  misc_feature (724)..(724): n is a, c, g, or t
  misc_feature (784)..(784): n is a, c, g, or t
  misc_feature (806)..(808): n is a, c, g, or t
  misc_feature (845)..(845): n is a, c, g, or t
  misc_feature (847)..(848): n is a, c, g, or t
  misc_feature (851)..(851): n is a, c, g, or t
  misc_feature (863)..(863): n is a, c, g, or t
  misc_feature (870)..(870): n is a, c, g, or t
  misc_feature (872)..(872): n is a, c, g, or t
  misc_feature (885)..(885): n is a, c, g, or t
  misc_feature (895)..(895): n is a, c, g, or t
  misc_feature (898)..(899): n is a, c, g, or t
  misc_feature (902)..(902): n is a, c, g, or t
  misc_feature (921)..(923): n is a, c, g, or t
  misc_feature (926)..(926): n is a, c, g, or t
  misc_feature (953)..(953): n is a, c, g, or t
gagaggggcgctggcgcggggctgagccgcccgggatcagcgcgagcacccagcccgcctcggccgggagggcagcgcggcactgcggggcgatgagcggcgcccggggcgagggcccggaggcgggcgccggcggggctgggggccgcgcggcgcctgagaaccccgggggcgtgctgagcgtggagctgcccgggctgctggcgcagctggcgcggagcttcgcgctgctgctgcccgtgtacgcgctgggctacctggggctcagcttcagctgggttctcctcgcgctcgcgctgctcgcctggtgtcgccgcagccgcggcctcaaggccctgcgcctgtgccgcgcgctggcgctgctggaagacgaggagcgcgtcgtgcgcctgggggtgcgcgcctgngacctgcccgcctgggttcattttccagacactgaaagagcagaatggctaaataagactgtaaaacacatgtggcctttcatttgccaatttatagagaagttgtttcgagaaactatagaaccagccgtgcggggagcaaacacccaccttagcacctttagtttcacgaaggtcgacgtgggccagcagcccctcaggatcaatggtgttaaggtatacactgaaaatgtagacaaaaggcaaattatttncggaccttcagattagtntngtaggaaatngtgagattgatntggagatcaaacgatattntngtagagctggtgtgaaaagtatccagattcatggtaccatgcgggtgatcctggaaccgntgattggagatatgcccttagnnnggagctttgtctatcttcttccttaggaaaccacttntnncanattaactggacnggactgncnaatcttctggatntccctggatngannggnttaatcagatactatcatnnnggnatataatatcaaactatctggtgcttnccaatcgaatcaccgttccacttgtcagtgaagttcaaatagctcagttgcggtttcctgtaccaaagggtgttctaaggatacattttattcgaagctcaggatcttcaggggaaagacacttaccttaagggactctgtcaagggaacagtcagacccctatggcaatcattagagttggcaaccaaaatcttccaaagcagaagtcctcacggagaacctcagtccaaagtggcacatgaagtctatgaggctttagtgtatgaa

SEQ ID NO: 685750 - DNA, 863 bp, Homo sapiens
  misc_feature (303)..(303): n is a, c, g, or t
  misc_feature (321)..(321): n is a, c, g, or t
  misc_feature (323)..(323): n is a, c, g, or t
  misc_feature (333)..(333): n is a, c, g, or t
  misc_feature (345)..(345): n is a, c, g, or t
  misc_feature (364)..(364): n is a, c, g, or t
  misc_feature (366)..(366): n is a, c, g, or t
  misc_feature (426)..(426): n is a, c, g, or t
  misc_feature (448)..(450): n is a, c, g, or t
  misc_feature (487)..(487): n is a, c, g, or t
  misc_feature (489)..(490): n is a, c, g, or t
  misc_feature (493)..(493): n is a, c, g, or t
  misc_feature (505)..(505): n is a, c, g, or t
  misc_feature (512)..(512): n is a, c, g, or t
  misc_feature (514)..(514): n is a, c, g, or t
  misc_feature (527)..(527): n is a, c, g, or t
  misc_feature (537)..(537): n is a, c, g, or t
  misc_feature (540)..(541): n is a, c, g, or t
  misc_feature (544)..(544): n is a, c, g, or t
  misc_feature (563)..(565): n is a, c, g, or t
  misc_feature (568)..(568): n is a, c, g, or t
  misc_feature (595)..(595): n is a, c, g, or t
ggcaggttactgtttctagaagagcaacaccaatgcaagtgaataagcaccaccttgtgagccggttcattttccagacactgaaagagcagaatggctaaataagactgtaaaacacatgtggcctttcatttgccaatttatagagaagttgtttcgagaaactatagaaccagccgtgcggggagcaaacacccaccttagcacctttagtttcacgaaggtcgacgtgggccagcagcccctcaggatcaatggtgttaaggtatacactgaaaatgtagacaaaaggcaaattatttncggaccttcagattagtntngtaggaaatngtgagattgatntggagatcaaacgatattntngtagagctggtgtgaaaagtatccagattcatggtaccatgcgggtgatcctggaaccgntgattggagatatgcccttagnnnggagctttgtctatcttcttccttaggaaaccacttntnncanattaactggacnggactgncnaatcttctggatntccctggatngannggnttaatcagatactatcatnnnggnatataatatcaaactatctggtgcttnccaatcgaatcaccgttccacttgtcagtgaagttcaaatagctcagttgcggtttcctgtaccaaagggtgttctaaggatacattttattcgaagctcaggatcttcaggggaaagacacttaccttaagggactctgtcaagggaacagtcagacccctatggcaatcattagagttggcaaccaaaatcttccaaagcagaagtcctcacggagaacctcagtccaaagtggcacatgaagtctatgaggctttagtgtatgaa

SEQ ID NO: 685751 - DNA, 643 bp, Homo sapiens
  misc_feature (407)..(407): n is a, c, g, or t
gagaggggcgctggcgcggggctgagccgcccgggatcagcgcgagcacccagcccgcctcggccgggagggcagcgcggcactgcggggcgatgagcggcgcccggggcgagggcccggaggcgggcgccggcggggctgggggccgcgcggcgcctgagaaccccgggggcgtgctgagcgtggagctgcccgggctgctggcgcagctggcgcggagcttcgcgctgctgctgcccgtgtacgcgctgggctacctggggctcagcttcagctgggttctcctcgcgctcgcgctgctcgcctggtgtcgccgcagccgcggcctcaaggccctgcgcctgtgccgcgcgctggcgctgctggaagacgaggagcgcgtcgtgcgcctgggggtgcgcgcctgngacctgcccgcctggacggaatctcgctctgttgccaggctgaagtgcagtggcaccatctcaactcactgcaacctccgactcccgggttcaagccattctcctggcctcagcctcccgaatagctgggactacaggcgcacaaccagcacacccagttacttctcgtatttgtagtagagactgggttcaccatgttggccaggatggtctcgatctctggacctcgtgatcca

SEQ ID NO: 685752 - DNA, 128 bp, Homo sapiens
ctacgaaaaagtccgtggataaacaagtgttagtcctctgtacatgtcaatggacacttcaattatgtgtatacagcaggaatatcttgccccactggagtcagaaaaagcaaaacaaaatctagagt

SEQ ID NO: 685753 - DNA, 328 bp, Homo sapiens
  misc_feature (9)..(9): n is a, c, g, or t
  misc_feature (84)..(84): n is a, c, g, or t
  misc_feature (106)..(106): n is a, c, g, or t
agcgaaatncccggaaggacgatctatgatacgctttattacttaaataagtaggcacccgctcccgcgatcgacagggaaagncgatcttcgtgcttcgccccgnaactacgatctactctatttatatgccggattctataggctacagaatagggcgcccattatttcggccgtgggcgggaaatctgctgcaccgaccttagaaacacctatcggaactgatctccggagcctgaagacccctgaacaaaataaccccgcattggattgtgttcttgcgagaggcacaacggcatgggccctttaatttggtaattttatcctt

SEQ ID NO: 685754 - DNA, 179 bp, Homo sapiens
aggtgagatagtgtaaatgtcattaaaaagagaaggaagagaagtaagccgagtggtgtctttgattggtgtagtaagggtggaaggtgatttaatctggaatgggaggtgattcctagtggggtgtgtcttgatccctgttacgttgcaatgaatatgtgagtgtggatgtgcttgct

SEQ ID NO: 685755 - DNA, 137 bp, Homo sapiens
acttcttatttttctatatatgtacttccttacgtgggtatcattctattcggttggatctctatctgacctagcctgcctggttatctcttgtctcgctctcttgccttatgatgcccttttctgctttcactcaa

SEQ ID NO: 685756 - DNA, 769 bp, Homo sapiens
tgctgggattacaaccgtgagccactacgcccagcctgatctctcatttttcatgacccttcgtaatatttggcagaatagtcctagtttacagatatggaagttgaggctggaggataaaatctcttgccaaaggtcacaaaataacattaaaacagcatatttcccccaccagattatttgggctacctcagaggagcagacatgcaatgtatcacagtatcacaaacccaatcaaccacctacaggcaggagaacaaacctggctaacttgagttcttatcatatgctattcaagaaacggaagttagctaaaaatctgttttgacctgctgaaggctaattttgtttagcaggagaggtgggaggtagtgaggtgggtgttaaacaatgacaaaagaagataggccagagttctgttcattattaaacaatgagtaagtaggaaagaatttctagtaaggtcaccatatttatgtgacccaggctccaccaaagtatggcctccccatttgtgcctgggtcacagcttaacataattcaccaaaaaaggtctggaaaaaaggtcaagaaactactcaccagttaatcctagcttgggataacccgtaatggaaagacttagaagaatgtgttcgacaatttaaagacagatgtcaggcattccttgtctcctcatcacacatacttctttggggcaaatgcagcttaaggtggagactgacacaatgagaaccttgtccctggctacagggcagccccctgaccc

SEQ ID NO: 685757 - DNA, 152 bp, Homo sapiens
agacaccttcaaatacacaacagcccagccaactctacaacaaggcggccagccaacacaggtgtcacgtagtggtcaatagcacctttgcctccccccatgcgatagcccaaacactaatgcgagtgatgggctaagaaaggggctggtac

SEQ ID NO: 685758 - DNA, 848 bp, Homo sapiens
taaaatttagaaacaacgttatggttatggttaaaatagtgagctctcatgagaaaagagtatgtaaaaagggccttcctacacccggggctttctcacttatcccagcagacggggactgtccctcacgtgtgtaggagggaaagttctccaccgtggctcccagaaatattaggctactccagttttactcttggattattgtgcaggcataaaaaaaaaaaaattcaaaatccaccgatataacagtctatctccctcctaggcattattagtgctcacaactcccgcacgtgggcaaccacaagagaggctgggccatcaagagtctccataatccccacaatgttaacaacgcccgagggaaatataaaagtggcacccctgtggaaaatcaacaagagggcgtaaatcccagaggccataggagcaactgaaagaaagaatcatcaagcatccaggaggagaatcgggtgagcaacaatcactagcaacggacggcgctcacccaaggcatagaacaaccaggaagaatcccacccacatctaacaggcaggcgaacaacattcgagaacgcgggggcagcgcaccgcagcaacgtaaaaacggcgtaaggaccagaacattctgtgggccacacgagggtaagaaatacagggcccagaggaaaagcccaacatgtggtcacccataccaccaataaccgttgacaagaatcccccttaaaattgagtgtcaaaggaatgagaactccaaagatgtctccaaaaggagcaccacataagtgaaaaaccgggcgccagcgaagtcctacaagggcaaaaggctcaaccaagtcacggccgag

SEQ ID NO: 685759 - DNA, 607 bp, Homo sapiens
gaaaagtcggaggagtatagcagttcatggagtctgtgtgaagatgacagttttctgtaactacagtcttggaaactatgcaaatggtctataattgctcagaaatcacatgataggaatataggagactgctctctgtgaccacctcaagagcaatctgattgagatagaacgttaaatgagtgtatctgcctggtgctgaggggccgcaagagactgtggacattgactgtgatgtgctctcatagagtatcggagatttgatagcatcatgaatgtggtcaaaggtgcctgtaataattatcattaggaggaactactagtagattatcacttctcgttgatccgttcctcttcgtcctggaacttgaatagaatattgtggaagcttaggtcacaaactgttttgtaactcctgtcctcctaaaacacgcaagccctgcagtcaatcactagtaatctgattgtgacagtctgcctgctgctcctcgtttgcccatgtctgagtcctccccatggatgattcaggaatcaaccagaagatggtggacctatggtgcatacctgttatctcagaaaaccaattcataatccttgtgtaccagga

SEQ ID NO: 685760 - DNA, 156 bp, Homo sapiens
atccccggttctacctctatgtggacacaacttcagtaagacacagcaaggacttgcagactggttgaataacttgtgattactggttatacagttccccattcctcacccctttagactttctttgcaattctttccatttcgttctctctccac

SEQ ID NO: 685761 - DNA, 450 bp, Homo sapiens
gttgatggataccatatgcgggactagtcaggatatgtctgatgtcccagtgcgtagacgatgccgggtctggatacgatgacacggcctttacgtgaatctggggtttcacattgacaagtcagagtggcagtgaagtttctaaacacatttgactgtgttatgctcaatatgatcggataatactccatgcatccccttcaagttacgtccttgataataaacgaatagccacagagtcaaatagcgagcagatttctcagtcgcaggtaacccgatctcttaaccatagaacttccggcgagggatatggcttcgacttccatagacagccggtgagaccgcttgacacctacgggtccgagcacctgctggttctcgatgttgcacatatgatgaatgcttcatcatatatatgcactgaggtgttaacggatgtgactgcgtccg

SEQ ID NO: 685762 - DNA, 175 bp, Homo sapiens
  misc_feature (8)..(8): n is a, c, g, or t
  misc_feature (47)..(47): n is a, c, g, or t
cagctcgnacccaatcaccagactttgggagggtgaggcaggcggantgtttgaggccgggagtttgagacaagcctgaccatcatggagaaaccccggccccactgggacaccgtgctcccgtctctcaggcagcgaagttcgatccatcaaccaaactctatgaaatcagcaa

SEQ ID NO: 685763 - DNA, 201 bp, Homo sapiens
cagctgtcatcacgttatttaatgaacctagtgctgacgacagtaaaaagggtccattgacagttgcacagaaaaaaacccagaacatcatggagtcctttgaaaatccattaaggatgtatctgccccactgggacaccgtgctcccgtctctcaggcagcgaagttcgatccatcaaccaaactctatgaaatcagcaa

SEQ ID NO: 685764 - DNA, 156 bp, Homo sapiens
ctagaggatccccttgagctgaaaatacccaagatgaaaatgccaagttcagcatgcccagcctcaaaggcgagggcccagaatgtggatgtgaacattgcctaagtgctgactgttgttgtctcagtgacccaagggtggagtgttgaatgtcgt

SEQ ID NO: 685765 - DNA, 279 bp, Homo sapiens
agatgaccgggaaagaaactaacattgcctgggtacttactacaggcatagcgcaacaaagcagaccagcctgggcaagaaagtgagaccccgtctttacaaaaaatttaaaaattagccaggtgtggcggtgtgcacctgtagtcccaactacacaggaggctgaggtgggaggatcacttgggtccaggaggtcgaggctgcagtgagctgtgtttgttgccactgcaatccagacttgagtgacagagcaaaactctatgtcaaaaaaagacacac

SEQ ID NO: 685766 - DNA, 235 bp, Homo sapiens
atactgacgcgatacgattggctctagatctacattcttcaaaaaaaaaaaattggcttaactgtttcatctttaagtagcatttggctgccattggtatggggctgaagaaatcactatggtgtatttactcaagtctttttattttccctcttttcataaatgctcttggactttatggggcttgcagagtccccttattctggggattacaatgcttttatcgcgtcagttg

SEQ ID NO: 685767 - DNA, 119 bp, Homo sapiens
atttccaaggttttatagaacgtgtgtgtgtgtgtgtgtagagtgtgtaaacttggctcagctagcttggtctcctgcaaatgtattgtagacggacacaattttctactatgctattc

SEQ ID NO: 685768 - DNA, 360 bp, Homo sapiens
  misc_feature (360)..(360): n is a, c, g, or t
gcaacaactgtgtaggctgttctttcaacctctttcttcttacttctttacttttccttcagagaggagaaagccacccctgtgctatagccaccgctccaattctgactctagctaggtcatgaaacagactgagctattattgcatcaacacattcctgtcatttgggtattattctttagagaactagagattacctagctgcaacctaagtttcctgaattagaatcatttgagcagcaccatcttaattggctcattcatatttgtgaccaggcacagtggcgcatgcctgtggtcccagcactttgggaggccgaggcgggcggatctcttgaggtcgggagtttgagaccgcn

SEQ ID NO: 685769 - DNA, 190 bp, Homo sapiens
tgtttctgcatgagcacctgaatgtgtctgcgttcgcatgtagcatagatgtgaggaggtggagagacagcccagccttgtgttcagtgtgaccccgtgttccacatgctgacctgtgtatcctccccagtcatctttcttgttccagagaagtggggctggatgtctccatctcgtctcttctcttgta

SEQ ID NO: 685770 - DNA, 227 bp, Homo sapiens
gcttcggtacctgtatatgctgtctcacattaaagaaatatttaatgggccgggtgaggtggctcatgcctgtaatcccagcactttgggaggccaaggcaggtggatcacgaggccaggagttcgagaccagcctgaccaacatggtgaaaccgcatctctactaaaaatagaaaaattagctgggtgtggtggtatgtgcctgtaatcccagctactcaggaggc

SEQ ID NO: 685771 - DNA, 514 bp, Homo sapiens
ctggatggttaatgttctaataccagatctttgatgacatctagtggtgaaatgtagatttatttattcactgttctcaaagttttaagatgtcaatgttgtatatatcttgagagacattgagataagttggagattgaataaaatggagaaatttggtaatttttgtcttcagcaaagataccttaaaatggttaagaacaaaggggtaggcagaaaagagataaacaacctttagtaaacatttttacattttaattctgagaaatttgtgtagagaataaaatttaaaactgtagcataatcacatcagctaaacataattgttgactgttttgaaaacatgctttcaggaatatctttgtgtttgttaattctgcaatattcacattgttttattaagatagagtcctgaactgaaattgaattgatgaaagtataagagtactttatagctttcggtagcattgccaaactgctttccaaaaagacttaatgagtgttcaaaaaaaaa

SEQ ID NO: 685772 - DNA, 184 bp, Homo sapiens
tcgattcacccaaagcagtcaacgagtgctccgtatgcgtgacgcattcatagtgtgacctctcaagaaagctcggtgttcttatgctggttggcagcctgagcatgctgctcgtcgtcatcatcctcaccctggatgtagacatcgggtaacctggcacgtttacctcacaccacttcaacgg

SEQ ID NO: 685773 - DNA, 143 bp, Homo sapiens
catgtatacatgcgcaggccgcaatcttaatcttctagacaaagagaatataaaccaaactcaagacatgaccaagtggattttacatggcttggctgtgcgcatcttcagctacctctgtaatacagtcttcctccagacaa

SEQ ID NO: 685774 - DNA, 251 bp, Homo sapiens
agggtttacctcgaaagaggtatctcctattcttgtccttcagcgtgcgatgttcggaagagctatcccgccaggcctcccagaagcatctggctcgctgccatctagcacctgcacaggttgggccgcagaaccctgagcagctactggggccccgtctactctgcctcgctagctcctgtacccacccacaggtaggcggctagagggggttttcagaacaaaggcatacgttggagttcagtgcacca

SEQ ID NO: 685775 - DNA, 479 bp, Homo sapiens
atgtttgtgcccactctcatattcatatattccaatattaaactcttctgtaattgtcttaagaggtggggcctttaagacgtgattatgagttaccgcttcaaccctctggaacaggattagtgccctttcaatcgagggttaccttgctctttcctctatgtaacgacattccaataggcaccatccgtgaagaagcatgtccccaccagacaccaaatctgctggtgccttatcttggactttgctgcctccagaacagtgagaaataaatttctgttgtttataagccacccagtccaactaagacattaaggaccagtcacgtaatacagactgtgtggcaagagatgagactggagacagagaggggcaagatcacagagattttatgccaaaagaatgcagtaaaacagaattagtaataaatctccagtactacaacatcttggaaaataaggatcgattgccttaccctg

SEQ ID NO: 685776 - DNA, 446 bp, Homo sapiens
  misc_feature (117)..(117): n is a, c, g, or t
tctaccaggacacctacaggcagcatctacacggcgtatcttgcctctatatgctctcttctgtctctgggtggctgtcagtcattgcaggccatcagggcagcctggagaagagancagagtaggagttgcgagagcagatctacctcctccgtgttgtttgttgagacagagtctcactctgtcaccaggctgagtcagtgttgactcagttgattgatctcggctctgaatcagcgattctctggtcagcacctgagtagcttggattacaggacttgccaacactcctggttattttgtatttagagaatgggggtctcatgtggcaggtggctcggactcttgactcagtgtctgtcacctggtctcccaaaatttggatacaggtgtagtacgtgctggcctccatttttgatcacagcaagactggagtatggcagctt

SEQ ID NO: 685777 - DNA, 844 bp, Homo sapiens
ccgaccggcaggccaggtccccagctcgccgcgacccacacatgagtcgaaaaaacgagactcaacgtaggcgtaatacgctacttcgtgcggcaaacagacacgactgtcttctctaggctacaaaactccaacacgcacctgctcggggaccatctccttaaccgcaaccagcagcaaccaagcccgcacggcactgcagcgcgtaatcctgcccaccgaccaacacaccagctgacatcgacaccccagctgatctcccaacaccgacacgcctccactcacaacacatgcggcataaccgcctgcccaaccgcacagcagaacacaagacgacaccccagcattcagtgccgacaccgcgacgcaacggctacaacccgacacagcagacaaccataacaccacacacccacaccgcacgcccgcactaccagacgcactcacacccctgccaccgacgacccaccgaccacaacacccagcaaccacaacccacccaccaacccacaacccacgccagcgtcacggctcgtcggcctcgtctcctgtctgcgcctcgataggcgtgactccacacaccgatcgttctcttcactcactcatcacgcactccttacctactttctctctcactacccatccgccacgcacctcaactatcttccccatacacaccacctactgccaaacatcagtcttctcaccatctctaacatcaacacaccccaacaatactcgtcatctcccgacaccccatcacgccccctgtcaccctccttcatcatcagttcctctcctacctccctatccccaccgcttcacccactcttacactcactcc

SEQ ID NO: 685778 - DNA, 231 bp, Homo sapiens
aaatcaaaaccccccggggtaaaacaggccggtttttgttttcttatttttaaaaggctttgggtttcctttttaaaaataagggcataacccccctttccccttgggggggccttcaccatccggctttggcctttccaatgaaaaggggtactttaggggttttatatatataaaaacaaatacccctttgtcccctttatccggtaaataaaaaagttgttttggtca

SEQ ID NO: 685779 - DNA, 141 bp, Homo sapiens
cacttccttgatgacgcggttgccgctgcgggtccaggtgatcttgtgatactgcggattggccggatcgccctcgacacgttcacgctgggagaaaatcacaccatcgtgaaggtaccaggaaacggcctcgatggcctc

SEQ ID NO: 685780 - DNA, 496 bp, Homo sapiens
  misc_feature (409)..(409): n is a, c, g, or t
gcacgagaaaacctatatgaagaaaagagactcacattatgctaagtgaaataagccaagcgcagaaggataaatattgcatggtgtcacttgtaggtggactctaaacaagttgaactcatggaaatagtagaatggtgattgcaggagtaggggttgtggtggggaacagggagttgctggttaaagggtacaaagtttccgttaggatgagtaagttctggaggtctaatggtagaacatggtaattactgttaataatgtatacccaaagatttctaagagcgttatcttaaatgttcttaccacaaaaaataaaatacttatgtgaggtgatagataagttaattcacttgatggtggtaatcatttcacagtgtatacataaaaacaatatgtcgtacatcgnatatatatatgtgtgtgtatacgtgtgtgtgtgtgtgtgtgtgtgtgtatatacacaattttaatttgtcatttatacttcttcaat

SEQ ID NO: 685781 - DNA, 260 bp, Homo sapiens
gacaagttgggatattggcaagacttcgtcgcctgggaagagcggtctcatgtctggacactccctgccttcataccctgtctgaaacttgtatcttacgtgaacttaaagaatacaatgcatttctaccccgatctcgcccgcaggactggcacgacaggtccacggcagcattagatcttttcccagtcctgatcggtgcgtggacatccagccaccagttctgattcgattccacagtgatcctgtcctctgagtat

SEQ ID NO: 685782 - DNA, 108 bp, Homo sapiens
ccttatcttctgcgttcggtcttctgtcaccatccttcttttcttcttcctcatcagaaccaacatcttcaatttgcaggtatgtcttccgacgtctttctctatctt

SEQ ID NO: 685783 - DNA, 300 bp, Homo sapiens
gaggtaaacgaccggcagtgggtggagagcttttgctgtgggtcggtcaagacagctacttattagtcgttcgccttcggggccccagcggcggcggtgaagagcccgccctgtcccagtaccaggtaatgccaggccgatcttggaagtgaccctcaccgggatcggaaccagtcttttttgttccttgctcctcttggctgtttttcatcttgtggcaggcgttccagcggattgactccgacgctgccatacgcggtcgcggggactcaggctctctcgatgcttacggcctggagg

SEQ ID NO: 685784 - DNA, 1021 bp, Homo sapiens
  misc_feature (163)..(163): n is a, c, g, or t
  misc_feature (165)..(165): n is a, c, g, or t
cccgtgagtccggcgcgcagaggaggggagaaagctgaccgcttaggcccgggtagtggtcgtcgtggttttccttgtagttcgtggtctgagaccaggcctcaagtggaaacggcgtcaccatgatcgcacggcggaacccagaacccttacggtttctccngnatgagcccggagcctcccccgccaagttgaccgaccctgctggctcgctctacatctggcttcttgtggctacttgctcctggcctgatatgataacctagatcctggcaggagtgcctgatctgctgactgtgcttggtttagcattcgccagactatctatatattaactgggcgcttataatttaattggctgggatcattatactttgtaaaagcgtgcaagactacctggtagtgctagtgacgggacccgctgaaactgtactggggactatactcgaacacttaacattcacaggaagcgacttatctccctgacacgaacgactaaggaacagacactactgggttggacaaatgtaatgcgggacaaacatttaccaatacacgaaaattaacgcggttatggcaaaagggtccgtatacaaaagaaagtggactttggacttccccagattattccaacattggacttacactgggcctggtatcccttggacacttccggaattgcgacacacaactggcttccctctaattgacacaggtttgggccacggccttactggccctacaactcctaggctcacatggctatacacgcacccccccgtttggcctacacagttgacaaaagacgaattaaacgcgcgatttaagcgccaagtttgaaccgcttttaaccgatcccacttgggacaccatcaccgtttttagagttttgggggtagcgggctaaccaggcgtgcaactacaaaagatttcaggttctaccaaacttccaaactttcacacgcaacgaaccgcatcggggggctccaacggacataacgcccatatcccacagaccgct

SEQ ID NO: 685785 - DNA, 270 bp, Homo sapiens
  misc_feature (163)..(163): n is a, c, g, or t
  misc_feature (165)..(165): n is a, c, g, or t
cccgtgagtccggcgcgcagaggaggggagaaagctgaccgcttaggcccgggtagtggtcgtcgtggttttccttgtagttcgtggtctgagaccaggcctcaagtggaaacggcgtcaccatgatcgcacggcggaacccagaacccttacggtttctccngnatgagcccggagcctcccccgccaagttgaccgaccgggcttctttaaaacgcttttgggctattctccgtcttattataacttatcggggagctataagcgcca

SEQ ID NO: 685786 - DNA, 130 bp, Homo sapiens
gtaacatgacaacatactcctccgcataagcctgcgtcagactaaaacactgaactgacaattaacagaccaatatatacgaacaaccaacaagtcattatataccctcactgtcaaccacgacacagtg

SEQ ID NO: 685787 - DNA, 523 bp, Homo sapiens
ccggccgggatgaaaggtcttacaagataaacacagtgaaaaagcttcaaactgcagttcttcacaagtaattcagcatatatcatatatcatgtatacttatggcttaagaatgtaaagcaagtatatttattacgctgatggaaatatgggaaatctctcattcatgcaatatacagggataatattcaagcgaagggaaaattcccgctgttaatgtgagtagatgtatccatatataatcatcgacatgacagatgaggaaacccatgaaggtgcccagtagtcagatatacatgttctgttcatcagaagcacctgatatctagcagctaatttataattaggatactgtgtcaatgaaaccaaaatgagccctacaagtgcctataaacaaaagcttccaaggtacgaggacagtcagtaattcatgcatcattcagaggattatggctgtcccttaagaagtgcaaggtcgaacctgtcaacaccagaggtaatcatttcatattaatttatacgt

SEQ ID NO: 685788 - DNA, 1050 bp, Homo sapiens
cagctacgttggcgaggctgattgcagtgagcaatgggctgtaagccgggaggcggagcttgtcagatgagtccgagaatcgcgaccgattgcagctccagacctggtgcgacgcgagaatgagagtaaactaaacatggaaggaaccgttgaattctcggaatccccaagtaagattaatttcactgtctgagggtagctattttgtgcattcgcagattcgagggtagcgatgtctaaggatagggacgcgtgaaaaaatcgcgattcctaatacggatgacacttttcagagaaaggctgcatttgtggttagacacttcccttcgttgatgtcctatagactctctgggcgtagaagtgaatacggtcagcttattacacattagatgaatcacttgaaccaaactggagaaggaggattcctggtccctggtagccccccaatatctaccccattcttttggtaacaggggttcgggacaagaaaagttctgagagcccacggtgcattcttacaatcatcgggtgagcccatgggtacctcagagcacgagaaagctcgactgttcatagctctaggaatgttgaagttcccgagaaccgagactgtgttggcacagcataaagatggtactatcgtaatgcaagtggttgtgcaaatcacgggactcaggggacttcaagtcctgggggccctctgcgtatgatctgggagtgcgctcagggagtattacttctgttgacccctacggcgtcggtgatgtgggtctcgttgggtcacaagaatcggttgcctctggaagtcgatactcgggccgttaccatcaatcgttatccatcggctaacgtcgggtctcgtccccaaggggagcctcttctagcttggttgcccggcgggcgtccacgggaccggttgggccacgggggtccgctgtggtgtgggttccaggcgcccggcgcgtcccacgatttccctggtccaaggcttggttccctttctgcccgtgtggaggggggcgttgtcagcgctcgaaccgcgagcttccc

SEQ ID NO: 685789 - DNA, 117 bp, Homo sapiens
atacccggtgggcattactatgtgaaaaactataatatcacaaaacagataccataccaacataaggataaaacgtaaatggaaattatacacacttgtgataaacttcacacatct

SEQ ID NO: 685790 - DNA, 1049 bp, Homo sapiens
  misc_feature (319)..(319): n is a, c, g, or t
  misc_feature (329)..(329): n is a, c, g, or t
  misc_feature (331)..(331): n is a, c, g, or t
  misc_feature (334)..(334): n is a, c, g, or t
  misc_feature (337)..(337): n is a, c, g, or t
  misc_feature (342)..(342): n is a, c, g, or t
  misc_feature (346)..(346): n is a, c, g, or t
  misc_feature (350)..(351): n is a, c, g, or t
  misc_feature (384)..(384): n is a, c, g, or t
  misc_feature (433)..(433): n is a, c, g, or t
gcttatgttgatgtgaccacttacttgctttcctgcctccttgaacagacaccgaccagaacgaacactgtgtctttcgccactagatttatcccatgctgcaaactcatctcattacccttttcatgggtttgaagctgctgtctctacaaggtgccagtctcaattcgtgcgtattgtatcagtcagtgctggacaaatcttgaatagcttatgtacaaaactttttaaattcttatattatctctgtgaaactttgctttgggtttgtggcatccctggccaccccatctggctgtgacagcctctgcagtccgtngggctggcangnttngtngactntttnaagnnttccttccctacccagtccccattttctggtanggtttctaggaggtctgttaggtgtacatcctgcagcttattggcttanaatgtactctccttttatgtggtctctttggggccgattgggagaaagagaaatcaatagtgcaactgtcttgatactgaatacttgacaagtgtctttcccgaaataacagaatccatgtccgctctcgaaggagaatgagacaataacacatagcctcggagcgccctattaatgctggggtgccgaggacaacgtggttgtcaaggtaacgcggtccatggtccctaaagtgactcccgttctcccatgatattccttgccactagtcggcagcactagccgaggacatccatcatatcatgtcactgctgatagcagaaacaccgcactacacaccagaggatttcccccgtctgatattccccctcgcctgaaaaagacaacttaactctccactttccagttcccccgacaaaacactataaccttccccgtaaagtcatcttcaagcgcccccataaaccacatatttccacaagcaacccctactcccccttggtctaacctgtcatttacacacatgatcacacaccatagtacccccaccaatctcaactccccccaattactcccgcttctcccaatcctattccccccaactccaagttccccc

SEQ ID NO: 685791 - DNA, 295 bp, Homo sapiens
cgctgcgacttgcacacgcacgactcgctgctcgtggtgtgcgatgactacagcctctacgacatacgtcttgttttttaaacgcctcgcgggcgccttcacctctcatcctcaacttctagagggactgggcgattgcacattatggaggagatgtgcgcgctcagcttcaggcaagagctcgactactggggcatcgacgagatctacctggcgtcctgctgacagggccgattacaacagaagaaaaaacagatgaacgaggagctcaagcgtgaaggcgagaacctacagg

SEQ ID NO: 685792 - DNA, 329 bp, Homo sapiens
  misc_feature (264)..(264): n is a, c, g, or t
gtgggcgtctgagtctcccaaagagagtcctccagcaccacccctccaatggagatcagctcctctcgtcggaccaagtggacccgccgaaccaccgacaggaagagggagtccggaaaactctgaaggatgaccggaagggagacttctcagagaatagagacggtgacaagcgggaagattgggaggacaacagcacacctgaaccaaaggaaaagggggaggaaggctgtcatcaaaagggtctggccctcccggtagtgnaagagggggaggttctctcacactctctagaagcagagcacaggttatggaagggtaccgagctc

SEQ ID NO: 685793 - DNA, 175 bp, Homo sapiens
cctgatgctgctggcgatctagagtatccccttgatgccaatcttggcggctacaacgttatcgtcacagcccatgcatttgtaataatcttcttcatagctaatacccatcataatcggaggctttggctactgactagattcccctaattaatacggtgcccccgagtatggc

SEQ ID NO: 685794 - DNA, 147 bp, Homo sapiens
tataggcgctagtgtgcctaggttctgtgagctgtagtcccagctacaaggtgggatggattgcttagcgcctgggtgattgaggatgcaatgagctgtgatttgtgccaccacactccagcctggccaatacagcaagactgtctc

SEQ ID NO: 685795 - DNA, 300 bp, Homo sapiens
  misc_feature (34)..(34): n is a, c, g, or t
  misc_feature (73)..(73): n is a, c, g, or t
  misc_feature (86)..(86): n is a, c, g, or t
cctttccaagcagacgttttcccaccgcatgcgntgcaaggcttgctggtgtttgtcctgcctttcgagccantaaggtggagcangcttagcgcagtgctcgggccaaagtgtggaggaaggcctgaatttgccctgtgaaagctgggggttggcagccaggaatattcatggagcccctgaccatgtactcacactgctcttcctcagttcaggggtcttggatttgctcaaggccacccaaatatccctttacgattctcagggtcccactccttccagatccaatgccctaaactt

SEQ ID NO: 685796 - DNA, 851 bp, Homo sapiens
  misc_feature (24)..(24): n is a, c, g, or t
  misc_feature (66)..(66): n is a, c, g, or t
  misc_feature (89)..(90): n is a, c, g, or t
  misc_feature (110)..(110): n is a, c, g, or t
  misc_feature (137)..(137): n is a, c, g, or t
  misc_feature (181)..(182): n is a, c, g, or t
  misc_feature (194)..(194): n is a, c, g, or t
  misc_feature (262)..(262): n is a, c, g, or t
  misc_feature (445)..(445): n is a, c, g, or t
  misc_feature (501)..(502): n is a, c, g, or t
  misc_feature (509)..(509): n is a, c, g, or t
  misc_feature (519)..(519): n is a, c, g, or t
  misc_feature (551)..(551): n is a, c, g, or t
  misc_feature (568)..(568): n is a, c, g, or t
  misc_feature (624)..(624): n is a, c, g, or t
  misc_feature (755)..(755): n is a, c, g, or t
  misc_feature (850)..(850): n is a, c, g, or t
tagtgaaaaacacagtactataanctaactgtgtgcacacagttttaacatagtacataattattncacgtacaaacctatttggagannctgttagacttttaacaaanacaaacataactgtaatacactgatgncaagaatggatggagcatttctgagttaacagtgctggacagtnncgtactgggtgncataaactctttatgaatggtaatattatgtaaattgaaatctggccctcaaactatattgcagctcncagcagtatgtttgaagaccacttttgttaatgattctgtaatgtatgaattatgttcttgagtggttaaaaaagaatatgaaggcttgataattatttattgggtaaagtcaggaaattgtagtgaaagaactaatggttttgttttttggaataaaggcacctaagctattgctaattganttgctgctagaattagaaattatgctttagaatagaattggtatttctgtgattcnntttgctncttggtattntctcttgtatctatgtatctagtattgaggcntgctctttcatgtggcnttatcctctctttaatagctgttgtaaaattcctgagtaactggctgcttcaggancagcttgcagagtcttgcttttaggttagatacaaacaaagtaaatcatagttggtgtaaatccagcaaaaaacagctggctttggaatggagaacactacaattcaaatttgaagtatattcagaagaanactttggaattagctttacatttgtttgtaaatctaaacaaatatgcaaaattggtcaaaatgtaagtatatagcatttttaaagattaatggtnc

SEQ ID NO: 685797 - DNA, 220 bp, Homo sapiens
cgacttagaacaagtcacttagtctaggtcccaagcccctcttctgtaaagtgaggatactgttactaaacgtgttttgtgagggttgaattccttatgcaatgaaggaaccctttaaggtaattttaaaattttttaggaattggtacacagtgtccttctcttcacattctctgtgtgtctctgagaaatatgagaaaaggttgatatcatctgcaca

SEQ ID NO: 685798 - DNA, 140 bp, Homo sapiens
ggaaaccaggacgttaaatccacacatattaatactaaccttgaatatcaacagtctaaatgccccacttaaaaggcatggagtgacaagctggataaaaaagcaagactcacacggtaatgctgtcgggctagtcgggg

SEQ ID NO: 685799 - DNA, 803 bp, Homo sapiens
gatggacaaatcttatttggcttaatgtgtttgtgtgtgtgtgtgtgtgtgtgtgtgtgtgtgtgtgtgtatgtatatatatatatatacactatctctcccaatatgccccgtggaccagtgtataaatcccagcacaaagagctggctgatctgcacaactataagttatgctggatactgcgacgcactataatatacactcagaggtacagacggcgctgctgctctcctccgctgccaaagacggcgaggctgtgagccagagctcctctcactatacagagactcacctagtgtatagcagcacaacaggggttgatccaacgatgagaaagacgatgaggcagcagtgtcgtagtaatagtgtctgctgcaggcggctagcaccagtgctagacgaaggtctacacaaaacgacatagcaggggccccgtagatcctccatcgaacaagaaagtaaagaaggttagagcaacatagagagcgagccacatcccatacgagaatgctaatagtcgtaggagcaaaccaaaaagtccatccaaaataggaaaaccaaataatagcggacatagataacggcctttccatcaatcaatatacaaaacaagtcttaactgcaaacacttaggataaattaaaatacaaacaaccccatttataaacagaccaaccacacacacaaaccacaaaacacacaacacacacttcatataaaataaactaataaaaaaaaaaagcaacgaaataaacaccagtaaccacacaaaccagcaatcaacaccaacaaacacaaaaaa

SEQ ID NO: 685800 - DNA, 928 bp, Homo sapiens
  misc_feature (16)..(16): n is a, c, g, or t
  misc_feature (60)..(60): n is a, c, g, or t
  misc_feature (169)..(169): n is a, c, g, or t
  misc_feature (285)..(285): n is a, c, g, or t
  misc_feature (844)..(844): n is a, c, g, or t
cccccttctctctccnccttcttcttcttctcctatttcgtgccactctgccctacgtgntttaacgttgggcgttatctgttgagtttttttgtctggagtagagacaactctcatggcattttaacttggccgtccagaagcgtcagcaacccctgctttcctttgncttttccatattcttcgttttttatttattttaattaaagaatcagcatatacgagcacgcgaaacataactgtgcgttcctcatcttcgctcccgttgtgaataaaaagaaagangttctttgtttattgtttttttttttctgttatcttactttccttttcttccctgccactccatcatccacaccacttttctttcctttttctcgtgtctgcgagagaagtttgaaaagtaagacgatagaagagccggagcagcgaggagtgatggaggactggacggtagtcgcgggagaagagaaataagggcaaatcagcaggataggtagagataaataatgctacgcaccggctccatattagagtctcgctgtcttttaagagaacctctcatttttatatcaattcttattactttatgtcaatcattatcctattaattcctccctccgccatcccctcttgtcaaacaccactcgacttccacctcgataaaacgcaatacaaagcagataatatttttatctccctataaccgaatgaactaaggttcagccaccgtcttcccgttttcatgaacataatagtaatataatgtcgtatttcgctatatactccgacgtaccttctgattcaactctggcgacgctaatatctccgccaatttgatctngcatagaaccaacgtaggagatcactgcagcgagtcatcaacaacctacgaccgcttactctccctcttctcgttaatgaagtt

SEQ ID NO: 685801 - DNA, 160 bp, Homo sapiens
tggtttttctgtaaataaaaaattgaaataaaagccccacaagggactcgtaatgccctaatttgctttttagccaactttgttaacggttataacagattgttgcttctttaaaattttggagtccttgtaacccaataaataatttaggataatttga

SEQ ID NO: 685802 - DNA, 100 bp, Homo sapiens
aaggctaggtagcgaggccgggtgtttagcgaagcgtctgcgaccgtcgtttgagtcgtcgctgccgctgccgctgccactgccactgccacctcgcgga

SEQ ID NO: 685803 - DNA, 312 bp, Homo sapiens
  misc_feature (192)..(192): n is a, c, g, or t
gtgccgcagggttcagagcaagagagccctgtggagagggaaaaaaaagagaaaaataagcgctgccttgttgggtgttataaagacgccagaaagaagcccctctctgtggtggggaaaaaagcgcacccagcggtcccaagaaacccacccccctgtgaaaagagcccttccagagaagacaccctctanttcaccaaaaggggaaaaaaccccctgcatataaatttttaaattggattttcccaaaagggccaatcattttgggcacactttttttgaaaaaaaacccggttatacaggccgggggga

SEQ ID NO: 685804 - DNA, 1024 bp, Homo sapiens
cagccttccccgacgagcggacgcggagcgcctctgtctcgctttttcttatttttcccccctttccccgtttcttattaacacattatcttagctacccagtcccaacgcatcacacaacataaccacactgagaggaagcaacaccactgggcaaggcgagcaccacgcggacaacaccacaaccacaccagcgccaaagacgccacagccgacacaacacaccaacccaccacccacaccaacgaccacaccgcacgcacgacacacgacagccacacacacacaccaacaccacagacaaccacgaccacaaaacagacaacaaaaccaaccgcaccacccaaacacacacacgccacccgcgcccccaccaacgcacgcgccacgcacagcgacccacccgcccaacgcacgccccacataccccgccacaccacacgcaaggcccgtcgcaccccgaccacaagacaggcacaaacgcagggccgagacaccagatcgacacacgccacacccacgacaaccctcaccacgccgacaccacacagacagcacggacgacccacgcagcccacaccaccgaacgaccacaccagccgacccagagccaccgcgacaaccgacgagaggagaacacaccgacctaccgacacaccaccgatgcgcacacacgaggaacagggaacgaacgcagaaggagacaagccgcacagacgaccaacgacccacagcaaccaccacccgagccaccgcactccacacctctgagccacagagcacacagcgcggccacacgacagcacacagaccgacacaacacgcccaacagcgccgaacacccagccgacaccgccagccacagcagggcgccaccaacgaacccacagaacgcacgcgacgacaacggagaccagcgccagacaaccgactcgcacggcacaccgcacaactcgaccacgcccgcagaccaagctcaccccgcgaccagccaccggacgatgacgagacgagacagcgaaga

SEQ ID NO: 685805 - DNA, 915 bp, Homo sapiens
  misc_feature (10)..(10): n is a, c, g, or t
  misc_feature (18)..(18): n is a, c, g, or t
  misc_feature (20)..(20): n is a, c, g, or t
  misc_feature (25)..(25): n is a, c, g, or t
  misc_feature (45)..(45): n is a, c, g, or t
  misc_feature (47)..(47): n is a, c, g, or t
  misc_feature (115)..(115): n is a, c, g, or t
  misc_feature (145)..(145): n is a, c, g, or t
  misc_feature (166)..(166): n is a, c, g, or t
  misc_feature (201)..(201): n is a, c, g, or t
  misc_feature (220)..(220): n is a, c, g, or t
  misc_feature (223)..(223): n is a, c, g, or t
  misc_feature (226)..(226): n is a, c, g, or t
  misc_feature (260)..(260): n is a, c, g, or t
  misc_feature (264)..(264): n is a, c, g, or t
  misc_feature (346)..(346): n is a, c, g, or t
  misc_feature (378)..(378): n is a, c, g, or t
  misc_feature (382)..(384): n is a, c, g, or t
  misc_feature (390)..(390): n is a, c, g, or t
  misc_feature (392)..(392): n is a, c, g, or t
  misc_feature (406)..(406): n is a, c, g, or t
  misc_feature (420)..(420): n is a, c, g, or t
  misc_feature (430)..(430): n is a, c, g, or t
  misc_feature (434)..(434): n is a, c, g, or t
  misc_feature (437)..(437): n is a, c, g, or t
  misc_feature (444)..(444): n is a, c, g, or t
  misc_feature (447)..(447): n is a, c, g, or t
  misc_feature (462)..(462): n is a, c, g, or t
  misc_feature (487)..(487): n is a, c, g, or t
  misc_feature (499)..(499): n is a, c, g, or t
  misc_feature (513)..(513): n is a, c, g, or t
  misc_feature (515)..(515): n is a, c, g, or t
  misc_feature (517)..(518): n is a, c, g, or t
  misc_feature (522)..(523): n is a, c, g, or t
  misc_feature (525)..(525): n is a, c, g, or t
  misc_feature (545)..(545): n is a, c, g, or t
  misc_feature (552)..(552): n is a, c, g, or t
  misc_feature (558)..(558): n is a, c, g, or t
  misc_feature (570)..(570): n is a, c, g, or t
  misc_feature (576)..(576): n is a, c, g, or t
  misc_feature (586)..(586): n is a, c, g, or t
  misc_feature (813)..(813): n is a, c, g, or t
  misc_feature (827)..(827): n is a, c, g, or t
  misc_feature (848)..(848): n is a, c, g, or t
  misc_feature (894)..(894): n is a, c, g, or t
aaaaaaaaancatcattngncactngtgacacatacaaataactnanctctcatactgcttgattttcaggttgaaaggttacaataatctatatatttcaattacatggcagtnaatacaaaagcattttaaacatcttttganctgtgtagtatactataagcnggggtttattctaaaacattccatcattcttctgncctgtttatgggtcatgcnggnttncggcgatccacatcacataaattatccaccagtnatgnggtgtaaaatcaattatgcatgtattttgaatagaaattatttttaaatgtcagagagaatgctattattggccaacttganatttcctaattagctatctgagctatttaagnctgnnnttcagngncttcatttttttanatgagagagctggnctagattttntatnagngcctacnaangcctagtgttttgcngttacttccttccctgtcaaaattntgcctcctttgnttttcaatatatanananntggnngncttactctgttgcccaggcnagagtgnagtgangtgagcttggcncactgnaacctctgcntccggggctcaagcaatcctcccacctcagcctcctcagtagctgggaccacaggcatatgctacaaagcccagattattttttatagaaacagggtttcaccatgttgcccaggctggtcttgaattcctgggctcaagtaatctacccacctcagcctcccaaagtgctgggattacaagggtgagctaccgtgctggcccaaactaactttcaaagtgactttnaacacttccttctnaccatgattatcctttcaaancttgtctaaatcttcagagttccaacatttcactgaaccatacttntgagtttaaacaacaaacagt

SEQ ID NO: 685806 - DNA, 491 bp, Homo sapiens
  misc_feature (52)..(53): n is a, c, g, or t
  misc_feature (86)..(86): n is a, c, g, or t
  misc_feature (120)..(120): n is a, c, g, or t
  misc_feature (259)..(259): n is a, c, g, or t
  misc_feature (317)..(317): n is a, c, g, or t
  misc_feature (330)..(330): n is a, c, g, or t
  misc_feature (368)..(368): n is a, c, g, or t
  misc_feature (403)..(403): n is a, c, g, or t
  misc_feature (430)..(430): n is a, c, g, or t
tcctgtttaatatggccggggtgacattccggaaattcataccgaagtgcannaagattgtcattgactttgattcaattaacagnagaccgagtcaaaagcttcagtgagttacatctnattcaatctccagaagattgggattatcgtcttctaagaggttgctaatgcctttcatcttgaagttacacataacttcttactagccagtatggcaaaagtaggcatctaaagaatataaagcctctcttcttactgnctctcttgtcacatggaatctacatgtggttggaactattgctttaggattttagggnagcctgtggtggnctggtgcacagggctagaaccagagtgccttcccttcntgggcctggctggctgggatgctggtggctctttnaaggagcatcagctgctgcattgtgcnacccggagcttcttactggtcatgtgctggaaggacaataatattggggtgggtcttgggc

SEQ ID NO: 685807 - DNA, 216 bp, Homo sapiens
cgtcggtcgttctataggggcctgatcaactaagcactctactctcagtttactgctgcatccaccttcgcacccttaacgcttcataaggactatcgtagatttctggcccagaaaatatagcccatttcttgccatcttatgggctacaccttgacctaacgtctttacgagcgtacttgcgcatactttgtagccttcatcacggatagctga

SEQ ID NO: 685808 - DNA, 144 bp, Homo sapiens
gtaatatatagagagaaggaagagaagtacgccgagggcgtctttgataagtgtagtaacgggtaggaaggtgattttatacggaatagggacggtgattcctaagggggtatgtattgatacccagtattcgtagcaaagaat

SEQ ID NO: 685809 - DNA, 238 bp, Homo sapiens
ctggtggtataaatatactgctgagaagtgacccattcacgtgaggctgtaaatctaggtcactgacactaagaacctgaagagaccctatgaacttttccctaggaggccgtttccaactgccctatgtacaatacagctgataatcacgttgtatacatgatggttcactcacggagcttcgaacttattcatacctacatttaattgatcaccacgaatgggttggccgacgtgt

SEQ ID NO: 685810 - DNA, 247 bp, Homo sapiens
ccaacacacttatgaagtaggaatccttccccatgctgtcttgtcaggttgtcacagatcagatggttgtagatgtgtggtgttatttctgaggcctctgttctgttccagttgtctatatatctgttttggtaccagtaccatgctgctttggttatggtaaccttgtagtgtagtttgaagtgagacagcatgatgcctccagctttgttctttttggttaggattgtgttgggcgataacatca

SEQ ID NO: 685811 - DNA, 335 bp, Homo sapiens
tctccatttttgcctacactctgcccacagaaaaattatcactaggcccaggtaccagacaatgtgtctttcttgcatggccctttatcatagaaagcattgttacctattgctgggctcagcacctaggtgatgtcattgctgcctgtcgtgctttcaggagaaggttgtaacatattcctggctgagtattaaagtgatgtgacactcctgtctggtccctgccctcaggaaagattgtgatgtattcttggccaaaaaacccaggtgatgttaccctcctcctttctgcctgttcacaggtgggattgtaaaatatattttggtctagctca

SEQ ID NO: 685812 - DNA, 159 bp, Homo sapiens
acctctgcaggtgctgtttgccatgttaactccacactctagctgcagtgacgctgatgcagttgctggccatcgatttccatgatccttgtgtaaatttttttccgaagaaagagaaggctccctcagggaatggtggcagctgcgtttcacttccga

SEQ ID NO: 685813 - DNA, 360 bp, Homo sapiens
acttcgccgcttgtccagctgacccatccttgcccatcctttgtacaggtgacaggtggacagagagggtgttattctcaagaccatcgagacagggtatggggatgtcgtcatgtgaggccacagaggaggagtatgatgtgctctagagagagagaccctctgacaacagagagcgttctcacctgtgtcctcagtgctctctgaagccagtcttcttatatacagagagacaacacaccgagtctcgagttctcctctcagagtctctgacctctatctctagtggacatctctcgtggtccccaagaagcgatatagcctatctgtgtacttgtaacaggtggggtatcctctaga

SEQ ID NO: 685814 - DNA, 875 bp, Homo sapiens
  misc_feature (792)..(792): n is a, c, g, or t
agcgggccgaggacccgcgccgcgctccccgcgcacctcaccgcgtccttcacctgactcccgtcggcgctcggccgggcgcggaagggcgggcgggggtctcctccatggcgtgcgcgctcggatccgcctgctgtagctatgaggcggggcgctggggccctgcggtcgccctatctcggctcagtcctccccctgtgggacctggcgacggccggcggagggagatgggagctggcgcccgggccgtggccgggggcgtggatggcgaccgggggagtggcgtgctggcagcgcgtgctgcggtgctcgaggaatccgcagtccggatcgggcctgccgaatggtaacgacacatgcgcgttcagcctaaaggatgctggtactcacgctgggtccgacgccagggtgacacgaggtgtaacgcatgcattgagacggatgataccaaatggtgcggacagctcgtgccgaggaacacggctcaaggaagattttgagatcagaataggaattgccaggagtgtcgcaacgcatggtcccgtgtagccccttgcgtcacgtggctcctcgatggaacgaatgtcgcccttgggtcgaacttgtccactgcatcctgtaatgtgcaagctccttgtaggaaactttggctgcgcaatacacttccacctcggagtaattacaataagcataagcatattaatttcactgggtggttgagctaattgtaaagatcccgcacggactcatttacttttcaccgtgggaagagcctggtgagcttctttcctntgtagcgccatcttgtgaagggtgccggattatcccaagaaaaccgccagttaaccaactaatttgaggcaagcgaaacactc

SEQ ID NO: 685815 - DNA, 271 bp, Homo sapiens
tttctcttttaaacaagtaaattttgacgtttttagcatgtggcaataaatgcacatggaacaaaatgtagagtgtttcacagagtgtgatgtgaaagcccatccccgcctctgagtcgtccagtcagacaccaccgtagttacagttccaagaatcttgtgcttagacatgtaaacatgtgtgagcggccttccgctcttcacacgcgtggcggcttagcacacacggtctgtcccgtgcctctgcaactctgtctgcaaggaacccacg

SEQ ID NO: 685816 - DNA, 532 bp, Homo sapiens
acgctcaagaactcggctctgagcgcgcagctgcgcgaggcctgctactcaaggcgtcatgctagacccttgtggttccaccaatatgacaaaagctacctgggatccatgttatattgtgcttgtgtctccacagactcagggaataccctggcagtctcttccgttccattgataagctacgatagccatgtaatgaagatccacgactagagccccatgctaacgcgggttggttggtgccatgggcttaagcttattccaggacggccatgaccttatcccttggcagctttccatgacgattcagggagcccgtgatcgtggtccacgttcatttggacgcagcagatgcacacaaacactcgacgggcgtcgtgttcatatcatcagcacgtgcccgttggaggtagtgtgcggggagggtcaccccctattggacccccattcgacacgtgatggacctatcgaggcgggacatgtggccgatggcgtgtcacttggtgacgcccaggatgcagactggacggag

SEQ ID NO: 685817 - DNA, 617 bp, Homo sapiens
  misc_feature (1)..(1): n is a, c, g, or t
ncttttcttggtggttaaaaaatttctcttttttttaagaaatttttggaaaatttcccccaaagagaaaaaaatttttctccccaaatatttggggggggtgttttggaaaaaaaaaaccttgttaaaatatttgggccccctaataacccattccccccgttttgcttttttgtgggggtaattttgaaacactcctttttaaaaaaacggggggggggataaccaaaaaaaaaacaaactttttaaaaaaaaaaaaggcccttttttccccgaccggtggaaaattttcccgtttgttgttttggggcccccctccgtaaatttgaaaaccccctttccaaaaggtgcccgcttttaattttttttgcaaaaacttttaaaaagaaaattttgaacgctaaaaaaatttggacttctttaaaaaaaggccttttaagggaagaaaaaaaagaacttgcctttaaaaaggggccacgggccttgaaaaacattttaaataaagggccccaaaacccccgtttggataaacccccctgtggggaagggttttaagggaagagttccgggggaaaacctaaaatttaaaccccccccgctcctgttgtccctttata

SEQ ID NO: 685818 - DNA, 144 bp, Homo sapiens
gggcccgagaattattatgacccgcccttttttaatcatgggacatttttcagaggggaaaaaaatgtttggcaaagtcctcccttttaaggaaaggcaaagcttaaaataaaacttttttttgtttggggcaacccccccgta

SEQ ID NO: 685819 - DNA, 236 bp, Homo sapiens
ggtggagtggcgttcatttgggttgcgacagcacttctgatcgcgaggctgacgacgctgcaaccaagcgcctggcccgcccatctcctggcgtgcggaagtgcgaatgtggcagtaaccgcgctgttcgggcttggtgtagccgcggcaattccgctgtcgttcgtcaatctctttgaggccgtcatcgctgcctcggtgctgagacttatccagataccggagcgtccgctgga

SEQ ID NO: 685820 - DNA, 81 bp, Homo sapiens
acatctgtgtacttctgtgcagcagttcggaccgtgaacactgaagctttctttggacaagggaccagactcacagttgta

SEQ ID NO: 685821 - DNA, 231 bp, Homo sapiens
agcgaactattatacgcatgatccaataacttgaccaacgggaacaagttacccgtgagggataactacgcgcaagtcctattctagaagtccatagtcaacaagtagggtttacgaacctcggatgtctggatcagggacatcccgagtggtgcacgtccgcgtattaaagggttcgttgtgttcaactgattgaaattcctatcatgtatcatgtagttcaggcaccgg

SEQ ID NO: 685822 - DNA, 1619 bp, Homo sapiens
ggattgctgcagcgagggtctggcggctagaccgtggctttgagccaggctgcccgtccgtgctgctgcggcagcctggggctccggcggaccttggctacgatctcacccccccatggcagcaagcagctcgctttatcatctctggatgacaacgccccgagttccgcaggggcctccgggggagttcactagatgacgtaggaattcatccagacccaactgtcatctctggcaatccccatcttaccgactgctcatggaaccggtgaagtgccaaatcactcaactcccagcgaggacctccacacctgaccgaacggaccacaggtgcctagaacgccctctactcagcacgcactgcaccactgacttgcaaccacgcactgtgcacccggccagtccctcctatgcagcctgcctcagccgcgcccaggggcccggcatcttcacttctacactgcaaccaaaccttatgagacagcacggcagcgagccacccgccaaccgctgccgcgacagctgcccgccccgccccccttgggacacaaaccaccgcgcacccctgcgatgctccacgagccccaccctacacccggcgcaagggcccacagcctgctgccctgcaactgcctcactcccgggggcaaccttaaccgcccccctggcgcacgaccctcactctccgactagggacaccggcacagcatggcggctcacgtggagcccacaaaccaaattgccaaggcctcggaacgcctcttgcgggcaccacacgatgcgcgccacacccacagacaatcgccaccctaggttgaccgaaccctaaaacagcgcctcgacacaaaggagaaaaacccgcacccaacgttatacagcagtcccaccctaaactcccttcacccatccccttcccaacacttgagccccccaaccggcgcacagagaaactccccgcataccacagcgaccgacggccagcgcagcccggcccagcgcgacgcgcgctaaccgacccaaccagccccaaaagagctgatgcgcccctcaaacgatcgccccacaacccaagcacggactccgccccacaccccctgccccacacccctctacgcgacaccaacgctgaccgccaaaccccacccacgtcaagcgcagcgaggcacgagccccctcaatgtcccgaggaccctaccaacccccacccccccccgccccaccaacacctagcacaagagcgccccccacccaagtagcaccaccaccccgcccccgcaccaaccaccaaccggacccaaaacgccacaaacccttcacacaccgacccccaacccactcgtgctacccacggcccaaccgaccagcagcaaactatggcactatctgccacagacacgaaggcccccacgcgacacgcgcaacccacggactcaaccacggcctgtgcacccggcacacatcctcaccctacggcagcgccataaccacgaccaccacaccgagtagcagccacgacgacccacaagagaacagaaaccaccacacccctactagacggccgtcacccaccggacgtcgcgccccacgccacccgacacacaaaccccaacccgtgcaat

SEQ ID NO: 685823 - DNA, 815 bp, Homo sapiens
  misc_feature (1)..(1): n is a, c, g, or t
  misc_feature (81)..(81): n is a, c, g, or t
  misc_feature (116)..(116): n is a, c, g, or t
  misc_feature (118)..(118): n is a, c, g, or t
nctaggtgtgtaacgttctaccaaatggtgagttaaacacagatgaccccaccgcaggacgttcaaatgcacccatcacancccctacggaagggggggtgatagataaaaccaantncttctgttttttcaaacgaaggagaaggtaaaccatacagcgccacaagtgactctggacacagacagatcctggggaggacttacatggtatctgctgtgttgggataaaatcatctcttggggggcggtatattttcaagggctcactcttagaaacaaaaatggcatactttcatacttcattttggggttggcttacattctttttctttttttttttttctctaatttaacctttatggaagctttaaaggcttggcaaaacatgagtgctttgcccatcagggaatggaatggaccaatgaggggggatcaatgaatatagttccatagaacattttccagaagttcttctgttggagaaagcagtacagtatcttaagggggaaccagttatatacctaatctgggtttttataacttctggaagagcataatcaaacaggagttttcttttctcaggggataatacaacagagaaaacagaggggcgccaatatttaaaagaagttatttcttggagaagtcatattttggggggcggtggattgatttcagtattacggggggggactgggattcataaagtgctattaacattctctcccggagaatatgggacagtcactgggcagaggggctggaggagaaaacattctggggtccggcaaaaggggggggggagaagaaattag

SEQ ID NO: 685824 - DNA, 397 bp, Homo sapiens
  misc_feature (369)..(369): n is a, c, g, or t
ctgcaatgtaggaaccaccacccccatttcatagatgtgagatcaaaggttcagagaagctgcattgcaaaggcacacagctaggaagcggttcaaaagcaggttcctttgttttgttttgttttgttttttggctcaaacccatgttgtgtccccatttgtgactcggcctcttctgctgctacactgcctgggtatggtttgagatggggtttgggttcaagccaaggagctggggttgggaatgttagagcgaggggagggaaaatgggacccccaagaccactaccccagcctttgaagtttaaggccgtatagcctgctaggagtccttgagccccttctgggcttggggacatcctctccctnggggggcagctggatcacatgtttttct

SEQ ID NO: 685825 - DNA, 277 bp, Homo sapiens
gagtatcctcagcctttccggcgggcgagcagtacatgccacgacttcaccagtcaaagcgagctactatactcaattgacccaataagttgaccaacggatcaagttaccctagtgataacagcgcaaacctattctagaggccataacaacagtagggttaacgacctcgatgttggatcagaacatagcgatggagcagccgctactaaagactcttatgttcaacgattaaagacctacgatagctgagctcagaccggagctatccatatgg

SEQ ID NO: 685826 - DNA, 412 bp, Homo sapiens
ccatatcacttccttacatggactgaaccaaggtacatcattataactacatgattgatgtctcatatcccccgtaagatgtataaaagcgaattgtatccctaacacctcggagacaccagttttaagactttcgtgacgctgtgtcatgtcgtgtgtactttactttggggaaaccagagttaccaaattgactgagacctgtctcagatattttgtgttcacaagatcgacagctaatttttttagtgtaagtcctaaatgatgcatggggtatacttatactagattattagttgttgatctgaaatttagagctaactgggcatcctgtattttccgtcatgaccctatccgggactctcctaaggtcatctttcattcttttgccaaatgtcctaatcaggatggt

SEQ ID NO: 685827 - DNA, 124 bp, Homo sapiens
tggaagtttaagagctgggaagcatgactaataaatagcattgctggaagagagggttgtgtttttttagggtatgagttggtctgtagaaacagaccagttaaggagccaaccgtggactagt

SEQ ID NO: 685828 - DNA, 212 bp, Homo sapiens
tcctggggaattttttggaagggaaccttcttcttggggggggacttaattgaccaaccctcccttccgattttaagcctctggggaaatataaattttaaagtttgaaggggggtaaccccccgcctttccctgcttcaaaaaatttttcttccgggttttggtttttaaaaattttttcccgggcccttggtatttttattggggggggg

SEQ ID NO: 685829 - DNA, 309 bp, Homo sapiens
agctttgaggagttttctatggtgtgggcgaggttacctgtggcctcccccgagaagatgccgagggtgtgggggggccctggccccccccataagccaggccttggggaggggccccccttaggccccattggcccattttccagtggccgcggccccggccccatttttggtggccccggccccacccccttattaggggggcgggcccccctgccttttcccaaccaggggcccggggcctgttttttccaccttttttggctgtggggtttgggggtggggcccaattaagttttttccccccca

SEQ ID NO: 685830 - DNA, 297 bp, Homo sapiens
aggtagagcttaaggacgcagccaatcttaagtactgtgtgaccacatctgttagtacatcacatagtcatactggatgtaatatgtgatggtaaacctgtagcttataaatttactatattattctttatactcatttactcagtcatttctttacaagaaaatgattgaatctgttttaggtgacagcacaatggacattaagaatttccatacaataatttatgcaataagtttcccagaacaaatttcctcaataaccacaatccagcattggttttcattctatttcatttt

SEQ ID NO: 685831 - DNA, 387 bp, Homo sapiens
tcgtcactatgcacagactctcggcactctgccggtctcagcctaccttcagctatactcctccaacagtttgatctcctcttcatatttatactatactttaggtaggaatacttgtccgcctgggcctccagggatatcacgttgttggtaacaatattacagctcctcctactaggtccccacatttactctacgggcacctcaggccctctcctccgagcgctccagttctccttccaggaatcaccagcttcctggccacctcttcatatttgcggtctgaatcctcagcgatagtgcttggactccttcagctgcatctcctgcagttccatcttctacctcatccttcatggaagtatcaagcgttgagggggatcctct

SEQ ID NO: 685832 - DNA, 209 bp, Homo sapiens
  misc_feature (111)..(111): n is a, c, g, or t
aagagtgtgctgtctcactatgtggtgcaggtctctggtgctacacaaggttgctgagcccaattctgttctcaggtgggacccccaaggtatcccaaaggtatacccagntccatcaggcagactcctgaaaagcagaatgttggacattaccgggttttcactcttcactttctctcctggaggaagaatgcacataagtttgtgct

SEQ ID NO: 685833 - DNA, 699 bp, Homo sapiens
taaattttaatgttttaatttagtctcccgcaagcagacagggtatttttttaaaaactatgttttactacgagaaaatattatttatagtcccattaaattggttctgtttgtgtcacctgaatggaagttctgggaagagaatggtcgcaaggtattcagcaggcaactttatagcttgatattcaatgggaaggaaagctatcctgggtggcactaggaacaagaaggtaaacttaaaagagcagctggtgaacacacatctttgagaagaagggacacaagaaggggggcactaagacaacaattcagtgtttggtggcaaaatcttagattaccaaagataaccttgggcaattttacctagcgcttcccttttctcaccccattccagataccaagatagggcctattttaatggctaacatgaactcatggaaggataattaacagacacaattcaagaaaactgtcctaatgttactcaagcaggaataagctttggcccttccctgcagctgtttcacacaaaacgtgtggacttggtacgcatacgtgtgttatctgggctccccatttttgcaattcaagaggacacttgctaataacatatcttgtcttctgagaatacagctgcttaagactacaggaactgaagtagtctaaaggtccatccagctgttttgtccggggacagat

SEQ ID NO: 685834 - DNA, 574 bp, Homo sapiens
aagcagttaatacagactcagtctcctgagtatctgggattacagtgcctgtgctaccatgcccagctaattttgtattgtaagtagagatggggtttcaccatcttggccacgctggtcttgaactcctgacctcaggtgatccacccgcctcggccttgccatagtgctgggattacaggcgtgacctgccgtacctggcctgaagctacttttaaccccagttctcagaatgccccttatcccagaggtaatcacaatgtctctattaattgggggtggggggatattatatgcagtctacggttccatagtatataatccctccccactttggtcacaggtcgtagcatatgatatatatccttgggtatgtaggcgtaatcctcttaataatatctctgagccattttctaccacgtatggcaatactggtttattctcattggaagctgcatagagttccatggttgggatgtacataaggtattaaatcagcttcctgttggagagcatattattcctctctacgctgttggaggcagtgtgccgggaataagccccttgtaggccc

SEQ ID NO: 685835 - DNA, 397 bp, Homo sapiens
gccttgtggcttttgctttgcgtgctgtttcccttgaaccagagggcggcaccgtggaaatactgttttccctgtagcatatatgtagtaggatatgcatatactaggcagagcaacaggacaatggtagccacttcaagctcctagcggtagggctatccagactgcctataatagacagtactcaacgctctctcgcggtacgctgacgcctgcaaagccctacaggcaaaagcaggagtaccctagttttcactctctgatcaaccttcgcactccactgcgaaccctttacaaacttatctctccacacccacctcattggctgccccactgcccgcctgctaccctatgctctcaccagcctttccctggcactgcgactggtgaccctctc

SEQ ID NO: 685836 - DNA, 403 bp, Homo sapiens
  misc_feature (296)..(297): n is a, c, g, or t
  misc_feature (328)..(328): n is a, c, g, or t
attgcttagaatgactacgagcggggtggctgttggggatgaaaagggaaaaaggaaagcaatatttgtggtggtttcttctcaggggggaactgaggagggttttgtgcacgcctggcaggccaaagtgtagtcaactggtctgaagtcaaggaaagtgaacactcaggctgacagccttgggtcctctccagttgagagatgcagagaaagtcagattaaaaatggtgtaggttgacccttcgggccttttacacgtgatcatacttgcctgccaccttagctttgacctttannatgagaaagggcttatagttttggcccttgnaattattctatctggtaaagtgcttagagaaccctacaaagaagtcagtatgatcattgcagtaaggctgtttag

SEQ ID NO: 685837 - DNA, 167 bp, Homo sapiens
taattctttttttaaaaaaacccccccccctaaagaagcccccctgtcaagagttttggacccccaacttcagctttgcctcccgagttttggattcccaaaaaatcaaagggggcccatttggttggttcccccatgaacccttctaaaaaaacccttttttttta

SEQ ID NO: 685838 - DNA, 304 bp, Homo sapiens
ataacctaattacggatcattaacccactgagcaagggcaggatggagcccaaaacctcatggttcctagtcggattcgttaaccactgcactgtccacgatgggaactcctccttcctcttctattgcctcccagagtcttgtctcagagcctgctttggggctgggaccctaaggcagatccattttctatttcagcaccacctccctcaccgtgcatctgagacctggggtggcttgtccatcttgggctcttcttgctcctttggttacctcgaactcatatgttttcgtaattggggtt

SEQ ID NO: 685839 - DNA, 180 bp, Homo sapiens
ctctacaggatcccggactgacagcttaattaaattcgaatgccaaagtgtatgatgtatgtcctccctggtacttatcacgcggtcataccacctgttcctcttatttgtggtttgtttcgtgtgtgtttccttctactaaacatctttgaattattactttttttgacttgatacatt

SEQ ID NO: 685840 - DNA, 99 bp, Homo sapiens
cccatctgcagttggaggaagtaatgctgagcctgcgagggctgacatcacttacgagagcgtcaggaagccagccagcacagcagcagcagcttggct

SEQ ID NO: 685841 - DNA, 214 bp, Homo sapiens
  misc_feature (186)..(186): n is a, c, g, or t
ttcccatccagctagacttccctagccagacatccaatctcaactcatccaacgccaggcgcactcattgagcaggcatccaatctcaagcttcatccaacacacagacatactcatccaccaggtcatccagatctcagacttcactccaagtaccacggacacacttcgatccaaccagagcantccaacttctcagactccattccataca

SEQ ID NO: 685842 - DNA, 119 bp, Homo sapiens
gtgatcatgagtgagtctggacacacacatatatatcaagagagtggctagagggcataaaacccttaatgagacttcaatgagcttcctggtatcatgcaaattaagcacacaggcaa

SEQ ID NO: 685843 - DNA, 142 bp, Homo sapiens
aggtttccccattttggccaggctgatcttgaactcctgacctcaggtgatccacccgcctcagcctcccaaagtgctgggattacaggtgggagccccaacccccggccatgaattaactccgttaaaaaataaacgtata

SEQ ID NO: 685844 - DNA, 328 bp, Homo sapiens
  misc_feature (205)..(205): n is a, c, g, or t
  misc_feature (208)..(208): n is a, c, g, or t
  misc_feature (214)..(214): n is a, c, g, or t
  misc_feature (216)..(216): n is a, c, g, or t
  misc_feature (234)..(234): n is a, c, g, or t
  misc_feature (241)..(241): n is a, c, g, or t
  misc_feature (245)..(245): n is a, c, g, or t
  misc_feature (305)..(305): n is a, c, g, or t
  misc_feature (314)..(314): n is a, c, g, or t
cttttcccccttgttaaaagggagttataactgtcaaccctttggaatattatgatcccaagtagtctttttataatttggattgtaaaaagactacttgggatcataatattccaaatagtctttttacaatccaaattataaaaagactacttggattgtatcgtatgttagatttttgataaaatttggccaatttttacanaanaaattntntgatcatttagttctatntatttanaaanatgtaaaactggattttttttaagtaatatgtgaccaaagttaattttgtcccaaaggtntaaataaanagcagtttcccata

SEQ ID NO: 685845 - DNA, 523 bp, Homo sapiens
ggggcgaggaaagacgggaggatactgcgcgggatgatactcgtcggcggaaaagtgtgtcaagacttacacggcagaacccaaacatcagtcccccgagaacaaacagacagaccaggcactgggcccgaaaaggctcagagcgagcccagtggcaggccggctacgcacggacactaggatctaccgcccctggggctgcacagagggtctgtgccgaggcggcagcagaagtgtgtatgccgtacactcagggccaaaccagaggctgggagaacgcggacttcaccagactcttgggcgttcccaacccccagaagaagagtggctcggaaggagacgtgtgcacatttggctgccggccaggttcacctcagacaggaaaacctgagggtaggcacccttggccggaaccttgtcccgcaggctgccaatccactgaggccctttcctgggcgacaaaacagcaatgccagagtcagaccgattctcttcctcctctttctctactccccagaatcat

SEQ ID NO: 685846 - DNA, 119 bp, Homo sapiens
agcggaggggtgcggcgcgctcctggcgaggacggagcgagcagatctcgcgtgcgctcgccgcccggcgcagcccagcacatccccctttcgcaccgtgatcccggtgtatccgtgcc

SEQ ID NO: 685847 - DNA, 246 bp, Homo sapiens
  misc_feature (123)..(123): n is a, c, g, or t
  misc_feature (126)..(126): n is a, c, g, or t
  misc_feature (132)..(132): n is a, c, g, or t
  misc_feature (134)..(134): n is a, c, g, or t
  misc_feature (152)..(152): n is a, c, g, or t
  misc_feature (159)..(159): n is a, c, g, or t
  misc_feature (163)..(163): n is a, c, g, or t
  misc_feature (223)..(223): n is a, c, g, or t
  misc_feature (232)..(232): n is a, c, g, or t
cttttcccccttgttaaaagggagttataactgtcaaccctttggaatattatgatcccaagtagtctttttataatttggattgatgttagatttttgataaaatttggccaatttttacanaanaaattntntgatcatttagttctatntatttanaaanatgtaaaactggattttttttaagtaatatgtgaccaaagttaattttgtcccaaaggtntaaataaanagcagtttcccata

SEQ ID NO: 685848 - DNA, 107 bp, Homo sapiens
gccttattttcggcactcgttatcatcggcaccaagtataatattaagtatgcattgacctctagagcgaatggtgcgatgaatagggaggtgccgactaatagcga

SEQ ID NO: 685849 - DNA, 214 bp, Homo sapiens
tgttgcctgtgacacattgagccactgcactccagccgggcaacaagagtgaaacactgtctcaaaaaaaaaaaaaaaaaaaaaaaaaaaaaattttacccccaaagggggtctggggagggccttaagttcatgagggaagacccctcttaattgcatttggtgcctttttaaaaggggcccaaaagaagtccctttagtgccctttttgcct

SEQ ID NO: 685850 - DNA, 978 bp, Homo sapiens
  misc_feature (796)..(796): n is a, c, g, or t
gagcggttccaagaggccagggtcccgccgcatcggtccgaggctcccgcgggccccctgttgtcgctcccttccgggggcccccacgttgggggacccccctttcgccggaacgtgtgataccccccgcatttgccccccctcttttttggaaccaagagcctttctggggtttgcccccccggtgtcccgcgcccaatgggtccccccaaaggttaagagccggccaacacatcttggccccagaggtacagtggcgggcccccccgtgggccccccgcgcgcgccattcggaggagcccccgcccagatgggcccgcggcctccgcgcttacaagacgcggcgggtcacagacccggcgaaatctcaacaaaccgggggttctccggaggatttccggccaccacttcgcggcaccctggcgcgcgcgtggtgcccctggagagtctcaacaccacatttcccccccggacagaaactttcaccggtcaagagacccaaggaatggcctggtggagaaaatcaccccggcacaagcacacgaaggaggccggcaccggaacgaggcacatggcgaacaatcttccccggggcgttcaaccccgggaaaacacccgctgcgccccccggtgtggagcccccaccccagtttctctcctccctgtccccctgaggggcacccctggccctggagggcccccacatgccccaagctatgccacacgcacgtcccaacgaggagtctcccacttccacgtcaccctttgagagtttcgggcccacgacttgggggcnccagaaaactgtccaaattcgcatgtagactgtccgcccacaggttaagaccttatgcccgcgatgtcccaccccctgtctgtccgcccacactgggctgtgcctcccccgcccacacctgtgtgtttttttgaaacaattattttttgtttttttccaaaaaagttccaagccacccccca

SEQ ID NO: 685851 - DNA, 219 bp, Homo sapiens
tagctgagattacaggtgcctgccaccacacccagctaatttttgtatttttaatagaggtggggtttcactatgttggccaggctcatctcgaactcctgacctcaggtgatctgcctgcctctgccttccaaagtgctgggattacaggtgtgagccactgcgcctggctgagactcatatttctaacaagctctcaagtgtgctaacacaggtggt

SEQ ID NO: 685852 - DNA, 963 bp, Homo sapiens
  misc_feature (963)..(963): n is a, c, g, or t
gatgcccgtaggttggccgcgacgatcgtacgtggggggatacggattgtgtgtatggccaggaggctgatggttggggtacttgttgagaacttgtgagctgttcaggattgataatgtcgcaagaaggtagatcgagaatgctgagcgctggactatttctgccaggtcggaagtgtgctaggttggcaaacgaactgcggtgccttgaccgtaaacccggaaagttcaggatggggaacgctgctggcccaaggcctaacggtctgttccgaattgatacaggtctttctgggaggacctcgttgaaagaatatgacactcctgaaccattacctattgacgacccagggtattcgggaatcctggtttcggaggtgtaaaagcctccgggcatgtggcgaaaggaatccagtatgggaccagtaccggttagtgagtggtagtttcacaaaagaaccggaagcgtcattcggaaattagcctcacgtatggggggaattataccacccccggagactaaattagtttgtcttccagctttgtggcattttctctgggctcgtgaaacgttgagcatgaagattccaattgtagtctacatcccttcaaggttgggttggaaaaacgcctgcgggaaagaagtccttttgtgggccagggagtatgttgcaccttgggaacggcattacttgggacatcttgggaacttacttttgatattcagagacgttgaatttcgcccttatttggtgcacggttctttagaggaacactttgcgaggagaacctgatttcgaaatatatagaacccgggaaccccaaaaataggggaaacccacacaagtgtcgacgcaaccggagttatgaagcttagacaaaaggctctggggacgctacctcttataacagcctgccaaatcggccggtggaacatatcggccagcggaatatgtcacgtcn

SEQ ID NO: 685853 - DNA, 451 bp, Homo sapiens
tactaagtgaaataagtcaggcacagaaagacagataactgcataatttcacttgtatgtggaatctaaaaatgctgaaatcatagaagcagaggctgcagtggaaggaaatagggagatgttggtcaaagggtacaaagttctagctagacagaaggaataattgcatgggatgctgatcatagttaataatgtattatatggccaggcatggtgactcatgcctgtaatcccagcactgtgggaggccaaagcaggcagatcacttgaggtcaggagttcaagaccagcctggccaacatggtgaaaccctgtctctaccaaaaatacaaaaattagccaggcgtgctggcaggtgcctgtaatcccagctacttgggcggctgaggtgggagaatagcttgaacctgggaagtgtttgttgcagtgagcagagatctcaccactgcac

SEQ ID NO: 685854 - DNA, 457 bp, Homo sapiens
tgaacggtgtgtgctttacctggtccttatatagcacggtactgaaccccgtatactttctgcattatgaattaactagaaattactttgcaatggagagccaaagctaagaacgccctcgaaaccagacgagctacctatgaacagctaaagagcacacccgtctatgtcgcacaatagtgggaacatttctcggtagaggcgagcaaacctaccgagcctgcttattcctggttgctctctgtatgatcttagttcaactttaaatttgcccacagaaccctctaaatccccttgtaatttaactgttagtccaaagaggaacagctctttggacactaggaaaaaaccttgtagagagagtaaaaaatttaacacccatagtaggcctaaaagcagccaccaattaagaaagcgttcaagctcaacacccactacctaaaaaatcccaaacgta

SEQ ID NO: 685855 - DNA, 321 bp, Homo sapiens
cgggggatagtttgttgaaggctgattttgagtttagggaccaaaacagtaatcatgacatgtgcaaggggaagatgatcatgaaaggtagaagcacatgctaatagatataagctagaagagaataagtaaatgttctgttattagtgaactatatgaaattaagcaacctcaggtttctaattaaaatgttcagtgtgtccaatcgtgaatgtctgtgtggaatgtccgtgtttttaattcaaacactggcatgaccaattggaatggctgatggaactagtgaacatatagtcttcatccagctggaaacataggtat

SEQ ID NO: 685856 - DNA, 349 bp, Homo sapiens
tattcccaaggctcaaaccctattagttgatgactctagggagtatagatttgtatttatattatcagagcaaattgtgacgttttttgtaccatacttatatattgccagtaacttccctttgtcctacaacaatgtgagttgtttacgaaagcaactgaatttattcagacatcaatagaaagttcctgaaagcattatgttatctgatttacaatattaaggatcacctgaggtcaggaaatcaaatcatgaaaggtttattaacattaacctttaagaggatgaggttggcggggctctattaccttttggtctatggttaccgaattcaccaggagcaaggact

SEQ ID NO: 685857 - DNA, 414 bp, Homo sapiens
  misc_feature (267)..(267): n is a, c, g, or t
  misc_feature (304)..(304): n is a, c, g, or t
  misc_feature (351)..(351): n is a, c, g, or t
tgcaagatgtatggtggcagtgtgggctctcagccacccccatgtggctccagtagccatggtcctgttccctcttctcccagcaggagcctccaccaagcgggagtatgaccagtgtcgcatacaggtcaggctgccagatgggacctcactgacccatgacgttcctgggccctgggaacaggctggcagcgtgtagaggctctatttgtggagctccacccgtggggacggaactaaggtggcgggccatggacccttgtgcanattgcctcagtggcttccccatgacgggccttctcangaagctgacattggagcggcctctgcaggagcctgggactcgtgccnttcttgctgttctcatttgttggcaagaaatgtcccagctgaggggcctttgtcccattgtcc

SEQ ID NO: 685858 - DNA, 584 bp, Homo sapiens
cacaagaacattatacaagttttaaatttacatttttgcaataaaagttatcaatatatgcattatttgtataacttcatcatggatggaatttgaatcagcggtataaacatgttgcagtcactaaatatagatcatcatcacagtgaaccaaaatgcatagttgttatgaaatgacaaatgaccactaaaaggtgaactcacagcccatacaccaatataataaattaattatacagatatatttttcttcaccatatcataaaaattctcactagccccttaccaaacattagaaaaacacagttctggagccatcctggtgaaccagtgccttcacattctacacttaaaaaaataaagtgacttagttgcttggttggaaggaaacttcataagcataaattgtttgcaatgattaaaggtaaattaacctaggaccatttgaaccaaaagaagaaaaccctgggggcttgggggcagcacttgaaaaatacccttatttacagtgcaaaaaatttgaaatcaaattcaaatacgggggacccccatatttaaaagggggtctttggcaaaaaaaaggc

SEQ ID NO: 685859 - DNA, 863 bp, Homo sapiens
tttgccgccagaacagccaggtgtcgtgaaaactacccctagtgagctaccatgggaaaggactagattcatatcaacgattgtcgtcattggactgcgtagattcggggatgtccaccattactgggcatctgatctataagtgcggtgcgcatccgacagaagaaaaaactcacttgaagagaattttcgtggcataggagcgtccgtgtccctcgtaccgcatgggcacaaggcctcacttcatagatatgcgctggcgtgtcttggcatagagcgtgacaaggctgcacgccgtgagagcagtggtagtcaaccagtctgatatcgtcctatggtgggaaaaatttggagacccgagacaaagtatgtgatgattggacctaatacatatgaatgagcgcccagggaagcagcacgtgagaagcgttgcatgcgaagaatagccactgaatttaccagggtagccagtcctcagtgctgtactgtggtctgatccctgtagttggtatcggctgacttgggtggtaggatgaacattttggaaagactggatgaattctcactaaaggaacaattgggccgccaagaatccccggatgtaatggcaacttgccaccccattttccttggggtcattgtaaacaaacgaagcttggagggggttggtttgataacaaagccaacaagccattaacagatatggtccagatgtaggcttgacgagcgaagagactcttggggtagtttcccgcaaacgttgggactcccccaaaagcggcgtcaaccaatggccaccaagcacaaagacatggcatttacctcgacggggacaagacttcgaggtatagaagcggatgcga

SEQ ID NO: 685860 - DNA, 955 bp, Homo sapiens
agaaggggtgcgagcggggggggggaggtgcatggacgacgaggaggagacgtaccggtctggaaaatccgcaagaccatcatgcagtgtgccacgaccgtgctatctgtgacccaggagagttgacagaccctggaggagtccaaagcccaattggggccaagccgattgagggacggcgcgggcggcaaggaaccatcaccgtgctgttgcccacaagatgacccccaaccgaaccagaatgttgggtgtccttccagagcacgcccaagtgtggcaatacaaggaccatcaacgtgtgtacgtgccaagcccaatgcaaggcaaggaagaacatcacacggcttctcaatcggggtgccagacagggcttttcacccccctccggcacaagcaggctccccttggtgagaattggcccccgaaagttacattctggaagcaagtttcgtgccagcaaggaggcctggttaactcaaacatcagggacgcaggagctaggaccacctgagacagggtagtctatgaccaaggagacgggtgcacaagacgtgtggcccgaatattagctccgagaaacacaagtggcccagagattcaggcaggaggaccctgtggcgccgcacttgggaaaacacgcgttgcacgggggtacagctctcacgggccagtagcaggtggagagacatcacatacggcgtgtagcaatcaaccgctgaaggccctagaggcgccaacagcgaccccaatcctggagaacggcctggctcaaaattggcacaggtaggcgtggcactagtcagtgagtggccacccagttcccagctggagagcggggcagccacacacgtggagaaagcacaaacaggcagtgcactgcgaggtgggacaaacgccctggggagtgcccactcatagacatatccgggcgctttacgctttggtaaaatatccg

SEQ ID NO: 685861 - DNA, 404 bp, Homo sapiens
gccaactctcggagctcggagaacacgaagcaaatgatgagtagcttcatgctgtccatctctgccgtggtgatgtcctatttgcagaatcctcagcccatgacgcccccatggtgataccagcctagaagggtcacattttgggccctgtctatcccctagggctgggctttgggtggtaaacctgctgccttcaactgccatcctgggcttccctgaatgaggccgtctcggggcccccagctggataaagggaacctggccctttcctagggaacaccctagggttacccctcctgcctcccttcccctgcctggtggtgggggagaagctgtccatgtttttagggggattcatttgctttttcgttgaaacccggtgttaataaagtttttccctttga

SEQ ID NO: 685862 - DNA, 179 bp, Homo sapiens
caatatacgcctacatctcaattaaagctatagagagtgcaggcaagtttccatccagtctgggtcttagcgtgctcttcttgtcttcacccagtaaattcacggtagctttcttcgcttctttagtgatggcatctgcagtctctttggcctagtctttcaggtccttgaccacactg

SEQ ID NO: 685863 - DNA, 98 bp, Homo sapiens
tccgcgccttttccgccgggacctcgagcgaaagacgcccgcccgccgcccagcccttgcctcccagtgccagaaaataaagtccttttggattttga

SEQ ID NO: 685864 - DNA, 659 bp, Homo sapiens
  misc_feature (447)..(447): n is a, c, g, or t
accagctctaccatactggcatacggccttcgcgcttatgattctccatggccgagtacatgccagagcccatatgggaatcatgcattagagccgagtcacgatgggaaagatgaattactcctgcccagcattatatcgctcggactaacccgctatacggtatgcctacagactgagatacaaatcacttccaacggatggccaaagctcaaaccctcgagaccagactatctacctaagaccacttatatgagcacacgcgtctatgtgacacagtcgagataagatttatgagttgatgcgacatacgtaccgagcatggcgattactggttgatcatgatcgagtcttagttcaactgataattgaccacagaaccctatatatccccatgcatgtgaaactgatagttcgaagaggatcagctctctggacactaggaanatacctagtacagagagtaatgctgctaacaggcatgagatgcctaactgtcctgaatcataaggcgatcattctcgacacccactgcctcatgtatcccatacatataactgaactgctgagacccaattggaccaatctatcaccctataggagaactaatggcagtatatgtcacatgcattcatcgctcggattaacctgcgtctttt

SEQ ID NO: 685865 - DNA, 614 bp, Homo sapiens
gagtaattgcccctcagaggagaaattgatatataattttttttaccttctttcacttttctttgtcttccatgataatacctatcacgttatttcattcttcattacagtagctaactctgagtcctaactaacacagtgatttttgaggctgactttctctttaataaaatggaaaatgatcctttaacaacaatttataaaagtgttaaatgatcttggagggtccttcttgttttaccaaaagaaattttttcccataaaaagtaaaaagtctcaatcctgaatggcaccctgttataatctagaaactgccatgctgggttaatttactatcgcacagcccagaaatgatctcattgacagagaccaaggcaccattttgttccttggtcatcctctatatgatttccccaacatattagccatactttccaagatctctagcttaatttactaactcattatggacttagagaaatgtgaaatgtgtattcaattgtttctctgaacatttaagaaatgcaccaacaacatttcttacaaatttttttttgttctatcaacaatattactttgttgtaataaattaatgagtttggtgcttctctttc

SEQ ID NO: 685866 - DNA, 351 bp, Homo sapiens
tggaaattcacctgaaggttgtttaaccagcccagcaaaaactgctaaatgcaattgaccccccccattaaaatgtgattttggtccctttaattcctctgggggcttggtttggttacggttgggcaaaatcctccaatggggcatattgggcaggcagttgaaaccatcgtggtctggcgggcagggaacaacatctcgaagtgggtgttctcttccccccaaaaattgcacttagatattaaacattggggcgtgctatataaagaaaagcagtttaacaacaacaacatgagggatggctccagataaaaaaatttccccaaagagcaaacaccaccacaaacagag

SEQ ID NO: 685867 - DNA, 1976 bp, Homo sapiens
ggaagtcattcctagcagaggactcagatatatataggattgaagatctctcagttaagtctacatgaaaaggatggtttcttggagcttccacaaacttaaaaccatgaaacatctattattgctactattgtgtgtttttctagttaagtcccaaggtgtcaacgacaatgaggagggtttcttcagtgcccgtggtcatcgaccccttgacaagaagagagaagaggctcccagcctgaggcctgccccaccgcccatcagtggaggtggctatcgggctcgtccagccaaagcagctgccactcaaaagaaagtagaaagaaaagcccctgatgctggaggctgtcttcacgctgacccagacctgggggtgttgtgtcctacaggatgtcagttgcaagaggctttgctacaacaggaaaggccaatcagaaatagtgttgatgagttaaataacaatgtggaagctgtttcccagacctcctcttcttcctttcagtacatgtatttgctgaaagacctgtggcaaaagaggcagaagcaagtaaaagataatgaaaatgtagtcaatgagtactcctcagaactggaaaagcaccaattatatatagatgagactgtgaatagcaatatcccaactaaccttcgtgtgcttcgttcaatcctggaaaacctgagaagcaaaatacaaaagttagaatctgatgtctcagctcaaatggaatattgtcgcaccccatgcactgtcagttgcaatattcctgtggtgtctggcaaagaatgtgaggaaattatcaggaaaggaggtgaaacatctgaaatgtatctcattcaacctgacagttctgtcaaaccgtatagagtatactgtgacatgaatacagaaaatggaggatggacagtgattcagaaccgtcaagacggtagtgttgactttggcaggaaatgggatccatataaacagggatttggaaatgttgcaaccaacacagatgggaagaattactgtggcctaccaggtgaatattggcttggaaatgataaaattagccagcttaccaggatgggacccacagaacttttgatagaaatggaggactggaaaggagacaaagtaaaggctcactatggaggattcactgtacagaatgaagccaacaaataccagatctcagtgaacaaatacagaggaacagccggtaatgccctcatggatggagcatctcagctgatgggagaaaacaggaccatgaccattcacaacggcatgttcttcagcacgtatgacagagacaatgacggctggttaacatcagatcccagaaaacagtgttctaaagaagacggtggtggatggtggtataatagatgtcatgcagccaatccaaacggcagatactactggggtggacagtacacctgggacatggcaaagcatggcacagatgatggtgtagtatggatgaattggaaggggtcatggtactcaatgaggaagatgagtatgaagatcaggcccttcttcccacagcaatagtccccaatacgtagatttttgctcttctgtatgtgacaacatttttgtacattatgttattggaattttctttcatacattatattcctctaaaactctcaagcagacgtgagtgtgactttttgaaaaaagtataggataaattacattaaaatagcacatgattttcttttgttttcttcatttctcttgctcaccaagaagtaacaaaagtatagttttgacagagttggtgttcataatttcagttctagttgattgcgagaattttcaaataaggaagaggggtcttttatccttgtcgtaggaaaaccatgacggaaaggaaaaactgatgtttaaaagtccacttttaaaactatatttatttatgtaggatctgtcaaagaaaacttccaaaaagatttattaattaaaccagactctgttgcaataa

SEQ ID NO: 685868 - DNA, 870 bp, Homo sapiens
ggaagtcattcctagcagaggactcagatatatataggattgaagatctctcagttaagtctacatgaaaaggatggtttcttggagcttccacaaacttaaaaccatgaaacatctattattgctactattgtgtgtttttctagttaagtcccaaggtgtcaacgacaatgaggagggtttcttcagtgcccgtggtcatcgaccccttgacaagaagagagaagaggctcccagcctgaggcctgccccaccgcccatcagtggaggtggctatcgggctcgtccagccaaagcagctgccactcaaaagaaagtagaaagaaaagcccctgatgctggaggctgtcttcacgctgacccagacctgggggtgttgtgtcctacaggatgtcagttgcaagaggctttgctacaacaggaaaggccaatcagaaatagtgttgatgagttaaataacaatgtggaagctgtttcccagacctcctcttcttcctttcagtacatgtatttgctgaaagacctgtggcaaaagaggcagaagcaagtaaaagataatgaaaatgtagtcaatgagtactcctcagaactggaaaagcaccaattatatatagatgagactgtgaatagcaatatcccaactaaccttcgtgtgcttcgttcaatcctggaaaacctgagaagcaaaatacaaaagttagaatctgatgtctcagctcaaatggaatattgtcgcaccccatgcactgtcagttgcaatattcctgtggtgtctggcaaagaatgtgaggaaattatcaggaagggaggtgaacatctgtgatttattcacctgacagttttgcaaccgatgaggatatgggactgatc

SEQ ID NO: 685869 - DNA, 535 bp, Homo sapiens
tcgcggaaagcgcgccttgtgtgtggaacggggaattcgcccattaggcccgggaggaagatgagtatgaagatcaggcccttcttcccacagcaatagtccccaatacgtagatttttgctcttctgtatgtgacaacatttttgtacattatgttattggaattttctttcatacattatattcctctaaaactctcaagcagacgtgagtgtgactttttgaaaaaagtataggataaattacattaaaatagcacatgattttcttttgttttcttcatttctcttgctcaccaagaagtaacaaaagtatagttttgacagagttggtgttcataatttcagttctagttgattgcgagaattttcaaataaggaagaggggtcttttatccttgtcgtaggaaaaccatgacggaaaggaaaaactgatgtttaaaagtccacttttaaaactatatttatttatgtaggatctgtcaaagaaaacttccaaaaagatttattaattaaaccagactctgttgcaataa

SEQ ID NO: 685870 - DNA, 587 bp, Homo sapiens
tcctcgggaaaagcgcaccctgtgtgtggggtacccgagaatttcgcccattattggccggttgggtgtagtatgaataaaattgaaagggttcaggggcctcattaagaagatgagtatgaagatcaggcccttcttcccacagcaatagtccccaatacgtagatttttgctcttctgtatgtgacaacatttttgtacattatgttattggaattttctttcatacattatattcctctaaaactctcaagcagacgtgagtgtgactttttgaaaaaagtataggataaattacattaaaatagcacatgattttcttttgttttcttcatttctcttgctcaccaagaagtaacaaaagtatagttttgacagagttggtgttcataatttcagttctagttgattgcgagaattttcaaataaggaagaggggtcttttatccttgtcgtaggaaaaccatgacggaaaggaaaaactgatgtttaaaagtccacttttaaaactatatttatttatgtaggatctgtcaaagaaaacttccaaaaagatttattaattaaaccagactctgttgcaataa

SEQ ID NO: 685871 - DNA, 395 bp, Homo sapiens
  misc_feature (328)..(328): n is a, c, g, or t
tgttaacacatgtgcatgacccaaatccttcatctaatgcctgctatattctttgtgtttagggggtgttgtgtcctacaggatgtcagttgcaagaggctttgctacaacaggaaaggccaatcagaaatagtgttgatgagttaaataacaatgtggaagctgtttcccagacctcctcttcttcctttcagtacatgtatttgctgaaagacctgtggcaaaagaggcagaagcaagtaaaaggtagatatccttgtgctttccattcgattttcagctattttctgggttagtgaatagcattcatacgcttttgggcaccttnccctgcaacttgccagataagcactattcagctcttattcccagtctgacatcagcaagtgtgattt

SEQ ID NO: 685872 - DNA, 150 bp, Homo sapiens
gcggatcctctcgatccgctgatcagcacacacagattcagtgtccgtctgggttgagggctggtgcccaggcctgctgaccaatgtccgcctccttacccgccttctgtcttccagtgtcgattcctcgtgcacccatcagtctcacct

SEQ ID NO: 685873 - DNA, 247 bp, Homo sapiens
tgatatcctctacagagctagaagtggtagctgcttttaacatagaatgtaagtaaaaaatctctccatgtaattattgtaacccaggtatgaagaaaggctcacaaggatttaaaaaccacctctgtagccaggcacagtggcttacaacctctaatcccacgactttgggaacccaaggcaggtgggttgcttgagcatgagaattcaagaccagcctgggaaacatggtgaaacaccatctcta

SEQ ID NO: 685874 - DNA, 2033 bp, Homo sapiens
ggaagtcattcctagcagaggactcagatatatataggattgaagatctctcagttaagtctacatgaaaaggatggtttcttggagcttccacaaacttaaaaccatgaaacatctattattgctactattgtgtgtttttctagttaagtcccaaggtgtcaacgacaatgaggagggtttcttcagtgcccgtggtcatcgaccccttgacaagaagagagaagaggctcccagcctgaggcctgccccaccgcccatcagtggaggtggctatcgggctcgtccagccaaagcagctgccactcaaaagaaagtagaaagaaaagcccctgatgctggaggctgtcttcacgctgacccagacctgggggtgttgtgtcctacaggatgtcagttgcaagaggctttgctacaacaggaaaggccaatcagaaatagtgttgatgagttaaataacaatgtggaagctgtttcccagacctcctcttcttcctttcagtacatgtatttgctgaaagacctgtggcaaaagaggcagaagcaagtaaaagataatgaaaatgtagtcaatgagtactcctcagaactggaaaagcaccaattatatatagatgagactgtgaatagcaatatcccaactaaccttcgtgtgcttcgttcaatcctggaaaacctgagaagcaaaatacaaaagttagaatctgatgtctcagctcaaatggaatattgtcgcaccccatgcactgtcagttgcaatattcctgtggtgtctggcaaagaatgtgaggaaattatcaggaaaggaggtgaaacatctgaaatgtatctcattcaacctgacagttctgtcaaaccgtatagagtatactgtgacatgaatacagaaaatggaggatggacagtgattcagaaccgtcaagacggtagtgttgactttggcaggaaatgggatccatataaacagggatttggaaatgttgcaaccaacacagatgggaagaattactgtggcctaccaggtgaatattggcttggaaatgataaaattagccagcttaccaggatgggacccacagaacttttgatagaaatggaggactggaaaggagacaaagtaaaggctcactatggaggattcactgtacagaatgaagccaacaaataccagatctcagtgaacaaatacagaggaacagccggtaatgccctcatggatggagcatctcagctgatgggagaaaacaggaccatgaccattcacaacggcatgttcttcagcacgtatgacagagacaatgacggctggttaacatcagatcccagaaaacagtgttctaaagaagacggtggtggatggtggtataatagatgtcatgcagccaatccaaacggcagatactactggggtggacagtacacctgggacatggcaaagcatggcacagatgatggtgtagtatggatgaattggaaggggtcatggtactcaatgaggaagatgagtatgaagatcaggcccttcttcccacagcaatagtccccaatacgtagatttttgctcttctgtatgtgacaacatttttgtacattatgttattggaattttctttcatacattatattcctctaaaactctcaagcagacgtgagtgtgactttttgaaaaaagtataggataaattacattaaaatagcacatgattttcttttgttttcttcatttctcttgctcaccaagaagtaacaaaagtatagttttgacagagttggtgttcataatttcagttctagttgattgcgagaattttcaaataaggaagaggggtcttttatccttgtcgtaggaaaaccatgacggaaaggaaaaactgatgtttaaaagtccacttttaaaactatatttatttatgtaggatctgtcaaagaaaacttccaaaaagatttattaattaaaccagactctgttgcaataaaaaaaagaagaaaagaaattgtggggcgcgggcccggaaagtttaaacaaggggggc

SEQ ID NO: 685875 - DNA, 557 bp, Homo sapiens
atgagtaggtatctcatgtggtttgattgcatttctctgatgattagtgatgttcggcattttttcatgttcgttggctgcttcttcgtgtccttgcctactttttaatggggctatttgcttttttcttgtagatttgtttaagttcttttctggatattagtcctttgtcagatgcataatttgcaaatgttttctcccattctgtagtttgtccatctgcttcgttgatagcttattttgctgtgctgaagctctttaattaggtcccaactgtcagtttttctttttgttgcatttgattttggggacttaatcataaattatttgcctaggcaatgtccagaagagtattttctagcttttcttctaggatttatatagtttcaggccttacatttaagcctttaatccatcttgagtttgtttttgtatatggtgagaggtagacgtctggtttcctatttggatgccttttatttctttctcttgcctgattgctcaggctaggacttgccgcatactgattgcggtggcttcgataaaggggatctcta

SEQ ID NO: 685876 - DNA, 2359 bp, Homo sapiens
ggaagtcattcctagcagaggactcagatatatataggattgaagatctctcagttaagtctacatgaaaaggatggtttcttggagcttccacaaacttaaaaccatgaaacatctattattgctactattgtgtgtttttctagttaagtcccaaggtgtcaacgacaatgaggagggtttcttcagtgcccgtggtcatcgaccccttgacaagaagagagaagaggctcccagcctgaggcctgccccaccgcccatcagtggaggtggctatcgggctcgtccagccaaagcagctgccactcaaaagaaagtagaaagaaaagcccctgatgctggaggctgtcttcacgctgacccagacctgggggtgttgtgtcctacaggatgtcagttgcaagaggctttgctacaacaggaaaggccaatcagaaatagtgttgatgagttaaataacaatgtggaagctgtttcccagacctcctcttcttcctttcagtacatgtatttgctgaaagacctgtggcaaaagaggcagaagcaagtaaaagataatgaaaatgtagtcaatgagtactcctcagaactggaaaagcaccaattatatatagatgagactgtgaatagcaatatcccaactaaccttcgtgtgcttcgttcaatcctggaaaacctgagaagcaaaatacaaaagttagaatctgatgtctcagctcaaatggaatattgtcgcaccccatgcactgtcagttgcaatattcctgtggtgtctggcaaagaatgtgaggaaattatcaggaaaggaggtgaaacatctgaaatgtatctcattcaacctgacagttctgtcaaaccgtatagagtatactgtgacatgaatacagaaaatggaggatggacagtgattcagaaccgtcaagacggtagtgttgactttggcaggaaatgggatccatataaacagggatttggaaatgttgcaaccaacacagatgggaagaattactgtggcctaccaggtgaatattggcttggaaatgataaaattagccagcttaccaggatgggacccacagaacttttgatagaaatggaggactggaaaggagacaaagtaaaggctcactatggaggattcactgtacagaatgaagccaacaaataccagatctcagtgaacaaatacagaggaacagccggtaatgccctcatggatggagcatctcagctgatgggagaaaacaggaccatgaccattcacaacggcatgttcttcagcacgtatgacagagacaatgacggctggttaacatcagatcccagaaaacagtgttctaaagaagacggtggtggatggtggtataatagatgtcatgcagccaatccaaacggcagatactactggggtggacagtacacctgggacatggcaaagcatggcacagatgatggtgtagtatggatgaattggaaggggtcatggtactcaatgaggaagatgagtatgaagatcaggcccttcttcccacagcaatagtccccaatacgtagatttttgctcttctgtatgtgacaacatttttgtacattatgttattggaattttctttcatacattatattcctctaaaactctcaagcagacgtgagtgtgactttttgaaaaaagtataggataaattacattaaaatagcacatgattttcttttgttttcttcatttctcttgctcaccaagaagtaacaaaagtatagttttgacagagttggtgttcataatttcagttctagttgattgcgagaattttcaaataaggaagaggggtcttttatccttgtcgtaggaaaaccatgacggaaaggaaaaactgatgtttaaaagtccacttttaaaactatatttatttatgtaggatctgtcaaagaaaacttccaaaaagatttattaattaaaccagactctgttgcaataagttaatgttttcttgttttgtaatccacacattcaatgagttaggctttgcacttgtaaggaaggagaagcgttcacaacctcaaatagctaataaaccggtcttgaatatttgaagatttaaaatctgactctaggacgggcacggtggctcacgactataatcccaacactttgggaggccgaggcgggcggtcacaaggtcaggagttcaagaccagcctgaccaatatggtgaaaccccatctctactaaaaatacaaaaattagccaggcgtggtggcaggtgcctgtagtcccagctacctgtgaggtggagattgcattgagccaagatctcaacactgcactccagcctgggcaacagcgtgagactccaccttc

SEQ ID NO: 685877 - DNA, 2279 bp, Homo sapiens
  misc_feature (1984)..(1984): n is a, c, g, or t
  misc_feature (1990)..(1990): n is a, c, g, or t
  misc_feature (2002)..(2004): n is a, c, g, or t
  misc_feature (2047)..(2049): n is a, c, g, or t
ggaagtcattcctagcagaggactcagatatatataggattgaagatctctcagttaagtctacatgaaaaggatggtttcttggagcttccacaaacttaaaaccatgaaacatctattattgctactattgtgtgtttttctagttaagtcccaaggtgtcaacgacaatgaggagggtttcttcagtgcccgtggtcatcgaccccttgacaagaagagagaagaggctcccagcctgaggcctgccccaccgcccatcagtggaggtggctatcgggctcgtccagccaaagcagctgccactcaaaagaaagtagaaagaaaagcccctgatgctggaggctgtcttcacgctgacccagacctgggggtgttgtgtcctacaggatgtcagttgcaagaggctttgctacaacaggaaaggccaatcagaaatagtgttgatgagttaaataacaatgtggaagctgtttcccagacctcctcttcttcctttcagtacatgtatttgctgaaagacctgtggcaaaagaggcagaagcaagtaaaagataatgaaaatgtagtcaatgagtactcctcagaactggaaaagcaccaattatatatagatgagactgtgaatagcaatatcccaactaaccttcgtgtgcttcgttcaatcctggaaaacctgagaagcaaaatacaaaagttagaatctgatgtctcagctcaaatggaatattgtcgcaccccatgcactgtcagttgcaatattcctgtggtgtctggcaaagaatgtgaggaaattatcaggaaaggaggtgaaacatctgaaatgtatctcattcaacctgacagttctgtcaaaccgtatagagtatactgtgacatgaatacagaaaatggaggatggacagtgattcagaaccgtcaagacggtagtgttgactttggcaggaaatgggatccatataaacagggatttggaaatgttgcaaccaacacagatgggaagaattactgtggcctaccaggtgaatattggcttggaaatgataaaattagccagcttaccaggatgggacccacagaacttttgatagaaatggaggactggaaaggagacaaagtaaaggctcactatggaggattcactgtacagaatgaagccaacaaataccagatctcagtgaacaaatacagaggaacagccggtaatgccctcatggatggagcatctcagctgatgggagaaaacaggaccatgaccattcacaacggcatgttcttcagcacgtatgacagagacaatgacggctggttaacatcagatcccagaaaacagtgttctaaagaagacggtggtggatggtggtataatagatgtcatgcagccaatccaaacggcagatactactggggtggacagtacacctgggacatggcaaagcatggcacagatgatggtgtagtatggatgaattggaaggggtcatggtactcaatgaggaagatgagtatgaagatcaggcccttcttcccacagcaatagtccccaatacgtagatttttgctcttctgtatgtgacaacatttttgtacattatgttattggaattttctttcatacattatattcctctaaaactctcaagcagacgtgagtgtgactttttgaaaaaagtataggataaattacattaaaatagcacatgattttcttttgttttcttcatttctcttgctcaccaagaagtaacaaaagtatagttttgacagagttggtgttcataatttcagttctagttgattgcgagaattttcaaataaggaagaggggtcttttatccttgtcgtaggaaaaccatgacggaaaggaaaaactgatgtttaaaagtccacttttaaaactatatttatttatgtaggatctgtcaaagaaaacttccaaaaagatttattaattaaaccagactctgttgcaataaaaaaaaanaaaaanaaaaaaaaaaannnaaaaaaaaaaaaaaaaaaaaaaaaaaaaaaaaaaaaaaaaaannnaaaaaaaaaaaaaaaaataaaaaaaaaaaacaataaaaaaaaaaaacccaatgtggggcccctttggcccaagcaatttttaactttgggaagttttttccgggggcccaaatttgggctcatttggccaaattccctttatggggggcggttaaaaaatacatggcccggttttaaaaaagtgggagtggggaaaaccctggggttccccaatttaaatcctttggaag

SEQ ID NO: 685878 - DNA, 2189 bp, Homo sapiens
  misc_feature (1977)..(1979): n is a, c, g, or t
  misc_feature (2022)..(2024): n is a, c, g, or t
ggaagtcattcctagcagaggactcagatatatataggattgaagatctctcagttaagtctacatgaaaaggatggtttcttggagcttccacaaacttaaaaccatgaaacatctattattgctactattgtgtgtttttctagttaagtcccaaggtgtcaacgacaatgaggagggtttcttcagtgcccgtggtcatcgaccccttgacaagaagagagaagaggctcccagcctgaggcctgccccaccgcccatcagtggaggtggctatcgggctcgtccagccaaagcagctgccactcaaaagaaagtagaaagaaaagcccctgatgctggaggctgtcttcacgctgacccagacctgggggtgttgtgtcctacaggatgtcagttgcaagaggctttgctacaacaggaaaggccaatcagaaatagtgttgatgagttaaataacaatgtggaagctgtttcccagacctcctcttcttcctttcagtacatgtatttgctgaaagacctgtggcaaaagaggcagaagcaagtaaaagataatgaaaatgtagtcaatgagtactcctcagaactggaaaagcaccaattatatatagatgagactgtgaatagcaatatcccaactaaccttcgtgtgcttcgttcaatcctggaaaacctgagaagcaaaatacaaaagttagaatctgatgtctcagctcaaatggaatattgtcgcaccccatgcactgtcagttgcaatattcctgtggtgtctggcaaagaatgtgaggaaattatcaggaaaggaggtgaaacatctgaaatgtatctcattcaacctgacagttctgtcaaaccgtatagagtatactgtgacatgaatacagaaaatggaggatggacagtgattcagaaccgtcaagacggtagtgttgactttggcaggaaatgggatccatataaacagggatttggaaatgttgcaaccaacacagatgggaagaattactgtggcctaccaggtgaatattggcttggaaatgataaaattagccagcttaccaggatgggacccacagaacttttgatagaaatggaggactggaaaggagacaaagtaaaggctcactatggaggattcactgtacagaatgaagccaacaaataccagatctcagtgaacaaatacagaggaacagccggtaatgccctcatggatggagcatctcagctgatgggagaaaacaggaccatgaccattcacaacggcatgttcttcagcacgtatgacagagacaatgacggctggttaacatcagatcccagaaaacagtgttctaaagaagacggtggtggatggtggtataatagatgtcatgcagccaatccaaacggcagatactactggggtggacagtacacctgggacatggcaaagcatggcacagatgatggtgtagtatggatgaattggaaggggtcatggtactcaatgaggaagatgagtatgaagatcaggcccttcttcccacagcaatagtccccaatacgtagatttttgctcttctgtatgtgacaacatttttgtacattatgttattggaattttctttcatacattatattcctctaaaactctcaagcagacgtgagtgtgactttttgaaaaaagtataggataaattacattaaaatagcacatgattttcttttgttttcttcatttctcttgctcaccaagaagtaacaaaagtatagttttgacagagttggtgttcataatttcagttctagttgattgcgagaattttcaaataaggaagaggggtcttttatccttgtcgtaggaaaaccatgacggaaaggaaaaactgatgtttaaaagtccacttttaaaactatatttatttatgtaggatctgtcaaagaaaacttccaaaaagatttattaattaaaccagactctgttgcaataannnaaaaaaaaaaaaaaaaaaaaaaaaaaaaaaaaaaaaaaaaaannnaaaaaaaaaaaaaaaaataaaaaaaaaaaactggtggcccgcttggcccaagcggattttaaccttagcaaggtttagccttgcgcccgaatttgggcctcattgggccatttggccctatagggggccgaataacatttaatgggcccgggtttaaaaaggtcg

SEQ ID NO: 685879 - DNA, 1581 bp, Homo sapiens
gcgaggagatgtgagctcaaaggccataatactctgccttcaccctggcagagaccgtcccatggagtgagtcactgctgctctttgaggcaatgcgcacagggcaacgcttttcagagcggcgacggccaccactacgtgcatgcaatcctggctgatgcgaggatgcgcaagcactggcaccctgtacgcctatcgcagtcaacgtatacacccacaccaccgccacacgggtgcacaaactggtgcatctactccccaccctacgaacataccacaccacctgccctcctgctcgacatccactccaccccacactccacctccaccttcacctcctgcaacccacagctgcacacttccccacggcccccccgaacagctacctctccctaacccttcttgtccctctctgccacacttgcccaccctgcgcagccgccctcctactctggcccaccctgctctgcccacgctcgcgggacacgctacacgcgcccccgccccctcccactcgctgcccaccgcccacctgccctcgctcgactccctcctctacacccacgcgcacccactccgctctcccgaccccttctgccttacgcccacaccccttgctcctgccccctgctggccctcgcccaccactctcccccccctgccccccccacccgcgccctccctcccacccacccctcccaccgggcccccccctgcctgctcccctctcccgtcgcccgccctccaccctagcccccttcctcctccctaccccccccccgccccccttctccctgcctgcccccgcgcgccccatcccacccccccttgcccccctgcccgcgcccccccagcccccccccacacgcccccgcccccccccccctccctcctccctacccacccgtcccccggctgcgcctcccccctcccccgcctcgcccctcccccccgccgcgcccccccgcccccccggccccccacgccccccccgagccactgtctccctgtcccgccgccccccccccacgcgccatccaccccccccccctccccccgcctccctccctcccgcctcgccctcggcccacgacgctaccctcttcggcgcgagccatccccatccgtcccctcacgccacgcacccctccccgacggtcgaccgtcagcccgccgccacactcgcctctacccccgctcccgccccccccttgcctgccacccaccccttcgccccccctccctcgcccccccctcccaccgccctcaacagcccccgcaccctccctcaccaccccacacacccccccccccacctctccccccaccactccaccgcctcccacccctcctacccccctccccctccaccatcactcacctcccctacactcgactcccaccacccaccaacgctaccacatcaccacctcccacaacctccttcgccacccactcaccacccttaaccaccacactcctctcctcccctccaccctacacccaccttcacctccaccacacgaccacacacccctcacctaacacccctcaccctcctcactccccccaacctccccc

SEQ ID NO: 685880 - DNA, 84 bp, Homo sapiens
aagacagcagcatatatctctgcagcgttgcagcgggagtcatcaatgagcagttcttcgggccagggacacggctcaccgtgc

SEQ ID NO: 685881 - DNA, 1982 bp, Homo sapiens
  misc_feature (1941)..(1941): n is a, c, g, or t
ggaagtcattcctagcagaggactcagatatatataggattgaagatctctcagttaagtctacatgaaaaggatggtttcttggagcttccacaaacttaaaaccatgaaacatctattattgctactattgtgtgtttttctagttaagtcccaaggtgtcaacgacaatgaggagggtttcttcagtgcccgtggtcatcgaccccttgacaagaagagagaagaggctcccagcctgaggcctgccccaccgcccatcagtggaggtggctatcgggctcgtccagccaaagcagctgccactcaaaagaaagtagaaagaaaagcccctgatgctggaggctgtcttcacgctgacccagacctgggggtgttgtgtcctacaggatgtcagttgcaagaggctttgctacaacaggaaaggccaatcagaaatagtgttgatgagttaaataacaatgtggaagctgtttcccagacctcctcttcttcctttcagtacatgtatttgctgaaagacctgtggcaaaagaggcagaagcaagtaaaagataatgaaaatgtagtcaatgagtactcctcagaactggaaaagcaccaattatatatagatgagactgtgaatagcaatatcccaactaaccttcgtgtgcttcgttcaatcctggaaaacctgagaagcaaaatacaaaagttagaatctgatgtctcagctcaaatggaatattgtcgcaccccatgcactgtcagttgcaatattcctgtggtgtctggcaaagaatgtgaggaaattatcaggaaaggaggtgaaacatctgaaatgtatctcattcaacctgacagttctgtcaaaccgtatagagtatactgtgacatgaatacagaaaatggaggatggacagtgattcagaaccgtcaagacggtagtgttgactttggcaggaaatgggatccatataaacagggatttggaaatgttgcaaccaacacagatgggaagaattactgtggcctaccaggtgaatattggcttggaaatgataaaattagccagcttaccaggatgggacccacagaacttttgatagaaatggaggactggaaaggagacaaagtaaaggctcactatggaggattcactgtacagaatgaagccaacaaataccagatctcagtgaacaaatacagaggaacagccggtaatgccctcatggatggagcatctcagctgatgggagaaaacaggaccatgaccattcacaacggcatgttcttcagcacgtatgacagagacaatgacggctggttaacatcagatcccagaaaacagtgttctaaagaagacggtggtggatggtggtataatagatgtcatgcagccaatccaaacggcagatactactggggtggacagtacacctgggacatggcaaagcatggcacagatgatggtgtagtatggatgaattggaaggggtcatggtactcaatgaggaagatgagtatgaagatcaggcccttcttcccacagcaatagtccccaatacgtagatttttgctcttctgtatgtgacaacatttttgtacattatgttattggaattttctttcatacattatattcctctaaaactctcaagcagacgtgagtgtgactttttgaaaaaagtataggataaattacattaaaatagcacatgattttcttttgttttcttcatttctcttgctcaccaagaagtaacaaaagtatagttttgacagagttggtgttcataatttcagttctagttgattgcgagaattttcaaataaggaagaggggtcttttatccttgtcgtaggaaaaccatgacggaaaggaaaaactgatgtttaaaagtccacttttaaaactatatttatttattgcaacagagtctggtttaattaataaanctttttggaagtttttttgccggatccacattaattgtttt

SEQ ID NO: 685882 - DNA, 402 bp, Homo sapiens
gttattaatatggtagcgcttacaattagtagcatgcgtagattgcttgcagtagtgtccatcatacctagtatgagtataatggccgaagacgtgccctgtggtacccagtaggctagggcacagttagtctcagagtgcaagccatatcatctatgcgcccgctcactagcgtatgtccattactaggtgtatggctagatgggtagttgagtgttaagtagctcaggcagtagctcgaacagcatagtcgaggcactataaattactaagtatactaggatgagatatcaggttagtcccaatctgctgtggatggccatcattcatttccaaagtatgcttcaagagtcattgttagctgataaatagtcggttgacctcgtgccgaattcctgcagc

SEQ ID NO: 685883 - DNA, 985 bp, Homo sapiens
ctgtctgagccttactttcctcgtctgtaacatgaaaatgccaaatataccagcacctggattgccacgaggatgaggtgattacattgcgtatggtcctgaaacagtggtgtccctcatccccgatcaccactcgtttgacccaatgctcctggtcttcaaactcgaccttgtaaggcaggtatttggatgttctgctttgcagatgagagaaaccgaatagctactggtaataatagacaacgatccgggagaatgtgagagacctgcggtctgcaccatccgaggtgtgttcttgaggtcatagagctgagacatttgcctcactagcccatgtggtcccactctcgtgtcattctgatcttggcctggggtcagttgttctggcaatgcacctagctgttctggctgggctcagagctcgtttatgacccatgatggtggacttacaccccccaaactaattaactaactgacaagctgtgtcatgaagctgcactcctggtgacgtgtaggtggcatgataatcatcctgttttttcacttattcagcaccttctgaagggtctttttatgagaccgtttaatggattatccattgttctgggcagtttattcatggcaaatgaaagcctcaacggtgctcccatgccggtctgctggaacagtgttttataagtccattttttccccgaaagctcacagaagacagaacaaaagaaaccccccgctggttgtgggcgcctgcgcccctaaagaggctcaacaccccctctggtgtgccgggcccagtcgggatgtaacaggcacactcgctgttccaagggacctggcacggaaggcgtggcctccaaagcaacgccgggcccgcgcgcgtgaacccacgggctgaggtcttggctcctcgccgcatcaccccccgacagagagcagcaggagagagaagagagaaaaacacagagcaacaagaagcagagacactgcc

SEQ ID NO: 685884 - DNA, 564 bp, Homo sapiens
  misc_feature (1)..(1): n is a, c, g, or t
  misc_feature (72)..(72): n is a, c, g, or t
  misc_feature (116)..(116): n is a, c, g, or t
  misc_feature (120)..(120): n is a, c, g, or t
  misc_feature (128)..(128): n is a, c, g, or t
  misc_feature (135)..(135): n is a, c, g, or t
  misc_feature (147)..(147): n is a, c, g, or t
  misc_feature (152)..(152): n is a, c, g, or t
  misc_feature (154)..(154): n is a, c, g, or t
  misc_feature (158)..(158): n is a, c, g, or t
  misc_feature (162)..(162): n is a, c, g, or t
  misc_feature (165)..(165): n is a, c, g, or t
  misc_feature (173)..(173): n is a, c, g, or t
  misc_feature (175)..(176): n is a, c, g, or t
  misc_feature (186)..(186): n is a, c, g, or t
  misc_feature (195)..(195): n is a, c, g, or t
  misc_feature (198)..(200): n is a, c, g, or t
  misc_feature (205)..(205): n is a, c, g, or t
  misc_feature (208)..(208): n is a, c, g, or t
  misc_feature (218)..(218): n is a, c, g, or t
  misc_feature (225)..(225): n is a, c, g, or t
  misc_feature (234)..(234): n is a, c, g, or t
  misc_feature (236)..(236): n is a, c, g, or t
  misc_feature (238)..(238): n is a, c, g, or t
  misc_feature (256)..(256): n is a, c, g, or t
  misc_feature (269)..(269): n is a, c, g, or t
  misc_feature (274)..(274): n is a, c, g, or t
  misc_feature (301)..(301): n is a, c, g, or t
  misc_feature (315)..(315): n is a, c, g, or t
  misc_feature (333)..(333): n is a, c, g, or t
  misc_feature (338)..(338): n is a, c, g, or t
  misc_feature (366)..(366): n is a, c, g, or t
  misc_feature (377)..(377): n is a, c, g, or t
  misc_feature (379)..(379): n is a, c, g, or t
  misc_feature (406)..(406): n is a, c, g, or t
  misc_feature (414)..(414): n is a, c, g, or t
  misc_feature (449)..(449): n is a, c, g, or t
  misc_feature (475)..(476): n is a, c, g, or t
  misc_feature (508)..(508): n is a, c, g, or t
naacaagtatacaaaacagttgattactaatcgtgtattgaaagcagtaagaagttccacgacaccaaatanaccagttctgaagattccccaagaaaaatttaaaaactccagcntcantatttatnaaaatanaaaaaaaaaaantagangntgtntttntcnatggcaantnngccccttgcnggccgccgncgnnncagcnacntcacacaccncggtggngtgctcccntngngctgtgggtctaggtggnccgcctgcccggnttgcncgcgctcctgctggtgagggcccaganatcctgccaaagtntctgagcgagctcgagtnttggngacgacggacccactctggccacacggngaccgtgggananatggggccctgcgtcccataggttgcntgatggtnggtagggcggcctgcggcatagtggggtggttgtnggctcccagcttggtccctgggaacnntgggagcacagggacaagcacatggttatggnatgcagggtgacccaaggtcaagcgagttgtggggatctctactgtgaccatgcag

SEQ ID NO: 685885 - DNA, 859 bp, Homo sapiens
tctgagaggaagtaaggactggtgtgaggcacgaggtctgagaggaacccttctctgaggatggacacttctcacactacaaagtcctgtttgctgattcttcttgtggccctactgtgtgcagaaagagctcagggactggagtgttaccagtgctatggagtcccatttgagacttcttgcccatcaattacctgcccctaccctgatggagtctgtgttactcaggaggcagcagttattgtggattctcaaacaaggaaagtaaagaacaatctttgcttacccatctgccctcctaatattgaaagtatggagatcctgggtactaaggtcaacgtgaagacttcctgttgccaggaagacctctgcaatgtagcagttcccaatggaggcagcacctggaccatggcaggggtgcttctgttcagcctgagctcagtcctcctgcagaccttgctctgatggtcctcccaaatgacctccacccttgtccttttatcctcatgtgcaacaattcttcctggagccctctagtgatgaattatgagttatagaagctccaaggtgggagtagtgtgtgaaataccatgttttgcctttatagcccctgctgggtaggtaggtgctctaatcctctctagggctttcaagtctgtacttcctagaatgtcattttgttgtggattgctgctcatgaccctggaggcacacagccagcacagtgaagaggcagaattccaaggtattatgctatcaccatccacacataagtatctggggtcctgcaatgttcccacatgtatcctgaatgtccccctgttgagtccaataaaccctttgttctcccaaaaaaaaa

SEQ ID NO: 685886 - DNA, 882 bp, Homo sapiens
taacatggcacacttaagtgagatatgcacggttggtctgtgtctagcttatttcatttaacataatatcctccaggtccatccatgtggtggcaaatgacaggatctttctctatcttttcttttttgggttgagacagggtctccctctgtcacccggggcttaagtgaccctcccacctcatttccctgagtagctgggactgcaggtgcatgccactatgcctggttaattttggtatgtttggtatagatggggtttcgcgatgttgcccaggcgggtctccaactccggggcttaaaccatccttctgtttcgcttccaaaagtgcggggattacaggcatggactgccatgcctagcccaggtcttctttttatttttggaaagggagtatggctctggtggcccaggcggagtgcacggggggcgaacctcagctcagggaacctccacctcccaggtgtcaagtgattccccggctacagcctccagagtagctggggtcaccaggtgcatggcacccagggcggataaatgagcaatcctactcacagaggggttcaccatgtgggtccggctggtcttaaaatcctgaccctaaagtgatccaacccacttgcgccccccaaagactgggactaccgggtgtgaacccagggcctggcaagggttcctataaggccaaaaggtcagcgaggcgcgtgtgtgttgctttgacgattttcactaccctgtgagggacaaaaggccgatttggagggaaaccgcaatgaacgagtcatacggatagccagtatcaaagatggctatgttgaggagggtacaactcatgccaatttagagactaaagtgtacacataagtcttcactctctttcg

SEQ ID NO: 685887 - DNA, 935 bp, Homo sapiens
ggagccattgtggctcggcggttgcgcgggccctcggaccctcagtgtaggctgagggttcgagggcacgagtgcgaggccaacctgtccacatggataaaacaagtccgaacagacacaaaaatttgtgggcgcactctcaggccgaagaagaaggtgttttgttagccaccattttcgttgtggtggcgcgggcaggagtcgccaggggaaggtaacggtagacccttggaggtcgaaagccgttccccccaaggggcaagtcgtcgtctttagcatcgcgtgtgttcggttgtctttcccaataaagaatggccgcggggtcccaccccgttgttgttttgcgaccaaagacccaaagaaggagggtctgacaggggatcctgggagcgtttatgaaccacacgggtgtcccaaaagggaagcgcgccggcatttaatattcacggccccgcgcgcgggtgggtctaacggaaaacacccagaaattatcaaggtgacagcaacttatattaagacttgggtccccccggggctactggggtaaaggcaatatttcctattggcttgagagtaaaactcctagaaccagttcctgtttctgtacacaacgatgttcctttagagtcaaagtgagaacacaacaacctacaaattccatgcaggggaacatccgtggaagttctttgaaaaaaggaacgaaaccttgaaaaatgccttctgtgttgtgggaactacaatgattgatcttttaccccaggagactcgtggaatttgtgtcttgggcacggctcttgacagatggtgtgggatattcaagtttgccaggtatgcaggatttaatgctggatataaggaagtgagaagtcacaaaactttacagggccctcattggaagattttccgaaacagggcatcgaccggaaataccaggg

SEQ ID NO: 685888 - DNA, 665 bp, Homo sapiens
agtcttttagacagacagcctctctgttctggaaggacaacaattgctacatcaagacaggattgtcagcatattatagtacatcccatggattttatgaggagaagaacgtggaagaagataatcagcttcagcaaggtattcctagtgatgtgtattgcctagttgatccgttcagagatagggcataggaacagagtggtgactagttttggggcaaatttcttctaagcatgcttgaatagcaatagtcgctaaggattcacgtcacattttgatagtagccacttgttattgtccaatgcgtctaggtttgatttgtactcgactaatggcgagatcggtttttcttgtgtgctacagattaaacggtatatatacttttgaacacttctgggggaagaaaataacttataggggaaatcaatggcatggtggggggcatcacgcattggcgcgcccgtttccaacttttaggttcgcccctgattggcgacgaggccaaagacgtaacactaaactgatatccgtcacctttcccaagatggaattcctccggcattccctcagtaaaattaggcctttagctttgctatatcaattcgaacccgttacgtgggaaactcttgctcccaagaaggggcattcgggaacatcggacctgt

SEQ ID NO: 685889 - DNA, 340 bp, Homo sapiens
ccctttcccccaagtggttttccattcccagggtcagtgcaggatccaggcctgcatgtgtggcgggtggaaaaacttaaaccggggcctgtggggcaaaaaaaccagggggtttttttttcggggggctcctacctagtgctgcccaatggcccaaaaaaggtttcccctttgcccctgtggataggccagcagtcatcccgggatgagcagggggcctgttccgtgctggctgtgcccctcaacccgctgctgggagagcggcctgtgcagccccgcgaggggccccctgcagatgttcaataaaggagacaagggctttcccagctcttttcctgca

SEQ ID NO: 685890 - DNA, 335 bp, Homo sapiens
tgccgaggatccccatcgacctgaatatcattcatgctgttgtaatatcacttaggaggagcagagtgtgcaacagaacttagacgggatttggtagagccaagtatgctaagtgtacaatatatttaattaattttacaccttaaacaaagaaatgtggtcactaaaaataaaagtatatatctcggaattaatgtactcttgctttgtcaagctgtaagctatagtttccaaggtattcatgttactctaactctaaaaagtgatgtaatctggtcagcaaatgtagtaattcaaataaaggcatttacataataacatttcagggttgcatg

SEQ ID NO: 685891 - DNA, 301 bp, Homo sapiens
gctcacatcaaactagcgggactgcggttctccccaagagattctcacccgttgcagagcgtgaggttgtgtccaacataggtgtccatgctccagccctgtgcagggcatgcacatctttgagagaacgcgggtcctggccgctcttcttgtgggtggctcgcggggtcctctttgccgtcttcctcatccttctgcgcttgtaccgtatgaagaagaaggatgaaggcagctctgcactgggcaagaaacccatctacaagaaagcccccaccaatgagttctacggcttcgtcggtca

SEQ ID NO: 685892 - DNA, 109 bp, Homo sapiens
tccggccaaaaaattttttggggaagcctttaaaaatatttttgggggtcaaagcctgtttttttttgggctaaaaaattacccggattaaatggcttatatttttaga

SEQ ID NO: 685893 - DNA, 372 bp, Homo sapiens
gggcttttaattccttgatgctaaaagaaaaggcatgggttttatgagcttcccagtccccttcccctttaaccttttaccaatctttcagagggctgcctagtagccaaggttattcctgggcacaggaaaaacgggccctccaagggcccaaagctttaaaggtggccttttttttcccaccccctggctggaaaaggggccaaccccctcccgggtgagtgatacttttccgttttttttactccttccacaaaggaaatgtggggtggggcagaggtcttttttcctttaatactgggaaaatatttaagagcctccctgttcccttatggctggttttgctataaaaattgggaaataaaggcccct

SEQ ID NO: 685894 - DNA, 179 bp, Homo sapiens
gtgggcagccctgatggctgaaggggactgtctcctctccggagtccagcaccaaggggggttgggtcatatacgggattcttctgtatgggaagttcccagacacggcccactttggtgccctcacccagttacgcagtatgcctggtatccccctctttcctcctttctcttcaatg

SEQ ID NO: 685895 - DNA, 296 bp, Homo sapiens
  misc_feature (244)..(244): n is a, c, g, or t
ataattagcctcagatgtatatatcagtcaattcaccaatcgccttttgtcccacacattattcctcttccaccccattactgacccaaacatggatctcagccctttttcttcatttccagagtagcaacagcaatacaaaaaatctagtcaaagacacatgtataataaattcagctgtactcggagaggagagtgtggaatgggggcagaggaattaaaactcaaggtcaacaatttttanaaactcaggagactaatattcataatgcataaagaacttttacaagctgggt

SEQ ID NO: 685896 - DNA, 168 bp, Homo sapiens
tagggctgcacctacagcacatggaagttcccaggctatgggttgaatcagagctgtagctgctggcctatgccacagccacagcaacaagggatctgaaccgtgtctatgacctacaccccaactcatggcgatgccggatccttaacccactgagcgaggccaggt

SEQ ID NO: 685897 - DNA, 568 bp, Homo sapiens
tcgtgatagctgatctccagaggatcccccagagaaacagctgaccattcttgatgattacctaatcgacatgtaagttatctttctgccttaaatatgtataacaggacagagcccttaaatctgattcaattattaattcctgatttacaagtgctatggtgagctaacagaacttatcaatgcctttattgcactttactagccaaatttagaaggttggaattagtctctcctatctagtattctgtcagtttgcccagcttgtacttttaattttgcttctaatggtaatcagccctatcccttgaaataaaataatctacattttgggagggctaattcttcattgtgccaggctgtcccatgcactgcaggggtgagtgtctttaggcttaaatgccaacagaagcccctagtaaatatgacaaccaaaaaagtgcccctacacatttctcagcatcctctggaatgacaggttactgcctctagttgaaagccactggcacaactttggtttttaagctcttatgccatttattttaattgcccagacatcaattccacc

SEQ ID NO: 685898 - DNA, 912 bp, Homo sapiens
gcagcagctgtggcatgtgtgatgtgaccccatctgcctgtgggcagggtgagtcccttccctccccagtgcctcgcttccccagccttctgaaagaaggaggtttagtgtgttgatctgatggggctggcgtgggagaagcagacaccctcccagcagaggtggcatgtgatgggtgggcatgtgatgatgttatgcaaatgtgtgacaatcttctcgtgtggtgtgatgcctgagacttgctgcaatggcattgtgtgtggtggttattgtgtgccctgttccatgtgcagaaagatgcaatgatgtgggcatgtggatgtgtggatgctacatgtggtgttggccatgctgtagtgtgtccatgcaactgtggtgtgttggtaccccatgtgccgtggtgtcatagacatgggacagtcggcatgtggtgacacatgtggacattgatgtggtgtccccaatgacttgccaccgtcacaccaacactgcaaatatcaatattaagtaagcatgtggcagcatgtggtgcatgctcctgggacaactggctttctcatgtgcctattgcctgtgatgccttcggaagggtgcttgtgagatgctgcggaatgaacatgtgcagttgctctgtgtggagtttgcaagcagtgagctgtcaccatgtgatggtgctgaagcttgggccaactgtgtgatgttggggggtgcccccttgtgggaccacttttgctgccatggccctgggatgggcttggtatgggggctcgggccttgcttggggcgcccgtgtccccagggaagtgcactgtgtggccatggttctggtgctgtgatgtgccccgtgtggggcttgttgcgctgtatgcctcaccgtcatgcccttggggttgttggctacgtccagatccg

SEQ ID NO: 685899 - DNA, 365 bp, Homo sapiens
  misc_feature (56)..(56): n is a, c, g, or t
  misc_feature (142)..(142): n is a, c, g, or t
  misc_feature (165)..(165): n is a, c, g, or t
  misc_feature (200)..(200): n is a, c, g, or t
  misc_feature (248)..(248): n is a, c, g, or t
  misc_feature (296)..(296): n is a, c, g, or t
  misc_feature (323)..(323): n is a, c, g, or t
  misc_feature (347)..(347): n is a, c, g, or t
ggtcatgaagcatcctttcattcttcttcttcttttttttgggggggcggagcggnggagggatctcaaagttttagtcttccagaatccaaattaaaggttgcccctgatgggggccaggttccgccacagaacatcttanatgtcagccttgacctcacttancagggattacagaaatgagatacattttgaagganagttgctggtatgttcactgtattctaaagtgcctgggataaagctgnctcatggggtgcttccatatatattcatatataattgggtgaagtganttaaatgaattaagaagtggctggcanaagtaggcagaaaaaggaccttgnaaatggcatttgttcttg

SEQ ID NO: 685900 - DNA, 810 bp, Homo sapiens
  misc_feature (281)..(281): n is a, c, g, or t
gctttcttgcggaatcaccatggcggtgggaccctgtacacgtatcctgaaaactgagggccttcaaggctctcatcgctgctcagtacagcgggctcaggtccgcgtgctctccgcaccaccccacttccatttggccaaaccaaccgacccctgaatttctccgcaaatttcctgcggcaaggtcccagcatttgagggtgatgatggattctgtgtgttgagagcaagccatgtgcctacttatgtgagcaatgaggagctgcggggaagtactccangaggcaagcagcccaggtggtgcagtgggtgagctttgtgatcccgatatagtgccccagccagtacctggggtgttccccacctgtgggcattcaatgcaccagaaaaacaggccactgagactgcaacaggaggaagtgaggcgaattctggggctgctgaatgcttacttgaaagacgaggacttttctggtgggcgacacgagtgacatgggtgaccatcaccagttgtctgccaccctgttgtgggtctattgagcaggtctagagccttcattcgcaggctttccaatacaacggtggtcctactggataacagcccagtcgggggttgggcgatgactgggtggaaatggcagttgtgcaaacgtgggacaccacctaaggacaccggaaagagcttcgggcaaacaaaccgtgggaggggaaaggcgcggctgagaaggaaagggctgggggcaggagcactcgcaaaacggggaaagacagacactgcgtgcagagggggacccaccacactctaggagg

SEQ ID NO: 685901 - DNA, 1313 bp, Homo sapiens
  misc_feature (426)..(426): n is a, c, g, or t
  misc_feature (620)..(620): n is a, c, g, or t
ggtgcaccgtcgcgggcccccctggtcccggccagctggtgaccgtgcttggtggagtcattgccatcttaccctctcatctcgctgtgaccctgacaaaatgtattagtgctggatgccatacgctgggcgctgatgacgtcgcccccggaggaggaggatcgagggaagcgcccgagtgccaggagcggacggagccatttgacccgggactcccgtacgtcctgttagagcaggcgctgaccatccccagccgctctccgtgtgcactggtggatcgtggcttgatggatgccaagtaatggtgcaatctttgcattagtggcgagaacagttgccgaggagacgtgcctgtgctgtccctgtggaacaacacgctcgcgacgaagtcgatgacagggagctgctaacttgaggtccccttgnaaagataacgagccgtgtttaagctggcaagatgcgagttagcctcgcatggatcttgatcggggctagaatagcagggaagccaaactcgtgcgattagacgctttcgttgtggacatctaggctgctcttgctcgtatctgaaggggcacggcataaggtatgaagtctcgagggaaatagccccatcgagntgtgcttgcgcttgcgcatagtagccttgcgttgaagccgaacagaaccaatgaagactggtgcgcaagagaccaattaccatgggtatgggagtctccagactattcgactccttgcacgtacctatggaaaacccttctgctgaatattgctaactgagtgcatcctggggcagaatcgggctaccagatatgccccaattctagctgcgcttgtcattctggcagagttgtataccccttgcttgcctttgatgccaccacgggctgtgacgggagaaggcctttggaggcccctcgcgagtacttccaagcacatgtgttagcggccgatgaggttcccggggttgaatgggtgactcgcctggttacaccgagggcaaacagacccttcggacgcgcgtcaagacgccaaggccctggcccccgaacgacacatgttggggcgcgcacacgactcaacggaaaggacaagagttgtcaccggcccagagggacggggccaatctgaagcccacattgcgggcgacaagcggagatggggactctactctccgggagcaaacatgcggcaacaaaagagaccgcgcagaacgggcgccaccgggagaaccacaagatccacaagcagagaattgtggccaccagggcataagtccagcaacaacacgagtcgacgagacaaccgctgag

SEQ ID NO: 685902 - DNA, 389 bp, Homo sapiens
ggagccttgggtaaaacctaaacactagaatacagcgtaccaggctataagcacaacatgaactaaaatgctacgtggcctacaagtagatgaagtttgcatacgctatgagcatatgtactatttttcacaatgcaagttcagtcaacattcccaaataaattccctcattgggtgggaactacaaatacacatgccatgggaacctaaagggaggaaagtctatggaacaaagagatgggacgcctctggaaatatctgcactgttactttaaacatgaacgcacaggccggtgcagtggctcacgcctgtaattccagcagtctgggaggctgtggatcacttgagctcatgcgttcgagaccagcctgggcaacagagtgagagt

SEQ ID NO: 685903 - DNA, 104 bp, Homo sapiens
caatcttattaatctctatgaacctctcacggtaggcatgagacagtcaggatcctacagccccctaacaactctcattttctctcagtggcacgtggtgcacg

SEQ ID NO: 685904 - DNA, 548 bp, Homo sapiens
ttcgaggagcatcaaaaatcagtcagcaacattgaaataatgcatatttgtcacttcattagcaaatgtacaagtccttgcgagtacaagatcttgtgctaggtgttgagggttccgtattgataaaacacttgttaattttaactgaaatacaattttaggcaagcaccccaaattatgccataatgaaatcaatggataggaaggcggtgggagggctttaggaacacagttcagaaggagctattaatttttccgggtagaaccaggagtgttttaagacagagctgaaatttgcacaaggtctttggtaaaattttgccaggtaaggtgcagaagtgtaattcaggcacagaagataacaagagaaaaacttggaagcaaaaaaaacccaacaaaaatccccccaacaaaatacagttgttcgtgtgattcaatataatttcttaaaaatagtttagtgtgacacaatatacagtgctggagtagaaaaaagaaggatagttgagaccagattttaagggcattgtatgacttgatgaatgcgt

SEQ ID NO: 685905 - DNA, 294 bp, Homo sapiens
gggtagtaatactacccctagacatttctcagaacgaggtattctttttttttcttataagagatggggtctcgaccaaggcttggtggctcatggccaggtgtggtggctggcgccttgtaatcccagctacttgggaggctgagacaggagaatggcttggacctgggaggcggaggttgcagtgagttgagatcactgccatttcactccagcctgggccataagagcaaaactctgtttcaaaaaaaaaaaagggggggatttagaactttgggtgcggaatacggccac

SEQ ID NO: 685906 - DNA, 434 bp, Homo sapiens
atccgatttggtgtgtgattcagaagaaagagcaaagaggggaggggacactagcctggcagccaggggacacagggcagccaagctgcttcaggctccaccttgtcccagcccctgccagccacacgagggctgaagctctgctcctgggggaggttcagccaatgctgggtccagcagctgctgcagcttccaggagctttaacccttcctggggcacccaggctgcctgggacacagccatgagataggcaaggggacagggaggtgacaggagggccagtgtatttgaaagtgcatgcaagtgggtgtgccagtgtgtgtgtatgtgtgtgtgtgtgtgagagagagagagagagagagagagagagagagaaagagagagagatgggtaggaagacagtctgtctctttgaagccctcaggaaaggaca

SEQ ID NO: 685907 - DNA, 854 bp, Homo sapiens
agcggggaggatgcgtcatagagggcgggggcgacgaggggtggcggcgtcggagtgcgcctccgcggggacggtgtgcggtcccggctggtgaggccgcgtcctgtccggggatcgtcgagggactgggggagctgtgggcacatggggctggggtggtgtggagactgccagtggctggagtcaacggtctaggggcaaggtcttggtggctatgggagaggctatgttcgtgcacgagaagtctgaggtggtggagttatgccatgctttatggcttgtatgagtgataggcacaattggatagagaatgaagcagtcatattgttggtacgttccacgagagctgaaggtagtctgggggaagttctcgatcgtaccataactggtggaagagttgcatgggaagacgtgttggatgggccattggtaggcatgagacgcgagcgaagttggatctcgatggtaggcggtattacacaatggatgccacacaattggaaccttttcagttccaggtatataccagaatgtggggtagaatgtgttgtgaagcaactctaggaacgacaccgtgaggtacaagagttattaattacctggggcacagttggtggcgtgggggatcgagggcgaaagtagtggatttcccaagaggtcgttgaagtgggcggttgtctttcagagacaggagttcgcggtggaaattggttggcagtagcttgtgtcgggtcgtattccaaaggattccgaacgttgtcctggaatacgcgctggccgaagggaagttgggggtatcttgcatttacttgctccgcggaatgacaaagtggtagtgttggaacaggagaagc

SEQ ID NO: 685908 - DNA, 708 bp, Homo sapiens
cgcaatcccggcttatgtccagctgctggtggattattccaagatggaaaaaatttctttccgaaatcctgtacgacagggccaggggccactggtcctcagaccgccccgctgcactttagaatccctgggggaaggctggatccggtggtttcatgccttttgggagggctaaggcaggaggattgctgaagcccaggaattaaagcccagcctgggcaacatagtaagaccttgtctctacaaaattaaaaattaagtttgagcgtggtggctcatgcctgtaatcccaacactttgggaggccaaggcggatagatcacctgcagtcgggagtttgagatcagcctgagcaacatggagaaatcccgtctctactaaaaacacaaaattagccgggcatggtggtgcatgcctgtaatcccagctactcgggaggctgaggcaggagaatcgcttgaacccgggaggcggaggttgtggtgagctaagatcacgccatcgcactccagcctgggcaacaagagcgaaactctgtctcaaaataaataaataaataaataaaattagttgggtgtggtggtgtgtgcctgtggtcccagctgctctggaggctgaggcaggggcatggcttgagcccaggagttcaaggctgcactgagccgtgatcgcaccactgcactctagtctgagcaacagagtgaggcc

SEQ ID NO: 685909 - DNA, 1069 bp, Homo sapiens
  misc_feature (264)..(264): n is a, c, g, or t
  misc_feature (301)..(302): n is a, c, g, or t
  misc_feature (974)..(974): n is a, c, g, or t
  misc_feature (1058)..(1058): n is a, c, g, or t
ctccgctctggggaggcagcgctggcggcggggctggggccactgaggaaatccatccgcgccgccgccgccgccgccgccgccgccgccgcctccgccgcggaggaagacagcgccgcccgcgcaccgccagcgacccccgccgcagagtcccaccgccacaggcctcgggccagcggccaggagctgcctcccccgagccccggtccgcggcccccagccgcccccaaccctgccccacgggcccggcgccatgagtgagcnggagcaactgagaaaggaggccgagcagctctggaannattattcgggatgcccgaaaagcatgtggggactcaacactgacccagatcacagctgggctggacccagtggggagaatccagatgaggacccggaggaccctccgtgggcacctggcaaagatctatgccatgcactgggggaccgactcaaggctgctggtcagcgcctcccaggatgggaagctcatcatctgggacagctacaccaccaacaaggtccacgccatcccgctgcgctcctcctgggtaatgacctgtgcctacgcgccctcagggaactttgtggcctgtggggggttggacaacatctgctccatctacagcctcaagacccgcgaggacaacgtcagggtcagccgggagctgcctggccacactgggtacctgtcgtgttgccgcttcctggatgacaaccaaatcatcaccagctctggggataccacctgtgccctgtgggacattgagacaggccagcagacagtgggttttgctggacacagtggggatgtgatgtccctgtccctggcccccgatggccgcacgtttgtgtcaggcgcctgtgatgcctctatcaagctgtgggacgtgcgggattccatgtgccgacagaccttcatcggccatgaatccgacatcaatgcagtggctttcttccccaacggctacgcnttcaccaccggctctgacgacgccacgtggcgcctcttcgacctgcgggccgatcaggagctcctcatgtactcccatgacaanatcatctgtgg

SEQ ID NO: 685910 - DNA, 762 bp, Homo sapiens
tccaagcagatacctgatctaagctgaacatctgagaacctaattaatctctgacaaactggtacagtcttttcaaatgtgaccattattgagcaaatgattagttaggaggtctaacctaatggaaataatgtgtcttctgtttctgttacttttaaacttttaatgtgtcttgtttctgatacttttaaacttttattatgtattaagtttctttagtgttttgtgtttgaaacctgttatttttggaacttagtattatgtttgaaaatcacttataaaaacagtggagttcattaaaaggaataataatatcacaatcaatttacacttaaaatgcttgactgagcttccagctttttgtttattctaggaactatcgtgagcataggtgaccctaagaaaaaatatacaagatatgaaaaaattggacaagggtaagtatttgtgactgtattacgataatattcagtattcagtatttcctggctttatagcatgatgtttattttgcctgccgacatcaagtacttatatagtattctgtgagtggtaccctgggggattgtgtaaataaatatgcagtttttgtagatgctgttaaaaaactgtactagtgtagcatgacgtgttatattttttcttaagtgtcatttcccatctgtgataattagagggaagaattgcccataaaatatatttaaaagacaataagaatatttactgcatgactataagcaataaaaaatgcatttaaatcaa

SEQ ID NO: 685911 - DNA, 1078 bp, Homo sapiens
  misc_feature (264)..(264): n is a, c, g, or t
  misc_feature (301)..(302): n is a, c, g, or t
  misc_feature (457)..(457): n is a, c, g, or t
  misc_feature (460)..(462): n is a, c, g, or t
  misc_feature (487)..(487): n is a, c, g, or t
  misc_feature (543)..(543): n is a, c, g, or t
  misc_feature (554)..(554): n is a, c, g, or t
  misc_feature (561)..(561): n is a, c, g, or t
  misc_feature (581)..(582): n is a, c, g, or t
  misc_feature (587)..(587): n is a, c, g, or t
  misc_feature (591)..(591): n is a, c, g, or t
  misc_feature (595)..(596): n is a, c, g, or t
  misc_feature (600)..(600): n is a, c, g, or t
  misc_feature (609)..(609): n is a, c, g, or t
  misc_feature (614)..(614): n is a, c, g, or t
  misc_feature (621)..(621): n is a, c, g, or t
  misc_feature (623)..(624): n is a, c, g, or t
  misc_feature (629)..(629): n is a, c, g, or t
  misc_feature (633)..(633): n is a, c, g, or t
  misc_feature (637)..(637): n is a, c, g, or t
  misc_feature (640)..(640): n is a, c, g, or t
  misc_feature (646)..(648): n is a, c, g, or t
  misc_feature (983)..(983): n is a, c, g, or t
  misc_feature (1067)..(1067): n is a, c, g, or t
ctccgctctggggaggcagcgctggcggcggggctggggccactgaggaaatccatccgcgccgccgccgccgccgccgccgccgccgccgcctccgccgcggaggaagacagcgccgcccgcgcaccgccagcgacccccgccgcagagtcccaccgccacaggcctcgggccagcggccaggagctgcctcccccgagccccggtccgcggcccccagccgcccccaaccctgccccacgggcccggcgccatgagtgagcnggagcaactgagaaaggaggccgagcagctctggaannattattcgggatgcccgaaaagcatgtggggactcaacactgacccagatcacagctgggctggacccagtggggagaatccagatgaggacccggaggaccctccgtgggcacctggcaaagatctatgccatgcactgggggaaagaataaangannntgaataagagcctcaaaaaaaaaanaaaaaaataaaaaaaaagaaaaaaaaaaaaaaaaaaaaggtcaaaaaaaaaaaganaaaatcataangggaaanaaaaaaaaaaaaaaacgaannaaagnaaanttgnngcanaataggggnattanaaaaaanannaaaanaaanaaanaanaaaaannngagaggacaacgtcagggtcagccgggagctgcctggccacactgggtacctgtcgtgttgccgcttcctggatgacaaccaaatcatcaccagctctggggataccacctgtgccctgtgggacattgagacaggccagcagacagtgggttttgctggacacagtggggatgtgatgtccctgtccctggcccccgatggccgcacgtttgtgtcaggcgcctgtgatgcctctatcaagctgtgggacgtgcgggattccatgtgccgacagaccttcatcggccatgaatccgacatcaatgcagtggctttcttccccaacggctacgcnttcaccaccggctctgacgacgccacgtggcgcctcttcgacctgcgggccgatcaggagctcctcatgtactcccatgacaanatcatctgtgg

SEQ ID NO: 685912 - DNA, 355 bp, Homo sapiens
ctccgctctggggaggcagcgctggcggcggggctggggccactgaggaaatccatccgcgccgccgccgccgccgccgccgccgccgccgcctccgccgcggaggaagacagcgccgcccgcgcaccgccagcgacccccgccgcagagtcccaccgccacaggcctcgggccagcggccaggagctgcctcccccagtgctgggatgaggaggaaataatgagatggaagagattgaagagaaggtgttagaagagaagagaagaagtgtagtgagtaggttgtgtgataagatctgaggtagttaagggattttgtatgattaaaagtattatggatagaagagaatagtga

SEQ ID NO: 685913 - DNA, 181 bp, Homo sapiens
  misc_feature (179)..(179): n is a, c, g, or t
  misc_feature (181)..(181): n is a, c, g, or t
atgcgttttgcctcgtctctagaagtttccccccgcatctggggctggtagcagtgagccctcactctactcagatgtcacaaggtatgtgacacagtgaccctatgaggtgtgaaatagcagaacccagtgagtgcgaagccgcagatgacccagatctccttggaatgtcaccttantn

SEQ ID NO: 685914 - DNA, 93 bp, Homo sapiens
cccagcacggagagcggcccgcggcaggcgagcgtaaatgtgtgctaagtgcacgagtgcgtcccgactggtagtggtgcattcatgcacccg

SEQ ID NO: 685915 - DNA, 344 bp, Homo sapiens
ccaatctggcccgccgctcgcccagaacttacctcccctaaaagcaccctcagactgatctggctattatctgagggcaagggcatggtgccacacccgctcaagtgtaaggaactgcgtgcctgctcctcaggcccccatggggggcagggatcggcttggaaatcaagcgtggttgtccccgtccaggccggtggaaggtatggagcagaccccagggaggggggcactaggtgtcattgtgcccgatgtctggctcccctgcaggagggaggctccagggtaagacagggctggcaggagcagactgcctcagcccatgtgcccatgccggcagggcgtgg

SEQ ID NO: 685916 - DNA, 315 bp, Homo sapiens
cgttagtagttgtgggtaggagtatgagaccagctatggcagatagtgagacctgtctctaccaaaaaaaaaagaaaaagctgcgtagaggtggtacatgcctgtagtcccagctactcaggaggctaaggtgggaggatcctttgagcccagaagctatgattggcccaatgcactccagcctgggagactgtctctaaaaaaacacacacaaaattgcgcggcacagtgcctcatgcttgtaaccccgaaatttggggcaggccgaggcaggcggaatcccaaggtcggaaaatcgagaccatcctggttaac

SEQ ID NO: 685917 - DNA, 185 bp, Homo sapiens
tgctctggtaccaggctgagtgaagtggcgcaatctcggctcactgctgcctcgactccagctcagatatcttcccacctcagcccccaaggagctgggactataggcatgtgccaccatgcccagctatttttttgtatttttttgcagagatggggcttcactaatgttgcccgccaatcgaa

SEQ ID NO: 685918 - DNA, 358 bp, Homo sapiens
gagagcgcaatgacgctcgtgggcgcgagagctgtgtcatgatgctgtacacacggctgtggaacgacgcaccgtgtgacaccgagaaggaccgctggatctgtgagggcacaactggtgaccccgcccagtgcgcctggagccgcgcccattggagcatgtcggattctgggggctggtcacacttcctggcttctggagctgattggcaaagaggtttttctttctcatacaccgctggtgagtctcagaaacactctggccaacataggcctgtgcagaccagagcctgggctctgggaccttcatggcgacctcatactaacttcacttacgcagacccactcttcactggttc

SEQ ID NO: 685919 - DNA, 110 bp, Homo sapiens
ttgagggcccacctgctcttcttcatcgctggccaggcgtaccggtgcaggcttgtggtgaggcgcgagaccaggtgcagtggagcgcttttagagcagggtctccagta

SEQ ID NO: 685920 - DNA, 198 bp, Homo sapiens
  misc_feature (19)..(19): n is a, c, g, or t
  misc_feature (51)..(51): n is a, c, g, or t
  misc_feature (89)..(89): n is a, c, g, or t
tgtgttggctcgacctcanccccaaatcttacatctcaattcccatcctangaaagcactcatactttatgcatccccgcagctacacngacacaacacacagcacacgcatgaacacagcacacacacgagcacagcacacacacgagcatacagcacacacacaaacgcacagcacacacagcacacagatcagca

SEQ ID NO: 685921 - DNA, 1195 bp, Homo sapiens
agcgggtgcagcgcgctggccggcgtggggacccgcgcaacgggtggcgcccgctgactcggccctgcctcctgtgctgggcgatgcctgcgtcccggaccatgatggcgcagctcagtgtcgccctcccgggtcgatcatgcttgcaaccacgttgctgggggcctcgtgcggacgatcggccgggccgctggttcgatgccgaagggacccatatcgacggacggtgactcagtcacgcagtgctggtcgaccagctcgaccgttctgctgtgtactctgttctggactcagtcgccaatccatggacggcagcctgaagcacgcgctggatgcgagggccgccacgattgatacgaactggagaaccactcgtgcgtacgttggcagcgttcctgatgcccgaagattgagactcggggtgcgacccacgccgaggccacgagttgacccccaagctttcgtgcgggaacagtaggagctggttgtggcttctcaggcgtagttacgcttgtaaaaaattgccctctgtcgggtgcggtgaaatcccttaccgcgacaaggaagccaatcctacttggtccttggaatcaactcatggtgtgttcccccttccatgtgcctatgggactagcacccgatgatggactccacggtggaggcgcagaataagaggggcgcatgactccttggggatgactccgaggggaaacaggtcctttcacacagggaacttgtccctgcagggccaagaaatcgaagggggcacgccttggggggcaaggctcacgtggggaccaacaagtcgaagaggagacacggagggggcggacttgtctctcttgaacatcgcaaaggatgcccccgggttcgacaatgtctttaccttcgcagcactgtttttgtggcctcgctttcgctttatatgtaccccacatttgggcacggaaattgggcctttggacgaattgcgccggtgggaaaggccatagggagaataattggggggagcaaggaggagggtttcttttaaaccccacacattgaataaaccacgtgaacccgagggcgcgcccttaaggtaattggccccaattcggaatcatatcacacgtgcggcaattcactttgggcgtgaactgggacgcaacccggtggttcctcgtcaacttgggggaatgaacaaggtgttgga

SEQ ID NO: 685922 - DNA, 386 bp, Homo sapiens
ggcagaccctgattgggacccagtccacagatattcctgcgccaactgagctgaagttcactcaggtcacacccacaaggctgagcgcccagtggacacacacccaatggtcagatcactggatatcgagtgcgcgggacccccaaggagaagaccgcgccaatggaagagaatcaaccttggttctgacaggtcatacgcgggtgtatcaagacttatggtggccacctatgaagtgagtgtctatgctcttaaggacactttgacaaggagaccagcttaaggtggtgtgaccactctggagaatgtgaggccaccaagaagggctcgtgtgacagatgcttctgtgaccaccattaccatttggtggaggaccgactgggacg

SEQ ID NO: 685923 - DNA, 290 bp, Homo sapiens
aggaccttgggagccttaacccttaaatagtaacgcatttggtcacccccagcccaaaggggtaaaaggggcatacaacatcacaaaacacagaacggggagagaagtcccggcccgggggaagcaccgggagttttaagagtctcagtacatatctagcagaaggaagaggaaacaaggtcaactataatgcaaaccgaagaggactaatgaagctgatagcataacaaaatcggggacaaccagactaggaagaaaaggaatgactcttacaagttcatagtatacag

SEQ ID NO: 685924 - DNA, 253 bp, Homo sapiens
cgtccccggttggctactacgtcacggttggctactcgtccacggtgggctcctcgtcgcgggttggctcctcgtccccggtcggctcctcgtccacggttggctcctcgtccacggttggctcctcgtccacggttggctcctcgtccacggttggctcctcgtcccacggttggctcatcatccacggtcggttccaattccattcccagcgtcacatagtcagccacacgtggcatagtgggtcaccgca

SEQ ID NO: 685925 - DNA, 120 bp, Homo sapiens
tacgagacacacacatcgagcggacactagattgtcagcacactacatcatatgtgtgacaccgtctgtctgtgtgtctacacttttactgacgtactgttactgtgtgagcgatgatac

SEQ ID NO: 685926 - DNA, 198 bp, Homo sapiens
  misc_feature (38)..(38): n is a, c, g, or t
gatgatcactgctcgattagtatacaaaataaattatnttcactttcctttcagtcatatcattatgatatggtagtgatatggtgtggtagagattcacaagaagatgggtcgaaaacatataattgaatgactcatatcatgtcacgaaaaatgataccaatggcttaagttcagatttcaatattcctttatctt

SEQ ID NO: 685927 - DNA, 1315 bp, Homo sapiens
gagagcgaagaaggaccgtgcctgtcccttcctatagctgcagcccagagcgctggctttaggccggccaggaagggtgtgttgagtgtgtgtccacagccacaagaaaagaagataaagatccgtcacagtcacccttacctgtgccgggcggccggacaagtagacgtagctccacgtgcccgagagaccagacattatcattatcgcgtcggaacagcaatgcctgctccgccaagagaacgaaagcctaagcatctgatcatcgttatagctatatcaatctaacgttgtctcggactgcatcgagttgtagtctatggcaattgaaagaaagactagacagaacaacccaaacatctaagcttatgctgttccagcttgggtggggcattgttcaccagcgccagcaagaccgacacctctagatctctaagcgcgtgcgcgtgatagcacacatgcgtcgtgaacgatgacgagtagtagttgctcggcgcaatcggagctccaccatcgcactatgagcttcgtgcacttgtgagtgcgacgcaccgacacggacatgtgctgtatctggatctgaagctgcgtgtcctttgacagtaaacgcgattgcggtcattggtagtgctaagccaaacaataagagtagtcggactctcatctatagaacgttgacagtcctagcgctagcctttccttatccttgattatcatattcatcataatactactattcttatctccaatcctaatacacacaccccagacaacacacacaaaacatcacccacaaccgcgtgaggtctatttatctatgttgattgactggtcgaatcccgacgaacaaaaacacatcgcgtgtctcatcggtacaccacgatctgcccccaagtttggtccctcgcatcttctctttgtctactcccttcagacactcccacattggtacttctgagcaacaaccgaagtgaaatacatcaactctagaatgcacccactatccatcactgaatcagagtgcaacatctcatttcactcactcaacgacaagagtcagggcgtttctccgtagacaaagctttgtcgtcaacgcgatagacttctgtgttgataacaattaccggcctaccctattggggtctagtcatgctactgaattacattgagagtagtatgtgcagtcttaggagagaaatacgcgcaggagagcgacctcctcacaatagtaagaaacggcgtgagtacatgcagttatatactcagtcacgatgcgagctcggttcaacacgcacgtagcagtcctgtacgtaca

SEQ ID NO: 685928 - DNA, 96 bp, Homo sapiens
gaaagatgaggcggcaactgcaagagaggcagcgaggagcgctgtgagcagcagagagagagcacttattgacattaattcagagggcggttggac

SEQ ID NO: 685929 - DNA, 403 bp, Homo sapiens
cagagctcggtgccgaacggtcgcgagagctcggcgaagcgctcgatgatggcggttccttcctcgatgcctgcgaggcgcggacgcccgcgacgatggcgggcatctttccagcccagcgagatcggtgtcagctcgatcgagcgcaatgtcggccgtccgttcgagccgtgctcgtagcgtagcgtgggcaccaccgactcccagtagcggcggtcggccggaaagcccgcctggtcgccctgcgtgcgcttctgatagacctgccccggcgtcagatgaggctcggcgcggaagcgctcgtagccgtcggccgggatcttgggcaccagctcgttctggccgatgaagttgccgaggctgtagaagatcggctttcccttgtagagctccagcccgcgca

SEQ ID NO: 685930 - DNA, 286 bp, Homo sapiens
  misc_feature (151)..(151): n is a, c, g, or t
  misc_feature (213)..(213): n is a, c, g, or t
aagtagcaaaatagccaagcctcattctaccagcttaaacaaccctggcagaaaaagagtatagctttcccaatagctacagcaaataaaacaggggtgtctgatgagctcagctttcatcgcccagtgatcttttgtcatttaataaggnatttatctgttgggtactgggcttaatacctcagtgatgacatgtatatcaaacccccatgncaggtgtctatctatgtgataaaccttcacatgtatccccaaacctaaaataaaactttaaataaataggctg

SEQ ID NO: 685931 - DNA, 446 bp, Homo sapiens
  misc_feature (35)..(35): n is a, c, g, or t
  misc_feature (73)..(73): n is a, c, g, or t
  misc_feature (106)..(106): n is a, c, g, or t
  misc_feature (158)..(158): n is a, c, g, or t
acaggggaactggcgtgtacccccactttacttangaattgtattccctggaaaagctgcctttaaatccagntccccaatttcattgactttggggggagttccngtatttaatggaaccccctatggggaaacccctttacatgtgaattagtccncctcctaatttgtttcttctgtctttatgtttttctataacctggattttttaaatcatattaaattacagatgtgaaaataagcagagcaactttttccctcttcccagaaaaccagtctgtgtttacagacagaagagaaggaagccatagtgtcacttccacacaattatttatttcatgtctttactggacctgaaatttaaactgcaatgccagtcctgcaggagtgctggcattaccctctgcagaacagtgaaaggtattgcactacattatggaatcatg

SEQ ID NO: 685932 - DNA, 106 bp, Homo sapiens
  misc_feature (65)..(65): n is a, c, g, or t
ggcacgaggatcgccatcatgaacgacaccgtaactatccgcactagaaagttcatgaccaaccnactacttcagaggaaacaaatggtcagtagatgtaccatac

SEQ ID NO: 685933 - DNA, 259 bp, Homo sapiens
gactctgaggatcccctgcctgctgcgctactaaggtggtagaaaagcaaatttaaaagtccaactgtcagtaaactgacttttaacaaaggtgccaaagcaatccaatgagaaaacttaatttttttaaaatggtgcaggatagtctggatcactggataattatgtggagaaaaaaaattaacttcaacccctaactcacaccacacattaaatttattagcattttgtatcagacttacaatagcgacagcaggca

SEQ ID NO: 685934 - DNA, 177 bp, Homo sapiens
  misc_feature (147)..(147): n is a, c, g, or t
  misc_feature (176)..(176): n is a, c, g, or t
acatgaagtgcaggaatgtgtgcgggtagaaaaagtacgcactcaccaagcgaagcgcagcattaattgaagtgaacaagtcaaaggaacgctctggtagccggtcggactttccgtgtaggggacagcaagtcaagtgcttatcangcggtcctcagagagagacaattttgatnt

SEQ ID NO: 685935 - DNA, 244 bp, Homo sapiens
atcagatcatatatctgaaacatatgtaggcatagcatacgctcacctcttcgcgcaaaagctgtcacaacttcgcttctgtgccatctacttccttccatggcatctctcttgaaagtaatcttgtataggagattgaacgatgctgtcatttagaaattaacatgatatcttaaattacctttatgaaatatagttttgtataatagcatagatattccttcaacaaatgaacatttatata

SEQ ID NO: 685936 - DNA, 508 bp, Homo sapiens
ccctggccccactgtgggtttgggggcatcatttttgggccatcttcatcatccagggagggggcaaaaaacaatacacccaaacacagggggcctctgttaggcacatggagggagtggtggttcttaaaaaaaagatccctgaagaaacttttgctttaatgactttccaaagctggccatttttccatccttggcctcagtgaaagccgttatttttagggtttttcagccccataaccccccccagggggggtttgcccccccgattggtccggactttaacatctagctgggttccccgtttattgccctttcctggatttattttcccctatttcccatcctttttttttccccccgccaggcctttggaataaaaccacccggggtttgtttttgctatggaatgccccctggggccttttttgggggcttattgtttaagggttccccccactgtggtttttttgaaccccataaactttttttatggttttggggggga

SEQ ID NO: 685937 - DNA, 1023 bp, Homo sapiens
taaccccatacggattacgggatgattaatcacaccattcattaaatataaaacatggatctagcaaccagtttcctccaaaaacagatccattgggaaatgggccacactggtagaaggcaatctggtgactcccttctagtggttatataaaacaataacaaatcggtcagggagtcgggtacaaaacagtgggtacaaaagctatgaatagatacgcctttatcaaaaacagggtgcctcatttctcatatgtgcgaaacacttctaactcttagaatctcgtgcattttatagaaacactatcacgtgcgtgggtcacaattgtgctctgcggagaacggtttcttctcaccacgctctctatttccacttccttaccttccccttggacataaaaactccactgtgaactgtgacacaaaattacctatagatatgtgggatctcccacatgtggaacccaaaaaattcccacaagtgtgaaatgtgggagtctcacatgtgcattcaagccacagaggggctataccgcggtttaacaaatctgtggcttcaacccacaggccctcaagtgctattttaaacggagacgtggaaacttccgacaggcccatagaagcggcccccccagacgcacttatgcgcggcacttactcggggaaacctccatacattccccagatgtgttgcccaactgtgggtacaccatttctataaagaggagctccccccaagtgtgttacatacgcgagaacttcgaccgtggggaatgctaccataaaccaagatgtggacacaactaccaaggggcgacacaagaaacacccgctgaacggacaaaaagccccccaagaaagaaggggggggccacggagcaacaacctgcgcgcacaacagacgcgaacgggtgagaatgaaacacaagccccctactatactcaaaaacgccccgttccaacatcaaccaggcgtttagaactaccgggcaagcagagccacaccacaagagacgccccaccc

SEQ ID NO: 685938 - DNA, 1186 bp, Homo sapiens
gctgcgggtgaggctggcgcccgtaccatgagcgaggcggacgggctgcgacagtggccggcccctgcggccgctggtcgtcccgagacgcatgatggtcaggctccctgcaggctaagggagccggcagcgtcctttagacggcagagttttgccgagtgaccttcttgatgcttggcgtgtctcggtctcaccgttcccctgcttggagccattgatgctgcttggaactctcctagtatgatccaacatgccctactcagctctccgagatgatacgcccccgcgtctctggcctctggctgttcctgtcatccataattagcgtacaccgctgcgtacgcatgtgctcacgaaatccgggctggtgagactacactacgatcttgattgcggcaccggaaggtgccactaaggcaacaatagttggcggactggtgactgctcttaactcgtgggatcacggcaggattgccaccggtggcctcggtacatacagcgtttgcaagagattgtgccgtacccactcacgaagtagctcacttttgaccgcgggggattccgcgaactgccaggcccctcttgcggacatcagaaaccggaattactcgacctcaaaggcccttgctcgttgaataggagacgaacccgacgtcggggttattcctgcttgtcaagggaaccccacttgcactggcgtagattcctgccgtcatatgccggctggggctccgcactggccgatttagcaccactgtgcggagccgtaaactcttcgcagaacgtagacaattccccccttcggggatccgacccggttcgaccaacgtttggcacacttctgttggacctccgactttggctcacccgtcgccgcacttaaatcatgccccccaacgtttgggaagcacgtgcgaacagggaaaacccactttgtttgccctctttaggcacggtaacagttgacactccttttgtatcctcatgagatacgcgaccttatcccaggccgcaaactggaaggtacggggaacgcagcaactgtctaaccttatattgagccacatggagttgtcccctatagaccactggcatacgagcacttggggtcgacaacttctgcgacacagaagcgcaagccgtatcatgcattggcctttaccaattgggcgatggaacgttgcga

SEQ ID NO: 685939 - DNA, 141 bp, Homo sapiens
agagctcttatgtctgtatgtcgtatgcagatgagcttgttataattatagcctcatagggatagtacaaggaagtgggtatcgctatgtgtttctgtcagggggttgacgaatgagtgtgacggcgtattataccagaaa

SEQ ID NO: 685940 - DNA, 433 bp, Homo sapiens
acggagaatgacgcgagctgtaagcagcgtccagatcagcagcgtcactcggatgtgagcctgcgtgctgtacctgggagctgcagtcgtgcagcgggactggggtctctcggagcagtactcgcaaagtgctggagaatgccatctggccagggctgaggcgagcggaggcctgcggcagtgcagcgtgagaaccaggagctcaatgccacaaccaggagctgaacaaccgcctggttgcagagatcacacggttgcggacgctgctgactggggacggcggtggggaggccactgggtcaccccttgcacagggcagggatgcctatgaactagaggtcttattgcgggtaacggaatcggaaatacagtacctgaaacaggagattagctccctcaaggatgagctgcagacggcactgcgggacaagaa

SEQ ID NO: 685941 - DNA, 239 bp, Homo sapiens
gtctagcaggagcttatgggtaagctgggattacaggcgtgacatcatgcccagtaattctagtatactccagtagagacggggtttcaccatgttgcccaggatggtctcgatctcctggaaccatttgttgactccagccccggcatcgggcattccaaagtgctggggttacaggcgtgagccaccgagcccggacattgctttttatttttaatctatacccaggacccgggaat

SEQ ID NO: 685942 - DNA, 295 bp, Homo sapiens
cccggttagagcggtctagtgcagatcagaggttaacgtccccagatgtattttccatcgttaatcttccgacaagcaaggcctctttatctggatttgtttttacaaagttctaaatcatggatattaatcagggttaactaattaactgattgattaatcaaagcccatgttcctactctaaccacccgaattgttattctgcctcagtgagacgcggggtaccacagacggactctgtgaggcgccgcacctgtgctgcatctcgacagatgtgaagtacgcagtaggcttg

SEQ ID NO: 685943 - DNA, 180 bp, Homo sapiens
cttagcactgtatcatgaaaagcacaccagtaaggaacacttcctgtacaccgccgaggaagaactgatcggcgccgatgagcagttgccggaaaaagccaaaatcgaagtgctgctggccacctccggtggcatggacgtcgaccaactgagcaacgaagaagtgcagcgctacgtacg

SEQ ID NO: 685944 - DNA, 164 bp, Homo sapiens
taagattaaagagaaaatatgacgacttagaagagtagcatgaggaaggacaagataaacggtttctaaaacatgacagaggttgacatgaagcttcttcatggagtaaaaaatgtatttaaacgaacctcgagagaaaggactacagagccccgaattaatac

SEQ ID NO: 685945 - DNA, 1289 bp, Homo sapiens
tgtggtatgatggcttggtgactacagccaatgggattcatgtgtgtgtgtgcctgtgtgtgtgacactgagtgaatgctgcccaatggcttttcaatgattggcatgcatccatactgcatggtcatgcccatgtcacttctactacgaaagatgcacaaagctcatgaatgaccagattggtccatagaacatccatagacaacacaacatttttgactattcttagaacaatgacaatgacacacaaactatatatcaacatgtgctgacactttggaacaacatgcttggtttctctgtgaatattctcaacacttcctgttcagactgctgcttcaaggttacaacatgatgctttgaacgacatatgcatcattggctacacttccatttttcgtctacttgttcgtcactgacaagctttctgtaattgatgctttgtattcagataatataagcacggcacacaactgtgttcacacgaagctcactgatttggcatagtatgtggtgtctctatcccagttcttttgggtttcactaaccatggacgcctggcaatcaagtatcataccgtaccactgtctaacaaaaggcacgcggtcctaatccaattggctgaccgctctgtcacaacaccaatgacactttcattggcgacttcctcgtagtactacccacgcattactgcttcggactcaattaacatggtcctataccattattgcacgattcgccgagacccttgcacaacactctccaactaactacgttacccaaaccaatcaaatggtagtcgaaacattggcacaacctggacgttccaatacacgaacgtaccctcgccctgtcacagacaccataacccgtacccgtgcaaccaaccacaaagtcccggtgcccctccgcgctcacaacaaacactcacactgctccccaacaacctgcaagaacacatgctcatgcacccacgccaccatgacgtcaaactcaaggaggcgagcggacaagccggggacgaacggcagtcagaccacggagttgtcgtgtggccttgctcgacgatacgatgatttgtcgtcactgacacaacgaaatgccggctcgtcgatacgatcaattactagattgagatatcgaagaaacagtcgagagagaaaacacgagccaaatcactcagaggacgtatcgtcgcagtcgtccactcacctgaaagacgatcagagcaaagagatcacgtcatatgaacacgttagatatcacatacacatgataacgtagattgc

SEQ ID NO: 685946 - DNA, 373 bp, Homo sapiens
gaggcatgcagctgatctgcagtcgatctaagatcccctaacgattaaactgtgctgacagtgatctgactgttattaaacaagcatcgcgaagccgcggcgggtgttgacgcgatatgagattggccaatggtcctgatgttcaagtgaagaaattcaatgaagcgcgggtaaacggcgggagtaactatgactctcttaaggtagccaaatgcctcgtcatctaattagtgacgcgcatgcatggatgaatgagattaccactgtccctaccttaatatactatcgaaagcacagacaatggaaggggcttggctggcatcatcgggggaagaagaacctgcttgagcttgagtctagtctggcacggtga

SEQ ID NO: 685947 - DNA, 210 bp, Homo sapiens
  misc_feature (210)..(210): n is a, c, g, or t
ggcctgctcctcccgctgctgctgccgctgccgcccctgagtcactgcctgtcgcagctaccggcccgtcctggcgacccatactagttcgtcgcatatttggagttcttacaacatggcagacattggacaacatgggagcagatctgtaacttgatcaggatttggattatgtttgtaggaggtagaagaggaggagactggtgaggn

SEQ ID NO: 685948 - DNA, 1230 bp, Homo sapiens
  misc_feature (146)..(146): n is a, c, g, or t
  misc_feature (959)..(959): n is a, c, g, or t
  misc_feature (969)..(969): n is a, c, g, or t
  misc_feature (1000)..(1001): n is a, c, g, or t
gggcgtactcgtcgttggtctgttgtattttgtgtgctctggtgtgcgtgcttgttgttgatctcttatcgtcgtccttggtgcgtactccgtcgttcgacttggcgtcgacttttcctccctggtggttgtgtttggtcgcttgngtgcatggtgttcggccgctctgcctgtgggtgttgtgttctgttctgggctgcgtgtgggatcactggtggttgtcgttccttgctctgacgccctgggcgttggtgtttcgtgtcgctcgcacggcatctttctgctctgtggggggcctgtgtgcacgaattctctgttgctattaggtggggcgctcccgtatgcgttctgattgccggctgtgtcgcctcgtgtgttgttaccgtgggtctgtttggtctccgcgccggtactgcatttatggggggctcccaagtttctttgggcctggggtaccaggttaaatcccgacttgtgcagtgacccctcttttttaggctggacccttgagtgccccctgcttttttgccagaccttgatggatccctgtcttgcagctagtttcttcattgggccctctttaggccacgtgccggaggaggcatgctcctcgttctatgcccccggacctaccctactctagcagagcctttcttgccctttaaagtgagattaatttaggctgtaaatctgggtaaaaacttccttagagagaaaattaagtctactgatttggtataggtaaatggacacttaaacttttttaaagtaaaggagatggtagataccgcttagattatagttcttgaggttcaatgtgaagccacagtggtgttaacttatctttgaatttccttgttcacggtcacgggcctggaaacgcctgtgcgcgggaggtcactccaattccaaattttctgtatgaaagcactttttcaccccaaatgagcctcatcccnttaatgccanaccataacctctactgagggagggaaatacnngaagccaccccttttatttctcttcacctgtgtaacaagttcaccttgttgtcttgaacacctgtctccaatacctgctttttgttttggatagtaccttgtctgtataagaagctggcccttccactagagaggccctcggagtctaaaattatgagaaccattaatttatttgtgtcttctattatgatctcgttttgaccaataaaaatccttactactttctcca

SEQ ID NO: 685949 - DNA, 444 bp, Homo sapiens
  misc_feature (53)..(53): n is a, c, g, or t
  misc_feature (65)..(65): n is a, c, g, or t
  misc_feature (89)..(91): n is a, c, g, or t
  misc_feature (125)..(125): n is a, c, g, or t
  misc_feature (262)..(262): n is a, c, g, or t
  misc_feature (268)..(269): n is a, c, g, or t
gagatcctgtttgtgatcctctggacggtcttctagggtaggaaccttcctgnctttcccagctnctgggggctcggggagtccctgannncgtgtcagatcactccagtctctgcctccgtctncacgtggacttctcctctgtgtctgtgtctcctcttctgtcttttagaaggataccggtcagtggatttaggacctaccctactccaggatgatctcatctctagatctctaactaattacacctgcaaagttcttnattttnnaataaagtctcattctaggttctgggcttcgggatgtggacagatctttctgtgaaccaccattcaatccactacaattatatccagttccctccagaggctctaggggagggcccttcctgcctctcccagctcctgggggctccgggcatccctgaccctgtgcatgcacaaa

SEQ ID NO: 685950 - DNA, 708 bp, Homo sapiens
ggctggagacgtgtggagctgttcgaggactcgcgggtgtgcaggcacctatatatgtgtttagaaataggcgttaaacgttcggttcgaatgaatgaatgtctctcaatccgagcgtatatttctcagaagcgaaggtggaagaacaataggttcaaaatttgtggtaaactaaaacaggtcacaaactacttccatagcttcagaagatccccttcaaacacttatgtcttaagcatctcaagaagttcttcagagaaagctcagcaaagtgggagatcaaaatgtctcaaatgtggtggttccagaatgttctactgctatacatgttatgttccagttgaagaatgtacctattgaacagattccacttgtgaagcttccagttgaagattgacgagtcattaaacagtccgaaatgaaacgagatggcaaaagtactggctatacatgcaaacactcttagcacctgaatccgtaaacgtttacacgtatccgtgtattccagaatatgacgaacaggaccgtgacagacaggtctcactatgttgcccagactggtctcgaactcctagggactcaggtgatcctctcaccttggcctcccaaagtgccgggattacaggttgcactcatttttactgggactcagtctatctcaataaaagatatttcttgttcatctggaaacacaggatccagaatacg

SEQ ID NO: 685951 - DNA, 450 bp, Homo sapiens
  misc_feature (92)..(92): n is a, c, g, or t
  misc_feature (100)..(100): n is a, c, g, or t
  misc_feature (113)..(113): n is a, c, g, or t
gcggccgcctactactactaaattcgcggccgcgtcgacatccatcaaaaagcagctgatagcctattacaaccagatacaggaaggtaagnccaatccncgccaatcaagcnccttaataggtcaaactaaaagaggggtttctacatcagagttaattgataaagagggtaaatatcgtctgatagggcagcaagcgttaaaggaaattagggctaaaaattcacaaagataaaggttaaagagtttaagtagttaacaaggctcgaccaagccattgaccaataaattagaggcaggccaaaatgataatcaaagacccacttacacacgagtcactcgtgcgtgataacccacctatattacctgatgatggattggaccattcgccatgtcatctcgatcgcttgcatatagccgcgagagctagaacgaaagcgccacatcagc

SEQ ID NO: 685952 - DNA, 126 bp, Homo sapiens
gcggccgcctactactactactactgctcgaattcaagcttctaacgatgtacggggacatgctatggttgcatttccgttttctatgaatgaatttgcattcaataaacaaccagacccaaaaaa

SEQ ID NO: 685953 - DNA, 198 bp, Homo sapiens
ttgtaatcagcatctgggctcccctggggtgggcaggaggacccctggtgtcgtctccacgaaggaagatccaacggtgctggcacgccactcctcatccttctccacaacagagctcctcctacagccgctgctgtgagtagcaagacaccgatgactgattcccaccacgagccactggagaacttggctggagat

SEQ ID NO: 685954 - DNA, 266 bp, Homo sapiens
cttctagctgaacgagatggacaggtcaggcagaggctgtgccatggttattatgagatggcaccttgggatcgtcagaccagggagcaaagtaaacgatctgaaatatgtcggaggcacttgctgatggataccatataaggcgggatgaagaaaaagagaatcaaggatcatttctaagcatccaaatttgaacacacatgatgcagtggctggtagtgcttaagtcacaacatggggcagcacatgagcagcagcaagtaggt

SEQ ID NO: 685955 - DNA, 1246 bp, Homo sapiens
  misc_feature (36)..(36): n is a, c, g, or t
  misc_feature (41)..(41): n is a, c, g, or t
  misc_feature (46)..(46): n is a, c, g, or t
  misc_feature (71)..(71): n is a, c, g, or t
  misc_feature (73)..(73): n is a, c, g, or t
  misc_feature (77)..(78): n is a, c, g, or t
  misc_feature (81)..(81): n is a, c, g, or t
  misc_feature (89)..(89): n is a, c, g, or t
  misc_feature (96)..(96): n is a, c, g, or t
  misc_feature (100)..(100): n is a, c, g, or t
  misc_feature (116)..(116): n is a, c, g, or t
  misc_feature (126)..(126): n is a, c, g, or t
  misc_feature (128)..(128): n is a, c, g, or t
  misc_feature (131)..(132): n is a, c, g, or t
  misc_feature (150)..(150): n is a, c, g, or t
  misc_feature (196)..(197): n is a, c, g, or t
  misc_feature (200)..(200): n is a, c, g, or t
  misc_feature (202)..(203): n is a, c, g, or t
  misc_feature (249)..(250): n is a, c, g, or t
  misc_feature (257)..(258): n is a, c, g, or t
  misc_feature (276)..(276): n is a, c, g, or t
  misc_feature (316)..(316): n is a, c, g, or t
  misc_feature (321)..(321): n is a, c, g, or t
  misc_feature (324)..(325): n is a, c, g, or t
  misc_feature (328)..(328): n is a, c, g, or t
  misc_feature (339)..(339): n is a, c, g, or t
gtcccaaagtgccgagattgcagcctctgcccggcngccancccgntctaggaagtgaggagcgtctttgncntggnncgngccatcgntcggggnatgntgaggagcccctctgncccggtgcgncnagnnctgggaagtgaggagcanctcttcccgggcgtcatcctgtctaggaagtgaggagcgtctctgnnccngnncgcccatcatctgggatgtggggagcatctctgccccgtcggcccnntctgagnntgtgaagagcgcctctgnccggccgtgaccctgtctgggaactgaggagtgtctctgncccgncgnncancccgtctgggnggatttttctgccgtcatcttgggcaaataatgggcaaataatgatgctgttctgaagagactggagcagaagggtgcagaggcagatcaaatcattgaatatcttaagcagcaagtttctctacttaaggagaaagcaattttgcaggcaactttgagggaagagaagaaacttcgagttgaaaatgctaaactgaacgaaagaaattgaagaactgaaacaagagctaattcaggcagaaattcaaaatggagtgaagcaaataccatttccatctggtactccactgcacgctaattctatggtttctgaaaatgtgatacagtctacagcagtaacaaccgtatcttctggtaccaaagaacagataaaaggaggaacaggagacgaaaagaaagcgaaagagaaaattgacacgacacggacgagacgacggcgaaaaaacagcaatcaatagctggaagtgccgactctaagccaatagatgtttcccgtctgggatcttcgaatcggttgcatcataactactaagatatacacctgatgcagattctcgcatgtgcagcagttgatgtcggagaaatagcccaggacagtgccacgggcctgggatcaaggtcccttgaacgaatgaaaacggatggactacattggaactgagactgcaaagaagggagataccccagcaggcctgtggcactaccaagaaagaacctgggcgtcaagggttggtcccggaaaaacaatggggtaccggagctaggaggaacctaaactggtggagaccactgacgtgagggtcatacgaactcggagaacgaagtgagccacggatataagtgcgacaaccaaaatgatacagaaggtcagacaatgccatgtgctcttttttttatcatacatgaa

SEQ ID NO: 685956 - DNA, 952 bp, Homo sapiens
ggcttcctgctgtggctgtctcggaacccgtggtcctccgcttcatgatttttctgccgtcatcttgggcaaataatgggcaaataatgatgctgttctgaagagactggagcagaagggtgcagaggcagatcaaatcattgaatatcttaagcagcaagtttctctacttaaggagaaagcaattttgcaggcaactttgagggaagagaagaaacttcgagttgaaaatgctaaactgaacgaaagaaattgaagaactgaaacaagagctaattcaggcagaaattcaaaatggagtgaagcaaataccatttccatctggtactccactgcacgctaattctatggtttctgaaaatgtgatacagtctacagcagtaacaaccgtatcttctggtaccaaagaacagataaaaggaggaacaggagacgaaaagaaagcgaaagagaaaattgacacgacacggacgagacgacggcgaaaaaacagcaatcaatagctggaagtgccgactctaagccaatagatgtttcccgtctgggatcttcgaatcggttgcatcataactactaagatatacacctgatgcagattctcgcatgtgcagcagttgatgtcggagaaatagcccaggacagtgccacgggcctgggatcaaggtcccttgaacgaatgaaaacggatggactacattggaactgagactgcaaagaagggagataccccagcaggcctgtggcactaccaagaaagaacctgggcgtcaagggttggtcccggaaaaacaatggggtaccggagctaggaggaacctaaactggtggagaccactgacgtgagggtcatacgaactcggagaacgaagtgagccacggatataagtgcgacaaccaaaatgatacagaaggtcagacaatgccatgtgctcttttttttatcatacatgaa

SEQ ID NO: 685957 - DNA, 422 bp, Homo sapiens
  misc_feature (23)..(24): n is a, c, g, or t
  misc_feature (193)..(193): n is a, c, g, or t
  misc_feature (209)..(209): n is a, c, g, or t
  misc_feature (215)..(215): n is a, c, g, or t
  misc_feature (219)..(219): n is a, c, g, or t
  misc_feature (223)..(223): n is a, c, g, or t
  misc_feature (232)..(232): n is a, c, g, or t
acatcgatacgactttttttttnngaagcaccagagtccatgaggcattttatttgtaaatatatgtattacatccctagaaaaagaatcccaggattttcccttctgtgtgttttcgtcttgcttcttcatggtccatgatgccagctgaggttgtcagtacaatgaaaccaaactggcgggatggaagcanattattctgccatttntccagntctntganttgcacgtnaatctggggctgatcaccccacacttgtttagcctgcctgtgaggttaacaacaattttcccagctttgtggcataaatgatttcaaattcgccaatgtaaccatgcttcatcatcacagggagaaaccggacgatgactttggagcacggcctaataagcaccctgcgtttgcctctcttttcgggatt

SEQ ID NO: 685958 - DNA, 554 bp, Homo sapiens
aagctgttcctcaaaagataaaggagcttaatggtcgtagttgcaaaatatctggcaaagcttagaaaactactgtccacatattgtttgatagagctcactttggaacaagataaaaataagaaaagacatagatattcaaaggtgtctaaacccagctgatcccctattttgttctcagaacacaaggaaacaagtggagaagaaaccaaacggctgggtttttttccacatgaccatgcattttattggtggtcaaatgacacatttagaaaaaaattttttttccctctcaggcatatttttgggggaaaaaggaaagttctataaaaaacaacagaaaaacaagctttaaagaaattacatctatagcttaacacagactgatactaaatgtcaggctttccaaatagtggtaatttaaactggtaaaaactcaatattcaaaaaaggatggggggagagggagagtgagataattatgtaactcaaattctactttggtgtgtgtgtattggtctccggcttatagttaatacctagagatctttaga

SEQ ID NO: 685959 - DNA, 148 bp, Homo sapiens
  misc_feature (23)..(24): n is a, c, g, or t
acatcgatacgactttttttttnngaagcaccagagtccatgaggcattttatttgtaaatatatgtattacatccctagaaaaagaatcccaggattttcccttctgtcgtcttctcaacagccgtatagtagtagtaggcggccgc

SEQ ID NO: 685960 - DNA, 116 bp, Homo sapiens
tgtgacttagaggatcccgactgcatcaacgccgctccggatcgggtcagatcccgaatcggagtggcggcgttggatgcagtcagcggcgttggatgcagtcgggtaccgagctc

SEQ ID NO: 685961 - DNA, 135 bp, Homo sapiens
agttcgttgacatctgcgttggggattcaaatgagtattggtgatatgctgagagactgggtgctccgagctccactcaggtgaaagaatttgcggcaattgttgacgtgaaagaagaatctcattacatcttgg

SEQ ID NO: 685962 - DNA, 153 bp, Homo sapiens
tctagaggatcccacagaatcgtgtgagggtgggaatagtgttaatgtcattaaggagagaatgaagagaagtaagccgggggcgtctttgattgtgtagtaaggctgaaggtgattttatcggaatgggaggtgattcctatccttcgcacg

SEQ ID NO: 685963 - DNA, 1311 bp, Homo sapiens
ctcttatctccttcatcatatcatccattccactccattccttctattcacatcatattcttatcccatcatctcatcaccacgacatcatccatatcccatcatcattcatcttcatttccattttattctcgtcttcatcatcatttcattattatcatttcaccattcatattcattcatattccacatcatcatcatcatccccatcatctccacatcatagtgtatatcaacgctatagtacaacaataaaccaaagtggccactaccacgcgacacgacagaaacaaagcgataacacgcgacaatcccacgaaaccagaccacccaaccaacacacaacacaacaagcacaacacaaacaatgcagaaaagaaccaaagacaaagacaccaaaaactaaacaaacgaaaaaaacaagaaaaacacacaacaaacataagcgcgcgtagaacccagccaagaggagggagccaaacacagaacaccaaacaccacgagcgaacgacacactcgaacacagaaaaacaagaaccacgcgagtatgaaaacgacgcagacacagacggactacagaccagaccacaaacaacccgagcgacacacaaacagaggagcaccaagagacacgcagcacgataagacccaaacagagacgcaaatggagtacgaccgacaaagaaacacagggcgacaacgagcacgacacgacagaggaagcagagcgcgtgaggagcacgcagaccacagacgccacagaagcagaaagacacaagcatacacggagcacgtgacagagaccagaaacgcccggcccagcgaacgaaagcaagacaacacagcgggcacgaaggcgacaacgcaagcgagtagctaagagacgacaggggcaaggaagacgcgcgctgaggacggaaagagacgccgagatgacaagaaggcaaacatcagaaggaggagacaggaccgcaaggcccgacgacgcacggacaaaagaccaggagacaagcagcacgagagagcaaacgagcgacgcagaaaccgggcacgcgaagcgcgaggaagcacaggcgcagggagaagagcaaaggaagatagcagggagagaagagcaaacggcagcagacagcgaagaagagggagataaaagacgaacggacacaacaacagagtagaagaaaagaaaaaaacagcagaaaagcaaaagcgagagcaacagcagaaaaaaaagaacaaaacaaaaaaagaggaacaagggagggaacagacgcaaaccaacaaaagaggaagtctcccagaagcgaacaa

SEQ ID NO: 685964 - DNA, 595 bp, Homo sapiens
ggaaacaaaggctggctctgaaaaaaaggagggggggaaagggaacaaaatcggacaacggaaaccccactgcaaactccaccggggtacaagggagtttccggccccacccccccaagaggctgggtcaacaggggcccaccaccaccccgggtgagcttcagcattttaagaagaaaccgggtttaaataccccggccaaaagggccgataccccgggccccaaaaaaagggcgccctttccaagaaaaaaaaaaaaagcccggccaaaaaagcgacccgggcgtaatacagggaaaacgcggttcctgggggaaactgatgccccccacaaacgctagggcccctaaattgttggcgccccggaacacacaaaaacccccctggaaactcaaccgggaacacccgcgaaaaccctctcccgggggaagggccaaaaaaaccccaccccactcttccgcttaaccccccaccctccgcgggaaaaagcggggcctgccctgggcattcaaaaggggcaccccaaaaggcggcggggaaaaaagggcacaacggcggaccctgcgggaaaaggaaaccccgccacaaaaacccc

SEQ ID NO: 685965 - DNA, 270 bp, Homo sapiens
taacgacgctagggatgtagcaattcaatagtatgtaaagccactttctgaaaaccacaagggtcccttaaatacatgtaaggcagctagactagtcccaaaataaaagacttatgtataataaaatacttacgactaacaggggtttggacgcaaaagtcaaatattttgcaagccaaaacattgaatttgactcttatctaactctacttccaaacaatgatctataaaatgtggtggagagtggtggtctatgtcaagcagccttat

SEQ ID NO: 685966 - DNA, 626 bp, Homo sapiens
gggaactcatggtttggctatttctcattctttctgcactgtttcaaatttttacaagtgtatgttattgtacttttaaaaagattaacttggcaacaagtctaacctgaaatgggtgctattttgactaatctgagtgaaaagtgaggatttaaatgaactaacccctaaactcaaccagtcccatgtttttttaacacttggaatatctaattccatttacactgcattcttcaaatgtaattttcaaagatgccttttaccttcatcccttacttttaaatattattataaacttttggagactcacaaaacaagcaatccctaaattctcacctaagaaagtatcttggattaaatggtttttgagaaccttgatagtgtatattctatgaaatggaaaaaacaagaactatacagaatcacaaatgctgttgatcacataccaatcttttccatccataaaggtaatgttatacatcttggcgacctggtgtaatgtgaaactttgcacaggtgagggatggaactttttaaacttttacaaactcttattctttaattttcccaaaaagaaaactcggcaaaaagaaaaaaggaccattttcctttcaactattctgaaa

SEQ ID NO: 685967 - DNA, 144 bp, Homo sapiens
cgctcagctacgtttctagtataaggtctctggggtagcactagagagccaacagagaatagataggggtagagaatagggctcctggccctatccctttggattaagagttatacctagaggtataaggaagcagacttcttc

SEQ ID NO: 685968 - DNA, 168 bp, Homo sapiens
tttaaataaaaaaaaatcctgattaaaatagttttggtgaattaaaaataagagtcgatgagctagaggctgggcatggtggctcacatctgtaattccagcactttggcaggccgaggcaggtggatcacttgaggccaggagttcaagacccacctggccaacata

SEQ ID NO: 685969 - DNA, 366 bp, Homo sapiens
agcctcttaccgtgcttgttaagccatagctcagggctcctcttgactacacacccaagactccttggaacgcgttctagtactgcttctccccaaactatgtcgagaggaagaaaaggtctggtattctgagtatctactttttttcatttccagtagtaagtcagtgctgctccaccaagctgagaagaaaatggcccttggctgtcctcggggccagttgtaagaactctggaccagccgtctgtagtggggcatgacttcgtgctcgaacaagtggagggcgaattccaaggccactaacaccgggaatacacaggcaatcagttctcgccctgttcagccggaacttctcttccagtttgt

SEQ ID NO: 685970 - DNA, 100 bp, Homo sapiens
gggagtgggaaaggggaatcagagcaaaccaagataggtcctagggccagcctagtgcctccacggacccggccgttgatagccgcggatgtgtgcggat

SEQ ID NO: 685971 - DNA, 362 bp, Homo sapiens
catgagtttggggcatgcggggtgtccaaaggtccttcctgtgaccgagtgctgcacctcctggcactacgtgcctaccgcaaggctgagctgctgctgcgactgcagaatggacggcctgacgcaggcggacaaggacgcgctggatggcctcctccagcaggtgggtgccgccccgagtgtcttgtctttaccacgtggtctccgccagatagtcttgtgcggcgtgcgatgggccagaagcatggagaactgggattcgggactggcaagtgaagagccgcttcctgggggtctctcacagtgttcagaaacctgcactgagtagccagggccctcctggatttagaacaaagcttagg

SEQ ID NO: 685972 - DNA, 666 bp, Homo sapiens
aagcctcgtacgcctatccaggatcgtcagaatgtattaaaattggccaccgtccggtccgatccagcgatcctcgactatactccgaccgccagtactatatttacccggaccgataattcaaaacatcataatgacaagaccggcgcccaggacaaccgatcaaaaattcaccactaggcactaaaccctatcgaagtatccgagaccataaattctaccgaagaccagacctgccagacgggaagttgcgggatcaagtagcattggagatcaacgttcccaatatgagttccccttgtcctagtctccctcaaagttctcagtctttctcgactaattctacttctagagcagccggtaaagaaactccttctgtactccttactaacgctcgcatctaaagacggtgcgttcgtactagtcggatccacaactttgttacactcaaactacggtaaatactacatgtaggcctagcttatagagtcccgctgcgatgttcaaccttctgaaaaagttatcttctcatattactaatcgtcctattacccgctctcgccgccggggtatcaatagatccaattatcgttaatctaatacgaatgtttcctattctatccgaaaagcaccctttcgtgttactactcatgctattacgggctc

SEQ ID NO: 685973 - DNA, 651 bp, Homo sapiens
tggaaaaagtcatggaggccatggggttggcttgaaaccagcttgggggggttcgatcccttcctttttggtctaaatttaattgtatacgggtttccttcgaatgtgttggtggtatagggagtggggggcactccatattagctcacctccaggtttaagtgggagggttctctctatacatattataggacttttctcgcctctcgaagcgaagggcttcctcaaatctccatgtgaaaatttatttaattatttagcgtggcgtggtatagaagaaaaagtgaagtggagccctacgagattgaatgaggaagtgtttcacagtggtgggtggtagtgccatgcggggttaagactccgaagttaaagcggtgcggggccatccccggaaataggcccggagaaagagtgtgtttggtgggcaagaaagagtttaagatttatacgccccgaattataattattgattagtgtggaacagtggggacatttggggccgtatagggttgtgtggctcctaaggggtgtgtttaccccgtgggaaaattagggggaaatctcaaggtgaatgtgaaagccctcccattgtggagtgggccaatataacaggccccccaattgggaatggggacaatagggtggaaattt

SEQ ID NO: 685974 - DNA, 540 bp, Homo sapiens
  misc_feature (45)..(45): n is a, c, g, or t
  misc_feature (132)..(132): n is a, c, g, or t
  misc_feature (238)..(238): n is a, c, g, or t
  misc_feature (309)..(309): n is a, c, g, or t
  misc_feature (446)..(446): n is a, c, g, or t
  misc_feature (481)..(481): n is a, c, g, or t
  misc_feature (523)..(523): n is a, c, g, or t
gcccctacactcaagggagcaacgagacccctctgccggtgcctnagaaaagtccagaaacccaagcaggatggggacgtggggagttaacttttgaaagtttttagggctccaggagccttgggcaccccnagagaacctgccgggggccagctgatttcttccacgccctctccgggctttccaatgtccacaggagctactgcagcactaacagtggctttggggcctgtatgtnaatgactgccatgtgtttgagggtgaggagagtgccatggatcttcattactattgaagcttctcatttanaaacatcagcgtgctctattttctactctccaacagctacatggcggggaggccaggtttcgtgtgatctcacttcagaggctcacccgagtccaccatagtcagagtggccactacataccgtactgggaaagctngcttggcaaaggggatggatgcttagcttttgccnaccggccatgggagatcttcacatcttctcgggggctggganagtggtttgtcttgccg

SEQ ID NO: 685975 - DNA, 913 bp, Homo sapiens
tcagtgagttgtgtctattgtgtaccagaacttggcgctccttgttgcagtgtgtagagtttttggacgcagtgaattctgtgcgccatattgcccatatgggcctcggttcctacaggtgtgcccccacaaaagtgtggcgtgcgccagagccgtttttacggggcgctaattctcttaattcggcccgcgctgtccccaaacacaagggggtggggacgtcccccccccctgggtgggaaccccccgccctcccgccgtggtggaagcccgccgaccaaaggtttcgtcgcaaacctcgcggattttcttgcgccctgttctggtgttgccaaaattgagggacccacaagtgccggcccgccacaggttgtcaatatttaagggcgggtccccaacgaccaggggttctgaaaccgcccaacatacgtgggcgcttccatttccaaaagggacactccccgggttcctccacgccctatcaaagaagttccggaggcgcccaccccgaacgagtgtggcgcgtgtctcctccagagggtcgttccctacatatgttatgagggtccccccaggtcgtggttttttataaaccccagaggttattgattaaagtcctctcgcacagcaaccctcctggcaatcaaacattccagatgctcccagtttggacacaacacagatcagatccccccctgctgcagatggcaaacttcccacaaaatccgtccttcatgagacaatccctccccaggaacaccttcttcagagcaaatatctggtgcgaccagaaaacaaaccacggtcccaattctttcggagcttgtaccatcgttaccccgacaagccccacaattcaatgggccatttgcaccccaacaaataaaacagattcccaaaaaccaacaaaaca

SEQ ID NO: 685976 - DNA, 336 bp, Homo sapiens
gtatagtaaaatcaccaagaaaaacacatgtacacaagaacactcactaaaagctcacgccataaggtaagaccaacgattgttgaaaaaaaccttatttccacaatctggccatgtttacagttttcccactttgttctcatcaaccttccctagtacaaatttaattacatcatcttactgaacactactgactttactggatcttttccttgattcgatgttacctttcataccgatcacagtagaaaaacgtatgaagttttttcaactacagccaagatgctgggttctcacctgtaactatagttttcacgactggtaggcgataagatt

SEQ ID NO: 685977 - DNA, 878 bp, Homo sapiens
  misc_feature (562)..(562): n is a, c, g, or t
  misc_feature (681)..(681): n is a, c, g, or t
  misc_feature (840)..(840): n is a, c, g, or t
tcacaaaaacaaatactgcatgattccatttaaatgaggggcctagaatattcaacttcatagacagagggtagaatggtggttgccagaggtgggaagagggggtaggggttaggttttaataaatatcatttcagttttacaagatgaagagagttttgcagatgggttgtggggatacttgtacaacattatcaatgtatttaataccactgaattgtacacttaaaatggttaagatggtaaattttatgtgtgtattaacacaataaaaactgaaaaaaggaatatatgttaccctaaataaaaatttcatatgctgaactcagaacccccagtacctaagaacatgaccttttttgaaaatgggattgttgttaatgtaattagttaagatgaggtcatgctgtaatagggtgggcccctaatccaatatgatttgtgtctttataaaaaagggaaatttgtgcacagagataccacaggggatatgccatatgaagatgaagcagaattctccagcccagggatgcgaagattgccagcaacgaccggaacctgnggagaattgtgagtggtcctctccaaggctccgaggaccagcttgccagaacttgttctgctctagctccgaatgtagcaatgccttgtgtgtaacgcctatgttgtgcattgttttgngctaggatgagaaagacatgatgcatttgcacgtgcaaaaggtttgctagataacatggcaagtgcttaaaaaaaaaaagattttttggccgtatgcccgtgcgttccggcgattggggcctggcatccgccgtgcgcgcccccccgtgagccgcgggntcgggacggtcctcccgaaggccaagcgccgtatcctg

SEQ ID NO: 685978 - DNA, 121 bp, Homo sapiens
tagacgatccccgtaaaggaaaaacaaaaactgcaaatctacgaaaactttttagagaaaaactatttaaaactgtcagatcccaacacaacatacccccgcaggcgtgctccgcttactg

SEQ ID NO: 685979 - DNA, 994 bp, Homo sapiens
ggcgagaatgatgactattctcagcaatctgactgtcgacattccagaagatgtcgacattagtctgagcgggacgcacagttatcgtgaagggccccagtaggaaccctgcggagggatttcgcatcacatcaatgtactaactcagttcttcttggaccgctgaaaagagtaggctccgggcttgatccaaaaatgggtggcggtagactaggaatagggaactggggctttaccgttctctgggcactcatatttagtgcgtacaatgtacacggagacatgatcgaatggcgtgttacaactggagcttccgtgaatcacacgaatgaggtcctggtgtatgcgtcacttccccatcaaatgttgtaatccaggacaatggggtctcttgtggaacatcgcgaaaatttcttgcgcgttgaactacatatatccgtcgagcggattcggaaatgcacgaacccagggtgtgtgcgtgtggtgttcgagtactctacaaggccactagcccaaagattgatagtttaacatacccgtttgtacaggtgcacacactgaccactctagtaggtcttgtgtttcacaacttcacgtgggccttttggatttcacgcaacgccacaaacaaggttaataaaatcaatgggatatcacggaacattttccggactggtaatctatgtctctgaaaaaaaggaactgttcaagcagcgctgatgaattaacgatcctaaaagaagttacgccggccttaccgggaaccggaaaggatggcctcgaatgaccacttaagaagcctacgttggtgaatatttcaaattgattgcagtaaaaaggacctatgggttgggaccacgcacacacaaaacctccgggggcccactgcgggcgggggagcaagacggctgcaccgcgccggtgcctacgcggccgaacccagtttgcaaacgggaaaccgcgggcccaaaggcagctaaatcaaagcgacgag

SEQ ID NO: 685980 - DNA, 130 bp, Homo sapiens
  misc_feature (82)..(82): n is a, c, g, or t
  misc_feature (91)..(91): n is a, c, g, or t
cggtacccggtcccatgcaagtgttggggacgccgagtgggggtactagttagcatgcagagtctcgttcggttaatccggngcaaaaatntaaccagacaaatcgcgtccaccaactagacggcatgac

SEQ ID NO: 685981 - DNA, 159 bp, Homo sapiens
atatccccaaaagctacagtcttgataaagtaaaacattcagtcttaaaacacctgatttctgttcgcagttgagagtgcagatagctgactctcacagacactcatggagtgtcccccttcaggaaggcatgaaagcactcgatatgaagggtaccga

SEQ ID NO: 685982 - DNA, 467 bp, Homo sapiens
  misc_feature (414)..(414): n is a, c, g, or t
cacgagggcaagtttgacttgggggagattcgtcgtagaataaacgcaatgcaggagacgctcgaccgcgcgctctccgagcaggatgagttgttctagccctgaacccttgatgggctggaacgccgccgaatgtcccctgcggtgttcgtcgatcgggccaatattcttggaacctacttgttgcgatctggttgcggactcaagtagcgttggtgtgcgcgtcccaagcggaagcacctgagacgctcggaaagcgaccaccttgaacctcagggttcaggatgaaggccggacggcattggcggggggctcctgttcgatgcgggcgaaggctcgtgcggcgaaggggggttgcgggagaccggaaccccccttagtttttctgccgagcgtttccagtggatgatcggncggcagaggagcgacggcctgacgatcggggccgcgaatctgatgggtaatct

SEQ ID NO: 685983 - DNA, 238 bp, Homo sapiens
gaaattccattttttaaaaccttttcttttttggaaattttgaaaaaaaaaccagaaaaaaacctttttaaaaaaaggggagggggttaaaaaaaaagttttggttttgttcccaccccccctgcttttggcatttaaaaaagggaggggccagatcaaccccaaaatttcctttttttccccccttcccggattaacttccaaattttttggggaatttttaaaatgggaaacccca

SEQ ID NO: 685984 - DNA, 385 bp, Homo sapiens
actctacaggatcctcttagcccgacatgtcctgacagtgacgcatcgaaaattactcgatacttcatgacattaccgaagctgcgccacttgtcattcaggcaggatcgatgggcttgggcggcgacgtgttcgtttctggatattggcgaaacggtcacaaatcgttggagttggcttggacacacagctgatcaatctttctgggcttagtgttcgttccgcagcaaaaaaccggcatggtgatatttctcaatttgcaagttccaggtgaggcctatccggcccaagagccgcaggaaaactcttattgaacgaaggtggttgacttggcgactaaacgttggccccacatatcggtgctccaaggggtaccgcagctcga

SEQ ID NO: 685985 - DNA, 165 bp, Homo sapiens
ctacaggagcttagctgagcaagctgggcagggtcaagggtaattgaagggcggagggataggtgggggtctcagggacagagttcgaggcagcatcgctctggtcctccaaggcctgggttgaaccactggtaatgaagccttcttctctaaagtctcaggtcc

SEQ ID NO: 685986 - DNA, 591 bp, Homo sapiens
caagaactgcctgtagttttcaaaatgacatgtgggtttttactgttatcattgttatttcgatagggctttttcctgattttgggtatacaagtttccaaacttgcataataattgctaacgcactaggcgatatctagggccagtctgttaaaggggacctctaatgtagctataagacaggttggtaaagatgaactaacataagtttaagctaataattcagtagttgatgcagtatttcacagtagagcccgagcttactcatttttttcaaaatttggatcctgatactcctttttcagagttcagaactgaactgctcccctaagacctcagaatcttttgcattgagacatatgatctatttataaataaaggttatcaaatatcttgttgaactaattaggttgatcaaattaggatcccaaatattggggtccctgacatctgagcctttatctaaaaatgtttctgtaacataatgacagcctttatgtttgttaattgcctatagtaaagaagcaattttaagcctattctcatttccctctcccctacaaaaaatgataaaagctttccaattactta

SEQ ID NO: 685987 - DNA, 107 bp, Homo sapiens
agtcggccctgtgaatccgctggtgcgtgtgaggtgtgacctgcggttaaaagcctttagtgatagggcagacctcattcgccacttcagcatccaggtgctcaatg

SEQ ID NO: 685988 - DNA, 848 bp, Homo sapiens
  misc_feature (9)..(11): n is a, c, g, or t
  misc_feature (473)..(473): n is a, c, g, or t
  misc_feature (656)..(656): n is a, c, g, or t
  misc_feature (792)..(792): n is a, c, g, or t
  misc_feature (810)..(810): n is a, c, g, or t
ggcggggannncaatatacgctaggcgaggctggtgttaatcggccgagggcagcgcgccgaacccggccgacgggacccctaaagttctgcttctgtcggggcagcccgcctccgccgccggagccccggccgggccaggccctgccgctcatggtgccagcccagagaggggccagcccggaggcagcgagcggggggctgccccaggcgcggcaagcgacagcgcctcacgcacctgagccccgaggagaaggcgctgaggaggaaacggaagaaacagagtagcagctcagactgccagagatcgaaagaaggctcgaatgagtgagctggaacagcaagtggtagatttagaagaagagaaccaaaaacttttgctagaaaatcagcttttacgagagaaaactcatggccttgtagttgagaaccaggagttaagacagcgcttgggggatggatgccctggttgcntgaagaggaggcggaagccaaggggaatgaagtgaggccagtggccgggtctgctgagtccgcagcacgtcagactacgtgcacctctgcagctggtgcaggcccagttgtcacccctccagaagatctccccagtggattctggcggtattgactcttcagattcagagtctgatatcctgntgggcattctggacaattggacccagtcatgttcttcaaagtgccctttcccagagcctgcagcttggaaggagctcccagaggtttacccagaagggcccagttcttacaggctcctttctctgtcagtgggggncgtcacagccaagtgggngccttaatgaactaattcgttttgacgccatttttcca

SEQ ID NO: 685989 - DNA, 109 bp, Homo sapiens
gcggccgcctactactactactactgctcgaattcaagcttctaacgatgtacggggacatgctgctgccctccagcttgggcaataaagcaagactctgtcctaaaaa

SEQ ID NO: 685990 - DNA, 112 bp, Homo sapiens
aaaaagaacaaaatataagctcaaattgaccaaacagacctatagtgaagccaaataacaattcaaatgcacgacactttacaacgtcattaaacggcaaaaccttggagaa

SEQ ID NO: 685991 - DNA, 270 bp, Homo sapiens
tggccctgaggcgtttaatggccacgcaaagacttctccccgctgccgtcctcgtagaacaggcaggaggggagatgtcgttcagggcgcgcagagcgcagatgcccttaaagaggatgatgtactccaacaggcgcttcctgggagggtcgagcagcaccagctggtttacattgtccgtcatctcagcctctatggcactgggcgccctcgatgggctgtgtgcacttcttgttgtccagggccgggcccgtggccacctgttggtcc

SEQ ID NO: 685992 - DNA, 194 bp, Homo sapiens
actctagagtgatccccaggaatccacctggctgggaaaacatgtgaaaggtgttcagtcttcttagtatattggtaaaatgcaaattagaaccaaatgaggtaacattattcaagaattaacagtactaatgttgataaagatatggagcaatagtttatgctgtaatagtttatgctgtaatagtttatgct

SEQ ID NO: 685993 - DNA, 354 bp, Homo sapiens
  misc_feature (20)..(20): n is a, c, g, or t
  misc_feature (30)..(30): n is a, c, g, or t
  misc_feature (46)..(46): n is a, c, g, or t
  misc_feature (70)..(70): n is a, c, g, or t
  misc_feature (88)..(88): n is a, c, g, or t
  misc_feature (96)..(97): n is a, c, g, or t
  misc_feature (102)..(102): n is a, c, g, or t
  misc_feature (128)..(128): n is a, c, g, or t
  misc_feature (131)..(131): n is a, c, g, or t
ccttggtgctttttcccggngaacgtatgncgagaacccaaatagnccatcccctgagagagagaagtanaagtcacgcacatgctanagtcactnnagatngtattatctatcacttcatcagaaanatngaaatgtcatttcattcacatatcactgacaatttttttttctgatgaagtgattgttccccgctaagtgattgttccccgctacagtgattgtaccccgactaagtgattagttccccagctaagtgattgttccccgtctaagtgattgttcccctgctaagtgattgttccccgctaagtaattgttcccccgctaaactcattgtaccccgcttaagta

SEQ ID NO: 685994 - DNA, 793 bp, Homo sapiens
  misc_feature (124)..(124): n is a, c, g, or t
  misc_feature (525)..(525): n is a, c, g, or t
aaagcacatataaagaggcacgcagcttcctcctggcagctctcgggcagctgcccttggagcctgactgccatgctgtgaggaagcccaggtggcagcgaggcggccatgcagattgcagccnatggccctggcagaacctgacaaagtcagcaccagccactagacctgccagcaaggatgctctgagccgacgtccactccagctgtcgtctgactgcccacgagacaccctgagtgagcactgcccagctgagacccgtcaactccagaactgtgagaggcgatggttccacgacttcctggctgtagtcactgctgttgggcagctgtgggtgaccctgaagggacactctgataagggacatctgcctgcatgtgtgacctgagtcccagcctcagctttctcatgtgaaaaatcaggaccacggtagaccctaccttataaggcagctgcaagagtgaaatacaatggaaaatgtacacaagatagggtggctgttcgacgccctcttggttcttcanatctaaggcccatgtcaagtttaccatcattttgccatcatgatgagaaaagaaatgagaccagcctgaccaacatggagaaaccccatctctactaaaaatacaaaattagctgggcatggtggcactcgcctgtaatcccagctactggggaggctgaggcaggagaatcactcgaactcaggaggtggaggttgcagtgagccgagatcgcaccattgcactctggcctgggcaacaagaatgaagctctgtctcccaaaaaaaa

SEQ ID NO: 685995 - DNA, 457 bp, Homo sapiens
gagccctggtgctggcaccatggacactgaagttatccgtgaggcagactggacggggacctgtgctgctgcatgcatgatctgtgggtgggcgggcggcgcctgggagtggctcttgctcaggaattgataggaaccctaaaaactaggataccccctcctcggcccatgaggcacgcacagtgacttatgttaagacttcaccccttaatatatcatgcccacaggatgcgtcagtcatgatacagtggtcagcaggcgcacctccaccccaccgccgacgtgccctcgccatcgtggtcagacccccctcccgacacaacacgctgctggtctgtgtcagccatttgccaacgtgggaggctctgccagtgtcttccgggtgaacagtatttggattgcgcgcatgtacggtccgccatgggctgcaggcgcccattcctctggaccctgcaat

SEQ ID NO: 685996 - DNA, 124 bp, Homo sapiens
  misc_feature (86)..(86): n is a, c, g, or t
  misc_feature (101)..(101): n is a, c, g, or t
gacagtggcggccaggccgggactcggagcctgcaggcctgaaccagggtgatgctgaagatgatgaccaaaatacacgctacatnaagccgttttcctgngccaggcaccctttacttgccta

SEQ ID NO: 685997 - DNA, 144 bp, Homo sapiens
  misc_feature (1)..(1): n is a, c, g, or t
ntctaagattaatccaaatcatactgtatttacatgcacggtcagccaagatacaaattcaaaccatggtgcgttagacaatggtttgttccaacttaaattaaacagataatactcttattcacccccttggacatgtacaat

SEQ ID NO: 685998 - DNA, 691 bp, Homo sapiens
  misc_feature (691)..(691): n is a, c, g, or t
caagacctgaaactataaacatgctagaagaaactctagaataaactcttctagacattgacttgaacaaagaatttattactaagatctcaaaagcagatgtaacaataacaaaaatagacaaaaggaactcaaactaaaaagctcctgaaaatgagctttttaattaacacagtgaaaagaaaacctatgaaataagataaacgtttacaagtttcgcatgtgacaaagatctaatgtccagaatatacaaggaactcaaacagctcaacaaaaataaaacaagtaacctcattaaaaagcaagcaaagaacatgaacattaaaaaaaaagacactgaaggtcaatggtcaacaagtacgtaaaaggtgctcaacattgtcaatgatcagagaaatgccaattaaaaaccacaatgagataccaacttacaccatgccgaatggtattactaaaaagaagaaaaatgagctatcggcaaggatacagagaaaagataacatttatacactgtctgtgggaaagtaactttctacaatctctatggaaaacagtatggagatttcaaaatagactaaaaatagaacttccatttgattcagcattcccactacttggtatctacccaggggaaaataacttgttacataaaagaaaatacccatgctcacatgtttatcacaacactatn

SEQ ID NO: 685999 - DNA, 109 bp, Homo sapiens
  misc_feature (88)..(88): n is a, c, g, or t
  misc_feature (99)..(99): n is a, c, g, or t
ggccgtttgggccgggaagcgatgtagtagctgccaggctgtcccccgccctgcccggcccgagccccgaaaaaaaggtgccgtcccnggtgttttgangaagcagctc

SEQ ID NO: 686000 - DNA, 257 bp, Homo sapiens
gaaatttgggccattatttataatcagggtagcattaaaatggagaaaagaaatttttctgaaaaaatgcagtaagtgtaagccacatttgtaaagtttatgtgtatgaaagcttctggtaagatgttgaaatctattgtgcattcccaagagtttatgtttgttgtgttttatatgatctacaacgtataaaattgtgtatttttctttggttgtccctggtaacaaaaaagtattttaataaaaaattgaagtga

SEQ ID NO: 686001 - DNA, 431 bp, Homo sapiens
  misc_feature (5)..(5): n is a, c, g, or t
  misc_feature (21)..(21): n is a, c, g, or t
  misc_feature (114)..(114): n is a, c, g, or t
  misc_feature (119)..(119): n is a, c, g, or t
tccangaaatactgaaatgcnctggaaaaggcctggttgcagcatgcttgaaatctgggatgtggaagacccttccaatgcagctaaccctcccttatgtagcgtcctccttgngccgngattgtgccactgcactccagcctgggcgacaaatcaaagaccccgtctccaaaaaaaaaaaaaaaaaaaacttgattgggatccaaaatcatacaactatacactaaaatcagtgaatattaccttatgtaaattaaaaattaggaaatcaaaagaaaagcatacatataaaaaacagttttttctaagcatttctcatttgtagggtgtttgaattacgttgtatgttgtctcatttcacccccataacaaatctatgaaagaggtacttttatccccatgttaacgtgaataaacccaggtttggaaaa

SEQ ID NO: 686002 - DNA, 190 bp, Homo sapiens
gagcgccacgcgatcgatgcggtagaagacctgttggactcctgccatgcgctgatgaattagggcgttgaccgctataaacgcccctatccgatttccgcagaagaggagcgcctgcgccagaaggaacgcgaggagcacctgcagaaacagatcaacgacctgtggcgcaccatccccaagcgcgccg

SEQ ID NO: 686003 - DNA, 215 bp, Homo sapiens
cagttcctgcttctgaaagcatgtggatcagaggtccaaatatgcattacattctggagtgaaactcatgaagatctttggaagctgaacttgctgaggctaaagaattttcatccagcaggtaagatatcacagtgggaactaaaagagcaagtagctggactctgttgtgttcttcaccaagagcaaccagtgtttcaagaagcaggaactgg

SEQ ID NO: 686004 - DNA, 691 bp, Homo sapiens
  misc_feature (324)..(324): n is a, c, g, or t
  misc_feature (542)..(542): n is a, c, g, or t
tcaaggaatttgatgggaagagcctggtctcaggttaccaatggagggtctggagctgcctgaggatgaggaggagaagaagaagatggaatgagagcaagggtcatacacgttgtgagaagcctctgtcaagctcatgagaagaaatcttagataagaaggttgagaaggtgacatagtctcgcaatagacttgtgtcttcgaccttgctgctattgtgaccagctagccgtacggctggacagccgaactatggagcggatcatgaatagcccgaggcacttcgggacaactccaccagtgggctatagtgagtggccgaantagatgcgacctggtagatcagaccctgaccgaccccatatgtggagactgcgtgcggcagaatggctgaggagcgacgagaatgataaggcatgttaaggaccgtggtggtgctgctgtttgaaaccgccctgctatcttctggcttttcccttgaggatccccagatccactccaagccgtcatctatcgcatgatcaagcgtaggtctaggtatngatgaagatgcaagtggcagcagaggaacccaagtgctgctagttcctgtatgagatccccgcctctcgagggcgatgaggatgcgtctcgcgatggacagaagtcgattaggtgaggagttcatagttggaaaacttgtgcccttgtg

SEQ ID NO: 686005 - DNA, 1472 bp, Homo sapiens
  misc_feature (794)..(794): n is a, c, g, or t
gttgtttttatataaagtattcacccatttgtatcacaacaacatgattgttgttgttaaaaagaaaacaaactgataaagttgtttttataaaattaaaacagagaaattttttgtctttctcttacaatatgtttttttcccgcacatgtctttatgtcgtttttagcggtattatttttcccccccccacccacccctgtacatctcttgggtggtacccaccgagacgcccccccacacattgttgttgtggggttataaaccttgtcaacctccacaagaatccccacatcctggggccccccaccgagttgtgtttgctcctgttcaagaaaagaaaagattgtgctcttttgtaagaggaaaggtgggatatttaaaccccaccacctaattttagggtgtgtttaataagacgcttcttgcccccaccggttatataaataaaatatggccctccactacacccacctccgttatggtgatcacccctcgtcggagaggacaaccccccccgcctggtgtgaatatgtctccgcttgtgtgctcttaaaagccacgagtactctctgtgtaaaatatataaagtgtgtaaaagtatgtgttctcttattcccacacagtgaaatattgtcgccccgcgagtgtgtacccaccacaagacacaccccactactgtgtgtgtgtgtggttgaattatgtcccactattctgcttgttgttgttgtgtaacactgcacataatgtgtgtgtaaatagtgagataaatattgtgtaatacacactttctncttgagtaccacacacacacaggtgtgcccacataagtgtaacacacacgctgtttataatatctctcacacacagtgttctctgttgtataaaggagacactctcttgtatataaagtggtgaacacacaacagtgtcatcacgccacacatatcactctctcaatgatatagggggtggtgataaagaagagagaggatgatgatatagaaattgtgtggggagacaccacttgttttgtgtgtggcgccatatatagttagagtgtgagatgtgtgcgggtggtgagaaaaggagatatagaatatagatatataccacaaatagtagagagagatatgtgcgccgcgcgagatatgtgagagaagtataagagagagagctcaaaaggagatatgttttccttctcccacagtgtgttagtgagaactcggacacacttgtgtacttattgaacacctcaggcgttttatgaaaatagcctaggtgcccacataaatattttatatgccaccgtgttagtgatatttaatatccaccgtgccagcttgtatataatagttttcctggtacacccacttaatgaattttaaattcacccaaaaattgtctacaccagctcaccacgatttataaaatgaaactagcactcactttaaataaatttgataattttt

SEQ ID NO: 686006 - DNA, 203 bp, Homo sapiens
gaacaagagagatcaacaagattttgctaaggtttatactcatatactatattacctagctcaagtctaccagcatctggaatgtttcgagacggctgctcactatttgccatagtacactaaaacgccagctcgagcacaatgcctaccatcctatagagtgggctatcaatgctgtacctgtcacagtttacatcattagc

SEQ ID NO: 686007 - DNA, 468 bp, Homo sapiens
  misc_feature (4)..(4): n is a, c, g, or t
  misc_feature (18)..(18): n is a, c, g, or t
  misc_feature (35)..(35): n is a, c, g, or t
  misc_feature (88)..(88): n is a, c, g, or t
  misc_feature (183)..(183): n is a, c, g, or t
  misc_feature (282)..(285): n is a, c, g, or t
  misc_feature (298)..(298): n is a, c, g, or t
  misc_feature (435)..(435): n is a, c, g, or t
tcantggtgcccagatgnctgtggttgttggtcancctcttggataacaaccctctttccgctttgcccaccccttaacataaaaagnccctgaaatatgttttgacttaagacagcaccttaggatactagtccaccatcttctcagattactggctctccagataaacctgctttcttacncgccatcgctcctctcctgtgtttggcttttgacaggtgagcagctgaacctgggtttgatgacaacatcgagggtcactgatcacagatcaccatgannnntataataataatnaaaactttgaaattttgcaaggattataaaaatgtgacacccaaaccgaaagtgagcacatatgttggaaaatatttgaagaacatctaaatatattaatagaataaaaaatctataatccaaaacagcataattanaaaataatagacatttttaataaaaattataaa

SEQ ID NO: 686008 - DNA, 138 bp, Homo sapiens
ttccggaactatgctgaactactataaggagcagaaggtctggtggaggggcgctcaacaacctgcgtgagagccctcatagcagttcagcaagccacggaagctggtcaacactatcaacccgggagcccgctatca

SEQ ID NO: 686009 - DNA, 775 bp, Homo sapiens
gaaaacgctgggtcagcagcaagctgtagtttttaaaaatgtttttagttaaacgttgaggagaaaaaaaaaaaaggcttttcccccaaagtatcatgtgtgaacctacaacaccctgacctctttctctcctcctggatggtatgaataaccctgagatcacctcttagaacgggttttaacctttagctgcagcggcttacgcttgccacgtgtgtatatatattgacggttgtacatttggcacataccctgtggatccccacagttgggtcctcctccaagttaccccttttatagtatgacgagttaacaagttgggtgacctgcacaaaggcgagacacagctattataatctctggccagattatcgcccctctgggtgcgatgctgtacagggtctctgtaaaaaggtccttgctggtctcagacagccaatcacatttatagttaatttttttcggggtattaggtataggtttggtattactttctaatcgaggtgtgaaaaagttctaggttcagttgaagttctgatgaagaaacacaatggagatttttccagtgataaactctggcatattggtatttcaagcaatggtagctaaaactggatgtaaattcctcctttttttgccttttggggcttaatgaatatcatttatgcagtattgacatcttgatacctatagttgttcccaggttgttaaggacattacgtggtacattgacacttctggcacaaagaaacagaacaaacaacaaaaaaaagtt

SEQ ID NO: 686010 - DNA, 186 bp, Homo sapiens
  misc_feature (19)..(19): n is a, c, g, or t
  misc_feature (92)..(92): n is a, c, g, or t
gggctcatgtgatctctcnactctgcctcacaagtagctgggactataggtgcacaccacgatgcatgctggctaatgtttctgtattttcntgtagagatgggggcctcactatattgcccaggttgttgtcaaactcctgggctcaaatgatccacctgcctaggccccctagagtgctgaaga

SEQ ID NO: 686011 - DNA, 116 bp, Homo sapiens
cttagaggatcccgtcatctccccctcctccagaggctgaggccctcagcagcagcccctgctgctcatccgcggacccctggagtatgtgccatctgccaaagtggaggtggtgg

SEQ ID NO: 686012 - DNA, 400 bp, Homo sapiens
tattaaactaagggcttaattttaaaggattatgttgccctcctataggggataaaaatggataattgcccattggttggaaccattatttttttttaaatgaaagggtaagaatgccttctgattcccccaatttggtatccaaccggttccctatccccttttttgatggagcataaaaattgtcccgggttgagttataactgcccgtagatggccagtccccagtgacccccttttcaggtgcccatcttttgctcctattaaaaaccccctcccaaaacttaggttttggatctaatctctgattattaaaatgtttataaagtttttttttccccaaaagatgccattccttttgagaaaggattgcctaataaattttgttttttacccttta

SEQ ID NO: 686013 - DNA, 406 bp, Homo sapiens
aggctggaaaccgcagcccagctcgccccctgcaccccgacaatgaagctaccaagcggccttcatctgttagagcccctcccctcggggtcaccccatattctggtatttccctccccaaaagaccttatgggaaccctccctcctgctcaccaagcttttgacagaagagtcgactatcaggaaaaacagagagaccttgaaataggcataaggaaaaaaccctttgctcaacctaaggagtctaagcagccatccaggtcctctccacctttgctctttgctgttcattgttcacagctcgaaatcgtaggaagctcaatgtgcctgcccagtgggatgtgattattactgtggattttgaccttttgccagtttgaatctatttgcaatttgtcttagcaaa

SEQ ID NO: 686014 - DNA, 203 bp, Homo sapiens
atgctcttatacaaccatgatcattaagggtggaatatatgaactcgtgactgtatagcaatttgcagtaataaatatagtaatttatttttaattgtttcatgtctatattataattataatgatttgctagatataatagtcttatattacaatattacaatgatttgctagaaaaatgttatttacattttttttccaaa

SEQ ID NO: 686015 - DNA, 242 bp, Homo sapiens
  misc_feature (52)..(52): n is a, c, g, or t
  misc_feature (72)..(72): n is a, c, g, or t
  misc_feature (77)..(77): n is a, c, g, or t
  misc_feature (102)..(102): n is a, c, g, or t
  misc_feature (105)..(105): n is a, c, g, or t
  misc_feature (136)..(136): n is a, c, g, or t
  misc_feature (143)..(144): n is a, c, g, or t
  misc_feature (164)..(164): n is a, c, g, or t
  misc_feature (176)..(176): n is a, c, g, or t
  misc_feature (183)..(184): n is a, c, g, or t
  misc_feature (189)..(190): n is a, c, g, or t
  misc_feature (214)..(214): n is a, c, g, or t
ttgctttatttggtgttttatacaagtaactaaaataaatagaataacaaangcagctacatggcccaaatntcccngcttcctcaggctgctgtctaggangantaaccccggggtaccgctgacaaaccccaancctgcanngggcagggctgtgggtaacngggggggggggncgcgttnnggggnnggggggggcccaggtgggtggggnttcttcatagtggaagaggaaatgccta

SEQ ID NO: 686016 - DNA, 224 bp, Homo sapiens
gtggaagatacgttagtctccaagctccactggagcctccacaactggttgccagtcactattcatgagctctggacagaaagatgcccctttcgccaggctggtggcttgatgggtgtacctcgagagggggtttggctccctgcccaagatgcctccagccctgccaggccccctccagcggaaggcctcatatgtctgtagtgtcgagtgtcttcaagagc

SEQ ID NO: 686017 - DNA, 528 bp, Homo sapiens
atgggcgacattcaaccttaaaaagagacgctgcttcgccgggcacagtggctctcacctgtaatcccagcactttgttaggccgaggcgggcggatcacgaggtcaggagatcgagaccatcctggctaacacggtgaaaccctatctctactgaaaatacaaaaaattagccaggcgtggtggcgggcacctgcaatcccagctactcgggaggctgaggcaggagaatggcgtgaacccaggaggtggagctggcagtgagccgagattgcaccactgcactctagcctgggcgacagagtgacactccatcctaaaaaaaaaaaaaaaaaattttattatttacccacacacaaccccctaagccaggtgtagcactgcggtcctcagggttgggggaggctaaataagtttggaggcttcagggcaaatgagtccctctggagggctacctactagcagtaacggtcaggcacaggaggaggatacagtctatgctgtgcataaggaattcagaagtccagga

SEQ ID NO: 686018 - DNA, 904 bp, Homo sapiens
  misc_feature (820)..(820): n is a, c, g, or t
gtaaaattttttgcagccaaaataaaaggcctctgtcgccctaatttgcccccccctttgtaacaccccccccttttaaaaaacgagagttttttgaagaaaaccccgctcctgtgggagccacacacgacctcctgcaatatcttaatcctgtctcccagcttttcgctgtaacccctccgccgctatattcttcctgggtcgccatatcaacatgtgtcaatcagaaagctcccacccccggctcacgaaataaaatttcctccttgagtcaaccccccctccttttccccccgccaattttttcttcgccccacataccatttccgcacactccgcatgggttgtatcctccaaacagaggctcttccgagggtcattattcgtgacagtccgccaatccactttcgcactaaatcgtgtctatggtgcggcaccacaccctggcgcctcatctattctgttgtatgctttggaatactacgcccccgggagtggtctatatctggtgctggcatccttgcccacacccaccttgttaacttgtgtgcaccactgacaacatttaggcgagccaggcaacacatgctcttgataaagattagaaagttgtgctatcttcttctcgccccccactaagagggtcaaggcggaggatttctccgcacatacagacaggcaagacggcagggcgcgcacccccctgcgacaagaatccttggtttgcatatgacagaacatttcgctggtcttctggaacgccgggcactttgtagcaaggtggaaggcattcgcccccctcaggaaaatatcggacatnctgtcgcagctttccctaccagagagacagagcaacgtcggacctataaaaaatagaaaaaaaaaacaaacacccataaacaca

SEQ ID NO: 686019 - DNA, 423 bp, Homo sapiens
acatcactttgatgtggctatagggctgcaaactgctgaacatgatcgcttccacctgacgtcaagagattgtaatatagccagcttagttaagccattaaagcagaagtgcttcatttactcttctctctaggaaacgaccagtcatctccatgttccttcatgctatggccccctgtgttctgttgtttttgctttagcgcaatccctttatcgtatttgcatcttctctcttctgatgcccaccatacccatcaatctcggcccagggcgacataccacgttctctgtagtctctgtgagaaggcttggtgcatcaaactcccattgcttgagaagaggctcatccaagccccagtgctccaccctgcagtcgtaaacgtcctcagttgagggcaggaaggggagatagtggaacttgcg

SEQ ID NO: 686020 - DNA, 123 bp, Homo sapiens
ccggtacccttattgttgaatcttgaactattcttaatgaatggtgagccaaggagccccagtgtggagagagaactactgcactaaatagtgagttttgttctacttccagtgtggagagag

SEQ ID NO: 686021 - DNA, 262 bp, Homo sapiens
gttgtaagtgatcaaagcacagtaagtcagcatatccatcacctcagatgtttatcatttctttgtgtttgggaacattcagaattctctcttctagctttttgaaaatatacaatcagattagtagttaagtatatttaccttgcaaatactgcagagcactagaacttattgatgctgcaattttgtaatcaacactcaccctactacctactcctcccacctaaccttacccagacaagtcagaggtaccgaaggctcg

SEQ ID NO: 686022 - DNA, 858 bp, Homo sapiens
agcgggggggaattcaaacgtgtatgcggaaaggagttgggttccatcttttcatttccccagcgcagctttctgtagaaatggaatccgaggatttaagtggcagagaattgacaattgattccataatgaacaaagtgagagacattaaaaataagtttaaaaatgaagaccttactgatgaactaagcttgaataaaatttctgctgatactacagataacacggggaacaggttaagccagaaatatagatagataggcaaacaacccagaggactaggttgagtattggttgctacaaactaagagaaaaacaagtgttccgctaagtggatagctacttttaaatacaattgatatggtcgtatacagtcaagcaacttgaaggcggcttcccccagattaaataatggccaaaatgagagtattgggctaagaatacaagtagagattggcaagaatataaaaggcaaatcaagagccagacagaaagcacgtagactaactaaacaaataggccgagagcaaactagcaagaaataaaagcttttgagttcatagaaaaacgaagggacacagagaataaatcaagacacaaagagaagagacaggaaacaaggaaagacgaatctaactagtcaagaacaggccaagtaggaaacggaagagaatcaatgtaacccagcgaaagaaacatgaaacgaaaggaacggatgagctcccgagcaggagagaaaagataggctatccaaatataaaaaggcaagttaagcaagccaataattaaagacgaagatagcaacaacatataaaccagtcctaacgaacgttgaagaaaaactaaaccccaaagaat

SEQ ID NO: 686023 - DNA, 964 bp, Homo sapiens
  misc_feature (20)..(20): n is a, c, g, or t
  misc_feature (182)..(182): n is a, c, g, or t
  misc_feature (274)..(274): n is a, c, g, or t
  misc_feature (350)..(350): n is a, c, g, or t
  misc_feature (456)..(456): n is a, c, g, or t
  misc_feature (473)..(473): n is a, c, g, or t
  misc_feature (541)..(541): n is a, c, g, or t
  misc_feature (585)..(585): n is a, c, g, or t
  misc_feature (647)..(647): n is a, c, g, or t
  misc_feature (691)..(691): n is a, c, g, or t
  misc_feature (697)..(697): n is a, c, g, or t
  misc_feature (708)..(708): n is a, c, g, or t
  misc_feature (710)..(710): n is a, c, g, or t
  misc_feature (712)..(712): n is a, c, g, or t
  misc_feature (717)..(718): n is a, c, g, or t
  misc_feature (720)..(720): n is a, c, g, or t
  misc_feature (766)..(766): n is a, c, g, or t
  misc_feature (792)..(792): n is a, c, g, or t
  misc_feature (804)..(804): n is a, c, g, or t
  misc_feature (807)..(807): n is a, c, g, or t
  misc_feature (813)..(813): n is a, c, g, or t
  misc_feature (815)..(815): n is a, c, g, or t
  misc_feature (817)..(817): n is a, c, g, or t
  misc_feature (843)..(843): n is a, c, g, or t
  misc_feature (858)..(858): n is a, c, g, or t
  misc_feature (882)..(882): n is a, c, g, or t
  misc_feature (930)..(930): n is a, c, g, or t
attaacaagcatcacatatntaagcataccggtggtctactctcctcaaattcagttggaggcataaaaacatgcagaaaagcccccagccctactttcctagcatgcagcacccacatagagcaggtatatttacaaggttaccatgcaagagtttctggcttgtcttccatcaccctgcntttcctctatcacctccttccttctatcttttatccagttaaaatgaaaacatctccactaagaggacttcctagtatagaaatggcaagtntgttctatctaccaatttgctactagcaccaccattacctatttacatgccctttgcatttgtggccaactgatcnacagcattgtgccttagtgtattcaagaaacttggaattggcagttgagatgattatttgccatccccaacctagagatgatcatttactgagttccttctatatnggaggagagttaaagtnagatggccacagccggcagtttgattttcttagaggagatgctgagatcagcaaagtcattctgagtnctaaatcgggttctgaggtcctcctcccaggtgtctagaatgtncctcaggcctgggaacaaactctctgggacactaaaagaatagagcaggattgggggtaganctagcaaccatgagaaccgggcagtgaatactcgtagtggagtnagagcnaagcagttgtnancnaaatnnancaggtgacaggtatagggaacaggatagcccaggaggatcccaaanacagttcacagattccagtttgaggnatggagcctgcngtnggagantncnagagaaaagtccctctccagcccctnaaaatgtgtaaaganctaagccacgagggcctaaaagtnctgaagcggggtcagggagcagaaagaagggtgaagccggcagccggnaaaatccacaaaggctatggtaacaagccgcccc

SEQ ID NO: 686024 - DNA, 367 bp, Homo sapiens
agtacagaacctttcatatactatgtttttccctagccatacatacctaagagaaagtttaatttataaatcaagcacaggccaggtgtggtggctcacgcctgtaatcccaacactttgggaggccgaggcgggtggatcatctgaggttaggagtttgagaccagcctggccaacatggtgaaaccctatctctacttaaatacaaaaattagccagccgtggtggcgggcatctgtaatcccagctactcaggaggctgaggcaggagaatagcttgaacctgggaggcagaggttgcagtgagccaagatcacgccactgcactccagcctgggtgacagagcgagactccatctcaagagag

SEQ ID NO: 686025 - DNA, 297 bp, Homo sapiens
accccagctcaggatactcctgcaatagccatcgctgtagtatatccaaagataaccatcattccccctaaataaattaaaaaaactattaaaacccatataacctctcccctaaattcagaataataacacacccgaacacaccgactaagaatcaatactaaacccccataccaataggataaggcttagaatgaaaaccccacgaacctcataaataaccacagcggagatcatctacaatagtcctgctggcggtatgcctcgttggagtgcgcggcgttacacaagtaagcg

SEQ ID NO: 686026 - DNA, 817 bp, Homo sapiens
aacaggctggttccctcggatccaggaccccctggttcccaggctatggcccccagtgccctgtagatctggcaggccccccgtgcttgcgagccctattggggggtctgggtggctactggagggccttgtggagtgggcatgagaaaggcaggaccatgaatctagggcctctgaactttctccggggcgcaggtgacggatggcatcatcattgtgggcgatgagatccttaagggacacactcaggagcaccaaacacctgtctttctgtgccggacacgtgagcgttccctatgggtccaggtttgccgagtgctcagttggtacgtgatgaggtagccaccattgcagactgaggtcacttctttcatccaaccgcttcacccatgtcctcacagcagggggcatcggccccactcatgatgatgtgaccttgtgaggcagttggcacaggcctttggagatgagctgaagccacaccccaagttggaagcaggcaccaaagccctaggaggggaaggctgggagaagctatcattggtgccctcctcctgcccgccctgcattatggcacaagatccttgccgcttggtcaacctttcagattccctctggtctccgtccgaaagtctagctcttcccaggcattccagagctgctgcgggagggtggtgggaggggatgaagggactattcaaaacccaagtgttccagttacatccacaggagctatatgtggtgctgtgaagctccacgcccccttctggatgaggccaagcccctttgcagtggttgggctggtctaactgatggg

SEQ ID NO: 686027 - DNA, 859 bp, Homo sapiens
  misc_feature (565)..(566): n is a, c, g, or t
  misc_feature (569)..(569): n is a, c, g, or t
  misc_feature (573)..(573): n is a, c, g, or t
  misc_feature (575)..(575): n is a, c, g, or t
  misc_feature (577)..(579): n is a, c, g, or t
  misc_feature (585)..(585): n is a, c, g, or t
  misc_feature (587)..(588): n is a, c, g, or t
  misc_feature (590)..(590): n is a, c, g, or t
tcatggaggtttgaagatgccgcatttggattggatgaattccaaattcggcttgctggctttttaatagtgatatgcttatacacttacacctccccaccaaaatgtagggttataataatgttaacatggacatgatcttcatttatacccactctcctctttccggggacgttgtctgcaggcactcagaatggtccagcgtttgacataccgacgtaggctttcctacaatacagcctctaacaaaactaggctgtcccgaacccctggtaatagaattgtttacctttataccaagaaggttgggaaagcaccaaaatctgcatgtggtgtgtgcccaggcagacttcgaggggttcgtgctgtaagacctaaagttcttatgagattgtccaaaacaaagaaacatgtcagcagggcctatggtggttccatgtgtgctaaatgtgttcgtgacaggatcaagcgtgctttccttatcgaggagcagaaaatcgttgtgaaagtgttgaaggcacaagcacagagtcagaaagctaaataaaaaaatgaaacttttgtnngantaananannnaaaagncnntnaaaaaaaacacttgtggccccttttgcccaaatcgtctttaaacttgggcaagttttagtatatggggcccaatttgaggtctcttgggcaatattccctctatggggaggctttaacacattcatggcccgggttttaaacaccttggaatttggaaaaacctggggtttcccacaattaaacccctttgggaaaaaaccccttttttccaaggtggggaaaaatgaaaaagggccctcaccatgggccttttacatgggccctgggc

SEQ ID NO: 686028 - DNA, 849 bp, Homo sapiens
caaccatcatgaatgctgatattctagcatagtgtctgcaaggaaggcatggtgcatatattgagcttcttctatcttctagtcatcttttttactgacctatatggcgatgatctatgttttatggtgcagctcttcagcaacataagcgacgacagtaagaattgtgtcccagttcaagtgcgatgctaaaagagccaccaaatagaagggattctatccagcaaggatccgtgtccaaagagtaagcctgtggaatctgatcagaatacgtctctaaaaaatgactcctctattcttttacatgtttccacattttggcttgtggaacagactgtttacagtactgttatacttcacgactaacatgattgtaatagtggtattacgtatgaaatataatagtagaagaactggttcacactctggtgtcgttgacgcggttagaacttgcgactatcttaatggaacagccataatcctcctgattgactcgcattattttactgacggtcctagtacattggcagcttgagttacactagggaactagtaggggctcattatggtctcattgaagaccggcatctaagtctataaattaaggcagtagatatcacggtgcattctgatgaagtgaaaatgtgtatctgattagtgggaaacttcatgggttactcatagtgtcatgtcgtatgataagtctttggctaccttgtccagccttaataaagggaggatctgcgccttcgcgtgatattatgcctgtatatttgcatgattgcaaagaaaaccatattcatcaatataagccaaattggtgtagtaccaagctaagaagtgacttta

SEQ ID NO: 686029 - DNA, 815 bp, Homo sapiens
tcatggaggtttgaagatgccgcatttggattggatgaattccaaattcggcttgctggctttttaatagtgatatgcttatacacttacacctccccaccaaaatgtagggttataataatgttaacatggacatgatcttcatttatacccactctcctctttccggggacgttgtctgcaggcactcagaatggtccagcgtttgacataccgacgtaggctttcctacaatacagcctctaacaaaactaggctgtcccgaacccctggtaatagaattgtttacctttataccaagaaggttgggaaagcaccaaaatctgcatgtggtgtgtgcccaggcagacttcgaggggttcgtgctgtaagacctaaagttcttatgagattgtccaaaacaaagaaacatgtcagcagggcctatggtggttccatgtgtgctaaatgtgttcgtgacaggatcaagcgtgctttccttatcgaggagcagaaaatcgttgtgaaagtgttgaaggcacaagcacagagtcagaaagctattagacaggcatggtggtgcatccattgttttcccagcttctgggcaggcgagaggctcaaggaaacagctgaagcgggaggtgagaggttgccgtgagccaggatcacaccagtgcatcccaggactcgcggaagagcaagacgggggcgacaccaccacaataaaaagggcccggggtaacgcgaggctttcggaaaatcccagatggatcggggcggactaacgggtcttgcaccaggggcccaggagtcggaaaaaacagccgccgggg

SEQ ID NO: 686030 - DNA, 155 bp, Homo sapiens
  misc_feature (7)..(7): n is a, c, g, or t
gtagtantccagagggtgatagggggagtcctaacaggagctgtgatcagtgtgccagcagttcacggagatgtctaggtccggacgatgtagtggtacctgcctgccatcaaggactcccaagtgaggtggatacttgggagggagcagccagg

SEQ ID NO: 686031 - DNA, 811 bp, Homo sapiens
tggagaatgatttaacaacatggaaagagtgctttacgaatgtatcatttaggagacaagattgtatctatccaagatatgcatcctggcattatcactagtatttaccatagaattctgggtgcaggcagtcagcacagagtacattgaagtcactaggcgaaccgctgaacctgcagagatccacccaagaggtcgggagtgtcagatggcaccatcgcggctcaccggtctacctccacctcctggcgttacaagcgattctcctgtcctcagcatccccgaggatagctgggattacaggtgcccaccaccacgcctagctaatttgtgtatttttagtagagacgggtttcaccatgctggcctcgaactcctgacttcaggtgatccacctgtcctcggcctgcctcaaagtgccgggatttactggggatagccagccaccatgtcataaggacaaatgcagacccctgaggagaaccaatcccttggggaggaactcggcccccagtcagcagccaatactcaacttgcctcatgtgtagaagttatgtcatcacctatgaaataggatctgttgtcccagccaagccttcagatgagacgcacagctctggccaacaccagatctcgcagcctcatgagacgatcccagagaagccatcctgttgagtctctgcttgaacttcttggcccactagaaattgctagtgatagtaaattattcttgttttctaaaccactaagttgtaggttaatttattacacagcaggaatgataacttttcactgggactattgtggtcaa

SEQ ID NO: 686032 - DNA, 229 bp, Homo sapiens
cgtcgacatcgacacaaaatatctatgttttgttccacgagccactttgttatcacttttgcctcatggcaaggtgctccattatgctggaaaaggcattgttcgtcaccaaactgttcctggatggttgggagaagttgctctcggaggatgtgttggtaccattctttattcatggctttgttcttaggcaaaattgtgagtgagcccactcccttggcgtcgacgc

SEQ ID NO: 686033 - DNA, 928 bp, Homo sapiens
tgctgtagcagccactagcccgtgctggtgttcctaatcgcacagtgcagctgcgtacccgtgctagtctgggagctctcgtgtgtatatattgtcctgccctgttgatcacgcgcgctttttcatcccaatgtcgttcgagtggcggtaaatttgccctcttcgcggttatgtgttctctccttttggggtggtggcaccccccccccgggggtggtttcccgaagcgtccccgcctccatgtttctggggttcagcctcctaacggtctgggtgaaagaaccccgctcgtccgtcccttgagaaaatgccaagggtttgttcaaactaacagaggggatgcgggttctttataagggcccccaagggtggctaacccgccccccccccggtgagaagactgttggcctgcaaccgccgcgattgacagatgtggtgcaccagccccaacaccggaggaaatgcctgtccccacatggggccccccgacaagtgctccttgggtgctctggcaacgcacaaacaagtcaatccttggttgccggcaacaatggaagagcgaaatgtgtgccaggccgccatcgagtgcaaggccccccctcctttcgcatggccggccaagttgctcgcgcgaacagggcgaagaggccgattttctgaaaaaaaaggtaaaccccctcgttggcccccacaaaagcgaaatagggggccacgatgctcagaaaaacagagcgcgtcacccagaggatggtcccgaaaagacatacaatggcgagcaccatcccataagacacaacgggtggtcccgctaggctgggcacccccggggctgcgtaattgtccgcccaggcggcgagtccacacggcaaaaaccacgcatcaattccgttctgccccagaaacgaacatcccccgccccacatgacgc

SEQ ID NO: 686034 - DNA, 2665 bp, Homo sapiens
gcaggggcacacatcggggcacacacgacacatacgcacaaatctcatcattctctcccatttctgcacagcattttagaaaatgtaataaaggtatagaagcccccacattgtgccatggaagcaacatgtatttaaaactcttgatttctggcttagaattcagtttatgcctcagtaacgtctcctgcatacacataaataggtaagtgtaaacttttcaaaagtgggccattttgcaatgtgggagccaagtatagtgatctaggggattctgaagttatatccattgttgctatgggaactaataccccttttctttgactcctgcctaacccaagttctgtgtttctcttaaccaggtttccatctctatcacaagttgcccacgattgtgccggagagctgtcttctcataatggttgggcttctactaggtgggattatcttcggtgtcgatgagaagtctcctcctgcaatgaaaacggatgtatttttcctatacctcctgccacccattgttctggatgctggctacttcatgcctactcgacctttctttgagaacttgggcaccattttctggtatgctgtggtaggcacactgtggaattccattggcattgggctgtctttgttcggcatctgccagattgaggcgtttggcctcagcgacatcaccttgctccagaacctgctcttcggcagcctgatctcagctgtggaccctgtggctgtgcttgctgtctttgagaacattcatgtcaatgaacagctctatatcctggtttttggcgagtctctgctcaacgatgcagtcacagtggtcctgtacaacttgttcaaatccttctgccagatgaagaccatccagaccgtagacgtgtttgctggcatcgctaacttcttcgtagtggggattggcggggtgctgattggtatcctgctgggattcatagcagcgttcaccacccgtttcacacacaacatccgggtcattgagccgctctttgtcttcctgtacagctacttgtcctacatcactgctgaaatgttccacctttcaggcatcatggcgatcacagcctgtgccatgacgatgaacaagtatgtggaagagaacgtgtcccagaagtcctacacgaccatcaagtacttcatgaagatgctgagcagcgtgagtgagaccctcatcttcatcttcatgggcgtgtccaccgttgggaagaaccatgagtggaactgggctttcgtctgcttcaccctggccttctgcctgatctggcgagcactgggtgtctttgtcctgactcaggtgattaattggttccggaccatcccactgaccttcaaggaccagttcatcattgcctatggagggctccgcggggccatctgctttgcactggtgttcctcctccctgctactgtgtttccccgaaagaagctgttcatcacagctgccatcgtcgttatattcttcactgtcttcatcctgggaataaccatccggccactggtggaatttcttgatgttaagagatccaataagaagcagcaagctgtcagtgaagagatccactggtgtcggttttttgatcatgtgaagactgggattgaagatgtttgtggacactggggtcacaacttctggagagacaagtttaagaaatttgatgacaaataccttcggaagcttctgattcgggaaaaccaacccaagtctagcattgtgtccttatataaaaagcttgaaataaaacatgccatagagatggcagagacagggatgataagcactgtcccctcatttgcatctctcaacgactgccgtgaagagaaaataaggaagctcacgccaggagaaatggatgaaattagagagatattgtcaaggaattctctatcaaatccgccagcgaccttgtcctacaacagacacaacctgacggcagacacaagtgagaggcaagctaaggagatcttgattcgccgacggcacagtcttcgggaaagtcttaggaaggacaacagcttaaaccgcgagcgcagggcttctacttcaacctcccgatatttatccttacctaaaaacacaaagcttcccgagaagttgcagaagaagaataaggtttcaaatgcagatggtaatagcagcgactcggacatggatggaaccactgtactcaatttgcagcccagggccaggcgcttcttgccagatcagttctcaaagaaagcctcaccagcctacaaaatggaatggaagaatgaggtggacgtgggttctgcgcgaccgccccccagcgtcactccagcgcctcgcagtaaagaggggggcacccagacaccaggggtcttgaggcagcccctgctctccaaagaccaacggtttggccggggcagggaagacagtttgactgaagatgttccacccaagcccccaccaaggttggtgcgacgagcatcagaacccggaaataggaaaggccgccttggcaacgaaaagccatgatatgaagccaaagcagacttgtggtgaatgggcaagcatggttgtgacttgttactcaaacccaatcgaccgtggaatccacttaaagtcctctatccagaggcattctttgggaagtagagtcaagccactgattcatgggaggagcgc

SEQ ID NO: 686035 - DNA, 297 bp, Homo sapiens
gagtggcattaatcacggtgtaaagacatgccagtggtggtgattactggggaatcttgaacccgggtgagtacggcgtgactggccacgcgtggggctacaccccgagtgccaagacctgcaatgttgactatgatagtcggtgccacgtcagtgcaatttcatcctggctcgttccaattggaatcgcatccgggagatcgtggccatgaacgggaaccggcctatcccacacatagacccatcgcgccctatgaccccccaagagcgactgacaggccaagagcgactgacagg

SEQ ID NO: 686036 - DNA, 567 bp, Homo sapiens
tacaactatagctaaaatttccacatatagcgcacgaggagatgaagcgaggtataggttagcctttgttcgcttgagacagttccaaagcgaacgtggttactataaactacaggcaggcaaactgttcagactgagctataacatagtgtactaaatttcagtctcaaagttgtgctaattgctcatcattagtatggcacatttggtccatgatgtggtttactgccaagacagatcgcaatttgttacagaaacacatagattactgttgcttttggtttgtaagtacatatattgttagaaagccaggtatacttccacatacaaaggcaggtttcccaggagaaatttataggaagtagtctggggtgcgccgtgtaacatgaggctcaccacgacgaggcgctgggtcaaattgaaggaaggaatattttaaagtgtcatctaattccatgatagcagcctggttcccacaacgataacagtaattgggtgcactgaaaatggtaaccacattccgatcatgacaccaattgtatccctccattacaagctggtgggcac

SEQ ID NO: 686037 - DNA, 839 bp, Homo sapiens
  misc_feature (839)..(839): n is a, c, g, or t
ggcgcatgcattcacccacacagtatcgtatcaggcgagtatgaaatgtgtatcacctgtgcgcaagtatagtataagtaccgaaaggtcaaagatgagagaaattatatatcccaaagcatatagtactagcgatggatctaatgcccatagtacctgtctgctaatcaatggaaactttacatctcagacagaataatctctctggctgggaggacgaagcccgagtagctgagatgaacccacggatcatccacggaggtagcgtacctttatgaactagctccacacgcagtcgcgacgccccgtctaatgatttgcattgataagtggcgtagaggtagtgtattactgagcggtaaagagggggtccgaagcgaggaaccccatagctcgttacgggcctgtgggtgcactatgcgctggtgtgtgctgccatacgcatgtatgtacaatgctccatgtgttagcagaccttatcgtatgattgtctgggcctcacccgggaacctggcttcctacaatggcccccttgccctaagactctgtaaccacgtgcttcccgttttccccacataggaacgggggaggacccgatttccttccttccttttggcaactcccttcttaccggcgaaaaggacccaccagctctgtggtttacgcatggaacgcaccgttacacaatacaccaagttgttacgaactattgccccactttacgttcccggggcccttgagatgaggcccgccccggttgccacggcgcacattgttggacctggactacacggggccgaattttcagagggaccttttcccttttcaccccccgctan

SEQ ID NO: 686038 - DNA, 614 bp, Homo sapiens
  misc_feature (123)..(123): n is a, c, g, or t
agcggggctttgccggcctgtgggccaccagctgggggctccccgcttccagtccacctaccacacccacattcctgaccgccatcccgtcctgtctggttgctggttggacaccaggaactncgacagagccgcaacccactttcccagaggaaacctaaggcggccattccttcttccgctctttcgattggcctaggaagacaccgcccgctcataggggtcccacatttctccatcatcggtacttccggggtctccaacccgattgaatgcttctccctgtaaagggcctttaccttaaagtgggtttcccaaactgtgtttcccccgtgccacagttaacaagtttcctgcggcgtccctgggagcgttcctcccgagtgccacacgttccccttgtattcgtattacacatcccagcgtgcgcatctggttcccaggggggacactttttgcccgtccgttgaacgttggccccgcggtagccagcttagtttccctattccattattccttccgtcgccgccgcctttggtaaaccccgcgtgggccaccttttttcccggccccgggttaaacccgtttgtgtggttcgtttagcggtgcctcca

SEQ ID NO: 686039 - DNA, 303 bp, Homo sapiens
cacgagggttgttccaaacacttgtgctatcaattctacagatgatccacaggttatcttcaactctaattacattgatatacacagtaattcagacagtggatctacattcgtaaatgtaaatgaagattcggtccctgaaaacacttgcaaagaaagcttggttttgggccagaaacagtctacttgggttcctgaatcacaatctccaaactgtatgaactgccaagtcaaatttacttttaccaaacggcgataccattgccgaacatgtgggaaagtattttgtggagtctgttgtaa

SEQ ID NO: 686040 - DNA, 617 bp, Homo sapiens
ttgacatgaaacgtggtgcaatagatatagtaccgcaaggcgaaagattaaaaattatgaccaagcatatatatgcaaggcactatcccctataccttctgcatattgaattatctagaaataacttagcatggagagccatagctaagacccccgtaaatctagacgagctacctaagaacagctaagagagcacacccgtctatgttgcaaaatagtgggaagattctataggtagaggcgacgaacctaccgtagcctggttgatagctgtttgttgcaccatagaatcttacttcaactttaaatttgcccacagaaccctctaaatgcccttggtaaattccactgtaattccactgaggaactgctctttgagacactaggaaaaaaccttcaagagagagtaaaaaatttaacacccatagtaggcctaaaagcagccacacaattaagaaagcgttcaagctcaacacccactccaccttactaccagacaaccttaaccaaaccatttacccaaatcaagtataggcgatagaaactgaaacctggcgcaatagatatagtaccgcaagggaaagatgcaaagttataaccaagcataatatagcaag

SEQ ID NO: 686041 - DNA, 538 bp, Homo sapiens
atgaaatttggccacccgtgttatcgaagtaatacatgagaacttgtgttcactttcgtgccgtcactctcaatcgtcaggctctgcgtgtatagcttcacccggatcacggctgacctctggccaagctatggcatgcaggtgctccgggccaggatcacatggatcttcctcctttgcatgtccaggtctcgccgctgctgaaggtagacatagtctctgttggacatgggaaaagggtacttcacttcccagtagtccacagtcctgtaatctgagtccatatacatgtctgccagtaaagttggtcatcagtcctccataactccttagactttatactcatatagtccagtcttcttgtccagcagtcggtagatgttgatgtccaaggtctccactaggagctgccagtcggctctggccagaatggtctgctgaagctcgtcgcaggcctcgcagaactgctcctccgagtagcttgtgacgcccaactccatccttccacagttcgggctcctactcctgtagagcaggc

SEQ ID NO: 686042 - DNA, 963 bp, Homo sapiens
acatggatgggatggcaggccaacaatgatcctggatgatgggggagacttaacccactgggttaatacacgaagtatccaaaacgtgtgttagagatagaatcctgaggatgttgtggaaggagagcgtgactggatgttcacaggcgtgttagtcagactcctccaacatgctgggtaacggctcatgttgtttccgggtcatgaacgtctaattgtattcgtaggggactcaatacatgaagatggagtaaagctcgtgacgtgcatgactcggacggatccatggttgggtaatgggctgaaggtaggaatactacaatggatgttgatgattgtgggtcgtggaaaacaagtgtgatggttgtgtgacaatatgtgtgagggtgggcaaggggcctgcctgctgctgctctttatggattcttgtgccgcattcgtcgtacattgatcgtaaagtcgcatccccttctggcgctctggcgggcttgctggtattgcgtgtggcgggcgtggtggagctagttgaaggtcgttcggtccagtcgaggtcgttagagtcttgtccaggaggtagggatgtagtgtctctggtagctcttggctcgtttgataaacgctgttccagatggcaaggggggcacttccgccagagttcgtgtgacaggcgtccgtagtcctgagctaggcgtggggagacgaggttccgtctccggggggcactgggaactgggcactctgaaaaaggtggcctctgggagaggtctacaagcccattaggggggcacagggacaaattgggtggacacaagcacttcacggttgggctggtaaacttaataggccgggcggtgcaccgatggtttgtgttacaaagggaaagaggcgagagatggttaaccaaagggggagccgaaatgacaagaggaaagtatgcaacaagggaaaaaatcagaaatatac

SEQ ID NO: 686043 - DNA, 198 bp, Homo sapiens
ctcacagatctatccgcagcgcagaggaggagcgcagcccgttactcgaagaacttctgcttgtggtgtgctgaactacatgactctatgaaccctagagtcattgccatggcaaccaaaggaggtactgtcaaagctgcttcagtgattcaagtgccatgtgcagatgcccatgaccctgtagtgaaggccactgaa

SEQ ID NO: 686044 - DNA, 933 bp, Homo sapiens
  misc_feature (687)..(687): n is a, c, g, or t
gggcgaggtcggggccatggcgctgggcccggatcttcctgcttctggctggcatctgcccttgtgcacctccgggagctgtgctgagccccacagttcttcgttataacctcatcggtgctgtcctgggatggatctgtgcagtcagggtatcttgctgaggtacatctggatggtcagcccttcctgcgctagtgacaggcagaagatgcagggcaaagccgccagggacagccgggcagaagatgtcctgggaaataagacatgggacagagagaccagggacttgacagggaacggaaaggacctcggtgatgaccctggctcatatcaaggatcatgaaagaaggctgtgcagttccctcgcaggagattagggtctgtgagatccatgaagagaagcagcaccgaggagcgtcccagcagtttctagctacgatggggagcttcttcctctcccaaaaactggagactgaggaattggacagtggcccagtcctccagagctcagagcttggccatgaacgtcaggaatttcttgaaggaggatgcctgaagaccaagacaaaattatcagggtatggctgagactggcttgcaggaactacgggcgatatgctagaaatccgggagtaagaccggagagaagcagtgtcccccagggtgaatggtaccaggcggggaggnctccagggagaattccggtgactggaggttcagctcaaccccgggaatcatacgacggggcaggagggaacttggggcccaccagaatgggcgagtgcccgggaatgaaccacgcgcggggtcacagaagcgggagacaggacccagaacaggaacacaacggcgccgagggtacaagagagcagagggggcgggaatacaaaggaacacgaggcggacacgacactgaccgttgagacacgcagc

SEQ ID NO: 686045 - DNA, 912 bp, Homo sapiens
gggtttcacccgcaactcaagcagcgtatcaccacacgggtacgtgcgagcacatccccagagaccaattataatccgtcaccacgagcatgaacggatacggtctgccggaagtgtccaatggggcggtcccccaccttcctcaacggctcagctgccaaagtccccctatgccatagttgccatccagccccaccagtggcctccctccaaaagcctcccccttcaaagtgcagaccagtctcctcgggggcatcttctcctttctcaaccagacaaaagtggttctcaagcggtggacacacaacgaacgacgtggtttttcgcacccagtcgtcaggacccaagaacttgcgccaacttcccaacttggaaccagagcacccaagggggaaccagcgcctggcaaagcgactatcctggaatgaatgtgtccctcctattgtggaacgacaatggctttgacgactggtcatcccctcgccagacggctgactctggcaacaggacgaggaatctggtaccaagtcccagaagggatcctctacactccgaggcctttttaagcggcatcacccaacacgtgcacattttacacacaacaaattcaccgacctggcatactggaatcggccgacgcaccgcactgcaggggtggtaacgttgcccctcccaggtatgggggcacatctaatctggattgcagagccgacccctcgccgtccccataccacacgcaagcggacccttggctacaaacggaaggccacgaggccataccaaccccgggtactagcgcaccccgtggcagcaggcgcttacaggcaaacagccggaacgtgggcagcgcactcaacacgggcccacggcgaggaaaagccgacgtgggacgcaaacctgcgcggacacccc

SEQ ID NO: 686046 - DNA, 135 bp, Homo sapiens
tcagtcggtcctcacgccatgtccacaatgtgcgtgttttcagctgctggcacctggctcagggccgttggagggctggctgccgctggccgcaagggtctcttggcacctgtggtggctgcagccaggcggggg

SEQ ID NO: 686047 - DNA, 229 bp, Homo sapiens
atataatgataaaagaggcccccaaaagggtgatctttattagcctcgtcagtttgcccgtggtagtgagcgagaatttcgggattaatgtcactttgttggatctatatatcactggtcttcacagcaggagcttgatgaaactctcatcctcctgcccttgttgtctcttccagctcctggctttgccagacactgtaaagtcccaggccgtgagagctcacttgtc

SEQ ID NO: 686048 - DNA, 214 bp, Homo sapiens
ccggggcagatcatgaacaacaaacatttataggagctctagccaatataaggggcctctgggtaggcaatttaagatgcagagtttacttcttcaacttcctttattggttttacttttgattgttcaggatcttaaacaatagaccttttccagcaggaactggttagaaacaagcctatggtccaaaggtcagcaatgagggtatggattt

SEQ ID NO: 686049 - DNA, 318 bp, Homo sapiens
gtggggaacaataaggaagggtccccaggttggggagagccccaagttgagaacaataatgaacaattattgtatgaacaattgttagagacagctaatcacaaacaacctgcgggcacaatgacctcattccacacgtagcacccttcagcaggaccctataaaactctcctccagcccttgcctctttgcaggtagccccttctctgctgagctgcccactgcaacatattttcacactggatctagtaattatgcccttctttacctagaaatatcttggtgaatggctttaccacctgcaaaactgaccctagg

SEQ ID NO: 686050 - DNA, 113 bp, Homo sapiens
tttcgctctaagattaaaaatgccctagcccacttcttaccacatggcatccccaatactagtggtggcattcaatgtcgtcaggaataaatctgctgtaaaatcttcagtca

SEQ ID NO: 686051 - DNA, 112 bp, Homo sapiens
  misc_feature (59)..(59): n is a, c, g, or t
attcgagctcggcaccgtgttttttgcctacagccctagatcagcacactgctccttanctggcttgggttcttataattgttagaagcaaacctgggcatggtgcctattg

SEQ ID NO: 686052 - DNA, 139 bp, Homo sapiens
gatgcctctggggtcaagcggctctcctggtatagctcccgagtggctgggaccacaggcgcctgccaccaccacgtctgagtattttttttgatttttggtagagctaggtttcgccatgttggccaggctggtcttg

SEQ ID NO: 686053 - DNA, 1040 bp, Homo sapiens
ggggactaccccggggcttatcagtgttccctcaggtaacaagggttgtctttttcagatccaattggtttcttgcatacgtagtctggatttcatgagtcatctaatcttttaaaacatgaatgtcatcccaggcgatgcatcctactcttagtatgtcactgaattcgttatattaaaatatcgattggtttcatgttgtaaattactctttggtgtatccaacgttattgggttactggtgtccttttatctgagcttggattaattccacttttttgcataaatttatggggtttcgcggtaatcctaatggttcgttccagtaccaagtgtgaacagtacctgagtaagtcatcctgtataggttattttctcggggtctacgctttctccaagaattccatggatacggttggtttattgccgtgcacctaagtaatgccgcatcttacatcccataattttgccgctttgtagggcgcgttctgcccaagtctgtgagtgacccatttggtttcaggcccgttgttcggtactcccatatgttttctttgttaatgtaccgcgttctttcactgatgagtacgatgtttctgtgaagcactttgcctgaggtgtcaaattgtcatgctcttcttagccgtttttctttctactaaaatgtgttaaatgatgctaaatttattgtttgttgtggtgtctttagcaaagtttttctatcaatttttcccccatcccatccccacgctggactcattttgagaagacttgagagaggtcttagatactcacactgctgcatgtagctcatctgcatgtatgttacgtggtctgggatacaggatgtatttccgttttgttcaaagccaattgacagtttacacctgaaatactcctccttttgtatcattcagccttttgctttagtttggtaagttttaagaaattgcaagcagcaaagttgttattccacgtgggcacgatggactccaaatgcctcatagttatgtattactgtcccggatgtaaacatgtca

SEQ ID NO: 686054 - DNA, 351 bp, Homo sapiens
ccaacgtggtagccagccacttggcgtgctggttgagcatcgagtcgacgatgtgcacgaacgcctcgtagcagttgaagagcccgtgccggccggtcagcaggtacccctcgagccagccttggcagaggtgctccgacagcacctccatcactcggccgtccggcgcgaggtggtcgtcctcgggccccatctcggaaagccagacccggtcagtggcgtcgaacaccgcatccagccggttggaggccgtctcgtcgggccccatcaaccggaaccggtcggggttgcgcttgatgacgtcacgcaggaacgtgcccagcacccgggtggcctcgtgggtcgcggccg

SEQ ID NO: 686055 - DNA, 1005 bp, Homo sapiens
tgggaatacaaaaataaaccccttctttggtttaaaaaaaaaaaaaaaaaaaaaaaacgaaaacccccaaaacaaaaaatttcaaaaccgggaccccggggcccccccaaccccccccccgcccgtggcaaagacaggccaaagcctctctttctgcttggcgagagtttgggggctgcccccaaaagagaattgaccccttctcttggcggtcttggggatttggggggggagaggcgcgacggcagccccctattccgggcggcgtctcgggggccgcccaagtctccctcggggtgtcgccgcgccatgggctttgcgcttgtagaagtggcgcgggagatgtagagggagagccactcctcaacgactagcgcgtgcctccgagcgcccgggggggtgtgtgttggtttgccccccgcgtcggttgcagccgcgctctctcatcgagatagagtgtggaacccactcccacggcggtgtggttgtctgtgccggcgctgtctttgtgtgagaaacctcctctgagggtgggaggccgccggccctctgtgggggttgtgataggagctcctgtgttaacacgcagaccaccgcggataactgtggagtactcttctctgaacaccgtgctttgtttgtatgatgttgtttttcctccgcagcaccaaatttcctccgcggtggaaagagacagccgctgccctctgtgtgcgcctctgtgagccgagggtgtctccctctggtgggggagcacactcgggctctccccccctgtgtctgtgtgtgctcacctggcgcagaagtatttttaagagcgcgccccgctctgtggggctccccacgtggggaacgtcagaaccctgtgcgtgttcccacaagggtgggttgtctgcggttctcccccggagaagagagcttttgggagaagggggggtccgccagccctagtgggcaggggggagtatgttcgctccctttgttgtgcaccactgacccgtgggt

SEQ ID NO: 686056 - DNA, 235 bp, Homo sapiens
atccatctctccacacccagaataccagtctcattatcaccaaggaagaaattagaaaatgacgtttccccactccaaagtgaagtggaagaagtatccaagaatcacgcaatgcagaatgagaaagccaagaaggccatcactgatgctgccacgatggctgatgagctgaagaaggaacaggacaccagcgcccatctggagcggattaagaagaacctggaacagacggtga

SEQ ID NO: 686057 - DNA, 113 bp, Homo sapiens
gacgctgcgagggcagaggagcgtgcggcgccgtctgaactaaaatgtggtgacctggcagcagagctcaagaatgttactaacaatctgaaatctctggaggctgcctctga

SEQ ID NO: 686058 - DNA, 330 bp, Homo sapiens
  misc_feature (259)..(259): n is a, c, g, or t
  misc_feature (262)..(262): n is a, c, g, or t
gacgctcctctctcagtccaaaagcgccttttggttcggcgcagagagacccttgggtctagcttttcctcgaaaagcgcgaccggcgccttggccccgagaacagacaaagagcaccgcagggccgatcacgctgggggcgctgaggccggccatggtcatggaagtgggcaccctggacgctggaggctgcgggcgctgctgggggagcgagcggcgcaatgcctgctgctggacgccgcctccttcttcgctttcnacncttccacatcgccttctctgtcaacgtgcgcttcagcaccatcgtgcgcgccggccaagggcccatgt

SEQ ID NO: 686059 - DNA, 112 bp, Homo sapiens
gtatgcttttaggaatatatggagcaatgtggcataggcaccaattcagagaactcgctcagggcaggcagactaatgaacacatttcagtgtggcacagaccgctctaccg

SEQ ID NO: 686060 - DNA, 713 bp, Homo sapiens
  misc_feature (583)..(583): n is a, c, g, or t
agcgggttggctgccgaggctcggccggatcgtggagcccgcgccgctggcccaggacctgcgcccgcgcctttgtccgcgcggcgtccaccgtccgtcgctccgctcgcccatggacgcgctgcctgcgccgtcgcgcctgggtcccgcttccgctgctgctgctcggtgtgccttgccgctgcttggcggtccggagtggacgcggagtgtcctcctggaggcctgctgtgcggactggacaccggatggccacgtcatcatgaagggactgctcgtcatgccatatgctacggtaatcctgaagaatgcaggatggtgcacggagcaagttgcttgctcgagcaggtcgagcctggcaggtagcgtgctacatgtgccacgggcagtcatgctctggtcctaagcagtaggctaggaccgcgtgttgccacgccccacggtgactaacggccatgcctggtaggccacatttgtgaacgcaggtgcttgccatatgacttgtcttgctggagagacggtgcaggtccaagtgcccagggccaagatgctgcagagtacagcctcatggttggctaccagntgtgtgcaccagtgtcttcctgggcatgctagtgtcacagagccaaggagacctggagatttgcgattgtctgggggcctccaataaacggatacagatcattgaggttgaggaggaacaagaggaccca

SEQ ID NO: 686061 - DNA, 362 bp, Homo sapiens
  misc_feature (29)..(30): n is a, c, g, or t
  misc_feature (154)..(154): n is a, c, g, or t
  misc_feature (237)..(237): n is a, c, g, or t
  misc_feature (273)..(273): n is a, c, g, or t
  misc_feature (303)..(303): n is a, c, g, or t
  misc_feature (312)..(312): n is a, c, g, or t
  misc_feature (348)..(348): n is a, c, g, or t
ttccacctcccaggttcaagtgattctcnnacctcagcctcccaagtagctgggactacaggaatgcaccactgtgcctggctaatttttgtattttttggtagagatggggttttcaccatattggccaggctggtctcaaactcctgtcctnaagtgatccacccacctcgtcctcccaaagtgctgggattacaggtatgagccaccatgcccagttctgataactttaaaatnaacagactcaatacaaatttccaagactctaataanagattaactggtttatgacttttaattaanaacattggntacttttatgcaaatactttggtttccccaaatttntttctctttgcttg

SEQ ID NO: 686062 - DNA, 640 bp, Homo sapiens
tggagagagagcaaaaccctatctcaaaaaaaaaaagaagaaaaaattagaaaatccaaaaaaaaaaaccaaaaggccttgcgggcgtataaatcccggggcgggttcctgataaatggcccgtgtgctgtcagccccgtgcacttgcactggctggcctccccatgggtggggtggggagaccccagaagcggggggcaggcgccactggaggggcttttactgggagtcggccagcaggccacgcagcatccggcaccctggggcggggctgggctagctggccttctaaggacatctctacttggaagagatttaaccgcaggaagcaatagcagcgctgggccatgggtggctggatagacaagcatggggtctgggtagagaggggaacggggctgggaaacgcagaaagaccccccacagaggcatagcggcatgggtcccgagagctggctcagccagggggaaggggggtcacgcctacagcacagccctcccatttgcccgcccaggggcccggacacaaagcgcgcctttccataagaagggtcaagtccataaaggtctctctagctctgggcataaagacgagatgtaacattggggaatatcgttaagaagggcagggaaaccccag

SEQ ID NO: 686063 - DNA, 743 bp, Homo sapiens
cgagtgtaggactagcaccgggtccggcagcgccagccctacactcgcccgcgccatgtgcctcgtctccttgctacccaaagtaaactaacgccacccctctaccatgaggatccggacactgaaacgaaattatatgttgtcatgtaaccaataaagccagcttattacaaaaatttttctttgggggggccggacacagtcgcgaacgcacacataccacgcggcccaaattgcaccctagatgaccgctgctgtttgtttaagaacgcttacactacaaactgccaaaccccaaaatagctccagttaataccattgctaaacacaccacccacacgacaataccagcccatattaccattgctgctgtagagcccaaaatagagttgcgaaaaaagggagaagcctttaccttctcggagtatatacccataaacgcagggtaggcggggataatttttccccacacctataaattaccatcaaaaaaaaacacaccccgcgagccatatcacacatttaacgacgacacacaattgattaggtcacgcatctcacctcaaaacaatgtgaactttagctaaacggcctggccacgagcctaaaattgatataactgtattacattccaaacaatgttaaggtttaaaaaaatgccaagaatcgcgcaaaccttacaacgccgggtaatccaaaaacgtcccaaataacagccccacaagattggaccacattacaat

SEQ ID NO: 686064 - DNA, 956 bp, Homo sapiens
ggggaagggtgttggggggggcagcgctgacctcatccgcaatctccggtcccgggtggacccccaggccccggaacttcctgagcgcctgtagcctccgcggggagccccctatggatgcacggatgtacccatgagctgttccgtcgcctgacgcagcttggacagatagcagctgacccctcctacgatgcggaactcttttctcacatttgatccccatctcagctgccttgggaggccatgtggcggtcacagcagaccgcgccaggcacattcatcagcctctgcccattctgtccgcagctacatgtcacacagctttaacaaggtgcgcagcgggcaccggttagttctgtcctgaacgggctacttccactggcagagggacctgcggaggtgaccatacggccactccgtcccccacagcagggcccggctcctggagaagtggatccagcgtggcagacggagtgccggctgcatccgaacacttctcttcagatctatgccgtggtgtcacgccctgaagtccaaccccatccacagcgctccgcagcaagcctcggtgagcgcaacgcaacccaggggacacgccatcacaagtctctcatccacgtcatctgcccaccactacctctccgcaggacgcactaactcattcccaacacatcggcgagcctggctccgatgccatcgaacggctgcaacggatagcatgcttcctccccttctctgaaagtcccacaacttcccccaatgtaacatgggcccacgagcacgcttacctcgcgcttccccctggagcgtatggcagcgagctgcttgagtccccacactgaaccatctttctcgcgcacaccgtccccgctcgagactcgtacaccatttgatgcacatgcattcgcaattggccgcacctcacaaccgcggatcccgacctcccgaatcaaacg

SEQ ID NO: 686065 - DNA, 385 bp, Homo sapiens
acagagagagagaatcagctctgagcccccccccccccccccgcagagacgacgctccgtcgcgccttttagcgaggtattactctcgggtaacagctccaaatcttcaggtctaaggaatttcttcgttctagttctttaaagcgtcaggaccacattacgtttagttaagacacgatccccaaaagaaaatagggcgaaacctaaacgcacaacgagcatagaccgacctacattacccacagacaaaccgccccaagaccaaaacaaacgcctatacggaaagcgaatcatcgaaagaatcgagtcgctatcccaacacctcctatccgcaaacttccgtccctacgacagtggatacggccctagccgtcgtacgccccgt

SEQ ID NO: 686066 - DNA, 84 bp, Homo sapiens
cttcctcgcactggctcaagtttctctactcggacgaggtgcagattggcccggagacggtgatgaccacgctatacaccgcca

SEQ ID NO: 686067 - DNA, 546 bp, Homo sapiens
  misc_feature (472)..(472): n is a, c, g, or t
cttttccccgagggagaagaaggataggatctcaaggctgtatgcgatgacggctatttagtttgtggcacagcagctctttggcgtgctgatgtcaagcgttcgttttagataatgacatctgttaaacaggaaaaacaggtttgaaaattctaggtaggatatctagtgcaggcaaagaggacatttgaaagtgtcatcaatgaatttgcacacagcctttccatcacaataatataaatttataccttcaatcttatgcagcagcaaaaacacagggagaaagacagcaattgcttctgaaagaaaatcaaagaagcctatagtggtgaattttttctaaaggatgctagggagttgaataaggcctgcttctccatgggttgacaatgtttggctgtgaagggaatggcagcctcctttcctgtgatttttttaccgatggcacacacttcaggggtgggccaggctnctaggccctgctgaggcataatcttttgacactgtggatttcagtggggcgacttctcccttatggggtgcacg

SEQ ID NO: 686068 - DNA, 609 bp, Homo sapiens
ttagttctttcgaaagttgccaaaaatgaagccactttgagagtctgcctcacttatcagcaccattctgacagcaaactgtattcgactattttattttattcagagagttttgcctaggccaacttttttcaaataaaggaatagtgccttgcacagtatggttttgccctccatcgtttttttggagagggataaattgcaggacagtaactctgtgcaagatctaactagtcacttgttattctcttccactttccctttagtaacatttgcctaaacttccaatttactagattaacccaatgtagagcaatctaatgcaacatttttagtacatcgagctgtgtggtgcagcgccaaccactcttaattaagttttctagtccttttttcgggggtatggcttttttgagtctaaatttatgcgatagtgggacacaccaccaaatcacttagttctctatacctgttagtgtaagtttaggttacttagccctggtgccacactttgtgtgctacacccagatgccttctagtacaggtaccaccattctcttgcttccctttatacctgcatctcttgcctgtggcatctatagttcgctt

SEQ ID NO: 686069 - DNA, 192 bp, Homo sapiens
  misc_feature (2)..(2): n is a, c, g, or t
antagacggtagtgatcggcttgacggggcatcacaggacatgcccaggtactgggcttgcttctcagttagcttggtcacttcacattcagcttgcccaggtggagcttcaagccaactgccctcatccaggcttcttgggcaggaaatgtaaccccaacggggtacttgtctggcgctagttgatgagca

SEQ ID NO: 686070 - DNA, 1002 bp, Homo sapiens
  misc_feature (520)..(520): n is a, c, g, or t
  misc_feature (680)..(680): n is a, c, g, or t
  misc_feature (808)..(808): n is a, c, g, or t
  misc_feature (812)..(812): n is a, c, g, or t
  misc_feature (818)..(818): n is a, c, g, or t
  misc_feature (860)..(860): n is a, c, g, or t
  misc_feature (882)..(882): n is a, c, g, or t
  misc_feature (892)..(892): n is a, c, g, or t
  misc_feature (894)..(895): n is a, c, g, or t
  misc_feature (901)..(901): n is a, c, g, or t
  misc_feature (909)..(909): n is a, c, g, or t
  misc_feature (967)..(967): n is a, c, g, or t
agcggggtttcctgggcggcggaaggagacgcggccgcgtgaggacgaggctatttgaaaacacgctccgggagctagagcctgaggtcggcggcgcacgctgttgccccgtgggcttctgctccctcgcttgtcttctcgggcttctcgccccggccgcggccgggtcctcagtagtcgagaatgactaagtagaagagaaaacgccaacatgattttcaaaaagtaaaattgaaagttggtaaaaagaagcccaaggttacaaaatgctactcctacaaactttaaaacaaagactatacatctgccttagcaactcaaagaggatggaacacttccaacaaacaatagaaaacttaacataagaggattttgctgtcacagatgcatcacgtacaatgctggggttaaacaaagtgctcttcttggacttaaagaccttttgtctcaatacccatttataattgatgcacacctttcaaacatattaagtgaagtgactgctgtgtttacagataangatgctaatgtacgattagcagcagttcaacttcttcaattcctggcccccaagaatacgagctgaacaaatttctccattttttcctttggtaagtgcccatctctctagtgccatgactcacattactgaaggaattcaggaggactctttaaaagtntggacattctgtggaacagtacccagctctaattactggcgtagcagcatattgcttaagaattttgtagaacttatttctcatcagcagctgtccaaaggactggataaatagagacagatcccagncctngatacnttctgtaaatcctaatcggagactcacttctcagcaatggangctgaaagtcttagtgagaatnagtaaattcntnnagaccntggaaganggatccagtaggttgagaaaaagtgaaggccttcgggacagaaagaaaatcccctgcnctagaaatcctttttttacactggaggaaaatgcc

SEQ ID NO: 686071 - DNA, 455 bp, Homo sapiens
gcattatcaagtctgaaaggaaaataaaatttccctatgaaaatcgctatgccaaaagggaaaaattcagctgaaatctaagtcatgcaagaaactgctcttccttttgtccctaagcacacggctgcagataaaaggccagatatctccacaggtagctactctatgttcaccttatcttatgtaaagtgctgatttactgagcaccagacaaatacataattggcttttcccctacctgctccttttctcgtgcaacacgtggattcagtaatgtgaccacaccttctctctttcccctccaaactgcgtttcccctttaaatactgaagcctttttctctttggagaaaggcacacaggacagactgtttctgtgatttctgtgttcctttcttcaggggatgtccttaatgttgacaaaataaacttttaaattgattgagaaaaaaaaaa

SEQ ID NO: 686072 - DNA, 536 bp, Homo sapiens
tgggtctaaagggggtaaagggggtgctatagggtaaatacgggcccaattcaaaaatttaaggggaataattctaggagatgggcttgaaactgtggttggtccacagattcaaagcatggaccggtagtatacccccgggtcgtggtagcgggtgaaagtgggtttgggtttaagaatgtccgggaatggcatctggttttaaagcactaatggtggggacagctcatgagtgcaagactggtcttgtgatgtacttcattatacagaattgggggtaccaatacgggacctacctacccgatggtcaaacggccacaggagatcgccacgatccccgtggatcactcagggcataagcgggcgcacaccttgccacgcgagtctgaacaactccatcccgcacgacccacacgactgtccccacgccacagctcccattcaccccacgaccgccccacaccacccacgacccccacccgcaggcaatcgaccacccccgccagtcatgtcaccgcatccccccgagcgcagcc

SEQ ID NO: 686073 - DNA, 154 bp, Homo sapiens
gagtccatatcatctggcatccgttcaatgttgtatctatggttagacatgtacatgataggaactccaggaatcttacggattcttctttacaggtcccggtcaactgtggacacaaatgtaacactatctgcatgagttactctcatgtact

SEQ ID NO: 686074 - DNA, 129 bp, Homo sapiens
gatgaaggggtctcttcagtggctgaatgtacagcagagctatttccttccactagggtggtcttgcatgggaagggtccacgtgacttgatcatctttaacgattgctgtctctgtccccattgcgtg

SEQ ID NO: 686075 - DNA, 346 bp, Homo sapiens
actacatacttccgtaaggaaagtccctcacatttttcaaactaagctactatatttaaggccttccaagtgcttctaactcttccaaaagccttctgccttaggtttttttaaattacaccagtccttttggtagctttttgatgtgattttaaaccaacttccgcttctagcttcaagtattcttctaaatgggctctggtctacgtaagcaccctcatcttctcaagctttaccttctaacttgtgcaccaccagaaattaaatggatgggcttttaaaataaatgggctaccaataattccctcatttttgcagcgctattatatccaattttgggctttat

SEQ ID NO: 686076 - DNA, 84 bp, Homo sapiens
tctggtttttggttttttttttggggggggtttaaaaccaggccctggccataataaggggcccaataaaaactggttggttga

SEQ ID NO: 686077 - DNA, 195 bp, Homo sapiens
tcccatccagtgctgctgccaaccctatgcacatcttacagtgccagagtctgtcctcgcctgcaggtactcctgggaatagaggctggatccaggctggctttgagtgcatgccccgtccagcgaaatgtcacttcattttagactttggatccacagcatcttttgatgcatctgttcatttccgtttattgc

SEQ ID NO: 686078 - DNA, 386 bp, Homo sapiens
tttagtagagatggggttcaccatgttggccaggctggtctctatctcctgacctcgtggatctgcctgcctcggtctcccacagtgctgggataacaggtgtgagcccaacgcacccggccgatggtcttcatttttaggaaagtttaaggttcatggccaaagttgaatagaatatacaaagaatgcccatgtgcccctgttcccacatacgcatagctttcactgtcaacatcccgtatcagggtgtgtacatatgtgagaactgatgaacctaacattgaggcatcgttaccacgcaaagtccatcgtggacgttagcattcactgtgggtgttgcacatagatgtatccagcaatacaaaatcagatagactcatttcatt

SEQ ID NO: 686079 - DNA, 923 bp, Homo sapiens
gcctggatggtaccggatggaacagcttccaagtcgtcggatgccactgagccccagcccctggctctggccaggcccccagtatggaaagccgacccccagagcagacatccctgcagcaagcagcggtctggacgacctagaactcctggggaagaccctcctgtctggtagtcgctgcccccggaatcccagcaagtgcggtgggagaagcaggagccaaccccccggctcaacactccgggagctgcagaataagagcagcagctgagactcccgcagctccaggcccagcagactactccacaccgtgtcccagaggcccaccaggctccgcagcagaccagtagcaaccgagctcctcacataggccagcatcactgtgccccgtggagtccatcaaacccagcaacatccgtgcccgtgactgtgtattgacaccaagcacggattccgcattcgcctcttccattatggcccgggacccactgacaagggcagctcccgaccgtgctggtgctggtggttagcccatgctgggcacacgcccccgaggccactccagcaaaaattcgatgtaccaggtcaagctgtccccagggttatgacgggtcaagcttggagcaccccatccagggcaacggagcgtggcaggttataagccccactcgtcaacccctcagaatcaccaggtctgctgctgcaagcccccagaaggcgaaggtcgctcagaaacagctcacctccaccagggggacagactacacggcgatggggctgtgcccagaaccacactgaaaccggggtgcccacaacacaggcgggaaggaggaacggacccgacatgcacccggacggggaatggcccggacccctgtgctgccatacccggggtgtcccaaccggtgcaaggagtacacagc

SEQ ID NO: 686080 - DNA, 518 bp, Homo sapiens
  misc_feature (179)..(179): n is a, c, g, or t
  misc_feature (204)..(204): n is a, c, g, or t
  misc_feature (227)..(227): n is a, c, g, or t
  misc_feature (289)..(289): n is a, c, g, or t
  misc_feature (328)..(329): n is a, c, g, or t
  misc_feature (332)..(332): n is a, c, g, or t
  misc_feature (336)..(337): n is a, c, g, or t
  misc_feature (340)..(343): n is a, c, g, or t
  misc_feature (385)..(385): n is a, c, g, or t
  misc_feature (389)..(389): n is a, c, g, or t
  misc_feature (403)..(403): n is a, c, g, or t
  misc_feature (406)..(407): n is a, c, g, or t
  misc_feature (409)..(410): n is a, c, g, or t
  misc_feature (414)..(414): n is a, c, g, or t
  misc_feature (427)..(427): n is a, c, g, or t
  misc_feature (442)..(442): n is a, c, g, or t
  misc_feature (446)..(446): n is a, c, g, or t
  misc_feature (448)..(448): n is a, c, g, or t
  misc_feature (450)..(450): n is a, c, g, or t
  misc_feature (513)..(513): n is a, c, g, or t
cgagcgggcgcctggcggcggcggcggcggcaccagcgatcccagcagcggccacgacgcggacgcgcctgcggcccggggagcagcagcagccacagccacagcagccgccactgcagttagagcggcagcagcagcgacagccacagcagcagccgccgcggagagcggcgctcggncgggcgcgccctcctgaaggaagcngcccgccccccaccgccgccccntccggcgtgttcatgcccccggggccccagggagcgccatggcccgcgcacgccaggagggnagctccccggagcccgtagagggcctggcccgcgacggnncgngccnnttnnnnttcggccgcctggtgccctcggcagtgtcctgcggcctctgngagnccggtcttgttgcngcnntnntccnccccaccctcctncccgctgcctacctntgcncncncaccgccccacccgccgtcaccgccgccctggggggttcccgctggcctggggggtccccgcngccgg

SEQ ID NO: 686081 - DNA, 1205 bp, Homo sapiens
aagcttggcacgaggagcatggccaggcttggaacctgaatgtattttaaagcaaaagctcaaagggggcacgtggcttgaactggcttgaaggatggcacctgctacactgcaatgtggccgcggccctgcttctggtgtgtaggtaaaggtaaggctggtggaatatatgattccatcatttcggaccaaagttactgaaacctgtattggttgctggacctatctccaaccttctcagaatgcagaaacgtctgggacaacacgagcatactctctccacacctgtacatagcttcagcttctacatccccaaaccacacttgtaaatttgggagtgaaattctgtcctgtaagttcaagcattggttcgtccccaccgccattcaacttaaggctctctacggacagggcgggagggcatgaccaggggcaagggacaggggcccactctctcggtaaaatgtatgcttcgccttatgtgtgctaatgattgcccaggaagcaccatcatttatcttctctttatttggttcttttgggcatggagtggcctgaaattgaattattctttcttgagaaaggcataagtactttctttctgtatcctcaaggtcaaatgcacatttatggagttgtgacacaggatcatctgcatccaataatgtggtctgcttatcaactttcctaattatcaatcttgggagtgccatgccagtaactgagcacacaagtttgactgtttgtccataatgaatgtagccatctcagactgtgaattcttctccttctgatccatcatcatccaagaataatgtaaaatgctccccattgctgtgaactagcatgaaaattacctctttcctacgtgcaagtatctggtactaactgtctgggatagtagtcgattaaacagagccacctttcttcctgaggcaatgcataagtcagcatttttcaatgactgcttctttttggaaggtttggacgacttgctgaggaacacaccaatgtcatcactgttgccatagaacacctttacagacaacatgaagtgcttttgcttgtctaaatcagatatgtacaatgttttggctgtgcaatagttctttccttccaagtttagctgctgcatttcttggtcactatttcctatgccaataaatgcacatggttgagacccttgttcagaacaaaaaaaaaaa

SEQ ID NO: 686082 - DNA, 236 bp, Homo sapiens
cctgagcagggctgagccagctgggagggccggggaagaagtggagctagggaaggtgcaaggctgagggctgttgggttgagaaaagggaaactggagagctggggccgctgcagggagctggctggccagagggtggtggggactgatggagagggactgaggaagtcagccaggcagccaggacacgggtctgttctatctgttgctgtaaataaagatatttgtacatctca

SEQ ID NO: 686083 - DNA, 602 bp, Homo sapiens
  misc_feature (13)..(13): n is a, c, g, or t
  misc_feature (66)..(66): n is a, c, g, or t
  misc_feature (77)..(77): n is a, c, g, or t
  misc_feature (110)..(110): n is a, c, g, or t
  misc_feature (112)..(112): n is a, c, g, or t
  misc_feature (146)..(146): n is a, c, g, or t
  misc_feature (168)..(168): n is a, c, g, or t
  misc_feature (170)..(170): n is a, c, g, or t
  misc_feature (182)..(183): n is a, c, g, or t
  misc_feature (186)..(186): n is a, c, g, or t
  misc_feature (261)..(261): n is a, c, g, or t
  misc_feature (339)..(340): n is a, c, g, or t
  misc_feature (363)..(363): n is a, c, g, or t
  misc_feature (366)..(366): n is a, c, g, or t
  misc_feature (376)..(376): n is a, c, g, or t
  misc_feature (420)..(420): n is a, c, g, or t
  misc_feature (467)..(467): n is a, c, g, or t
  misc_feature (477)..(477): n is a, c, g, or t
  misc_feature (480)..(480): n is a, c, g, or t
  misc_feature (507)..(507): n is a, c, g, or t
  misc_feature (514)..(514): n is a, c, g, or t
  misc_feature (523)..(523): n is a, c, g, or t
  misc_feature (533)..(533): n is a, c, g, or t
  misc_feature (538)..(538): n is a, c, g, or t
  misc_feature (546)..(546): n is a, c, g, or t
  misc_feature (558)..(558): n is a, c, g, or t
  misc_feature (590)..(590): n is a, c, g, or t
gggcagattgggnggggggctgggtgctacaataagggggggggtgccggggcgacagtgcagggnaaaggcagggnagggatctgggctgcctgggggtcatctggggngnggagtacaaagctttgcaagggtgtggttttggnatgacgctaaactgaaggtggngngaacaggtaagnnggntgggggttgcgcactgtacactgttaagaagttgagcttttatcttagaggcagcagaaggtttggggccaaggnatgaaatgatgaggcgtccttcaggtaatgaacttcagctgcagtgtgaaaggggcaggaagactggcagctgtcaannctgggacagtccagtgggtgtgngcnggcccgggcntgggcaggggcgggggcagggggcacacatcaatttctgcggtnccttctagaggaagacccgacagagggtcaacagagttgaaaggggnaaataattgnggntggggtccaagtttttagtttcagagnctaggcntatggttantatttaggtnggganttcggggnaaggggcttggngggcgggggggaaggaacggcagcttggggcnctctgacatctt

SEQ ID NO: 686084 - DNA, 413 bp, Homo sapiens
agcgtaccgttcgccttgtaccctgtccgcgtgtctccttctccgtgtgatctctcgctgttgttgtcgaattggatctcgaagtaggcttcgttcggtgtgcggtaccaggttctcttcggacactacgttgtacgttgcttcgtatggtcatatctagtttttttcgggttgtggtttcttttgctcggtgcgcttggccagctattcgtataagggggaagagctgggagctgctgaaggaaggtttacttttaggcgctagaccagggcagagagatccaggctcagaacttcttctccagcttacaccctaataaagctgaggcactcctccgctctagagtgggccagcctaggggcccaggcaccatcgggcacctactcccccaattgaactatagcgcccaata

SEQ ID NO: 686085 - DNA, 382 bp, Homo sapiens
gccccaaacccccggtttaaacccgtccccttcccccctgggttgggccccgggggttggggggggggtttcccctggggggggttgggccccccccccctttggggtacccagggaaggggggcccgggcccccctggggggcaaaaccaaaggggagttttttgggggtccccctggggccctttgaaagcccttttttgttttcccccggcattgaaaaagacggggtacccctttttccctggtgggcccccccggggaggggggccggcccccttttttccccccttctccttttttttccccttttgggggggccccccccctttggggggggggggggggggccgggaaaaaaaaaaggtttttggcggttttta

SEQ ID NO: 686086 - DNA, 275 bp, Homo sapiens
  misc_feature (5)..(5): n is a, c, g, or t
  misc_feature (246)..(246): n is a, c, g, or t
agacnttgtgtatatttttacactttaaaaaccccatgctgggcatgttggctcacacttgtggtcccagcactttgggaggctgaggcaggtggatcacgaggtcaggagttcgagaccagcctggctaacatggtgaaaccctgtctcaactaaaaaatacaaaaattagccaggcatggtggcatgtgcctgcctgtagtcccagctactcgagggctgaggcagaagaatcacttgagcccngggagcagaaggttgcagtgagccgagat

SEQ ID NO: 686087 - DNA, 137 bp, Homo sapiens
cgatcccccttgactccatgtggaagacgatctagataccgtcgtagttcctgaccataaacttcgacatcggactctgcgctcgatcggaaacgttgctgccatcgagtgccatctggaaacttcgccgtcggggt

SEQ ID NO: 686088 - DNA, 306 bp, Homo sapiens
tcacgctgcaggtgttcgtgtctgggctgcccaagctgctggagaggcacgagcaccatgctgactgaggtagatacacgtcctgacggactgtacgagacaggccgaggaagtgtgtgcacgctcgctgagtcaggcctgcctgtacttccacgacgaccgtcgaccgcgttcgagggaagttacgtccttgaggcaggcacgacccagggctcgtgtgctgccaccaagtaggtgcctcctggaggcaggccgccaggggagaacgaccgagtgggtcccttggaaggcaagctgagagagacg

SEQ ID NO: 686089 - DNA, 993 bp, Homo sapiens
  misc_feature (17)..(17): n is a, c, g, or t
  misc_feature (56)..(56): n is a, c, g, or t
  misc_feature (59)..(59): n is a, c, g, or t
  misc_feature (92)..(92): n is a, c, g, or t
ttagtattagtagtagnagcagtagtagtagtagtagtagtagtagcagtattagnagnagtagtagtagtagtagtagtagcagtagtagnagtagcatcatcattacttgcattactattagtactaccttctcttgtactcctcttctttgctcttctatctctctcttcctctcttccttctttgtcttcccttcttctcttcccactctcttctctatttctgtctcctcctcctcttcttcttactttcttctcctctcctctctcttctttctcctctctttctttctctctctcctatatcctctcctttttccttcttcttctttctctctctttaatcaatccttctctcatctccttctcttctttctctctcctctctcttcccttctcttctcctctcttctcttctcttcattctctcccttcttctctttcctctttttccttttctcttcttcttttcttcctcttccctttccttatctctctctcttctctctctttttctcttctcttttttctctctctttctttcttctttctcctatttctttctctttctccttttcttctccttttctttctcttccttcctcttttcttcttcttttctctcttcttttctctcttctcttcctttctcttcttctttttctctcctcttctctctctctatctccttttctcctttctttcttctcttccctttctctctttctctcctctctttctccttccttctttctgtctcttcttctcttcctcttctcttccctcttcctctccctcttctcacctctcctcttcttcttctgtcctctttttcccttctctctctctctcccttctcttcttgtctctctctttctctctcttctctctctatctctcttctccttttccctcctcttctcttcttccttctctctctcctctctctttctctctctctcctttttctctctcttccttctctcctcct

SEQ ID NO: 686090 - DNA, 217 bp, Homo sapiens
agccatgaggatttattgtctgcagagtgaagtgggccatagtccgttacaatgatgattcgatgtataagtagattaacattctaaggcatagctaatatctgtcctcttgccttctggtgtgttttaatgtattcttataccatgtctttgatataacttttatcctccagatcttagtcttgctcattgctctcttcatgcacttaccgagact

SEQ ID NO: 686091 - DNA, 934 bp, Homo sapiens
  misc_feature (44)..(44): n is a, c, g, or t
  misc_feature (452)..(452): n is a, c, g, or t
  misc_feature (669)..(670): n is a, c, g, or t
cactgcggtagtagctttgggtgatggtgcggaaccgctcctgnccggccgtgtcccagatctgcagccctccagacagcttccttgtggcactcccattccaggtattcaacatatttaatgaatggctactacaggcgggcattgtcctggggccttgtaatgcacctgtggacaaagcagacaaaaatccaggagaaaaggggaaagtcttcaagctgaaggagacttcgcagagagcaagtcccccagtgccactgtgaggaccccagccaacctttcaggtcaagatagaaagggactgaatgagcagtctgcaaaggcagaccccgtggagaaggcagaagagttgtttcttctgaaagtttgaactccactcccactgggaaatacccaacagaatcagacaggaaaccccaagtgccactgaaaagcaattgagagccccactntggtacacctgatgggagcggagagttagagaggcaggaaataacctccactccaggtagaagtagacaggagatgggatggaaggtttctgcatgctgggactagctcaggtcaaagtccagaactccagaaaacaaggcctgcccccagctcagagcagctaccacagcacaaaatggtgtggaatccaggagccaggatgaagcgtaggggtanncggtggttggatagctaactggcctttccactgctctagcctggaactggttgggctggggcaggggacatgttggtctgagtatagattttgtcagaaaacccaggcaccactcccttgcctttgcggggtgattctaaaattggactgtggtaagggttgcacaactcctcaagtttattaaaatcattaaaatgtaaacttacaacctgtgggttttatggtatgtaaattatacctcaataaagctgtctaatatctgca

SEQ ID NO: 686092 - DNA, 879 bp, Homo sapiens
atcatatagtaaaacccagcccatgaccccataacaggggccctctcagtcgctcctaatgaccgccggcctagccatgtgatttctactttcgcgactcccataacagctccatcattacttgagagccatacataagccgaacacgacatatactcatattaccaattgtatggcggctgatgtagatcgacgagtaaagcgatcataccgaaggaccaccacacaccacctgtccaaaaaggccttcgaatacgggataatcctatgtattacctcagaagttatattatatcttcggcaggattgtttcatgagcctgttgaccacatccagacctagctccctaacccccaaattaggagcggcacgtgggccgccgcaagcaggcattctaccccggtcgtaaaatccccatataagtcccactccttaatacacatccgctattacttctgcatcaggacgtatcatattcaccttgcagctcaccatagtcctaatagagaacaaccgaaaccgaagtaattcaagcactgcgtatattacaagttttactggtggtctcgtatatcacccttcctacaagcctcagagtactgcgagtctcccttcaccatttccggaggaatctacggctcaacatttcttgtagccacaggctaccgacggacgttcaccgtcattagttggctcaacttgtgctgcactatctgctgtcagtccgtcaacataagtaatttcagctttacaatccaagacattcagttctggccttcgaagccggcgtcctgatacttggcatcctggtacatgtgcgattgagcatattctggtatgtctccatctattgatgaaggccttaagacagaaaaacag

SEQ ID NO: 686093 - DNA, 182 bp, Homo sapiens
gacttagaggatcccccccgactagcctgacagacccaggaggagcggatctgccagagaggccagcagggggctgagcttggcagtgatggagctgcagaaaggatgttacagcccccacttctccctgccatcgtgggagcagatcagtgggctcagtgtggctggtccacatgaggcca

SEQ ID NO: 686094 - DNA, 155 bp, Homo sapiens
catcagacaccttcaggaagaaaggacatttctcatcttagtgtgacagactctgaataagaacacacagcactgtttcagtgacacaagagtaaatggtacagtgtatttttagagtacttgcaaaagtcacgtcaatagacaattaacatttg

SEQ ID NO: 686095 - DNA, 599 bp, Homo sapiens
actaatgttgtatgaagctacatcataaatgagcttacggagtgtaagctatatagtaatttgattaatttctatcgtgaaaatgtctaggttccactgtttatctgtgaagttaccagctcgtaagtcttcagtgttttgattacagaacacataactgctcttccatcagctgtgaattgagagcccttttttacgagcaatgtcccttttatcactgagaagtacatttttattcacttggcttgtgtggctgctagattggattagcatagccttgcaactctaggaggttttaacttcatcaggagattaattacatcagaaagtggtaccgtctggagaggcttagtcaaattttacagtccttcctctgaaagcctacctagtgtggtggaaacatgatctttgtagacaaatacgtttgccctgattctatattcttgaccttaataaatggcactaccatcagtcctgcctgtaatccttgtcttccttcctgtccactatttcccaataaaatcagtcaccaaatcctgtctctccctgaaactgttcccatcagcatacaaattatgttctggtatccttcacaccct

SEQ ID NO: 686096 - DNA, 213 bp, Homo sapiens
actggcgagtatctcgaactcctgactcaggtgatcaccacctaggctcacaaagtttcggattacaagtgtagagccaccacgcccagatattttacggttaaatggaacccgggtcaaatatatgtacacccaaaatgaagtgcagtggtgccatctcagttcattgcagttataacctatctgtgatcaagcaaccctcccacctcagcc

SEQ ID NO: 686097 - DNA, 233 bp, Homo sapiens
  misc_feature (115)..(115): n is a, c, g, or t
  misc_feature (136)..(136): n is a, c, g, or t
ttcacatccttatatattattaaagatacagaatgggcttttaatagatcctacaggccaggcacagtggctcatgcctgtaatcccagccctttgggaggctgaggcgggtggntcccatgaggtcaggagtttnagaccagcctggccaacatgacgaatccccgtctctactaaaaatacaaaaattagctgggcgtggtggcaggtgcctgtagtttcagctgttcggg

SEQ ID NO: 686098 - DNA, 603 bp, Homo sapiens
ccagccagcgctttcagaagggcacagagcccttgggcccggcggaccagttcgaggtgggcccagacagcctgaagcccgaagttgaaagagctcggacgaggagccggtggagtccggggcccaccggttgcggcgcaccggattgcaaaaggtacagagcctccgaagggccctttcgggccggaaaggcccttcagcgcccccgcccaccccggtcaagccgcctcgccttgggcctggccggagcgcagaagcccagccggaagcccagcctgcgctggagcccacgctggagccagagcctccgcaggacacccaggaagattccgggagacctggggcttccgaaaaacctttgcctccaaatgaagaagtgtagctaaggggctggtgttgcctgcctcccctgggcttgggccttgtcccaaaataaatcctttcagaatgtagccctcccgccctaataaggagcgaatcctacatcccccaaggcgggcgctttggccctcccttccttaagcccagtcctgtgtcctttgaaaaaggtgcagtccctcccccctgcttgcgctccccctcaataaaagttatttcccccca

SEQ ID NO: 686099 - DNA, 145 bp, Homo sapiens
  misc_feature (49)..(49): n is a, c, g, or t
tacttaagtagtatacatttttaatgagatacatgatatgtataatatnttgtaacctttttaggcttaatgtcttgtattttaaagcttagagagtttaaacctatattagagttataaccatgagagtgttttgtggataggg

SEQ ID NO: 686100 - DNA, 311 bp, Homo sapiens
gtcgacgaaagaccctcgtttgagaatccctgcttttatgttctgctttagtccaggcaacagatagcttaggttgtcactttacaactggagcagcaggtagggctgagaggctcgcatactccaaattaccagtgccagtcccatggcccaagacaggaaaggcaggcactcaaacagaaaggtagtgcaattaattgcttcaaattctttactcagggctgcccttagtcatgatcaaataaaatgtacacattgtttggcacttggtaaaatgttgtttcctttccttcctccttccccggtcgacg

SEQ ID NO: 686101 - DNA, 120 bp, Homo sapiens
ctgggaagggtccacaacatgcagcacccaacctgcaacccacaacagccgagacaggagagagagaagaaaggaagagagagagaggcgcggacgcgcgagacggagcggcagcgctag

SEQ ID NO: 686102 - DNA, 1183 bp, Homo sapiens
gagggcaggcatccctaccgacggcgaggttgagagcaatttatagagcagccgagacagtatccgcgacgcgttcagtgcgtctgtcaccctcacgggtagtgcgtccgcccgcgagagaactggaatcttctaccgttggactccgggtcccgtggacactatccggcggtggatcccggctcgtccgtccgctgacctcgcgcatgtcctcgtcgtgctcggagcggatcctgcgtgccgtcgcattctctcaactggactctggcactgcttggagaggtggctcgcgaggcggctggttgcttgagagagtgttaccggtgacctgctgtgagctccgtcaagtaggaccgatggtccgtgcactagaggcgtagacgtgcgtagtagagtcttacagtggtcccgctcagaactaaagggtgcacagtgtagtctggcataagtgctcttgctactgacttggaccctataagcctacaagggggacgagccctggcgaattcaaactgattgcgaatgcccagcgtggcctccccatggtcttaaccccccggttacccccaggccatctttgcagtgcttagacaaaggggcgcgcgagcgcccaagttacgagtggcttacggaaaactggatcatacccttgagaggctagggtgccgacctggcccccgattgtctcacaacagggaaggggggtcaaaccctctgggggaccaaaaccttcggggaagttaggtttgaggggacgaccccccattcccgcaagagatcgcggaaaagcccttataacctttcccgggcgcgagcgggctggcaacactcattgggggagtggaccgaacacccatatacaaccatggaaaacggtgacgcaccaaatttgtgttgagccatatccatgtcccacaagggggagggcccacaattccttattatgcgcgattcctcgggttcccgacccaccgtggtgggtcacaaaacgagggtggggaggcgtaagatacacccataaacttccattggacacttgatcatcgtgcattcatccgccgatgcccgtatgagaggaaaagcgctctagaggggagcttaagggcatgagaccgagcagtctattgagcaaattgatcggtcgacgagacactcgtaggtttggttcacacactaccccggg

SEQ ID NO: 686103 - DNA, 173 bp, Homo sapiens
caaacttctatataacttcaaattactttaaaaaaattcctaaaaggtattctgctgcctttctgaggcatgaacatttgggtgtcttcccaagaccaaccccgggccagcaggtggcgcctgtgaaatggaaaacattcggaaaacagcatcccctcaatagcgggtaccga

SEQ ID NO: 686104 - DNA, 220 bp, Homo sapiens
ggtatatatagaggaaataagggccctactaaaaagataaaaggcgacataattactaggacgatgggcatgaaactgaggtagctaccacagatatcagagcatagaccgtagtatacccccggacgagtagcggtgaaagtggaaaggaaaagacgtccgttaataagcatactagtaaaaaagcctaatgtaggggacagctcatgagttagcaaga

SEQ ID NO: 686105 - DNA, 134 bp, Homo sapiens
aaaccttttttttccccggttaaaacccccgggggaaattttttacccccttttttttttttaaaaaaaacccgggctttttttttttttggggggaaaaccccccattaaattttttttattttttaggggga

SEQ ID NO: 686106 - DNA, 899 bp, Homo sapiens
  misc_feature (395)..(395): n is a, c, g, or t
  misc_feature (802)..(802): n is a, c, g, or t
  misc_feature (843)..(843): n is a, c, g, or t
tatagtaagagatgtattaatattaaccactcatattcatagtcggatacaatggaaagcgtgttatacccatgcccttgcaaatgtacaaacctgcacctatactcatgcatgaatatttatatcctgtgagcagaagaggacaggctgcctgagtgccagggaggtccaggtctagcctagctgggggagacttcccactctgccttcccagccccaggacccttaggagaactttcttgctgccctgtggtccccagggcaccagaaccctggatagccggctctgtggttttcctagagtgttaattgttgcccaggagcagggaatggggaatcgggagctccctccttcccaggagaaagggctgcagtggctggcctgggagccaggngagagtcttcacgtcccagcagttctggtgcagaggcagctcagttggattattcgtcccggttcctaatgaaagtgaaagctgctggtacctgccagccctctcttggcacacagcgagctgaaaatgcagagactggagaacgttgccaccagagtcagcttgtcctggtgcagctcagatttggagctgagggttatcgatgcattggtctatcttattccaggatttcctaggcttcagttatctcccaactaggaaccacagctgctccttcctaacctggtccctccttgccaatctgtggcctgtgctatcagcagaacccctgtgccggacatagagctgcccaggtcagaaacccaaacctttccacagggacacagtcagatttgagttatgggagntcccacagccagggggtcagggcggatgcaggaaaccaggncaggaagttgtgggtgttcatttaagcaagagacagacattggtgaacacagggag

SEQ ID NO: 686107 - DNA, 154 bp, Homo sapiens
  misc_feature (4)..(4): n is a, c, g, or t
  misc_feature (15)..(15): n is a, c, g, or t
  misc_feature (100)..(100): n is a, c, g, or t
  misc_feature (107)..(107): n is a, c, g, or t
gatnttcctagactnaccgtgcctggagagccaggaagaagaggccagcctggaggaatgggcctggtggacaggaggcagagcaggctcagtggccttnccttctngggagcccagacagactgaaatgctatcctcccacaaccaccactgc

SEQ ID NO: 686108 - DNA, 791 bp, Homo sapiens
tatatcatagcgaataaatctagtagtataaattctcaaaatgccgtcagtagaaagcacacaaggttatggatcagttttgaattactggcttctgagtttctgtcacttcgtgatccttcttcctctttctgcagatgtagctgagtcttgatcattttaagacaacgatgggtagaattttagagatgtaatgctaaagtctatgtcccttgtttgttaaatttcagtcccctctcactatgctttatgtccagaaggatcaagaattcgaccatcccttgggtctttagtgtataagacaatgttaaataaaggtagactcagtctttaagatattagacagtttttgtagtccatgggattgtaaatataaacattaacgtttccgtagtaagaatattttaggctgatgtaatctatagcctcaaattggtatttattatggattcactagacaaacagctgtttccttattgtcttttttctttagtgtttctgatttgctatcagtagctgtttttaaagccgtccaaggaaaataattatttacagatttatgaagtcactgtttgagccctcatcaagctctcattgtgagtgggagggatacactttttgttgttaaaagcgtattattgttaaaggcctatgttatggaaaccaacttggaagaacaacattaaatgtggatgtatgagatttggtttatcgagccatgggagagaaaacaaacactaagtttagtttactagtacatatacagtacaatggatagtatattgtcttaa

SEQ ID NO: 686109 - DNA, 412 bp, Homo sapiens
tcgaaagtactgggattacaggcatgagccactgcacctgtgcctgttcaaataactcttaagggtggctgtatctccctgggcaagttacattgagaccgagggactttccattttcctgctttctctctctcatatcggcttaatcatactaggaggagagaagatgccttagtttggatacactcctggtcctcctgtataaccctagggaccaaaagggagctgctggaccacccccgtggccaccacacccactcatggttcttccctctcacccctaggtaccttggccaggctggcagtgaagagaacaccttcaaagagttcccccatgtgtctcaggaactcatccacataaggcctcttgagcacatacacctgaggaagagcagagcagcagggaaagaca

SEQ ID NO: 686110 - DNA, 515 bp, Homo sapiens
aaaactgtatttgttgtaacttgcaggtgaaatacattcttttcacatgatattgtaatcggcccttatttatggtcttttattattattccttgagtcctttcccttcactagtttaataagtcacttctggcttgtctagagagcaatcctagcacaataatgttacaacttgcacggaagaacgcccttcattgagttgatagaactccaccagctgtattagatctgtaaatctagtgtggccatcatccagtgtgtggcaccatttcaccgtcatctactactggtataatttgaaagtgcttaatttaatgtccatgactcattgacagtacgaaagtaagggggtatactctgaattatcccgttaccaagaaaagtccatccactattccttgctgaatagtcaatcgctgagcctcatctctagtacattgtgtggtgaaacccattggctgggaccggagaatagccatgttagtgtgcagagctctgttaagaggccatggagc

SEQ ID NO: 686111 - DNA, 757 bp, Homo sapiens
gccgggcgctgtggctcacgcctgtaatcccagtactttggaaggctgaggcgggtggatcgcttgaggtcaggagttcattaccaacctgggcaagggcaacatggagaaaccccatgtctctacaaaaaatataaaaattagctgggtgtggtggtgcacgcttgtagtcctagctactccggaggctgaggcatgagaattgcttgaacctgggaggtggaggttgcagtgggctgggattgtgccactatactccagcctgggtgacacagcaagactctgtctttaaaaaaaaaaaaaaaaaaggaaacgaagaagagttaaaataaatatagggattaatggatcattctattaaaaagcaaattttatgccttgagctgggagtagtatcggataaattggtaaagtggccttcccaacggtgatatttgggtggattttataacctccttttatctccttcctattttggggtcccctatctagatccatcatcttctctcacattctatcctctttttttgttttcccaactggattttagcttcccccatggttgtggtggaggttaaccctttcttgtgcgcgaaccatattcccccagcggtccaagtatgcctggtcgaaacatctgggggtgtgccctctggagaattctacacagatgtctcggcttacagtttgccttgaaaaaaatggggcgctcttaaccgggaaaacggaaaatacgctgggacatgggtcccagaac

SEQ ID NO: 686112 - DNA, 179 bp, Homo sapiens
  misc_feature (45)..(45): n is a, c, g, or t
  misc_feature (72)..(72): n is a, c, g, or t
  misc_feature (77)..(77): n is a, c, g, or t
  misc_feature (85)..(85): n is a, c, g, or t
  misc_feature (132)..(132): n is a, c, g, or t
  misc_feature (136)..(136): n is a, c, g, or t
  misc_feature (154)..(154): n is a, c, g, or t
  misc_feature (162)..(162): n is a, c, g, or t
  misc_feature (166)..(168): n is a, c, g, or t
tttttataacaatagttaaagtaataaaaacatacaaaactttgntttttttttaatatatatacacagtgnaaggntgaagcanctttgacttttctctcaaaatttacgtctgtatgaaaacccaacccnctgnagtaacaatctggggggngtgaagcngtgnnnacccagagctc

SEQ ID NO: 686113 - DNA, 1681 bp, Homo sapiens
  misc_feature (1)..(1): n is a, c, g, or t
  misc_feature (614)..(614): n is a, c, g, or t
  misc_feature (932)..(932): n is a, c, g, or t
ntgctgcgcggtcatcgcggtgctgcgctctcgtttccgtgcctcagctcgtcttgattggatgatctgattgcttcagttgctgtctcccccctgtctggttgggatggttgtttatgctctatccccgctggttctttatcagatcagccgctgcattttactctcttcgctgcggctggttgtgaggagccacccacgcgtgtttgttggtgatcacccgtgggactgccgccctcgcccagaggtcgttattagacggcgtccttccttcaagttgttgttgtcccccttatgacggcctgttgtttggtttccgcgaaggaactccctcccgcgggggtttgccccttttggtgggaatttccgccgagggttcttccttgaatttgcccgcattgagtttccccttgtccgagggccctctggtatgtggaaaaagttggattttttgtggggctccccccgagattggtaggggggtttgaaaccttatttctcgaccaagctgctattctccttctcgggtaggattctcaccccgtttttgttgtggttaagaccgccaccccttgcgcccccggactccggtcgccgcccttgtgggatccgcncacatgtgtgttgatggaatgcccttatttggtgcttgtttgtgcccgccaaaaaaaggggggaccaccatatttaatatggctttattattggagatttgttgaacatccggcgtttaacccacacccccgggtcgcataatgtatagtaaagcccacgggtttccacccgcggttttttaagaaaagtcacacacaactgtgtcctgccggaattcccccagcaagaggtgtagggcggcaataaaactctctgtcgccttcaactcgctctacgctcacggggattcccaacgcgggggaaaccgcagagaggtntcaaaaggtgtccacagacacttttctttccctctcgaagcggagtttcacaacgagtttctattttcctctctctctcttcgctatagagtctcaaaagaagattcacagcctctttcaccttctcaccgagagagagatttctaacagtgttctctgggtgttcttaatataaagaagggagtctccgagagggtgatttttttcgccactgtcccccgctctcgagagggttcacaagagtgtccaagaatgcccacaggtgtctatttttcaccgcgccccacaagagagcgcaccccgcagttcacacaagtggccacagagttctcccactatctctcccacataaagagatatgtctgttgtccccactccacgcgaggaagttcctctcccacagaaagtgcacacagtcctcgagaaagagaattgggactcgaaagcttctcccaagtgtcacccctcttaagggagaaaagttattttttgtgtgtaccacattattatatataaagggagttttgtggagatagttctgtataaagtgtaaacctatggagaagatatattctcacccacttctatatccaaaatggagttctggagttatctaatgtaaaatttcccaccccgctaaagagataaataaaaaattttgttgagaatgtattaaacactcactatatggttctgtaaatttgggtttttatttggccaccatttaaataaaatgtttttaaactaga

SEQ ID NO: 686114 - DNA, 142 bp, Homo sapiens
agtcaatttgtcttgtctgtctgtctgcacaccaaattttcctaccaaaccctctcacatagtctttctgggactcgtgcttctccgtattgccttgatactcaaagccaacggcgctcttatccactttggccttatcgag

SEQ ID NO: 686115 - DNA, 196 bp, Homo sapiens
  misc_feature (1)..(1): n is a, c, g, or t
nactagaggatccccgataccccattttgtgttcaacagctactagagggacgggtgtatttaaaaaaacctagggcagagggctttgggaagagtaagaagaattgggagggccttaaatatagtagcttagttggaaaattgtgagggactttcgtacgggaggtccttcaggggtcccgagctcgattccgat

SEQ ID NO: 686116 - DNA, 461 bp, Homo sapiens
  misc_feature (56)..(56): n is a, c, g, or t
agtcgactctagccatctatgtcatcccccttcgtgagggggtgcgtatagcaggnaaacgtataggacatctctccaattcttcctctactggcagctccgcggcgacctcctaggcaacatctcctaggactttctacaagctctagtacttagcataaagtgggaccctgtggtaccctattccgaaatgagtctagcagtcaccggctataaggtgaggaagcaatcaagctaaggccagaatgggaaggaacagctcctctgtgtttccagtgaacataaagcagcagcaatttataagcaatatggcatctgagtgagacataagcaaagggtttgtgactgtgagaggaatgacattcatggaactattctctcagtaacttgcagtaggaaactataaaaaacgggcagatggtatcactgcagaaaggcagagttcacaggggcagtgatgg

SEQ ID NO: 686117 - DNA, 145 bp, Homo sapiens
ccgtgggcttcgagtgctgagacacaggcgtgcaccacacactctggctaatttttgtattttttgcagagacgtggtttcaccttgtttttctggctggtctggaactcacgtggtagaccaagcatctctacagccccaagcg

SEQ ID NO: 686118 - DNA, 162 bp, Homo sapiens
  misc_feature (116)..(116): n is a, c, g, or t
  misc_feature (139)..(139): n is a, c, g, or t
ctatcagcgcctccgtaacgtcctaacacctccgtaacgagcgcctccgtaacgagcgcttccgtaacgagcgcctccgtaacagcgcctcctacacccctagaatggtttatatncgggatcgcgatttttcttttcnttggtggcgctctgttacggggt

SEQ ID NO: 686119 - DNA, 603 bp, Homo sapiens
agtacgacggcagactctcttagcttgtaatcatttactttatttaccatatttttttaagtggcgacgttagatacatcctgaggatagtcagtaagattcgtctacttgctttgtcttctcctttgctctgtttgtgcgttgagttgcattatttcttcgtggttgacacactaaatagcatcatgttttgtcactggaatccccattacttgttcttaattataaaattaaacatatttagtccttatccagaagcctcacatgatgttggtcttactgtgcagtaagtaggacatgtctaaaaaagccatcgcaggaacaaggttttttaaaatcataaatatgcatgagtgttctacattccttagacatgattcatagttaggatgaataaaatctcatctcactactgtgttatctgtgtcataatcattaaaccatttctggattatcatcctgtataagatgttgctatcaagaagtctattatcaatataaacttcttatcctttgaccttcatgctcaaataattgatatgattatttcaatttttgttcttagaaataaccattacatgggtattactattcttgggctaa

SEQ ID NO: 686120 - DNA, 257 bp, Homo sapiens
acctcccgtgttcacgccattctcctgcctcagtctcccaagtagctgagactacaggcgtccgccaccacacccggctaattttttgtatttttagtagaaacggggtttcaccatgttagccaggctggtcttgatctcctgacctcatgatccgcccgcctcggcctcccaaaaggctaggattacaggtgtgagccaccgtgcccagctggaaatgtttaaatttgataatttagtgttgggcgataacatca

SEQ ID NO: 686121 - DNA, 174 bp, Homo sapiens
  misc_feature (1)..(1): n is a, c, g, or t
  misc_feature (37)..(37): n is a, c, g, or t
ntttctcctccggccagaatcaacgaagcggtttggnggcaatgggagcccattggcggtctaattcgcgcaccctggttcgggcgtatagtaacgaataacgtgtaatatcggctcatcgcgccatttgcaactcgcttttttcaagccgtgttcgttccatttcgggtaccg

SEQ ID NO: 686122 - DNA, 694 bp, Homo sapiens
  misc_feature (415)..(415): n is a, c, g, or t
  misc_feature (423)..(423): n is a, c, g, or t
  misc_feature (476)..(476): n is a, c, g, or t
  misc_feature (554)..(554): n is a, c, g, or t
  misc_feature (556)..(556): n is a, c, g, or t
  misc_feature (567)..(567): n is a, c, g, or t
  misc_feature (593)..(593): n is a, c, g, or t
  misc_feature (620)..(620): n is a, c, g, or t
  misc_feature (623)..(623): n is a, c, g, or t
  misc_feature (625)..(625): n is a, c, g, or t
  misc_feature (628)..(628): n is a, c, g, or t
  misc_feature (630)..(630): n is a, c, g, or t
  misc_feature (632)..(633): n is a, c, g, or t
  misc_feature (639)..(639): n is a, c, g, or t
  misc_feature (644)..(644): n is a, c, g, or t
  misc_feature (653)..(653): n is a, c, g, or t
gatctccaggctgctgcaggtggatcctgaggcacgcctgacagctgagcaggccctacagcacccttctttgagcgttgtgaaggcagccaaaccctggaaccctcaccccccccgccagcggttccgggtggcagtgtggacagtggctggctgctcggacgagtggccctaagcacccattgtgtacggccactgtagccaagaatagcacatcgttgtaggggagcaccctaagcgcgttcggttaatgcccgcacccttaattcgaaccacctggttggccttccggctctacgggcactgggtaaagaaaggggagcagcagaaccgggcggctctctttcagcaccggcccctgggccttttcccatcatgggccctgaacgaggagggagactctgctgctataacngaggatgnggccgtgcttgtgctgggctaggacctcaaccccagggattcccaggaagcanaactctccagaagaagggttttgatcattccagctcctctgggctctggcctcaggcccactaatgatcctgctaccntnttgaagaccancccggtacctctctccccactggccngactctgagatcagagctggggtgganggnanccntncnnaagccnggtgnccgtcagtngttgatggtcttcattaggaactatagtttgtttacgctcc

SEQ ID NO: 686123 - DNA, 269 bp, Homo sapiens
cgggggggggggttcccccccccccccccccccggggggggagggtggggtttttttccccccccccccttggggcggggtttttttgccctttttcccgggggggggggcccctttttcccctttcccccccccccccccccgggggggggggggttttttcccccccatatcccttttttggcccccccggtttcccttttttccccccgggttttttttcctttttggggccggggttcccttttttttaaggggggggtttttga

SEQ ID NO: 686124 - DNA, 180 bp, Homo sapiens
cgataatggcccatttggccaaaaagccggttagcgtttgcaggcctcctagggagaggagggtggatggaattaagggagctagtcatgttagctcgtttcaggggccagatagtaacagcgtcgtgactctgaagaccagttgagtagtaggaatgcggtagtagttaggataatata

SEQ ID NO: 686125 - DNA, 749 bp, Homo sapiens
ccgatgaatcccgagggggcgcccatcattttgggagtaaagaacagtgcgtggcaatgggtctgtatcgaaacagaccggcggaggatatatgtggggccccagacgaaagatttggtggaggccgaccccacgcctctcgtctctttgtaagaaccatcctgtctcagtatccaccacgcgcgcccctcatcagcgccggcgcgaaaattagccgctggatatgcttgtcgccgcctccctaaggactgtcgcagacatgagaaagaggggcgtattcttggtatatgagacaaaagcgcgctccggcggtgtgtatttccagcctcctcgtggaagcggtccaaaaacgggctatcgccctcgaagtgcgtgggacatagagagatatctcgctcaggctttctctcaacaacaatttccacgcacgtggtcttcgagtgaggctcacgcgcagagctctcgcccccgtgttgtgcggaggggcgcatcttggaaagcacccgtggccgtttcgacgagcacagcctatccatgggcccagacatggtgcgagtgcaccagagttctccctgccgccttgttacgacgactactacgggaagtgccgcattcggacggcttcgattccaacaactgtcttttgattgaagaggcagtccacggctggtaaataacagtctccgttgccggaaaacccgtgcgggtcaaacatcggggccccaaggttttttcacgccaacataaca

SEQ ID NO: 686126 - DNA, 483 bp, Homo sapiens
tggccctggacacgacgtggatactgggctgctggtagggcccagctaaggccctgagagctccatgcaggctgggacgttgggagatgcgaggaggtccctggtgcagggctgcagagagggcttaggatgagcacgagaggagttcaggactgggtgtggccaagggggaggacagagactacgagttagggtggggagcaggtggctgagatctgctggtcacatcgtgtgacacagatggactcgattccaaagacagtgacaagaccctgtggcgatcctcgcctgatcaggaaagtgtcatccgcaaggtctgggtgatctatcaataatattggccatcatgaaagggggctccaaggagtactggtttgtgctgactgctgagaatctgtcctggtacaaggatgatgaggagaaagagaagaaatacatgctgtctgtggacaacctcaagcggcggtaggtatgtgaaggacg

SEQ ID NO: 686127 - DNA, 765 bp, Homo sapiens
  misc_feature (133)..(133): n is a, c, g, or t
  misc_feature (153)..(153): n is a, c, g, or t
  misc_feature (229)..(229): n is a, c, g, or t
  misc_feature (239)..(239): n is a, c, g, or t
  misc_feature (256)..(256): n is a, c, g, or t
  misc_feature (279)..(279): n is a, c, g, or t
  misc_feature (316)..(316): n is a, c, g, or t
  misc_feature (345)..(345): n is a, c, g, or t
  misc_feature (351)..(351): n is a, c, g, or t
  misc_feature (357)..(357): n is a, c, g, or t
  misc_feature (367)..(367): n is a, c, g, or t
  misc_feature (413)..(413): n is a, c, g, or t
  misc_feature (447)..(447): n is a, c, g, or t
  misc_feature (462)..(462): n is a, c, g, or t
ggaaaaaaaagaacctacttaagatagaacatggttttggctatggcttgactcatgggctttcagtgcttttttccatttgttgaaagtaacatttctctctctctctcttttttttttttttttttataanagcaaaccattgtttttgtnagtgttaagtacctttggtctatgggtctcttggccagccctccccttttcccaatgaaagccatgtcaaattaantcacgggatngacggcttcatcttttnattttaatgaaggggtgtaccanggttgtaaagcaataagatttgagatgaacactatgnaaacttcgcttttggctaaaaaatagcangttgantagtantcaaaaaacntagaaagattttagttcaaaatgatggctcctttctctaccggganttttaaaaaatcaatggtcatctaatatgagttnattggtctatagacncaagtatcaaggtctaaaaaaaatcatgattttaaacttccaccgatgaggcaggtaggagataaagatgaattctgaaggttactaaagagtacgtcatttttctaccttgtagggcagggtgggcaagggggttacctgaccttattgggggtttgggctccttttattcacccttgtttttccagagactcggccccgtgatccttttattctgcacagcttggggctcaacaaaacaaagggggctccacacttggtttttttctcctttttttttcccgtttcggtcacttcccaaga

SEQ ID NO: 686128 - DNA, 750 bp, Homo sapiens
ccatgcagcgctcctgggcggtgctgcggacgaggctggcctactccttgcctgtggctggccctgcgggagctggagcctgggtgcgtgctctcccggtcgggggctggcggggtgccgcggcctgggcctggaagacgaggcggcgccctgcgctgggccgcagagggaatgggcagcggcgtgcccctgaggccggggcggacggactgagcctgcggggagcggggtccccggcgcgcggcggttccgggagctcagcgcgcagcctgcgggcagcccactgggccagcctggcgggggtccgacggcggcggcggtggcggcagctgcccgatccagcggcatcagccgtgggctacgaccagcgccacggcagcccgcgctccggtcgctcggacccgcgtccggtcccgggccgccttcggtgggcagcgcccgtccagcgtttccagcctcggctcccggggctccggcctggcgcctacgcttgacttcctccctgcccggctgccttgcccccggccgctcgctccccggagcctggcggggccggcccccttcccgttgcctgaactcccgattgcccctggccgggaggggcggcccaaagcgcggccggaactggcggcttggaggcgctcacccggggaagctgagctgggcggctcgaggcgcgcaacggcgcgggactacttcggcatttgctcaagtgtggcttggcatctacggggccccagcagggtttca

SEQ ID NO: 686129 - DNA, 100 bp, Homo sapiens
aatttgattgtagaggatccccgtgactacacaggcactgtcacagcccttactgtcccttttccaaaaatcaaacagacaagccaaatcccacagcata

SEQ ID NO: 686130 - DNA, 799 bp, Homo sapiens
  misc_feature (799)..(799): n is a, c, g, or t
ggcagtcagcccggcccgggtcatgcgtggtagggcctgatgggttgtatcggccgtcgcatgtgctctccgctctgggagcctgctgccgtccgtcgaggtctcggttagcctaagtgccgcgctgccgggctcgagcggaggcggcgcatggcgcttgagggcatggcagcggatgcgggctgcggggcctgtcgcgtgtgcggaaagctgctaggtccagccctgcgtggggacgttttctgccagacagatttgtggaagaacctgaccgtggacgagggcaccatgagaggtatgaggtgcttggcgtgccctgaccgagcaactacatgtaccttggtcattgatgatgagaccaaggaggctgccattgtggatccggtgcagccccagaaggtcgtggacgcggcgagaaagcacggggtgaaactgaccacagtgctcaccacccagcaccagtgggaccatgctggcgggaatgatgaaactgtgtcaagctggagtcgggactgacggtgtccgggggtgactgaccgtatcggggccctgactcacaagatcacttcaccttgtccacactgcaggtggggtctctgaactgtcaagtgcctggcgacccctgtgccagagcttcaggacacattgtgttacttcgtgagcaagcccggaggctcggagccccctgcctgtgttcacaggtgacacctggtttgtggctggctgcgggaagttctatgaagggactgcgggatgagcatgtgtaaaagctctgctggaggtcttgggccgggtccan

SEQ ID NO: 686131 - DNA, 144 bp, Homo sapiens
ggtgattacaggatcttattttagcaggcacttttacccaggctttatggagaggagggtggatggaattaagggtgttagtcatgttcagctatgttgtatggtgcgagatagtagtagggtcgtggtgctggagtaaagttg

SEQ ID NO: 686132 - DNA, 552 bp, Homo sapiens
gaatattatcacagcaaaacctcattaattggatgctatcaaaattatgaaaggaaatctgagtgagcacacttgtttgaaaagaaattggtaaatacttctatgatgcagttttaagttatacaattaactcctatttggaatttaataagtccactataagcaatgtgcctgcacaccaattaaaggttggatctgtctcttcttgacaattttttagaagccattatttcgttaccaaataaacctgaagttaagaaatatttatatttacatctatttatatctgttggagaatatttcataactcagacttggttgttttacacagacttctccccattatccaacatagtgagatttttctatagttctatattttactctagtattaatgtggttttataaatgattatatgccttatattctggggggaaagaaatgtgaaaatgtgctaagtagacagaaacagaatatataagtcgtttcgaatgttatttcttttttaaaaaatttgcttggtgtcatatagccaaaactattcatggtga

SEQ ID NO: 686133 - DNA, 205 bp, Homo sapiens
atgctgcagtgatctagaggatccctgcgggtcttcacgtggggtgctgatgtctacatgtcgggcccagcttcgctggccagcatttctacgccgtggcgcggcgggcatattgcgagggctgctacgtgagcaccctggagaaatgtgcccctgtggtcccagcccatcctggggccggctcctgcgggctatgggggaaggg

SEQ ID NO: 686134 - DNA, 474 bp, Homo sapiens
  misc_feature (1)..(1): n is a, c, g, or t
  misc_feature (62)..(62): n is a, c, g, or t
  misc_feature (193)..(193): n is a, c, g, or t
  misc_feature (356)..(356): n is a, c, g, or t
  misc_feature (390)..(390): n is a, c, g, or t
ntttttaagaatctcactcctgtatctcagcctggagtgcactggtgccgtcatggctctcnagccttcgacttcccgggttcaaagcgatcctcccaccttagcctcccaaaagtgtttagggttacagacatgagccactgcacttggcccgagagttattttttacaaaaatgggatcaagcccaagtgngtgttgcgcctgtagttccagcttacttgggaggttgaggtgggaggattgcttgaggctaggagtttgagaccagtctgggcaacacagcatgactctgaccagtctgggcaacacagcatgactctgtctcttaaaaaaaaaaaaaagtgggctgagggtnggtgtaacgccggtaatccttgcactttgggagncaaggcaggtggatcacctgaggtcaggagttcgggaccagcctggccaacatgaatgaaaccccctctctaccaaaaatatat

SEQ ID NO: 686135 - DNA, 146 bp, Homo sapiens
cgtggaattccactccggagggtgactgtccgcgatggccatgccggacagccccccacttgccgttccgccagatgcacacggtgtagtgcaccctggactcctgctcctccaccacctaggcgcctccctcctgcggcgggttc

SEQ ID NO: 686136 - DNA, 172 bp, Homo sapiens
tcgctccctcggctctaggattcggcgagtgctgctgccgggggggctgtaacactcgggggggggtatgaacaacagtgcaagtatgaacaacagtgcaggtataaacaacagtgcaggtataaacaacagtgcatgtataaacaacagtgcaggtataaacaacagtgca

SEQ ID NO: 686137 - DNA, 174 bp, Homo sapiens
  misc_feature (34)..(34): n is a, c, g, or t
cacgagggacacggggtttcaccgtgttggccangctggtctcgaactcctgaccttaggcgatcccaatgcctcaacctcccaaggtgttgggattacaggtgcgagccaccatgcccagccaagggttgaattttgaggtgactaacgctgcctggtggtgggggtaggggg

SEQ ID NO: 686138 - DNA, 106 bp, Homo sapiens
tgggtgctgtttgcattgatagtagaggtgagtgtagtagagatggggcgaggcaggaggagagttgcggtgagtgagattgtgccatgttctcagctggtgaaca

SEQ ID NO: 686139 - DNA, 285 bp, Homo sapiens
ctaattggttcttcgatgacgaacggtcgcgccgatactgacgacgaagtgcttcaggccgaggtgctcatgcacaacgagcttcaatctggcgaagtacgcgagttcgtagcagtagccccaaaagccgagcaaggctactagcaggccgttgaaaaagtcgatgcgggttcaaaaaatggtgatttcgggggtgcctcaccccttacccactcttaaaaaatcgcttgtaggtcgttctgaaaggtcggcctttgggtccttcgtcatcgaagaaccaattag

SEQ ID NO: 686140 - DNA, 1010 bp, Homo sapiens
ggtccccggggtctccgggcgaactgaggctgcggtggacgtgacgccgcgtgggtgcgagctagccggctccggcgcttctccgcgggatccagacgccgtcctgggtgctgctggctggagggatcgtgagagcggctgcggacaatggacgtcacctccggggcatttgcgcaaccagcacatctcgagatgagaccctgagagtagctcttcagcaagactcgaccgcatttggcaaggtgctcgtacggggaggtctacacgggcatcgaataaaccagacaaaaggaggtggtgtgccactcagagactcactcggacctctgtgaagtgatgggccgacggattgacgctctgaggactattcctagctagggatgagtcatcgtgtctcttcatgtcatgtggcggaccaggccctaggattcgacgcacgctacgtttgagctcctagccctaaaaggaagcaccaagaggctactaggagtcaatcaattgggaaagtacccgtgaggcagagcgggactcgaggcaccttgggaactttgcgttataaacacgaaggatccgcccttgggaagggacagaccagtacaatttggccgatcggaattcgctgtgccgggagaaagaacttcttggaaacgggaggcactggggccagtttactactgccagcttcacggaaatcggccagatggaattcacaggccggaccggaaccaatttccacaatggattttgggccaaagacgggttggccgttaacttcagtgccgtgaaaggactgagggggatggatcgtgggtggaagacggcacttggggtctggtgaaccctttagggggacgagagtaactgaccaatgtgtgtgagaaagagcgatcctatcttagagagacaacttggctcaggcaaaattgtaaaacggaagggggcgaaacggaacaagttaccagttggaaggggcatagcaccactgggtattgtctattggagaaatgggg

SEQ ID NO: 686141 - DNA, 114 bp, Homo sapiens
ttagactcactgcaactctgcctctcaggtacaagtcattctctagtcttcatcgctctccgagtggctggcgcattacagtgcgtgctgccaccagtgcgcgaggcataattt

SEQ ID NO: 686142 - DNA, 375 bp, Homo sapiens
  misc_feature (6)..(6): n is a, c, g, or t
  misc_feature (112)..(112): n is a, c, g, or t
  misc_feature (117)..(117): n is a, c, g, or t
  misc_feature (201)..(201): n is a, c, g, or t
  misc_feature (331)..(331): n is a, c, g, or t
ggtggnaaaggtgggaagttgttttccaagcatgaagatagggttcaaggctgtgaaatcaagaagtctagagccctaagataaaagaagataccccagggctgggcccacnggttntttcgccctgtaatccctagcactttgggaggccaaggcaggcagactgcctgagctcaggagttcgagactagcctgagcaanacggtgaaaccctgtctctactaaaatacaaaaaagtagccaggtgtggcggcatgcacctgtagtcccagctactcgagaggctgaggcaggagaattgcttgaacccgggaggcggaggttgcagttnttggagatcgcgccactgcactctagcctgggtgacagagcgag

SEQ ID NO: 686143 - DNA, 187 bp, Homo sapiens
tgtcagaggatcccaatgatgctcaccgctcctatttagggaattaggggcatggtcactcacacgttagtggcatgtcatcaaagccatttatattatatatatcctaactttctcgggtgcagaaggaacaggcaacaccttgggggatctggtgccttgaagagaatcaagatctatcctgcca

SEQ ID NO: 686144 - DNA, 240 bp, Homo sapiens
accaatacaagtaccttagaacagtagtacccaagttcacgctattaactgtaattatgggtcccgtaaatccttatatgaaatcctttggaccagattgttttagaattaatttttcagatacttaaaaggttatttggtacatatactgcatattacataaataccctaatggggtctaggcagtacacccataatcatttaagttggtttggtttgtttttttgctttgttttggga

SEQ ID NO: 686145 - DNA, 396 bp, Homo sapiens
cggcacgaggaaaataatgagaaccaatgggcacaacacagagaacaacagacactggggataactagagcggggagggagagagaggggaagggtgtttctaactatcaggtgctacactcaatacctgggtgacaggatcaatcataccccaaaccccagcacgttacgttacacccatgtaacaaacctgcacatgtactcccaaatctaaaataaaagttaaaattatatctagggaagagagtgggaggagggagaggatcaggaacaataactatcaggtactgtgcttagtacctgggtgaagaaatggtctgtacacgagacctccgtgacatgagtttgcctttgttaacctgcacatgagccccagacctaaaataaaaaaaaaaa

SEQ ID NO: 686146 - DNA, 864 bp, Homo sapiens
tattttggatctttgttagttgcatactatatttcagtgtttatcttcttggtgaattgacccttttatcattatgtaacttccctatatttatatctttatatttaaaatagatttccttaaaccataagacatttgagaagtaaaaataaaataaaatagctttcttgctgatagcatatagtcgggtcttgttttttctttttccaatccgataatctttgtctttttttttttttgggaaatgggaatctgtgctctaccaccgtggacgggaattgcaagtgacgtgatcctcagctcacgtgcagcctccacctcccaggttcaagcgattctccgtgcctcaagcctcccgagttagctgggattataggccacccgccaccagtgcccagctaattttggtatggtcagtagagaacggggttccaccatgtgggtaaggcggggggaagttcctataattaattcctggttaaatttgggtatacgccagaagaacatgctttatgtgggtttcatttaacatttggtcacgttctattttatgacccagaatatgatctatccgggtatatgtccggtgggcctgggaccgaatatgtatcccggtggtcctggggtaagaagtgtttgggtaaattgtccctttattttaacccagttgaataccgtttatccaggcttggcataatatccctttttgggaattccattctaatttgtttatcagtccattggaaagtgggccttattgagttctcccagctaatgactgttgcaatttttcccaaatttttctgtaagttctatcaacttttgggtccataaattggggacacgttgcaacgcgcattaaat

SEQ ID NO: 686147 - DNA, 388 bp, Homo sapiens
ttttgtagcgttggaatctcaccaggttgttcaggttggtcttgaactcctggcctcaagtgatcctccctcctcggcctcgcagagtgttgtttttctttccttagtacgggggtttagtgctgtaaattttccccagagtactgctttagtggcttcacacaacttttgataatttcgatatactttttattttcatttcattttaaatacattctaattaatttactttttaattttatctttgacttgtgtggatgttttgttttgtttttagatatttgttagtttccaattatttgaggatttttctagatttttttatttgtttctaatttatttctggtgtagtcagagaataaactttgtacaattgagtcttcgtaaa

SEQ ID NO: 686148 - DNA, 164 bp, Homo sapiens
cgaaagatagtgaactatgcctgactgtcgctatcaaccaacacctttatcatggggatctgatgagacgtcgagaatcgggcgccattaacccggacgattcgagttcatcccgacagcgccagattctgcaataccaaacaatggcccactagagcactcgc

SEQ ID NO: 686149 - DNA, 120 bp, Homo sapiens
gtttccatcctcaacaattccagtatactctggataataatgttctaaccctggaacagagaaaattttattgaaggaaattgggtttctagtaatcaaaaatcttgtaccctatgcccg

SEQ ID NO: 686150 - DNA, 672 bp, Homo sapiens
  misc_feature (21)..(22): n is a, c, g, or t
gttccagaatatctctcaacnntatttttagcattatggacacttacaagaaaaaatttgactgccaattttaaatgcaatgaaagtacttttaagattaacaccttaggactttacatttggcatgttttggtaacaaactgctttataacaataactataaaatgctcccatagaactatgagtttcaattctcctctatactcaaactcaagcaagtcagttgccacatctcttattgggaagtcaagtagggaaagtgataaatacatgaaattctgaagagaaagacaagacagatttattggtaatcctccagattttagataaatattttgctgtgtagcaaaagccatacctgtgagaccatagatttgtttgatagtcttgatatcacctgaaagaacaaacagaagtattaatcattttacatatactggtggtttgggactgggtgaaatgcagcaggcagaggaaagagaagtatgtacagagtttgtgggagggaaggagcacaggaaggggtgtggatctacctgtgcaggccagagaagagagaacaccttctacaatgtgccaacaactgcctcatactatactctaggaccactactgatcagagtgtgtaatgagggagcaccaagttgaatgtgtaccacaggataccaccct

SEQ ID NO: 686151 - DNA, 103 bp, Homo sapiens
gcaggaagctgaacaggcgtggctcgtgagctcaggaccacaggtcgacctgtctggatgtttgaagtaggactgctgtgattaggacggatcagacgaagag

SEQ ID NO: 686152 - DNA, 389 bp, Homo sapiens
aaactcggtctcaaaaaaaaaaaaagaaaagaaaagaaaagaaaagaaaatgttcataaataaaagaatggaggaaaagttgtaagaaaaacttaaaaaaaaaatctggcttggtgcagtggctcacgcctgtagtcccagcactttgggaggccaaggtgggtggatcacctgaggtcatgagttcgagaccagccggaccaacatggagaaaccccgtctctattaaaatacaaaattagcagattgtggtggcgcatgcctgtaatcccacctactcaggaggctgaggcaggagaattgcttgaacctgggaggcagaggttgcggtgagccgagatcgcgccattgcactccagcctgggcaacaaaagcgaaactcggtctca

SEQ ID NO: 686153 - DNA, 284 bp, Homo sapiens
ccccaaaaccccccccagggggggtttgcccccccgaatggtccgggctttaaaaattaagtgggtttcccgtttaatgccctttcccgggaatattttcccccatttcccatcctttttttttccccccgccaagcccttgggattaaacaaaccggggtttgttttttttatgggaagccccccgggggcttttttttgggccttttgtttaagggttcccccacaccgtggtttttttttaacccccaaaaacctttttgttttgtttgttggggggaaga

SEQ ID NO: 686154 - DNA, 717 bp, Homo sapiens
  misc_feature (537)..(538): n is a, c, g, or t
  misc_feature (544)..(545): n is a, c, g, or t
tatctgaatcctgcgtgtcgacacgcggactcaggacgtcatggaacatagtgcatagcgtgtctcctaatagatactgttcttcagtaatggttggatcctcatgattagaaaatgtcctgagctgtgggatctcataggccgtccttgatcaaaggactagtactcggagaagtccatagagcggtcgagtcatcgtgggagacgtactcaagaaggagagagtccatgagtgaggctctgaatatcacatggatcggacacgctgtccggatggtagaattcctctaagtacaatggatgggcctttaaaaccactttcctggggccatgtggcattaacagaaattaatgcctgaattaccaaaggtttgttgtggccagcttgtggcgctctagtggggaagaacttgtggcacggtgcccttgcagatcacaacagtcaatacccttgtctgtgcaacgacggtggactgcagcgtgcgttcctggacaacattcgcgggaactgaagcaacgtcgccagcagtgtctgtnngaagcnncgcagcattctgtgtcaggtgtttggctgactatttgccccgttgcgtattggacggacgacgtctaacaaaactactttagaaggtttgtatttgacatacttctttcaggcaaggccttcccccagagcccacggttggaccaaagttcagaacttatgtacactggtgg

SEQ ID NO: 686155 - DNA, 258 bp, Homo sapiens
tacaaaaaaaaaaaaccatcaaaagttgggaccggtatctccatccatccacctatctattcaatcaataagggatatccggagcaccaccgggatggcaagcacggggcttaagtgtcgaggataaaaagagaacaacactttctggccactacaagcaagccttatagtccagaacaagaaatgagacatttttcctttaccaagtccagtccctaggatctctttaatatattctctttattccaatactattct

SEQ ID NO: 686156 - DNA, 890 bp, Homo sapiens
  misc_feature (35)..(35): n is a, c, g, or t
  misc_feature (62)..(62): n is a, c, g, or t
  misc_feature (64)..(64): n is a, c, g, or t
  misc_feature (72)..(72): n is a, c, g, or t
  misc_feature (81)..(82): n is a, c, g, or t
  misc_feature (103)..(104): n is a, c, g, or t
  misc_feature (113)..(113): n is a, c, g, or t
  misc_feature (133)..(133): n is a, c, g, or t
  misc_feature (135)..(135): n is a, c, g, or t
  misc_feature (146)..(147): n is a, c, g, or t
  misc_feature (153)..(153): n is a, c, g, or t
  misc_feature (164)..(164): n is a, c, g, or t
  misc_feature (174)..(174): n is a, c, g, or t
  misc_feature (186)..(186): n is a, c, g, or t
  misc_feature (198)..(198): n is a, c, g, or t
  misc_feature (215)..(215): n is a, c, g, or t
  misc_feature (233)..(233): n is a, c, g, or t
  misc_feature (237)..(237): n is a, c, g, or t
  misc_feature (244)..(246): n is a, c, g, or t
  misc_feature (261)..(261): n is a, c, g, or t
  misc_feature (276)..(276): n is a, c, g, or t
  misc_feature (301)..(302): n is a, c, g, or t
  misc_feature (309)..(311): n is a, c, g, or t
  misc_feature (336)..(336): n is a, c, g, or t
  misc_feature (362)..(362): n is a, c, g, or t
  misc_feature (390)..(390): n is a, c, g, or t
  misc_feature (460)..(460): n is a, c, g, or t
  misc_feature (465)..(465): n is a, c, g, or t
  misc_feature (478)..(478): n is a, c, g, or t
  misc_feature (541)..(541): n is a, c, g, or t
  misc_feature (556)..(556): n is a, c, g, or t
  misc_feature (705)..(705): n is a, c, g, or t
  misc_feature (734)..(734): n is a, c, g, or t
  misc_feature (741)..(741): n is a, c, g, or t
  misc_feature (754)..(754): n is a, c, g, or t
  misc_feature (756)..(756): n is a, c, g, or t
  misc_feature (775)..(775): n is a, c, g, or t
  misc_feature (794)..(794): n is a, c, g, or t
  misc_feature (829)..(829): n is a, c, g, or t
  misc_feature (875)..(875): n is a, c, g, or t
tctgaataaatcactttacaattactgaaaaacangttcattaccttagctatgtacttaangnaccaaatnccccaaacnnaataaacaccccaatataaannccttaagantttacaaaacagtacaaaanancttaaaatttnnaaattngtctgatacantctgtaaganctcttcgagagngcggtccaattncagatctatatactttncttcagaggggcaaaganaggntgctttnnngcttctctgagagtnattcttttggctggntcatactccaacattttctgaatgnngtcaaannnacgctcatgttcaacatcttgaganagcataaattccttcagaggtttacngcgtcttgaaacatatctgccggcaganctgtgttcatcccagtctaatcgatcgtggtgaaaatatttacgtttcctggttttctgtatcatatgtnttggnagaggtccaagantcctttccatcattgctaaatgctccttactatcgtgtgttggaaatacggtaaacccaaganagtattcaataagantgcatcctatgctccagacatcacatggttgggaccaccctagggctaaaataacttcaggtgctctataatgtcttgtagataccaatgtactgtgatgttcgtcatcatatgttgcactaccaaagtctacaactttaatatctggntttattaaggtgcgttcatcacgttttantttggcnttatacgcctctntntagtcagactgcacaaatnagatgttttcaggctttangtctgtgtgagtcaacttattactgtgcaaaaaantcacagacttgcatatctgatatgccatctttctgatatgatccantcgaaatggtagaaa

SEQ ID NO: 686157 - DNA, 215 bp, Homo sapiens
  misc_feature (41)..(41): n is a, c, g, or t
  misc_feature (45)..(45): n is a, c, g, or t
  misc_feature (47)..(47): n is a, c, g, or t
  misc_feature (60)..(60): n is a, c, g, or t
  misc_feature (193)..(193): n is a, c, g, or t
ggaaggatgagaaacagatttctgctcacttcatgggctgncctngnattgacgatggtncaaacccaagattatcctcatgtaatttatgaagattatggaactgcagcgcatgacatcggggacaccacgaacagaagtaatgcaatcccttccacagacgtcactgatacaaccggtcgggcacatctcncggcctatgctgccggtggtgc

SEQ ID NO: 686158 - DNA, 250 bp, Homo sapiens
ggcacgaggtgagccaagatcctgtcactggactccagcctgggcgaaagtgcaagactctctctcaaaaaaaaaattataattgtgggaattaataatattaattggaatttgttttttgggctccttttatgtcaaaggacactttaacaatttaattaaccccaagggaaacccttggggggtatatccctccatttcaaaagggggaagggggggcccccccggaacacggggccggtttcccccc

SEQ ID NO: 686159 - DNA, 558 bp, Homo sapiens
ttcttacaccattttacatttgtgccaccagaaatgaatgagggttccaatttctctgcatccttgccaacacttgttcttgtctgtctttttttttttagccatcctggtgagtttaaaatgacttggaactagtggctaatgatattgagcatcttttcatgtgcatatttgccactcatatatcctctttggagaagcatcagatcctttgcctatttttaaatcaagtcattagtcttttttttttgagatggagtcttgccctgttgcccaggctggagtgctagtggcacgatctcagcttactgcaacctctgcctcccaggagaatcacttgaacacagaagtttgagaccaacctgggcaacattgtcagaccccccatctctataaaaatttaaaaaattggccaggcattatggtgtgcacctgcagtgccagctactcgcgagacttaggtgggaggattgctcgagcctggcagtttgagactgtagtaagtatgaccacgccactgctctccagcatgtgtgacagagcaagccccatctcaaa

SEQ ID NO: 686160 - DNA, 352 bp, Homo sapiens
aactcgagctcagtaccctcgaataagggccaacatccttgatacagcgaatatatatacagcatagtgtagcattttatcaagcaatggaaatacagagaaaaatactttttttatatttataagaaagggatatcttcgctcttttcgtcccagtgtggaagtgtaaggggggtgtgatcttagctcactgcatccttgtgcccccgtgtgttaatttgttttctccaaaaatcagcctcctgagtagctgggactagaggcgtgcgccaccacatccgttttttttggtttggtttcctgttttttaagtagagatgggatggggttacaccatgtgggccttatcgag

SEQ ID NO: 686161 - DNA, 381 bp, Homo sapiens
tatcatgctgaccttactctacaaagcatctatctatcaagactatgattatattgctatccctgagaagacatcagagaagcataagatacaatgaaagagcaagtagagttgtcatcctggacttcattcccagattacctgcagcaacccatagaaagtgatttaactcattgctcgatccttacttcccgtcctgtagtaccattattttagcagctggtaatagacttcatttcaatctctaaaaattatatgatctcacaaaagcctggttgcaaagggataggttggatggttgggagcacattcatcatgaccaaagattaatactaggaaagaggcctaggcaggatcttgttctacaaaagaatacagcat

SEQ ID NO: 686162 - DNA, 126 bp, Homo sapiens
gggtgacctagaggacccgtcacttctacacaataataagtaataataataaataataaataaataaataaataaatattatggatgatgaagggtatgtggtgtagatagagcgcggaccaccgc

SEQ ID NO: 686163 - DNA, 342 bp, Homo sapiens
gagtggcatgtgaattgttccatttttggctttgagggggtcagtttgggtgcttgttgtttccgggttggggggaaagttggttgggctgggagcggagccaggttgggatggagggagtttacagcgaagcagacagggccaacgctcgaagcccgaattccaggctctgggcgcaccacacgatccaaggcgcgccacactcgactgaatgggcacggcgcggagggctcttgcgctggctctctcgctacttcaactcacatgctcttgccccccaggcctccgcgtgtgactcgctgcagcccactcgcacagctgaacgcctgctaggctgaaagc

SEQ ID NO: 686164 - DNA, 99 bp, Homo sapiens
cgccgcccggtggcccataacttctcgcgtccgggctccgccgccgccccgggcctgcgctgcgacgacccggcgtcccggaggccgcgcggtgtccgc

SEQ ID NO: 686165 - DNA, 202 bp, Homo sapiens
actagtccaacatacgcctagatttaacatctgactgtgatatgctccatgatgctgtgtgtattggtagtaagaaaacaaaaattgggaggcttaacaaagtgtggctttgtataggtagtaacaactgctggattcttcttcactcaaatattttggggctaacacttcacagcagggtcacatgtccatgcatctgacc

SEQ ID NO: 686166 - DNA, 116 bp, Homo sapiens
cctgggggctggccacactagcccagcggtccgccctggccagctgcagcgactgcgccagcgccgggtctcgacccatcaaggccacacagctggtccggggccatggtgcagct

SEQ ID NO: 686167 - DNA, 199 bp, Homo sapiens
cgcgaagatctatgaatattcatgaaggtggtccttatgcacgcatatagtacattcatgtggcatgtctcgtgctgcttgcactctgagatgtagtcttaacatttacgtgtatcacagttaggccctaaatgtcaaaaaggtcttttcaggacttgaaggcactcaagtgagcagcctctgtaaagcaaccagctcg

SEQ ID NO: 686168 - DNA, 94 bp, Homo sapiens
gaaaaccttcatgcctaagcaacgtagcttacagagtttggaggcaagcttgcatcgtcatcggagtactaccagagagtcattgaaagcagaa

SEQ ID NO: 686169 - DNA, 407 bp, Homo sapiens
  misc_feature (407)..(407): n is a, c, g, or t
ccgtcatatgctaggtacgagctgttaatggacgagcagcctgcggaaagagcgggaccggaaccgtcccggagacgccgcctcgcgatccccgcgcgggcgggacccgggcggcgcatcatgaccctttcacttcggactgttcgtcttgctacttccctacttcatcacctacaagtgcagcggctgtcgagtacaacgccttctggaaatgcgtcaggctgagtcacctacctctttgtccaactctgcaagatgctgttcttggccactttctttcccacctgggaaggcggcatctattgacttttccatttggggggggaggttccaattggaaaaaaaggggggcccaagcgtgggatttggcagacctgataggtctaaaccttgtcatgtcccggaan

SEQ ID NO: 686170 - DNA, 837 bp, Homo sapiens
  misc_feature (119)..(119): n is a, c, g, or t
gtgatttaagaataaagagagtactttgatcatgacacataggtatcttgtccctctcactagaaacggagtgtcgtgtgtggcgcgccacgtgcttctatggtggtgctttgactctngtacaagattctagtgccaaagatcaaggttgtctgaaggagccaaatgtgtgaatgtgggtgtcggctgcggcagttaaattcatcatctcaacccagagtgtctggtctccctgctctttctgcatggttgtgtccctagtcctaacgcttcgggttcttctacggtgactgtggtaagaaggatatttagatcagtgacatgcgacggcacacgtacgagtatttagactgaaacaaggttttaccaaagcagtatttactcgtgaatgtgcgtagtggcattcgtggactagtttttgagcccatgcctatcggggtcctacttcaccctaataagaagagtacaacactaaaaatcgtggatctacaagagaaataagagacacaagaaaataaaagagaaagcacatacatagacaactacaggtgggagtggagccgcgagacctcaggagaatacaccgcgctactggaaggccgccaacagcgtctgcccggcttgtccaccaatcctggtcttgtaagccaaacgagaaggattgcccgccttcatgaacaaatgggagaccacgtcaaaattactgacaatgaacaagcacccatttggcagagccctgcgtacttgacaatgcatcacttggcaggaccacacgtcgcagaaaagacctgcgctaatgacctggtggctaaaccttgcaatgagagaagaccttcc

SEQ ID NO: 686171 - DNA, 217 bp, Homo sapiens
gtagtactcatcatcttgtgtttaaagcaatttccttggttcgggtcctcaccactttcgtatgccagtctcccatttatgtccctagtaatgcctatgcacaaaacaaaaaaagagaaaaaagaaacaacggtgggatgaaccctacggggtcaagggcttaacatctcagaggtgggttaggaggtacaggagcgttgcaggggatacggagctc

SEQ ID NO: 686172 - DNA, 884 bp, Homo sapiens
ttccagcgctcattgacccagtgcgctgatcagaattttcagactctttctctccgtggtatctgaagaaaggaaggcgatgcatattattatctcagccatttctcagaaatgcccggttggcacattttttgctggctcatgaccatttcagttgtggtagatgaaattgatagtcaagaatgagatacaggtcagttgtagcacttctgtgtttggcaaattatggaaactcgttactttgcaaagaagaaaacccttcttggttgagtaaatgggtgcattagcttcagacttttcagaggatatgctacaagaaaaatttgaagaaatggtgagcaggagcgctttctactgcatcaggagaccctacctgaacagctgtggcgggagaaacagctaaatctcagtgcgatgccagtattgacgtgcaccacaactcatgggtctatatatctgtgaagaaaatagacggagtaagtgaatatgatttccaagaaaagctttgggcttgtgggaatatattgatgaggacgaagatttaattttaatgattttaaaactggaattcgtttgcaaggggtttttcaaagagataagtgcccagtctgatgggaagatgatccatgaagtttttacgacagtatttgtgagatttccgaactttaaggagggattggccaggagatatacgggggaagacggtaaagggtaagtggagaaggccactattgggtgtggagattgaattttccggaaattattcaaggggtgtaaagtataggcgctcaatgtgcaaaggtgtgcaaaggggattatgaagacaaataggagtagtgacacgggggggatagggtgttgacatgtgtgtaataatatatatc

SEQ ID NO: 686173 - DNA, 598 bp, Homo sapiens
  misc_feature (303)..(303): n is a, c, g, or t
  misc_feature (362)..(363): n is a, c, g, or t
  misc_feature (365)..(365): n is a, c, g, or t
agatggtatccaaatggcatttggccagagaaccctgggaagtctgaaggcttcagccgtgattatgaggctgccacacaagggtgatgagggaaataaatgacaagcaaagtgaggtaggcaatatgacctctattatcagtgaggtgagagcatccaaatctttgtaagcagaataactgggttgagggcttctttacccagttaagttaatgacattaggacatcacacttgccttttcaacttccatgacccaactgcagcccctctaaatcaagctccttaacttaccactctattgnaaccagaaaacttcattctcctacagtacagggaaagtaccagagagaaagacagaganntntccagaaacggctaaaactggtctggtctaggctgacctagccttctctgggggagaatacaaaaaggtgtgggagagaaatgatgatgatgaagaagaagaaggcggcaaattaatttggccagttttaggggagaaccttggtctgtgttacccctcagccaggtcctgagggtagcagagaacggacaacatggctgggctctggatctcttaaccaaacccagcagctc

SEQ ID NO: 686174 - DNA, 133 bp, Homo sapiens
tactcatatgtgccagtgtgggtctgagtggggtgggattcccatcagactcagtaaacagatgaaccccgagagtaagccatcactgtgtctgtgcagtggacttctcccctcctgggcacacattatggag

SEQ ID NO: 686175 - DNA, 938 bp, Homo sapiens
cgtcagtgggtggcggcattgctcaacacaatttgccctatattattctgttccagattgaagagctgggttttagcgggttctttgtagtggcatgccgggtgttcctctaaacacagctgtcttctggaacgcccgtaaaacaattatcgcgtggtagtctcaaacgtgtgagtgctggagcgtcttttaatggcccccgccagcgtccttaaaaggggcaaaagcaatggattgtgccagacaggaaaacctaccagtagattttgggcccactccatattcaacgctatgagttttccagccccgagtgagaaccggggggccccctgttccccgagtgacaaaatacggggagaaccttgtatgcagagaatagatgctctgagaaaggtgaggctataaatgctttttcttaaaaaattaaagggcgcgacccaagcgcacacgaagtttagatgctattgtaagtagattttccggcccccctgttctctttgtgatgccctcgtccacctcttcccctcgcggtgtcatgatgtaccacgacacaccctcctgtttagtaagcacaaaataacacaccagagagcgttggatccagttgaacacgacatcctaattgaatgggagaatgtacatgttcgtcaaccccgacagtagggaagcacactcgaaggagtgtctctgtattacaaatggagagtagtacagtgtgtgtgccacgcaaaggcaaattgctttccacggtcgcgacgagaaatgtccacaacaggatacccgggatagatacgggcaactgttttgcgagaaaataccagttaaactctgttgcatggggctcatagacaataaacactgacgcacgaaagatacttgttcttgtctatggggcttcttgaccaaattggtgcccaaaatccccgatggaataccca

SEQ ID NO: 686176 - DNA, 812 bp, Homo sapiens
ggaggtcgtgatggtggcgccggaagcgcaggttctgtcctcagtgcgcagtccctgatttggagtggtatgagaagtccgaggaaactcacgcctcccagatagacctacttgagacatggctctacggcaggagcctctcaagcgcttcggagtgccttttgtccaagagactgcggatggtaccagtggtgttgcctgggcctgtgagccatggacggctgctgtcatggttcactgtgtgaactactaatagctgtatcatgtatcaacggccagactgtattcccttctgccctagttgaagcacgcttaatgacaacttattaagcgaacaaccgttctccccaggcagaggaggactgctgatagaagaaacctctggggccaccacttgatggtgatgcagtcggggaatgtgccaaccaagccactgggcaggagagcttggatgagttgtcctcacgtgcatcctgggaaggacgtatcttttgcaatcggagcctgctaggtaccggcggagtgcttgatgctccttgggtggcaaatgccttaaggcgccccaaggagtccttctgcacgctcgacttgtcttctgcgtggcccccctactgctgttggaaccagtaccccgtaaatccccggtgtgcttggtctgcgctgtcctctatctggggcccatattcgtggctgattgccttgtagcgcagcttctggctcactccactcctgggcaccgtcgtcgtggcacgggaacccgcactttggacaaggtggtttcacccgagctcagtatcgagtgccgcggggct

SEQ ID NO: 686177 - DNA, 296 bp, Homo sapiens
gcggccggtgcgggtgtgtcgctactgtgtcttcttgccgtatgctcttgcctgtctcatctgaattaaatgccgcgcatcgctggttgaccgcgattcccactgtccctctcttctagccaccgactgcctcgccatctaatcggtgttgcgcatgtctgggtgaccgaaataccctgtggcccttgcttctattctgctacagcttcagcgcggggcatcgtcttatgagtcgcacttgccaggcatacaaacttgcgtgttgaccttcattctagcactggtacggattcacg

SEQ ID NO: 686178 - DNA, 120 bp, Homo sapiens
cccccccccttttgggaaaccaaattcccctggcctttaaaaacgggtttttgaaccttttggaccggccttccgggttttcccctttgggcctttaaaaaaaattggttttttggggga

SEQ ID NO: 686179 - DNA, 430 bp, Homo sapiens
  misc_feature (51)..(53): n is a, c, g, or t
  misc_feature (55)..(55): n is a, c, g, or t
  misc_feature (58)..(59): n is a, c, g, or t
  misc_feature (61)..(61): n is a, c, g, or t
  misc_feature (82)..(83): n is a, c, g, or t
  misc_feature (86)..(86): n is a, c, g, or t
  misc_feature (168)..(168): n is a, c, g, or t
  misc_feature (183)..(183): n is a, c, g, or t
  misc_feature (204)..(204): n is a, c, g, or t
  misc_feature (217)..(217): n is a, c, g, or t
  misc_feature (220)..(220): n is a, c, g, or t
gatctgtgcatgaacagtcacgtgaccagtatatggtagctactaaattcnnngncgnncnacgtgagcagtgcatgatagnnacntgatgtgtgcatgatgagttacgtgagcagagtatgatcagccacgtgatcagtgcatgagtgccacgtgatcagtgcatgntatgtcacgtgacangtgtgtgatcagccacgtgancagtgcatgttcngcnacgtattcagtcatgatagccacgtgatcagtgcatgatcagttacgtgagcagtgtatgatcagccacgtgatcagtgcatggtcagacacgtgaacattgtatgatcagccacgtgatcagtgcatgatatccatgtgatcagtgcatgatcaatcacgtgatcagtgtatgatcagccacgtgaacagtgcatgctcagtgtcgacg

SEQ ID NO: 686180 - DNA, 426 bp, Homo sapiens
cgagcggggatcagccgaagtcgggagaggggcgcttccacggggcgggaaactggcgcgcgactctgggggaagtgcaggatggggggacaggggcgctcccgcgggggtggatgggggaccatagcggggctggcggggcaggggccggcgcacgaggctggaggaggggagcgcgcgcttctacccgggctgggtcgccgaggtccgcggcgcatcgtggcggcggtgggcggaggggggcggggggcacctcttctcccttgtggcgcaggtgggcgcgctctggaccggcttgacgacccctccccgccgccccacctccctggccaaaggttctcagcttctaatcagggacatttctagtccacagcctcgaagccatgggttctccccggccctctgaagccgccacacctgtgccag

SEQ ID NO: 686181 - DNA, 135 bp, Homo sapiens
actcatgtgtcggtgatattgacagcattttcccaaattcatttgaccaatgaaccattttttccacgagccataccatgggacacgtcgtgaaaagaattgtcgttacatccctctttctctcttggcccccgg

SEQ ID NO: 686182 - DNA, 748 bp, Homo sapiens
  misc_feature (528)..(528): n is a, c, g, or t
cccttttgcattaaggacactggaagggttgctaaaatgattcttgctttcattgtgggaatagattaccatgttctgatgtgcagctatatgtttgatgcctgagtagagttataatcaatcgtgcagcgtatccgctctagataggaagaatagagtggacttgtacagctatactttgtgactcttgcacgtaattcgtggcagttagacaaggttgcgttgcgtgaacatgacagtcgcgccagcagaatgacaactaggagcgagcacgcttggatgctaccgatgctgtatgcagttttctaggcgtgccatcattgaaaatggattacgtgaagttgctgttgctacctcaggctggcaaagaggcgagcgtaagaagtaacgtccatgcgagaagaagatgaagcttaactgcttttacatgcacatggacatggcaggtaatttgaagtgttaagagattctattcttacgaagaacttccatgggcacatgatattattagttaatactcgtggcaantccaagtgccttagagtacatagttcatcaggagcatgttaggtggaaagatccagagtcttctcgagagctttgataaaggccaactgtgcttggttatgaagcttgtggctcttgaggtatagattcaagattgcttgtcgagctgtaagtatgaatagtgttgggtggataagaacagagatggttgtggagtgtgatgtctggtatgtttcgggtt

SEQ ID NO: 686183 - DNA, 1017 bp, Homo sapiens
gagttcattctcatgttctaccgggacacggcccatcgagcgggctcctggaccatatactgtgggtgaaagtctgctaactcgagaaggatgcgagagcactgtcgaccagtgtgagacaaggcaagcctgcgagataccgcttgctagatagccggtcgccgtctttccaggcaacgttggtgctgctcatcgtccgtcggcgtggcttggcgaagatccagatgactgataggacatagatgagcttttgcgataaagcacggcggcatgccgtgcaaggatgcgatgtgaaccgcgtcatgacatgaggtagacgcgacgacgcctgcaagacatatcaggacttcaaccgctggaggaaagactacctgcgacgaggacatccgttctgggccattcaagtcccctgtcagcgcggcgtgacttctatcgcgcgttccgaacttgcttccaagctcgtaaatgcattgggagacggattcattcttccgcagtgggaacatcgagcacccggaggacaatgctcttcaacacgtctgtggaggtgctgcccttcgacaagcctcagtcagacaaggaggccctgcatggagggccgacgcggcaccctccggtaccctcggagccccgactggctacctccagcatcggctccttctacaagggagtggcagagggggagaaggtggacccagccttcggacctctggaagcactgcgcctctcgatccagacggactccccatgtgtgggtgattctgagcgagatcttcctgaaaaaggccgactaagctggcgggcttctgagggtaccctgtggcagccctgaaagccacatttctgggggtgtcgtcactggctgtcccccggagggccagatacggcccgcccacagggtctgctgggtcgggcttgggccggcctgggatcgcagtggcccggaggcctaggagctggtgctgacccgccgacggacgcggagaggcacgcggccccaatgtgctgaggccggac

SEQ ID NO: 686184 - DNA, 1796 bp, Homo sapiens
tgcctgtagatgccagctaccaggtaggctgaggctggggcatcatgtcgagtccaggacgtcaaggctgcagtgagccatggatcacgactactgtcactccgagcctagcacgtgccataacaatcagaatagcagtgcagaacacatcaaatcaaatgccatggatggatggcatcagatagatgtgcaatccttattcttataagagaataaatgagtacagggtaagactgcgtggtcatataatagctggccagagcttgtcaagacaacagaggcccagtgtacaactttttgagaacttggcctatgatcaggtaaagcaatatatgtcacggaagatacatcttaacacatcagccgatagagaggcaaccatcaggtcttcagtggtggtcccgacaacgtgcactagcacatcagcatatctctgcgctcacaatcgtctctctcccttcacatcattaagcaaaaataccccaggttaatttcaggtcgcttaccaagtttgatatcttaaggagccattggttcgttagggtccatatcacggcctgaaaaacgcagggcctcttaggcgggtaaccattaacttagttgtacgcttatacattgttagtattatgcgctagagacacacttacgttgccaaaccctatgcgcggttcccaagcatcccagggtggaacttatcgttccccttgggatggaccccaccgaggcatctgttcacccgctagacccattatgctaacattcgcaggggcactcctgcgtggcgtgccatatacctctcatggcagacaaggactgataggctcatacggagaacgtgcaccttcgggcgcgtggccttcacacagcacgctacttcggttacatctcaagcctcacccatgtcttacacacacccggttctagcatacactgtgcaaacgggttacacaacacccactactacccactagagtatgctacacctccgtcactaacaacgtcaccccccaacgacctcacaccttcaaattgacacacctctaccaaacaacgacctggggggctgtcacgtcaacatctgacaacctgcgcccatggcactacaccacaaccacccctaacttctcacagtacacacgcctactttctaccaaagccctcctaaccacgccaatactcttgcaacgacccccatctccttacacagacacacaacatcctcccacgaccaccacccagctactaagtctcgccaccccacactctctcccgttctaacataacaactgtaactagcacacgccacacacacccgtcacgccactacttccataccccactcacacctaatcacccacctctgcagcccacccacctctctcacaccaactccacaaccacctccctccactaatctacacagcacctcccgtcgaccactacccagcgaccacttcacagtggcaagcagtccacgccacagaacgggagaacatttcacatcgcacccactcatgagcacccccaccacccctcaccaacccatgcccccaccccccgccacacaccacacaaccacaccgccacccgtgctcatacacactacctcatccccccacatcacccctctctccccacccactacacccccaccctccccaccacactcacctatcctactcaacactacaaccacaccacccaacccccacacactcagctccctctacccacgcacgccacccctcgacccccaccatcacacctccacatcaacactcgcacttcccatcccc

SEQ ID NO: 686185 - DNA, 496 bp, Homo sapiens
gaccctccttcctctctacggtcgtctcactatttcctaaaaagccccgtgctgtataaatgctaggcatatgttattttatttagcccttacaataaagccttggcttgtgagtgatcagcattggctgcagcaccctgcctccaaccacctgaaggtgtttacagacggcctctgcctctgagtagctctggagtccgagccatgcacaggacatcaccaagcctcagcttcctcacgtatgaaaccaaagaaaacgccagcctcatgtcaccatacagctggagagtcacagagcaaaggtgccaggtccccgccattagctggcgctcaggaaatgctggctgcccctctcctgccccgtcccacagccttcacgtgagattggcccactactcacacacctctggcttcctggcacttctgtcaaaacctcacatctcttaggaaatagtgagacgaccatggagaggtggaggaagagagaagggaaaga

SEQ ID NO: 686186 - DNA, 425 bp, Homo sapiens
acggggaacaatcactttggtgaggatgtgggatgagcgagctacgcggggaaacgtgccacttggcttccaggaaccacttgcactcagccaatgagcatgaagtaaaaacatgtggtgttggcatgggccaagtggaaaacagcgagccctatgcaccatctggtggcgcagtggcagtgagagagccaagtgactggcccttccctctggccagtggggtttgcaaaccaaaagctgccttgaggtatagaaggggattgtgccacagatatttgtgacttgtagaattcgtaaccacaaaatgctggttgccggcccacatggcccaggtggcagtgacaacctctcaccctggaatgccccaagaggacccaaagcacaacaggtggattatttcagcccaggtgatgtgttccctgctt

SEQ ID NO: 686187 - DNA, 427 bp, Homo sapiens
agctagcattgggaaagagtatgattttatcgtatcgacagttgttttgatgtttttgcaagcagaccgcattcctgcaattatcaaaaatatgcaggagaaaactagtattggtggctataatcttatcgtttgtgccatggatacggaggattatccttgctcgattaacttctcattcacttttaaagaaggggaattggcagactattacaagaactgggaattggtcaagtacaatgaaaatccaggccatttgcaccgtcgcgatgagaatggcaatcgtattcaactacgctttgcgaccatgctagctaaaaaatcaaataaacatgaatgaagattgggaaatttcctgatcttttgtctttttttcgaataataaagaaaaggtgggtaatcatgtttgttgctagagatgctagct

SEQ ID NO: 686188 - DNA, 240 bp, Homo sapiens
ctacagatgaagtaccaggtcgtagaaggtgagcagcaacgcaagacttgtcaaggaaaatgctaagggcacgatgctcttatacagctggtctcagctaaggctgcagaagctattcgagcagcagcacaaacaatgctgccagagaggtactcacgcattttacataactcgttcacagatggcagcaactccctgcaagactgacaaacagccaattacactatgtatgtcattgaa

SEQ ID NO: 686189 - DNA, 406 bp, Homo sapiens
  misc_feature (1)..(1): n is a, c, g, or t
nagaagaaagagtgtctgacacatcgagaggagtccgtctgggctctgtcagagagctcagccttggaatggccaacccccaggggaagattatcttctcactccatcggctttccagctccccatccatcctgctgaaagcttcttccctcatccaataaaatctcggtattcaccatccttcaagtcgtgtaggacctgattcttcctgaatgctagcacaaagacccgggtaccaagagcacagggcgtaaaaggctgccaccttgactctcctctgagctggtttaactctatagccatccgcgacacagcatctgctaaaagcgcattaattgtcacacacccatagatgctgacatggggctagagcccaagagcgctcaccgtgtctcctcgcgtgccg

SEQ ID NO: 686190 - DNA, 262 bp, Homo sapiens
attttttgggatataccaggcctgggtacaggggggtcttaaaacaggttttattaaaaggatttttacccaaagaaggttatccccgcaaagagttttgaaaagaacacttgaataaattttgccttttttcatccaacctaactggtttttgaaccccttgaaagcacgtttgtaaacggggtgagacttttccagagactcttaaggttgggaattattaggctgtattaaggcccataacgttatttcggggttccag

SEQ ID NO: 686191 - DNA, 122 bp, Homo sapiens
tggacacattgttgttttcttaatatgtcattccaaatatcagatgcgttgttatacagaagtcccttgccatcctaaaagccagcccacttctctctaaggagaatggcccatttcctcat

SEQ ID NO: 686192 - DNA, 416 bp, Homo sapiens
tgtaaagcacacccggcccggacatcgtcgcggccaaccgcctgatgatccaaggcgaccggcactatgactacgacgccttcggcaacctcatccgtgaacggcgcggcaaaagccagcaactcgtcactgaataccgctacgactgccggcatcggttaatcagcatcacaaagcccaacggcgaaaccgccagttatcgctatgacccatatgggcggcgcatcagcaagaccgtagacggcaagaccaccgggttttctggcaaggcgacaagctgattgccgaacaccatgcagagcgccatcgcagctacctctacgaacccgacagcttccgcccattggcgctgttggaaggtttcggcccaaaagaaaccacgccctaccactaccaacttgaccacctcggcaccc

SEQ ID NO: 686193 - DNA, 888 bp, Homo sapiens
tttggcccctgtcggttgtgtgcactgaattcggtctcaggccaccggcctccaccttgggtttcttcctggtgtatggtccccaatcgctggtgggcccagtgtctctgggcatgccagtccgtgttacccttctgtactcgtgcctgctttctcctcaagcttcctctggagacctgatatgttgatgccgttgctgtgctcaatgcaatgcaagagtggctaccgtctatcgtagcccctgggatcggtacggtactctggtgacggtatgctatgccggtgatacgacgactggatatgaaagacctcatttgtgatgtcttgtactcaatctcaccgtctggatccctatgctgctctatgctgtcacgcgtggtcccaagccccgtcgtgcagccaccgctcgtagtctcaaaggggtggataatacgataagtataataatgtaactcttaagcaacaaaggcatgtcctgtttctgcgacaatctctggttccatcctctggcatgatgagagtgacggatgactggatcaacactgtgctgtcacagtttagagacgggcgagaagcgaacaccactgatgggacatcctggggtaggaggccaggcggtcttggggtctgactggggacaggtgctctacatgggacagacttcacgagacttgctgaagtagcagtcgccaagctcacagggcaagtcaagggcacaggccagagaaagggtcgggcctgcagccatgcacccccacacgttccccaagcccattcctcaagagactgaagggatcccagcccctaaggtgggcagaggcagaccctccccagagctccttaggaagaagacagacatgggttcattgaatgccgcctaggagttaa

SEQ ID NO: 686194 - DNA, 335 bp, Homo sapiens
tctcaaagagtctgacacagggtaatttcatacaattgttgatgttgataaagcattcgtttttatagctgagccattggagcttattatgaaccgtaaactcatttagtcgcatggttgtaaccttagtgcaaagtaaaaagggaaaatttgacttaatagaaacaatagtagtattgataagaacaaaagtcatcctccctgcctctctgagaccttgaagtcctgtgaggaagggaaatcgtaatgtaaccaaaggtaaatctgtgtaactcatttccaacaatgttgaaaggcttgtcttagaagcattaaaggagtattatgtaaaatca

SEQ ID NO: 686195 - DNA, 258 bp, Homo sapiens
cagtggtttctttttgggagcgtaatgtttatggatatcaaggtgcttcataaaaatcatgcatatgtgatatggccagtggcttgacttatcttgctttgtcttccacgtgtgcacgctgtatataggggtcaatgtgttgtgctggagtcgagaataatgtggtctagaatagtgcactgtatttagtgtggattgatcagggatgtcctctttaatagccatatgcaattaaattgagtacattatttatgaaat

SEQ ID NO: 686196 - DNA, 248 bp, Homo sapiens
ggagaaagggccagtttattactcacagggaacccagcagccagaacaggatctttagtcactttcccatgcccctattcccaaaaagagggcatggggatcgaaccagctgggcaggcagggggtctgcatcccaggagagggacccgaaactgggaaacttggaaattttatcagggctggggaggacctgccttttttttcctccagagatagatgactcattttccagcaacacagaggtcagc

SEQ ID NO: 686197 - DNA, 367 bp, Homo sapiens
cccttagtgtcactgtccaagagacaaacagatgtgaatagcttaaacatcttaaaaatgcaccaagcttatgaagatctcaaacaataacttgaatgtgctgtacatactcctgtcaaatgaagtattgcctgtacaccacttctcttgcaaactgtcttctatttcctttcatttgacctagatcgactacgagacctagagaaggatcgggacggcttgtgatttctctcccgagacagcgatctctctcttctcctatctctaggaagggacctgctccggctgcgagagaagcttctccttcttggagatctgcgacgagttggaggactcctcctacgatcatcatctcgagggcgacgac

SEQ ID NO: 686198 - DNA, 279 bp, Homo sapiens
tggtcgtctagaggatcctcacatagaggcaggtagaataggatcttttcagcttttctgctaaggaacaaatggccagctaggcatagtggctcacgcctgtaatcccaacacttggggaggcagaggcgggcagatggctttgagctcaggagtttgagaccagcctgggcaaaatggcaacgcctgcttttttttttttttttttgggaaagggatcgggctcggcgggccaaggtcgggatgtgcagggcaggatcgggcttcaatggtcagttt

SEQ ID NO: 686199 - DNA, 220 bp, Homo sapiens
  misc_feature (61)..(61): n is a, c, g, or t
gttatagaatttcagtgttgtgcttggcatggtggagtgtctggttcagtctcctcttgtnttatcgagtatttattcctgtgcttcaggcggtaacagccgaattatcggtgaccatcactacatggagatgtttggtcgtggctcactctcttgcttccgctctatactctgggctcctctctgtggcaagacactacttggccttctgtcgtcttct

SEQ ID NO: 686200 - DNA, 1471 bp, Homo sapiens
  misc_feature (1471)..(1471): n is a, c, g, or t
gtctctaccaagaaaaaaaaacaaaaaaaaaaggttaaaaaaacaatttagctggacctggtggttgcacactcagataggctgaggtgaaaggattcctttaacctggggagactgaacctgcagtgagccatgatcgtgccactgcactccagttctgggggacaaaggtgggacccttattcttcaaaaaaagaaacaaaaaaagtctgttcctctcctctccaacttactggtgatttgccattattggactcactcggtatgagaccccttccctgtgcattccgggatctccctataaagggttcctatttaaatagctttgaggaagagggcagaacttttaaacagaggaacgttgttgttagaagttgaacaatgaggatatatagcccattatcaccacgcgtgggcccgaggacaccttgaaccagccgttccccaaattctctatatgtggccaaccgagtggggcaaactcaaagaggtgtggccatgcccaagagtttcaaacctctcaaagggggcgcctgaagggtaaaactccccacattgtggtctcccaactatttacagagggacacaaaagcccccctggagccactgagaagagctgggtagtgaaagcccccctcaaggtggaagcaaaaagagagacgcccagtgtgtgcttgtgcgggaacagaatagaaatcccccctttgtgtgttaaccccagtgagtatgtgagggggggagtgtgactcctctctctcagcagtgagaatatttaaacaagctctctagtagcgccccctatttttctcatgaggggataatggcgcgtgggagagagaaacttatgggggacaatcgggctaccacgaagaaatatttattctccctggaaggaaagacacgccctgttatcacattatatgaggggcggcccccccccagacgtgtttttaatatgagcagcgcaccccccaaaagttctctgaattaactaccactggaggggatagcgaacaaaacatccctctccgttgacacggcgggcaacagcgggggtgtttcccgacggtgattggcgcactaagttagggcgcgcaccccggtggaaatagaaggccaaccacaagagaagtctctgctatcgcacgcaacatatctttcatatccaacatagtggtgtggtggttccaccacacaattatatatatttcggcgacgatagtaagaagaaactcttccttcaagacgaaaaacacactacagcggggggagctaaacaagacgcatattatcccacctttataggtagcgacgaagtcttaaaacagatcgaaccgtataggaatttacgacggcagcacgcaaaaacgaaggcgtcggccgcaagagacgaacacatggtggtataccaccacaagagcccagaggaagaagacagcggtatagaagtagtactagaatacatcacccn

SEQ ID NO: 686201 - DNA, 137 bp, Homo sapiens
gggcgattcggatctgtgcttggtgtgtctcctttaaagctgcagtctgacatttcgagggtagtttggtgttcctagagaggtgtttttgagattcctgagacaaagtggtctacagtgaaggccaggcttacgta

SEQ ID NO: 686202 - DNA, 558 bp, Homo sapiens
  misc_feature (439)..(439): n is a, c, g, or t
tgatacggaaggcatgagcaatcgtagagaaattctcaggagagtcggacaagaagagtcggagagagaagtacatgaaacagcctgtaggggtggctagaagccagggagggggtgggaaacaattctagagctcccagaaggcaggcaagatggagtcacacttccaacaaagccctctgcacaccaaaaccccaggaagtatggttttgctaggtaagttggctttggagacagaatctcactctgtcacccaggggggagtgcgatctcaattcactgcaccctcggttggcttccgggatccaagcgattctggtgcctcagcctcctgagtagctgagattaggggcgggtgccaaaacacccatctatttttggtattttaagtagagacagggtttggctatgtgggccaggcgggtctcgaactcccganctcaagtgatcgaccggtctcagcctcccaaggggtggggattacagacgtgagcccacgcacccgtccaaggaagtatggttcattgaaatacagtgcataaggttcctagcttggtt

SEQ ID NO: 686203 - DNA, 93 bp, Homo sapiens
ctgatcaagaccttgatccctcagacttgactttcttccttgtcatcactcgatttctgaccagtatgccctcacttcaacccgttctttgcc

SEQ ID NO: 686204 - DNA, 490 bp, Homo sapiens
tgatttcgaaacgaggagggtggtccaactgccaaagtcaagcaatggccacatcacgcttcaatggttatattccagcgatgatctcacttgagctctaaatcttgcaatcccagagaaattcctgacaaaagcgttgccacctatttattttcgcgtcaggtgccaggtcttagttaagattcacaatctttaaaaagaatgagattcacaataaattaactccttcctcatcttcttgataaattcccgcatacctacccaattcccaagtaagcatcttgtagcttacatatacctactataccgtccatgcagcttggacattggggagtgcgacagtcctatctagcacatcatacaccatttgccacagaaaggatctcttggggcttcccgtggggtgagattcaagcaggacaataacaagaggctggaacaccctacagatgtctttgaagtcaccagttgtttgatatatctcccctgt

SEQ ID NO: 686205 - DNA, 100 bp, Homo sapiens
ataataatccccccccccccccgagcagagaggcaagatggctacggcagggggtggctctggggctgacccgggaagtcggggacaccaacgaacaaag

SEQ ID NO: 686206 - DNA, 411 bp, Homo sapiens
cgaggcccatctctactaaatatacaaaaacttagccgggtgtggtggcgggtgcctgtagttccagctactcgctgaggcaggagaatggtgtgaagccgggaggcggagcttacagtgagccgagatcgcgtgactgcactccagactgggagagaaagcaagactctgtctcaaaaacaaacaaacaaacaaaaaaaactagttttctgtctttttctttttttgagacaaagtctcactctgtcatccaggcttacgtgcagtggcctgatcactgcccactgcagcctcaatctcctaggctgaggcagaagaattgcttaaacccgggaggccgaggttgcagtgagctgagattgggcccctgcactccagcctgggagacagagcaagactctgtctcaaaaa

SEQ ID NO: 686207 - DNA, 295 bp, Homo sapiens
gccgcagaggccggagacctcctcggactagttcggcgaggagactggccactggggggtggctgttcgggactgagagcgccaagggtctttgccagcaaaggaggttctgcctgaattgagcctctctgatgatggagatgaggtgaaggtcttaggagcgggccctggggcgaggccatctctgcctcctccttagaagacgccacggtggagcctgagtcgcaggacacatccgccagttattcattctagcacttaagggtttgtaagttccctggatctcacggcacaa

SEQ ID NO: 686208 - DNA, 139 bp, Homo sapiens
actactcatgcagctaatggtagcgcaccctagcaagatcaagcattaaccttccctctacacttatcatcttcacaatcctaattctactgactatcctagataatcgctgtcgacttaatacaagcctactaagcta

SEQ ID NO: 686209 - DNA, 345 bp, Homo sapiens
ctgacgcttggtaccacctgaatggatccaagtatactgagatcaacataatcatgaattcttctcccactgtaaagtttgaggaggtaagaatctccttgacttagcaaatttgggcttataaatgctaggtccaactagactttactggcctcaatcccttagcattatcctgcaaaatactgatgtatactttttggttaatacctttgtatcactttcgaccacctagtgagggttaggttgtatgaagagatgccattttggttaaataatctcaaggaatctgtgtcaccgactaagactctagttctcgtccgggttccaatctctggtctcttgcct

SEQ ID NO: 686210 - DNA, 103 bp, Homo sapiens
aacatagaatgcagtaactagcataaaacgattcttctggctcatgttctgaagccaacagcagaaccctgaagttataagtgacatgacatgtgaggcagaa

SEQ ID NO: 686211 - DNA, 934 bp, Homo sapiens
gctagcatactcgtcgctgtttattacgacagtttcgccggatcctggggtgcccctcgtgtgtcgtacacccgtaacttttgggggaccccctaaggtgtttgggaccactgacacctgggggtgttcccagtccggccatgggcgggtccccctgcgatgtaaggctgggccgggttcaaacctgtgcccgtggaaggtaatatcatttgtgcggggggcgtgaatactaatgctgccttccgctcgcccgtgggaccaccctgttcaccgggggtcccaaaaaaggggttgtgctgcccccggaaaaagacagaagggcggggctccccccgccatgaaggcttttaagggccccaaccacgtaatgccccctttgatgaggcgtccccaaagccatgcgtagcgcgtcccccatgcatttgtcgacattggggacatcttccctcaccccccctcacttttttcccctctgttcgcccccaaaattattcggcggtcttatgcgagaacgttcgctctcacaactatcatcgaagatcatgcgttttttgtttgcgtcctcctgtttgtaacactcgccccctccacaccagagggtgttcctcgctccccttatctgtgattattgggccgttgccggagaataagaacactttttgttgtttcgggcgtccataggtatagaaggcaaaagatcccctgtttcctcacgttgacaagggaactctctagacatatttgatcttttgatccacacatgatggcactcaaccacctcccatagccccctctgagggggtagacacatgtcgtctaggaaaacacaatagtggagttagccccacccggtggttatacagagttgacttgttcttaaaaatcgtcggtacctcaccaagtattttaagggcagcccgcaaacgcacatgaa

SEQ ID NO: 686212 - DNA, 191 bp, Homo sapiens
gaggatccccgctcagccactggtgatccacccatagaatgcagtatccataactgccacatgtacataatagtgggttataactcaccctcctttgatcattgagtaaacttttgtccacatttttgacatacttgtgatctagcgatttgaccacgattccagcatgattcacataatcgttttctctc

SEQ ID NO: 686213 - DNA, 378 bp, Homo sapiens
ggggacaaggccaattagccatctgtgtgcctatactcataatatcctggctgtcatcaatataataataacacttgtatttgggccgtgcttcgcatttgttaacaaatggctgtgatagtatggagtatcatgaaagtggcctgcttcgatttaagcaagtatctagacatgggagtgatccaccctcttaataaaagcacagtaggcggacggcgttttgccactttggtcatcactggcaacaaccagcctatagtatcacagcaagggacaacacagctcagtgtagaaaacaacaaaacttctattacaagtgacatcggcatgcagttaactgacccgaggactcaacatatcttcattcagcacagcact

SEQ ID NO: 686214 - DNA, 115 bp, Homo sapiens
tgagttaccataggaatccaggagcactttacacactaatcatcttgcccaggttcacagccttgtttcgttatcgttcgttggtcatagatgtagcattttactcatggtcttt

SEQ ID NO: 686215 - DNA, 212 bp, Homo sapiens
agtcatgatcatctactcagcctcccagtagctggatagctcacagcctactatttttggtatatttagtagagaccgggtttcactatgttggccaggctggtctcaaacttctgacctcatgatccgcctctgccttggcctcccaaagtgctgggattactggcatgagccagcgcacctggtgcccgattcttctaagaacaggtgtc

SEQ ID NO: 686216 - DNA, 952 bp, Homo sapiens
gggggcggtgggtgcgaagcgcgcatgcgcgtcgcacaagggtgcgaggaagtagtgagcaaatcgcggactaccggggctgccagtcgctggatcccggcttgtgcgctcataggcggcggacaaagggtgcgggctcttcgccctttgttgtgtcctcctttctttcactaactttgcttgactttccagcctcttccgaagttcgttctgtgccggcaaacagccaaaggggtttgaaaaaccgtccacgatgaccaagctagtgaactcaggtcttctgcgggggagggtggataacgggccattgacccaagggcttcgcaatttggacgaagaagtttggggaaaagaatcactctttgtctccctggtggctccgtggggaaagggtgattgggtgaaatgaacagtaggacagagaagctttaaccaattgaaataagggcactctcacaaggggggttgacaagcaaaggttagtaaggattaacatttattcaacaagtggctcgtgttatgaggggaaagggggagcacccagggagtcaagtgtcgatatgaacataaggtacattgtacaaccgtgcaaaattgagggagaagaatattggtgattacggccacatgtttctggaagccagggaaaaccactgtgctttaccctctgggggatctggaccaacggagggcaccggaaatataagtgcacagggagagacacaaaacttgggagttgagagaaagggagtgtactaaaggaaccacaggtaatataagtatagattggacaacaggtaattttgaaataacgtagcaaccgtgtaacaacaaaaaacaatgtgtcgcgtctgcctagaaattaacaatatggggggccaagtatgatggattcgttcagagaaggtgggagtgtgttcaaaaagcggggggaggtaaaggttggagcatg

SEQ ID NO: 686217 - DNA, 877 bp, Homo sapiens
  misc_feature (34)..(34): n is a, c, g, or t
  misc_feature (96)..(96): n is a, c, g, or t
  misc_feature (107)..(107): n is a, c, g, or t
  misc_feature (110)..(110): n is a, c, g, or t
  misc_feature (155)..(155): n is a, c, g, or t
  misc_feature (174)..(174): n is a, c, g, or t
  misc_feature (191)..(191): n is a, c, g, or t
  misc_feature (209)..(209): n is a, c, g, or t
  misc_feature (213)..(213): n is a, c, g, or t
  misc_feature (216)..(216): n is a, c, g, or t
  misc_feature (249)..(249): n is a, c, g, or t
  misc_feature (264)..(264): n is a, c, g, or t
  misc_feature (274)..(274): n is a, c, g, or t
  misc_feature (288)..(289): n is a, c, g, or t
  misc_feature (293)..(294): n is a, c, g, or t
  misc_feature (305)..(305): n is a, c, g, or t
  misc_feature (308)..(308): n is a, c, g, or t
  misc_feature (316)..(317): n is a, c, g, or t
  misc_feature (335)..(335): n is a, c, g, or t
  misc_feature (348)..(349): n is a, c, g, or t
  misc_feature (353)..(353): n is a, c, g, or t
  misc_feature (370)..(370): n is a, c, g, or t
  misc_feature (446)..(446): n is a, c, g, or t
  misc_feature (456)..(456): n is a, c, g, or t
  misc_feature (504)..(504): n is a, c, g, or t
  misc_feature (869)..(869): n is a, c, g, or t
gtggtactgactgtacaatgaaagcgaaaaaganaaaaaataaaagcaatgtacatgttgccaagataacctgaaagaccaccatgaacggggggnacaaccatggntgngtggtggctccgcagagctggctctccactcactcgccaatttcngggtacagtggtggggtgnggtgtgtgcgtcggtgnacgggcaggcgggaccangggnggngactaccatgggtgggggggtctttgggggggngtgggccttggggtngggggggggntcgggggggcaggnntaanngggttgggggntgngctaaggnntggggggggtccctttcnagagggggactgnncggnaacgggggggggggggntgggcaccatcccgggtcatcgggggggggggaagtgtgctcccaggtaggcggggtcagaccacccccaggggcntcacttttcnctggtgggtctgcatgggctggctcttagggccggaggcgggtgagcnttctagccaggaagccggagggaatcttgacaggcacacagcatccaaaccaacagcacttctgcagccggggcgcggctggcagaggggtgctgcctgctgcctgcaaatcctgccagagtcaagggtttgctttcctactggtcttcctttggctagaaaagtgacaaaactgagctgggtggggtataagttacaggggcgagagcttcagtggcctgtttatcgggaggagttggagctggagcggctcctgtggcggcggcggcccggggaccgtgatctccggcgcacgggggacctgcgcctcgggggagcgggaccttctcctcatccgtgggggagacctgcgccacataggcggnggtggcaa

SEQ ID NO: 686218 - DNA, 153 bp, Homo sapiens
accaatactatctgctactgaatcacagtctacatatgtagaccacactagtaactgaccttgaggatctggaatatgacgactgtcattaatgacacttcagctggtcatatagtcgcagcataagtgcatcatgtcagcatatcagtacag

SEQ ID NO: 686219 - DNA, 135 bp, Homo sapiens
gaatgtgtgctgtgcagttatctccagatacatgttattgaatcgagagtctcttccccatttagaatgcaggtttatagaggtgaaaaaggagcgtgtgctgatacaaatgctgttagacctggaactctcagt

SEQ ID NO: 686220 - DNA, 218 bp, Homo sapiens
ggggcgggcctaaaaaaagccttttgggggttttttttttcccggccgggggtggggacccccccgggggggggggggggggttttgggctttttaaaggctttttcttttgggttttggttttttttcccttttgggtccgggcccgggttttggggggggggggttttttgtttttcccccccctttttaaaaaatttttttattggggtttttta

SEQ ID NO: 686221 - DNA, 309 bp, Homo sapiens
gaattgagaactcaggagtctaatgctctaaaatctcacttcttcatcttctttttttattttttaagacgggaggttacgctcttatcgcccaggctgggagtgaaagggcgcaagctgggatcaccgcaaccccgtgcctcactcatttacaccaaccacccaactatctataaacctagccagggccatccccttatgagcgggcgcagtgataacatggcagtggggtggttggtgataaataagtaaggcaggagtccgagaaggtaagtgggggcaatacaaaatgataaaggatactagtat

SEQ ID NO: 686222 - DNA, 190 bp, Homo sapiens
ctcctgagtagctgcgacttacagggcgcccagctaattttttgtaatttcttaaatttttagtagagaatgaggtctcactatgtttgcctataggtcttggtgaaagacagtgacccctccctgtaatatgttgacttgtaatcttctgggcacgaagcacggaagcgcgggatcctcttagagatcg

SEQ ID NO: 686223 - DNA, 200 bp, Homo sapiens
tggcgacctataggactccaagaaagaaagaaagaaagaaagaaagaaagaaagaaagaaagaaaaagcaagcaagcaagcaagcaagcaatactcagattgggcacggtggctcacacctgtaatcctagcattttgggagactgaggtaggaggatggcttaagctcaggagaccagtctggagaacttggtctctac

SEQ ID NO: 686224 - DNA, 363 bp, Homo sapiens
aggaaaagttcggtgtctgagatatcagaacagtggcttagaagcaaagaccaaggcagatgtctaccagtaaaattacctctcagggccaagcatggtgtcttctacctgtaatcccagcactttgggaggccaaggcaggaggatcacttgagtccaggagtttgagaccagcctgtgcaacatagtgagacctcatctctacagaaaataaacaaaattagcagggcatggtggtacatgtttatactcctagctactcaggaggctgaggtgggaggatggcttgagccccaggaggtcgaggttgcattgagccaagatcacaccactgtactgaagcctaggcaacagagtgggatc

SEQ ID NO: 686225 - DNA, 1296 bp, Homo sapiens
taaagacaaagtagtattatgtggcttcagtttctttaaatacctcgtttctttggaaaccaaaaatttcccattcaaggaaattaaactcagccgtgattttaacatttttacattatttacattgtgcctttaagcactagtgatgtggagtggctttttttcatattgtgttaaaataatctccttggggctaaatttcacatgtgttattctaagaggaaaatagcgtgagtttacgtgaatttctattaaggggaagaaaaagagcattttattttcagcatgtgattacacttggaaaggtggaaaaaggtaagagaacattttacgcgagagaaataatttcatttataaaaatataattttatagaaaaattcagagacattatttctaagaaattctatagggtgggattctataatcccgagcatagtgcgtgcacagtgtctctatacactataactacagtgtgggtccacacagtgtctgctgcaacagtgggggcctcattctacgagacagactcagagggtacacccggagggggttacaccacaacgacacacggggcgcacacacatataacggcaaccaaaaattcggcagaaacacacgtgtggtctccgcgaacacacagaaccaacacaatatatatttccacctcgggggatactgggcacacactattctatattattctccacaaagggttgcggggaatccccataatttattctccacaaaaatgaggtgaaacaacgatggggttggtaaaaaatatcacatcgttattcgaaggcgaattctgcgggggtcgcaccttttattggggtcaccccaagaaattttccgggtcggcaccacaagaacaagcttattaaatgagggtagaaaatgtggttcactacaacattctgaaaaacaacacttattatgcagaggggacatctaatagagtgacgcccacctatatgggcgaccaagcacagaacagcccacaccgacccgcaacaaccaaaccgctaacggacccccatcaaccacaaacacataaaagggtgggcgaaaaccagcgcagcgggaatacacccaaacacgaagcacggaaccaccgtgaagccagggctaaaatacagtggggggaaatccaaaaacacacgcgtagagtactccaaagacgagcgcacccaagacgcagaagacacacacagcacaaacacgaaacaaccggccgacgcgcgccggcacagcccgcagaaaaagaaagaatatacccacccacccaacagggg

SEQ ID NO: 686226 - DNA, 146 bp, Homo sapiens
agaaagggtggggcttagggacagaagccccagagcatcacaagtctatatgtaaaggagaggtgtctattaggacgtggaacactactaataaactgactgaaacctggacccctaaactggtcccagtgagacccagatatatc

SEQ ID NO: 686227 - DNA, 830 bp, Homo sapiens
  misc_feature (100)..(100): n is a, c, g, or t
  misc_feature (106)..(106): n is a, c, g, or t
  misc_feature (156)..(156): n is a, c, g, or t
  misc_feature (167)..(167): n is a, c, g, or t
  misc_feature (177)..(177): n is a, c, g, or t
  misc_feature (185)..(186): n is a, c, g, or t
  misc_feature (194)..(194): n is a, c, g, or t
  misc_feature (200)..(200): n is a, c, g, or t
  misc_feature (219)..(219): n is a, c, g, or t
  misc_feature (248)..(248): n is a, c, g, or t
  misc_feature (268)..(268): n is a, c, g, or t
  misc_feature (276)..(276): n is a, c, g, or t
  misc_feature (282)..(282): n is a, c, g, or t
  misc_feature (294)..(295): n is a, c, g, or t
  misc_feature (322)..(322): n is a, c, g, or t
  misc_feature (346)..(346): n is a, c, g, or t
  misc_feature (373)..(373): n is a, c, g, or t
  misc_feature (377)..(377): n is a, c, g, or t
  misc_feature (445)..(445): n is a, c, g, or t
  misc_feature (453)..(453): n is a, c, g, or t
  misc_feature (475)..(475): n is a, c, g, or t
  misc_feature (484)..(485): n is a, c, g, or t
  misc_feature (490)..(490): n is a, c, g, or t
  misc_feature (537)..(537): n is a, c, g, or t
  misc_feature (556)..(557): n is a, c, g, or t
  misc_feature (588)..(588): n is a, c, g, or t
  misc_feature (592)..(592): n is a, c, g, or t
  misc_feature (608)..(608): n is a, c, g, or t
  misc_feature (623)..(624): n is a, c, g, or t
  misc_feature (647)..(648): n is a, c, g, or t
  misc_feature (651)..(651): n is a, c, g, or t
  misc_feature (654)..(654): n is a, c, g, or t
  misc_feature (657)..(657): n is a, c, g, or t
  misc_feature (659)..(659): n is a, c, g, or t
  misc_feature (661)..(661): n is a, c, g, or t
  misc_feature (672)..(672): n is a, c, g, or t
  misc_feature (687)..(687): n is a, c, g, or t
  misc_feature (701)..(701): n is a, c, g, or t
  misc_feature (716)..(716): n is a, c, g, or t
  misc_feature (725)..(725): n is a, c, g, or t
  misc_feature (748)..(748): n is a, c, g, or t
  misc_feature (793)..(793): n is a, c, g, or t
gtcttcctgttggccctgacaatcatagccagcacctgggctctgacgcccactcactacctcaccaagcatgacgtggagagactaaaagcctcgctgnatcgcnctttcacaaatttgtgaatttgccttctactccatcgtgggactcagcanccttggtgctnaggtgttagntgtaaagnnagcatgtncctacntcatatctaacctttatcncagcaatgtggattccctcttctacgctnctctagtccagccagtgccntctcaggntgtganatctctatttcnnatgagactaaagatctttttctggcanctgttattgaggactcatctgttntctagatctaccatgcagttgcagctntaantggttttggtcttccctttggtcatcctcatatgaagcatttagttgcttcttactgcttgtcttatntaggaggngactgtgctggtaatagttcangttctgcanntagcnatcccacctgtttcagcatgttgacctgatggatgcatcgtggaggngattttggtcttgttgctnncctggatgaactcgggggcgtgtatctccantttnaagaaggactggaaanaacagcgttatttgnngctgccacctacaagctcatggnnatnggnacngngnatccattaatnaggatcaggtcatcnagctgatgaacgcnatcttcagcaagaanaactttgantcctctccgaagccttcagcgtngcctctgcagctgctgtgctctcgcataatcgctaccacgtgccntttgtggttgtgcctgagggctctgcttccgatactc

SEQ ID NO: 686228 - DNA, 377 bp, Homo sapiens
gtgattcccatgcctcaactaccagactaggtggagtacagacacgcggtacttctccaagctaatcattgtatagagagactacacgggatctcatcatgttggccatactcatctctagcttcttacctctaaagattcacgccgcctctaacttctaaagtactcatattacctgtgttaatctcactgccttggcaggctccaagaactttcatactttccatgtacgatcttgagataatacctacactatcatctatgaccaatactctttatctatatgctactgtactctaaagtgccctttggtgagactccaaccttcacactgctcttgacatgtatgtcattctcatgcatgtttccgtacctac

SEQ ID NO: 686229 - DNA, 365 bp, Homo sapiens
  misc_feature (91)..(92): n is a, c, g, or t
  misc_feature (123)..(123): n is a, c, g, or t
  misc_feature (127)..(127): n is a, c, g, or t
  misc_feature (143)..(143): n is a, c, g, or t
  misc_feature (158)..(159): n is a, c, g, or t
  misc_feature (182)..(183): n is a, c, g, or t
  misc_feature (186)..(186): n is a, c, g, or t
  misc_feature (189)..(189): n is a, c, g, or t
  misc_feature (192)..(192): n is a, c, g, or t
  misc_feature (194)..(194): n is a, c, g, or t
  misc_feature (196)..(196): n is a, c, g, or t
  misc_feature (207)..(207): n is a, c, g, or t
  misc_feature (222)..(222): n is a, c, g, or t
  misc_feature (236)..(236): n is a, c, g, or t
  misc_feature (251)..(251): n is a, c, g, or t
  misc_feature (260)..(260): n is a, c, g, or t
  misc_feature (283)..(283): n is a, c, g, or t
  misc_feature (328)..(328): n is a, c, g, or t
gtcttcctgttggccctgacaatcatagccagcacctgggctctgacgcccactcactacctcaccaagcatgacgtggagcttgttgctnncctggatgaactcgggggcgtgtatctccantttnaagaaggactggaaanaacagcgttatttgnngctgccacctacaagctcatggnnatnggnacngngnatccattaatnaggatcaggtcatcnagctgatgaacgcnatcttcagcaagaanaactttgantcctctccgaagccttcagcgtngcctctgcagctgctgtgctctcgcataatcgctaccacgtgccntttgtggttgtgcctgagggctctgcttccgatactc

SEQ ID NO: 686230 - DNA, 608 bp, Homo sapiens
  misc_feature (3)..(3): n is a, c, g, or t
  misc_feature (16)..(16): n is a, c, g, or t
ccncctggacgtgggnctcgcacgcatggtggtgatccaccgctccaaggcggtgaaggaaccccttctttgactacaaggacaaagttcttggccaaagggaacctctcccggttcctttccgcccgggggcagggggatatcttttttttattgggcccccccgggagggggaccggcgggggtttccctctaacccccccccgaattttggggggggggaacaagcggcttataaccccccctcccaggggggccccccttttttggggaacccccccgaaaaaaaaaagggggcctttttttcccccccccttttttttttgtgcgcccccccccaaaaaaaataaaaacccctcttctttcccccggtttttttctctttaaaaaaaaaaaatttcgcgggcgggtgttttttttttaaaaacaaaaaacccccccccctcgggggggggggagaaaaaaataaaaaaaataatgggggggggaaaaaaaaattttttttgtagggggaaggaaaaaacatctttttttttttccccccccggggggggcaaaacacttttttttttctcctatgagaaagaagaactgggggggtctctcct

SEQ ID NO: 686231 - DNA, 371 bp, Homo sapiens
atatagcacgctgagggcctccaggtcgataaagcagctagccttgggaacccgatatatagggatggaaatgcaggaccaagcatgtcgaatctcccaaaatctatcgaccttcaagagcgagtcgtcgaatacagatactcgatgtcctccgtgttgaaggcagaatatctctcaagatattgaccatattcttgaaactctaagtgccttgggcgttgatcttggcgggacgaacctccgagttgcaatagtcagcatgaagggtgaaatagttaagaagtatactcagttcaatcctaaaacctatgaagagaggattaatttaatcctacagatgtgtgtaggaagctgcagcagaagctgtaaaa

SEQ ID NO: 686232 - DNA, 1505 bp, Homo sapiens
  misc_feature (347)..(347): n is a, c, g, or t
  misc_feature (471)..(471): n is a, c, g, or t
  misc_feature (883)..(883): n is a, c, g, or t
gcctacgccgtggttacgagcgccaccagatgcctgtacctgctcccaagcagggtctgccaggccgacgccagcactggtaagcaaccacgatctctcttgaatagctgctctactcgaggtacggagctgctaggggtcgtgcgtaccagcaaggaagcctcacgcgtggatgaggcataacatgcatcgtatatgtgtggccaacgcaagtgttcccggaagcgcttgcagcgtggcggtagcactcgcccttacgagcaccgcattccatcgccacggtagcggcttcgcgtagcttgctgtgcccttggcatcgtcgtcactctcgtgcacgccaccgtggntacgttgcctcatggttgcagaggctgcaacgtggtatagacccctttgagcgcatctgtctagattcctccaaagggctgcacgtcgcggtgcggaagggtaacgcgtgcctaaggccccatntcccacgactgctgactcacggtctcacttgtgatcttacctatgcgcgatgcccaagcgagggtcgcatccttttcgctcctcaggggttgtcccgtgcgacgctatggtacatccgtacgccgttgggcgcggggccctagggtagtggttcttgcgcctttctccaattgaggcatcctttgaaaggctggagccgcggtgttcccccttcgctcgcgaagtaacctgggcgcgaaggaggttggggaacgaaacatggacctccagaaggtggaatggtttggaaggcgggagcctcggttttccgcgcggggacgccgcgttgcgatcggttgtgagtgggaaacgcccacgggaagggttgcgagaaccctgggggagaaccgggtctgaggatttttcctgggtntagtacataaggaacccgcatgacgcagttataggggttttgacttgtggggcggcaggagggacctgacacccatctccgcgttttgtaccatgggttcctccgaactgggtataacccattaaagccccggcggggagccgtttcccaaccccttgcgcttcgcccattccgtaaggcgttaagaatggggattaacccaaggtcccccaaggggtgtcctttgaagacttgcaacctctcccgcattccgcgggtgtggcaggggaggggggcaactcctttcccccagagggggttccttgtggcccttttgcctgtccgggctgaaggcactgggccgtgccctttccacccgcagtggggcggtggtccccctagggtggggagacgcgtctcctgacagggggcctgcccttcaccttggtggccctcctgggggacagcggcttcggtgtgcccttgaaccgcggtgggagccctttgcggggcccgcctggtctgtgtgcccccagagcggaaccgggtgggggcgcctttccgctctgtgtaaggggcccacgtcccttctcgcgaccactggcccgagagggcgctttggtgtcgcgcaccgcgaatccct

SEQ ID NO: 686233 - DNA, 366 bp, Homo sapiens
gaagactgtggtcagcctttgcattgtgtgacatcgccagtccccgttccccgctcccacttcatattctcccatacttataactctccccacagtcttcgctatcaggcgaagcatgtggctgttctatgaaccagcttcttctttctgcgagcagttcctttcccaccaatgcgcacttgtgcctgcagttaggtgagtttttcctggttcatgattgtttctttcatcttgtcggagcgaataagttgtccgtgctgggggactagggttggtgctcaaggggtctcgggtgggccacctgagattaggcgcacacacgcggtgacgcaagatggcagctaatggcccatagtcttcgcctga

SEQ ID NO: 686234 - DNA, 1109 bp, Homo sapiens
agcggattttctccccaggggctctaggctgtggatgtgagaaggggagcaagggagggagacggcgaaaaggaagagcctccaggcctcgctgggggcaggagtcagaggggatcgctggagaaggggaggagcacggggccgggtcgctggacgccggcctcacgggacactaggtgctggacgacctgccaggctcaaggatggaaggccaggcagaggtgcacaggatcacggcggtcatcgatcagaagctggagactcaccaagatacgtgggatagggttgcgggcataacactggtggagtaagctcggatgggctcgcaactcgttatctttcctctctcgttccacacggtgcggtaaatacgtcgtggacaccggaagagagggaacggatcgcctttggggcagtacaagcacccggtaccagtttgtgaaccttattgaagatgcgcggctcattggaggccttcgcgtaccaaaaccattcagagaagggcccggccctcttcaacatgacgtgcggttgaaaactcgggacttagacacgcaaacaggacaatcagttgggttggggaacattgggagatcattgaccgttgcctatgggaactattcctgtgggatgataactattcgttaccaggcggctcagtccttgtagtacagaatcccttacccacgaggtggaagcgaaggacattgtgccctgggatcttccttgcatgccgtccgaattcgagtaatccgctaagtcaagcaacattctggggggaaagcaatgattcaacgacgggatgattgcgtcccaataggtggtgtgatgagcccattttcaagaggattcccactgagaggacaatatgacaatccagtttgaacggttcacacactagagttaggagagtgtggtgcattggtatcacaaatacctttaaatttttaccattaagcgaggagcatatatgtatacttccaagaaggagattgggtgttagagttgggagaacagtagatggagggaaaaccaggaggaaggatcattatctggaccagcagagttgggtttgggactcaaatattatttacaggaggaggggctag

SEQ ID NO: 686235 - DNA, 314 bp, Homo sapiens
agtcgttgaatggcccggaggcgttgaatggcccggaggtgttgaatggccgaggttatctagagtcaccaaagcctgcggtgcccgccccctgtgcgtgcccgtaaggggctgaccgggttggttttgatctgataaatgcacgcataccccccgcgaagggggtcagcgcccgtcggcttgtattagctctagaattaccacagttatccaagttaggacaggagcgagcgaccaaagtaacccatgggcatttcaacggcctgagggatccttctagaagtcgaccctgcgggccttgcacgccttgccac

SEQ ID NO: 686236 - DNA, 166 bp, Homo sapiens
ggcgcgagcccgcaggcgcggtcgctccccggacagcctgctgatcatgcctggggtcatgccctttgtcgcggaaagcgccgatgaggccaaacgcaagctcgaccggctgcaggcccttgtcgagcccagacaggcgctgcgtctgctgtcgactttcctcggt

SEQ ID NO: 686237 - DNA, 203 bp, Homo sapiens
aagatgatgggcaacgcaccgtgttgggccaacgcaccgtgttgggccaacgcaccgtgtactggtaggagtacctgctgcttgccactcttgtcctcgtagaaccgtgggcacaatcttcagtgatgtagtcgtgggaggccagggggttggaggtgagtctgtctgctcccccgagtagcattgacggtgcgttggcccaa

SEQ ID NO: 686238 - DNA, 779 bp, Homo sapiens
  misc_feature (78)..(78): n is a, c, g, or t
  misc_feature (100)..(101): n is a, c, g, or t
  misc_feature (105)..(105): n is a, c, g, or t
  misc_feature (126)..(126): n is a, c, g, or t
  misc_feature (140)..(140): n is a, c, g, or t
  misc_feature (193)..(193): n is a, c, g, or t
  misc_feature (196)..(196): n is a, c, g, or t
  misc_feature (213)..(213): n is a, c, g, or t
  misc_feature (217)..(217): n is a, c, g, or t
  misc_feature (221)..(221): n is a, c, g, or t
  misc_feature (270)..(270): n is a, c, g, or t
  misc_feature (275)..(275): n is a, c, g, or t
  misc_feature (277)..(278): n is a, c, g, or t
  misc_feature (281)..(281): n is a, c, g, or t
  misc_feature (328)..(328): n is a, c, g, or t
  misc_feature (331)..(331): n is a, c, g, or t
  misc_feature (335)..(335): n is a, c, g, or t
  misc_feature (439)..(439): n is a, c, g, or t
  misc_feature (442)..(442): n is a, c, g, or t
  misc_feature (486)..(486): n is a, c, g, or t
  misc_feature (496)..(497): n is a, c, g, or t
  misc_feature (594)..(594): n is a, c, g, or t
  misc_feature (604)..(604): n is a, c, g, or t
  misc_feature (613)..(613): n is a, c, g, or t
  misc_feature (634)..(634): n is a, c, g, or t
  misc_feature (649)..(649): n is a, c, g, or t
  misc_feature (765)..(765): n is a, c, g, or t
tgaaagggaagaaacattaaaaaaaaaaaaaaaaagaacacaacccccgaaaacaaaaaaagcattaagggccaaaanacacccaacaaacaatgaaacnnggcncacaaaaaaaaaaaaaaaaanacccaagaaaaaantttaaaaaaacccccaaaaggaaaaaacaatttgggcccccccccgccgaaanccncccaaaaacaaaccacnccanccanaccagcatccccctccacggggcccgaacaacaaagaaccgcacaaagngagcnannacnttgaagaacacattgttttggaaaaaaaaggggggtcccgaaagganganccanacaaaaacccagggtcccaatccacaaaaaaaaccaaaggccggaagagcagggacaaccaattcccaaaacccccagtttaaacaaaaggcgcagaaaaaacnacnaaacccagaggtttccacaaaaattcgcaagagggccaaaaacnaagaaaaaannaacgaaaaacccaaagtcggccaaaactagtgtctctaaagatcaaaattcttcactcttttagcatggctgataaatcttttctgcctttgtcacnaatgcttgtnaaaccaaanaactttgcaaaagaatatgcnctgctgaaggaaganagtcccaaaaataccatattgaacttcggtcttaagacacacacagttcctgttggatactggactgtgaaagtttattatcttcagtcttttcatgtcctggagcatggcaagtngtcttccgcttaaa

SEQ ID NO: 686239 - DNA, 373 bp, Homo sapiens
tccccccctccaagtgtttatttttgataccaaacatgaattttcagttccctccctcccagccccccaatttcctgcggggggggacaaaggaccccttcaatgtccctggagttgggagggaggaatgggggacataaagcccgtcctgtttctattttaggcaagaaagagtggggtccaaaaactcttggggttcccctgttagcgctggcccagccccggccttgggacctgggggttggttatttgggggacagtgctaccctcgtttcccctgtttgtttttcttcccccaaatgggccctttttttttttaaaaagtccccgagaatggggaattgttcctgttaatatatttttttcaaagtga

SEQ ID NO: 686240 - DNA, 573 bp, Homo sapiens
ctgaggatcccggaggcagggaaagcctgtataactagtggtttgagctgactgagctctggttccttccaagcatacaatcataagcgatcactgctgcattccggtaccgccaatctgggttcttgatgtgttctttactgaaggggaggacatgtgggacaatgtcgtgactggaacaagtgtggcgaagcatgaggcacacccctgctgctttgcaggggttccagtcatcgtcatcatcattttcgtcctgtttagttagtgtctgtgtgaggattggaaccagatactgtagtgctcccttcgcataaaacttgctggtgtgctcagggggccgtccttgttctgctgcctctgaagcttcaatggccaaatccatttcctcatcacagacattggaccagaattctatcccttgtaaagccacctcatcaatgtcacttttcattgcttcgattgtgattgcaaaaagagcaggacccatatatgtctccatgtacttgataatataaggacattttcttcaccagattctgtaaagcagccactcgtaccctcgtatctggacct

SEQ ID NO: 686241 - DNA, 326 bp, Homo sapiens
ccctttgaaacccccccctttccgggggggggtaaaaatttacccttttttttgtttgtcctgggggcctttaaaacaggccgaacctgggggggcgggttttttttttgggggggaaagcccccccaaggggggggggggttttttctcaggaaaattttttccccaccccagggaagggcccaggtggggcccccatgtttacacaaattccttcaaagccccttaaacatggggccgggccccctttcccccttttttttgtccaattttccaaagggggaaaagtgggtctttttttaaaaaaggaaaacccctttggggga

SEQ ID NO: 686242 - DNA, 259 bp, Homo sapiens
tgcggcgcagacccgccgccacatccagctacttttagtagagatggggtttcaccatgttggcctggctgatctcaaagctcctgacctctaagtgatccacctgcatgatccacctgccttggcctcccaaggtgctgtgctgggattacaggcgtgagccactgctcccagcctcgtcggcctttttttgccttctgcttgtacctcaaccctttggcaaaaagtacgaactacagagggcctgtcattagacttc

SEQ ID NO: 686243 - DNA, 961 bp, Homo sapiens
tggggtgtaacagggttaatggatgatgagtccagggctccgggtgaagccctgggggggaggggcacaaagcgaaagggggcgaaagggaagtgctgtagaaggcgtgcctccggagagtgctcggctcggagcttccaaacataggcgagggcaggggtgaggcctcgggcacacagccggggcccagtcacccggcccaaagtggagggcggccgggcccttgcccgggcacttgtgccaagggtggcctcacacttcacgcacacttcgtacgtgagattcaaggccgtttccacaaattccaaccagtgtgcaaagtgacttaggtgcaaatttaaatctcaaaagggacgggggcaaccagaagctcggggaggctttggaactctcctcagaaaaaagaggaaagaacgaggaaagcctcagaaaacaaagaagaacagcaaggatgacacaagccaaacacagggacgggtgggtggggacgggagatcaatcccgcgtggaggagcctcagcctcggggcactgaatggtggaggccgtgggggctcaaccgatccgccgacaggggcggtgtggccagtgaccaagtggacgctcgcgcggttgaccggggtagaggatagctagcgcgaccgctgcgagaccccaagagggagaccaagatagatcgggctagcatgcaggctcggggccccctaagctaaccaaagcccgatacctgaacccaggtaatacgcacgggtcgacaacggatgccacgcactaatcccacttccccaggcctcacaggagacggggggcacgcggaatctcaaagacgccccagggattagacacggagcgtaaccgcccaattactatacactggatcggggggcacatgggaagcccacagagtgcaagcccaatgaggccgaaccacgggcagaacatacacagacaggaccccgcat

SEQ ID NO: 686244 - DNA, 926 bp, Homo sapiens
gccaccgtccaggagcaggtagctgctgggctccggggaacactttgcgttcgggctgggagcgtgctttccacgacggtgacacgcttccctggattggcagccagactgccttccgggtcactgccatggaggagccgcagtcagatcctatcgtcgagccccctctgtaggtcaggaaacattttcagacctatggaaactacttcctgaaaacgaacgttgctgtgccccttgcgcgtcccaatgctaatggatgatttgatgcgtgtccccggacagatattgatacaatggttcactggagacccaggtcctagatgaagctcccgagaatgcctagtaggcatgcgtccccgcgtgggccctggtacccgagcagcatcctacaccggcggccctgcagcagccccctccgtggccccatgatgcatccttctgtcccttcccagaaaacctaccagggcagctacggtttccgtctgggcttcttgcattctgggacaggcaagtctgtgacttgcacgtactcccctgacctcaacaagatgttttgccaactggcaagaactgccctgtgcagctgtgggttgattccacaccccgccggaccgcgtcgcgccatggccatctacaagcagtcacagcacatgacggaggttgtgaggcgctgcccccaccatgagcgctcctcagatagcgatggtctggcccctcctcagcatcttatccgagtggaaggaaattgcgtgtggaggtcatttggatggccgaacccctttcgacttgtgtgggtggtgcctataaccgctgaagtgggtcttgacgtacccattccttaagtactgttacaaccggtgggggatgaccggaggctctctcatattctggaaacccggaccgggaggaacataaacggttatcag

SEQ ID NO: 686245 - DNA, 771 bp, Homo sapiens
tccgcacggttagggtactgcggccgtaaaacttgtgtcacggggcaggcggtgcctctaatactgggtgatgctaaaggtagatgttttggtgtaaacatggcggggtaaaatttggccagagtcccttataactttttttaaaccttcccttatgacgcatgcctggtgtgggtgtttgacatgtagaaggtgtaataattgacttggtggtgtatagattggtgaagatattggggctggtaaattggtcagtccagtggtttaaatctggaccgcagtgctatatgagcgggaaggaaaaatggtgtttccatggtgtaatcttaatatcttaaacatgttaagtatacttctctaataaggggtaggataaaaattggtgtcccaatggggtgtgtgtgatgtgatgtacacagtaataatgtgattgtgggggatttttaaagcgtaagtgggtgttgttatgagtctttgaaaccgctatctctaaaattgggtggtgctggcttataaaagcgcctaacatcatggtggttgtaaacatttttatcaactcctccttctcacaagggttttttccctatgtggtccaccaagacgtctgtccctctttgtggacttacactagtttaacatctacacagcggggtgcatacaagaggggtcccggggggcgcacatttacgcgttggaactaacaatcatatcttgtggaacaccagctatacaccaggcttcggtagggttggcagccttaacctaataatc

SEQ ID NO: 686246 - DNA, 1053 bp, Homo sapiens
gccctgatcgacgcggcgggagcgagaaatacttgcagacttgaaggaattatcagttcttgcattttcgtattcatcatgtgtcctatgatagttagtggcttccgctcgcctcatccctttgttcatgtcactcatgttcaccaacgccactctgctgaaatgtcgttatttcttcaaggcccggaggcaaatgctcacccacatctccatccagcagggttaccagcagcatgggcagtgagaaggagcagcagtccagcaaccacaacctgcctgaggaagagggcaagggggtaagccttggcagcagtggcatgacatcaacagggttctatggatccccacctggcgcgcgcaaggcagcatgggcaaagagcagcctgtctggatgcaactagcaatgcaaactctatcctacaccaaagcccatggcacgcaaagtcaactgtcacggagcatcgagagcctagggggaacaccatagctcataccaaggcaatgaggcagactgagaagacctaaatatgtgcccaagtgtggcaaaaccttcaataatacctccaaactgagaacacaccagcggatccacactggtgagcagccttccaagtgtacagaatgtggcaagagctactcgcgaagctaccccgcatccggcacgagcggatcactggaaagacacactacaatgaccaagtgcaggagagcaaacggcggcagccagacctaacaaacacaaacagaacacataaggacagaggaaaacagaggacaaaggcgaaacagatacagcaaaaggcacgcaagtgtagcacccggacacctgctcagacacaaaaagcgaaaatataaaaagcagaaaaaaccagaagagagatatacgccccaacagtaacacctagagaacggagggagagacagaaacaaacgacgagaggaccaggtaagtacgacaagaacacaaagaccaacgaaaagaagaaacagaaaacgcccaaagcaaaaagaaaccacgagcaaaccgacaaagaaaaccaaacagaagaacaa

SEQ ID NO: 686247 - DNA, 1297 bp, Homo sapiens
tctgccactcaattttgtgttgaccctcatcctcttgttctcgcatgactgtggttgtccgcccgcctctcaccagattgtgtaccctgtggaaatctctctccacttttccgaaaacgcattttttgggtctcccgtgtggttgacccacccccatggctgcaacacccgggggatgtgtgccgtttttctgctccgaagcccacccattgtgtggggtggcccaccaaccttactgcaaagaggttgccccatttcgaagagttgccgcccactcctagattgtggcccaacgccgcgacgtggccaatatgtgagagagttcccccccagagttccacagggagaattattgttggaaccattattttatccgtgggtgggcaacttgtgggggttccacacttgcaacaagttgcgctttcttctaaaagggcttctggttaggggacaattgcgattctcacaagcagaatttgtcgccccaaaacttttgaaggaaggtagagggaagggtcccctgtggagattttcttgtaatgctggggtgcccccgccgacgatctgttttctttaccccgaaaccacacacttcggcgcgggggagtatacacctcgcacagacacccgggtcccacaaggattctcacacgggctcgcacacgcgcgagaaacaccctctcgagtgcccccctgggaggggatgctctgtgataagtcccctgggtgtgagcttatctgatctagatagaataaggcttactcccctccagtgcaagaatctcttctctcccaaccaccgggtgcactaggatccacgggtcccaccagacgtgtattcacactgagaaagctctattccaagcagccaacaaaaccaccccagcggtttttcggaacacacggccaactctcgaacatgcgcacttgtttcacaaggctctttctgatggaagagacactcaagatacctcgccagggtgtgtacacttccacctccaccattggaagacccaatatggggtgtgtgccccgggcattgtaaacacacacagcacccacctccatcaggagcgcaccccacacaccctacatgccaccgccccacctgaattctatggaacgtctgccaccacgttctccatacatggcatgcctccaccagttgggtccccgcgcccgccctcgccggacttcggcccctcataggctccagcccaacacatgaccacagcccctcggcggggcacacacctttgcttcaaccctcccgatttaagcgtgccccaggtcacca

SEQ ID NO: 686248 - DNA, 842 bp, Homo sapiens
gcaccgcgcgggacgtgagcttgtgctgttgtgtctgtgtgtggttcccgtgcggcgtgtgtgccaatggagtgatgtgatgacacatgtctggatgcatgctcctgtgtgttgcttgacttgtgtgtgctgatgtgcctacagcagctgctgatgcttagagttgctggcctgacgcgctgctgtgctgcacttccccatgctgtggatgtgtgtgacgcagctgtgtgcccctgctgtgctgtcattctgtgctggctgatgtgatgcctgcactgctgcgctctgtgcccataagcatttgtctgtgaacgcttgtggctgatgtgatgcacgccccattgtgatgatctgactgtgtgctgccagcctgatggaatctgtgacattgatgtgcctgtccgcaccctgaaagtgtgccgatggttctgggcctgtgccctgtgtgtgtctttgtgccaacgtgggtggctggctctgctggtgcttgttgttggtgcattgtgatggtgctgctgagctcttggttgtgctagcgaccccctgattgcctggggcaccatccagggacacctgtggctggcaccagatagggggcctggacaccaagtggagttacaagagcctgcgcccaggctatatggacgaccggactgcgcaagggaccatgcctggtgggagaacacagtttggtttccggtttttgagcttgtggcctttggaggggcttggggggacttacttcagcccaagacgccaaagcgcattttacagagacggaaccatcaattctattgagcggtacacgactttgtgcagcacgactgagatctgcaattgga

SEQ ID NO: 686249 - DNA, 1319 bp, Homo sapiens
tatatatatatttttttgggtgtgtgtgtgtggagagaaaaaaaatatatagatgatatttttttttattattgttatataataatcaagccacgcgaagagaagaagaggggatttatataaaaaaaaaaaaagagaggaggggcgcccataataagacaatcaccccgcagggagggcgcacacaacaatatccagcggccgccgcccaccgtattctgtatagagaagaaggagggcgccacacacataggagagagaggcgaactattataagaacagacacaagagaggagcggcgcggtagaaaacaacacagggagcagagagagagagagaaacaacaacggccaactgggcggagacctactaggagagagaagaggacacacctaccaccaggggaggcggggagaacaccaaagtagcggcagcacaaccccacaaaaaacaagaaaaatagacacccctccagagagaggaaacaaacaaaaaaccccacagagcggcgccaaaaaacgcagcgcacaccacaacccaccccgccaccaccaccaccacccccccagcgcaccccgaacacaccccccgcgccacccccccaccaccaccacccacacagagcacaaaactactcaaaaccccacacgggggccgaccagccaacaaccccccccccaccaactcacagagcggaaaaagaggagcacacacagcagaccggacgcaagaaaagcaccacacaacgcacgcacagaacagaaactagacggcacaaccaagagagagcgcgaaggcagctaagacgcgcatccgacacgcaggccgacgagccggcgaagaggagagtacggaagggaagaacagaaaagacaaccggaaagagacacacaacaacaccacaaaacacaccaccataacacgaagcaaacgcaggaacaagaagacaagcaaacaaccagacgacccaaaaaaaagcacaaaacagaacacaccccataagaaacaaaaaacacaaaacacgcaaacgacacaaagaaaaaagcacacgcgagcacacaacacagacaacaagacacacagacacaccagcccacgagagcagaccagcagcacgacgaggcacgcccacaacggcgttcgaaaacacaaaacaaagagcaaccatcagaaagagcgagaccaaagaaagagacgaacaagaaaccaacaaacaacaagaggtaagaacaaaaaagcacgagaacacagaaagcaaccaggcgagcaagaagacgaagaagacaaacagcaacagaggaagaaaaaagcaagacaac

SEQ ID NO: 686250 - DNA, 232 bp, Homo sapiens
ttgtcagtggaggtgaggcggccagtccataactgaaaagagagcggtgttgccaggggctgggtgagaaaatatcctggaattgacagctacacaactccgaatctactgaaaccactgaattggacgcattgaatgggtgaatggtgtggcatgtgaattacctctcaataaagctattaaaaaatactaataatcagcatgaggtcaacctaattggcactgacaacgg

SEQ ID NO: 686251 - DNA, 373 bp, Homo sapiens
  misc_feature (282)..(282): n is a, c, g, or t
tttatggttcgtgatgcttatgtcaatcactgatgctgatggggatcgcagtgactgatggtcgactggcgtatgctaatgctgccgatgccttcgtcggctagataagtaactccaaacccgtgtagcatgaggattcattatgcttaagctgtgaacctgagattcagaagacaatctacctgtggctgggtcactaatcagagcttctcggtctgtcctcaggctggatgttgtccaagtgacaagagagaccctcacttactcagtgtcacaaggaangatgtaggaccctatgagtgtggaatccagaacgaattaatgtgttgaccacatgcgacccagtcatcctgaatgtcctctattgcccaga

SEQ ID NO: 686252 - DNA, 383 bp, Homo sapiens
ttgtcgtgagttaccattacccagcgcctgacgatacgctcttctattgtcttattctggcaggttttgacgtctttcaacattatatattaaagaaattttattccttggaccaaaaggtttggttaaccacccccctcttacttgctttcacattttgagtgtccagaggaaacagaagggaatgagtgtgtgacgttgctgcacgcctgactctgtgcgagcttctttctgtgtatatattttgttttatttttttccgtgtatattttaatccggcagacatcatgtgagattccttaaaatggattaacgattctcagctgaaaaaaaggtttgaaatgtttctgtagtttgtttggtctaacaacaataggtttata

SEQ ID NO: 686253 - DNA, 276 bp, Homo sapiens
tggcagtggccgcatgtgtgtactaaacacgtcaaaatctcacgaacaccagacatggcatgctttacccatcttacttagtgacagagagctgccgttgacattgtttcaaaagtagcaggtacactgactcttgtcacagctgtgttaatttatgaagcaatgtgggtgctgactactagtagtatcaacactatgttcaggatggtttcgctcacctgtctttcatcacatcaacacaaatgtgggggggcagttgcatgcacattccgtgtc

SEQ ID NO: 686254 - DNA, 348 bp, Homo sapiens
  misc_feature (86)..(86): n is a, c, g, or t
  misc_feature (174)..(174): n is a, c, g, or t
aataagaatttattccatatttatttttacaaatgtacaaacacacattcgcaccatcctgggaaagaattggcattagggaagtncttaactcgataccattgcacttaagcagcaaccctttaaagcaaccatcatttgttgtccagtagccacttctggacaccaactttnctttttatttcactttgacattttaagtagactttaaagttttagtttatctaaatctcaactactttaagaaaacctggtcttcatgttgatgtattagtttgctagggctgccttaacaaagtaatacaggatgagtggcttaaacattagatattcactttctcatagttt

SEQ ID NO: 686255 - DNA, 466 bp, Homo sapiens
  misc_feature (60)..(60): n is a, c, g, or t
  misc_feature (131)..(131): n is a, c, g, or t
cctgggggccctgcccttgggtcgccggcccgaggtaacctcgcgagtgcgagcgcgcgnccctggaggagagaacagggatgcagaggcccagcgcctggtccccgacggcgacggtcggaccagccctntaggcggcgcccgcagctcatcccagcgctcccccgtagggccagcaggggtccgatcgccccgccccggctcccctcagatgcaagccagcccgagccctgggatagcacccaaaccgaagacaccacctacggcccccgagcccgcggctgccgtccaggcgccactcccgcgggagcccctggcgttggcgggcaggacggccccagcccagccccgcgctgcctcggcgcctcccacggaccggtccccgcaaagcccctcccagggagcgcgcaggcagcccggggccgcgcccctggggaaggtcttggtggaccccgagagcggccgc

SEQ ID NO: 686256 - DNA, 419 bp, Homo sapiens
  misc_feature (55)..(55): n is a, c, g, or t
caaaccacctctgtggttccaggactaaggccaattgtaatgcagatgattggtntgcggcaacgtaaaaaccaactcacatttctgcaaagactatattgggaaactccaaacacaactaagccggctggtctgcaaaaactcaagtcactgtttgtccctaaaaagaaaaggtggtcgaagtgatgagctaccctgaaaagtcagaaggaaaccacaaaacccacgcccattgctcctcctaagctacagctgctgctgcacacagcagaaatatttatattctgccagagatcccccaggactatcctggatagagtagcttctacagacgttattctggtgggaaatactacgaaaaagtcaagtgctgatcaatctattgggaattttctgccatttaacacctgttaaggaac

SEQ ID NO: 686257 - DNA, 221 bp, Homo sapiens
tactgacctagaggatcccggaatgctagcagagaatggaacaacgaactactttcaatttcatatggaaccaaaaaagagcccacatagccaagacaattctaagcaaaaagcacaaaggtagaggcatcatgctacctgacttcaaactatactacaaggctacagtaacaaaaacagcatggtactggtaccaaaacagatatatagacaaagggaaa

SEQ ID NO: 686258 - DNA, 221 bp, Homo sapiens
ttcctttgtctcggtttgttttttttcgctggttgtttttttgagacaggtcttgctgtgtaacccaggctacagtgcagtggcacgatcactgctcactgtagcctcgacttccaggctcaagcaatcctcccgcctcagcttctgagtagctgggaccataggtacatgctaccacaccccactaatttttgatctttttatagagacaaagggaaaca

SEQ ID NO: 686259 - DNA, 511 bp, Homo sapiens
actaaaggaacgcctgcctgactgaagcttaatgatgtgaggcttctaatgtgataccctaccttgtattaacctgaagtgactcttccttagctaagagagccagacggactccatcgtgactccttcactcgcagccccttacccacccccttcctcaaggacttaacttgtgcaagctgactcccagcacatcaagaatgcaattaactgataagatactgtggcaagctatatccgcagttcccaggaattcgcccggttaatagcacccagagcccctgcgtaagtgtccggttgataacgcccaaagcccggcgtccatcaccttaggatagacttaaagcctctgcacctggaactgtttactttcctgtaaccgtttatccttttaactttttgcctactttacttctgtaagattgtttcaactagactcacactctcccctgtctaaaccaaagtattaaagaaaatctagctccttcttcggggccaaagaatttgacgc

SEQ ID NO: 686260 - DNA, 234 bp, Homo sapiens
ttgcacattttcaagaagttggagtctttgatagggagaacaatttgttgcaccattggctactcctttaaagttaataatttgattgatgatagcgcatctgctatcatgttgttatggcaaaatttgagtttgattattacgattgggttgcatttgaacagttcttagatcaattacctgataaagatgttgctaaattaattgcaaccattcaaatattgcaataatgcc

SEQ ID NO: 686261 - DNA, 288 bp, Homo sapiens
gaacaacagagtctcagggaaagagaaccacaatagaaaaaggcagaaaagttcgggcgcggtggctcatgcctgtaaccccagcactttgggaggccgaggtgggcaaattacgaggtcaggagatccagaccatcctggctaacacggtgaaaccccgtctctactaaaaatacaaaaaaattagccgggtgcggtggcgggcacctgtagtcccagctactcgggaggctgaggcaggagaatggcatgaacctgggaggcggagcttgcagtgagccgagattg

SEQ ID NO: 686262 - DNA, 402 bp, Homo sapiens
acccgcggcgagttcatgcagacatgattgttaaatggaagccgaaagtttctgctaccagtgtccctaccctccacccgtgccacaactgccaatcttattaaccttgtcctgaccagagttgagtcacaggcttactctatcaagtgtcatactggcttagaataattaggattcatctcaggggtgagggagaggccccactttcctagtaatagttattcttactactgcatttgtgagtgctaggactcaatccttgtgcccttttaccctatctatgattctagtaatttcctctagtctcatggtttcaaatatcacctacactcttcccaaatttttctcttttaagagacaggatctctgtcacccaaactgaagtgcagtggtgcaatcttt

SEQ ID NO: 686263 - DNA, 149 bp, Homo sapiens
aaaggttaagcaggacatgcctccttcggggggctatgggcccatcggctacaaacgggacttgtccgcgtcgaggactttcgggctacagcatgctggccataggggttgggagccctggatctacggggactggagcataatgtaag

SEQ ID NO: 686264 - DNA, 1048 bp, Homo sapiens
tggcactggaagttatgtatttaaacagctttacatgtaatattcatatataaaaaacttaaaggtgcttttctccaattaaaaaatctaaaagaattcaaaaataagggcattcaatatttggaaaaaagtacagatttacaaaatggtgtatattctggtcatgaaaactccacaccaacattatataacactgggaaaaaatatacaaacgggtatatattattacaaattttatggcagcaataaacttaagttcacaccaggcaataaaagagtcactattaatcaagatacacaagctttgggtgaggttctctataaacgtgaaggactttttctctttttttctcgtgcagaaatccttaaaaccgtggggccactttaaaatttgtggttaccctttctaagtgagagggtaaatttattacacaacaagtgatgtgaaaaagattaacagaaccaggtgtggtcatattatagtgaaatctcatttccagcctttgtggttcaaccaaagtgggccgaaaaacctctattattcctcaatattttcctcgagtgtggggtttccccgtggaataaagggcgtggtgacgtgcccgtgggcataagtggggcgttggaaaccgtggtaagggaaattgcggggtatccactcccacgacagaagacacgtggacatttggagtggttctacacgaattcaaggaaagaaattacgatccaatagtggttgggagaacttcccaaatgcgaaatctcttgaaaggggaaaaatcctaaaaaccattttattggctggataacccagtttcgaagagcatatattaccaagcgggtggcaaaaaaggcgacacagatttcatcctcttatcaaaattttttggtgttttacaccacacaacttcccgttgcgccgatttattttctttaaaacagcaggttttaactaggaggcgaacaaatttctttttaatacccccaacaaatgcggaaaaattgggtcttgtggggcttttaacaaaacgaggcttttttaaacaat

SEQ ID NO: 686265 - DNA, 229 bp, Homo sapiens
tttactcccaaaccctcttctcccttatctgagctgtttttctccttagcatgtttgcgtgacatgctgacttcagcatcagagaaagtgtcaggccctagcaaggaaactgggcacatgacatagagggacactgtgagaaatggccatgtgtgtgggacccaacgtgtggtacaggtgggagtccaaagccacagagctgcaggtctcatccagggctgtagtcctg

SEQ ID NO: 686266 - DNA, 408 bp, Homo sapiens
tttcccctttcccccccccctccggggttttttcctgggtttgggccaggtgaaagggtcccccccctccctggctttttgggttccaggccccggcaaggggcgcctcccttttttttggggggggggttaattaaggaattttttttcccccccccccctttttttttgggccccccccccccccttttttgcccaggaagtggggggtggggttttggttttccaacaagtgggcgggcgggggggttttttttcaaagggttccctttgccccccctcccccccctttccccccctttttcttccttccttcctttccttgggggcctgggccccctttggggggtttgggggacccccatttttaaagggaaaagggggggggggccgctccttttttgtcca

SEQ ID NO: 686267 - DNA, 487 bp, Homo sapiens
tattgaaaatctcgcctaaggtcatctagatggttagtggcagaacgatggtttaaactcaagtggtctggctccagccctgccctcgcgtatcccccacagccctgtgctttggagggcacctatagctaggtttgcatgtcacatgctagaaatagggtagacgcttctcaaggatgtccggacctctctctcactactgaggaagaagttatttccttctgcttgagggaatggtgggcagagcctacagctgtggtgaccctttgacaggtggggcaggtagagcaggcacaagtgactcaccagggagcattagccctaggatgcagtaggaatgcagctgctgcactgatcttggcagttttgattagtgaacagaataatttatttgtcattcatactctgcttccataaaggatttaagaaagcttacaataagtgactaaatagttactggaataaaactcataagttagaaatgatg

SEQ ID NO: 686268 - DNA, 159 bp, Homo sapiens
ctcgagcgaactctgtctcaaaataaataaataaagtcaaagaaagaaagaacatacacgatcaaagcttctttctctttcttatgtcctagtgtcagtgggagaacttcagagtgatgaaatagaatatttggtggatgaagtcactgaacaaagtgg

SEQ ID NO: 686269 - DNA, 393 bp, Homo sapiens
  misc_feature (244)..(245): n is a, c, g, or t
agtttttcctgacatttccatacaaattaggagacagcaattctcccattccatacagactgtattgcttagtcaaattatatatctcctaagtggagaaaacaatatgcaggtttcacatttgccttaagattagagatgctattaaagtgcatagcagagtgcctagcatatagttgataaccagaagaactctccttgtatgcacctttcgtgagctggacacttctacaagttttacctnnttcgtgcctacagcagcagacttgtatggtaggtattactagatttcatcaagcctaagaccacatttttaatttttttgcatgttgacatttctgacaatctatagaatttttaactaaatgaatatgatactattattcccatggc

SEQ ID NO: 686270 - DNA, 206 bp, Homo sapiens
atcaggcgagtttgtcaggggtgggtgggctgtgagatagatgacagaaaggctggaaggaaagggggtagggtatagaaggccagggccaaggggggtacctacaggtaccgctatactagggaaggggacaagcctatgagcacaactcgccctgggggtaccggaggctacgaatatcggtaatacatagggtacataagcta

SEQ ID NO: 686271 - DNA, 1288 bp, Homo sapiens
aaccgccaaattcactgcacacattcaccaacagcaagcacacatcaatgtatcttgcaacacagtggcagcatcaattggcaatcacttcttcattcactcatcacacatcagcagttcctttattgcacaaaccaaacactcgtgggacccaggtcattcttccactgcaccagttgtaccacaacattttgagggcaataacacagtcatctttcagacaacacagacaggagagagacacacttcatatctatttcgtgcaggtctttcattcacactgcatcagtcaacaatcacaagcatcattcacagacacacaagcaggcaatccatagcacgcaacagtcgctcattgacaccaccagcatgtcaaacaaatctttcacacaatccacaatgcagcaatatgtcacaacacaatcatacaaacattgatgaccacagtgaaggttatcatttcacccccagtaacatgtatggtctggggccaacatttcacaaatcacctgttaaattatctcatttctaaaactgcaccttccaaaatgggttacaggccaacagccaatgacaagacatccaccattcccattcatgcactaagacatttttaaccaaaacatagacatattcagggaatttacaacctgggtaagggtgccattatgggcaaaaaccgacacacagccaacaaacacaccataaacaaacgaaccattatcacacaaccaaaatacagaagatgaaaagggacgacaaaatacgtcccaaggcattaccacacgtaagaccaggcgaaagtgaggaccagagaacatgtgacaggctctacaactaatgcacataaaactacaaccatggtaaaagaggataccacacaaaaagaggatgaaccaaggggtcacaaagacgaatcaacttagacgcaagcctcacgatagaggaggcccacagataacccagcagcgggcacaatatgtagggaaccgacaagtggacgccacagctgagttacacaccagagagggcaccacccctagcacaacgacctcacaaagaacgaagaagaaaagcaaacacaacacacaagagaatgcagccaaacgtagcagcaccgccgacaggcacccacacccacacatgaaccccgcacgttcgaggacatggaagcacacagagagcgacacccacacacaaaaccataacggacaaaaccaacaaaaagtggaccacgcactcacaaacaaaaaggtgaagaataaacaaggcacaccgcacacaccac

SEQ ID NO: 686272 - DNA, 665 bp, Homo sapiens
tcctaagagccagggacagtactgggagaaaccaaggctgaagagtcaggttgaagcacaggcttttgttttttgttgtttttgttttttgagacagagtctcattctgtcacccaggctggagtgcagtggcgcaatcttgcctcactgcaacctccttttccggggggggagcaattctcctgcctcggcctcctttagtagcccggattacaggtgcataccaccacacctttctaatttttgcatttttagtagagatggcgtcaaaccatgttggacaggctggtctcaacctcctgacctcaagtgttctgcccgccccagcctgccaacgctgcctcgctcgttcgcgcttgcgcctccacaccccggccaaatcacagaatcttttaattcctccccccctcccctcagccccaggctcatgacggccaaggagctccctctcctcgtccgcccctttctgcccatgaagccccctttcctgtgtgccacgccgaattgccccccactcctccctctcctttatacttatcactctttattcctttcttcccctttttgtactttgctgggccgtcctcccgagtactccttgcacccgttcccatttctagcttcttattttttcttccctccaccttcttcaacaaccaaattaa

SEQ ID NO: 686273 - DNA, 576 bp, Homo sapiens
gtaacggcatcatattccaggtactgtgggggatgagtatctggtgggtagcttgtcttgcagtgctaagaaagtccctccaagcaggcaacgtctcatgacctgtttattcacggtgtatgtctggttgggattgaatattcgcttcttggtttgaacatgtggatccaggatgggtagatcaaccgagataaggggatagggcagtggctccacctcaggacctcagggcggtaggccaccctagtgagaagtggaaaaggacaggccagagcttgagagaggttgccgagcctctccctggccatcctcaccactgaggccacgacaaagcagagctccagctcggacagaagcctcagggccagtgaggctctgccagagctctcttaccgctcttcgtccccagtctcctccaggcctgcccaaggcaggatgtccagccaggcctcggggtcatcttgtcacgcataacaatattagtcgttaaagtgtaaacaggctaagtgccccgattaaaagacacagactggcacatgggataaggagtcgagacccattcaggctctgggggga

SEQ ID NO: 686274 - DNA, 3373 bp, Homo sapiens
atggccccagaatcccatatattagcttctaacaccatggagacccatatattagcatccaacaccatggactcccaaatgctagcgtccaacaccatggactcccagatgctagcatccaacaccatggactcccagatgttagcgtctagcaccatggactcccagatgttagcaactagctccatggactcccaaatgctagcgtccaacaccatggactcccagatgctagcatccaacaccatggactcccagatgttagcgtctagcaccatggactcccagatgttagcaactagctccatggactcccagatgttagcaactagctccatggactcccagatgttagcaactagcactatggactcccagatgttagcaaccagttccatggactcccagatgttagcaaccagctccatggactcccagatgttagcaaccagctccatggactcccagatgttagcaaccagctccatggactcccagatgttagcaaccagcaccatggattctcagatgttagcaaccagcaccatggactcccagatgttagcaactagctcaatggattcccagatgttagcatctggcactatggactctcaaatgttagcttctggcaccatggatgctcagatgttagcgtctggtaccatggatgcccagatgttagcgtctagtacccaagattctgctatgttgggttcaaaatctcctgatccctataggttagctcaggatccttacaggttagctcaggatccctataggttgggccatgacccctatagattaggtcatgatgcttacaggttaggacaagacccttatagattaggccatgatccctacagactaactcctgatccctataggatgtcacctagaccctacaggatagcacccaggtcctatagaatagcacccaggccatataggttagcacctagacccctgatgttagcatctagacgttctatgatgatgtcctatgctgcagaacgttccatgatgtcatcttacgaacgctctatgatgtcttatgagcggtctatgatgtcccctatggctgaacgctctatgatgtcagcctacgagcgctctatgatgtcagcctacgagcgctctatgatgtcccctatggctgagcgctctatgatgtcagcttatgaacgctccatgatgtcagcttatgaacgctccatgatgtccccaatggctgatcgatctatgatgtccatgggtgctgaccggtctatgatgtcgtcatactctgctgctgaccggtctatgatgtcatcgtactctgcagctgaccgatctatgatgtcatcttatactgctgatcgttcaatgatgtctatggctgctgattcttacaccgattcttacactgacacatatacagaggcatatatggtgccacctttgcctcctgaagagcccccaacaatgccaccgttgccacctgaggagccaccaatgacaccaccattgcctcctgaggaaccaccagagggtccagcattgcccactgagcagtcagcattaacagctgaaaatacttggcctacagaggtgccatcattaccatctgaagagtctgtatcgcagcctgagcctcctgtgagtcaaagtgagatttcggagccttcagcagtgcctactgattattcagtgtcagcatcagatccctcagttttagtatcagaggctgctgtgactgttccagaaccaccaccagagccagaatcttcaattacgttaacacctgtagagtctgcagtagtagcagaagaacatgaagttgttccagagagaccagtgacttgtatggtatctgaaactcccgccatgtcagctgaaccaactgtgttagcatcagagcctcctgttatgtcagagacagcagaaacatttgattccatgagagcctcaggacatgttgcctcagaagtatctacatccttgttggttccagcagtaactactccagtgctggcagagagcattctggagccgccagccatggctgccccagagtcttcagctatggctgtcctggagtcttcggctgtgaccgtcctggagtcttcgactgtgactgtcctggagtcttcgactgtaactgtcctggagccttcggttgtgactgtcccggagcctcctgttgtggctgagccagactctgttaccattcctgtgccagttgtttctgcgctggagccttctgtgcctgttctggaaccagcggtgtcagtccttcaaccttctatgattgtttcagaaccatctgtttctgtccaggaatcgactgtgacagtttcagagcctgctgtcacagtctcagagcagactcaagtaataccaactgaggtggctatagagtccacaccaatgatactggaatctagtatcatgtcatcacatgttatgaaaggaattaatctatcctctggtgatcaaattcttgctccagagattggcatgcaggagattgcattgcattcaggtgaagaaccacatgctgaggaacacctgaaaggtgacttttacgaaagtgaacatggtataaatatagaccttaatataaatagtcatttaattgctaaagagatggaacataatacagtgtgtgctgctggtactagtcctgttggggaaattggtgaagagaaaattttgcccaccagtgagactaaacagcgcacagtattggatacctaccctggtgttagtgaagctgatgcaggagaaactctatcttctactggtccttttgctctggaacctgatgcaacaggaactagtaagggtattgaatttaccacagcatctactctcagtttagttaataaatatgatgttgatttatctttaactactcaagatactgaacatgacatggtaataatttccaccagtcctagtggtggtagtgaagctgacattgaagggcctttgcctgctaaagatattcatcttgatttaccatctaataataaccttgttagtaaggatacagaagaaccattacctgtaaaagagagtgaccagacaatagcagccttgctcagccctaaagaaagtagtggaggagaaaaagaagtacctccccctcctaaagagacactgcctgattcaggattttctgccaatattgaggatattaatgaagcagatttagtgagaccgttacttcctaaggacatggaacgtcttacaagccttagagctggcattgaaggacctttacttgcaagtgatgttggacgtgacagatctgctgccagcccggttgtaagtagtatgccagaaagagcttcagagtcttcttcagaggaaaaagatgattatgaaa

SEQ ID NO: 686275 - DNA, 168 bp, Homo sapiens
  misc_feature (83)..(83): n is a, c, g, or t
  misc_feature (89)..(89): n is a, c, g, or t
  misc_feature (115)..(115): n is a, c, g, or t
  misc_feature (131)..(131): n is a, c, g, or t
gtacatccacccgaccgccaaggtggccccctcggctgtgctgggccccaacgtctccatcgggaagggggtgaccgtgggtnagggtntgcggctccgggagagcatcgtcctncatggagccactttgnaggagcacacgtgtgttctgcatagcatcgtgggctg

SEQ ID NO: 686276 - DNA, 145 bp, Homo sapiens
gggacctggtcaacagatacctgagtagctgggactatggcgcacacctagcacgcccagctcatgtatgtattttttgtagagacaggatctcaccatgttgcccaggctattttttctttaccatagctatattctccttatt

SEQ ID NO: 686277 - DNA, 387 bp, Homo sapiens
agcggctgacatatttgttgctgctgttgctgctgcggtatgtgctgctgatgatgagagagtgctgattggacactaagtatagtctttttgtctctcttcttcagcccatccatgttagctctacggaggtttgaataagccatctgaagcttattcaattccttggagctcacctcttgaaatcccttagaaaggtggcatatgggttttctcactgggtccacagtgctgatctatcttcttcccatcgtaagctcgtaacagacacttgtagtctgcgggctcaaagccctccacagtacctttactttggactgggtatggtacgaccgtcatacttactacaaggcggctatcagacgctgcccgaacgtccgggcactt

SEQ ID NO: 686278 - DNA, 227 bp, Homo sapiens
cgctggtgatctagaggaccattgattcacgtgtacgacctaaagttgcttatctctgtaggaagtaacggtagtcatcatgtatttatttcatttcagaaaaacgtctgatttccctatgtgttggttgcggcaaatcaattcacgatcagtatatactgagggttctcccggatttggaatggcatgcggcatgtttgaaatgtgcggagtgtaatcagtatttg

SEQ ID NO: 686279 - DNA, 861 bp, Homo sapiens
gcgccagtggggtcccaaacaccgcttccccctattcttaggggcgtttccccctccgtggttccccccgctctgagcaagtgttcccctagatgcgtttcctagatcccgtgtagtgcccgtgtttcggacaacatccccgacccgacgtgcatgtatagtgccacttctctccgacccctcctgggatatttgaacccctgtgttgacattttctgcccccccctcctatctttcggtctctttggcccgctccccaactccttgagggatcccctttgctatggaccacgaccgggggtctcacccaggactccctcccccttgtgccacctcggatccgaatttggcgcccccccaatgggggctgtgacaccttccgggtactacccggcttttctctgcggcggcatatatgtttctcaacatctcctgtcaaaatacttctcctcccccatatttgtcacttgagcaccccgggcgggcactcggacatccttgacacgtagacacaatatggagtgagtgactccccggtttgtaacgcccccacttgtatttaaatatattaaccatcacacgaaacagtgttgtgccaaatcaatatggacaggtttctcccacccacataggcgtttaaaacacagaaagcaaattattccccggacggtttttgaacaaccgacacacactgttccaccggaacacaccacccggggggtatataatacaccggcaaaattttaaattttggggccaacaccccgatttaacccctcgtcctagaattatttccccaaaattttttaaatggggcccttttttccccttagcccccccttttcccccttttgggcccca

SEQ ID NO: 686280 - DNA, 190 bp, Homo sapiens
  misc_feature (33)..(33): n is a, c, g, or t
  misc_feature (149)..(150): n is a, c, g, or t
ataatatcttaaggtgtatatttaatttttttnattggcttagttgttttttgttttgttttgtttgagatggagtttcactgttgcccaggctggggtgcaatggtgtgatcttggctcactgcagcctccacctcccgagttcaaannattctcctgcctcagcttcctgagtagctgggattacagg

SEQ ID NO: 686281 - DNA, 802 bp, Homo sapiens
  misc_feature (175)..(175): n is a, c, g, or t
cagtgggagcagctctcctgccaagtcctcaccccctgaaaattgtcgcctgctccaagtttgtctccactccctccttggtcaagagcacctcacagtttgctgagccgtccgctatctgcagtggtgctgaaacgaccggagatactgacagatgagagcctcagcagtttgnagtctcatgtccccttacctcacttgtctctagccgaatcttccaaaccagcgccatttcagggacatcgacacaggcagccaatgttcattggagctggggctgccacatttggggtggcttggtctggggctgggattggaactgtgtttgggagcctcatcatttgttatgccagggaacccttctctgaagcacagtcttctcctacgccattctgggctttgccctcctcggaggccaatggggctcttttgtctgatggtagcctttctcatcctcttgtgccatgtgaggagccgtctccacctcccatagttctcccgcgttctggttggccccggtgtgttcttttcctaatacctccccaagcagccgggggaacggggttgtgctccgtgttttgaccgtaggaacggaccaattaacttctggcaaaaacaagaaacaacaaaaaaagttgtgggccgccggacgccggaaaaatttaacaccattgtttgtgccggccccataataaaaactgccaggtgtcccaggaaccgcgccgagtctgttggctccccaaaaagccgggggcggtctcaccacacggttggcccggttacggcgtcacccccacgcaat

SEQ ID NO: 686282 - DNA, 208 bp, Homo sapiens
agacctctttttcaaaatactaccccaaactgcctttgtgaatggtacaatgggcctggaagggtttgtctcccctaaaagaattgtgggtgctgtaacagtgctggaggtttgtctcccgcccttctcaccctgtcaagtctgtctctccttccccgcaggtgtgtccaacatcatgcctcctcccaagtaacgttcagtgttaaat

SEQ ID NO: 686283 - DNA, 108 bp, Homo sapiens
  misc_feature (57)..(57): n is a, c, g, or t
gaggtcgtgccattgcactcctagccttgggcaaccaagcagtgaaactcttgtctncaaacaaaaacaaaacaaaaaaaatatatgtgaccgcgcgagaagtgtggg

SEQ ID NO: 686284 - DNA, 269 bp, Homo sapiens
tataccctgggaaaagctgacacaagacaagagtgctgtctcccgaccgacgcctattcaacatagtacaggaagtccgggccaggggcagtcaggtaagagagagaaataaagggtattcaaataggaagagggaagtcaaactacgtctctttgcagatgacttaattctatatctaataaacccatagtctcagcccaaaagctccttcagctgataaactgcagcaaagtgtcaggatacacaatcagtatacaaaaatcactat

SEQ ID NO: 686285 - DNA, 599 bp, Homo sapiens
cggctgacttgcctggcctgcgaggaagtcctggcccctggctttggggaagtgcctgccgaggcgcctgcgcactgtgcccctctgtgccccctccccgtactgtctgggccggaccttgtgagcgcgctgggccggcggtgcggcgcgagtggctcgggatgcgcgtgttgacccccaggctgtggtgaggtgtcttgagagctggtaccacggtgagcctgttgtgcaacctcctcctggcccaccacaatgcccaccccagcatgagtggctgagaaagctatgatctacaagtggtcatgattgatgtgctgtgaaccagtggcaaccctatcaattgtcacgagctaaattagaatatccacgagatatgctacaccgaattatgtgatccatcctcaatgaacacaggcaaagacccagttggctttgctcattgattgcattagaattgcgttaggcatagacttggtacgacatgcattctccttgggaaacacaacagatgctgagctgaggacacaggccgtggagcaatgagcgataccagcgaagaaaaagcaaatagaatgcagagcacacctacccacaagctt

SEQ ID NO: 686286 - DNA, 319 bp, Homo sapiens
tcctacttagaaataataaataggggcagctcccatgagtgattacaggccagttccatgcacagtgcactttcaaccaagcaactgcaatatgtgtccttcaacatgctgtccctacagtgcctgggcgggggctgatcgctcatgcactgtagtgttcatcagaggaggggtcccaggttcgaggcctgtccagtgccacagtctgtgagaagtgggtccgaagcggtccatagctgaggtctctggtgtcttttaggctgagatccgcagggttgagggctctgggggctggcttagtcaggttgtccctttcacc

SEQ ID NO: 686287 - DNA, 1133 bp, Homo sapiens
  misc_feature (627)..(627): n is a, c, g, or t
gagaaaaaaaaaaaaaaacacgttggatacttggtacattcagatgcattcttatttaaaaggggatactttggtaaaaggtaaaaccttggttattaaggaacaaaatgtgtttcttaattttaattgggtggagtttacaacttggcatgtgttcccttatacctccgtgttggggctggagtggaccggggtgcattctcacacttagtgaaacagaaagactcgtgctccaagggacacaggcttggttattgaacagggcgtggaatttggggctctccatctcaggataatattttggacattttctcaccaaaaattattaggtttggcacctttttaaatctctaaaggctcattccctttcggaggtggaaattggcctcattaaaggcatttgggaatacttaaggccattatatttggccatttgggggtacctttattacaaaggaaaatttcaggcccttaccctggcattaatttggaaggacacaggcaggaaaggggggctaaggggatggagggccctgggtatttcctgggtataaatagggacgtcatggggcggtaaggtcctggaaggtaaataaccttcccaggcaccggggacaatctcttccnagaagttatcccaactgggctagggtggtggtaataccattaagggggaggataaatctggatgctaacgttattatattatcctcttgggtcctggaataagctaaagttcctttaaataaacaaggtccaaacttttatttaccaccaataacgttgagaggtaatcccttaaagggtccccggtggaaattctccagtgagaaggccacattctcttaaggccttaggggagttccactctttaatggatcttaacagggagggggttattcacactgtgatcttcccattaccctgtgtgacgggatcaagttaataccccccaggcggtctattaaacccttcttcaagggtccaccggggagaaaaggggggaacggagcgggccaagaagggacacaatgggggccggaagggcaaaaggagagggtcaacggagagaatgaacatgtcacaggaataacgtaacatcagagcgcattaattaaaggaataacagagat

SEQ ID NO: 686288 - DNA, 357 bp, Homo sapiens
ggatgtaaagtggagagagatctcttgcagtttggcactagagctgtaaaacagagatttctagtcttctcgatatgtcaatttcagtcctgccaaagggaaatcctcattctaccctcaattccgtcagtagtaaactgaatacatctaaagcacagacctaacaactacaaactggatggactcatacccctattctagtagccattacgaggggtgtgtctagttcctgagcataaaaatattaatttcaatctctatatgttaatgtgtaatatgttaatctcatatgttaatgctatttttcttttatactcaatgttcagcattgaataaataattatgagacttacgaag

SEQ ID NO: 686289 - DNA, 451 bp, Homo sapiens
aagctgcatctagctcactgcaactctgcctcccaggtccagcaattctcctgcctcagcctcccaagtacctgggattacaggcacatgcccccatgcctggctaatttttgtatttttagtagatacaggttttcaccatgttggccaggctggtctcaaactcctgacctcaggtgatccaccagtctcagcctcccaaagtgctgggattacaggcgtgagccactgtgcccggccactttattttttttaacctttgcactgaactttgcatttgacccatttaaactgcatcttagctgggtgcagtggggtatgcctgtactcccagctacttcagaggctgacgtgagaggatcatctgaggccaggagttttaaggctgtagtgtgctatgaatgcacctgtgaatagcagctgtgctccagcatatagagaccctgtctct

SEQ ID NO: 686290 - DNA, 162 bp, Homo sapiens
ctctagaggatgacgggtgctctgtgctgggtgcgttagatcacctcaccgtaatccagcactctgggaggctgagcgcaggtggattacctcaggtcaggagttcgagaccagcctggccaacagtggtgaacacccgtgtctctacataacacatacaaa

SEQ ID NO: 686291 - DNA, 164 bp, Homo sapiens
  misc_feature (74)..(75): n is a, c, g, or t
atccccctcgatcgacggtttctccaaaccagagaggaagtcaaataaatcatgaatgactttttaaaattttnnagacagtgtctttgcctttgtcacagatttactaaacaagaactatcagaagcttctacctaacaattccttgctgggttgattttttt

SEQ ID NO: 686292 - DNA, 324 bp, Homo sapiens
aacgctactacctggccagcatcaggagccccgacattgccggactctggtcatacgcgtttcttatttgaggcctgaaactgatgtcatcaacttcgcagtacgcagaactgcctgtctccacatgctgtcttataacgtctgcagcttcacagccaatggctcccatatgcccagattacttcatgtccaacaaagtaaccgtctcaccatttacaccccaggcctcacagttactcctgagtgtgcttggaccgaagggaaggtaagtagacggatggtgctgaccccacagtactggatcaggataccaggaatgacctc

SEQ ID NO: 686293 - DNA, 106 bp, Homo sapiens
gctcgtgatcacgaacatctccctccccgaacatatacgctaaaacaaaagcagcaattcactgtaaaactggaaagggacgaactggtgttcggttgagcggaga

SEQ ID NO: 686294 - DNA, 922 bp, Homo sapiens
tgtggctgtgggagatgtggctgtggctgtggctgtgctgggaggtatgatggacagtagctgtggcaatggctgcctgggacctgggcgtgagttatggctgggctcagcctccccttctcctgggagctttttctgcctggtgtccatacagtgactattgctgtctgttcacccctgctgcctcatctcctcacccctctgctcctccggacttcctgacgtgcctcctgtgtcttcctaggaagccagagcagtatggcccactgtcgctctgggacatgacacgactgatgaacacactgattgtgtttcgcttcctgcgcatcatccccaacataaagccaatggctgaggtagccaacaccatcctgggcctaatccctaacttgagggcatttggtgggatcctggtggtggcatactatgtgtttgccatgatcgggatcaacctgttccgaggtgtcatcgtgcctcctggaaacagcagcctggttcccgacaacaactcagctgtatgtggaagctttgagcagctaggttactggcccaacaactttgacgactttgctgctgctttgatcacactgtggaacgtgatggtggtgaacaattggcaggtgatcctggaagcctataaggcgctacgcaggccgtggtcaatggtgtatttgtgctatggtggtggtgtcctctggttatctggatccacctggtttctgggttcctcttctggagaacttttccacagatgggaccctcaaggtctaaggagctcctgttgggacaagcgatttcgggggctcctgttcggtatccaaaaaaccaggggaggatgttggaataaaaacccttggttggggcggaacaaaaggcctccggggcagcaaatggcggccctttggagaagtcgacaaaatgg

SEQ ID NO: 686295 - DNA, 210 bp, Homo sapiens
gtccctataaggatccccttttgcaaacgccggtctttctattcctgttggcactgggcaggcagtgggttgttgtggctgagctgaggggtcttggaaggggggggctttttaattttggaggatccttctaccccaaggcctcactgctgccatctgtaagtgaaggaactggaccagatgggactaaacttctgcttcataaaaaaa

SEQ ID NO: 686296 - DNA, 414 bp, Homo sapiens
acctcaccaccggatctacatggctgctggaccacactggctggtagggtgaatagactggtacatgctgggtaggtaggaagatgaatagatgggtgcatggatgagatggatggttgggtgactagatggtagatgatgggtacgtaggtagatggatggctagctggctgcctggatgagatggatgggtgcatagatggtagcatgcatgggtcaggtaggtcagctcacatggatggcatcagcatggcatgcatggatgagatggcatggcatggcatgggtgcacatcagcatggtagatccatgggtaccatcagcatagcatcaatggctggatagcatcatgcatggatgcagcatggctcaggatacagtcagggagcaggggcatcctctcagcagtcgcac

SEQ ID NO: 686297 - DNA, 280 bp, Homo sapiens
accaaggcggacatgagagcactgctcacacacgcacttggtgacacatctcacacatgctcacggtgcccagagcccagatcttgtgacacacatctgccgtgcccacagtgcccagagaccaagtcctgtgacacacctgcgacatgcccacggtgcccatagtgctcttgtgacacagcttcccagagcccaaggtgcccaacacctgtactcctgggaggaccgtcagtcttgctcttgcacagggctgacgtgagccacggaccccgaggtacgc

SEQ ID NO: 686298 - DNA, 416 bp, Homo sapiens
  misc_feature (8)..(8): n is a, c, g, or t
  misc_feature (232)..(232): n is a, c, g, or t
ttcccctnaagccttttcccttgaacaggtgcaagtatttttaactgccttcccctgtcctttcctagtctttccccccttcccaagctccttcacccatactgcccacccagtgaagtttgaaaacaatagttggccggaacgcgggtgtcacgcctgtaatccccagcattttgggaggccgaggcaagcagatcatgaggtcaggagatcgagaccatcctggctaacncggtgaaaccccatctctactaaaaatacaaaaacaaaattagccagtcgtggtggtgggcacctgtagtcccagctactcgggaggctgaggcggaagaatggcgtgaacccaggaggtggagctttcagtgagccgagagcgcgccactgcaccccagcctgggcgacagagtgagactcca

SEQ ID NO: 686299 - DNA, 755 bp, Homo sapiens
  misc_feature (32)..(32): n is a, c, g, or t
cccttcttgtttgaaaggcacaaagcccttcnattaaaaaccagagagccccaggcttaagaagcaaaaggccttagtctattggggagaagagtgccttgcttaaagccagaccagtttcctgcttgggagggtcatcccagcgccggcccctcagttttaatttggacatcaccattgctcaggacattgagggtttgagggaaaagtctagaaagatgatggggcgggtcacacactaattaccattgggaaagctaaggtgagttccaagtttggcttcaccagagaaaactaatttgtgtggcattccagaaagacctgccaaactcgatgagtgaacaggcagcccttcttcattcatgcatgcattcagtttttgaatcaggtgagactttagatctcatgtgaaataagtcttaagtgaaacaaagagaaatttatcttataataagagaaaattggccgggcatggtggctcacaccggcaatcgcagcgctttggaaggccgaggtggatggatcacttgaggtcaggagttcaagactagtctggccaacgtggtgaaaccccgtctctactaaaaatgcaaaaatagcctggcgagctgtcgggcgcctgtagtcccagctactcgggaggctgaggtgggagaatcgcttgaacctggtaggtttaggttgcagtgagctgagattgttgccactgcactccagcctgggcaacaaaacaagtctagctctccatctctttt

SEQ ID NO: 686300 - DNA, 271 bp, Homo sapiens
  misc_feature (97)..(97): n is a, c, g, or t
tcccacccacctcagctgaggtgagacaagtagctgagaccacagacacacaccaccagctaattttttatattttggtagagacagagtctcgccngtgtttcccaggctggtctcgaactcctgggctcgggcaatcttcccgcctctgtcacccaaagtgctggtattataggtgtgagccacccctggatttaaatctgagtctcgactggagctccatcccagagactttcatttctacacttgagcccagaggatcacttgccca

SEQ ID NO: 686301 - DNA, 326 bp, Homo sapiens
cggatgtgctcagcattgagatctgtactcatttcatgcggctgacccttgttctcgttcagcaggttattaaataactcgtaggtcataggctggagttgttagagcagcttactaatggcatattcggacagttcgtgctgtggtgacatagtaatgcgctctgtcgttgatgcatatgcgccgtcactagtaccggtcagtgcgctcgatactaggcgtagttgagggttctcatggatgtccaagtgtgctgacacgggtagcccgtcagtcagagcgaggcctaggtcagcccctgatctttcatattgaatgggtgtgcg

SEQ ID NO: 686302 - DNA, 615 bp, Homo sapiens
  misc_feature (525)..(526): n is a, c, g, or t
  misc_feature (572)..(572): n is a, c, g, or t
ggtccggacttcctgtgtgtgttgagtccctcatatgcttcttacatcacggaaggcatgtgggcctatgtttcattaatcagaaggtttagaatcccaaacttcagtttctttagctaggttgagaaccattcagatctgggcatttcgttttcgagtgagtttgaaagttcgcgtctgtcacggcacatgctcctgtcctccgggttgtcaggtctgttggtgtaaagtccacaatattctctctctctctctctttttttttttgagatggagtcttgctgtgctctgtcgcacgagctagagtgcagtggggcgctctcggctcactgcaaactccaccttcccaggtttcaacgcggtttccctgcctcagcctccagagtagctgggattacaggtggctgccaacacacccagctaattttggtattcttagtagagacggggttttcaccatgttggccaggctggtctcgaactcctgacctcagggtgattccacctgtgccttacaagccttcnnccaaaggtgctgggattaaaggcttgagccaccgggcccagcctanaacagaagactttttgactaattgaaattaaaaccaacaacca

SEQ ID NO: 686303 - DNA, 255 bp, Homo sapiens
cagaagatcccgaggtatctgcagcttctcaccacccgtgacggctgacccaggcagtggcgagctagggtaagggtgcatactcgtcccaggtcctgcattctcttacagctccttccgggcgaaggtcccaggcgggtccaagcttccagcaggatctagcactgtccattggcttgtgcactcccagggctgttccccccttggtgccaggcataaccttcggggtaccggaggctcggaaattcgttaatc

SEQ ID NO: 686304 - DNA, 204 bp, Homo sapiens
actaaacaagatcacaactggctcatcgattctaacaaccagtacacgcaccgggaggaagataagctggggcaagggcagcagcggagtgtcaggagccaagccctcagacgcagcataagaagctggtcgcccagttactaatactatgaatcgtttctcagccctacaaccagcggcacccaaaaaagcatagataaaaga

SEQ ID NO: 686305 - DNA, 734 bp, Homo sapiens
  misc_feature (308)..(308): n is a, c, g, or t
  misc_feature (342)..(342): n is a, c, g, or t
ccacaggtggtagctaccacacccggctaattttttgtatctttagtagagatggggtttcaccatgttagccaggatggtctcgatctcctgatctcgtgatctgcccgcctcagacctcgtgatccacccgcctcggactcccaaagtgctggtattacaggtgtgagccaccgtgcctggccagtattttttttttaaaactaaattatcattaatgttaaaatttaactgaccatgtatataactgtgtaattgctgctttctcacagaactgtctaggattcattcaacagaccacagaaatnaggtctggcatttaacagactaatgatagaaganataaactggtttatacaagaatatcaaaatactgtcatgtggtttagtgtagctcaagttatgaattagtgccaactcttgctgcagtgtctctcacacaattttatcttggaacttggcgatttaaattgactttcttcactgaaaagagttctttcatgatactcttcgtgaatgctcatatagcagcttaatctctttcatttgctgtctcctaacaatgctaacttgttgccacctcttttgttgctcttgaaatattttaattagtttttcttcctctcctcagtcttctacatgtctatgttgtattcttgaagcaaagtcagcaactgtataggatatctataattccatttctgcattctgggttctcaaaataacattcagtt

SEQ ID NO: 686306 - DNA, 156 bp, Homo sapiens
gcgattttgagaatgattgcgccggtaaagcttcaggggttttggatgagaatggctgtgagcaactagggctatgttgtctaattgaagagtatgcaatgagcgattttagttcttgtattgccgttatgccgataagccgttaggccgatctga

SEQ ID NO: 686307 - DNA, 365 bp, Homo sapiens
tttttttttctgagcaatttattattattttttatttattgagacagagtctcactgtcacccaggctggagtgcagtggcgtggtgtcagctcacagcaacctccacctcccaggttcaagtgaatctcgtgcctcagcctacggaacagctgggacaacaggctcccgccaccatgcctggctactttttttttttttgtgccaggatttcattctgtcacccaggctggaatgcagtggcaccatcatagttcactgcagccttgaactgggcttagctcccaagtagctgggactgcaggcgctcaccatcatgcccagccaaaactgaagacttactgggctatgtggtggataagtcac

SEQ ID NO: 686308 - DNA, 1375 bp, Homo sapiens
  misc_feature (469)..(469): n is a, c, g, or t
gctggccgggcctggcctgggcgggacagtgtgcgcgatccggagaggaatggtgctgtgcgcgctccatgccctagttatccgccaaggacatcgacgggcagatggtttgcctgtgacatcgctactcgagggcctctcagtgatgcagtcagtccacctaacagtagagcgctcaccaagatgtaggccagtagcagaagtaaacttacacatctaggtgtcgtctgacactggacgcctcgatccgctgagtgtggtttgcggatcctggcctttcgccgtgtagacgcacgttcggggaatgcgaggagaatcccatggtcatgctaactgataggagattcgaataggagttctgcacgctgggacgtagcgaacgcttggaacttccgaatatgtctcaggtcatgaatctgtgcgtcgaaccggaggaactgacgcctcgacgccggcgtggctgggaaangtcgggactgaaaggacattccagacccccaaatgtgtggcaacggcggctactaccgtaggggcgatacagtgcactagtttcccattgtgtggaaaatctctgcaccaccacaaggttgtaccctgcaactacaggagcgacatgaaagccgcgtcttggctggtagagtttgaataggacggctacccgggaacccgcattggaacgagaacgtccccttggggtgaatcaggaaagaagagggatccctggctcgcacaacttagtgtgtgcttatgccgtgccacaaccatacgatgttggtgtggggccccccaggccccagaagacccccttttggcgcgcaacgggccccttcggggaagattctttcacgaacccctgaggctaatggtccattggaaaccgagcgctagccgccgtggcattattacactttgccggttgagttcgtggggcggcttaggaacccctccgtagataagacttcccaaggggggattggctaacctcccccggaccggagtaggagcaaatgtgttcgccaccaactggtgggtcttgggacatgggggcttttgtggggcttcggagactcccacaccccctcaaactttcgcccatcggaggttgagccctctttgtgtggaggcgcaccttacaaaaccattggaggcaaaaagtttaccgacaaggagcagccttacacaggggactttcaaattttgacttgctcactcgcggacagaatcacggatctcaacaggtgtgcggttccccacaagaaatagcgacagggttgggtcttttgcaccattgtggcaaccacctgttggttgttcggaaacgctgtgtggggttggggccccagggaacctattggtcgttgggttgtgtgcccag

SEQ ID NO: 686309 - DNA, 553 bp, Homo sapiens
aatccctcaacaaactagacatagcaaggacctcaattcaacgtagaggggccacctagtgaaaagccgcacagctagacattataggctaggatgattaataagagaagggtacactgactcgtgtgcgaatttcgtatcgcctaaatagtagtattgcagtatgtagctcaggatagattatggcataggaataaataatacagaaaggacgatccaaatggactcggatgaagcatacttatctgtttggagattacatgattaaatatgtagaaaaccctaaagactccaccaaaaaactgttagaactaataaattcagcaaaggtacagaataaaatatcaatatataaaaattgattatgtttttctacactaacaatgaactatctgtaaatgaaataatctcatttaaaataatctcaagaagaataaaatacttggaaacaaagtaaccaagaagataaaatccttatacactgaaaactttaaaacattgatgaaagaaattaaagaatacacaaatgagtgaaaatacattctgttcatgt

SEQ ID NO: 686310 - DNA, 185 bp, Homo sapiens
  misc_feature (56)..(56): n is a, c, g, or t
  misc_feature (79)..(79): n is a, c, g, or t
aaacggcagtgcacgctgatgctgatggtcgactcttagagtatccacccccttgnaaggcctgacagtgttgaggatnatgtgattttgatcatactgtgtgccccctttaatgtctaaaactaaatttggcttcaacttgctgtaaatcctgccatcggacttcaagctccagaactggctta

SEQ ID NO: 686311 - DNA, 148 bp, Homo sapiens
ggtgtttcctgtgtctggtagaattcacggtggagccatccagtcaagggtatttctgtgtgggaagattttcttggtaatttaatcttcttactagttatacgtttacccatattttctttttcttttttttttttgggaaacaagg

SEQ ID NO: 686312 - DNA, 628 bp, Homo sapiens
ctcttggtgctcgctctttccaggtgtccaacgtggggcagtgccctcctctcatcactctgctgttctcttgtctctcgcgtgaatagcgactgtcagtgatttcggcggtccccaatgcctcttgtgtcacgtggtggttcgggcccatgcgagtgctgtgccaggcctcagccttcttgccagtggagagtatcacctgagatcctccgatgatcagaactagggctattctctgacatccagacagggcgtgtgctcaacaaggtgaacagatgagacctctggctgatctctcacctgtgcacagttccaccctgacggactacatactttggaacaaggaaccatggactctcagatcaagatctgggacttgcaggaacgtactaatgtggccaaattccctggccactcgggccccatcactaagcatcgacttctctgagaatggttactacctggctacagcggctgatgacctcctctgtccaagctctgggatctgcgccagattaagaactttaagacttgcagctggataacaacttagaggtaaagtcacttgatccttgaccagagtggtacctacctagctcttgggggcacagatgtccagatctaatcc

SEQ ID NO: 686313 - DNA, 358 bp, Homo sapiens
  misc_feature (53)..(53): n is a, c, g, or t
  misc_feature (132)..(132): n is a, c, g, or t
tttaaaaaaacctacaacccccaaaaaagatgaagtgaaggcctgttgtaaanttttggaaacatgataaatgggttgttgccaaatatattgaaagttaggggctgtgtgcagtggccttacacctgtaantcccagccttttgggagtcccaggtcaggtggattgcttcagcctcaggagttcaaggtcagcctgaccaatatggtgaaatcctgtttctactaaaactacaaaaactaggtgggcatggtggcacaggtgagaggatcacttgagcctgggaggtcaaggctgcaaggagccaagattgtaccactgtactccagcctgggtgacagagcaatatcttgtctca

SEQ ID NO: 686314 - DNA, 141 bp, Homo sapiens
tactctacgcagccactggcctgaatatacacggaagcaaattgctggcacccccgcttcccaacccttcttgcctgggtaggagaggctaaagatcaccctaaatttactcatctactctagctgctgcctacacatatg

SEQ ID NO: 686315 - DNA, 375 bp, Homo sapiens
  misc_feature (2)..(2): n is a, c, g, or t
  misc_feature (10)..(10): n is a, c, g, or t
  misc_feature (237)..(237): n is a, c, g, or t
  misc_feature (372)..(372): n is a, c, g, or t
cngaggccgnagagagaagtcacttgccctggctctaccttgaagtggttctcagggttggggcgagagtcggggtggggaccgagatgcagctctatcctgtgcccctggtcgcagcaggcagccccagcttcgcgtgttctacttggcctgatcctgccgcctaatgagctcaggtctaggccgagcagagggggcacctggtcggactcggttgggctcggcggccccgccctnctcaccccgccaggcgggcccttctcgacggcgcggggcggctgcgggcgcggggctgaaggcggaaccacgacgggcagagagcacggagccgggaacccctgggcgcccgtcggagggctatggagcagcggncgc

SEQ ID NO: 686316 - DNA, 302 bp, Homo sapiens
gggcgggcttccactccatgaggtatttctccacatccgtgtcccggcccggcagttgagagccccgcttcatcgcagtgggctacgtggacgacacgcagttcgtgcggttcgacaaccacgccgcgagccagaagatgtgagccgcgggcgccgttggatagagacaggagaggccctctagtatttgggaccacggagacacgggaatgtgtaagggcccactcacagagctgtagccccgagaaaccttggggagccctgtcgcggcttactatcaaacagagacgagggccgcttct

SEQ ID NO: 686317 - DNA, 945 bp, Homo sapiens
ggaaggaggagggggtcgggcctccgaggaaggcctacctggctgctgctgccaggaattccaggtcggatggggcggccacctcctgccaggcttcagggccacgtcgtccttgtgcctgtacatgaatgagacagatgcttgaggagagcttgagggatgagcagtgataaggacgaactgtcgcagtcgttctgttcatcgatgtgggcactccgtcacgtgtctgggcaggtctctgtgtctgccgtggttccctgtctcgctctggtctgaggattccccaggggagatggtgcccagcaagaagagtataacgagtcctcacgcatgcatcaggatcgaggccaacccttcagacagagaatcaggcccaaaccgtgggctgagttgcgccttcgagcctatgaccggcggcctggagcgcagcagatccaacatgcatccaactatctgtcttcgtctcccgagatgaggcgatcgcatacatgcctttgcgaattggcgtctcaccatgagggaccataggcatgacactcacagatgatagatcctggcagggcctgaatttcataagcgctcagcggagattccggaggctcagatccatgaaggcttccaggaactcctccgtaccctcaaccaggcagacaggcatgctccatgctgagcaccaggcatatggcctgtgccatcgagactgagggcctgaagctagtggataagtttctggaggatggtggaaaccgttgtacgcactgagaatgcccttcgcgtaggcaggtccgggggacagcgagagatggccgagagacccgagtcaagatattgcgtgggagacggggtgcatccggcccaaggggagagatctgctccccaggagctggaccaggcaggactgaggacgggcagaatggctggggcccgaggggggtgggagagacc

SEQ ID NO: 686318 - DNA, 1123 bp, Homo sapiens
ggcacgaggggcactacctgacagtggaagattctggcagctaggctaggcaatgcagcgagagacaacaagaagggacgggtcacaccccggcacatcctgctggctgtggccaatgatgaagagctgaatcagctgctaaaaggagtcaccatatgccagtgggggtgtgttacccaacatccacccctgatgttgctatgctgaatgaatgctggggatccaaatggaaagttgtgaagcctatcatcacaccacaccccatgccaataaaggccaatgtctccattcccacgaatgaagcctgtatctaataaaatgcatggaggcaatgaaatggtgtgccctggaatatccaatgaatgaatgcatgtggtgaatgtcatgtaagtgcagccagctgcctgacatgctacaacctgagtggcacacctagcctgaccgtgcttacacagtacctactaccatccaaagagcctactatcctatggccacgaaagtatgcaaggtatgtacagggcttgacatatgcctacgatcgacacgtgatgctgtacgtatcaccccagacaaaacactagactatctactatcggtggtagaacgtacagcgaaacacagctggaagaacgaacaggtaggcaagtgagctcatgtagaaaagctagtccatgcgaactcctggcaaacaacaacgcggcccttgcgaagtagctaggagctagctagacagcgcaacagccatggaccctgccttgcccaatcgacaaggatgataccaactgctacctaagataccaaagtcataggagcgatgccagaccaaacttgttgcacgaacctttcatggcaataagaacagttcaaacaaactggctacaggccacctaggcctgaatgaactaaacacaacaggcatgaaaacgttccactcttgggcgcttttcccaattcccaccacggggacagcgggacaccaggaagatgggagaatacccccacaggccacgcagccaggacatgccattagatacagtatttctaaatcaagggcacaaactttcagcgttaacatcacagtagcgtttacatagagggtaactcaagtacgcactgaaaaatg

SEQ ID NO: 686319 - DNA, 167 bp, Homo sapiens
gggggggaaaactttttttttaaacccccccttcctttttttaggcaaacccgggaaaaaaagggaaaatttaaaaattgtttttttaaaaaagccccccccaggaaaacccctttgaaacgggaaaaaggggttttttttttttaaaaaaaaaggatggggcccca

SEQ ID NO: 686320 - DNA, 204 bp, Homo sapiens
tgtttcgcttggtgtctagaggtccggcttacctagaggtcatcagcaatgggcctttgtctcttgggagaggagggcactgggagtcctagtctaggggagcccagcaccccagtctctcgcttgcaaccctggttaacagccctggcatgggtctctctggctttcaccctttctctctccaacctcctcaaggggctgtag

SEQ ID NO: 686321 - DNA, 811 bp, Homo sapiens
cagcagacatggtagaatcctatacaagaatcctctaacctctaaacactgtatgtgctcatgtgagccctgtctactgtggctgctacccttcggcctccctcatgcccagcctccatgtgaacccgcagcccctccttatgattaccatgaatgctgtcagtgttggggacactggccgtcgttttacaagatgtgccactgccactcagctctgtgcagtgcaccgagttatctgccgctctgttctctctatccgcctatgtcagcatcggccgcactgggcagtgggatggggtggctgatacccaattcctcctcctgggcctgctgccttctcagggccacctggaagcacacgacaatgagtcatcctccagcactccagaatcagctttgccaaaacacagaagccccacccatcccagacaccatgattcactagctctggaggttcaagtcacagtgtactctggcaggaaggcactgtgctagcacagcgaacacattgctctgcagagaatctgctctcctccagtcggatggaatccctctgttgcacatcccagggccagtttccagattaaagaattctgaatgtgctctaaattctcactgcagatgggacaatggtacaatccttttgctaaaacaaaatgcaaaagatacatttctaccccctgccaggtcacaacagtaactatcagatccactacacccaagatttctgaagaccatggcatctccacccaagcgcgtgtaaataattccgaaatagaacctgtcatcaccctgaaggaattctaacttc

SEQ ID NO: 686322 - DNA, 209 bp, Homo sapiens
gctgatgctccctcttcaaaaaaatacaaaaattttccgggcatagtggtgcacgcctgtaatctcagaggttgcagtgagccaagatcacaccactgccctccagtctgggcgacagagccagactccatctccaaaaaaaaagaacacaaacaaaagggagaaaggagtttgaaagccgggaaacccttttccctttttgcccttgg

SEQ ID NO: 686323 - DNA, 1145 bp, Homo sapiens
ccgatcccctaacaacccccctcctaatactaactacctgtactcctacccctcacaatcatggcaagccagacgccatcttatccaggtgaatcgcactatcacggaacatacaatacgtctgaccatctcgtattaccgtaagtcgtcgccatagcgcaaagtgctcctgtagagtgtagtaagcatgtcaccacgcgcagcacgaaccttaactcattacttttgatagtcttgcttcggagaccacagttatccccaccttggctatcatcacccgatgaggtcgaagccaggccagaagcgcctgaacgcaggcagcattacttcctattctagcaccctagtaggctcccttacccctactcatcgcacataatttagcactcacatataccctaggctcacttaaacattgctacttacgtcacgtctcactgcccaagaactatcaaactcctgagccaacaacttaatatgactagcttacacaatagcttgaatagtaaagatacctctttacggactccacttatgactccctaaagcccatgtcgaagcccccatcgctgggtcaatagtacttgccgcgagtactcttaagaactaggcggctatggtataatacgcctcacactcattctcaaccccctgacaaaacacatagcctaccccttccttgtactatccctatgaggcataatgataacaagctccatctgcctacgacaaaacagacctagaatcgctcattgcattactcttcgatcagcaacatagccctcgtagtaaacagccatctccatccaaatcccctgaagcttcaccgaggcaggcattctcataatcggccacggttaattcccacattagcagtactgcctagaaaataaactatgaaggcaactcccagtgcgttataaacccttctcaggagttaagcgtatcccctatatatctgagactcataaagcctaacacgcttaccaccataccctgggaacccgggggcacaacatctgagaatattcccatagaaaaaataagcacacctcctataaaaaggccgagctcagcaagacactactgagtctcactagctagtattgcattatattactcttaacaacagactaacacaacat

SEQ ID NO: 686324 - DNA, 225 bp, Homo sapiens
taagcgcagtggcggagcaggtatagtaaacctggtctgattgtatggttgtcatgatcagtgtctggaagtggtgggctgagtgtttgccactgtgcattggcatggcggtgggtaagccggccatgagaggagctggcgcttgcagacttgaactggtatacactttggcgttgtgcagtggcggtgtgtctagaatcaactgtcactcccatgaaagtgaat

SEQ ID NO: 686325 - DNA, 331 bp, Homo sapiens
atcaggagaggcatactgatagtacatagttacttgcgggtcgcaattaccacagaggagatatctaaatggtgataccacgttcacgctgcaggttccagtttatccagacccaggcatactgtgaaggagccctttcccatctcagcagcctccttctcagatttatcaatggttcttgtgtcgatgccaccgcatttatagatcagatggacagtgtggacttgcccgaatctacatgtcccattgacgactatatttatttgagtcttttcctttcccattttggcttttagtgggtaagttttcacgacacctgtgttctttgctg

SEQ ID NO: 686326 - DNA, 179 bp, Homo sapiens
catggataatgtggatggtagaagatttaattaggatacaaagcttagcacgagaggagggccagagaagctgacaggcaagctacaggttacaacacatttgtgaactccgtccacgcacagtggctggcagggcctagctgctacaaagaacacatgttttagacaaatactcctca

SEQ ID NO: 686327 - DNA, 713 bp, Homo sapiens
aggcgtgcggtcactgaggtgtagcagaggatgcgctgtgcgtgctgtgagtgcggcgacaagggcaaatgcagtcgactcctcgctgttgggcaagagactctccgaagactcgagccgccaccagctgtttgcatgaatgtgggctgagcatgtgtgatgctccatgatgcgaatgacgcgtctggtggcctgacatggagagtggcgcagctggaggagtgatggcggctggctgcggaaggagatggcctgctggtgttcctgtgctccggttgcctggctggccgctgggcgactcgctgagctgggtggccagccaggaggacaccaacttgcatcctgcttcgctgtgtatacctgtaatgtgctctgtggataaggaacagaagctatccaaacgtgaaaatggacccatggttgcggtccttgagactttgttgctgcgcggggtgctcactcaatcttggctacgttgtacagatgcacgcccaagaatcttgattacaagagagacttgttttggctcagatgtgaagccatttgaagagtcatgtttagggtcctctgaaaagcaaattgtgtcagaagataaaagagctttttagtcttgaaagcagagtcgaactagaaaagtctctaacacagatggacgatgtcttgaaagcgttacacatgaagctgtgggaggccgaatccaaattgtcctttgc

SEQ ID NO: 686328 - DNA, 1736 bp, Homo sapiens
  misc_feature (35)..(35): n is a, c, g, or t
tttgttttctctcccccgcgcccgccgctgttgtnttttgtgcttctcacacggctggtgtgcgtctgtcttcgcttcctttgttgggctccactggtgtgttgtgcgcttgacttatcgacacatgtttgttgttgtgtgctctccgtctctccttgcacttccgtctcgctctcgttcttgcggtgtgtggctgcgcctccctgtgtctgttggtcctgtgtgtctagcctctccgttgtggtggggggagtgggtagctcgcgctccacgccggtgggtggctggcgttgcgtgcttacttgcgtagccgtttttttgttctccctcgtctggctgactctcgactgttgtgggttcttgcctgtgcttttttcgttatgtatcgattggcgctcttgcttttctttgctcgatttgttctcagtccctcttcttgttgttccatgtgtgttgtacgtgtccgtcttctcctcgtattcgtgctggctctcgatttgtcatttggtctcggctcgtcgtcccccttgtgttttttgttggttgttttggggtgcgttgtctgtagagcgtgtgcctcgtgggcgctcgctgccgctggcagatcatcgttgcgctgtgttttgtacagtgtcttgcgctgtcagccggtaatatcaggtgtatgtttggtgggcggttgctttgccgcttcgctttcttttgtctctggtccctggctgttacttgcctgcgcatgggcgtcctgcttcttgccgcttcttgttccaactccgcctttccctggttgtttttttttcttctctccactctccgctcgcggttgcggtggagtttcgccccccctcatcgtgtcgtttgtgttctctctcacgcgctgcggctctgttttctgtgtttgtgttttgtgttttttcgttgctcgtctacctctcgtcgcggctcttcgcgttcggtcgtcttttttttttcgttttcctctctctcacgctcgctgcgcgcttgtgtggctgattgctgttgtctccctcactcgcttccctcgtgcgtcgtcttttcctctctcttctctctccgctcgacttcacacacacctccctctcttctctctcttttatatttgtacgatacgtctttctgtttttgtctctgcgtctacacgcacatctatcctccacgggcctcgtctctctgtctgctgtgctgtgttgttggtttctgctgctctctcttcctctcctctctctctactctcttcctttgcgcgcgcgtggagtagtgagtgtgtctctctctacactcgctctctcgtctctctctgtctctctctctctcgcgccgcgcgctccactctcatctctcttcttctctctccctacactcctccgcgcgcgcgcgcgcgcgctctctcatcttctgtcttgtcgttgtgctctccccgccgcccgccgcgctccgacattcttttatcttttttttcttctctctctctctccgcgtttctgtcgtctcgctccgcgcgcgcgcaacctatctttcttttctctctcctctctctcggcggggtctcgcctcgcgcgcgcgctcgtgtgtgagtcagatcacgcccgccctcctctctctctctctctctctctctctctctctcctcctcccccccctctctctctctttttcgcccgcccccctcctctctctctctcttctctctctctctctctcctcaataacaaata

SEQ ID NO: 686329 - DNA, 909 bp, Homo sapiens
  misc_feature (27)..(27): n is a, c, g, or t
  misc_feature (142)..(142): n is a, c, g, or t
  misc_feature (187)..(187): n is a, c, g, or t
  misc_feature (189)..(189): n is a, c, g, or t
  misc_feature (248)..(248): n is a, c, g, or t
  misc_feature (275)..(275): n is a, c, g, or t
  misc_feature (283)..(283): n is a, c, g, or t
  misc_feature (295)..(296): n is a, c, g, or t
  misc_feature (300)..(300): n is a, c, g, or t
  misc_feature (304)..(305): n is a, c, g, or t
  misc_feature (314)..(314): n is a, c, g, or t
  misc_feature (432)..(432): n is a, c, g, or t
  misc_feature (449)..(449): n is a, c, g, or t
  misc_feature (511)..(511): n is a, c, g, or t
  misc_feature (519)..(519): n is a, c, g, or t
  misc_feature (556)..(556): n is a, c, g, or t
  misc_feature (583)..(583): n is a, c, g, or t
  misc_feature (585)..(585): n is a, c, g, or t
  misc_feature (601)..(601): n is a, c, g, or t
  misc_feature (607)..(608): n is a, c, g, or t
  misc_feature (611)..(611): n is a, c, g, or t
  misc_feature (628)..(629): n is a, c, g, or t
  misc_feature (639)..(639): n is a, c, g, or t
  misc_feature (646)..(646): n is a, c, g, or t
  misc_feature (649)..(649): n is a, c, g, or t
  misc_feature (651)..(651): n is a, c, g, or t
  misc_feature (655)..(655): n is a, c, g, or t
  misc_feature (665)..(667): n is a, c, g, or t
  misc_feature (696)..(696): n is a, c, g, or t
  misc_feature (698)..(698): n is a, c, g, or t
  misc_feature (708)..(708): n is a, c, g, or t
  misc_feature (722)..(722): n is a, c, g, or t
  misc_feature (728)..(728): n is a, c, g, or t
  misc_feature (757)..(757): n is a, c, g, or t
  misc_feature (779)..(779): n is a, c, g, or t
  misc_feature (790)..(790): n is a, c, g, or t
  misc_feature (814)..(814): n is a, c, g, or t
  misc_feature (827)..(827): n is a, c, g, or t
  misc_feature (844)..(844): n is a, c, g, or t
  misc_feature (871)..(871): n is a, c, g, or t
ggccgcgatttctctcgtccgcaaacnggggcaggacacgctgtgagccaccgagctctgaaagtgacagtgttttccagcggtctgttaccccttgcaaagggaagttcctgcacccctagtccacaggttcctggaaggngttccttctcctgtccactagagtgcgccagagtccacgcccgangngcctgagggctctactagccccatcccagggtgtgcgtcacccacagagggtcccaganccctgcccagggggtgacacgcccggngatggggntcctgagagatnngcanccanncaagttctnaatcccctgattttcttcaccttttcatccaccctggcatcccaaatggcgcgttttgctccttccctttcaaaggagggaaactgagtcaagcaagggcaggagtaccctggggggnggctgtcctggtgagangcagagaagagagcggccagcagcgggccgtccgtcccccgactcccttgcgtgtgggccgnggctgganagatagaccagggacactaggggtccctgcagccacncccacctcccacccgcccgccggtgcngnctgccccaggtggggnctgggnnacngcaggttgatctcgtcnnggtagcgggngagcacngantnccgnacgtccttgnnnaccttgcggatgttctgtgtgtctgtggnanatgtgtagtngctgaagaggcgtnggggtngtgcgcccttcttgctgccctcgggggcngtccacgcacccggtgtacatnctcgtgtacangtacaggatgaacctcttggctgnctcaagattcttntttagggacctgggaantgggggaataggtagcaagtgggaggnggggatttttctatcagatgtcggtttcttgagaagag

SEQ ID NO: 686330 - DNA, 124 bp, Homo sapiens
accttctgctacatatacaccacttccaccacacagatccgataaccaccaacatagggactgtgggagcttctctccaacacaactgaccccttatctgacgcgcgagggggctcctctagag

SEQ ID NO: 686331 - DNA, 369 bp, Homo sapiens
  misc_feature (211)..(211): n is a, c, g, or t
  misc_feature (347)..(347): n is a, c, g, or t
  misc_feature (357)..(357): n is a, c, g, or t
tgcagctgtctcttacttttaaccagtgaaattgacctggcccgatgaagaaggcgggcataacacaggaagacgagaagagcctatggagctttagagtttatgcaagtgcgaaagcagtcatcctcaagcagaacgccgatcaggctccctaatacgtacgcaagagcctcgcatataaacaagtgttccggctatgtggggcggaccntgcggacgcaagaagaccaacccatccgtaggcagatagcatgcctcaagagcttcagccatggtccaatacgcgaaccctagcatagtatcatcaccaattgaatcccaatgtgaaactcggatcacaaacaggnagagcgacangcgtatacactg

SEQ ID NO: 686332 - DNA, 119 bp, Homo sapiens
tctaagacggagcacccaggtgcggtggactcttgctggatgttgtagttagacaggtggcgtccatcttccagctgtttcccagcaaagatcaacctcggcgggttagggatgctggt

SEQ ID NO: 686333 - DNA, 184 bp, Homo sapiens
gagaatactggcaggtataaaggagggattgacccactcctattactggtatacggatcagagaaaatacggtacatgtccccatggaggatattgcttggcctttgaccgattcttaacgtggattctgaataggtatcacatcccagacgtgtccttataccctccgatttgtccacgcgtt

SEQ ID NO: 686334 - DNA, 159 bp, Homo sapiens
  misc_feature (133)..(133): n is a, c, g, or t
taatgtttagcctctgtagtctcaataatcatcccatacacacagtgtccttactgatgtaacttctcaaagcactgggtactttccttcacactgcttaccaatttgttattagacacttacacacatattntcttggttaattctgccctctcccag

SEQ ID NO: 686335 - DNA, 205 bp, Homo sapiens
tgatcccggggtagctatgtgttttgtccaggggttgcacatgcatgtgtcatggtgtgtctctgtggcgggcagggctgtgtgtgattgtgtgcctgtgtgtgtctgtgtgtgtaatggtgtgggtgagtgagcctcctctgtgctgtccacccctctgtggtgtccagtgctgtccacctcctctgtgctgtccacccccctg

SEQ ID NO: 686336 - DNA, 728 bp, Homo sapiens
ggagaggtctctgcaggactcatgattaatgaggccacggatatccaatctaggggatctccttgtcttgaaatccatagtaaccttaattacatctgcaaaatctcttttaccatctaaggttacatacaggttggagattaggacattaacatttaaccatggaacattattcttgcctactacagttcccaccaccccccacccactcctgtgttgatcagatcatcaaaataattatcatcataggtgctcatctcatcacaccaagcatcaactctaccaaacccatctaccatcttgtctgagatcatccccacctctcaacgtcccacgtctcacatcgaaaagaccaaactaccactcacagcccgcgagacgatctcgccacgcgaaccacaagctgcggccccgcgttcacaaccgcaggcacaccgctggcccccacgcccggcgatccgacgacacgacacaccaatgtgccgcctggcccctcacacggacaccacgggctccgcacgtgccactacaccgtttccgtgattccaaaaaaagccagcacacagactggatacaaacgggagcgcattcaggccacaagctcaaaccacagacactcacatagcgacgtcaaacgtaatgttaaatcaacacggaccagggaacaaatcaccaacgttccacgtgcagctcactgcagaagatagatcggcaaagcagaaatacac

SEQ ID NO: 686337 - DNA, 192 bp, Homo sapiens
atggagacggggcctatgtgtgggggcagctgagaccccacaggatgggcagaaggctggacggaggggccaagttcagacaactgaataattttaacaggaagccacatttcagttccatacaaatgtgactccttggtctaaaatttgagttacctgaagaaaggatggttttcccttctgcttgctttt

SEQ ID NO: 686338 - DNA, 296 bp, Homo sapiens
  misc_feature (117)..(117): n is a, c, g, or t
gctcggtaccgtgccgaagatcactcgcagaagatcactccatattatgcaatgaagcaacttggaagaggaaagaaaagaagtcaggaatggccttactcagagtctcacacgtgnccaggctggagtgcagtggcatgatccctggtcattgcaagctccgcctccctgattcaaaggatttttccacctcagcttctcatgtagctgagattacagggacccttgaaatccatggatgggggtatacagttcagctagggggattgtgaacttccggaagatgtgcttgatgt

SEQ ID NO: 686339 - DNA, 1113 bp, Homo sapiens
gccaaggtgagggagttgatggagcgagctctggagctagaggcactgggcgtgggctgaggatgtgcctccccagaggctggactggccattggcataggttgagacctggccatctgactatcactccacgaatcacctcccaggtcccgaggccaaggaccgaggagcatcacgctggacattgggctcacagagtaaagcgggtgctgcgtggtggagcatgtctgggtgcctgaggagctaccagcgcgcctttaatgaatattctggagagaggcaaggcaggttgacgaattacagggtccaactgttattgccaagcatcaactaatcgtgcctgtccgttccggagtgtccatggaagcagaattgtgcgaggtagcccgcaggacgacccatgagacctcctgctgaggaccccgcatgggtgcagctcgaagatgccactggcttgtgatcaagcctgtcatccaggaacccgtgtcatgatggacctggatacgccactgttggcaagaaggttccatcgcactatccgtctggggcggcccctgttggaggaacgcccctggcataaaccaagtcagtacggccacacgtgatacgaagcactgaaggggccttgtccatgaagtttcctccaagaaagcctgcgaagggtgcatggttctccagagaggaggtgatgacttcaacttggtacggggcccgtatgtggaccattggctaggcctggttgacacagggagttgaacgattctactccgcaaaagctgcgagctcaacggggcggcagcccctggggtcccgtccgcaatgaaccgggtctgaaactaggccgaggctacggcaggttgtgcattgtggtgacattcccttgggcccaaattgcttgacaaacccattccatgggattacttggttacccccaaggaacggggctccccccagggagaacctggtgcttgcagggccgtgctactttccgcttaacgcattggccgggaagaatcgagttcggcctggtatggagaccccaaggttgccatcacaggaaattgagggatggccccgtgacatgccaaccgtgtgtttacccctgaagttcag

SEQ ID NO: 686340 - DNA, 262 bp, Homo sapiens
tgactatttgttgctcttccaaaatatcagactattggtgtactgaatagcgctgtgggagtcagatccatgtgaccagtaagttatcattggactaaagatagggactccgggagtcatggcaccctgaggtgaggcaagcccttgagcgtaaggtggcaggctgttgttctgatccatgatgttcactttcttcttggcagaccagaaacccttgcgcttggaactcgtctcactattcaattttttcctagagcatctc

SEQ ID NO: 686341 - DNA, 380 bp, Homo sapiens
caggaggctgtggctgcaattgctctgaaagaggcgggtgcgcaagttggagactgctgagctgtccccttaccttagtccatgaagacaacaggctacagtgaaagtaacagtgaagcctgtaattgcttactatgctggcgtaaccaagaggagaaaacgccactccccttatgttccatttttttccccacaggacagcaccagacgagattttgccatgttgcttgggctggtctcaaactcctgggctcaagcgattctcccacctcagcttctcaagtaccttcaattacagacaggagccatctcatccagcaatttcctttttatgtattcacaatgtatagtagatgataaaagcctatttaagtaagttt

SEQ ID NO: 686342 - DNA, 231 bp, Homo sapiens
gccagggctcgatgccgtcggtattcacggcctggcattatgtcgaccagcccgagaatgctgttcacgactgcgcgatggttgatggaagatcggaatatcatacgccaagctaggccacatgttcgattttgtccatatcgaaggcgttcaagcgccatggtcatctccagtgaacaacagaacgcatgccctccgtcttttagattgtcggaactctaccgcgttttt

SEQ ID NO: 686343 - DNA, 172 bp, Homo sapiens
gcaacctggacgtctacgctctatttctatgaagttcaacattttttttttccttagaattccacatataagtgatatcatgcagtatttgtcttattccatttggtatatttcacttagcataataccctccaggttcatctatgttgctatcgctggcctacagcacatg

SEQ ID NO: 686344 - DNA, 615 bp, Homo sapiens
  misc_feature (81)..(81): n is a, c, g, or t
  misc_feature (317)..(317): n is a, c, g, or t
  misc_feature (381)..(381): n is a, c, g, or t
  misc_feature (397)..(397): n is a, c, g, or t
  misc_feature (505)..(505): n is a, c, g, or t
  misc_feature (509)..(509): n is a, c, g, or t
  misc_feature (517)..(517): n is a, c, g, or t
  misc_feature (528)..(528): n is a, c, g, or t
  misc_feature (571)..(571): n is a, c, g, or t
  misc_feature (612)..(612): n is a, c, g, or t
  misc_feature (615)..(615): n is a, c, g, or t
cacaatagaaagtattcaagagaaatacacagagaaaaaagaaacaaaaatcataaacacaagatgagggccgggcgtggnggctcactcctgtaatctcagaactttgggaggccaaggtgggcggattgcttgaggccaggagttcaagatctgcctggccaacacggtgaaaccccatctctcctaaaatacaaacattagctgggcgtggtggcctgcgcctgtggtcccagctacttgggaggctgaggcaggagaatcgcttgaacccggaaggcagaggttacagtgagccaccgagattgcaacacggnactccagcctgggtgacggggagactctgtctcaaaaagaaaaaagaaaaaagaaaaaaataanaaaaaataaacacagnatcagtttgatgtgggacttcaagaaacaggcggaattggagactctgaaggccagtatcaataacaatgaaggattctttcatgcactgtaatctgaataggggcanacanaaaatgangtggacagaanacatttgaaggagtacagctgaaagtttttgaaattaatactnttaacttacaaggaagttcaatgaacctaagcacatgaacntgn

SEQ ID NO: 686345 - DNA, 1354 bp, Homo sapiens
tgtggggacttaaaccccaaatctttatggaggccctcagcatctatttctctttctcctgacacagtctgggttccccggagacgtccagtccggggggacagcaatgaaacccatcttggcggccagcaggggcatctctgcgaatggtgaaggtgtccttgccaatgtgctggtggttgccacctcacaaaaggatgctccaaaggatcacatggccacaccccggatactcgttggccacgaaagtctcctctttggccattattatttggtggtgtaccgcccgtggccatgcctttccaaagatgggtgtttggtcaacttcgggcaaccttcacaggccaacacacacacaaccaacaaggcatctagtaggagcatagagagaagaataaacccttcttgtgagaggccagaaaagaggaaagtatctcaacacggggagctcatcacagtgggcacctcaaaggggatagcggagagaacaatacaccggggtgagcaataagataccacagtgatatgcccccggagaccacacattgtgccccaagggggaatcccttcccagagagactatttcatgctccgctccccacgtgcacaagcacaaccagagagatgtggtgaattacgcccactcgagggcacaatgtggtgtggccccccacacacgaggggggaaagccacaacaacatgttgtgcccccaaagttgtgttgtagaacgacttgtggtgggcaccaatctacagttgtggccccgaacgaggtattaccccaaccaataaactcggaggacgccccacccatgtctggctgacaacaaatgtcagcgccaatatgcaagaagacggcagccacaacatgagcacaccacacaaggtctcacaccagacacacccggctactccttatgacaaaacccccgcgaacataaccgagggagaacctcacccgcggggaaaaaagaaacacccacgcctcttagtaggagacacaaaacaatagcagtcgacacaccacagcaccgtcgagtgagaaggaccctcgcggagaagtaccacgctagtggggagacagaagacagtctgcgtccccatgatgagacgaagaaacgtaccccccccagtaggcggaagtcggtataaccccgacggaggcagacgcccggggcaacccaagaacaagagaaaaaaataaccacaaaaagggagagcagaccaacacaagagaaccgcaccgcaacaacgacgaccaccatctaaacaaacgacggagggcgaacccatacaccacagcagtatgataacccgaccactgcgggaagaaaacacacaagatagaaaccc

SEQ ID NO: 686346 - DNA, 677 bp, Homo sapiens
  misc_feature (398)..(398): n is a, c, g, or t
  misc_feature (410)..(410): n is a, c, g, or t
ggcgtgaggagctcatgcacagattatgacggaggagctggttggtcacggcagagacaacaggagaaggcaatgcggtcccacatacggcatcagcataactacttccatacgtactgtggcccccggaccatatagcatgagctgtactgggttaagctgaagcttgcagccattatacataggtgcctgtgcctgaggaagcaatgccgaatgcatagtctggaggatatgaccgttacagagatcaagggcccttaatatacagctttgattggagcattgacagagacaccgtatcggctgatgcacttagggagcgtgcacacatagccccacaggctgatggtcccatagccacttgtctactaacatgcacgctcaactgagctgtgtgncactgaactcangattggtcatatgactagaatgagcgaccatcggactagctcatagggcctatagaggactgttgcccacaggctgatgttactatccagacacatgcacacgtatgcagatcgcatgactgccctcgatacaggcgacttcagaccaatcaagacagcggcgcatgatagaccgaggagagaactcgtgttacatatcaccatggcccactgtcgcagcatgccagatgctccatctgatcctttaagagctcatggcatagcggc

SEQ ID NO: 686347 - DNA, 237 bp, Homo sapiens
attcgcggccgcgtcgacggcttggtggtgcacgcctgtaatcccagctgctcaggaggctgagacaggagaatcgcctgaacctgggaggcggaggttgcagtgagtggaggttgcagtgagcctagattgcgccactgcactccaccctgggcaacggataaagactgtctcaaaataaagaaaattatctgggtatggtggtgggctccatgtgattccggcttctcaagaggc

SEQ ID NO: 686348 - DNA, 537 bp, Homo sapiens
atccccccatgcacttagtcaacagtatgagttagaatgagcctgatgctgaagtatcaagaaactagaaaagaaagtggtacagatactatattataaatctgttaggtattttctttaaaagtaggtgtttttgttctttttctttctttttctttttaaatatctggtcatcctgggcactgtttctaaaaaaaaactccattatcccaagcaaaaagcacagaaggtggatttgggcttcaagagatgttacctcaaaatcttaggcctagcagagaatcaccaattttatggagagttaccaggggtttaacaggaaggaagtgcctttagttaggttctcaagccagaggctgaaggcagcagctaatctcagaggacagctctcctcagtgaaattgacccatccggggtggcatgtcaccccaggaattaaccacaatttaaaaacaattgatttcgtaggatagcccagtgacttggtgccctgtgaccctgaggcccctgttgcacacggtgcatggggggtcccga

SEQ ID NO: 686349 - DNA, 870 bp, Homo sapiens
  misc_feature (801)..(801): n is a, c, g, or t
  misc_feature (810)..(810): n is a, c, g, or t
  misc_feature (837)..(837): n is a, c, g, or t
cataaagcaagtccttagagacctacaaagagacttagactcccacacaataataatgggagactttaacaccccactgtcaacattagacagatcaacgagacagaaagttaacaaggatatccaggaattgaactcagctctgcaccaagcatacctaatagacatctacagaactctccaccccaaatcaacagaatatacattcttttcagcaccacatcacacctattccaaaactgaccacatagttggaagtaaagcactcctcagcaaatgtaaaagaacagaaattataacaaactgtctctcagaccacagtgcaatcaaactagaactcaggattaagaaactcactcaaaaccgctcaagtacatggaaactgaacaacttgctcctgaatgactactgggtatataacaaaatgaaggcagaaataaagatgttatttgaaaccaatgagaacaaagacacaacataccagaatctctgggacacattcaaagcagtgtgtagagggaaatttatagcactaaatgcccacaagagaaagcaggaaagatctaaaattgacaccctaacatcacaattaaaagaactagagaagcaagagcaaacacattcaaaagctggcagaaggcaagaaataactaagatcagagcagaactgaaggaaatagagacacaaaaaacccttcaaaaaatcaatgagtccaggagctggttttttgaaaagatcaacaaaattgatagaccactagcaagactaataaaggaagaaaaggagagaagaatcaaatnggacgccantaaaaaaaatggattggaaggggatantcaccaccgatccccacaggaaattccaaactt

SEQ ID NO: 686350 - DNA, 832 bp, Homo sapiens
  misc_feature (591)..(592): n is a, c, g, or t
  misc_feature (596)..(596): n is a, c, g, or t
  misc_feature (599)..(599): n is a, c, g, or t
cgtctcaacagttgtgccaagtgaagtttatttaatagttctttaaataagaataacaaagctgaaagatactgtgcattctaccagttccaataagcaataagcgacagccctcaagcgtcagatccctagtgaagactgcatgcaatcctcggcattttgaactgctttcggctccaatatgaatgatgcacagtgcaggatgaaaaactaagggagattaagatgcaaaatggggcaagtccaaaggcctccatactccgggttggcgatcatcggcagaaaaacagaaataaggatccctccactgggctgcttctttggcggcggaaatgttgctgaagcggatctgggctggcttgtcgcggtcctgataggcgcctttcccgcggccgccggcagccccggcagtcgccccgctccggggtgccacattctcgggcatggcaaactccgctgtgtctgggttggctcgggaaggacggatggacccggattctggccggccgcagtgtaataacggtaagccctcactgccttcacgaaccttccagaaagcggcgccggcgtcgggaggaggcggaggcggannaccntcntgccgcgcggcgctggcgtgacgtaggaggctgtccgctgcgcgccgggcgaggaggatgcgtgcggtgggctccgggctggcgagattgtacgcccggggcgctgtgggtgaagagcgccgggggaacctttacgcgaggcagcaatgacaacgcgcgattttaaaggcgagtggtgaggacatccgcatttcctcactccaccttgcacggctatgaggtccccctcgtgc

SEQ ID NO: 686351 - DNA, 357 bp, Homo sapiens
aatgtctgttttttaattagcacaatatttaattgctttctgatttcagatacattttttttctcttgttcttacaaaaaccctgcagagatgaagaagctgtggtttaaggcagttatgtaacatacccaatttcacacgggcagtaaaataggctattaagcagggccttagtgagtgaaaattgattataattggatcaaaacagccttacttaaagaagttgaactaatgagttctaatttccttttaaacaccaagattctgcatttatgtgtttttcaaaaatcaccctaggaggatgatactctgtaagtctcatgtccaggaaaaatgatccgagtgggtatcctatag

SEQ ID NO: 686352 - DNA, 955 bp, Homo sapiens
  misc_feature (714)..(715): n is a, c, g, or t
  misc_feature (719)..(719): n is a, c, g, or t
  misc_feature (722)..(722): n is a, c, g, or t
cgtctcaacagttgtgccaagtgaagtttatttaatagttctttaaataagaataacaaagctgaaagatactgtgcattctaccagttccaataagcaataagcgacagccctcaagcgtcagatccctagtgaagactgcatgcaatcctcggcattttgaactgctttcggctccaatatgaatgatgcacagtgcaggatgaaaaactaagggagattaagatgcaaaatggggcaagtccaaaggcctccatactccgggttggcgatcatcggcagaaaaacagaaataaggatccctccactgggctgcttctatagggaggacaagagaggatcacccgaagaaatgggaaatgagccaaacccgctcaagcccacgatgagagcgcagagcacaacaccgcggcgccgcgggtcaggccatgagagtgatacctttggcggcggaaatgttgctgaagcggatctgggctggcttgtcgcggtcctgataggcgcctttcccgcggccgccggcagccccggcagtcgccccgctccggggtgccacattctcgggcatggcaaactccgctgtgtctgggttggctcgggaaggacggatggacccggattctggccggccgcagtgtaataacggtaagccctcactgccttcacgaaccttccagaaagcggcgccggcgtcgggaggaggcggaggcggannaccntcntgccgcgcggcgctggcgtgacgtaggaggctgtccgctgcgcgccgggcgaggaggatgcgtgcggtgggctccgggctggcgagattgtacgcccggggcgctgtgggtgaagagcgccgggggaacctttacgcgaggcagcaatgacaacgcgcgattttaaaggcgagtggtgaggacatccgcatttcctcactccaccttgcacggctatgaggtccccctcgtgc

SEQ ID NO: 686353 - DNA, 371 bp, Homo sapiens
  misc_feature (37)..(37): n is a, c, g, or t
aagcacagaaggagcgtgggtcggaaaagaagggatncttcaggcctagaaaaaagtcccaaatcttcaaaaggtggtagtagtagagatacaaaaggatcaaaggataagaattcccggtccgacagaaaaaggtttatatcaaagagtagtcggtcaggcaaaagattttcaagaagtgaaagaggccgaaaatcagccaggaaagccaaaaggggttaatggaaaaagccaggcttttttagccattttttgcagcaaaagattttttgataaaaaaggattccctttccttgtaaaaaggatgctgccttaaaaattgcatgttgtaaaaaatctttttggaaaaaacagactgtttgttttccaga

SEQ ID NO: 686354 - DNA, 1033 bp, Homo sapiens
  misc_feature (202)..(202): n is a, c, g, or t
  misc_feature (205)..(205): n is a, c, g, or t
  misc_feature (212)..(213): n is a, c, g, or t
  misc_feature (217)..(217): n is a, c, g, or t
  misc_feature (219)..(219): n is a, c, g, or t
  misc_feature (251)..(252): n is a, c, g, or t
  misc_feature (254)..(255): n is a, c, g, or t
  misc_feature (266)..(266): n is a, c, g, or t
  misc_feature (268)..(268): n is a, c, g, or t
  misc_feature (288)..(288): n is a, c, g, or t
  misc_feature (291)..(292): n is a, c, g, or t
  misc_feature (299)..(300): n is a, c, g, or t
  misc_feature (307)..(307): n is a, c, g, or t
  misc_feature (312)..(313): n is a, c, g, or t
  misc_feature (402)..(402): n is a, c, g, or t
  misc_feature (792)..(793): n is a, c, g, or t
  misc_feature (797)..(797): n is a, c, g, or t
  misc_feature (800)..(800): n is a, c, g, or t
ggttgacggggtgaaattgtgggatccacgtggtgcgctggggtgggtcgtgcacttgcatcacgcgcatgaacgttcagtggagggaagcagagtgtgaatactgaggaaaccgccgtgggagtgcagtggaagtcggtggcactgagtgtgacgaagtttctctgtcactcagttccacaggtcgagacatgtcagtcanganttcaatnncctntnccagggccttctggaatgactcagaaatgatnntnngatgaatcccntnctgaagaagcttggtacaangannctaaganngagccangcaanngatgactactgatgtggtgccatctcctgcttctatatcttgagccttagacagctccaccagcattctggctgctggatgtaatactngcatttgtttcagaatggtagcaccatcatttgtaatggttacatcaccttttccatcttgaatcattttatccattccttttggtccaaggcttgttctaatagcatcagcaaccgctttggcggcggaaatgttgctgaagcggatctgggctggcttgtcgcggtcctgataggcgcctttcccgcggccgccggcagccccggcagtcgccccgctccggggtgccacattctcgggcatggcaaactccgctgtgtctgggttggctcgggaaggacggatggacccggattctggccggccgcagtgtaataacggtaagccctcactgccttcacgaaccttccagaaagcggcgccggcgtcgggaggaggcggaggcggannaccntcntgccgcgcggcgctggcgtgacgtaggaggctgtccgctgcgcgccgggcgaggaggatgcgtgcggtgggctccgggctggcgagattgtacgcccggggcgctgtgggtgaagagcgccgggggaacctttacgcgaggcagcaatgacaacgcgcgattttaaaggcgagtggtgaggacatccgcatttcctcactccaccttgcacggctatgaggtccccctcgtgc

SEQ ID NO: 686355 - DNA, 979 bp, Homo sapiens
  misc_feature (202)..(202): n is a, c, g, or t
  misc_feature (205)..(205): n is a, c, g, or t
  misc_feature (212)..(213): n is a, c, g, or t
  misc_feature (217)..(217): n is a, c, g, or t
  misc_feature (219)..(219): n is a, c, g, or t
  misc_feature (251)..(252): n is a, c, g, or t
  misc_feature (254)..(255): n is a, c, g, or t
  misc_feature (266)..(266): n is a, c, g, or t
  misc_feature (268)..(268): n is a, c, g, or t
  misc_feature (288)..(288): n is a, c, g, or t
  misc_feature (291)..(292): n is a, c, g, or t
  misc_feature (299)..(300): n is a, c, g, or t
  misc_feature (307)..(307): n is a, c, g, or t
  misc_feature (312)..(313): n is a, c, g, or t
  misc_feature (738)..(739): n is a, c, g, or t
  misc_feature (743)..(743): n is a, c, g, or t
  misc_feature (746)..(746): n is a, c, g, or t
ggttgacggggtgaaattgtgggatccacgtggtgcgctggggtgggtcgtgcacttgcatcacgcgcatgaacgttcagtggagggaagcagagtgtgaatactgaggaaaccgccgtgggagtgcagtggaagtcggtggcactgagtgtgacgaagtttctctgtcactcagttccacaggtcgagacatgtcagtcanganttcaatnncctntnccagggccttctggaatgactcagaaatgatnntnngatgaatcccntnctgaagaagcttggtacaangannctaaganngagccangcaanngatgactactgatgtggtgccatctcctgcttctatatcttgagccttagacagctccaccagcattctggctgctggatgtaatactccatcttgaatcattttatccattccttttggtccaaggcttgttctaatagcatcagcaaccgctttggcggcggaaatgttgctgaagcggatctgggctggcttgtcgcggtcctgataggcgcctttcccgcggccgccggcagccccggcagtcgccccgctccggggtgccacattctcgggcatggcaaactccgctgtgtctgggttggctcgggaaggacggatggacccggattctggccggccgcagtgtaataacggtaagccctcactgccttcacgaaccttccagaaagcggcgccggcgtcgggaggaggcggaggcggannaccntcntgccgcgcggcgctggcgtgacgtaggaggctgtccgctgcgcgccgggcgaggaggatgcgtgcggtgggctccgggctggcgagattgtacgcccggggcgctgtgggtgaagagcgccgggggaacctttacgcgaggcagcaatgacaacgcgcgattttaaaggcgagtggtgaggacatccgcatttcctcactccaccttgcacggctatgaggtccccctcgtgc

SEQ ID NO: 686356 - DNA, 127 bp, Homo sapiens
cactcgcacacgcacacatgcacacaccttctgtctctcactcaaagactaaatccatcatcttttctgattgtgagtttcttgtgctacactgaggggacttggtacaatcagtggacagtgcctt

SEQ ID NO: 686357 - DNA, 360 bp, Homo sapiens
attttgggaaagtgagcatgaagaagggactcagagctgccaggtacccgagtctcaggctctgacatctcttggggcccccttctgccacaacttcttgccacttcacggacttgaattatgtcccgcgcctaaaaaaaagattggcctgcagcacaggcgtgtatcctctccaaaaagctgctgctcatttctggccccatctgctgctatctttgccagtcagccatcacagtttggcatcatcagagtctcagctagagggagcgtgtcatttctgccttagtggtttgcctgcgacctgaccagggcaagaccagctgggatgtcaagtgacattttgggaacttgtcggaagtt

SEQ ID NO: 686358 - DNA, 1282 bp, Homo sapiens
gagcccaccggagtccgagcactgtgaagaagaggtgagaattgagcctcgggacgactcgatagagcccggcgcgccggtggcatcccgcgtccgagccacctacagttcccggcgtgcactgagtcagtccgggcagccgaccgatgagccaaatgaagggacagaggctgacagggggatgctaaggggagcatcaaagacggtggctgaagtgaggcaaccaacagcttgacagcatcctgcggatgttggtcgtgtgtaataggctggcttgcttgcgcgaaatggccaaggaggctccaaggtcctaattcctatatgggccacctgacacacacgaatgggacgacgaacgtgtatcgcccaaaagggtgtacacatcgagtggagatatacggctcgaattggcattgggccaaatgtgcactggggttgacataacacgcctgccgaccagaagaatgggtagggattgactcatttatcacaaggaacactatgagttcacacaacgaagaaatgcattgcaaatccggtagcctcgcgaacgcaatggcccattggtgcattgctgcctcgctggcatctccttcgtggaatagacgttgcttcggtacatatcacttggagtgcacatcgtcctacacagtttgcctgccagtcttatctgtagtatggtctttcaaactccgaggacggtttctcttacttattagacccaaattttcgcctaggaacgatttggtggttcggtgcttggtgacccctatccttgggtgggctttggggaaagggttctttaacaaagggaccatgccgggcgccgccaatgtggcatgaacttaccacggaagggaaagaccatttaggttttttccccaattgcgcaagcggcgtttttgccacccagcggttggttgtcactaatcaatggcgcaacacaatttttggtttgccctattccttttttaaagtccgcgttacacaggggatgatacaccgcttggcgaaccacacgttgaatgcagatggaccggtgttatgttccccaggcgcgttccaacattttggacataacggcttgggttgcggaatttcctcccctacgaattttgggtgcgtttgcaaagtcacatctttcattaccccgggtccgccttaaacttatctccaggggggagaagctggcgccgcgcacaaattgcacactacccgacgatggtgtacttgggaggaacccaccacccaatgtggttcacacacaacgggcgatatgtga

SEQ ID NO: 686359 - DNA, 156 bp, Homo sapiens
gagaggagaactgttcgagttttttatttatgtgtttttaacaaagggagcaaaggcaggggccttaatggggggccaggggcgggtgattacagtcaagggccacactttggatcttgaagtccccgtaagtctggccatgtatgagagatgggc

SEQ ID NO: 686360 - DNA, 1057 bp, Homo sapiens
agccgggagccttctatgggcgatctaactgacgcccatggtaaccgacggatggggagacgcagcgtcacgttaaagcgaaaggagttggctgtaaggcagagaatcacgtctatgtccaggcatcgacggtcctcgccatcatcaagcttcagagtatctcgtgtggtgtagtcataaacggtgaacgacactgatggtggaatgggatggcactgacaataatgattcaacgatttgggtgccaacgtgactctcttggtcgatgtgtctcttggccgtcgatgtaacggcgaggggcagcatgataagtggaactgaccccgtggtgattgacacacatgtagattatggtgagcacgaggaagcgtcaagagacgtcgagtccctgggcatgctgtcaggcacctgcaatagctaactcagagggcgtcgtgctcgtcattgatggtacatgatattggataagcaggaatgcaatgctctctcccgagggggagcagtgagcctattccggggattgccgagctactcagtgtgcacaggtgtctcaccgtggccagtcggtggaagtccatcgtgggaccaatgtacggctagagcagggctggcgtctgtgggaggattgaagcggtggtttggctgcacatccttcgtggtgcaacattcgtttgccttgggagctggtgagacgaaagctatacgattaaggctggctttgggcgccatgattgctgtggtctggatgtaggtgtcctgagtcgttggtcgtgatgggccctgtggcttggagctcaggtctcgcctgatcttgcgatagtggtgcggccgcacctggggtggctgctaggagcttgcaggcctttccgggtcccgtttgggcccttgccggtttgggggccggcaatcaaccgcgagagggcccattggtgtacctccccatcaacaagtttgtgggtggggcacacgcgctatttggcgcgacacacgctgctagcagggcgggcgggggtggtaccaaagcatcttgggggtgccgcctcacgaggggtggctg

SEQ ID NO: 686361 - DNA, 482 bp, Homo sapiens
  misc_feature (474)..(474): n is a, c, g, or t
acaccaaaacacaagtagcagttttttgttttgttttgtcttgtttcaagactctatcacaaaaaaaaaaaagagagagagagagataaagaggtatattgggacaattagtcatctttcctacattttctctttttttcagagcccagaatccttgcatacattttctcattctaaaatcctacctatttagtttgtagaaatgatttatgtagtaatcatagactgctaaaagctagaactccggcctccttttacagacagttactaaggcttagaaacatccttcagcttttcagaggttgcaacatacaactggtctttttccccagcccagttctctttcactgatagggccgttcatcttttcctattccttaaaccccctttcaagtgttaagatttaacctcttgttctagtattctagtatttgaagaacaaatttatttcctgttacacacttcatatttttnttacaaaa

SEQ ID NO: 686362 - DNA, 218 bp, Homo sapiens
taagcgacggttctctccagtgtggatactctgagttgtgcaatggtgtgaaatatgatggaagaccttttccacatacattacatctagtaaggttatctctccagtcatgaatgatcacgatgttagtacaaggtacaggaatttgcgactagaacacctatgccacattttgttacatatcgtacaggttttttgggagatcctactacgagtac

SEQ ID NO: 686363 - DNA, 212 bp, Homo sapiens
gtagcaaaggggcttcgtaacccagccgggccaggttctggaacaacaggctcttttccggggcaggctgcccaccccagcatgcgacgactgcccacagctggcacgcagcacgcgaatggcggctgtgccgctgtaggaagtcgccgagttgaactggtcgaagaccacgttcatgcgcgacagcaacgggttgtcgcgcagccccacgg

SEQ ID NO: 686364 - DNA, 155 bp, Homo sapiens
gggggcccgaaaccccccccctttttttttcggggcaacccccggggcaaggtggttcccaaaaggggttaaccgggccccccggccttaacaaaagggccgcccccaccaaatttttttattgttttaaaacccaaaaaaagttttttttttta

SEQ ID NO: 686365 - DNA, 174 bp, Homo sapiens
aagtccctagcgggatggagagctggactgtgaacttcaacctcccagttgggcagcagggagagctcggacggcagcgagccggatgatgccccccacgagcacagtagcggcgtgtgccagagacggtggagagagagcgccgattggtgctcagcaagagccgaagcaaga

SEQ ID NO: 686366 - DNA, 604 bp, Homo sapiens
ggactgtgagtgccggacttcctcgctgtgatggggatctgccggaacccctggcaagatcaattgctgtcccattccgggcccttcccttatcgtgcgacccccttcaccttggcatcatgttcaggaaatttgatgcaagacagaaaactgtgtccgaaacttgcatccacgtttgagaacacttcagtatattaatgggtattgaagaatcaatgtgtatagatgcaactttccaggtattgaatgcatggtcttaatcaatatctatgcgctacgaaagatcctgtcaaaatagtccgatgccatgaacatatagaaatccttacagtacatggagaattactcttttatagacgaagagagcgggcctttctatccaagcctaagattacttcacaaatatccttttatcctggcacaacagcaggtagataaaggagccatcgaatttgtactcggtggagcagatatcatgtgtccaggcttaacttctcctggagctaagctttacctgctgcagtagataccattgtggctatcatggcagaaggaaaagcagcatgtctagtgtgtggagtcatgaagatgtctgagaagacat

SEQ ID NO: 686367 - DNA, 402 bp, Homo sapiens
  misc_feature (51)..(51): n is a, c, g, or t
  misc_feature (190)..(190): n is a, c, g, or t
aatggttggttaaagggggggcaggtccccaggggggttccccccattttngggtgtttttcctttatcctttttatgttcccgtttacccccaagggaaagggaggttttttttttcccccccccctttcccactttttccccagggggggggtttttatggggccctttatttatcccttttcccccnaagaattttttgaaaaacccccccgagggggaaattttgaaattttttttcccctgggggggggggccttccccctccccctgtggaggggggttttttttaacccccccccggaaaggggggtggggccccccccttttttgggtgccccccccccttcccgccccccctcccgggggtttttccaaaaaaaaaaatttttacggggggga

SEQ ID NO: 686368 - DNA, 201 bp, Homo sapiens
gtccggggtcaacccccagcccccccccccctccctgggcagggtttttaggcaacccctgtgatgctcaaaccctaccttgcctcctaccctttttttttttctgcctactcccccctcctccctggcaaaaaacccccaggggtttggactccttttcccagttgaataaaaaacattttttaaatgaaaaaaaaaaaa

SEQ ID NO: 686369 - DNA, 326 bp, Homo sapiens
  misc_feature (58)..(58): n is a, c, g, or t
  misc_feature (320)..(320): n is a, c, g, or t
ttaatatctgaccaacctctagaagtgatgggcctaaagaaccccttggagctaaaantctttgtcacctgtaatgccagcgctttgggaggccaaggcaggcagattgcttaagcccaggagttcttgaccagcctgggcaacatggcgaaaccccggctctacaaaaaattagccaagcgtggtggtgtgtgcctatagtcccagctatttaggaggctgaggtgggaggatcacctgagtccaggaggtcgaggctgagtgaactgcgatcatgccactgcaatccagcctggatgacagagcaagaccctgtcacntaaata

SEQ ID NO: 686370 - DNA, 894 bp, Homo sapiens
ggcagcaggaggaagacaggcaatccctccggctgtccgaccaagagaggccggccgagccctgatggcttgtggcttttgctttctggcggagggatctgcggcggtttaggaggcggcgctgatcctgggaggaagaggcagctacggcggcggcggcggtggcggctagggcggcggcgaataaaggggccgccgccgggtgatgcggtgaccgctgcggcaggcccaggagctgagtgggccccggccctcagcccgtcccgccggacccgctttcctcaactctccatcttctcctgccgaccgagatcgccgaggcggcctcaggctccctagccccttccccgtcccttcccggcccccgtccccgccccggggggccgccggcacccggcttcccaacatggctctgacagaagaatccacaaggaatcgaattgatctgggcacgggaccctccagcacagtgttcagcaaggtcctgttggagatgatatgtccatgggcaagctacaaataattggggccaaatggacagtccctaatccaggtgggcgtaatgtctttgacaattcatttcccaacagattacccctttcaaaccacctaaggttgcatttacaaacaagacattatcatccaaatattaccagtcagtggcagcattggtctggatatctaacgatcacagtggtctccagcactaactatttcacaagtactctggtccatctgtactctggagtgtgatcccaatccagatgaaaccttagtgctgaagatggctccggttacacaccacgaatggagaaagtacacagaaaagctccggaatgggccaaaggtggaaggttaagaaactgtggttacccctcaatagattgggccctg

SEQ ID NO: 686371 - DNA, 127 bp, Homo sapiens
tcagatcttactgatcaacatcgaggtcgtaaaccctttgtgatatggactctagaataggattgcgctgttatccctagggtaacttgttcctgttggtcaagttattggatcaattggtggtata

SEQ ID NO: 686372 - DNA, 259 bp, Homo sapiens
ttactgccttcttgttttctacctttctaattcctacttgtggttagggtaatttatctatgtgtctgatggtaaaagctgttttttaaaagttgcatactatgtatttttttcttttcatgctcttttgcatgctgacataataataagacagtaactgtattgttatcagaaacatgtcatccaggttcaggcagttttgctgcgtcagcactttgggaggccaaggcaggcagatcacgaagtgcaggaaacaaga

SEQ ID NO: 686373 - DNA, 169 bp, Homo sapiens
ctgctgggttcaagcaattctcctgcctcagtctcccgagtagctgggactacaggcgagtgccaccacaccacggtctaatcttcccgtatattctaggtggaggacagggttttcaccgaggtggaggatggtcctcgatctccatgaccgtcatgtatccagcccg

SEQ ID NO: 686374 - DNA, 195 bp, Homo sapiens
ttccttccacacccttcactcaccatcttttcccacaatcacaactatcagctccctgggtacttccagcttccaactctcagggatctcatgattgctggctggagattcctctcttccagggcctgggaggatcagggctaatccgcaaggggctgctaggctagttagctggacagcactgcaagatgcacg

SEQ ID NO: 686375 - DNA, 1206 bp, Homo sapiens
  misc_feature (3)..(3): n is a, c, g, or t
ctncccctttcagtcgtcgactggtcactgctggatagtcctgccttggtgtcttatgtttgtttccactttttctggtcgggttttcgtgttgcgtgggcgtcttcttttgccctcctggtgggttgttgcgatgtgttcttcttctgcgggttcctccccccgtttcgcagagtttcccttcccccttgggtcccccccggtggtggggcctctcggattgagcagccattttctctggcgtggtctccggcccgggatttgttccggggaccttatgtttcggcattgttgaacttgggatttcctgcgtggccctggtgggttcccaggtttgcccccttttggtttccccctgcgcccggaccgccctccattggggtccctacccgcgggtgttcaaagccaggcgtctgtccccgatggaggtatttgggtggtaccgttctcgcccctgagggtggttctgggtggaaaatgggttccgcctattgcagcttgagccctccgtggtatccccccccgggtattcattgccaatcccagagggtgtcccccatgctttccgtgggttcccccttttgtaggccccccttcggtggaaactggtcagggcccacttccaagggttattgcaataatatcggaagcccctcgcgagtattttctgaaaagaaatgtgcccccttatccacggaacccgtggtgggaacccttttccgaacgttacccaatggtggaaacttgtgcccggtgtgcccacggcccacgccattggggctcggagcacccacggtccgttggcccccaaaagaggtggctgagatttttgctgcaccaatgcttataaaacccccagagagatgttaattgctgagaacttaagggtttaacatgtagatttctctggtcacttgaggcactattcccacgtggacccaagcacccttagatgcgccccccggagcctaccacgagcttcactggtcggagtttacccactaacactgaggctcttccctgccaccacttgagatgatccctatcgggaaaggaaccacgagttgttcctaataccacgaaagaggaaggttggcccacgaagaaaaagatatttcccacgaacgaaaactgagagagaacccacaaaacttaattggcccggggagttaattccagccatttaaattaatgttatttaaagga

SEQ ID NO: 686376 - DNA, 406 bp, Homo sapiens
  misc_feature (25)..(25): n is a, c, g, or t
  misc_feature (249)..(249): n is a, c, g, or t
agttcttttcctattagtgtttttntttttcattcaaatagaaaaactctctttagcatttcttgtaagactggcctggtgctagtgaattctctcagcttttgtttgggaaagtctttatctctccttcgtacctgaaggataactttgctatatagagtattcttgtatggaagtgttttctctttcagcactttgaaaatgtcattgcactccatctagttctgaatggtttctgttgagaatgtnattgacaaatgaattggaactcctttatatattatttgcttcttttctcttgctggtattagaattccctttgtccttgaactttgagagtttgattattgtatgccttagggaaatcttatttgggttaaatctgtttggtgttctctgaccttcc

SEQ ID NO: 686377 - DNA, 340 bp, Homo sapiens
aaggaatataggcagatgtacagaactgaaatcgaatgggaggatggcagaaaagctggcacttctatgtacctgcagaaccaaattggggttgtcatccggatccagaggtatcaatggagtgagcccaaaggttcgaaaggtgttgcagcttcttcgccttcgtcaaatcttcaatggaacctttgtgaagctcaacaagggttcgattaacatgctgaggattgtagaagcatatattgcatgggggtacccaatctgaagtcagtaaatgaactaatctacaagcgtggttatggcaaaatcaataagaagcgaattgctttgacagataacgctt

SEQ ID NO: 686378 - DNA, 321 bp, Homo sapiens
atggcgacgcccatgcaaagcgtaaccccacatgtgggggcacgaacgccaaaacgaaaacacccaatatgccccgcaagacgtacaggagccatataaccacacgtaccagcagcgacacgtacaacgggccaacggcacatggctaaccacgaacgggtccaatcacgaatagcggaccgtacggcacgaaaatagaataagcgtgatgccacacgcaacgtcaatatagagagttgatcactgcgcaaccaccgtggaagacacacaacatactacgcgcactgaccaacacataccagccagcaacgacggtgtgca

SEQ ID NO: 686379 - DNA, 1179 bp, Homo sapiens
ggttactactggatgcgtgccagtcttctccctgcatgccagtccttccgaggtattctcaactgcattgggcccttaaggctcctaatcactcatggctgcgcgcatagcactgtttggcctctctgccctcctttctctgtgggggctaccacaagtttcttcccatggacgaagcccaatttacctccgggtctgtgggtggtatgcatcctattgctgctccttcatcggccatattgttcctggtagtcggtattgtccaagatgccctagccgccgtgcaagatacggggtgtccacctctggcctatgtctccttgtgcccaaaatgccccttttctctggtcattatggcgtctgatagttcttcaaggttcccttgggcccgtcttccttcgactgtcgatacgattgacggaatgtcattccttgctttcacgtagttctacttgggggtcaattaatgctcgtgtttccggggattgtcaaccggaatgatcccggggtcctgttggtagatgatgtgtctctgagacgtgtactagtgctcgctgttctggctcttccatttgcacacgcactattcgacgggtttgaatttctcttccgatgctatctccgggtgcatgaacctcctctactactgtgcagttcctcgtagagtatctgcagcttgtccactaatgtcatcactaatgaggggtatttaatccaagcctgttgagcatatgaattcatcatgaaggacctgtatggaacttggcattcaactctgtaatcccatgtcaatggctattatgggaacctcagcgatgtatagaccctccgaaatcgaattggccaccgtcagggtcggtgttctcgatgatgaatccttgacatgtctcgtcagtgacgttcgcctgatgacgtatcctttgatggggtcaagcaagctgacagtcgtagccctaagtgtcctatctacgctatacgtgtcttcgctggaagcagtcgcaggagatagggcgcaatcccacgatacagctaaggaggcagtatttcattttcatcaacagatgataggctgtggccctttacccgctccgcaatgtctccagataggtacatgcagcaaagcagataattaggcagcctggagtataaaccagagatccagtacaggaagaaaggata

SEQ ID NO: 686380 - DNA, 425 bp, Homo sapiens
ataagcgcgtctgcgtccccacccaatctccgtcgaatgtaatctccagtgtggaggtgggaggtgatgtatcacgggggcgaatttctcatgaatggtttagtgccatcccccttggcactgtcctcgagatagcgagttctcatgagatctggttatttaaaagcgtgtggcacctcccctcattctctctcttgctccagctcctgccacgtaggacgtggctgctccctcttaaccttctgctgtgttcataagtttcctgaggcatccccagaagtcaagcggatgccagcatcatgcttcctgcccagcctgtagatccaattgaaccttgggttttattctttataaattacccagtctcgggtatttcgttatagcagtgcaagaatggcctcattcacattcataaggcccgagtc

SEQ ID NO: 686381 - DNA, 342 bp, Homo sapiens
taaggtgtgtattggattggtgctgtactaacaggtgcaactcaaagattatattattttttttttggagatggagtctcgcttttacacccaagctggagtgcagtggcgcgatctcggctcaccgaaggctccgccccgcggggtacacgccattctcctgcctcagcctcccgagtagctgggaccacaggcgcccgccacctcgccgggccaattccctgtattttaagtagagacggggtttcaccgtgtaagccaggatggtctcgatttcctgacctcgtgatccgcccgcctcggcctcccaaagtgctgggaccacaggaaatctaccggggg

SEQ ID NO: 686382 - DNA, 323 bp, Homo sapiens
cgacctagcaggatcccccacctcatctgcttacatatttagtctatatagtctagtaccactagtatagtaaagtcttagagagcaagaatttttgtttatatgctttctcttcctacctttcctttctatcctcttttacttcgttcactactagtattctcacataataatatatattggcatatagtagtgtgtacaatatgtagacaggaatgaaagaatttatagacttgagttgcaatataaaatgtatatttttttactgtgagttatggcaaaaaaagttttgaaagccgcttctaaataatgcagataaggtg

SEQ ID NO: 686383 - DNA, 574 bp, Homo sapiens
  misc_feature (14)..(14): n is a, c, g, or t
  misc_feature (192)..(192): n is a, c, g, or t
  misc_feature (330)..(330): n is a, c, g, or t
  misc_feature (418)..(418): n is a, c, g, or t
  misc_feature (429)..(429): n is a, c, g, or t
  misc_feature (448)..(448): n is a, c, g, or t
  misc_feature (487)..(487): n is a, c, g, or t
  misc_feature (571)..(571): n is a, c, g, or t
atactttatttaanacacatgaaaattttgtaaaggtagttttgtaattaaattgcaataaattgaactaaatttttctttattcagctgatagggggatggtcaacattactttaattgtggaaataattcctatttaaaatagttttatgaaaaaaagcctttttctgaaacctagttgaaatgttttanaatattctaaatgaaattagttaattgattatccttaatcttcctcatcctgtttaaaaatccggtggctctttaaacaggagaaaaaccactattaacagaaagcctaaggtaagtttacaacacctaaaataaatnaatttcaaatggataaagaaagtaaaaaaacagcaactaaataaaataggtaacccggtactgatttggcttccaagggaaatttctncgctggctatnaagggttgaaatttctttnactgaacgttacaattcaaattaacctgttttaagggtnctcctgttacccatttttctttcatgtggggaatataaactgaattatcatggtcaaatagtttctgggaatagaatactacanaaa

SEQ ID NO: 686384 - DNA, 516 bp, Homo sapiens
cttatgcctttcccatgcgctatggtttgaatgtttgttccctcaactcatgtggaaacttaatccccagtgtggcagttttcagaggcaggacctttaagaggtgttgggtcatgagagctctgccctcatgtatgggttcatccacacatggatcaatggattaatgagttaagtgattagtgggttatcaacaggagtggcactggtggcttcatacgaacagcaagagagacctgaactagcacactcataccgcttgccatgtgatgccctgcaccaccattgggaccctgcaaagggtccccaccagcaagaaggccctcacaatctttctggaaagcaattatcatacaatatatataaacttcttttctttataaattatccagtttcaggtatactgttataagcaatagaaaatggactacgaaaattggtattcagaagtggggctgttgcttaataatgaatacctgaaaacgtgaaagtaagggcagaggccagaagcatttg

SEQ ID NO: 686385 - DNA, 370 bp, Homo sapiens
  misc_feature (1)..(1): n is a, c, g, or t
  misc_feature (30)..(31): n is a, c, g, or t
  misc_feature (38)..(38): n is a, c, g, or t
  misc_feature (40)..(40): n is a, c, g, or t
  misc_feature (50)..(50): n is a, c, g, or t
  misc_feature (75)..(75): n is a, c, g, or t
  misc_feature (85)..(85): n is a, c, g, or t
  misc_feature (127)..(127): n is a, c, g, or t
  misc_feature (182)..(182): n is a, c, g, or t
  misc_feature (232)..(232): n is a, c, g, or t
  misc_feature (275)..(275): n is a, c, g, or t
ncgttcttgtaacttcttcatgatattttnnttctgcnangagctgctcncactgaccagaaaataatgccacanacaacttcancaacatccttactacggcccatgatcccactggaagtgaaancattgtttcctgttgctcaagtagaaatatcttaaggacggtggtttctggaganactaagatgatcttcttgcagactgacaggcatctagatattttcccacnattccaattctttcttcacctgagaagagagagaatccattanttgtcctattgcttttgatatatggtttgaagtctctagccattctgctaaagaagataatttttatgcacttaataaatggaagaaaacatctc

SEQ ID NO: 686386 - DNA, 797 bp, Homo sapiens
ggcttctccatccaggtcctggagttcctggtccctggagctccgcacttggcggacgcagcctgtcgttgaggcacgacgcgagctctggacgactggccgggcatgccttccgcgggctagaggactatgaagtgttagtacaccgattggcacaggctcctatcggccgcttgccagaagatcgcggaggcatgagtgatgcgcaagatattagtttggaaagaacttgcactatggctccagtgactagaagctgacgaaacagatgcttgtttctgcaagtgaattgtgcgtatcgctgaactgagatacatccaaagcatcgttcgttactatgatcggattattgaccggaccaatacaacactgtacattgtaatggaatatcgtgaaaggaggggatctggcgtagtgtagattgacataagggaatcatgggaacaggcaatagcttagatgaagagtgtgtgacttcgagtgatgactcagtttgactctgggcccttgcaagggaatggccacagacgaaagtgatggtggtcataccggcattggcatcggggaatcgtgaaagcccaggcccatgttatacctgggactgggaaggcccatagacggtcagagccttggcgaggaactttggggcttagctaagaattattaaaccgcattgaccccgacgtttaggcaaacacatttggatggcgggccaaccctttagttaccattgtcttcgtggaaaccagtagttgaatccgcatggtcctagcaatggagaacattcaggacatatc

SEQ ID NO: 686387 - DNA, 339 bp, Homo sapiens
ggtcaatagatatttccatgttctagatccctgaggaatcgccacactgacttccataacggtatgaactagtttacagtcccaccaacagtgcaaaagtgtacctatttactaccaaatacctctaccagcgacctgtatgtttccgtgacaaaagagtacccaattctataaactagagccctagaaactatttgggcatctaaacgccactaactatgaacattgtgcagctaatagtaacattacccatgatacaacgttgaatgtgcgcgggacaggttgcggacctatacagtagtatatacacacagtgccagtgcaaaaaccgctatacca

SEQ ID NO: 686388 - DNA, 326 bp, Homo sapiens
tgatcaatggccagcctgggacaaggctccgaggagctattctggtttctgggagagtcacattccctggaggaaggccccctccgcagataacatagatacctctttgataactttgtagaaaagagacgaattataaatgcaactgggcacagtatcccgtagacatcgaaagctacagagaatcgactagtaagtaacacaaagcggaacagatccaaggacggccaactgcgcgataacatctttcacccgccactacgcacaggacaacgctccacaaaacacatgacacgacagacatcaaccaaagcaagccacacccc

SEQ ID NO: 686389 - DNA, 185 bp, Homo sapiens
cagaccatgaggtacctatttccccaggagaacatatttgagacatatatgaaaatcggaggagataatgcactcgcagagaacttctaatcctgttctacaaaagtccaaagaaggagcaaataatgccaacttcacttttcttgttttcacatcaataaagacattgattttagtgtcacact

SEQ ID NO: 686390 - DNA, 287 bp, Homo sapiens
agccaactcaaaaagacaagggaaattgcaaagaagacccccctggcaagctacgaactgatacgcagcccacagtcctcaaccacctcggctgaacagccccaggctagctctctctcaaatccagagaaatacactgatgaacttgccactcagccaaggcgactgcttaacacactgagggaactcaaccctatgtatgaaggatatctacagcatgatgcacaggaagtattacaatgtattttgggaaacattcaagaaacatgccaactcctaaaaaaaaa

SEQ ID NO: 686391 - DNA, 81 bp, Homo sapiens
ctagaagattcagcaaagtacttttgtgctcttgggcttcctacgtactgggggagctcctgggacacccgacagatgttt

SEQ ID NO: 686392 - DNA, 184 bp, Homo sapiens
atctatttttcttggtctcatactcagttttttatgtagtcacttagtaaataacctaatccgcttgttttctccacactaatccgagggtgaattcctaatctagcttttcagatcatgggacgagggaaatgaccgcgtgcgcgaggccctaaggaataacatagaaaacaccgcctctgct

SEQ ID NO: 686393 - DNA, 443 bp, Homo sapiens
  misc_feature (435)..(435): n is a, c, g, or t
atacgtaagttactaaagcccatttgtacaaagaagggattattgtttacttaaggaacagtggttacggtttaattcagctatactaagtcatttcaagtgttcagtagccctgtgtgagcagtgactgtagcgctgatcttactagcactaagaatcagacatctagttccagctttcttatgttttaggagggaagggatatagacataatttgatttatgactaggcagactaatagaatactgttttacattcagaccttgaatttctagggccaggttagcggcataatttggggtttctgaatcctaatttctgtagttgtaaaatcaggtaatgccacctacctcttgttgatcttgtgaaggttgagatgtttgaattgccttccacgttttctgacataggaaatgctccctcataaatgctggnggtcattc

SEQ ID NO: 686394 - DNA, 396 bp, Homo sapiens
  misc_feature (292)..(292): n is a, c, g, or t
gcgaatcattggctctctcccttttgaatctcctgtttgcatttcccatattaccttctttctttgtttatttcctcctttcatggagctttcctttcggtagtttccttagataaggtgaattagaggtaaattttttgagatcctgcaagtgtgaaaatggttttatttggactaaatacttgattgatggggatggaaatcattttctgtcacagttttgaaggcattgctttattgtcttccagtttacagagttgctgttggaaagtctgaagccattctgattttnatacctagcttttccctcaccccctctgaaaaagcttggagaatgacctcttcaaggtgatatgccttgatgtgggtttgttttattcaccgtgctatgtaatt

SEQ ID NO: 686395 - DNA, 561 bp, Homo sapiens
ggaacagttggattcgctactggtattgagtggaggcaggatgctactaagcttcctgtaatgtacagggcagtccccaccacggagaggggttcagcccagaatgctaacactgttgaggctgagaaaccctgcctaaactcattaaatttaaaaaagaagaaaacaagccaggcacagtggctcatgcctgtgcactctggaaggccgcagtaggaggttcactggacgtcaggagttcgggactggccaacacggtgaaaccccgctactataaatacaaaaattagccgggcatggtggcacatgcctgtagtcccagctacttgggaacctgagacaggagagttgcttgaacttgggaggtggaggttcaatgagccgagattgtgccactgcacttgagtctgggtgacagagcgagattctgtcttcaaaaaaagaatgggggctcactgtgttgcctaggctggactcaaactcctgggtgcaagtgatcctccttagcctccaagttgctgggactacaaactcatgcctggtaagaacatgctttataaa

SEQ ID NO: 686396 - DNA, 140 bp, Homo sapiens
atgttctcacccacccccatcgagtaggtatctgaatatacagtaactaagctgaagcacttgcaggtgatattcaggttcagggagtgaccgtagaaatagacagctacaatagaagtatggcatagttaatttagttg

SEQ ID NO: 686397 - DNA, 846 bp, Homo sapiens
  misc_feature (23)..(23): n is a, c, g, or t
  misc_feature (45)..(45): n is a, c, g, or t
attctgatgtcggagccgtggcntgccgggccggcgacatggatnccctgttccagcaaacgcacaagcaggtccacgagatccagtcttgcatggtacgcctggagacggcagacaagcagtctgtgcacataggtagaaaagcgagaatccaagcaagcgagtagaccagatattcagccgtctagaacgtctggaggatttagtccaggcaaggagccccctaatcgagaaaggcaaaaatgccagtacttcgggcttgaccagttaaagtatgatgtccagcacctgcagactgggctcagaaacttccagcatcggcgccatgcaagggagcagcaggagagacagcgagaagagcttctgtctcgagaccttcgagccagctaacgactctgacagccacacatagccagatggacgaatcactgcagtttaactcctccctccagaaagttcacaacggcatggatgagctcattggagatgggcacaatattttagactggactgaggacccagagactgaccttgaaggtggggtccctgctgggggacagagagaaggcctcttgtctaagcctcatccaacagattatagtaactgtgttatatacttgtggatgtacgtgtccgtcaaagtgtgactatctcgatgacaagaccagagcccttgcagatcgggatccttgtctgtcggagttgacgttatcgtgagcctgaaaagtacccagttcgcttggccagttgcttgaaacaaaccatgaacgtggcctctcttaggatccaaggtctttcccatttcactgaccttagtcatgaaagtgagtgctacctacgactggg

SEQ ID NO: 686398 - DNA, 243 bp, Homo sapiens
  misc_feature (26)..(26): n is a, c, g, or t
tatttgttattgtgaaatggtgctgntgatgatgtacaggtgcatgtgtctttatggtagaatgatttatattcctgggggtatatacccagtaatgggattgctgggtctaatggtaattctgctctgagtactttgagaaattgccaaactgctttccacagtggctaaactaatttacatgcccaccagtagtgtgtaagcattctcttttctctgcaaggaacccacgcgggtaccgag

SEQ ID NO: 686399 - DNA, 437 bp, Homo sapiens
gagagagagagagagagagagagagagagagagagagagagagagagagagagagagagagagagagagagccgctccgctcgttcgctccctcccccgcgccgtgcacgtgttggttcggtccgggcataataggctcctcggcccacggctcacttggcgctgatcgcgtgtcctcgcgtgtgatcgtccgtgcgtgtagcctttgcccacgcaggtttcattcatggctctccggttacgcgctcatcccgacgccagcccctgacttgcaggcctcaccggcggttgctggcgccttctttgtggtgtccctgccggactcctgagggcatgtcgtggtcctctttttctgccctctggacttcgcttttgtgtgccctaccgagatcatctcgttcagcatccgtgctgaggacttccgccgctgggctgtg

SEQ ID NO: 686400 - DNA, 179 bp, Homo sapiens
cccccgttttttttggggaagcccctgggggtttttggggggggccggggttttggaaaaacccccgggggggaacccgggggttaatttttaccgggtgtggggttttaaccccccgccccaaaattttttttaagtttcgcctttcaaaagggggcaaaaaaaaggggtttttttta

SEQ ID NO: 686401 - DNA, 122 bp, Homo sapiens
cagcataacaaggcattcaggaaatatcctgttgttgtttatcacaactctccctctctgctcttccatcagacattctgcttcaacaggagcactctcaggctgatgatggcaggctcaca

SEQ ID NO: 686402 - DNA, 155 bp, Homo sapiens
taatcaaactaacctcaaaccaatgataccacacacaccactaaaggacgaccctgatctctcatactagtatcctcaatcattttattgcacacctaacctcctcggactcctgcctcactcattacaccacccaccgacctatctataaacct

SEQ ID NO: 686403 - DNA, 129 bp, Homo sapiens
ggcatgcccggaccccggcggctccggagtccgggaggctctggctgctccagtcgcgggtccgggccccgcctctccactcaagaagagacgcctgcattgttattgtggtggtagcggcgtctggct

SEQ ID NO: 686404 - DNA, 201 bp, Homo sapiens
ctgcctcggtctcctggagtgctgtgactacaggcctgagctactgcgcccaacctcaggatgtaaatcttaaaagttactaggccaggtgtggtggctcatgcggtgaatcccagcactttgggaggccgatgtgggcagatcagcagaggtcaggagcttgagattatcctgaccaacatcatgaaaccctgcctctac

SEQ ID NO: 686405 - DNA, 999 bp, Homo sapiens
  misc_feature (251)..(251): n is a, c, g, or t
ctgccctgaggcactcttccagccttccttcctgggcatggagtcctgtggcagcggaaagcgctacattgccaatgtttattggaacgtgtgcagtgcacctacgcagatcaatctagacgtacacttacgatgtgcagtgctaggtcctgacgacatggacgaagacggtacctttgccagcatccgactcaatgaaagatgtagatctagtaccttcggcaacacgagctagtaatgcacaacatacnagcagcgatgtcgttgcgctgcgctagcaaccgataggttactctggtgattggcatcgacgaggcatcgcaacacatgagcatcacttgtccatgggtatccaaagaagaatagtgagactacatcacacgatcagtgatgttatcgatcccatagatgcggccaacggatatctcactgtggttgcaactcgggacggtgctctctacctaccgggcgcgcatctactggatctcaacgcttttgccatttaacagacctcgttgggactcagaccaaaaagcatgcggtagatatttgaccgccaagcacccagaggacaagattgcaaaacttggtgcgcaactcgtgcatataatgtctttgcttatgtggcgagaacgtattgagcttttaaggtgtagcagatttaatatccctgtttcttgggcactaaaaagatccgataagactttggcagcaagaatagtaacacaggacttgaagaatgttgggcaattggaagtaagaattacttgggagagatctaggaaaataatggtccacccagatagatattggatacaaatgtggttgtccacgaattagtgaggttttgtgaaatttccaagagtatatgtaaagaaactagtttaaaaactagaggaacaacagtgacacaaaatactagacgacgtgatatgttgggtaaaacgatgtaacgatcacaattatagcgaaacaaaagattagagcgaacggaccctg

SEQ ID NO: 686406 - DNA, 170 bp, Homo sapiens
  misc_feature (57)..(57): n is a, c, g, or t
  misc_feature (81)..(81): n is a, c, g, or t
  misc_feature (113)..(113): n is a, c, g, or t
  misc_feature (117)..(117): n is a, c, g, or t
  misc_feature (153)..(153): n is a, c, g, or t
catggggaaggacctcactcccatcacgccgtccagcggcttcacgatcgacctggnctcagccttcacagtggtgatcgnctccaacatcgggcttccagtcagcaccacgnactntaaggtgggctcggtggtggccgtgggctggatccnctcccgcaaggctgtgg

SEQ ID NO: 686407 - DNA, 948 bp, Homo sapiens
  misc_feature (3)..(3): n is a, c, g, or t
  misc_feature (86)..(86): n is a, c, g, or t
  misc_feature (167)..(167): n is a, c, g, or t
  misc_feature (233)..(233): n is a, c, g, or t
  misc_feature (267)..(268): n is a, c, g, or t
  misc_feature (271)..(271): n is a, c, g, or t
  misc_feature (287)..(287): n is a, c, g, or t
  misc_feature (292)..(294): n is a, c, g, or t
  misc_feature (297)..(300): n is a, c, g, or t
  misc_feature (307)..(307): n is a, c, g, or t
  misc_feature (336)..(336): n is a, c, g, or t
  misc_feature (356)..(357): n is a, c, g, or t
  misc_feature (360)..(360): n is a, c, g, or t
  misc_feature (366)..(366): n is a, c, g, or t
  misc_feature (370)..(370): n is a, c, g, or t
  misc_feature (399)..(399): n is a, c, g, or t
  misc_feature (427)..(427): n is a, c, g, or t
  misc_feature (453)..(453): n is a, c, g, or t
  misc_feature (455)..(455): n is a, c, g, or t
  misc_feature (504)..(504): n is a, c, g, or t
  misc_feature (508)..(508): n is a, c, g, or t
  misc_feature (548)..(550): n is a, c, g, or t
  misc_feature (562)..(562): n is a, c, g, or t
  misc_feature (579)..(579): n is a, c, g, or t
  misc_feature (593)..(593): n is a, c, g, or t
  misc_feature (613)..(613): n is a, c, g, or t
  misc_feature (626)..(626): n is a, c, g, or t
  misc_feature (630)..(630): n is a, c, g, or t
  misc_feature (632)..(632): n is a, c, g, or t
  misc_feature (647)..(647): n is a, c, g, or t
  misc_feature (869)..(869): n is a, c, g, or t
  misc_feature (948)..(948): n is a, c, g, or t
gtntagaatgtcgaaaataataataatatcagataatcattagtataaaacaaataaaagagagtacaaattgaagacagcctgantatctattctttataaagaaataatgcatgaccacgttttcatctgtcattagcagttggtacttaatagcgatgatttanaattgtatacttaaaacctaacagaaattataatggcaactcagcatatacttgaaacaatattangtgtagtatattgggacatttagtagctttaganngtntgttattacaccattnttaannnttnnnnttcagantattttacatttatatatcataatataanaccattatatatattatttnnccncatatngggngggggttgctacagattcgcttgaatggnggctacaaacatcacaaagaatgagtcngacttccatgtctatgtgtgagagananattctaacaaccaatttaattttaaaagagattaaaccaaagataaatnaganttatccagcaaacaggaatagtaacaactatcctattttnnngtttcagttagntaaattatgtttcaganatctttacataaangcctctaatactaccactcntaaatcataaaangtgncnggtagtatatttatntttttacccaatcacattttagactcataataaaaatctactacttagagaaaataaatttgacaatttattcaaacattgttacataagaagttttaagaaactgtaaataattcttaatactctcattttgattttccgacttctcaagactattttgtacttctttcaaacacacttcctgatgttgtgctttactgttcattttgcaaacaagttgantttgctcttcatttttctttctaagctcagtttccaggatctaatattttaatttgtaaagcactctctctagatggcn

SEQ ID NO: 686408 - DNA, 984 bp, Homo sapiens
agtgtctgtgacgagagcaagtcggtcagatctgtgctctgttgtgtcatctcctttgtctgttgcgctgttgtcggtctagtgtttgtttttctcctctctctcttcctctgtcgctgctgtctggtagtagctagctcgatcgcaagtggggacgcctggcccctgttgcgaggtgccgccgcgcgagtgttgtttaccccccctattgggcgttgctctcctctctcggtgccgggcgcccgtttctttgtgcagtgccccccgccatatctttggttggacaccaattgtccgggtctcgcgtgcccggtccgcgaaaatttctgcgtggttttgccccttgctcggccgcggggtaatctctcgggtctttttcgcgcccccccttgggtggtcccgccgcaaattgcggctggtttctaaagttagacccggggacgcaaccctggtggcaagagctgccctgcctttgtccgcggctgcggaggtgagtagaatctctacgaggtgttcctcctggccaccctgctcagcgccccacataaatgggcctcctctctttattcctaccgcgcggtttttgcggcgcacacagaggaattatctggccgcctctcctgtctgggagcaaaagttcgcccttgtcaggttctggcgaccgagaacacccctgtggtctaacttggtgaaactgcgcacgcacagtgttctcagagtgacgccccccgagcgcctcctcgggggatgttacgcaagtctcccgattgacgccctttcgtcgagacaatcgagggagagtaacaattagcaaggtataatagaggagaaattttctcccccgtctccttctattccatgttctttcttgattatggctttttagcaataggatgtgtctccgagtagataactttaagggaaaaagggggaaaaaatcccccaaaaaaccgggtttccagggcaagtttttttcaaaaaaaa

SEQ ID NO: 686409 - DNA, 156 bp, Homo sapiens
  misc_feature (17)..(17): n is a, c, g, or t
ccacgcgtcctcccaangcttttgagtcagggacttgaagttgtcgactttgtcgatgaggcctgacgagaggaaaaacctgccaatttggacaaagggggctgttgccgtgaatgactccactgccatggcactggggttattgtggccaatctc

SEQ ID NO: 686410 - DNA, 265 bp, Homo sapiens
gctggtgcctcgcacaggcggccccgcgcttcctcccccaccctgtggaggagagagtgtgtgcccggtttccccgttccacctcccctggtccgacgagcgataggggcaggtgggcgggggcggctggtcgcctggaagggagtcgccgcaacgcaccggccgcccgccgctctccgggccctggcgcggggctgcggcctccgggtatggctccgccagggcgagggacggtgccgggcggagcaggacgcccagggggaga

SEQ ID NO: 686411 - DNA, 651 bp, Homo sapiens
  misc_feature (41)..(41): n is a, c, g, or t
  misc_feature (47)..(47): n is a, c, g, or t
  misc_feature (132)..(132): n is a, c, g, or t
  misc_feature (481)..(481): n is a, c, g, or t
  misc_feature (486)..(486): n is a, c, g, or t
  misc_feature (489)..(489): n is a, c, g, or t
  misc_feature (518)..(519): n is a, c, g, or t
  misc_feature (637)..(637): n is a, c, g, or t
cggggagtcgagagctaacgagcaagattaagcccgactgntagagncgagcgaagcgatgcctaaatcaaaggaacttgtttcttgaagctcttgtggcagggattctgacagtgaggttgacaaaaaggnaaagaggaaaaagcaagttgctccagaaaaacctgtatagattctttttgagtttttggacttcgagagccctaccatcttttaaacagcgcagaagcagcagagatgataacattttttagattggtttaacgaggaacaaaagagttccccatgtgaaaggcatagtgctccgggcaattagaaaatcttcactggactctgatggtctttcgattccagacatgacaaaacaaatgtattcccatgcggcccaacccccccagctgaaaaccccctttttttggatttttggcttagaggggattaggaaaacgcctaacaccaacgtctatccttttcccccgcntttcnacnccttcttctatcttttcttccccttcagnnctttcaccttggtcaacctccttactgcaacattcctctccttttattgtgcttctcctttctttccttctttctttctttttttctttctctcctcctttttttgtcttaattatgnttaaaaaaataaca

SEQ ID NO: 686412 - DNA, 377 bp, Homo sapiens
gacactgaatggacttcagccaccattcagtaattcaaggacagatagaaagagaatctttctcgtcctcttataacagaaagatagacgatggagacggcaacgctttggattgcaaagatcatcagccggtgccccaggtgaacggctttctcatctcctcataggcttcagagcttctcgatttcactagacgaccagggcctcgtgcacttgatccataaatatcttgagcaccctctgctgcttcagccacgtcatcgctacttcctctttgataactagggtcttggtggatcatcagtataatatctacctctatagagagggtgtgcttcggactgcttcagaaccatatcatgttgataatgtgatag

SEQ ID NO: 686413 - DNA, 132 bp, Homo sapiens
cggttcacataaggcttcagttgcccgggtagtgcttcacatagtcatccttgcccgcctcatagtaggtgtagatgagggagatgtattggcagcggagggtcctccacgccgtcatacaccatgtccacc

SEQ ID NO: 686414 - DNA, 675 bp, Homo sapiens
  misc_feature (321)..(321): n is a, c, g, or t
  misc_feature (368)..(368): n is a, c, g, or t
  misc_feature (370)..(370): n is a, c, g, or t
tgaaggcgaagaacgcaaagtgagaacatggagcgtaatatcgccccactcgcgcctgcgacgatttcttccgggtccgatcgctttgccggctgacttcagggactattccaaatgaacaacgcgtagtggagcaacctgtctattaccagaccaactacctgtgtgtggctgccatgatgatttccatgtggggttcttgagtcccttcaacatgatcctgggaggaaatcgtggttgtgctggtgtccacagggtttgtgtgggcagcccacaataaagacgtccttcgccggatgaagaagcgctaccccaggaggntcgtaaatggtggtcatgtgggcgagctatttccttatctccatgtngnagggagtcatggtcttggtggttggcataacttttcctttgctgtggatgtttatccatgcatcgttgagacttccggaaccttcaagaagcaaagtggagaataacattggaagcgaataggtcttgaagagggacaccgagtgggcatggtcctggaatgccttaaaacagcaggaagaaggcatcaagagactcaatgatatatcagcaagtgaaggtataaacataatttacctgagctagggttgcagcacaaattgagttgcagcttgccttgttcagacctatggtctggtgcgtaag

SEQ ID NO: 686415 - DNA, 302 bp, Homo sapiens
  misc_feature (56)..(56): n is a, c, g, or t
atgttaaaagccgtggggctggatcatcgtgggaatcaccgcccatctgaactttnctggcgcgaacgccagcgtgttgcgattgcccgtgcgctggtgaataacccgcgcctggtactggcggatgaactaccggtaacctcgatgcggtaacgccgacagcatcttccagttgcttggggaattgaatcgcttgcaggcaccgccttcctggtggttactcacgacctgcaactggcgaaacctatgaacccccaagtaggaattccgtgatgctcgtctgacggcggaactgagcctga

SEQ ID NO: 686416 - DNA, 318 bp, Homo sapiens
tcgacgtctacaggatccccaaggctcgaaaagggggccgagtaggggcccgagccgtggtcgtgctccagtggagaactgccggttatacttgtggcatggaatgtgctgagccactgtcgtgcatgatcagagcgcttcgtgtctcttcacccccaggatccggtttgactgcaccagtgagatcgggaactgaatgagcttgttgacgactttctgttgctgggcatgcttctgccgaaggctggccacctcccgccacagagcctcattctcatgcttcatggccaggagcttggagtccatgcactcctgctt

SEQ ID NO: 686417 - DNA, 1071 bp, Homo sapiens
  misc_feature (121)..(121): n is a, c, g, or t
gctcgcagacgaggggagagtgcgcgggccgcgtgcaataatgcttccaaatactgatgctccaacacacagttcatcctagttgaacacgcaggaggactgaatagacgtccgcaacggncatccgcgccagcttggtgcatgtaacatcaggtgccttgccacggtgagttgcctcggaggctcgctgacagacactacccctggagtccccgctgcggcagtgggaccaagcttcattgtatgcatggcagagcgtcgaagaggcgaacaatatctagtgatggggccactattctgaatcttcgttgatgttgtccatccatgacagctagatggacttcggctagacacttgccagagtccccaagatgctgaggtgccgtgatcggcaccagcctcaggtgacctatgcatggactgctagaagtttctgaagcacggtgaatacctctatgtggaagcgaagggtcttaggacgcccgccagatcatcgattgctgaggctattccaggtgagaggccatcccatgctggacagttaacgaagagtccgaagacgattgcgtgtgaccagtgaacggaagaggcttgatttccagtcggatgcagcaggcaagctggctggcatccataggtgtcgcccaatgaacccgttcctgcatgctacccgacagggctggcattcgttcccaagcttggcaaagggcgtctactttgtggcttgaacgcattcgggttcgctcgcgattgctcgatggacttgaaatgcttctgaatgaatttgtgcgtggcacagatttttgaaggaaatggacttttgggaagatccaaaggaaacggtaacaagggttggggaaggcccttacggaaggaatttcttcaaagactgggtaagcctggggtgttttcgcatccaaggcgagaaggaactttacactccttaacaggcaaggggtatatggaaaatggagaaccccaagaaaatgtagccagagaagtcccccgaagaattggcccctttctggaaatgttccgaggccaccgaggtgttggaaaggctggagacac

SEQ ID NO: 686418 - DNA, 825 bp, Homo sapiens
  misc_feature (9)..(9): n is a, c, g, or t
  misc_feature (83)..(83): n is a, c, g, or t
  misc_feature (92)..(92): n is a, c, g, or t
  misc_feature (111)..(111): n is a, c, g, or t
  misc_feature (138)..(138): n is a, c, g, or t
  misc_feature (168)..(168): n is a, c, g, or t
  misc_feature (176)..(176): n is a, c, g, or t
  misc_feature (203)..(203): n is a, c, g, or t
  misc_feature (211)..(211): n is a, c, g, or t
  misc_feature (256)..(256): n is a, c, g, or t
  misc_feature (268)..(268): n is a, c, g, or t
  misc_feature (384)..(384): n is a, c, g, or t
  misc_feature (396)..(396): n is a, c, g, or t
  misc_feature (400)..(400): n is a, c, g, or t
  misc_feature (412)..(412): n is a, c, g, or t
  misc_feature (568)..(568): n is a, c, g, or t
  misc_feature (576)..(576): n is a, c, g, or t
  misc_feature (611)..(611): n is a, c, g, or t
  misc_feature (653)..(653): n is a, c, g, or t
  misc_feature (677)..(677): n is a, c, g, or t
  misc_feature (820)..(820): n is a, c, g, or t
aagggcctnccgcagccctcggcgctcaagccgcagccccacccagaccaggcgtgtgtgctgtgctcctggcaggcagggcngagaggggngggagggcggctgggtccnttggagtgggggcgggtcagaggaganacagcaacttcctgcccctccccacggggncgtgggcncaccatagaccacgtcctgcattcccnctgattcnctcacggggagagccctggaccttctggtggtgtcccagcggggngggttcaaggcngcgaccccgcttggggcagcgggcctgcagggaagggccagacggcacctctcagtggagactgaatctcccttccttcaggaggctgcctccagggaagacctggggtccttccngcactcagcgcnggcnggctgtcctgtncatgcagtggaagacattacagaagaattcatacgagaagaacatgaagcctgtggagagggcagccttcagcaagcggggggacaggcccttgaagaagcccagggcgcctcccttttgcagcacctgcttggcacagtccatgaggcccttgtntctccggncctggccaaaggcagcgctggcatgctcaaacccnccaacctgtagccgcttcttgaagaggtccagcggatatgtnagggtcttgctgatgacaccagcnccactgccacatagcaggttttggaggttctcatttttctttccttcggctggtatggcccacttgttcaggtgcttcaaggagctgtagcaagagaactgcagcccggcgtaggggaagatggcgatcaaggtgggagcaanccttt

SEQ ID NO: 686419 - DNA, 1072 bp, Homo sapiens
ggccgcccttttttttggttttttaaaagataaaactttacaacctgcacattaggttatgcataataaatggtgtgttaaaattaagggtttcttgtgcctctctacactacactaatcgtgcctcaaagggtggtgtgtttcatatttataagtgctaattatcatacctacctactttaaattttaggtagaaaaataatctgatattaaatacaaacatatttttctcacattgagttaatatgcataagtgatagttccaaagtgttatttcattactatagtcacaatatccaactaaaaattacgctatctaaaattgtaccaaccaaaatctcgttatttggcagaatctgtgacgggcgtggaccgtgcaagaatgtggcttgaatttaaccatttattacataatctctagatgatacatgcatctagtaatcataagaaaatactatcaaagaggttcggtgcgctcgacacccacgcacgtggtgcagggacaaatacttaaagtatatacacacaaagtgtacaactaactgtgcaagaagtaataaacgccacatgggcaacagaatacagaaaaattagagggaaccctggccaaaaaacagtgcccctcctgctgcatagcaaacccataaaccaacacaacaaaaaaagaaaaggaggatgagccccgaacactctgatgcacgtgaaaggggcaccaccaaataaccaaaaaaagcacagaggcgggaccaaaagacactgggaaccaaacacagcaaacacacggacacgataacggaacacatctcaccctacgaacccatcaaaaccaatcagacgccaaaaagcacaccggcagccgcgcaacaccccaaccaggtcgacgcaaaaacaatgaaatgaacaggatactaaattatcaggagatcgggcagagaccacatcgtagcacacaacaacgagaaagaaacgacaggcataacccacaacaacggtggtcatagcatggcaaccctgcaggagaacaaatagaagcagaaagaaggagacaaaactacaagccacacagacgcga

SEQ ID NO: 686420 - DNA, 908 bp, Homo sapiens
aatagtacggtaaaactggactatttgaaccttccagaaagagtatatgtaactgtcaatcaatgattattcattcttacatgtgtggactactaatgtacctccagaagccaataagatatagcattgactattggcctcttatgatcttaccacgaataatactgctagcaccttgatcccaatagaaatgtccatatcttgactttctatgaccacaggatggcaggtcacctgttattctcttctcccacctgaattcttgaccatctactcctatgtgtcttcaaaggtcatgtccctttctgccttgggagtaactcaccactcctgtcattaattttaatcacctgcaccttgctgattacctctactttcttttctcttactgttctcccgtgctttcacacttatgtaattttatggagaaagttagcagtttgatacatttcaatctatcagaattattccctcatttgaaccaagcactcataggtatctggtacttgtcacgagtttgtgtgattgtggcggggggttgtgcctgagttcattctctctctctctctctctctcagaagaagaagtatacgacacacattaggatacagacagagatttctaagaatggaaggtctgggttactgaatgtagaggctgagtgatattgaggggggcctataatacaccctttaattcctccagaaagatccaaatggagggctttggccaacacaacacactgcggccacggcacggggtcacacattttgagggggcgttctttctccccgggcaagcgtggcaccggtggggcacactagaaaggaaaaccctctctggtctggacagggtggggccaccacggtggagaaagaaaaacccaacacgggcacaagaagagaaca

SEQ ID NO: 686421 - DNA, 896 bp, Homo sapiens
tcctatgtactaggcattattatattgattgacttacgaaactctatcttcaagtcattatcaatctcgggtttttttgtggtgcagtggaaggagaaataggtctagtttctgcctctgattagccgcactagccttgcaacaaatcacatttcatctttgaacttacctctactgttagactaggcgactcacattttgaggacttttctcgggtatctatgagggtatgtagatcctgaacccttaaacagtgcttattaggttacacaggagggcttataatggggggatgaccagtacagacatgccagttaagtttatactagtgggatcccaaatccaaagcagtgtacgtggtgatatggtcagtgactaaccaggcagctaagacagtcttagcgcagcagcccagacatgtatagaggggcagtaagacgggcagaacagggggtggcaacagggagcacagggggcagatagcatcagcacaggcacagacatgcgcctcaagaacaaacgagggcctgcactgggcaggcattgcgcgggcccgctacagtatggcgcaggggtacgaaacgacacgtaaccattgtggaactcggagttgcaggaattgcgctaggttttgtcactttgagatcctgaaactatactgggagtataggatgataaatgatttgaaaaagggcgttagagaatacttcacattgtagaaagtttaattcaaagcgcaaggtacggtttgacactcactttacacatggacaaacattatggtggctcttacacacactggacggttaccaacattttaaaaagggtagcatggatgtagcaagttaacagcaacaaaattcaggcagataatagtactcgcaagaaatggagat

SEQ ID NO: 686422 - DNA, 195 bp, Homo sapiens
ccgcctccacccaccccagccggggactgtcattttctcagtacacaaaggagagaaaggaaaaacaagagcgagaaagacacagggagagaaaaggaagagagaaggaaagaaaaaagaaagacacaggggaaagagtggggtttactcatgagccttagggtgggcatgagttgcggggtgggtggagagcgg

SEQ ID NO: 686423 - DNA, 241 bp, Homo sapiens
ggtgagaaatgagagaaagagtgaaaggccttaaggtggaggtacggtgtcgtggttggtttgtggagatgtttaaagaaagacccatggacccactctcttgccctcatcttgtgcccgtgaaaactgcaggctcagccagcaaaggcaggagaagcagctggacatcagagagaagtgccttacttcagagggacagctcgcacggcgcatcttccacgaagaatcccaggagacaggt

SEQ ID NO: 686424 - DNA, 307 bp, Homo sapiens
  misc_feature (280)..(280): n is a, c, g, or t
ttgccagtttcatgacagagtgaagagaagaaaaaacaaaataacaagcatccaaaaaacacagccaacctgtgcagccccggacagcgcatctccgggaagcagcaggcccagggtcccacgcagcccaaccctccagcatccatctgaagacagaaccacgcccactccaggacgggccatttcctcggcctccctgggaggtctgaaaaaccagcggccactcctgcctgcctccccactgcccgagcctggacgtgaaaactcttaggccccctcncctattaacgaagctgaggcgcggccc

SEQ ID NO: 686425 - DNA, 227 bp, Homo sapiens
gtgcagtgtattgccgcagtaacaagaaatagaccaataaacaagacataatgaataacctggagtatgtactgctgtggtgcaatgccttttgagatcactgggatgcaggttcaatccctggcccggaacagtgaattaaggatctgatgttgccacggcttgcggcttagcgttgaaatttgtggcttggatctagatcctgtcattgcgacatcggtctctca

SEQ ID NO: 686426 - DNA, 256 bp, Homo sapiens
gagacggagttttcgctcttgttgcccagggtggagtccagcgcctcactgtggactcaatgttatgggtttaaatgattttctttctcaaggcccctggagtagctgagactacaggcacacaccaccacgcctggctaatttttcattttattttttagtagagatgagggctggtgctttttgttgttgttgttgttgacagggtcttgctccgtcgcccaggctagagtaagaccctctctcaaaaaaaaaa

SEQ ID NO: 686427 - DNA, 273 bp, Homo sapiens
  misc_feature (28)..(28): n is a, c, g, or t
  misc_feature (105)..(105): n is a, c, g, or t
  misc_feature (219)..(219): n is a, c, g, or t
ccctcaaagtgagacttcatgacgctgnttactgtcgggaaaaatcagtgaaagcccaggagacaccgtacttacgccgctcattttgataccagcgaacataancctgagcactgttgcctgtaacaccatttttcattgcccgtaatggaacgcggtgagagaggcgttccagttgcgaaccaatacgccagttatcattaaaatcataccagccanacaggcgcgcgccgggtttatgctcatgattgaaaacgcgttcagcgtactctg

SEQ ID NO: 686428 - DNA, 1005 bp, Homo sapiens
cgatacgtccacgcgtccgtggagagcctgctgtggggttatccttgcgtcagagtcatctccagggccatgataagtctgtctctagctcctctgtgactcagaaggggaaataccgaaacgcttcgccagatcttcacactgcgcacacaggggatagggagggtgttgacgtaatccgtaaccaatcgaatgcggtatcgactagttcgatgcccatgacgcacttcgggacgatgcgcgactcagctgcgcgatactgcgtattcgggtacaatagaggggaaacctggggtagctggccacgccagagctgcagagtgagtggggcgaccgcacaagacggctgcagtagccatggctctggggctagtggcatggatggccatgtagggcacatctgacgtgccgcactgtccagacttgatgattggcactgacagggagtcctaaagttctgagacgaggcgagcatgctgtccgcaggcatggggctagaggacatcgggaagggggaccttgccctcgctgtacccctcttggttgcagcccacgtgggactcgaggtctttgacctgttcttttgtgccattgctggcgtcccaagagggcgaaggtgtcacaactcgtcgggggaggcagacggggacctagttagtcaagggctgtggcacgtggtagggggccccattggtgcgtccgaactgttgtcgttagggcagctgggaggagaagagcaacttgtgtggcagtccctcctgctagccactttctggggctcctgaagaacttccccggtgaactccacacacaggtacgcgctccttgtccaggggagaggggcctggaggcctagatgggcaggccctcttcttgggggcggggccttgggacctggatgaatgtcccaacctggagaacgcgacacgggaacaggtgtcagggctgttcggagacggccttcggaaagcggaaggggttgctggcgaggcaaaggactctggg

SEQ ID NO: 686429 - DNA, 657 bp, Homo sapiens
  misc_feature (365)..(365): n is a, c, g, or t
  misc_feature (419)..(419): n is a, c, g, or t
  misc_feature (427)..(427): n is a, c, g, or t
  misc_feature (482)..(482): n is a, c, g, or t
  misc_feature (487)..(487): n is a, c, g, or t
  misc_feature (547)..(547): n is a, c, g, or t
  misc_feature (573)..(573): n is a, c, g, or t
  misc_feature (624)..(624): n is a, c, g, or t
ttttctaccattttattttagtgtccctagatttgctttgttttcatatttatattgaggagtttacagagcttcttgaatctgtgggttgaaacatagctgcttttgaaattctcggcctgtatttcatcagacatttttcttctgtctcaatttctctgcaactccacttgcgggtatgtttgacctctgctatgtctttacatctcatacgctcttctataattttctccctatttgtgttccaatctgctctttattaccgacctaatttcccgttcaatgtttctcactggtagtatttacacctgatttttaaatcaatttcaggtatactataatatttgcaatcttttcttctattntcttatatttattaacagaagttattttaaaatctttgatcattacgatgtctngataactngagtaaacttttaaaaatttcttttccaggttcctctctgtttaaggtatgtggntgatntcatggaatgtgtcttattttgtgttgatgccagtaggtatgtgttatgagatctacatngatatatttatttcagagagactaantttgttccatagcaggtgagtaagaaattacttgcatggtcagaactgcgnatttcctgtgcttaatttgctaggaccctttgg

SEQ ID NO: 686430 - DNA, 1077 bp, Homo sapiens
  misc_feature (2)..(2): n is a, c, g, or t
  misc_feature (357)..(357): n is a, c, g, or t
  misc_feature (900)..(900): n is a, c, g, or t
  misc_feature (941)..(941): n is a, c, g, or t
  misc_feature (1009)..(1009): n is a, c, g, or t
  misc_feature (1011)..(1011): n is a, c, g, or t
  misc_feature (1026)..(1026): n is a, c, g, or t
tnctggaaagagacatacttctactctcttccggctgccgtggacaatgggaaagggcctacccttcctccttaggtgctttttccaaaagacatcccctatgattaaatgacatttgtctgcggttatatttttgaaggctagacagcaggcatcctctcttctatacctccaccctgcaggccactttacaggctgtcaagggatagcttcccccgggagtgggagggagagaggacgtggatacctgctctgcttgataatcctgcgccttctcctgcaaggccctcaggcgggcgatctccttctctttctccctccggattttctcctgctcagcttcatactctgcctctngagcctgccgggaagaaaaaggcttcaggataatgcacaccattgcagctctgcacagagaaatgcaatctgtacagggaacgtgctttccagcatcttcccttccacttccttgctagatctaagatgggggtgggactttagcaatgcacaaacaaaaggaaaactagcctttgtagaaggcagccgtggcttacaaaaagctttctcgggccttatcctagagagctcaggcagcatctcatcagacagaagctatggatgcccaaactgttttgaacgcaggaatcctcagccctggcgctcctactccttctgtcacactgaagataatttcaagttgcaaggccacagagccaagtaacaactgtggttccctgccttgccttgtaaaatgcagcaggtagatgttatctcattagtgcctgggaaaactgccaactgtgctttgggcaacccacagtgcttagcagatacctcaagagtaaaccatcaaaatgccgtcccttttaccacctctgggcaagaacaggagtgaataancccaaggcttctcaaccactgcgcctagagcagtcacatgntcacaggcacatgttgggtggcatgccatggtcatcccatgaagactgtcccttatccctcattattntnccttcccagactgcnaagaatccccgggagttgcctattttggggttgtgctccacagagtcaagc

SEQ ID NO: 686431 - DNA, 1174 bp, Homo sapiens
gggagcacggacgatctcgccggctattacgttgcacctcggatgtctagccacgcaccctaccgctatcctctcctaggcgaccgagacccagtggctagaagttcaccatggctctatatctacaatgatccatggccagggacgatcttagactactacgcgggcaatcccgactagtatgaggtatgatctactatcacctacaaacaggtactactatcagcaggctgcctcgtagcctcacgtggctgctatccaacctggctactctactgaccgcgcctctagcacgccatccgcggcaccaactgcactacaccgactcgccttactactaggggacacgcggctgtactcaacacgcgcctgcttgcaggccaccatcacactacacccactactacgccgccctggccccatggccacagccacacgcaaacctgcacacgctcacacgacaccaacgagaacgcatctgcacacacacctgcactgcacatcagacgcactagagacctgggcaacacacgaaaaacactaacactcatacacgacccaagcgctgccgcaaacgccccacacccatgcgcgagagcatgctccccagtagcccaggccacctgcacaaccgccacaggaccgcccagagagcacgaacacgcggagcgagatacccaccccaaggcttacaacacagcccaaccgacatcagccaagaaccatcaggagcactaggcgccacaacccgaacccatggacaacgctcgaggaccgctaggacccaaccgtcacacagcgcggcataccaaactagctccaagtacaaaaaaggccgacccgggccctacacccccgcaccgcggccactgcgcgacacaaatcaacaaaggcaactgcgacacaaaccggccccacggcaaccgccaaccaacgtggccacaccccatacccaccaagtgatacgtgagcatgaccacaacgcaccaacacaaccacacaacagccgcgccaaacacgcccccacaccctgacgcgcgcctcactacagggccatccaaccacgcgaaccgcgaccttgatatcaccacacaaccacacagcccacttgcacaacccaacaccgagatctcgaccaccacaacgagcaccagcaacacacacaccaacgggc

SEQ ID NO: 686432 - DNA, 287 bp, Homo sapiens
ccgcctccaggccctggccccgccccggggcccacccctgagctgttgtagtgagggcagtaaatatccagataatcgttcacattcacctgcaccgtgtagccctctcgccgcaggctgtggggaaaggaagcgggtcagagagaagaagcccaaagccaacccgctttccacctcaccgctccgcagaccttccctggggtcctccgagccttccggcttttcttccgagcggcctctagtctcactccctatctccatcctcggggccctagtgccgccagtcc

SEQ ID NO: 686433 - DNA, 399 bp, Homo sapiens
cccacgtcccccgcaaggacggtggtagattcctcactgaggccctggcgtgggtggtgctggctggtgacactgttgagtgagtacaacctggttggctaccggaggtggtggattcttcaccgacgcctacgcttgtcatgctgcgcaggtgagagtgttgtggttggtgatctggggctgctgctagatggtggtagatgcctctacttgacgcctggtgttctggtacttgccaggtaacgttgttctttcacttcagcctggactgatgcatgaggttgtatattctccacgacctgaggttgtggagtgcgcagatgatggtgttgttccacttgcatctcggctgctgtggcctattgtttcatttctcactgtggtccgaacttgtgcatc

SEQ ID NO: 686434 - DNA, 230 bp, Homo sapiens
ttctagtagcattcaaaatcttcccattgtttttttagtcttcaatttcactataattatcagcaataattttcttttccttatcttttctcttttcttcttctttctttctttctttctctttcttttctatactattttcgaaatatgttcctacatcttgttcacccacagctggaagtgcacattagtgacacatgtttgaatctcttgagagattcctctacagg

SEQ ID NO: 686435 - DNA, 188 bp, Homo sapiens
tgaagccactgcggtgagcgacgatcccttcgagtacgaatgctctattccaggatcgaccatgatgatcctgctcaggaacaacaaggaccctcgaaccggagaggaaattggaggggtaacagacctcaacccctacaaccaacgcttcttccgatgcaaccgaaaacaggtagctctgagccggg

SEQ ID NO: 686436 - DNA, 1481 bp, Homo sapiens
atctcagctgcattgtaaacctgttcctacacatagtgccttaaactatttgaggttgttaatgttattacctatatataaatgctgaggacgtgcagcacttaaaattcagacctactatttagtttccttttgatagcgtaatgtccatttcgtctccgagtggctatgattctcaggtagtagcctgttttgtttccttacttcacagcagggcagcatgtcggctatacgctgaattctgctgctctgattttctcagaatgactctagcttcaagaaaagcaagcacgttacgtacgtgcttaagaacaacattgattcagtatctaactggatacgtcgactacactgtcacagcacagcattttatactcctgttaagtgaaactgcaataacaaatctaacgcccactccccgcacgagctgtctgctgtactacacttcggacttaatcacccatgtttcagagcgtaccagtagggcatgaccttttggggtacgattacataaaacatggcaaaaattgctacatttgatttcattgacatcgtgcgcccacaatccatcaaggctttgggtcacaacccaatggcaagaaacttctcacttcacactaagtacgcagaaacctttttacctacattggaaacgccattggacccaacgcaaccggctgcaagcctaccctcacggacggctggcacaacatagtcaggacatgtaaactggcccatgtgtgaaacgaacagcggcgcacaaccgcccacacccaactacaccagcgcgacaattcaccacacaccactttgtgcccaccacacacctggcgaccacggcccccacgccacggcgccacgacagggcgcggtccacacagcccgacaatacaagataccccgggacaccggccacacagaacaaagtaacacaatggctaacatcagcacaccgcgtaaacaaagaggaagcgaagcggacgcacgagagatgcaccacccaactatcaccgacggaaagagatgcagatacaacgaacatcaaggggcaacggacgaccatgaccgggcataacgcgcgagccacactagcccgacacgaacacaacaccgcgcacacgcatggaccactcacccacgcacacaccacacaaagcacagaacaaagaccaacaacacgactagctgaacacaatatcaaccgggaggcgcaacaaccaatgggtaatagaaacagccgaagcagacaacactgccgagcgggtatccagagccagactaaatcaccggagacagtagacacgactaagtcgcgcaacacgcacacacgacccccaccacaccgagacatgacaccaccaacacagcgcgaaaccagacacagacagcacatggctagtcccaccgtacgccgagcaaacacgactgaccgaacacaggcaccacgcgtcaccgccagtcagcaacagactacagaccaa

SEQ ID NO: 686437 - DNA, 280 bp, Homo sapiens
cacgaggtcttctatagagtctctctctctcttttttttttaatgaagagagtttttgtgtaatgtagtataataaactacacatacttttacaggtacagatttatgattatggcttgctctggttaacacgaaaggtgttgctttggccagaccatattctgtgaaagacccatgattatcacaggtggccaaatgctttgaaagactctgggcataacgttccttttctggtttttattatcaatcttttcacttgtgactgacagctggcagtgtc

SEQ ID NO: 686438 - DNA, 408 bp, Homo sapiens
gacaccacaagataccaacagagcttctgaaacagatacccatagcattggagagaaaaacagctcacagtctgaggaagatgatattgaaagaaggaaagaattgaaagcatcttgaagaaaaactcagattggatatgggattggtcaagtcggccggaaatattcccccaaggagttcctctttaacacccgaagcgcacggccacctcagcatgaggaacacgagcgtcatgaagaaagggggcgtatctctgcagaatttctgaaagtttccttcctctctgctgctttctcatttgctggccatcggattggggattctatattggaagcgttctgacacctccaccagcacttttgatgaagaatggagtctgacttggttcgttagtggatacttctgag

SEQ ID NO: 686439 - DNA, 418 bp, Homo sapiens
aggggatgtcctttccagcctggggatggaatatatgagcccaaccaaaacctgagtgggaggctgcgggcccttttccaaaatcaggaaaattaaaggatgggcctcagtctttaaggaaggcaaagccctgggttgagcctcaaaataaaagatctttttccaagaaatgcaaacagggtgttcccccccatttccaggtgttcccagaccccagcaaagcaatgccctcctggccaagtagatttttttaaaaattagagggccttcctttgaatcaaaaatttttttatttttcaagaaaaaaggactaagattgggcccaaaacccaaaaaagtttcaaaccttctaatccagcgccaatttgaatgggttttgtaggtaaaggaataaaataaaaaactaaatctttttgta

SEQ ID NO: 686440 - DNA, 480 bp, Homo sapiens
ggctgctgagtctgatgttctgcattcccagtttgaacagcaaggagatgtggtcttgcccaaaatgaatcttttgagacagcacaatttattttgcgatgtatcaatttacattaatgacactgagttccacgggcacaaggcgattttggctgcttgctccacttttataagagatcagtttttactcacacagtcaaaacatgtcacaatcaccatcttacagagtgcacaagttggcagaaaattgctactgtcttgctatactggagcacttgaagttaaaaggaaatagcttttgaaatacttgactgctgccagttacctatacatggatcacattgtggaaaatggcacggaaactttgtcaaagtatctggaaatagatctttttatgaaaaacaacacccaactcactgacctgtgtcattcttctgatcctgttgtcaaaaatgaagatgaaaattctgataaagactg

SEQ ID NO: 686441 - DNA, 430 bp, Homo sapiens
  misc_feature (5)..(5): n is a, c, g, or t
  misc_feature (12)..(12): n is a, c, g, or t
  misc_feature (53)..(53): n is a, c, g, or t
  misc_feature (213)..(213): n is a, c, g, or t
  misc_feature (264)..(264): n is a, c, g, or t
  misc_feature (333)..(333): n is a, c, g, or t
tcgtncatactngagcaagcaagacactgacaccttcaggggacttgcagganaccttcagtgggatggatcaggtgaaggtgatgaaaagaattgcagagatgacagacatcaagcccatcctgagaaaactgccccggatcaagaagtatctactaaactgtgacaacatgagatgctcagtgaatgccacccgtcagcagatgcctcagnagaaaaagaggtggaaaacttccttagaaatgttggccgaagcaaaaaggnacggaagcctgtccgcccgcatattcgtcgagaaacccacacccagtggccccagtggagctgcacatntcagtggggtcccagatcgtcagaaaattggtgacagaccccaccttcaaaccctgccagatgaagacacattttgtgctgcccttccctgtgaata

SEQ ID NO: 686442 - DNA, 158 bp, Homo sapiens
agagcattcagtggcgctagtctggtcttatctcaacggatggaaaaagctgaaaacacttgtgatggtcacagcccattggcccagggtccctaaaagattgagatttcatccgtaaggtggatagaattcctccttcacccattcccttcaccacc

SEQ ID NO: 686443 - DNA, 439 bp, Homo sapiens
aattcggccataagggccggggcctttggaggccgggccaaaagggtttccaaaggctgccggatcccggttctttggattcaaaggctttaaggctcttcttcgggccggaattcaaaagccggttgaaccccaagccggccaaggccgggtagaacaatccaaactggaaccatatggaccaaggggtttaaaaccatggcaatgcagaagttgaaattaacatcctaaaggcagaaaagaaccgacttgccaggcaaattttaagaattaatttaaagaacggaaaattggccagaaagcgattagaacggtttggaccggattttcaaattattaggaattccttagggccctgggattatcagttaaggaccatcaaactcattaggaggtccagacctgcttattgggggacctaaagggtccagaccactat

SEQ ID NO: 686444 - DNA, 558 bp, Homo sapiens
gttcgacggaagcaatcaaggaagcgagttatacctgttgattcttagagcgatgagtgggacaggagagtctgtggctgctgtgagggtgaccgaggggcgatggacagtgcgtccttggtttcaaggaggagattgtcccagggaggaggaccaagtcaacgtgagcagctgtgtctttggggtttcgtgaggcaggggtataaggtcagttgtttcgtttgtttttacatagcaacagtaaagaccattcactaggtccccccgtcagtgtgagcatacccagtatgctagagaattgacacgaaacctttaaatcatggcctctttcattaccaaaacaaaacaaaaaaagggaaacaaaatacgatgggagagggaagagatgatgccgaagttgtcatcctgagtgactgtccctgcagtgaccatggtgtcccgtgccttattcattcttcctctctcatttccacgatgtcttgtcacctcctctgtcggaggcatgtctgccatggcagaatttaccccctcggggccgactcattctccatcttctta

SEQ ID NO: 686445 - DNA, 722 bp, Homo sapiens
ctgatctggggctctcttagtaggaaccctgggtcttggtggctgactccggacagtagggaaagagtgtgcagtggacagctgtgggaagaagaaaaaagcaggtccagctacgatttgggaacatgtggctacggatgacatagatgagatcctcgtggcattcatgtgaatctgtgggttgtgggtggtggagccacagcacatcatctggccacggtttgggtgttttgatgtctagcttgaggacagtgtcctctctagactgtgccgtgtagtcaggcaattggatgtctgattattagggtagcagttggtttgggatagctaagtactcccgaggggataataatagttcgatatcttttaagaaaataacgtccagggataataatagttcatatcttgtaaaaaataacgtcttgaatatacggataaagtgtatatgttaagtagtagtaatagcgcaggttaatagtaggtcagtaaatacagagatgagaacattcaggttgggcgcgagagtgctcacacctgtagatcccagcagttgggagttgaggctggtggatcaccgtgaggtcaggaatttgagatgcatggtgggcggaaccgggagaatccgtgtgtactgaaatacggaaattggcagaagtagtgggcatgcacctgtaatgccaggtaaacgggaggtgagggggaggatggttgaaccttgggaa

SEQ ID NO: 686446 - DNA, 338 bp, Homo sapiens
  misc_feature (328)..(328): n is a, c, g, or t
ctgggccccgtagaaacagacaggacagggtctcagcagccccagggtgataccggtggcagggtgctgggcttagaaggatgcgctgggtcctccggctgtccccactgtgcttgtttgtttaaacgtctgaagggcaaacggcagagcatcaacttctggtagctccgaatggtgggtccacgggcatttgtgacggtctcctaggtacagtttatacattggaagcatttttgtaattgttaccagcagtcacatgcaggcggtcacatcactgcagggccaactggactgtgtcccgggcagagactgaacacgtgcacacacntacccagagg

SEQ ID NO: 686447 - DNA, 231 bp, Homo sapiens
cggagggaggaaaaaaaaaggaaggaccctgtgactatgaagcaacacccaaagccactgtcagatgtcatggagatgagacctcacaagaaggccagaaaacaacagactaactccggatatgacaaactctttataaatacttataagtactgttggctacaatagttctaaagccttaacaaatgatgttgaagcaaaatgaataatgattattcctataaaaaaaaa

SEQ ID NO: 686448 - DNA, 425 bp, Homo sapiens
  misc_feature (348)..(348): n is a, c, g, or t
  misc_feature (358)..(358): n is a, c, g, or t
  misc_feature (373)..(373): n is a, c, g, or t
  misc_feature (395)..(395): n is a, c, g, or t
  misc_feature (421)..(421): n is a, c, g, or t
ttcatactactgaacagcataatcaaatcaacaaattcagctaatggccattgtgttgtgggcactgtgcttggccctgcacatccccatgttccctctcccctttgtcaaaaactagctccactggttgttaatgtcaatcactgatttgcggttgtccagaataaaaatggagagcagagcccaaacggagggtggcagtcggccttgtcattacccaaagaactaaaaatggagtaatgcaaaagagtggaactccttcacattaacaaaagcttagttatatacagtataagaccactgaatatttaaacacacaaatttgaaatatggcagaggaaccgggtngaacaggttnaaaacatggtttcantaattctgggtattttataagntatttctggagtccgcttggacaacnttta

SEQ ID NO: 686449 - DNA, 1563 bp, Homo sapiens
  misc_feature (246)..(246): n is a, c, g, or t
aaaaaaaaaaaaaaaaaaaaaggggcgccgttcgcgaatcaaaaaaggcccatcagcgacagttgaccccgctgtgagggctctctcaaaagttcttgagcaagaaccaggcaagaaaaattggagggcaaaggaacttcggcgtggtgtttgaatggagaagaactgtggtgcaagttcacattcttacgcccagaggaaccgacacagaaccgggaactcgcgcacattgttgccaattcctcntgtggccaacaatttttaccaaccaatgtgctctctgtgcaaacttcggcgcgtggttcaccagagggccccaggagaaaccttcaaagtgcctcaaagtgaaagcccaactttgggcgggggaacaaaacttttctccaaggcatgtgacaaagaaacccggcccagagtgtgccgaaaaattccctttgttacaacaccgcgccaccaagggtggtgccaaccttgggggccatttctgtgggtggccctttcccgcccaagaggggcctgttgacacccagaggggcagcgccacaaccaaaaacgcccccttgtctgtggacaccattcccgagtctccgaatgtgtggccgaaatcccaaaaggagaagctcttcggtgggcccacggggggccctgtgtttgtcttgcccccacgcctgtgcctagggagcctgcaacccggggggagccagggaagcatggggtgggacgccgtggtcgcccgttaaggggctcccccttttcacacctttggcacttttcacaccgtgggaggcttggtgtggaaaggttgttgttccctacccgtggggtgtttgtggcccaatgacccccggagggagaaatccctttaatggggccggaccaaattgaagagacgaaaatacccggacagacgcatgtgtatcacggcagataggtttccaccaccccagtgtggtcggtgtggtgaaactaagaaacccctgtctgtggggctccccccgtaattcctgcggggaacattgtggtgcgccggccccccagaggccgaaaaaaatgtgtcagggggacacccgggcacacgtttaacacccgagcgaaaaaacagggggcccaggggggcaccacccccggggaaggaaaaagccccaaccgttaggaaacctcgcaataggcgggacacccccccacgagggatgacacaccacggacacacataagagtacacgacagggcacaaaaaaataggtggtgaccaacagagaagtagtgcatacccatagtagatggcgttcgtctctgtgtgtgctttttccgtgctgcgcgtgtttaagtgttacataaggaaaaaaagaactgaaaagacacaacgacgtaagggaaccacgaaaagcaaagagagaagaacacgagaacaaacagacacacagaggcacgaacgcaagaacaaagccgcagaacgcagaacaaagaccacaggaagacagaaagaacagaggacccaagacggacaacaagccaaggacaagcacgcacgacgtaaaaaccaccgcagaacacaccgaaaaa

SEQ ID NO: 686450 - DNA, 141 bp, Homo sapiens
cgccggtaagtgggacctgctactggcatctagggggaagagactgggcactctgctaaacatcctaaacgacataggtcagcccccacgacagaagaattacctggtccacgatgtcgataatgctgaggcttgagaaaa

SEQ ID NO: 686451 - DNA, 153 bp, Homo sapiens
  misc_feature (1)..(1): n is a, c, g, or t
ntctataacccctacaaaaacaaaaaatgatagtcccacctataggtaagtagatagcccccaggtagcaaatctagtactaaggatacttcctactagatatagctatcccatgactagtcataggcctatgtaaggtatacaatatgctag

SEQ ID NO: 686452 - DNA, 1044 bp, Homo sapiens
  misc_feature (242)..(242): n is a, c, g, or t
ggtgcccgctcttgtcctccgttgctctgttatgtgatgctggttgcgtcagatattgtgttgttgtgcctctcctgtgtgtcccgcgggtgtttttctccttctggtttcccttggagggctttccccctttttccccccgcccttgggccttgggtccccaaacccgcgttgccgcccatgtttgggcccaaatccttggctatccacctgtcccggggatcccgttccaaagcataagnggttttaatagaacccggtttattccaggctcaggccccacattgtccaaggcgcacattagcttttcccagagttggttgttctcatcgccacagaacttgaggaaccacacgaatggggataccagtgtcctactgtccgtggcagagctgtactggcgatcttcctcccctaccatcgcgctgcccatgctcctgcaggctctggccctctcccaggagtaccggttaccgtacttggcctctgaaaccgtgctgaacttggcttttgccccagctcattctttggaatccccagcccaggccttaagtctttctcccacatggcccatcgagccccatcttggctgacggggctatcctggaccaaggtccgtgcccatagttcttagtggcccagtgcccggtggcttcagccagcttcctacgatccagcccgaagaaacgccagaagctttggaggctgcccatcgagaacctccatgaagcccagaactattttgccaaggttgactcccaagagcgcatcacgggacgctcgctttacttccacggccacgactctaccactaccctggggaagaccccggagaggaaccggtgtgcgatgcttttccggcagctgcatcacggagctgccctttcactggggtacccttgataaaccattcttctagagaggacatccctgctgggctgctgtgcagagtataagattttggacttgttcatgtcccctctctccctataaatgatgtactttgtgacaccctatcttgtccaataaacagcattttgatta

SEQ ID NO: 686453 - DNA, 1377 bp, Homo sapiens
ctgcgttgtactttatgtactttttttcttttacttttttcctctcttgctcttcttgtttgcctctctcttctctctccttctgtcgtgccgtttcccctcgtctttctcttcgttgttcttctctgtcttttgctctccttaccatgtgctcattcccgtctcttctgtcgtcttatgtattgtttctcttgttccttcgttgtcggctctctctgttgctccacgctcctgtgttccccttgcttgttgtgcctttgttatctcttccgggctctcttgttccctgtcccttgtctgtcttcgctctctctctcccttctttttcttgtttactcctgttgtttgccctttttcgtgtccctttcccttccgcgacctccctggcgcgtctgtgtggctcgcccttttctctgcgctcgtcccctggtctctcggcctgcattccgctatcctcctgtggttattgccgccccgttccgagggtcctggagccctttttccatctaagtttccttgcccgatgggatcacaccgtgggtctccactctggcttgagaatcttaactgtcagggcctccattcatttctccatctctaaccggatataccccctcgggatcctcactcgactcccttgctctcaggtgccctgcgtacaacgccagcataattcggtcattttcctccatccttctctattgtcgttgccgccagtcgtaactctgtgtgtcccgtcctcggctagccatctatccatggcgcctgtcctccaggctctgtgcatgggtcaccgggagggagggcccctcagtagcaagctctcggattctggcgtcctttcatggagcaagctgttacatgaccctaccacatcaccacccagcgagtccgtcctacactgccggtggcattgcagtcctggcatggaccccctccgccagctctcagccctctagcttggcctctcttgcatgggtgctgggggagaatggggcgaccgggagtgagtgcatggtgctttgtcccagtctcctgcagcccagcaggcccctttcagggctaccttgcactttcccccaccacctagcatcaccgccgtaccctgcttggaatcccagcaccagtcccaccaggcctctcctctgcgtttctggtttctctgccctctgcaagcatctgataagttgcactcaggagcgtttaggggagggcccatgggcaggctggtctcgtgatagtgagtgagtgctcatgggatctggtcgtttagatagcatgtcagcacctcctgcttcacttctgctctgtcatctcctggctccatccaaggccagaaacgtgccttgcttccccttcgcctttctgccgtgattt

SEQ ID NO: 686454 - DNA, 317 bp, Homo sapiens
  misc_feature (177)..(177): n is a, c, g, or t
  misc_feature (281)..(281): n is a, c, g, or t
tcttgtgcatacacctgtgtacacacatgcacacacacatataccccaccgttgatttttatgagggtgaatggtctcaacagcagaaaggcttactacacttgtttttgcaagtatttgcagatctttgtagttcctaatatgttatctcacactgtagcctacagataagaattnggggggaaaagtattaatttatgttattgatgaattctatgagattcccttactctagattcactcatccattcaatacctgtggcaaggctctgggagggatngcaatcatgaacagtcatgggactttgaggtccttt

SEQ ID NO: 686455 - DNA, 289 bp, Homo sapiens
tactgcctctgtactagactgcaagaactcacagtccgacaggggagacagatgtgtcatggtacaaaacaatatggcaagtcctggcacaaaggatgtgcttgtgaaatgtctatgaacaaatacgggaatgagccaagatgctctaagaagtaacacattcgtgtcatgggctttcagtcatctccgggttacatattcggtttttcagaacacaccctttccttaatattgctccaaacttatctatgtctaactgccaggacccggtcccaacaagcattgcccc

SEQ ID NO: 686456 - DNA, 604 bp, Homo sapiens
tgggcagagagggagccaagccctgtcccggccccaagcactaccgattaaatacatgttcttatagtcaagtgctctggggtctggccggaccggcaaaaactaaacccctggcgccccaagaacactatcccaatctggcaagaaggaataacaacaaactcaatatatcatctgtgtccctaaaagaaagggaatgtttccgagaaaaaataaaatagaggggccattttcaattataaaaggcagagcttccttggcaggggttttctcctttcccagtcacctctggggtgcagtccagagcaagtcgaccccgtgctccagcagctacggcttggcttggccggataggctgaaggtgccatccttagggttgggaaagccggagctcggggcggaatggtgccagatgctggaaatatgtctccgggagggggttgcaccaggcgtacacagcggtgaagagcattcctgtgggaggacgaaagagggcaagggtccattgctgttggttgttaatctcagagcagacagaaagctcagtacgggtctggtcacggaggacccgggacacccaatgtggcaggtgcaggggtcatgc

SEQ ID NO: 686457 - DNA, 200 bp, Homo sapiens
gcggtgactctgaggatatcatatttccttccattacggagatttcacgttagttgttcatacgctgcagcagccaggactaaaacaaagtgaagtatactggccgccttgcttaccagggctgcattcagaccctgcttttttttttcttttgtttgtttgtttttttgagacagattcccgctctgttgcccagagag

SEQ ID NO: 686458 - DNA, 125 bp, Homo sapiens
gatgcgtggtgttgtgtgcctgtaatcccgagtagttgccttacaggcgctggcaccatacccatctaatttattatttggtgtcttgtcttgtttccttgagccagacaggtgcagcgtagaat

SEQ ID NO: 686459 - DNA, 251 bp, Homo sapiens
gcccttccccccccccctttcattgggttgttccccccccccgtttccttgacccctttttggtttagggagccttgaggcttccccccttttttggggaataccttcctcctcccttttttaactggggctttttggggccctgcgtgctttttccatggtttccccccgtgttttttcctcccccaagggttggggggggttaaccccccccccgggattttccctaaatttttttttctttcccttga

SEQ ID NO: 686460 - DNA, 132 bp, Homo sapiens
  misc_feature (1)..(1): n is a, c, g, or t
nccgagtgggcctgccatcatgacccttggcgataagtatgatttatctccacactagcagataccaagccgaacccccttcgaccttgccgacaggggacctccagaactagttctcagtgcttcatcatc

SEQ ID NO: 686461 - DNA, 187 bp, Homo sapiens
cagcctgtaccacccactacctaggtatagccattagaagcaccagtctacagcccagagcataggcaatgagagaatagccagctataggaggacgtacctataggacaagcagtaaagctaaaagagactagtattaagagccatagagccgaagctacagagcctacctaagctaccattacat

SEQ ID NO: 686462 - DNA, 466 bp, Homo sapiens
  misc_feature (192)..(192): n is a, c, g, or t
ctcttcctcctgtttttatcaatggtgcactggttggtggctggacacatatagtcgttatgtccttgaatacttctcttgaagaaggccttgcagccctcacaggaccagactccccattagattgggttgaggccccttggaaaaaggcaattaaggctcccattctggcaaaccactgcacgagtagcngagtctccttggcagattccatagccatacttcccttgtcattggtactggccaatctttctctgccaccctggcgtcgattatctgaatttggcctgtagaactgcgggccggcctcgcgcaccgtgtagcgctgggctcgttctccaggtagtagggcacctgctggccgtggggctgcaggaaaggcgacagctgcggcggcgggtgcagtagcatcagcgggctcggagacacgctgttgagtggggaaaccccccaggccgttggagcc

SEQ ID NO: 686463 - DNA, 271 bp, Homo sapiens
tgtctataatgtagagaaaggatagtgtgggagctgaggcaatagataatatctagtgttgattaccgaatatggggatactggcttaaatttagtgctggagatgagtgcttcactcagtttaccctaatctggccctggttgaattaacaaaccttagaatggttagatatgttaagtgagggagaagataagccaaggttaaatgtagtgtgtctgaaccttgaacaactgggtaggtagtggggttattaactgagactagctgcag

SEQ ID NO: 686464 - DNA, 1081 bp, Homo sapiens
gcaatctgtggcctcagcccttgccaactctgcctcttcccccgctgactggggtatcagtttatggtgccctgcaggaagaccctcttgttcctgtgggtgggaaggttctggaatctcagttgccctctctggagttggggagacataggcttttggaggacaagcttgcagagtggttcatggagtgaggtggtgggagatttctgagcctctgcagagatgtgggcagctggtccggatggccacttcgggctcagcacagcaacgcacgcccagactcagactggcggaagcaaacaggggctggacaggccaggagagcctgtcggacagtgatcctgagatgcgggcagcttgctgcagaggcgcgaaggcacacgcgcacgcgctcgtggaacacaaggaagcaacagtgatgctacagaacgaaactcactgccgcacgacgcctcgacgacagggacgggccccagagcgcatcccacgaacgagcacaccaccaaagaaaaatccgaaagagacgcaatccctaggcacacgaagcatacccacgcgccggcaagccgccgaagggactgagacgaggactgcacgccgagcaacaccggccgccatggcgccccgagccacaccgcgccacccccgacgcctacgctcgtccacacacccagccgatctgcctcgccacccgctagcgccctagatgaagcaaccgacaacgagccccccaggtcgagggaggtccgcggcgccccacgccgcaagaccacggaaatgtgagtcagcccccaccacgggacacgacatgcaacgacagagagcgatgacaacgaacgaggacccagaaagcaacggcaccacgacagagcacgcggccacggatgaggggccacgacagcgtcaaccaccgacagcggagggccgagagggaggcaggagtaacgaaggaaggtgaccgcgaggagagaacggaaggggataggaggccgagagagagaagcgcaaaggagcaagaagaaatgaggatgccaggggaagaagtaccgcagcaaggagaacgcagagctgaagagaacca

SEQ ID NO: 686465 - DNA, 338 bp, Homo sapiens
gccgtgctttaaaaaggccttagtgcccgggatgggcccagtgtttttaagggaggtgggagctcttgctttcctggtccctgcagaatgacaaaaaaggtgaagctccatgcatgtgtgcgcgggggtatgtgcgctcagggtctctgtttaagtatcagctaaaaatgtgcttcccccgtgtttgtcataccctgagaccaacaggctccagggtccctgatttttggaaaagcctggaaaagctggggaaatgcggttcccaatgccccggtataggaggctgtgttgagctgccattcaaatggattttttaataataatgaaactggcgggta

SEQ ID NO: 686466 - DNA, 171 bp, Homo sapiens
caaaaacctgttagaaataataaacagattgagtaaatttacaggatacaaaatcaacatgcaaaatctgtagttttttgttttggtttggttttttggttggttggtttttggagacggtagtctcgctctgtcaccaggctggggtccatgggcccatctggcttcact

SEQ ID NO: 686467 - DNA, 100 bp, Homo sapiens
tatcataggtgagataatataggatagttggagaaggggcacgttgtgactggatactcatgaatgtacgtttggtttggggtgaaagcatacgtcttat

SEQ ID NO: 686468 - DNA, 488 bp, Homo sapiens
aggagtttgacatgcaagcgtatccattcttcaagatcccattatatcattcaataatacctcaggttgtgggctgtatggcacatggaatccccacgtttatgtccatttgctgtgcccagtcattgtacctgttgtccagtgaaatgtgttcctaaaagggcacaggtggctccttgggcagcagttatgtctaaggccacttggttttgcaacaccactttttgatctgatcaacctcattcattaacaggaggagggacactcaggtgtaattcagagcctgagcggtgtgctccgcaagagcagtaaattgtgcttctacagttttgacacctgctccagggatagtcattgccaaagggtagaaacaccagggggctcatcacattcgcaaaaactgagagcacagtgcctcccagttatacaggcatctgggcaatgtggggagaacagtagcaggtacataaggccacccccagataaaa

SEQ ID NO: 686469 - DNA, 852 bp, Homo sapiens
  misc_feature (434)..(434): n is a, c, g, or t
taaaaaatagaaatccttttttatttttctgtatcgtgctttaaaaaaaaaaaaaaggtattgttttggcttggcgtgggctccacacaggcagccacaaaagcacaattattttgtaacgctgtacgcgtgttccaccaatattttgagaccaccaagatgatagcgagaaccacccacaataatattaaggagacaagcacctcgcgtgtaataagtacaacgcctctagaagagaaaccttcccaaatatacttctaaagggaggcgctatgtgtgagagacaccccgctctggcttataagatctctctcctctctgttcgcgccggggccctctccttgtggctagtgaagcgggtgcgctcaagttgtgtcagaactcttctctcctcgggggagaaaagattagactgttgtagacgtgcgcacaanagtgctcctctccccgccagcggtcgtttggagatacacaccgtagaaaagccccaggcacagtagaattctcttattcatatatcatatcacccgcacagacactatgtgtggtgagtgtatagaataaagacccgcactagtggtgtgttggtgatcccccccaccaaggagagtatcatttgacgacaccacatattgtggtaattgaggaagagaagaaatactaacgatgaatactcccccccaacagtggtgttgcccccccaagagtaaaatctcacatccacaaagaggcgtcgtcgtagagtagatggaatcagccaattctctccccccccaaaaggaagagtagttgagtagatgaaacatagccacgaaaagtgttggaggcccatgtgtggccccccactattag

SEQ ID NO: 686470 - DNA, 505 bp, Homo sapiens
acaaaacaactagaagcaattaacaaaatggcagtaggaagttcttacattacatgtcggtaattaccttggatataaagggattaaattctccaaagacctggagtgactgaatggattttttaaaaaagagccaactatatgcttcccacaaaagacttgacttgtaaggatacacatagactcaaagtgaagggatggaaaaagacatgacttgtaaggatacacatagactcaaaagtgaagggatggaaaaagacattccaagcaaatagaaacctccagcagattgcatatagtgaaaaaaaaaaaaaatcatctgctttaattgaaaatgctttgttgagagatttgcagtcagaggcaacctgcttatatactggcaagtgtagaaggggacaagatagacaagacatgctcactaatgagtctccctgaaccccatacctcagaaacgtagggcacagtgagaactttggcatttgacttttaaagtgtccagcca

SEQ ID NO: 686471 - DNA, 884 bp, Homo sapiens
  misc_feature (856)..(856): n is a, c, g, or t
  misc_feature (882)..(882): n is a, c, g, or t
gagagggagccgcggaggtgcaggtcgaagaggccgggctacgtcgtgccctgcgcgtgagcagctgcagcggcagaggcagcatccagcggcggcgccagcagttccagtccgttgctttactttttgcttcaccgacatagtcattatgccgaagagaaagtctccagagaatacagagggcaaagatggatccaaagtaactaaacaggagcccacaagacggtctgccagattgtcagcgaaacctgctccaccaaaacctgaacccaaaccaagaaaaacatctgctaagaaagaacctggagcaaagattagcagaggtgctaaagggaagaaggaggaaaagcaggaagctggaaaggaaggtactgcaccatctgaaaatggtgaaactaaaagctgaagaggcacagaaaactgaatctgtagataacgagggagaatgaattgtcatgaaaaatgtggggtgattttatgtatctcttggggacaacttttaaaagctatttttaccaagtatttgtgtaaatgctaatttttgaggactctactagttggcatacgaaaatatataaggatggacatttatcgtctcatagtcatgcttttgggaaatttacatcatcctcaagtaaaataaatatcagttaatattggaagctgtgtgtaagattgattcagcattccatgcacttgctttaaaattagtcctgtgcatactgggtgttttactgtgcatatttgaatttttcatgcagttttctagagcataatcaggtgctttgacctaagttatgtgattctaatgagacatggatagttgtggccatctgcttactatatgtgggttagnatataaggtgtacttggctggatagnac

SEQ ID NO: 686472 - DNA, 1184 bp, Homo sapiens
gccggggtgctccgcatcgccctgcccgcacgccgcccgcaccaccaggaccgcgccgccggcctccgccgctagcaaacccttccgacggcctcgctgcgcaagcctgtggacgcctctcccccctcccgcaccccgccgcggaacgttcagttatgaagaggggggcagcggggaacatggacatgaagcggaggatccacctggcagctgaggaacctggacccggcaagctgtgacgagaccttgtcttggaacaagttgcaaatcaacatgatggaacacacattgagggcttacaccgctgcacctttgtgaacattagagtacctccgtctcactacattgtaggctgtgatctcaggtttccaaatctcacccaagactgcctaacatagaacaaagcttggaactccagtgaacaactacgaaaatcattatgcgagggtcatggaacaatgatcaggcatgacaaagcagttcgcaaaatcttcagcaagcattcatacacctttacagtggcaaccagtaccgcgtggaaaaggaataattccagcaaccgttgagaaacccttttggcacacacggttccgaactggtacgtgcacagcacggcccttgaggcagccctacgctctacaaacgtggatggaagcgattaacacccacacgcgtggaacattgaacattagcgcggagaaagcaagggtggtcctttctccaaagaacctaccgtggcagcccgccagggactataacacttagcgtagagggaacttggggcctaattgaaaccggaaagaagcggagcccagagaacagcgcaacattgaaccctcaagcattggaccggcccagggctgagacaagggagtgatgggaaacttgaacacacacggcagggagagacagacaacgaccagcgacggcacagcacgacggccaaagaaacggcaggcacacaacacaagcaagcgaacatgatgcacaaagccacagcccgagcagagtaggaaaagcaaaaccaaaagcacgcaagaacagccatggaaagcaaagacagacacagctgaaacaacaggaacgaagcaaaaccaacacaacacagcacaacccagcggaacacgcacgaacaaaaacgggcaacgaatacaagaaagcgacaagaagacaccgacacgcag

SEQ ID NO: 686473 - DNA, 847 bp, Homo sapiens
  misc_feature (819)..(819): n is a, c, g, or t
  misc_feature (845)..(845): n is a, c, g, or t
gagagggagccgcggaggtgcaggtcgaagaggccgggctacgtcgtgccctgcgcgtgagcagctgcagcggcagaggcagcatccagcggcggcgccagcagttccagtccgttgctttactttttgcttcaccgacatagtcattatgccgaagagaaagtctccagagaatacagagggcaaagatggatccaaagtaactaaacaggagcccacaagacggtctgccagattgtcagcgaaacctgctccaccaaaacctgaacccaaaccaagaaaaacatctgctaagaaagaacctggagcaaagattagcagaggtgctaaagggaagaaggaggaaaagcaggaagctggaaaggaaggagaggcacagaaaactgaatctgtagataacgagggagaatgaattgtcatgaaaaatgtggggtgattttatgtatctcttggggacaacttttaaaagctatttttaccaagtatttgtgtaaatgctaatttttgaggactctactagttggcatacgaaaatatataaggatggacatttatcgtctcatagtcatgcttttgggaaatttacatcatcctcaagtaaaataaatatcagttaatattggaagctgtgtgtaagattgattcagcattccatgcacttgctttaaaattagtcctgtgcatactgggtgttttactgtgcatatttgaatttttcatgcagttttctagagcataatcaggtgctttgacctaagttatgtgattctaatgagacatggatagttgtggccatctgcttactatatgtgggttagnatataaggtgtacttggctggatagnac

SEQ ID NO: 686474 - DNA, 690 bp, Homo sapiens
  misc_feature (179)..(179): n is a, c, g, or t
ggcagtgcaaatatccaatgaagaggaagtttgtcgctgcatggcatcttcaaagcctgaagctgtacagtgagtttcttactcgggagactggctgaagatggctactctggagttgaggtgcgagttacaccaaccaggcacagaaatcattatcattagctcaccagaactacagnaactgcttcttgcgtgcagaagggcctggcggtattcgggcacactgtacttgctgctagttcagtcacagtcaggtttggctttccagaagggcagttgctagagcctcttatgcctgcaacaagggtggccacttacgaggtctggtgtgccactctgcccagtgcagcaggtctctgcggttgaactcaacgtccttagggagggccttggctgtggcggcacgggccgtgctagtggatgtgcgtgcgcgttctatcagtggtaggagttggggccagaaggctgcgaggcttgtggctggttctgtggaagactccgacggacagcacgggctagactccatgacaggtctggtcggatggcctgatgcatccactagcggaggaccctggttactctactcacggttgacactggctgtgcgccacgtgcttgctcagactgggtgtgctggggctcatggtggactgatcatgctgccctgggacccagctggtacgatcgggc

SEQ ID NO: 686475 - DNA, 993 bp, Homo sapiens
  misc_feature (965)..(965): n is a, c, g, or t
  misc_feature (991)..(991): n is a, c, g, or t
gagagggagccgcggaggtgcaggtcgaagaggccgggctacgtcgtgccctgcgcgtgagcagctgcagcggcagaggcagcatccagcggcggcgccagcagttccagtccgttgctttactttttgcttcaccgacatagtcattatgccgaagagaaagtctccagagaatacagagggcaaagatggatccaaagtaactaaacaggagcccacaagacggtctgccagattgtcagcgaaacctgctccaccaaaacctgaacccaaaccaagaaaaacatctgctaagaaagaacctggagcaaagattagcagaggtgctaaagggaagaaggaggaaaagcaggaagctggaaaggaaggtactgcaccatctgaaaatggtgaaactaaaagctgacagtagatccacatctctcgctcaactgttaatgtctcaagcctccagaggcaccccacccaggcagcactgtcagtaaaggggcagattgaaaccagtgagagtaaagagaggcacagaaaactgaatctgtagataacgagggagaatgaattgtcatgaaaaatgtggggtgattttatgtatctcttggggacaacttttaaaagctatttttaccaagtatttgtgtaaatgctaatttttgaggactctactagttggcatacgaaaatatataaggatggacatttatcgtctcatagtcatgcttttgggaaatttacatcatcctcaagtaaaataaatatcagttaatattggaagctgtgtgtaagattgattcagcattccatgcacttgctttaaaattagtcctgtgcatactgggtgttttactgtgcatatttgaatttttcatgcagttttctagagcataatcaggtgctttgacctaagttatgtgattctaatgagacatggatagttgtggccatctgcttactatatgtgggttagnatataaggtgtacttggctggatagnac

SEQ ID NO: 686476 - DNA, 320 bp, Homo sapiens
  misc_feature (2)..(2): n is a, c, g, or t
  misc_feature (48)..(48): n is a, c, g, or t
  misc_feature (55)..(55): n is a, c, g, or t
  misc_feature (68)..(68): n is a, c, g, or t
  misc_feature (87)..(87): n is a, c, g, or t
  misc_feature (124)..(124): n is a, c, g, or t
  misc_feature (165)..(165): n is a, c, g, or t
  misc_feature (286)..(286): n is a, c, g, or t
  misc_feature (313)..(313): n is a, c, g, or t
gntctcatgaagaattctggtcgtgcagccaggtggtagtctgtaagntttgggntctgggtactggnagattggtccattaggctncctgtagattccagtctcccttccaccaagtcccagntcttgtctacgtggtcacagggtcaaacctgactccctttnggtcctcagtttcccctccccttcatgaaatgaaaagaatactactttttcttgttggtctagcattgctggacacaaagtgtagtcattattgttgtattgggtgatgtgtgcaaaactncagaagctcactgcctataagaggaantaagaga

SEQ ID NO: 686477 - DNA, 1342 bp, Homo sapiens
gagcggggcgtcgcttgactccgtcgacaagagtgagcgagtggacccgcgatggagagcatggcgagctccaggtaaaggacaattatcgagatgaagaggctataagaactatgcttctaaccgccttgaagtaatatgacgtcctgatagatcgcacgagggacgccgggcatttcatgtgtctcgagaagcagtagtgcgacgaggcgaacacacatttagtgatgctggaggcaacagtgatggacgcgtgctgtgctgaaacgaagctgtccgatgttcgggactagtctgtctcaatggacatcgcttattggtgaatgcatcttaccacctagagggaaggacgttggttgatcagcgcagcagcagacatgcgatcggaaggattgctccgataatgcatgaactagactttccttgaccgcttgcattgctatccggccaatccactactacccaccgaagctttaccgagacacagccttgggccattcatccccaatgcaataaacgacgcctaccaataccacttacctgacgactgtctggcacctgtagaacgcttatcatgtgagaaactacctttctcgaaaacggcacgtgtgtggctgcagcacattcgtgcgtatgtcaggctgtggcaatgcttcttcctggacgccgccacagcagtaaacagttgccacgacccctcttggctccccaattcttacacacagtgactactggcaaaacgcgctttgcccttgcatgttgaggtcccttacctaatagacggcaatgacacatatatcttgaccccagtttagattgcgcgatactacgcccgttccccctctaatacagcgagtgtaacgccacacaacatcaccaacatcgtgcgcgtcaccactttatgcgaaaaccagcgccacattgagattgccctgatggcgaactatccccgccacagatagtttgcaaccaactttatcgacacgaagccaccggcgcacttccagtgcattgtcccatgggaaccaaccgatgagaacaacgggacgctgtgttctctcagaggcgacgaaccaccagaggggcagctcgcacatctcttagggacgctcgaaacactatgctgtgacaacaaacagcgaaatcaagcacaatttgcagtctagcaatactatcagtcgcacatccattggaagctcctttgcaccctgaaacactatttttgaccgatcacctcagtgcaacgaccatagggatcatcccaaactcccctagcatacactagtcgccacatgtatggcattccacacacgacgcacctcccgtctagcacagcccaacg

SEQ ID NO: 686478 - DNA, 111 bp, Homo sapiens
ccatttgccaagccgtgctggttaccagggcctggcgggcgctgttggggggcatctggcatggttgactcctcggcgtcacgttcagcctcttcaccggggctgcagcgc

SEQ ID NO: 686479 - DNA, 710 bp, Homo sapiens
  misc_feature (682)..(682): n is a, c, g, or t
  misc_feature (708)..(708): n is a, c, g, or t
gagagggagccgcggaggtgcaggtcgaagaggccgggctacgtcgtgccctgcgcgtgagcagctgcagcggcagaggcagcatccagcggcggcgccagcagttccagtccgttgctttactttttgcttcaccgacatagtcattatgccgaagagaaagtctccagagaatacagagggcaaagatggatccaaagtaactaaacaggagcccacaagacggtctgccagattgtcagcgaaacctgctccaccaaaacctgaacccaaaccaagaaaaacatctgctaaggtgattttatgtatctcttggggacaacttttaaaagctatttttaccaagtatttgtgtaaatgctaatttttgaggactctactagttggcatacgaaaatatataaggatggacatttatcgtctcatagtcatgcttttgggaaatttacatcatcctcaagtaaaataaatatcagttaatattggaagctgtgtgtaagattgattcagcattccatgcacttgctttaaaattagtcctgtgcatactgggtgttttactgtgcatatttgaatttttcatgcagttttctagagcataatcaggtgctttgacctaagttatgtgattctaatgagacatggatagttgtggccatctgcttactatatgtgggttagnatataaggtgtacttggctggatagnac

SEQ ID NO: 686480 - DNA, 669 bp, Homo sapiens
acctacaaatgcctaatccaaggtttcccaatatcagcccgcacatccaaggaagtttggaagaaataggatcaaatcgggggtggggtgtgtgtgcgtgtgtgcgttacttgaggcattgggctgttgagatgtttcccttccgggagaaagtatttaaggggggctctaggaagagaagaaggttgattaaagtaccggtttcctctccgctactaagcgtagagtaagagaactagaaagcgaagtctgtgaacgacttctggagacaggcttcgcgtgaaggaaagtctagaggcgcattaccgaaaacttagaggaattgctagatagattgttaaagatcttggtggggtgggctgagtgttgaatccgttcgttggttgattccgatttctccttagggtagatgggggctgaggaacttctctccgcgatattataccccttcgctcgtttttttttagaagaggaaaaatctctattggcgtctgacctgggatgtgcggctacctaaaaaacgaaattgaaggtctcttcgctgccctaggttcttagttcctaactctgccctaatctatccttttcttttagccgagtctttctcttccctaggcattttcttctttccctaagcgaacgactccttttatatatgttcgagaacgt

SEQ ID NO: 686481 - DNA, 121 bp, Homo sapiens
aaacctccatcgctacatcaccatcatcaaagacctgagcaagccaggagacctgagcaagccaggagacctgagcaagccaggagacctgagcaagccaggagacctgagcaatccaggc

SEQ ID NO: 686482 - DNA, 290 bp, Homo sapiens
  misc_feature (13)..(13): n is a, c, g, or t
ttttttttgcttncaaaataatttatttcgtttataaaaactgacctaatagtgagtgcatatttacattttaaatcattacccaatttagcgagaaacaattcaatgcaaactacaaaatagcttataaaggcagacttatacaggacaccaaaaataataaacagacttactaaaataagtaggaaacaatttaaatagtcactgtattttaagcaggaatccacataagtcttaagacttaaggatttatacaaggtagaaaacactacaagtaaccccaagcttgc

SEQ ID NO: 686483 - DNA, 320 bp, Homo sapiens
  misc_feature (7)..(7): n is a, c, g, or t
ggaggantactatttgcgccagatgtaaaaagatggaatctctgattgctattagcggaacaacgcaaggagcaattgtctgctgcgatttccattgccgttgtccgtaatattgaagcaaccgccacaagggggtattggaatgcgtactacgacgcgctgaacattgatgtctcccgtagagaggcccatatcgtcaattctgctttagatgcctgcagcaccttcatgggccgggatcttattgcgttggattttgtttcacaaactagcaccaacgcacggtgatctgcatcaaggggtaccggcagctcgaattc

SEQ ID NO: 686484 - DNA, 163 bp, Homo sapiens
cctagcaacttccttacaaccttcctacaaaatggtggtctttttcttcattccacctcgtggagaaagacgcttcaggaagaggcacataacttcgctgtggcccttcaaatttgtcttctccacgaggtggaatgaagaaaaagaccacccatttatgtat

SEQ ID NO: 686485 - DNA, 148 bp, Homo sapiens
ccgcctcttagaacctgagagtaagttttcttgtcgtgattctcccaagtcttggtaggcatcgaactggtcctttcactttgagaggcttttcttttgcgcctcttatcacgtcagcacacaccttttccaaggcattttacgttgc

SEQ ID NO: 686486 - DNA, 228 bp, Homo sapiens
  misc_feature (54)..(54): n is a, c, g, or t
  misc_feature (72)..(72): n is a, c, g, or t
  misc_feature (103)..(103): n is a, c, g, or t
  misc_feature (112)..(113): n is a, c, g, or t
  misc_feature (159)..(159): n is a, c, g, or t
ttccgacggcatctacggctcaacattttttgtagccacaggtttcacggcttnacgtcattattggttcanctttcctcactatctgctctcatccgccacnctattattnncactttacatccaaacatacactttggcttgcgaagccgccgcctngatactcggcatttttgtagatgtgggtttgactatttctgtatgtctccatctattgatgagggtctt

SEQ ID NO: 686487 - DNA, 497 bp, Homo sapiens
tgaatcctctaactcagccacccgagtagctgagactacaggtagtgcgccaccgtgccccaccaatttttgtactttttagtagagacaaggtcttgccgtgtttcccaggctggtttttaactcctggggtcccaaagtgctgggattacaggcgcgagccatggcatggcgctcggctcattttttctttttaagggaactgaaatgacagctaaagtgtactactatttttatttttatttatttatttgagtttttgagagagagtctcgctctgtcacccaggctggagtgcagtggcactgtttcagctcactgcaacctctgcctcccaggtttaggtgattctcatgccttagctacctcagtagctgggactacaggcatgcaccaccacgcctgaccaatttttgtatttttagtaccgaagagggggttcaccatcttgaccaggctggttcaaactcctggcctcaagtgatctacgactcaga

SEQ ID NO: 686488 - DNA, 340 bp, Homo sapiens
  misc_feature (55)..(55): n is a, c, g, or t
  misc_feature (93)..(93): n is a, c, g, or t
  misc_feature (97)..(97): n is a, c, g, or t
  misc_feature (111)..(111): n is a, c, g, or t
  misc_feature (171)..(171): n is a, c, g, or t
  misc_feature (254)..(254): n is a, c, g, or t
ctccataatgtgtgcccaggacagggcatggtggggcccatggaatcattacccnagacgggcattttcagggaaacagcttagataaggccnggcntacagtagctcccncctgtaatcccagcatttggggaggctgaggtaggaggactgcttgagcctgggagttcnagaccagcctaggcaacatagaccccatatccacaaaaaatttaaaaaaggagtttgtgttcctgtagtagcatacttgggangttgaggtggcagtatcacttgagcccgggagttcaaggctaaagtgagctgatggagccttgcaccccagcctgagcgacagagg

SEQ ID NO: 686489 - DNA, 202 bp, Homo sapiens
tatactattatttcctattattaattttgcctttatttactgtagttggtaactaaatctctaacatcgaaacatgagatgttctgccaaaaagagattacagaagaaaagacctatgaaaagaaactgggtttgtgcagtgaagattttatttacagggttttgcaatcggtatctttaatctccataacaattgggctat

SEQ ID NO: 686490 - DNA, 854 bp, Homo sapiens
  misc_feature (249)..(249): n is a, c, g, or t
agcggagcggaggctcctgcagtggtggtcggctgttgggtgtggagtatcccagcgcccctcgggatccgacacctttgagcgttctgctccgggcgccagcctacctcgctcctcggcggcccatgaccactaacccatccaccttcaaggtgagtcgatcccaagcagcaggaatagctcccgatgtttcggcggtcgtccagtgtggtagtgatccaattttctcatatagcgttttgatgaacncagacataacaacctgatgaggcaagaactaaaatggcctcgtaatatcttgtgaggacaccttgaaagtaataatctaacgacttctatgaggcccaacgttcaatgtcgatggtagccatagatcgtaggtaggtgtgacaggtgaagacgttgagcagttcgatctaggcactgcatgagagaggaactacctactagaagtgcaagctaccggatgactatcttaagatcttgcaaagggacgaacggtgattattcattgacacacatgtcggacgacagacttgccaggcatggtctggggcagagtgaatgacgaagcctcagtgtcctgctagcagccatgtgctccagacctcaggtgagcaccacggcgcccgagtagccatccgatgaaggaaatccccctaggcggacaagtccagcctcgtcttgggttagctctgactgtcctgaacgctgacggactagtctgtttcctccatgctatgtgaactgcatcaacttgagtcctgactgtacatactcttggatttgtttcattagaaagaagcacgtttatgcaaaaagaatcaaaaaacctgttcacaggggggaaaccg

SEQ ID NO: 686491 - DNA, 339 bp, Homo sapiens
  misc_feature (320)..(320): n is a, c, g, or t
ccccgggctgtacgaatttggcacgagggcgccggaagatgtctgtggccgcggtggcggacacatcagatgatgctcggagtctggctgatcgctctcaccaaggaccgaggggccgtgggaaacgtctgacgcccactctacggaggagcaaatggaggcccaagccgcgattgtgcacggacacaccatataggcgcacagagcccggagtgggacaccttgcagtgtgtgcccagagaccccaacccccaccagtggagagctcctggatcaagtgaacgagcctgtgcataaataaagcaagagtgtttacaccntataaaaaattttttttgt

SEQ ID NO: 686492 - DNA, 804 bp, Homo sapiens
gcatggcgtgtgctcgcccactgatgaatcggtgtactccgacggagggggagtcatctggccaaaaaggtcacttggcctgctcgtatgcaagggctcctattcgagccagatattgtgaacttggtccacaccaagtagcgcaagaatgacagacagccctatgctgtcagatgaattacccaggtcatcaagcactagtgctgaggtctcgggggtactggcagagcctgtggctcgaatgtcccaggagattcgatggtggtgggacttgcacccggatcgtgggcaacaggggtgctataaggcaaacatgtgttcgtggtaggccgaatgtttgcaccagacaaaatctggccgccgattggccctcgtacagatgagacagctaactccaaatatacgcatacgcgcatctgattctgccactggggtgaccttcagccctaacacagatactggctcatgtctaaagggtcattcgatattgaggaaggtgtcctgaacgttcctttggtaggtgaaggatgaggtgtgcaaggctgaccggaagaccccagggaaggcagtgttgtctccttgacgaaaagttaaacgcccatggtaaggattactccatgcacaggtctcaatgacctctccagcgaaatgagagctcgggaaaggcccaaagaatgaagaatacgtgagcctgtataccaggggcagggggccccgttgcattcatctcattaaggggaggattaatgggttatcattccaaggcccttaggaaacattgccttgggattaccccggcaaagc

SEQ ID NO: 686493 - DNA, 381 bp, Homo sapiens
tatgtctaatctgatcagcagagtctcatgagaagttagatcctttctctggtaacattctagctttccactaattgaagtacagaattctctcagtgacacttattgatggcacgaaagaaaaaacaaacatgaattattttttatacaatcatggaaggctaacagaacacaaagaaagaatggccccattcagggtaagacaagctgtctactaaaggcaatgctgtatgtgaaaaaagcaacaaatcctcccacgatctttgaagaaaaccaaagtgttaacattggattctcaaagcaatttcttataaaggagcaataatgcttggtcgttcttcaagttctcaaatgatattttctctcaaaataaccagaagt

SEQ ID NO: 686494 - DNA, 916 bp, Homo sapiens
gtgctcctgtcccccgagaattgggcctcgccctgcttgggcgtgctggacctgttgcaaagcctggtgctgcgctcccgcgcagtggtgccatgaagcgctcggggactctgcgtgctgctactcggacctgagcgccttcggctggtgctgctgggcgctgctccgggagctggtggcctgggggactcagctgtgtacctgagtcctgtggcagtcctggactgtgacgccactttgcttgctccgtgctgaccccctgtggtgctggtagccccacaagttgctaagtctgcgtcgcgaggtgcccggtgcggagctaggagcgggggctggcctgggccgggccaggccctcccccggtggagcgccttcttccttgcctgtgggccagttgcggcctggtgctaggtagctgcgtgtggggagagtggcctggccggagggtgtaggggctgtctgggctgttggggcactaggacttgtgctgtgcctggattgaagaaggcagcggagatgagttgatgttaccgtggacctggagggaaagacctctgcggatatggtgtgccactgttaggctgggcagcatcccggaggggcacacattgattgtaggatgacaaaggacagacgggaatgcgcgcctgggacgccgaatgggaccccgataagggtgatccggcccaagactagtcaggatatatcaaggacccacttctgttgttgattgccggtatccgtaggacctccttgtggagccccaacgcggggggaacgtcttaaggcacgccaagccattggttgccacggaacgatacagtttgcttgtatgagaccagaattgcccgtttgcgcatttccgtgagtgatagcggagtggcccaatacgttagaaggaacaaaagttcctttt

SEQ ID NO: 686495 - DNA, 396 bp, Homo sapiens
ggctggcagacaaatggggatcagcgaagccacgctgttgaacatgctcaacatctcccccttctccttggggctggtcatccagcaggtgtcgacaatggagcatctacaaaccttgaggtgcttgatatcacagaggaaactctgcattctcgcttccggagagggtgtccgcaatgtggccagtgtctgtctgcagatggcctacccaactgtggcatcagtaccccattctatcatcaacgggtacaaacgagtccgggcctggtctgtggagacggattacaccttcccacttgctgaaaaggtcaaggccttctgggctgatccatctgccttggtggctgctgcccctgtggctgctgccaccacagctgctcctgccagctggctcag

SEQ ID NO: 686496 - DNA, 359 bp, Homo sapiens
tatacattgggataattttattcattgaaaaaaccttaggaatcagcttttatatttgcatttctctgcctgcagttgaagggaagagcttgactgtctttcgagggctctcccagccctggaatcccgggcttccttccaaactgggctgggatgtaacaaatctgggatatacatcccaatcatggggacaaggggcaacttgacaggggggccccacacttaaggtgtttggggaagtcaggctgggaaataaggaaaccatttccatgagggatttcaggccccatttcatgagtttattaccctttttttttgccaaatagccctggggaagggagtcatcaaatcgaaaatgg

SEQ ID NO: 686497 - DNA, 81 bp, Homo sapiens
gcggccgcctactactactactgctcgaattcaagcttctaacgatgtacggggacatgaaaaataaaggttccataatgc

SEQ ID NO: 686498 - DNA, 351 bp, Homo sapiens
gtataatagaagtttcaatagcacattgctagccatgagggaactgatgaggaggaactatcatcctgttagagaactccgcttccattcctgcgtctactgtcttgctccactggagatggatggctcacggaggaggccacagtcggatgagagcagcaggttctccctacggcactaagtctacagggggaaggacgctctgtgctggcagcggtggcacacatggcctgtctgcactgtaaccacaggctgggatgtagccaggactatggtctccttggacagacaggtctgatgtttggccaatccagtccttcagaccctgctattgaaaattctaaaactagg

SEQ ID NO: 686499 - DNA, 154 bp, Homo sapiens
  misc_feature (72)..(72): n is a, c, g, or t
tttatttttgggaacccttccccttttggatttataactttactaacccaattacctatcaataaacccttnctataatatttttaaaccacctatgtttatccagcttactctttgaggggcagaatatactaaataaagaatttttttatga

SEQ ID NO: 686500 - DNA, 1267 bp, Homo sapiens
aacttccccgggtgagaactttttttttggacaccatgtgctgcgggcaagtctgcgcccgtgagaccgcatatttacatgtgtgtggaaaccacgtccgtctcctttgtaaaaaatcttttcacacactggtgcttcaccacggttggggtgatccatatccggggatgacactcctaagggaatcttgccgtgccttcttggcaacctcgccttaatttgtttctttcgtgagtggtttttcccaaaacccataagtgctataggccttttgggggctaccaggtccatttcacatatttttaccccagccctgtgggttacacaggggacacaataaagggggtgtaccccccacgattaacttgggggtttcatctcctcctcctatggttaacatccgctttcatttcccacaggcgaaaggggttcccttccaccaaggcctcaaaccattcataggccttccataaaatttcgggggaagaaagcggcatgtggaatgggtaaaaaagcggggtcatgaacactcacgcgataggcccttaaatggcacacacttgggggcacacatctccgccgccacatatacggatggggggcccccccccaaaaacgtggggttattcgacggatcccatcgaagccatgggtcatagagggataccctgatgcgaacaaggatttaagccccgattaatgggggacccttcaccagtgtggctgtttctgaaagcgagcacgatccaattctcggaagtaattcatgcgcattgatggggtaccacgcgaagagtgagaacctacatcccccgcagtgttactacggcaactggttcatatgtcctattgttcaagaccctcatgtagcaggccaatcccccactgcctgtacgaggtacttggagtagctgctaggtcacaacagtaggtttgttccctctttgacggtgtctgtaccgcatgaactagccgctctttccgccacttgaaatttgttcgcacccatggtttaagcgcaaccctattaacgtccgagtgaactgggggagattcacaaaattgagagaacccttttttgaaggtctttagtatgtttagttttgttcttttttgttttttttttttgtaatataaagcgagatatttataagtgggtgctagggtcattgactttatctccgcgtgcacaagcagtgtgttgaactttctaatctcatccctctcctaagtgagacgctgagatagaccgggttccttcgtcccc

SEQ ID NO: 686501 - DNA, 219 bp, Homo sapiens
acgtctagagtgattccattaggcgatggaactgtagattcatatcttctccccagcatggctgcatccgtacgcttgacctcacctgttgtccagcataaatcaagtgaactgattatctgagacaagtcaccccaagagcgctgtgcagattgggcaggaaaagagctaatcacatggatgggttcatatattcgcttcccaaggcacacactgtcc

SEQ ID NO: 686502 - DNA, 142 bp, Homo sapiens
ccacagaatgggatcatgtggacgcccagaggatgcagagtggggcagacacaccagagactcggggattggcatggtgctctgcccgtgttttgccctcctccaatactcgccctgggctttgcgggcccgtgactggggc

SEQ ID NO: 686503 - DNA, 804 bp, Homo sapiens
gccgcggtttcctcggtcagaacctcgttagctccgcccgccgcgtgctccctcctcccactcggaatgcctgtctggggcggtggaaataagtgcggggcctgcgggagaaccgtgtaccacgcggaagaggtgcagtgcgatgggcggagcttccatcgctgctgcttcctgtgcatggttgcaggaaaaatttagacagcacaacagtggcgattcatgatgaagagatctactgcaaatcctgctacggaaagaagtatggaccaaaaggctatggttatggccaggcgctggcacgctcaacatggaccgcggtgagagactgggcatcaagccagagagtgctcaacctcacaggcctacgacaaatccaaacacttctaaatttgcccagaaatatggaggagctgagaagtgttccaggtgtggggattccgtgtatgctgcggagaagatcattggagctgggaagccctggcacaaaaactgtttccggtgtgccaagtgtgggaagagtctggagtctacaactctgactgagaaagaaggcgaaatctactgtaaagggtgtacgcaaagaactttgggcccaagggatttggtatggtcaaggggcaggggccctgttcatgctcagtaatggtgtgaacccagtaagcacgacagagaatctccattaccaaatgagatgggtatatgggctcactactggggaacagcagacttggatgggcatcacgagtgctgttggggctggacgacagggtgatctcggcatataagttaaagttcttaattgac

SEQ ID NO: 686504 - DNA, 367 bp, Homo sapiens
tctattgcctgatgaagaatacttatctcttaagcgaacctaatacagatcatccgctaattctttcctaatgagctatatacagcagaaagccgatttaatcgtaaaagtgccccacagagacactttaccaggaggctgggagagttctccagatatgggagaggcgcagagccagtgtgtgagccgagacctgtctcagcaatccaccatgaggagctagagtatcctcctccctttaccattcagaccgagagaaaaagcccagcttgtgtgcaccctacgtgggagtaaaggcagagctgtacctggttaaaagcctttcagtatttgttatgatgtaaggctctatgattttaggggggaa

SEQ ID NO: 686505 - DNA, 2044 bp, Homo sapiens
ggcgggtggatgacctgaggtcaggagttcaagacagcctagccaacatggtgaaacccccatctctactaaaaatacaaaaattagccaggcgtggtggcacatgcctgtaatcccagctactcaggaggctgaggtgggagaatcgcttgagcccgggaggcaggggttgcagcgagctgagatcgtaccactgcactccagcctgggcaacagagtgagaccctgtctcaagaaagaaacaaaagaaaaagagagaaatcaggaacatcatgaaagatacagcaaaatgttttaccccagcccattgcaccacacctgggattgtgacaattaacttgataaattgttccttttcctgttcggaactgactaggttgtgcgtggatggaccagtgaaaagaaaatcctgtttgggtagggaagagggaagtagaaaacctctttcgtattcttggtgtcaagaaatgggaagagaatgagggagcagagacctgggttgagtgttggctctgcactaaacagctgtgtgatcttggtctagtgccttaacctctctgagcctcagtttgtacatcagtaacattgggataatgacatccacatgcccacttcacagagctgctgtgaggactggatgagaaatgtagagaagtatttcggacaccataaagctcaaatacaaggtgttggttaggaaaagtttcaactgacttgtacccacctgatacccctccatcagcataagcgtgtatgaggatgttaggtacatgtgttgtgagtgaaagctctggaacacccgagtagagctttctgcaaatcagcttctccttcagaggagaccattttgttttgctttccagcagttacttgaagaagccttatctgaagtcacaacagtgacttcaggaatagaagggaccaatggccagcttgctgaaatgtaatgccattcttaaaagccagctaagaatcagaccgtattagttaaggacccataagagtagacatttagaaaaagtgaaaaatggcaagagtggcccaatcttttgagagtttagagaaaatatcatttggaaagggagtagctctccttctattttagccttattattacggtatctataaagcaatgccatattctaaatctgcagaaataaaattctaaggggcgaaagtccaaggcagaagtcaaaagttttgcaaggaaaccgatgaggttgctgacctgagctgggcagggttgaacaggcgagtgccaagatcaaggtctctgattgtctctccttgaaaggtaagcagagaactagggctatcccataaattaagtgggagattggaaaggggtgcggacttctgtattggggagaaggtcttggatgaactggggcagagaactgccagagagagtacctaggaatacgttgttagcaggagaaagaccaagttcagatgcagacttgggaaagtaggtaacttgaccaaaggtagcaaaattagactacccaactggattgtgaatgcagtttatgaaatggatcaggacaggagcaaaaatagattttctagaaactgcagactcctgtgattggagcagtatacaaagtacagcaacatcagactagatctcacctgaggtgctgggtgagaaatcttagggaccagatggaagagggcctgtgtataaagacattaggaaggaggtttgggaaggtttgggagggcagcctgacttgtctccagagaaagttagaactggttgacttagcaaccaagggacactgggtcaaagacgaggaatcaggacgtcggtgcctagtgactgagcgccagcccagcccatttctctacattgccatgggctaaacccagtgtgctgtaaactcttcagttcctttggttatggattttgtatcttttctgtgtttcttaataaagttcttttgaaaaatgggaacctttctcagatgggaattttgtatctttcctctgtttcttaataaagttcttttgaaaaattggaaaaaaaacaacaaaaaaaaag

SEQ ID NO: 686506 - DNA, 1956 bp, Homo sapiens
ggcgggtggatgacctgaggtcaggagttcaagacagcctagccaacatggtgaaacccccatctctactaaaaatacaaaaattagccaggcgtggtggcacatgcctgtaatcccagctactcaggaggctgaggtgggagaatcgcttgagcccgggaggcaggggttgcagcgagctgagatcgtaccactgcactccagcctgggcaacagagtgagaccctgtctcaagaaagaaacaaaagaaaaagagagaaatcaggaacatcatgaaagatacagcaaaatgttttaccccagcccattgcaccacacctgggattgtgacaattaacttgataaattgttccttttcctgttcggaactgactaggttgtgcgtggatggaccagtgaaaagaaaatcctgtttgggtagggaagagggaagtagaaaacctctttcgtattcttggtgtcaagaaatgggaagagaatgagggagcagagacctgggttgagtgttggctctgcactaaacagctgtgtgatcttggtctagtgccttaacctctctgagcctcagtttgtacatcagtaacattgggataatgacatccacatgcccacttcacagagctgctgtgaggactggatgagaaatgtagagaagtatttcggacaccataaagctcaaatacaaggtgttggttaggaaaagtttcaactgacttgtacccacctgatacccctccatcagcataagcgtgtatgaggatgttaggtacatgtgttgtgagtgaaagctctggaacacccgagtagagctttctgcaaatcagcttctccttcagaggagaccattttgttttgctttccagcagttacttgaagaagccttatctgaagtcacaacagtgacttcaggaatagaagggaccaatggccagcttgctgaaatgtaatgccattcttaaaagccagctaagaatcagaccgtattagttaaggacccataagagtagacatttagaaaaagtgaaaaatggcaagagtggcccaatcttttgagagtttagagaaaatatcatttggaaagggagtagctctccttctattttagccttattattacggtatctataaagcaatgccatattctaaatctgcagaaataaaattctaaggggcgaaagtccaaggcagaagtcaaaagttttgcaaggaaaccgatgaggttgctgacctgagctgggcagggttgaacaggcgagtgccaagatcaaggtctctgattgtctctccttgaaaggtaagcagagaactagggctatcccataaattaagtgggagattggaaaggggtgcggacttctgtattggggagaaggtcttggatgaactggggcagagaactgccagagagagtacctaggaatacgttgttagcaggagaaagaccaagttcagatgcagacttgggaaagtaggtaacttgaccaaaggtagcaaaattagactacccaactggattgtgaatgcagtttatgaaatggatcaggacaggagcaaaaatagattttctagaaactgcagactcctgtgattggagcagtatacaaagtacagcaacatcagactagatctcacctgaggtgctgggtgagaaatcttagggaccagatggaagagggcctgtgtataaagacattaggaaggaggtttgggaaggtttgggagggcagcctgacttgtctccagagaaagttagaactggttgacttagcaaccaagggacactgggtcaaagacgaggaatcaggacgtcggtgcctagtgactgagcgccagcccagcccatttctctacattgccatgggctaaacccagtgtgctgtaaactcttcagttcctttggttatggattttgtatcttttctgtgtttcttaataaagttcttttgaaaaatggga

SEQ ID NO: 686507 - DNA, 1521 bp, Homo sapiens
ggcgggtggatgacctgaggtcaggagttcaagacagcctagccaacatggtgaaacccccatctctactaaaaatacaaaaattagccaggcgtggtggcacatgcctgtaatcccagctactcaggaggctgaggtgggagaatcgcttgagcccgggaggcaggggttgcagcgagctgagatcgtaccactgcactccagcctgggcaacagagtgagaccctgtctcaagaaagaaacaaaagaaaaagagagaaatcaggaacatcatgaaagatacagcaaaatgttttaccccagcccattgcaccacacctgggattgtgacaattaacttgataaattgttccttttcctgttcggaactgactaggttgtgcgtggatggaccagtgaaaagaaaatcctgtttgggtagggaagagggaagtagaaaacctctttcgtattcttggtgtcaagaaatgggaagagaatgagggagcagagacctgggttgagtgttggctctgcactaaacagctgtgtgatcttggtctagtgccttaacctctctgagcctcagtttgtacatcagtaacattgggataatgacatccacatgcccacttcacagagctgctgtgaggactggatgagaaatgtagagaagtatttcggacaccataaagctcaaatacaaggtgttggttaggaaaagtttcaactgacttgtacccacctgatacccctccatcagcataagcgtgtatgaggatgttaggtacatgtgttgtgagtgaaagctctggaacacccgagtagagctttctgcaaatcagcttctccttcagaggagaccattttgttttgctttccagcagttacttgaagaagccttatctgaagtcacaacagtgacttcaggaatagaagggaccaatggccagcttgctgaaatgtaatgccattcttaaaagccagctaagaatcagaccgtattagttaaggacccataagagtagacatttagaaaaagtgaaaaatggcaagagtggcccaatcttttgagagtttagagaaaatatcatttggaaagggagtagctctccttctattttagccttattattacggtatctataaagcaatgccatattctaaatctgcagaaataaaattctaaggggcgaaagtccaaggcagaagtcaaaagttttgcaaggaaaccgatgaggttgctgacctgagctgggcagggttgaacaggcgagtgccaatgccaaatccccctctgcgagaaacacccaagaatgatcaataaaaaattaaaaaaaaaaaaaaaaaaagaaaaccaagaagatgggaaaaccatgcagaattgatttgacgaggaaagccttggtctctaatacatgcaatgactagaacagtatttggtcaaagaaccacataagctctgtaccctggaggaaatgtatgcaggcaaggactagtaaaataaaaaataataataattcagagccaccaacacaacag

SEQ ID NO: 686508 - DNA, 581 bp, Homo sapiens
cctaatcggtcaattgatacacttgagaagcacatcatcatgctgacagacaagaatcttggccaagtatccaaataggttgactgtaacccaaatacagaggttgccaaatctgtctagctcgaggtctggtgaaaggggcttacagaactcgaatggaaactccatggtcatatattaatgccagcatgtaggctaatatgtattacaaattaggccctatctcaagtcccacttccagtagcattaggcaccccaattctattgaatgcaacagttgtctctatgaccgtaggaatctttgaaacgcagccgcattttaggacgatacttctccaaatacagaagttgctatgctgggtattttggcacctaatcttcctaaatttcttatgtattgataagattctggcatgggaatagatttaacaagtcataactcaatactgcatgatttggggaaaggtcaatcgatacaaatgacaagcacatctttatatgctgacagcaagaatcttttgccaagtatccaaattggttgactgtaacctcaataccgaggttgcccaatctgtctaagc

SEQ ID NO: 686509 - DNA, 602 bp, Homo sapiens
gtagaaagaagtagacatgggagacttcatttgttctgtactaagaaaaattcttctgccttgggatgctgttaatctaagaccttacccccaaccccgtgctctctgaaatatgtgctgtgtccactcagggttaaatggattaagggcggtgcaagatgtgctttgttaaacagatgcttgaaggcagcatgctccttaagagtcatcaccactccctaatctcaagtacccagggacacaaacactgcggaaggccgcagggtcgtctgcctaggaaaaccagagacctttgttcacttgtttatctgctgaccttccctccactattgtcctatgaccctgccaaatccccctctgcgagaaacacccaagaatgatcaataaaaaattaaaaaaaaaaaaaaaaaaagaaaaccaagaagatgggaaaaccatgcagaattgatttgacgaggaaagccttggtctctaatacatgcaatgactagaacagtatttggtcaaagaaccacataagctctgtaccctggaggaaatgtatgcaggcaaggactagtaaaataaaaaataataataattcagagccaccaacacaacag

SEQ ID NO: 686510 - DNA, 756 bp, Homo sapiens
tgtttaagacaaaatgaaagcaaaaatatagagttccaagtatggtgtagataatctagttgggaatactttgaagtctcaccttccccttataaactaatattgccataattggttccgatatgttctgaagaagcactttaatgttacaaattcaaatgcaatatgggagcatttagattctgagtgtttagacttaggtgggtagcaatggcagtaaacttaaattacgtaagcttcttgcaagccacgaaaccgtgtaaatacgctgtgcgagtaacgaagtgtaggctgttatcagttgaactgtaaatacaaaagtgcttcttccaagttgagtctctatgatgatgaagtttctaaggatttatctgaacaccattcagaaagcttgttgggggaattgatagttatgatgtgcatctgttaaacggagtgacagacgataactcatcattccccagaaaccttttttgattacagtatctaacatttgcttcctcttttggtttgccggttataacggttgggattggacgagggctcactggatcccaattgcttggagctggtcatttggattcacctcatcatgtggctcggatagggcggatgacttaccaggattccgggcagcgggatcagattaccacgacatgggagggtttccttcccaacaagcggatcggggtttttatcaacttatggtatccagattttcttctatcttggatgggccttagatgcgaggatggt

SEQ ID NO: 686511 - DNA, 358 bp, Homo sapiens
  misc_feature (5)..(6): n is a, c, g, or t
  misc_feature (14)..(14): n is a, c, g, or t
attgnngggggggnattccccaaccccctgatatttacaacaactggtgtgtgtgtttttttatctgctgaccttccctccactattgtcctatgaccctgccaaatccccctctgcgagaaacacccaagaatgatcaataaaaaattaaaaaaaaaaaaaaaaaaagaaaaccaagaagatgggaaaaccatgcagaattgatttgacgaggaaagccttggtctctaatacatgcaatgactagaacagtatttggtcaaagaaccacataagctctgtaccctggaggaaatgtatgcaggcaaggactagtaaaataaaaaataataataattcagagccaccaacacaacag

SEQ ID NO: 686512 - DNA, 697 bp, Homo sapiens
  misc_feature (519)..(519): n is a, c, g, or t
aaaaacataaataaatataacgaaaaccattctccacataatgcagcagttgtcagcctgggaaaaacttaaggtggcgcctctatagtactcaattttagagagcttcattatggtgcagttcatacgcaacctggtacttgcagaatccacttatgccatgtgtacacggtgaagaaatagtagactgggtatatcattggttgcgcccgtatgaacattactgccacattttcatgtatagtacatcttacctttcattaattacttcttggcaatgatgttcgtgctcttaggcgactcagttgcagtttccttctctccgttgtttcgttccctgttcattatgcgttcagcttcgtgaggacctatatgagggtagaatcatattatcattcttaatagattcacagaaatttgtataggcaaagcaatttcttgaagagttgagtggccaagattttgaagacatgttgatttttcgagtatctagtttataatcgttgtcgacgaactccnacattaatagaagtttggttatatttcatgtgaaaattttcttccagtagtacgttctggttgtccgatgggttggggggtaactttactacatattagtaagtatggtgcagaatgttcatgcggcatgaggagtgccagctagtgtgataactctaaccattcttgtaatcaaaag

SEQ ID NO: 686513 - DNA, 1840 bp, Homo sapiens
ggcgggtggatgacctgaggtcaggagttcaagacagcctagccaacatggtgaaacccccatctctactaaaaatacaaaaattagccaggcgtggtggcacatgcctgtaatcccagctactcaggaggctgaggtgggagaatcgcttgagcccgggaggcaggggttgcagcgagctgagatcgtaccactgcactccagcctgggcaacagagtgagaccctgtctcaagaaagaaacaaaagaaaaagagagaaatcaggaacatcatgaaagatacagcaaaatgttttaccccagcccattgcaccacacctgggattgtgacaattaacttgataaattgttccttttcctgttcggaactgactaggttgtgcgtggatggaccagtgaaaagaaaatcctgtttgggtagggaagagggaagtagaaaacctctttcgtattcttggtgtcaagaaatgggaagagaatgagggagcagagacctgggttgagtgttggctctgcactaaacagctgtgtgatcttggtctagtgccttaacctctctgagcctcagtttgtacatcagtaacattgggataatgacatccacatgcccacttcacagagctgctgtgaggactggatgagaaatgtagagaagtatttcggacaccataaagctcaaatacaaggtgttggttaggaaaagtttcaactgacttgtacccacctgatacccctccatcagcataagcgtgtatgaggatgttaggtacatgtgttgtgagtgaaagctctggaacacccgagtagagctttctgcaaatcagcttctccttcagaggagaccattttgttttgctttccagcagttacttgaagaagccttatctgaagtcacaacagtgacttcaggaatagaagggaccaatggccagcttgctgaaatgtaatgccattcttaaaagccagctaagaatcagaccgtattagttaaggacccataagagtagacatttagaaaaagtgaaaaatggcaagagtggcccaatcttttgagagtttagagaaaatatcatttggaaagggagtagctctccttctattttagccttattattacggtatctataaagcaatgccatattctaaatctgtctgtattggggagaaggtcttggatgaactggggcagagaactgccagagagagtacctaggaatacgttgttagcaggagaaagaccaagttcagatgcagacttgggaaagtaggtaacttgaccaaaggtagcaaaattagactacccaactggattgtgaatgcagtttatgaaatggatcaggacaggagcaaaaatagattttctagaaactgcagactcctgtgattggagcagtatacaaagtacagcaacatcagactagatctcacctgaggtgctgggtgagaaatcttagggaccagatggaagagggcctgtgtataaagacattaggaaggaggtttgggaaggtttgggagggcagcctgacttgtctccagagaaagttagaactggttgacttagcaaccaagggacactgggtcaaagacgaggaatcaggacgtcggtgcctagtgactgagcgccagcccagcccatttctctacattgccatgggctaaacccagtgtgctgtaaactcttcagttcctttggttatggattttgtatcttttctgtgtttcttaataaagttcttttgaaaaatgggaacctttctcagatgggaattttgtatctttcctctgtttcttaataaagttcttttgaaaaattggaaaaaaaacaacaaaaaaaaag

SEQ ID NO: 686514 - DNA, 733 bp, Homo sapiens
agcgggtcagtccctcctgtagccgccgccggccggcgcccgccgcccctctgccagcacctccggcgccacctcgggccggcgtctccggcgggcgggacgccaggcgctgacgaggcgcgtgtgggggcaggcctgagtcgctcctgctggctgcgactcaggctccggacgtctgcgcgttccccatggggacttggccatgctggcgctctgaggtcgctctgcagatttgtcatcctgcatgttaccaaggggcgagagagcgagacgggattatggaatatcgttgcgagagattggccgtattgatgagaagcgtaggacaatatttctttacaatttgccgatcgtcgttgaggtggatacgcaataatggaaggatcgaacgaaatcgatggaacaacttttggttcatgaaaggagtttcgagcgtgccacttacctcgactgacatggtctttactggcgcaaaggacactgtctggaaccagcaagagttacttgatagctttctatcgttgctgactgactacaggactgcccttactatgctggcagacccatggggagacacttctatacatgaacacaatcatgaggtggcttaatatggctcgtccacatcgatggtacagcgcccatttgtatcgcagcacaagactgttaactgactacgcggaaagcgccagtcgcgcaagatccttgcgtgctaccggcgacaggactttga

SEQ ID NO: 686515 - DNA, 335 bp, Homo sapiens
ccccataacaggtcctcagggctggaataagtcctactatgcacactgtactgatatagctcaatgtgtttgaaagtccaaactcataaggtgccaggaagcaaggactgtgattctcaaggccttgcccagtggctaacacatgcagacctaactgacctgtgttcttctcaaactttaaaacatttattttaaatgtccatttaaatcacttattttcctttatcaaagcacagcaggaatattctttacagagtagcctacgaaagtctcaagaccatcaaccatttacaaccataaactatttgcaatggcaaaataaatacggaaatgta

SEQ ID NO: 686516 - DNA, 113 bp, Homo sapiens
  misc_feature (67)..(67): n is a, c, g, or t
gatctcataagaaatgtaatatgtaaataatatcttgctttatgttgtaaaatatacattgtttgcnctagaatagaaataatttcttttcaataaaaagaaagaaggactct

SEQ ID NO: 686517 - DNA, 242 bp, Homo sapiens
ccacctcagctcctgagtagctaggaccacaggcacgtccaccacgtccagataattttggtatttttagtagagatggggtttggccaggtgggccaggcgggtcttgaactccggagctcaagcgatccacccgcctcagcttcccaaagtgcggggatggcaggtgtgagccaccaggccggggcccaagggctctttaaagagagacatttcccttaattcttcttctacgccctcac

SEQ ID NO: 686518 - DNA, 252 bp, Homo sapiens
ctcacgatcacgaataaaaccgacgagagagaatggtgaacgggaagtgctgggcatgaagcgagacaagagtgagcagccctgccattcagctacgtctcaatagaacctatggttgttgatgttgaagattattacccagtctttcctgtgacatggtggctgagctctggtggagtggcaacgatagactcatcaccagtatgacagattcatctgacggagagatgttcaccgattcgatgccgtaca

SEQ ID NO: 686519 - DNA, 119 bp, Homo sapiens
acagtccaatataaaaatatagaaaagggcttaattcatgaagtggctataggtggctctttctcaaaagtgctcacatgagggtcacaagaagcactatattggtcagaccattggta

SEQ ID NO: 686520 - DNA, 597 bp, Homo sapiens
  misc_feature (14)..(14): n is a, c, g, or t
  misc_feature (67)..(67): n is a, c, g, or t
  misc_feature (87)..(87): n is a, c, g, or t
  misc_feature (98)..(98): n is a, c, g, or t
  misc_feature (100)..(100): n is a, c, g, or t
  misc_feature (106)..(108): n is a, c, g, or t
  misc_feature (123)..(123): n is a, c, g, or t
  misc_feature (126)..(126): n is a, c, g, or t
  misc_feature (138)..(138): n is a, c, g, or t
  misc_feature (171)..(171): n is a, c, g, or t
  misc_feature (174)..(174): n is a, c, g, or t
  misc_feature (211)..(212): n is a, c, g, or t
  misc_feature (222)..(224): n is a, c, g, or t
  misc_feature (266)..(266): n is a, c, g, or t
  misc_feature (278)..(278): n is a, c, g, or t
  misc_feature (298)..(298): n is a, c, g, or t
  misc_feature (313)..(313): n is a, c, g, or t
  misc_feature (385)..(385): n is a, c, g, or t
  misc_feature (412)..(412): n is a, c, g, or t
  misc_feature (419)..(419): n is a, c, g, or t
  misc_feature (426)..(426): n is a, c, g, or t
  misc_feature (436)..(436): n is a, c, g, or t
  misc_feature (444)..(444): n is a, c, g, or t
  misc_feature (486)..(486): n is a, c, g, or t
  misc_feature (496)..(496): n is a, c, g, or t
  misc_feature (522)..(522): n is a, c, g, or t
  misc_feature (563)..(563): n is a, c, g, or t
  misc_feature (585)..(585): n is a, c, g, or t
ataaagtgcaatgntatttccaacccctgtacatatgttccaaattcaagtattgaaaatgcccagnaacttactatagcagcttanctttttttttntnccacannntttgctacggatttnggnccttcaaatgtnttaaatgtgtgggacaatgctacatctacactnggntggcttaatcaacctcttcaatggtgggccctgaggnngcaccaccannnggggggggtccaccaccagggaatcccccaggcattcctccnggcatgcctccngcactctggtacagcttggngatgatgggggggcnaactttctccagctctttctgttgatgttcaaattcttccttctcggcagtctgattcttatcaagccagtngataatttcattacacttgtccagaancttctgngtggccncaccgggaancgggcctngaagtttctcatcttcaacagttgctttcatgttgaaggcanggactcaagngaattcttggatgacaccttgtcccnctgcttctcatcttcagctttgtacttctcagcttcctggnccatacgtgcaatggcttcctngcgcaaacggcc

SEQ ID NO: 686521 - DNA, 365 bp, Homo sapiens
  misc_feature (266)..(266): n is a, c, g, or t
  misc_feature (337)..(337): n is a, c, g, or t
  misc_feature (351)..(351): n is a, c, g, or t
ctggctggacattacccataaagatgaaagctttgtcaaagagcatttccctaccctgtatgcccgtctgcttgaactagggatcgatattaccaaagacatgattccagttgttccggcagcccattatacttgcggtggtgttgtggtcgatgaacatagccagacagatattgccggactctatgcgattggggaaacctcttatactggcctgcatggtgctaaccgtatggccagtaactcacttttagaatgttttgtcnatggaatgagtgcaaccaagcacattcaggaaaatttcaaggccgatcagccaactcctgcagttccaacntgggatgattctcnggtgaccaacccgg

SEQ ID NO: 686522 - DNA, 120 bp, Homo sapiens
tggcagccaagttgttaggagcactttgttgctgtatttgtgatccaaggtttgattttggtaactcaaggctttaaaccagctgattcccttgggccagttgactgactcttccatttg

SEQ ID NO: 686523 - DNA, 631 bp, Homo sapiens
ggtttcgtctttatccgggtccagtcctccctgtttatgccatcagtctttttcccttcatgaggaccttcctggtcgtgccagaccccagttggtcctctacgatccaggattgcccccggtgacccttattcggggtctgggggaccctgtcgccgaggcccttggccgtcgctccgaactggttgtatgtaagtatttgactcacattctcgcgtgggctgtaccccttcgacctagtcaagcacctggcacagaatactctattctcgacagcgctcgtgcccatccaagggcacggatcctcacccctggaggagcccttattatgaaggtggcacttggtcgaggctggtgtcccgtgcaatactggccgagcctggcatcactgtcacccacctggctagtttaccgggtcccacagaagtgggaaccgcgctgagctcctgcagatatttggtatctacaggcgatcccattgcccaactgtgaggggcctctatccccgagcctacgggcggggtatgcacttcgtgcgggggtcatatacattcctgagattctgggtaaggtgctccaagatgtactgagaggacgggcttaatatatgttttgagaaaaaaacataaaa

SEQ ID NO: 686524 - DNA, 735 bp, Homo sapiens
ccaggaggcagaggttgcagtgagccaagatgcgccactgcactccagcctaggtgacagtgcgagactctgtctcaaaaaaaaaaaaaaagaaaaaattctttatcgggatcggttaaaccatatttttatggatcatgggcaagctgaaattttggagaagatggtttctagtattaggtgatgaaaacatttgggtaatatggctgtgggctctcaaagaattttagtgtcttaatcttggctagaagaaagacaattatatatatatttgggcgtaaattacttaaacattttaattacattcagggttctattttaaacattggttttactcactggagggccacttttaaatattcatactcttgggacataagatggctgggtatatccctcatttctttaagtctaagtaagtcagctttaaaaagtacctggcaaccagaaccttccatattctgggactaaatctggcctcggataatactccagtggcagacctgtggtgttggccattttggaagaggagatagtagctattattattttacacgttgtttgatgtgataactcctaaagactttttagtggataaaaggcggcaattggtatttgtgatacccaaaggtggtgtgtggctacctttagaagcctgtggggcaaaatggtaattctaattttcatacctggtttttggattcacaacaacaacattattggggccggctttcc

SEQ ID NO: 686525 - DNA, 372 bp, Homo sapiens
tcgctctcgacacctcgacagctagaggggggctgaaagcctgtggtcccaggagatggagatgccgtttgtggcgatgatctccttgcagccttgctcatctccgggcatcagaccctctccctggcccttgatttcctctacaccatggagcctcacattcgtaggccagttgtgtgcatgctctagacaccacctcggtgtagacgctggaagggctgatgacttcccagggctgactcttcacatcaagctcctctcctcatcttttttgtgtgtgaggccaggtcttgactctaggtctcagctggaaccccaccctttctcctcctccttcctctgagctgaccagcagcaggtctgccgaccacc

SEQ ID NO: 686526 - DNA, 383 bp, Homo sapiens
gtagaagattggaataacagccataggggcgttgaatctttcataagagtagatgatccaacatatctcagcagtgacctagcctcatctctagaagctgggatggactaactattctcgttatatatcttaattactgaaaggtgctatgctctctgttattatgccaagacttggagatagcgcagggcgtagcaaaggctattattatttctcctatataatggatggtgcgtccaattcttcctatgtatatccttaaaaataaagatggttgaatcacttaccattgtgaaaacatacctgtaagatttcccgtgtctgaacgaaagagcatcgatccaatgcttgttcacctgtccctctgtcataactgtttccat

SEQ ID NO: 686527 - DNA, 170 bp, Homo sapiens
catggtgatctagaggatcccgagaggtggggtgcacttgttaattgtggttcagtcttgtgcaggttgtggatggtcagcagtgcccttccacacagtcttgccagtgcttggggagaggggagagatgccacctctgcttgtgttggcccacccgtggtcccacctct

SEQ ID NO: 686528 - DNA, 832 bp, Homo sapiens
cctccccggggttttttccggaggtttccggcgcccctctcattctggtgcccgcccgccgaattgattttttataggccgggcttattgagctcttatagtgtggcgcggtgaacaccccccctgtttcgttggggcccaaaacctttaacctgtggcgcgccccggagaacccccagagttgaggagattttggcccttcgggcgcttctatatatctggcttgtcttcttgttgtgttcgtctctttgggtggtttttttttttttttgggccttgggtgacatcccagagattttaagaacatggggaccggtggaagagtgggaccagccacgtccggtgttggagcggagccatccccccccaagttctcacaccaatagtggcgccgaggacatttggatttgcgaccatatagtgtggttttgtctttaatatagtgccatgtccccaataatagagatagcggtgtgtgtcaccaggaagtcccctgcccactccttaaagccccccccccttctctctataggagaatggccccgtcctctctcccagtccacacaccggggaggtgatagcacttgctttcgtgtaaatttatgtataagccacatttttttaatcttcgcccttaatacttttttaattttgttttattttgagatgaatgaagccctttgtgcccccccttctccccttttttgtccccccaattgagaagtatgaagaagcttttggttttcctgggagtgggtggaggcaacccgggcttacctgtacactgaattgagacccaattggattaaagtgcacccccctttaaaatgga

SEQ ID NO: 686529 - DNA, 346 bp, Homo sapiens
cagtgctggatgtaaagtacccaaaattgaatagaaataatggcttttgaaaattgcacaaagcaggccaggcacggtggctcacgcctgtaatcccagcactttgggaggccgaggcaggcggatcacgaggtcaagagatccagaccatcctggctaacacggtgaaaccccgtctctaataaaaatacaaaaattagctggacatggtggcacgtgcctgtaatcccagctactcaggaggctgaggcaggagaatcgcgtgaacccgggcccggtggaggctgcagtgagacgagatcgcgccactgcactccagcctggcgacagagcgagacaccgtctc

SEQ ID NO: 686530 - DNA, 130 bp, Homo sapiens
gactaaaagagttgaggccagccaggaggtcaggcgtcactagtgcaggctgcattcaacaaacgcattgtcaacagtcaaccaaaagaaacccagcgggcggccccccagcccggcccgccgggttacc

SEQ ID NO: 686531 - DNA, 1173 bp, Homo sapiens
gaacccaggaggcggaggttgcagtgagctaagatcgcgccactgcactccagcctggcgactagagcgagactccgtctcaaaaaaaaaaaacaaggaaaaaaaaaaattttcccgggaaggggcaagggggggggaacaggggggttggaaacggaaatatagggttaggagtaagtaaaaagacaaacgcaataatccaggggtgggactccattctggaattccttaagcttgggataatccctccaaggtaatcaggggctctggagagaccccatttaataactctcttaaccaattgccgttataacctcccagtggacacctctgggctcccgggggggatacctaagcggcaatagtcgaaccaatattttgcagaaagatttcacagggcggtgagaaaagttgtaataccgattacgcgggtgcaaacattggggggtaacgacaagagacaaattttcacctgtggtcaactaatattttaacggcaatttttgttgtgaaaacacattacagtggcgcttaaaaagggctagagcgacatacacaaaaaattgttccgggcggtctcaccaacggcgccacccaattggttcccaaatttgcgggtgtgaagcccttctttaaaggtggcgtggaacgtgtgaaaatccgttggaggggggtgaccaatagggggggaggataacagactccgtgactgcgaacagttgggtggcacaatgggccgccgcgaatgggcttgtcaccgggatatttcttgagaggaggaaaaacacctgtgggcgcgctcacaacacacagtaaacttaggggctacgatgtgggcacaaacaaggggacatatattgataagggcccacgttcagataatcaaccgggtggggcatatatacaacacgtgtggacccacgcggggaaagagttgtcttgacgagattggggtggcacagcgcggcacatgcggcagaggcgctacttacgagaggcccctttcaccaaagcgcgcgcactgttcacaaccccaggtggcagcggagcaagaccacatgagcaaaggcgcccccccgcgcaagcaccacgcaacgccggcccaaacaagcaccaagcgcacctcgggaaccacacggcgcccccggagaaaccgccagcctacctacaacg

SEQ ID NO: 686532 - DNA, 209 bp, Homo sapiens
catccccacgtgtgctccagcctggcaacagagtgagactccatctcaaaaaaaaaaaaaaaaaagaaaaaaaataatttgggccctgggaggcagagtttgtagtgagcccaaaattgtcccattgaacccaagctgggggaaaaaattaaacgcttttttctcaaagaactgaaagagaaagaaaagcgcccagagggttgggattg

SEQ ID NO: 686533 - DNA, 894 bp, Homo sapiens
  misc_feature (1)..(1): n is a, c, g, or t
  misc_feature (74)..(74): n is a, c, g, or t
  misc_feature (100)..(100): n is a, c, g, or t
  misc_feature (103)..(103): n is a, c, g, or t
  misc_feature (107)..(107): n is a, c, g, or t
  misc_feature (110)..(110): n is a, c, g, or t
  misc_feature (114)..(114): n is a, c, g, or t
  misc_feature (171)..(171): n is a, c, g, or t
  misc_feature (191)..(191): n is a, c, g, or t
  misc_feature (194)..(194): n is a, c, g, or t
  misc_feature (204)..(204): n is a, c, g, or t
  misc_feature (209)..(209): n is a, c, g, or t
  misc_feature (218)..(218): n is a, c, g, or t
  misc_feature (233)..(233): n is a, c, g, or t
  misc_feature (327)..(327): n is a, c, g, or t
  misc_feature (439)..(439): n is a, c, g, or t
  misc_feature (525)..(525): n is a, c, g, or t
  misc_feature (618)..(618): n is a, c, g, or t
  misc_feature (672)..(672): n is a, c, g, or t
  misc_feature (750)..(750): n is a, c, g, or t
  misc_feature (786)..(786): n is a, c, g, or t
  misc_feature (794)..(794): n is a, c, g, or t
  misc_feature (797)..(797): n is a, c, g, or t
  misc_feature (802)..(802): n is a, c, g, or t
  misc_feature (817)..(817): n is a, c, g, or t
  misc_feature (887)..(887): n is a, c, g, or t
nggggcaggcgccaggcagggcagagcccaagcgggcgcgagaccggcccggggcccagcgaaaccggcggacnaccacacgcgggagaccacggccagngcncccngcncccngacccccaaacaccccagagaggggggccggagcgggggaaggccagccgggacccngccccagccgaggccgggcngcnggccttcagngccancccaccccngggcaaggcaggcgnagcagcgaagggaggcgggggggcacgaggccaggcagcaggaggcggagacgccgagcggcggggccaagggagggggggggcgcagccggcnggaacggaaaaagcggggggcgcaccggggccagaacggagcccaggggggcccgagggaggggggcacggggggccaggggcagcacggccgcggccagggagcggagcgngagggcagggcgagggccaagggcagaggccagcggcgggaggagggaaaggagcgcaggcggggagagcgggcaggggggcggcncaaaaaccggggcgggggccacaggggcacacacatacagcaccaggttcaggtcagcagctgtcagcgcctgctggaaggcctgattgaggnggccctgctgcagcagctgcaggatatgggcttgctgggcctggcagtcaaggngggcagaggggacaggtgtgccagcagctgagcgcatggcctgcatgatgctggaggtgacggcggcctgctgctccntgagcgccacactcacctcacccttaacgatgcgcngtacctgngcnaaaanggactcctgcaggcngcccacagccacatgcagctggtgcgcacctcagcacgaacactgccggccacggtggctgccatctgcncagtgga

SEQ ID NO: 686534 - DNA, 517 bp, Homo sapiens
  misc_feature (110)..(111): n is a, c, g, or t
  misc_feature (130)..(130): n is a, c, g, or t
  misc_feature (132)..(133): n is a, c, g, or t
  misc_feature (135)..(135): n is a, c, g, or t
  misc_feature (137)..(137): n is a, c, g, or t
  misc_feature (143)..(143): n is a, c, g, or t
  misc_feature (145)..(145): n is a, c, g, or t
  misc_feature (152)..(152): n is a, c, g, or t
  misc_feature (167)..(167): n is a, c, g, or t
  misc_feature (183)..(183): n is a, c, g, or t
  misc_feature (191)..(191): n is a, c, g, or t
  misc_feature (193)..(193): n is a, c, g, or t
  misc_feature (196)..(196): n is a, c, g, or t
  misc_feature (198)..(198): n is a, c, g, or t
  misc_feature (200)..(200): n is a, c, g, or t
  misc_feature (209)..(209): n is a, c, g, or t
tcgatacgacttttttttttttggccctttgactctcttttaatgccacgggaggatctccttgcccagctcccaggaatgtttgcccttctcagtctgttccacttttnngaggcagccaccaggcctnanncntncggccnanaaaacanaaaatttggggacanaacagtcattcgtgcncatcccananctnananagcagcggngggagctttttgtcctgcaaacccagtgcaaacacttgctttgagtggaccctgctcagggtccggaggctcaccagtttcattaacatccgtgggaacatcaatcggtcatggggatggtggatggaaacctaggcatgcagggcttccacatatgtgtgctgcagcctctctacctggagctggtcctgcacattgggccggtctgcaaaaaaaatgctgatagcaatgagcaaggcaaactcggcttcatttagttgcagcttatctatggccctggagaactcaaaaatggggttgagaatttc

SEQ ID NO: 686535 - DNA, 1281 bp, Homo sapiens
aaatataatatttttttataattccgggccctcaaaagcaatcagggtaggttaagaaccaagatttggagctcattaggattagaggccaacttttaaacattctctccaggtgagagtggaattaggaaacgtggctttagaaccccacaacagttactggacaatcacctttaaaacggttaagtctcttctcggacacgcaggaattcaggctagaatcatcccctgcgggcctcgtggtggaggtggcgtggacaccaccgtggcggcgtgcgtggggaaaggcggtgcagtggcgggtggaagcgggctccgggtctcctctccctctctgcagagcgccctgtgtgccctccctgttgcctgtgcgccccacctgtgggcgcaccagacgggggggaaaagcaggagtcacaaaactatgctgcacccacctatgaatgataaattccaacccaaaagtggtgatggacttattcctcaaaacaaccccggggcaacagttggggagaacaattatacacccgccggacaaccagatggtgcagaagggagcatgttaggtgtcgcacgattagcaggaacaaatattgcttccccccaacaattaccccccaggagggtgggaacgaaagaaacaaacaaaaaaccaacacactcattgatggcgacacaaccacggaggtagttcctatccaactcggtttggccgaacaaacaaccaaatcaacgaagtaatgcaaagaaaatcatttccccccacgaaatgagtttggcgagcgccgtgatcaaataacataagtctgggagggggcgggggtagtttagtgttgttccaacatagtatcgtccgcctgggcgacccgcgccaagcgaggagatagtttttgattaccgtccctacatagtcgtgtcaagcatttaaaaggacacacaacaacgcccccgcgtgggggaatacttaaatttatctacaagggatattgattaaaccacaagaatccataccgaaagtttgtggtaaaaaggcgcctccaccgcttgtatttagttataaacacatgaaccactggaaacacaaacatgttgttgtagcgaagactactcccccgccatttgccgcgattaaaaaaatattaccaaagaagatctataaaacacagttagttcataatggtgtggtcgtttggagaaacgaagagctaacagaaacacaagtagggggggccccaatcttgttggtctgtatacaaacaaccaaacaatgtgggggggccc

SEQ ID NO: 686536 - DNA, 740 bp, Homo sapiens
gatggaaaagctaaactgagatcagacgggatgcgtgttgccagatcaaatctcttgctgctactgtaatactagtccatatattctacaagatcagtgtatgtgacgcgacccttggttgtcagttccacgtacatgacctaagtcgtttacacgtcctgttgatccccagcgtgctagttatgtgctcatagatccaagatgctacgtatgaatgtactttcgaagctacaaaaactatacatgggcaacccgttgtcctgggagatacattcctatagttacttcgacggtctccagcatgagtggcgtatcattccaattgtgattacctccagtctcagtcacagccaggattacggaatcttttgccatgaagtatcaatctacatgggtgctacacattactgaaaaaaattaggaacatggtgctagttaattcaagtcttcatgtaaaacttcttctatcatagtggacattaaaaaaaatctctctgcaaagtgcattgaccctacctctagtagatgaatgttgaacaagtagcctatgtaggaagcaagtgactagcatccatgggcatcccacaggttgtagtccagccccgatcttggtggtgggattgatgttgctgccaagtccctccgtttcatgttcagggctctggctatgttcctggtgtctggtacctgatttttcaggatgctgacatttacttcttgcccacaaaacatatacccta

SEQ ID NO: 686537 - DNA, 267 bp, Homo sapiens
ctcccagaagagaacactctcatgtgccagatgcagaatgagctcagcaaaaacagagaagacagagaaaccaggagctcccatggcagacattcaagtactatggtatagacgaaagctgtattttcttcttaatgcagtcacgaggatatgggttccatagacattagtaattatcagagctctcagactcttctccaataggacactgtcatgactagtctccctgctgctgaattggagcaattgcttttactctccagatag

SEQ ID NO: 686538 - DNA, 414 bp, Homo sapiens
gctgatggtctgattctagaggtatccccgtctgatccgcttaaagagacagagcggtagaaggcgctcattgtaggcatgataaaagtggtccaggtggtctgtgatcacctacgggacagtaaggtgatgtagaaggagacgtgagaagaacatttcagaaattgagtatgctgcttttctggcccgggagaaggcaaaggcagatgctgagtgctacactgctatgaaaatagccgaagccaataagctgaagctaacccctgaatatctgcagctgatgaagtacaaggccattgcttccaacagcaagatttactttggcaaagacattcctaacatgttcatggactctgcgggcagtgtgagcaagcagtttgaggggctagctgacaagctaagctttggcttaga

SEQ ID NO: 686539 - DNA, 172 bp, Homo sapiens
taagaggtatatctaggccatgcttcacaaatcgtgtgatacaccagagagcctcagaattacgctcactcaaaaatcctgcttcaaggaatatacctaaaagaattaacattcatccaagccctgtgtctttttgtttttttttttctatttatgttttattatttctttt

SEQ ID NO: 686540 - DNA, 361 bp, Homo sapiens
  misc_feature (11)..(11): n is a, c, g, or t
gacacatagantgacttgcagaggatgggctgtttacttcaagcaccataaaaaaaaaaagagcacaaatgcatgggtttcagggtatatacattaaagttgaacccttgggcacaaggaatcaggccgtatggtcacatagcataaacacatattagacaatggtgtagtgtcaaagggataggacccaccagcatcctatggtggtcgacaaccaatagaatgtgttacatgcagactcgctcaagggcataagttatggtgacggtttatgccaatcactgctcaaaagccctgcaaaatctggaatgatgctgaataataatgcggactaattccaacccagattgagacacaccat

SEQ ID NO: 686541 - DNA, 276 bp, Homo sapiens
gcgacgtcgtactaccaggagattacatgtgtacgggtggcccgtgttctcccgaggtcgtgtcttccgcgagtagccccagagtgtccccgagaagggcccacagagacgcaaactccgtgcttgatctcggataagataccacattctaactgctgaggtcccagcctcaggccaaagttctgggtcagctcggacccggaccgcgttctccctcccagggcagaagaggctgctggctcctcctgcatcatctcctaggatacagtagggaga

SEQ ID NO: 686542 - DNA, 414 bp, Homo sapiens
ttcgccttcctcaccctgggcggcccggcgtcgatgatcggcttcgccatcgcccgcgactacaacccgctgtcccgcgtcggaaccgcgaccggagtggtgaacgtcggcggcttcctggcgaccaccgtgaccgccctgctgatcggcatcctcctccaggcgaccggcggcaacttccggatcgcgctgctggtcgtcgtggccatgctggcactgggcgcttcgcgaatgctcgtgtggtggcgccgggcccgcgcccacgtattcgccgcggaagcccgaggcgaagaggtcccggtccgcatccggcggcaccgctgggaccgcgccccggaagaggccgtggccgccgcctgagccacccgcgccgacccggttcgaccgccccgagcatgcgtccggggcggccgc

SEQ ID NO: 686543 - DNA, 255 bp, Homo sapiens
aggtgattaccctcaggtgtcctgtgatgctggtggtaggagaccaagcacctcatgaagatgcagtggtggaatgtaactcaaaactggaccccaaccatgacctcgatacctacaagatggcatgactccaggaggtcagccccagtatgactcagccaagagcaagctgaccgaggccttcaagtacttcctgcaatgcatgggctacatggcctcaatcactgcaatgactcgcctgtcccggtctcgtaa

SEQ ID NO: 686544 - DNA, 136 bp, Homo sapiens
accagtgcggccaaaggaagagcctggtgttggtgcatgtgcgttatggactagtcgattatatgctatgcgaggtgattattctcacgaggagcatacttgtacacatattttgcacttcaaccagattacgtgt

SEQ ID NO: 686545 - DNA, 832 bp, Homo sapiens
cctatgtaacagtctggtcacttttccgaggagctactgtagtatgctgggggtctactccagtctctagtcaccttggattttccagtacctggagttatcaacagtaaagactatgaaacagcaaagatggtgtcctgcccctccctctgggagctctgtcccagggaggtttcaaaactctgtctgctggagaacactgatgagggtagctggagaacccagttggaaggtcctgcccagtgaagaggaacagggctggaggcttgcttaaaaaaaaagcaggccatgtttgcatataagccactgtgctgtgctgggggcccacttcaggccccagtcacctcagactctccaaagcctgaaggctaaaacggtgaagtcagccaaacagcaaaggtagtggctggcttgtgctgggagctcttttcagggaagtgtaacactgctaccagtggctgaaatggagttccaagccagtgggtcttatcctgtgaggtgccatggaagcaagggccatagactatgtgcttctcaggccactggattctgccccttatctaagtggtgcgtatgggaagcccactgaactccggcttggcaagaggttacagctcctttgacgagggaagccggaaagaccaggtatcataaggccccagggcccctgcatgtgaaggggcgaaattccaaggacgggggatccagggtgggtctgcgggtcaaccgagccggtggacggtacagagagaattacccaccgggggcagacccggccaacatggcccggggcaaatacacaccccgcggaggggcgctggggagaaccacc

SEQ ID NO: 686546 - DNA, 495 bp, Homo sapiens
ttcgacggtgttctgataattctgtggctacaatggaaatggttttgctttcagtgaagcaatgacatatttattctcacacctgtaatcgcagccccttgggaggccgaagtgggcggatcacttgaggtcaagagttcaagatcagcctggccaacatggcgaaatcccgtctctactaaaaatacaaaaattagctgggtatggtgccaggtgcctgtaatcctagctactaggtaggctgaagcagaagaattgcttgaacccaggaggcagaggttgcagtgaactgagattgtgccactgtactccaggctgggtgacacagcgagactctgtctcaaaaaaaaaaaaaaaaaaaagactttcctcgtgtggataaggtcctgtaccttaagggggtgggctcatacagtggtgtgcttccgtcaaaccccttggatttttatccgtaagatttatgcacttcataatttgcagggttaatctcaggga

SEQ ID NO: 686547 - DNA, 81 bp, Homo sapiens
attgactaaaattgggtatagtatggtatttgaaagaataagcatatgctaaagtttattaaaaaaagaaaccttaaaaaa

SEQ ID NO: 686548 - DNA, 1615 bp, Homo sapiens
cactgaccagccttgacactccccttgcaaaccatctcatgtcgaaggccaatgctaagagtggctgcctggggtgcagtgctgggactggtttgcaaggggagtgtcaaggctggtcagctgattactgggcgaacgagtcagggcccatcacgaggacatgaagtggcctaagggctgcctccatgtcctcaataagccacaagctgcacattctgctctgacaagcggacagttctacgcaatcctcaccaggacccaaagatggaacgcccgtcagtgactgcgcagcgcccgacacggccacagcaagcaagccgctccgccccctggtacgccactgggcccttaacacgtcgccatcctcacgaaaactcaccaacggcacctggccccaggcaccgcgagaacgcacacacaagaggaaagaaccccctgagccgacctagcccaccgtgccaccacaagacctgcgagcaaaccaactcacacccaacaaggaccctgccaacacacacacaaccaccggaaaccacacgccccccgcactccccgcacccgaccacaccccagagccaaccgcaacagcaacacaccccaacccacccacccccacagcacaaccggacacacacagaacgcccacccccgccaacagccaccaccccccacgggcccccggccaacacaccaccaccccaccccgaccgcccccacacacccacccaacgccagcgccagccaccgctcacccacacctcaccacccaaacaccgcagcacagcgccaaccccggagcaccacgccactgcaccccacacaccaggccaaccacgaacccagaaccaagccaccccccaccaccgacgcaggaaacccggaccgcaccacgccacacaaaccggcaaccaagaagccccacacacaacagacgcacggcaacctcgcacacgcgcggccccacccgcccagccaatcaccccccacgcgacacgcagagcacacacgacgaagcgaggacagccgcagaggaacaccacgcccacccaccacccgccgcacgagctccacacaacaccgcaacccagagccccccaccacccagccccgccccgtgcgcccaccacccccccgcccccaagcccccaggcggccaaccgccacagacaacccaaccgacaggacagcacccccggcagggagagataaggagcgcactcgagagcgacgagccacccaaccaggcgcagaccaccactccagccgaaaccacgccggctcctccccgtgccgccgggaaagaccacagacacgccaccgcacaaccgcccccacaatacaccacgagcggccgacgggcacagacggccagacgtgcacgcaagacagggacggagcacgcgccgcacactgcggtgcgaggagaaagcaagacgccacagagccggaacacagcagcgcggcagagaggacacgcggagaactgcgcagcagaagcgcagccaccgccaggccgcacaccacgcccaccgcggcagccgcacagccacacagcgcgagacgaggagaaaagacgcaaaagcggcgagcgccggacgagcaggcggaagcaccg

SEQ ID NO: 686549 - DNA, 203 bp, Homo sapiens
ggcgatttaccggtctcaccatggagcggaaagtgcttgcgctcctggcccgattagaataggaccgaggtcccgactctttctccatttcctcaatttcctgcgattcgcttctctaggtaattctgcctggcgcttctgcttcttcttcaatttcttcttcttattctttgacatttggtcagctggtttatgctgcggag

SEQ ID NO: 686550 - DNA, 117 bp, Homo sapiens
cattccgcaaactattctagagatccatattaacaatagggtttacgacctcgatgttagatcaggacattccgatagtgcagccgctattataggttcgtttgttcaacgattaaa

SEQ ID NO: 686551 - DNA, 205 bp, Homo sapiens
gaacgatattagggatgagctgcaggtttctgaagactctgactccattactcaggtctgaaaagtcactactgctgaaacgtctcttcctgctgggtattctgacaagatagatgtactatctatgaagtcatcaggagccttctcaccatgcttgctctctcagatgccccgcatcgaggcttctgcgcggcgcctcctcctg

SEQ ID NO: 686552 - DNA, 443 bp, Homo sapiens
  misc_feature (337)..(337): n is a, c, g, or t
  misc_feature (406)..(406): n is a, c, g, or t
caaacttctggcctcaagtgatcctcctgccttggccttccgaagtgttgagattacaggcatgagcatcagtcttgagcccttcctttctttctgaagtctttccttcctctcctccaagcttttgttaggctatcacaactggccacagaactacagcgtcctatcttcaagtttgtgtccctctcttctttaagttgaaattcaaggtctacctcttccagggcagatgatctcttttttttcctaaagttcctgctctttattacattagaacaattctgatgtgatggggtttcatccaccacatctcacttgggggtgtgtaagtggggtnggagtgggaaaagcaataatgcctgttgtcttgagaaagggatgggttgcaccactacccctttaaggnatcagggtacccttaggggaatggggagtgagttctt

SEQ ID NO: 686553 - DNA, 180 bp, Homo sapiens
tctgtgaggacaggagcggacggggagcaaggagacccaagcccagcagacaccatcaaggccaatcagggccacatccccgccgcacccggcgagacaggaagcgtgatttgctggtgtgatcagtcagttgcacctccccgccctgcaggactcagtgtgtccggcagacagtcctac

SEQ ID NO: 686554 - DNA, 134 bp, Homo sapiens
gttttgaaaacatcagcaaatggcttagaaacataggatgagcatggccaatggaagatgtgggaaggatgttactagggaacaagtgtgatattggcggcacaagggttgtacctaaagggaaaggagaccag

SEQ ID NO: 686555 - DNA, 125 bp, Homo sapiens
  misc_feature (41)..(41): n is a, c, g, or t
  misc_feature (54)..(54): n is a, c, g, or t
  misc_feature (71)..(71): n is a, c, g, or t
tgggctttgtccgggttgccctggtgaccccaacctctgtncacttcctaaccnaaggaccctgcacatcnagaactgcctttggccctacggatggccactggctctggtctaaagtgcctggg

SEQ ID NO: 686556 - DNA, 292 bp, Homo sapiens
aagggcaggattctctgtacgccccagggaaacggcgttatgacaggaaacagagtggctatggtgggccaactaaaccgattttccggaaaaaggcttaaactccaaaaaagattgtgctaaggcttgagtgcgttgagcccccctgcagatttaaaagaatgctggctattaaaaaatgccagcctttttaactgggaggagataaaaaaagaaagggcccagtgatcccgttttaagggtcctctttttttatgaagcccataaaatcttgggtttatgttcccttcca

SEQ ID NO: 686557 - DNA, 324 bp, Homo sapiens
  misc_feature (118)..(118): n is a, c, g, or t
acattaacgccagctgagagtgaggaggctgggtggcatataccgactctatgtccacctggatgggatgacactggggggccacgaatgttcggtgatccgggactcactgctgcangatgggcgattcagcatggttcttactaccaagagcaccggtggggcccccaccttcatgtcactgtcaccaagactgacaagacgctagtcctgctgatggggcaagaaggtgtccacggtggtttgatcaaacagagatggtatgaaaatgccctccaccttcggcgttcccatactgacctcgtctgtcccttcccttcaccg

SEQ ID NO: 686558 - DNA, 141 bp, Homo sapiens
ccgtgggacctcctctgctcctccagtgcctcttgagcgttgaccttgattgctttctctgcctgctccttgtactgctcggcatcttgcgctcgtctcgcactgcagcaagatttccttcagcttcttgtctttctgctt

SEQ ID NO: 686559 - DNA, 181 bp, Homo sapiens
  misc_feature (96)..(96): n is a, c, g, or t
gcaaaaccataactccaagaaagcatcatcaacatcaccaccagcagcagcaccaccagcagcaacagcagcagccgccaccaccgccaatacctncaaattggcaacaggccaccagccaaaattgaggcacttatttaggttgagaaggagccgccgggccaaggtggcccaacattaa

SEQ ID NO: 686560 - DNA, 105 bp, Homo sapiens
ggggttagtgatgattttaaaattaaagcagatgggaatctctcaaaaaaaaactgtaattttgttatatttgattcaatggaatttacctaaaaaataaagact

SEQ ID NO: 686561 - DNA, 891 bp, Homo sapiens
aaaaggggcggtatcacagcccccgaaggactcctctcgggtgtgtgtagaggaaggggtggcgaagctagcgctggtcaacctacgggacagtgacagagtgtatagaacataggagacctggggattctcgaccgaaggtcgagtacctgctcgcttacagattcgctgctgtccagggcaccgactgtgagtggcagatgcatgaagtgccggtgacgcgccagtggttctatgcatctatctgcccaagactggcgagctcgaaggtatgatcacaatctctgctgcagccttgtcctcctaggctcaggtgatcctcctccctcaggcttctgagtagctgggactacaggcatgcaccacaaatgtctggctaattttttgcatttttggtagagacagagttttgctgtgttgctcaggcaggtattgaactctcaggctcgagcaatctgccctcctcagcctctcaaagtgctgggattacaggcatgagccactgcaccttgcccaactggttttcctttgtagaaacctgccaaattcttttccacggtggctgtgccattttgcattctcactagcaatgagaattctagtacttggtattgtcagttattctcattttacatgtgtagtgatatcacctttgattttaattttgcatttccctgatgtctaataatattgaactgttttcctgtgtttatttgcatctgcatattttcttggtgaagtttccatatcgtatcttatagccttctgttcgaaaacgtgagacagggtctagctctgtaacccaggctgaatgcagtggtgtgaccttggactcactggtgcttgaactccagggctcagtgatctccatttaaacttctgagtagtgaa

SEQ ID NO: 686562 - DNA, 612 bp, Homo sapiens
  misc_feature (2)..(2): n is a, c, g, or t
  misc_feature (79)..(79): n is a, c, g, or t
  misc_feature (177)..(177): n is a, c, g, or t
  misc_feature (292)..(292): n is a, c, g, or t
  misc_feature (382)..(382): n is a, c, g, or t
  misc_feature (500)..(500): n is a, c, g, or t
  misc_feature (543)..(543): n is a, c, g, or t
  misc_feature (547)..(547): n is a, c, g, or t
  misc_feature (612)..(612): n is a, c, g, or t
gnggccctggtcacctcgtaggcggccctcatctctgatcatggccacaccgcccatgacatacacgatgagccggggncccgcccggtgcttctacgccagccttgttcttgttgccagtgaccgaagcgtgtgcactgacagcggcctgggagcaggccgtgtgtgtggcggggncggatacgaagggccacaggatcctgttccagccgtgtcctccacggcgtcctccattacatccttgatgaccggtgtgtccaacgggacagctgaaaggtgggctccatgcgtnctctcggctccagccggctggaggtccccgagcccccggggttggttgacagttcctcccagctgctccaggtttacggattaagctgcngtccgcctgttacattggcatgctggattcagcttggccaggttctcctcactcacaccattccgaagagggatgtagagcagcaggacccggatcttgtcgtaggcgggcacgcgcngttccagcagcaccggaacgattcagcttcattggagtccttntatnttctcccccctctggcgtcgggagcccatggcgcaggttcttgctccgacacttacacagctttn

SEQ ID NO: 686563 - DNA, 674 bp, Homo sapiens
ggagattactcactaaggccacactcaagtgcaggggacgctatatcaggtgactgaaagggctgccttccagggttccgccatcactctgccggagcctccacaatagcagggactactggaggcgcgcaaaccactcggataacacgtgataggtctaagagacatgccttcaggccgggtgcacacacacccatgcagagttcactggccaatgatggctccgtggccacatatgacatggggggcatatgaggcgtacaccatgatggcctgccactgcaggagaccattcagcctaccgccgtaataattatgacgtggcgataatgatcaatcacccacaggagtgcggtagaccagaccacgatcactttggtgtctaattaagaggatggagcgatcctgctacctcagatgatggaaagattgcaccattagacggtgcgcacactgccagacaatttttttcttgctagtatagacaggggttccctatcgtgcgcccgtctttgattaaaccaccgggttggagcgaatctcccgctggggaacacaagctcctgacgaaaccacctgcctggtgaaccaagtatatctcttttgggggcacccaacaaaaactcagggttatttgccctaaagtagggggaacaaaaaaaaaacgacatttt

SEQ ID NO: 686564 - DNA, 108 bp, Homo sapiens
tatggctgaggtatctaaggatccccggcaggcgtgaagggaccgctcagtggcgatatgctgaaaggtaagacaagccaggcatctgtctggtctggtcccgcagtt

SEQ ID NO: 686565 - DNA, 174 bp, Homo sapiens
tggactggcagatgggcttcttgcagaagtacgctaccccgctgatcccctcacgaggtgaggtgaacgcggccgacgccttcgacattggctcctttgatgaggaggacacaaaaggaatcaagttactggacagtgatcaggagctctaccggaactttcacgtcaccatct

SEQ ID NO: 686566 - DNA, 184 bp, Homo sapiens
caccaagatgcataccaagaattctgggcttgacatggataacccagggactacaaagtaactaattcctcaaatgaactgactgacagggagtcctccgaaatgattcgggcctcaaagatctgtcctcaggggtcaggacgaaaacatgcagtataagttgatatagctctgccaaggagag

SEQ ID NO: 686567 - DNA, 419 bp, Homo sapiens
caggctgggagcagtggctcacgcctattatcacagcacttcattgggaggccgaggctggcagatcatttgaggtcaggaattcgagaccagcctggccaacacggcaaaaccctatctctactattgtgcatgcctgtagtcccagctactcaggaggctgaggcaggagaattgcctgaacctgggaggcagaggttgcagtgagccgagatcacgccattgcactccagccagggcaacaagaacaagactccatctcaaaaaaaaaagctgaatctctgagtgggtttttcatttttcatttttttttttaaacagatgcctcagaacctgggtaactcagtttatcagaaattcagttttcaagtttggaaggataacacttggggcggtcgtgacacttgtggcgctcgtgc

SEQ ID NO: 686568 - DNA, 156 bp, Homo sapiens
  misc_feature (37)..(37): n is a, c, g, or t
gagcttatcgaatcgacggttctctgctgagtggtanccaggtctcggccccctcggactcctgctcagtccctatgacgggcgcacgtgggcaggcgctggaggtggtgcgctcgcgcgtcgccgacgctgccgcttgagttgcagcaacttcca

SEQ ID NO: 686569 - DNA, 767 bp, Homo sapiens
aaatctagaagcctgttgattcaagaactttctaaagtatttgcggaagacatggctaagtatcgtagcatgcggggggaggatcaccctccttgttaaccagctcaccctccctgtgtgaagatcccctgagactgcgatgcggagtgaggctgggactgcgagtgctgacgccaccttcctgttgaggtgggactggaccctgaacacacccctcagcccctctgtccttattgtatggcctcatgggacctaggggctggaggagaggctgatctgtgccccaaccgttccagcagattgcatggcgtcaactgacattcagagtgctgacacctcatcactggggggatcattctctcggagggcagatgacgcgcaggataatagtctctgaaactgtaaatatgatgggcaaataaaaagttgtacaacattctacctaatcatattccttgtacacacgttttctgtttaattggactaaggagcgcaaaagctaaataacaactagaaacaaattttttaaaaaaaaaatatctgcccgagggggaaagtcttaagtggtgacatattaacattttaatatttgggcatcatactgtccgaacgtaattgataatatggtttgatttcccccccctttgattaagcggatctagctattatgttctaaaaggataattaagaactccaatataaaccccctttcatttttatacactgtgtgtaaggtatatttttcgtgaatggggtttccgtattgg

SEQ ID NO: 686570 - DNA, 825 bp, Homo sapiens
ggtggaccagagagttccctggagtgtggcttcgtacgtgacttttagcagacacagatcctgcttttcaaacatgaccccaggtcggttcaacctcctgcagcatggctgcgctcggtccgagagaacatccaggagggcaggacctgggtgggaggtggtgctgtcggcactcgcgcgcaccttcgcaggatttccagcatccgagccgcacgccctcaaggtgcactcctatcgtggcgcctgccttcatgtgatcactgccggggagattggctcttcggacctagtagtcgccagaggcctcaagtgctgatggctgctgggcgtgaagttaccaacaagcgctgtgccttctagcatccccaacaactgtagtggggcccgtaaacggggcctgtgcttccagcgtctctggccaggtggaccaggtcggtgtgcctcgtgactgctcttccgatggtccctgtcgcctgacagagggttgaagaagtcttgaggccgtagacaccagcgatcttcctgccttcgaccgtccgcctcgtcatcctcttgcctacccttcttctgtcctacatcgtatacgggccgccccattgagctggacagatgctgctctccaaggtcaaggtgccgcacaccttcctcatccacagctatacacgggccaccgtttgccaggcttgcaagaaactcctcaagggcctcttccggcagggcctgcaatggcaaagactgcaagtttaactgtcacaaacgctgcgcacccgggtccctaatgagggtggtgcaatcggtgcgacacacgacgcggaatcaggcacc

SEQ ID NO: 686571 - DNA, 308 bp, Homo sapiens
cggcgctctagagaccccggaggcagtgacgaaacgctttattgcactctagcctgtgcagcaagaacaggactctgtctcaaagaaaaaaacaactatcttaaaatgtaaagttcagagcacacactgttttaatcctattttgatgtaagtgctgaaatcatacgtgtttgatctgaaatgactcacaccaaagttaacagtgtctacctctgagaaggcaaggaaatatgattgggcgggagaaaaacggatagtctcttagactctaagacgcttacggggttgcgtttttacagatagactat

SEQ ID NO: 686572 - DNA, 961 bp, Homo sapiens
tagtgtgttaaaaataaataataaataaaaaaataaacacacaacaacacgcaactttctgtgcaactgattctctacaatggtttttggcccctttatgtgcacccttttgccctgcctacattcagcgtctacattttagctatttcccttgaagccctcatagcgtcgttttatatccaccgttccgcttctacctcgcgtaaattacccaggccttcaaggctgtcttcatgcaagcttccccctagctttcgtcaatttcggtcacactccttataattgtgtgccgccggcaatgtccacccttcgaaggcggggctgcaatatttgtgagctcgttttgctgggaagacggcccccttataatttttggggggaagacggacccctcttttccttgggcgcgccacaagctgttttttcgtcattggaccgcgctggagctactcttctcggcttttcttcgccccgcctgtgccccctggccacttggtgattcccctggggttgtattttgaaatccggggctttgagctactactacgcccctatgaaccccggcagccccccacgttgtctccctctttcggggaaaaatacttaatgggtggtgtacagcccccgtgttctaagacctttattattgtacggatctcatagacacaccctctctgttcaatctgcactatgcaggtgtctctgtccacttccacgagagctccgaaggaacttgactacaagcagtttgcggaggccacatttaaggcatattatttcttttgatagaagccctctttggtcccatgttgagagaaaatcgagtacgccacttctcctttagtggggaggagacaaaagggtcactacgccacaaatcatgtatcataagagtttagataaagaacaactaattaaatcaaccaggtgatcattttctttcccaaacaaacaaatgaca

SEQ ID NO: 686573 - DNA, 1188 bp, Homo sapiens
gttgttggttgctggcgcctgccctcgtgtgtggtgggtgttgtttggcgtcgccgcgcctccgtctgtttgggtgtgtgtgttctggtgttttgggctgcgggcgccccccggcgggggggtggggggtgtggtgtggtgtgggtcgggggggggcgggcgcgcggcgctggctgtgctgtctggtgtgtggtgtggctcgccttcggtgggtctgacggggctggggctgttgtgtgggtggtcttgtcgtggctgtcctgctgcccgcgtcttgtggggggttgtggggcgctgtggttgtggttgggccgtcgtgcggcggtggcgcctccgctcccgcgcggtgggtcggggtgggtggtggtggtgttggggttttgtcctccgccgccgcgcggctgtggttggcgttcgtgagggggggggtgggggctgttgtcgttggttttgtgtgggtggtggtggagggaacgccgctctcctcggtgtggtgtgtgtgtctcgctccgcgcgctggcgttgtggttgttttcctctctctctcttttctttttgtgttattgtatatgtcgaccgctctcgctctgttgtgtctccgcgccctgcgcggcgggggcggtgcgaccacatatgagtggcgccgcacccgcctctctcgctttgtgttgttgtgttatatattgtttttgtctctctccgccgccgcgccgtgtgtgtgtgtgcggtggggggtgtggtgatgagtgtggtggttgttgtctcgtctttatggcgcgcccccgcgcgccgctcgcgcgcgcgcgccgcctctctccctgttgttgtgttccgcgccggggcgggcggggccgccgcgcgcggcgtgcggtggtgtggttgttgttctgttttttttttgtcttcgtgttgtgtagtatatagtatatttgttctcttccgccgctcttctctttgtgttgtgtgtgcgtgctctcctccccgccgcgcgctgccgccgcgcgcgcgcgcgacgagagatgctatatagtaggtagtaacaccgcgccccctccagtctatatagtggtcctcctctcgccccgcagcacctcggggtgggcgtggtgttttttctctccctccctctctctctccctcccccccccccccctgctcgtgtgtgtgtgtgtgtgtgtgtgttgaaga

SEQ ID NO: 686574 - DNA, 535 bp, Homo sapiens
attcaatactcctataaacttacttcctgttcctggtccgaaatttccaccgtctaccacgtgaataccccaagccaaagttgagctcctctaaccactacctaaactctcaacttcctagcatttactatgtactcagactaaagcctaaatatacttactagcgtatatgaccatatgatagtataggtatttctagcaatacgatattataccacaggatcatggtcatacaaaagtaatcacagccaaaagcctctatatctattcgcagactagcctaatacagtaaatttaatcctacaatggtaaaccaatttttaccatatatcctcaaagtaatctactaaggtgatagtatccacagtatctatcttaaataaccgccaacaaacagcttctaacacagtatacatacagcccctaggtatttccagatatcctactacttagctaacagcacgttaaaggctacaactactcttcccatacaattagaatagaggtcttagcagccataagcaagcatcgaccg

SEQ ID NO: 686575 - DNA, 294 bp, Homo sapiens
ccgtccattcgccagccggagctccgacaacgcacggtccagacctaccgccggcacaccgagacgaaggtcgatgttaagctcgagcgcctccgccgccgtgaggagcgtgacctcggctgcacctgcaccgacgaggtatcccttcgacagcggcggcttgtcgtagggcagcacgggctcggagccgatgagcacaacgtctccgcgatacccctctgcccgaagcgcctgcgcggcccgtacccccgcgatcgacgcaccgacaatcgcttgcgtcattcgtcttccacc

SEQ ID NO: 686576 - DNA, 1024 bp, Homo sapiens
ggaaaaaaaaaaaaaaaagtaccgttccagaagcaggagcctaggcagccgagaagggtgcccgaacctgtgagttcttgagtttgcggccactttcaggagctgagaaggagcaggatgtggaacttgcaggatctccaaagaattgaatgtggagcccttccctttcggaattgctggtgggctatacaggcaagaaacgttgaggggctttcctgtgcccagttcgggggctcctgtgcctcctgtgggagccaaggccggtctccagtttcagtggatttctcgagggggaaagacattcggttgggacatgtgttcaggtgtttacaaccttacaggcaaccgcccattcatgtgggccaggcggcacattccgtgggagccgtgagaccatattggccagtggccccaacagcgggggggttcatctcttctattccgtggccccgtggctgccgtgtgtgcaatttgtgcaagcaactctgtgtgtcagactcctataactctcacatctccgaacctctctctgtggctgtgaccctgtgtgtgccgtggcatattgtgcaaggcgcaatctccgggaggccctatatgttagaagcacgctgtggcgaccacgcaggggggcaatttctcggggggccctttgccggggagaaaaagggttaaggtggggtgggcccaacaagctttcaatctcgtgtctctgtgtacaccaaagtggtgtgtgcgggacgcacaagttgtttcccaagtttataccacccgtgtcgtctacaatattcaattcaaaactctcagtgaaagcactatccccccccgctgtgggagatataattccggggacaacgccttttcgtcgttgttttaccaagtggtgaaaacacccagcgaaagagggggggcacccggaggggatatcctagtgggaaacggtgggaaaaaacaccctcccttcaaatacaaatcaaatagggacaagattgcttgtttataatatccagtccgcttggcccccttg

SEQ ID NO: 686577 - DNA, 240 bp, Homo sapiens
tgaaagataagatcgaccttaaatctcatatctaacacatcactacagacacacaaatacacacacaatacacgttccccatgatcatgtacaatcgatctactcatctctcactctcacactgctctccgatgtacgccgctcctattcacttagatttagcagagctatcgctgactgaaatgagacacagctgggaggcacccaccaacacccgcctttttggcccctttatcagag

SEQ ID NO: 686578 - DNA, 420 bp, Homo sapiens
  misc_feature (158)..(158): n is a, c, g, or t
  misc_feature (175)..(175): n is a, c, g, or t
  misc_feature (178)..(178): n is a, c, g, or t
  misc_feature (184)..(184): n is a, c, g, or t
  misc_feature (187)..(187): n is a, c, g, or t
acacgtcacatccagatcttctaagtcatcatctagttatcttgctacagcagcctcccaagtccaggaaacctcatttgtttgtccagcctgggtaacaagagcaaaactccatctcaaaaaaaaaaaaaaataaaaaatttagtggttttttgggnggtgtcccttttggatnccnttcttnttnccttctctatatgtaagggttttttccttagtgggtattcccagtctagtgggctcacactcgaatagtctcagcactttggggaggctgaggggggagaatcaattgaggccagcagttaaaaaccagcctgggcaatatcatggtgagacctgtctctaaaaaaaaaaaataatttcccttggtcttgggtttccaccatttggctggtaaggtgtctggatgggaatctc

SEQ ID NO: 686579 - DNA, 278 bp, Homo sapiens
ttagacaggaggcccaggacttagggaggcatctgggatggaacatgtatattttgaacaatttcagttacccacttcttattgtcctcctcaaaggaatgcccattctgatttagtggtttcctctgcttaccttacaaaacaaactatctaaactaaagttatcacacgtcagagctgagaattccatttgaactagctgcccatggtcaggctgagtacactgcagctcttcaccatctacatgttccctcccagatggactccataagtccctg

SEQ ID NO: 686580 - DNA, 356 bp, Homo sapiens
cactgtgagcatccaggccgagatacaaactgaatcctgacaatcaggcgagcatatctgttgactttgatggtgatgagatcaccatgtggatatggcaaaaaaggagacggactgacggctagaagaatacggacgattagccagactaagaggctcaaggtgcattggccaacatagctgtggacaaagccaaccatggaaatcatgacaaagcgctccaactatactccgatcaccaatgtacctccagaggtaactgtgctcacgaacagcactgtggaactgagagagcccaacgtcctcatctgtttcatcgacaagttcaacccaccagtggtcaatgtcacgtggct

SEQ ID NO: 686581 - DNA, 795 bp, Homo sapiens
  misc_feature (119)..(119): n is a, c, g, or t
  misc_feature (299)..(299): n is a, c, g, or t
  misc_feature (303)..(304): n is a, c, g, or t
  misc_feature (306)..(306): n is a, c, g, or t
  misc_feature (309)..(309): n is a, c, g, or t
  misc_feature (319)..(319): n is a, c, g, or t
  misc_feature (324)..(324): n is a, c, g, or t
  misc_feature (328)..(328): n is a, c, g, or t
  misc_feature (333)..(333): n is a, c, g, or t
  misc_feature (345)..(345): n is a, c, g, or t
  misc_feature (348)..(348): n is a, c, g, or t
  misc_feature (378)..(378): n is a, c, g, or t
  misc_feature (382)..(382): n is a, c, g, or t
  misc_feature (389)..(389): n is a, c, g, or t
  misc_feature (403)..(403): n is a, c, g, or t
  misc_feature (412)..(413): n is a, c, g, or t
  misc_feature (418)..(418): n is a, c, g, or t
  misc_feature (427)..(427): n is a, c, g, or t
  misc_feature (449)..(449): n is a, c, g, or t
  misc_feature (616)..(616): n is a, c, g, or t
  misc_feature (619)..(619): n is a, c, g, or t
  misc_feature (623)..(623): n is a, c, g, or t
  misc_feature (630)..(630): n is a, c, g, or t
  misc_feature (632)..(633): n is a, c, g, or t
  misc_feature (643)..(645): n is a, c, g, or t
  misc_feature (650)..(650): n is a, c, g, or t
  misc_feature (657)..(658): n is a, c, g, or t
  misc_feature (666)..(666): n is a, c, g, or t
  misc_feature (673)..(673): n is a, c, g, or t
  misc_feature (684)..(685): n is a, c, g, or t
  misc_feature (689)..(689): n is a, c, g, or t
  misc_feature (703)..(703): n is a, c, g, or t
cattacctatgaggtttcatttacttctttgtaaatgtactgacttttggagttacttaagaaccacagttcctaaaacattttatttgggagctcaacttctggcttcctacttaccnagaggcagtaagttataacctctggcctttgtctttacattttcaactttctggatccctaacctctggtcccaagttactacgcttgcctatatccactaaccactcactaggtcacaaagttgatggctctggcttgacccagtgaatgagaagtgtcctagatgttttttttttttntttnntncgnaaattttctngggcncagnggccngttaaatttttnttncagcctttcccttagaggagggagccttangttnccttacnagggtggggggtanggaatctanncatanctagtctanaagatttctcacccaggggaantttcccttatctaaaagaggaacctccaggtctcaaccctgccagtcacacccatttaatgtccttcaccaaaattaacccgagcttagtgtcccctttcaattggagttccaggtgagctcaccagcaaaatttactcttgtaaatttctctctcagcaaattccnagnacgnattttcncnngggagtgagnnnttcgnttaaagnnttttcagnttccccngtttgcccacnnttgnccgcaaatttttcncaaaagacaacaccaccactcccgacagaacaacaacaaaccgttgttgggggcccccccttgagcgccctggaaaaaaagttttttaaacc

SEQ ID NO: 686582 - DNA, 365 bp, Homo sapiens
aagcccctaaaggcagatcaggtaaagcgtacatagtaaagggaaaggagagaatggaaataaaactcaatattatgcagatttatgccttatattttagcattaattaaggttgggtctttcaggctggttttggttagtcttagatctggatagtttaattaactggtgatgtagtagtatattaaagctacaataaatcttttttcttgggagagaagtattcctttgcctttctgtaaattgaacaacttacaatcttcagatgtttcgtggaatctattcagagcttcaccatggcaataagtatttcccttaaaacactgcaaacaaatatactaggagtgcgcccttgtaatctttac

SEQ ID NO: 686583 - DNA, 1099 bp, Homo sapiens
gtgcgtgcgtgggccggaggttagtgtgcggggcccgccggtgcggttgaaaagtcctgagacgaatcatggatgtgatggcctgtgtgctgactgtgctgactggctgtgcgaatggaaccctgataatgggcttgcatatgatgcctgtgacctgtgtgcactggtgtgtgagctgatgcctgtgacaccagtcccatctaaaccccaggacaaagtggaagcagctgaggcaacaccagtggccctggacagtgacacctcctggggctgaaaatgcagcatgtgagtgctatgctgcacgctgtagcctgccatgcctgcctgccttgttttgcagccagcagcagggtgaacccgacttgacagagcatgagaaagtggccatcctggcccagctgtaccacgagaagccactggtgttcctggagcgcttccgcacaggcctccgtgaggagcatctggcctgctttggccacgtgcgtggctgaccaccgtgcagacttctactgtgctgagtgtggcccggcagggcactgcccggccccgcaccctgcgtaccctgcctgcgtaaccggcgctatgctgccctgcgagaagctgatccaagggggcgagtacttcagtgatgagcagatgcggtttccgggaccccctgctatatgagcagtacatcgggcagtatctcacccaggaaggagctcagtggcccggagaccaaccaacagccccaaggccgagatccccgcgaaaacctgttggccggacaacaaactatgatgcccagcacacgaaggagcggaagctacagaagcgtctgctccaacagcaagcagatgagcagcgcacatgcaggaaaacaacaacgagaaagaaaaaagtaagaaaagacagagaagatatgaggggaatagagaagaatgaagatgaatggggaccagtagagaatttatagagaagaaagaaagataagagagaggataaagaaggaggagagatactaaggtgtgaggaatatagaagtagagagtagataagccaatgagagatgagatagaggataactaggagagtgagtgtcaggtgtatgatggaaggg

SEQ ID NO: 686584 - DNA, 630 bp, Homo sapiens
gtcgttcggctccctgcattcaagaggaagaccctggtgctgatcggaaccagtggggtgggtcgcagccacattaagaatgccctgcttagccagaatccggagaagtttgtgtaccctgtcccatatacaacacggccgccaaggaagaatgaagaagatgggaaggagtaccactttatcttaacggaggagatgacgaggaacatctttgccaatgagttcttggagtttggcagctaccaaggcaacatgtttggcaccaaatttgaaacagtgcaccagatccataagcagaacaagattggcattcttggaattgaaccccagacccttgaaaatggtccgacaggaaggcctggagcaactggaaagggattttagggcattcgcaagccggacgcttactactttggacttttactggtaataatggtggtgatgaacccttaagaaattccggaagccttgaccaacgtgcctttttcacaagggtgcctgtgctccgggttactaagccttggaatgggggaacccactgtgtgccccctttccatttggaagggtcttccagggttacccggggttgccccttcctgagctttggaatgcgaaatggcaatttgggta

SEQ ID NO: 686585 - DNA, 1010 bp, Homo sapiens
  misc_feature (21)..(21): n is a, c, g, or t
  misc_feature (208)..(208): n is a, c, g, or t
  misc_feature (384)..(384): n is a, c, g, or t
  misc_feature (453)..(453): n is a, c, g, or t
  misc_feature (518)..(518): n is a, c, g, or t
  misc_feature (865)..(865): n is a, c, g, or t
  misc_feature (868)..(868): n is a, c, g, or t
  misc_feature (870)..(870): n is a, c, g, or t
  misc_feature (876)..(876): n is a, c, g, or t
  misc_feature (881)..(881): n is a, c, g, or t
tgactgcttgggacatgcagnacttgtatatgagtatacattgggagaagagaagtttacctttattgagaaatgtaacaaccctcgttctgtcacattattgatcaaaggaccaaataagcacacactcactcagatcaaagatgcagtgagggacggcttgagggctgtcaaaaatgctattgatgatggctgtgtggttccaggngctggtgccgtggaagtggcaatggcagaagccctgattaaacataagcccagtgtaaagggcagggcacagcttggagtccaagcatttgctgatgcattgctcattattcccaaggttcttgctcagaactctggttttgaccttcaggaaacattagttaaaactcaagcagnacattcagaatcaggtcggcttgtgggtgtggacctgaacacaggtgagccaatggtggcagcagaagnaggcgtatgggataactattgtgtaaagaaacagcctcttcactcctgcactgtgattgcccccnacattctcttggttgatgaggtcatgcgagctggaatgtcttctctgaaaggttgaattgaagcttcctctgtatctgaatcttgaagactgcaaagtgatcctgaggattacagctgtggaatttttgtccaagcttcaaataattttgaaagaaattttcccatatgaaaaaaggagagaaccctggcctctgttgaaatttggaagttttgaaattataggatttttaaaaattgccctgaaggggatacccataaagcaggtcttttatccagtgaacaggatgttttgctttagcagcagtgacataaaattccatgttagataagcatatgttacttcccntgntnttaaanatttnttgaaaagccaattttaatgggttaattttatgggggcggatgtttaattatcccacccccccattgttaagcctttggttttaaaatttttatggtaaaataaaaggtccagtaattttaaatattga

SEQ ID NO: 686586 - DNA, 479 bp, Homo sapiens
aagtctatctctgtgtatctacttctgtgtacatgctcgggttcagttggttggatttggaccttttttttaatgttaactaacaaaagcagtgtctgtgccatgttgcgtctctttctctctttgtctctgtatgcctctgtctctgtgcttgtagctgttccttggagcgcggtgtggtgacttgatgtagtgagctcaagtctgcggctgtggctggggacgtggtggaggctgcatgttctgtcctctccaggaagagctagtggttccctaccctgtgtgtgggtgagcaatgtgcagaggcagagccgctgaagtatggttcctgaggggtggcgaagcaccgccctcattccaggtcacctcatcagccctcgttttggctggggccccagccttgaggctgccaaagttgagaggcatcaaaaccaatgcacagccagccccctgccactagcccctgccagcttgcacag

SEQ ID NO: 686587 - DNA, 304 bp, Homo sapiens
  misc_feature (11)..(11): n is a, c, g, or t
  misc_feature (45)..(45): n is a, c, g, or t
  misc_feature (114)..(114): n is a, c, g, or t
  misc_feature (121)..(121): n is a, c, g, or t
gatacgttgtnaaaaaataactcaggccccaggtacgggactggnacctgtaatcccagcattttggaaggccgaggcaggatgatcttatcagccccaggagtttgagaccancctgggnaacatagcaagaccctatctctacaaaaacataattaactgggcatggtggtgcacacctgtagtcccagctgcttgggaggctaagctgggaggatcacctgaacctgggaggtggagactgcagtgtcctgtgatcgcaccattacagtccagcctggcgacagagagagcgctgtctcag

SEQ ID NO: 686588 - DNA, 1026 bp, Homo sapiens
tatctgttttcatttttttcacgttataaataaaaatactatgctggccgggcgcggtggctcacacctgtaatcccagcactttgggaggccaatgtgggtggatcatgaggtcaggagttcaagaccagcctagccaagatggtgaaaccccgtctctagtaaagataacaaaaaattagctgggcttgatggcatgcgcctgtaatcccagctactcgggaggttgaggcaggagaatcgcttaaacccaggcggcagaggttgcagtgagccaagatcgcgccactgcactccagcctcagcaatagagtgagactgtctcaaaaaaaaaaaaaaaaaaaaaacctgccatttttcaaaattacgggaaaaattttttcgggggccattttaaaagtatagacagggggttttaactcctgtttttgcccaaaatggcaggtctgagggggcaggagtagggggcagcgggggacttcactcacagtgggccataacaagataggctaagtgggattcgggaagagaccgggcatagccgtggggattatcaacctccagtgggtaaggggcaaagacgccttacctttacagggccatgcttttcggaaaaaggggtctaagacctggaaccctggggtaaaaaggaacatgggacaaccacgcgtccaaatggagggtaaacccccgggcgcccaggtgtaagttaccacaagggcggggcaactcagggatcgggagaacggttcccaagtgacccaagcgggagcgaaatgcaaaggcatcagcgattgcccaccattcgggagcgccggaattaaggggtgaccatccgtgacagaccatggggggcaaaacagccttacaaggggggaaagggccagaaaagggtgcccctttacgacagggtgagcgagaccggttagttcgatagaatggagcgcacaaaccagacacatgattgtggcagcgctgtaacactgcagcagagaagaaaaaggaagaaggagggacaacgacacg

SEQ ID NO: 686589 - DNA, 172 bp, Homo sapiens
atgatcggagtatagttcaacagaacactaaagagaagtgaagctgcaagtgtgttaaggcagagcccagtagatccgtgtccacccatgtgccaataagacaatgggcaaagctacaaatggcaagagaaaaatgggactattaatcgcgtgtggaacaaggccttaatag

SEQ ID NO: 686590 - DNA, 1299 bp, Homo sapiens
  misc_feature (259)..(259): n is a, c, g, or t
tactgcaatgcggaagagtacgtcgggattggcagacttccttgatgactgtgcagtctgactatgtgactgtagccactgtagccacttctgtgctccggtttgtcactgagtacatatatgcgtgacagcaccaggagctgtcgtcttggaatcagtgcgttcggcgatgggtgctagcttggaggcgcacgaagtcgtggtctggcgctcctcgctctgcaatacgactgtctgcgtcacactcacttatctaaanacctaggctgccgtcgtccacaagacagtcgagacagacatgggacctgttcctgggtcaataggtagacacgacacgtgaacccctcagaaggccactggtaagcagagctgccagtgtctgaggttttgaaacgcaacgatcaacgtcgtgggaatgcgtactattggtcatgaacgttggtgtgttgggggagaatcgtcggtagtgatgcgtagactttatagtagacacattattgagagacagtcctcggttatagagccacggtgcgtgggtcgcgaacattctgacgccatgactttgcctggtcgttacggcttaatcctgaacttagtcactgatctgtgactgttagtggttcccagtgacgtcgacgcagagggtactggctctgatcctttgaaactcagcccgggggggagggcggggcggtgattactcattgccggcggaggcggccaccaagtttgtgtcgctgcacccttgaggtttcccccttttccgcctcgatggccgcttttggccacatctgcggggtagaggcggtggcttggatgcacacgttgtcccacgggttcccgcgctggttgccggaccatgcgattaaaggccttggccgggcggttaggaacgcattgttcctggttgggccagacacacgcttcaagaatgtggtgtcccggaagtggcacttaaggggaatcgttaataggcgtgttccaacgatgttcccgatgtccaagttcggtgtgctcattgaaccgacagcttgaacctattggaaagggagcaaagtgtcgtttgacaattaaggagatgaaacgcgccaatttctgatgtatacaaaacatgtggcggtgcgccccacatatttctgtgagtatcccctcacacattttctaccacaatttggcacttttgggcgacttcacagaccgagtggtgaatttacacaaaacatggtgggccgcatatttctactaaaaacctcagcgaggggtcgggtacacaccccaacgaaaaacatgactaacgcc

SEQ ID NO: 686591 - DNA, 354 bp, Homo sapiens
aaaaagggccccccgggcttttttgggggtggttagcgcccccccccccaagttggttaggccctttggcccccccttttattttcccccaaattaaaagggccgggttttccggggcccaaaaattttaccatttaaaaaaaaatttccccccctttggttttaaacccccgggcccccccgggaaaaaatttttaaaaaaggttgggaatttaaaaaaaacccgtgggtttttatttggtaaccccccattctggcccagggaaaaaaaaatcccccaagttttttaacaaaccggggggtggttttcccccaaaaaaaaaccccaaaaaaggttgggttttcccattttta

SEQ ID NO: 686592 - DNA, 576 bp, Homo sapiens
gcttccttctctatgcacacttaacctacgtcacgttgccgctgatcggattttaacagacatcctggaagttcggcagaagccatcctgatgacctctgcgcaggctccgcacgcagctaggtcatcaggatgggctagctgcgtgcggagcctgcgcagagcccggccggcccagcctcggagtgctgccaagtgcctacctgtccaccgccaccggggtctgcgatggcacgccagtctggagccgcagccaggcaggcactcgactcccggggccgggccgactccacgaacaccagcccaaactgaagtgcctcttccctccccctgcgaacgctagaatccgaaccaagtgagcccagaacgaaggaacacgggcgctcaggaccccgaggacggacaatgagaagaagcgtcctacaagacagacccacacacagaagagagacgtactaccgacatacagctgcaacccgacctcagcgaacccagccctcaccctggacaccacaacaaacaataatgggccaccaggatcaccaaggcagaaaaacaaacgcgaacgccccccaca

SEQ ID NO: 686593 - DNA, 152 bp, Homo sapiens
aggatccccgatggtttatgctgactggttcaagcgtctgtctggttcagatattaatacccatgttgggtacctagtgtgctagtctccccactaactgaggtgaaaaaggttcccagagtggggtcctctgtcccacatttgccacctac

SEQ ID NO: 686594 - DNA, 107 bp, Homo sapiens
ccggggggcccggacacggtctactggagacacgggcccccttccgccaggttgcccagatggggcctcctatgttctgcattcagcagctatttatcgagtaccta

SEQ ID NO: 686595 - DNA, 408 bp, Homo sapiens
  misc_feature (307)..(307): n is a, c, g, or t
  misc_feature (321)..(321): n is a, c, g, or t
  misc_feature (323)..(323): n is a, c, g, or t
  misc_feature (335)..(335): n is a, c, g, or t
  misc_feature (401)..(401): n is a, c, g, or t
gcttccttctctatgcacacttaacctacgtcacgttgccgctgatcggattttaacagacatcctggaagttcggcagaagccatcctgatgaccttgcgcagagcccggccggcccagcctcggagtgctgccaagtgcctacctgtccaccgccaccggggtctgcgatggcacgccagtctggagccgcagccaggcaggcactcgactcccggggccgggccgactccacgaacaccagcccaaactgaagtgcctcttccctcccctgctggcgctgctccgcctgtgccccccgcccatnggcccccacccatntntggagagccctntgcacccaaagaggactagagatgccgagcggccatgaagagagagcggaaggagcagttgattgnccagagc

SEQ ID NO: 686596 - DNA, 250 bp, Homo sapiens
ctgactacgcggcaaggtgtgcgagctggatgagaacaacacacccatgtgcgtgtgccaggaccccactagctgcccagcccccattggcgagtctgagaaggtgagcaggcaacgacaacaagaccttcgactctgactgccacttctttgccacaaagtgcaccctgaagggcaccaagacggaccacaagctccacctggactacatcgagccttgcaaatacatgcccccttgcctggactctga

SEQ ID NO: 686597 - DNA, 458 bp, Homo sapiens
  misc_feature (371)..(371): n is a, c, g, or t
gcagcttgcgggaagatggaatgacacttgcagacattgctgaggaactggaaacagtgaatgctagaggcaaggtctgctgctgtagtcaggaaaacagtagagcccattgaaggctgggcgatggctgtcagtgtacaacgtcgggatggtgcagtcagagaagatggggtcatggttgtggaagtcactatgggacctgaggtagtgggaactgaggagatggcagttgtggatgtgctgatggtggagtggatggttaaagtgaaggtgggagtactatgagaggtgttctcattagtggttgttaccaagtttctggtagaagtcatggatattcctttggttatgagagaggaagtagtggctgngagagaaatctcagtagacaatgtacctgttatacttgtggagtaggtggtttcggtcgtggagtctgtgacagtgctagtgggaga

SEQ ID NO: 686598 - DNA, 748 bp, Homo sapiens
aacttggtatatagtttgttatcctagtccgcgcctgattgaaacttccacagactgctggttttctcgccgtggccgaggggggtactcatacctaggtgatgttgcgatgtgccgtcatgggttccaccaaccccgcctggtaggttgacgctactgacgccgccataagcgcgggcagaacaacccagagaacagccgcccgcagtcgctaacgcagcccacagaggcaaaacagcaggcacgttgtacggccaggtgctaagtcgcctccgcagggcttggccgtgtcacagatggcaaccaccgttacccgacgtccacctgccgcagtgcgccgcggcccatccagtgtgtcagacttgtttttggtgtaggtgccggggtctggcggtacgcggtttcggcaaggccacgggcgggcaaccggaacaggcctcccaaaaacccacggcgtacgcttgctggcacaacattgaacccgtcgccacaaggcccggttttcaccgggttccctctcagcaaaccacatccctgcctgtgtacgggactgattaggtcgtttcagaacaccctgcacaagcgccgaacccggtaagcacctgagtgtatatactgcaagagatacactaggggcatccagatattagtaatttcatagtaccatttagggtctcacaattaactcttcaattcaatcccccttttccactttaataccctatacttggtcgcttattatttcttc

SEQ ID NO: 686599 - DNA, 137 bp, Homo sapiens
  misc_feature (76)..(76): n is a, c, g, or t
  misc_feature (78)..(78): n is a, c, g, or t
  misc_feature (103)..(103): n is a, c, g, or t
  misc_feature (110)..(110): n is a, c, g, or t
ctgtaatgttttcttagttaaacaattggaaatgtttaggcattttactgtgtgggggcagtgagtaagccactgntncaaattgtattatgatcttgacatngaaattncacaaattcataactcaaaaaaaaaaa

SEQ ID NO: 686600 - DNA, 223 bp, Homo sapiens
tgtctagagcctccctcttaaccgtatagaacaggagtgacatggggttgggcacagtggcttacgcctgtaatcccagcagttagggagactgaggcaggtgtgatcacttgaagtgaggagttcgagaccagcctggccaacatgacgaaaccctgtctctactaaacatacaaaaactagccaggtgtggtggtgcgtgcctgtaatcccagctacttca

SEQ ID NO: 686601 - DNA, 135 bp, Homo sapiens
ccatctgacagcttcacctagcgctcggtccctctataccccttggagcagccggcgtttcgtgttccttcgtttaccggggactcctctacgacgtcgaccctgacggactgtaacgctgggacctgggcgtcg

SEQ ID NO: 686602 - DNA, 777 bp, Homo sapiens
cgcgggctggggcggtcgcttcttccttctccgtggctacgagggtcccagcctgggtaaagatggccccatggtccccgaagggcctagtcccacgctgtgctctggtggcctcagcctcttcctcaacctcccaggacctatctggctccagcccatctccacctccccagtcttctcctcccgcctcagccccatccgtgtcatacctgtccggggactggttgacgagctttaacaagggcctggagagaaccatccgggacaacttcggaggtggaaacactgcctgggaggaagagaatttgtctcaaatacgaaagacagtgagacccgtccgtgggtagaggtgctggagggtgtgtgcagcaagtcagacttcgagtgccaccgcactgctggagctgagtgaggagctggtggagagctggtggtttcacaagcagcaggaggccccggactctacttccagtggcttgtgctcaggattcccatgaagctctgctgcctccagcagtgcaccgttctgggcccatcgctgcgctatccctagtcctagggggaacagagacggccctgacgagtgggctacggcgcagaagtgacaggagcaacgggacacggaggggggcagcgaggtcactgttgactagcacaatgccggctaccgggggagtgaggccatggtggccagtgtggcccttggctactattgaggcagaagcgcaacgccagccatctgcgtatgttcgggattgtgaaggcccctgtgcccga

SEQ ID NO: 686603 - DNA, 456 bp, Homo sapiens
  misc_feature (5)..(5): n is a, c, g, or t
  misc_feature (104)..(106): n is a, c, g, or t
  misc_feature (109)..(109): n is a, c, g, or t
  misc_feature (152)..(152): n is a, c, g, or t
  misc_feature (155)..(155): n is a, c, g, or t
  misc_feature (167)..(167): n is a, c, g, or t
  misc_feature (169)..(169): n is a, c, g, or t
  misc_feature (181)..(181): n is a, c, g, or t
  misc_feature (186)..(186): n is a, c, g, or t
  misc_feature (188)..(188): n is a, c, g, or t
  misc_feature (196)..(196): n is a, c, g, or t
  misc_feature (201)..(201): n is a, c, g, or t
  misc_feature (203)..(203): n is a, c, g, or t
  misc_feature (208)..(208): n is a, c, g, or t
  misc_feature (303)..(304): n is a, c, g, or t
  misc_feature (322)..(322): n is a, c, g, or t
  misc_feature (326)..(326): n is a, c, g, or t
  misc_feature (331)..(331): n is a, c, g, or t
  misc_feature (350)..(350): n is a, c, g, or t
  misc_feature (365)..(368): n is a, c, g, or t
  misc_feature (376)..(376): n is a, c, g, or t
  misc_feature (456)..(456): n is a, c, g, or t
aaacnacatctaagtgagtcacccaaaaattcttaaaaaagtcccaggctggctgcagccccagcgaaccgagtcgccactgacattaaaaactaatataaaannnaanaaaaatcagcttgtcgcagcattcaggtatttgtacaaaaggnggngtctccctacangnctcctgacttgnaacangnacccaggnacctnanctggnatggatgtcctagaagccagaaagggaagaccagacacaaaaatacagtaaagggaattctctactggtcagccccataggggcaccgaccttcnngttttctccctgcttgcnactnaatcngaaaccccagtgccaagancctgtgtctattttnnnnaatgctcnagcccttttagactctccccttggcttctccagtccctgccttggggcactgcccttggaagggaaagatacgggcaggn

SEQ ID NO: 686604 - DNA, 84 bp, Homo sapiens
acggccgtgtattactgtgcgagaggtgccgattactatggttcggggagttatctctactggggccagggaaccctggtcacc

SEQ ID NO: 686605 - DNA, 152 bp, Homo sapiens
gatgagccggtccagagtctcgctcgtacccaggctgcagtcgatgtgcatcacggctcacgccagcttgaccttcacctcagcctcccaagtagctgagactacaggcatgcaccgccatggctggctcttttttaattgtctttttctaa

SEQ ID NO: 686606 - DNA, 246 bp, Homo sapiens
  misc_feature (28)..(29): n is a, c, g, or t
  misc_feature (40)..(40): n is a, c, g, or t
  misc_feature (48)..(48): n is a, c, g, or t
  misc_feature (92)..(92): n is a, c, g, or t
  misc_feature (122)..(122): n is a, c, g, or t
  misc_feature (126)..(126): n is a, c, g, or t
  misc_feature (140)..(140): n is a, c, g, or t
  misc_feature (148)..(148): n is a, c, g, or t
  misc_feature (152)..(152): n is a, c, g, or t
  misc_feature (165)..(165): n is a, c, g, or t
  misc_feature (179)..(179): n is a, c, g, or t
  misc_feature (184)..(185): n is a, c, g, or t
  misc_feature (220)..(220): n is a, c, g, or t
  misc_feature (222)..(222): n is a, c, g, or t
  misc_feature (236)..(236): n is a, c, g, or t
gcccttggggggaaaacaaaaggggggnnacgcccccgcncctcctgngatttgggtgggttggattttgtttttaacccgttcctgccccncctgcccaaaagttatggcctgtgttttgntttnctggtcccagggcnccgtttgntttntgaactcctcccnccaggccctttttnccccnngggggtttgtccccctcgttttgtagggtttgtananaataaaacaatggngtggggccca

SEQ ID NO: 686607 - DNA, 348 bp, Homo sapiens
gccctgtgcacccgtgcactcgatccggtgatgggtgttgtgtacgagcgcgtgtggtgtggtacaagaacaacggtgcacgtcatccagcccaagatcatgcatgatagaggcgagtgccggccagggccacggggagtggaagaggctcctgctggccagaagctctcccgcatcttccatacggaatccacgaggcctacgtgtggccatctcccctgtaccacctaatgactcaggctcgaacaggcgcaaagcaggcgctgcctgccaggtctgaggggactgccggtggccctggagctgtgcccggtaagaggatcccaaattcctctcctctagccagcc

SEQ ID NO: 686608 - DNA, 282 bp, Homo sapiens
gaccttccaaagcggaatgctgggtgtagagatcattacctcgctccatcccgatgatcacctttgagagtagccattatctcctttgttgccttgtcgagatgtagcgcctttctacttagggctcaacattgatcacaggtctgttgagcgaacgtaagatggtgactttgggcacccagcctaccgtattgaggacttttcgttctctttctaccaccaacgtctttgcttgttctgaccgccccactgtcatctatagcagcatctccgctttggaaa

SEQ ID NO: 686609 - DNA, 103 bp, Homo sapiens
gtagtagcgaactctctctgctgactccacgcagcagaggaaggcagacaggtacaacaaggagttaaccaaagagagagacgccctcaggctggagttatac

SEQ ID NO: 686610 - DNA, 132 bp, Homo sapiens
tacctctggctatattgttgacaaaggcctcctctgtaagagtgcatagcacgctcacttgacactctcttgagggactaacggtgtacactcctggtgctaatgcagatatggggctctaggtagacacga

SEQ ID NO: 686611 - DNA, 593 bp, Homo sapiens
tatagtacaaagattaggctttatcactatttttaaaagacaaatggtacttatgttacatgctcgggaggcatgattggtggatgatgcacacctattagctctgtgttcctttcacgcaaagccagtcagaaagcaggttatatattcttcaaaaccatcctacctgattagcatccttgccacctgtggctctgaagaccatgtactacagtgtgaggtcactgttgacgccaaaactggcaatactaaagcattctttagttactgcattgacaaactctgctgttataagagagagcttaccattctgacgaagaggagagaacccccatagtctaagtggctcaaggacatgggagttgtctacgcagaagaacgaaatagctgctcttgggttagaaacttgcgttagtgaagagactttccatatcgcatgctacgttatcagcacctgggaaatgcagttcaatccccaatggcttcaatacattcattgtgcacatttgacatgttccattgttacataaccgagggtccaggcatgaatggtgaaaacattgacgcggttagaaatcagaagatagattttt

SEQ ID NO: 686612 - DNA, 304 bp, Homo sapiens
aatactagatagtatagactagatagatagaggacgacgaccgataaaagatagatgatcgatatgataggcgacagatgatagatagctagatagagatagattagatagatatagataggcagacagatgatagatggatagatatagataggcagacatgatagatatagatagacagatgatagatataggtagatgggcagacagatataggtagataggcaggcagacagatgatagatgagctacatagatgataagatggatagacagataacgatcgagactatcagctcctctg

SEQ ID NO: 686613 - DNA, 531 bp, Homo sapiens
  misc_feature (186)..(186): n is a, c, g, or t
gagagtgatctaagtccgtgaggtacaagcgtgcgggagcatagtggattgaggcttttatcagaagtcaggtgtgagcggatattgtcacatcactctgtgtctgaagcagtgtgtagaaatctagaacatcacacgtgcatgccctgctggtccggtgatgcagctgtgaatgagcaggcttgnggttgctgcacctggtgaggagcagaaggactgtggtcacagccacacgtggacgcggttactagggttctggtgggtgctgtggagggtgcagagggcgtgtgatgggtcatcctgagcgatgcaagctgggcctggaggacgtggagtgttcgcaagggaagagggtgggctggagtgactgcaaggagaaggtctcgggaggtggagctcgggatgtggggaagagctccctgggcctggtggccggtcagcaggggccaggtcggggagtgggtgcagagagccttggagaggccagagaggggtgattcggtggccatctagggcttcctttttggttag

SEQ ID NO: 686614 - DNA, 173 bp, Homo sapiens
ccctggggaaaagcccccccgggttttttgatggccgggggggcctaacgggttactcccgggaagcctcagggcagccagggcttgggggttttttttccccccgggggttttggggacttttttttttaagggttttttttatccctttaaaacgggacccccccccccca

SEQ ID NO: 686615 - DNA, 180 bp, Homo sapiens
acccacggtacttacatcctatgatatggcctgcaaactaaactacaaacgcactcacatcgctataatccttttaaggacttaaactttactccattaagacttttatgacttctaacaacctcgccaacctcctcaccccccactatacctcggagaactttcgcgtaataaccacgt

SEQ ID NO: 686616 - DNA, 947 bp, Homo sapiens
gacgtagccactgacggtgcgagcacatagacttgcgcccggtgcgtgtggtgtgacccggttgccttcgagtgacacatgccgacagactccagaggctatgcctctaatgtgacctcactacatatcaggcactatgtgttataccgtgcaacgcgcacgcttgaagatcttgcctcctggttactgggtaagaagtgctcgctggggtatctagcgtagcttgtctctccttttgccggacgtgctcgctggtgcggtaagcgtggttgaacccttcgttacgcgacatctcattttcgcctcgtgtcctagactattgtgagattccgtgtgttggctcccagattttgtcgtgtcagcgtcctgcttctccggaggggaaggccttcctgtgtggcttgcgcctctttctgtgctgttctctccctgcaacttctatctcatgagtgtgtctcttgtcttagccatacttgtgttggaaaacatggcatttttgctgtatccatccctttagagatgttgattcaccataaatatcctactttttctactgtgcatagaacataagcctgggaccctagaaagacttagacacagagccacaagtccacctgaaggaccccaaagacgagggagaacaccgtgtacaccgtggcgtggccccgataaaaaacttcatattaatggcgggggggggcaccccacatgataatgctccctgactggagatgtgttttgtcattgagcggtttgcgccttcacaccctgagggtttcttgggtagacattagaagtacggggcacgagagcgctggatgtgttataaacacaaatgtgttgataggtaggaggacacaaaagcatactgagagggagtcattagagaaaaggaacaactatattgttagggtgtggagacacacaatttgtagggagcactcatt

SEQ ID NO: 686617 - DNA, 368 bp, Homo sapiens
  misc_feature (81)..(81): n is a, c, g, or t
tgagtttatgttacatttctttttcgaaagtgaatgtacactgtctagcccttaaaaaaaagaaaaaaagcagccgggcgnggtggcacacgcctgtaatcccagcactttgggaggccaaggcgggcattatcacttgaggtcaggagttcaagaccagcttggccaacatggtgaaaccccatctctactaaaaatacaaaaattagtctggcttgatggtacacacctgtaatcccagctactccggagcttgaggcaggagaatcgcttgagcccaggagttgaagaccagcctaggcacagcaagaccccatctcaagagaaagaaagagagagagagagaaagggaggaagggaaaaaaaaa

SEQ ID NO: 686618 - DNA, 113 bp, Homo sapiens
ggcaaaattaccccccaataaaaataattaaacgcctcattcatcgaccgccccaccccatccaacacccccgccagaagaaacttgggcccactccttggggccgtccctaa

SEQ ID NO: 686619 - DNA, 491 bp, Homo sapiens
tatagagagaatccagatcttttaaaaagtgactagtattaataaaaagctggtgaatatgtcagcaaggattcgttacctcaggctgtcatatattcttcagatacaaccataaaaggctaataagccataaagacaaggaagaggacagtattagagaatgtttaatagatggcttcgttccgaattttccggattctacgtggcaaagcgaagctttggcatcttctttttcttgttcagagctgttgcacatgcacgttagcaatcctccctgctaacaaagttattgtcattccctccacagccagtataggtgaaagcatcacaggttctgtatcttggattaaaataatagcgagtcacatgggcagagcacagtccctcatcttatggactgtagcaaaatgatggcattttctttggtgcgcggaagcccatacaagtagcttcatctggaaacctgttctcaatccggttccggtgacacg

SEQ ID NO: 686620 - DNA, 154 bp, Homo sapiens
tcggtaccgtccctagcgagacagtgaagctcggaaagcattctattatggctggctcggactttaaccttgtttcccagaagcatcttttacccttcccttcttacctccacatgaaagcggaggttctccaggcaggatgacagacccagca

SEQ ID NO: 686621 - DNA, 499 bp, Homo sapiens
gcgaaattctcctcctcctagatgggatggcggcgggaagaggcgctcctcacttcctagatgggatggcggcggggagagacgctcctcactttccagactggcagccaggcagaggggctcctcacgtcccagacgatgggcggacaggcagagacgctcctcacttcccagacagggtggcggccgggcagaggctgcaaatctcggcactttgggaggccaaggcaaggcgggtggagaggtggaggttgtagccagccgagatcacgccactgcgctcaagcctgggcaccattgagcactgagtgaaccagactccgtctgcaaatctcagcatgttgggaggctgaggcgtccaatcacttgaagccaggagttcgagaccaggctggccaacatggtgaaactcccgtctctactaaaaataccaaaattagccaggcatggtgacagggacctgtactcctagctactcaggaggaggaggaattcgccc

SEQ ID NO: 686622 - DNA, 933 bp, Homo sapiens
  misc_feature (296)..(296): n is a, c, g, or t
  misc_feature (933)..(933): n is a, c, g, or t
tggcaaaaaacaagacaaccgagttttattttttccacaacagtaaattcccgggggtaaaaagaggcccacaagtattaaaggttgttttcaagaaacaaaagtttaactcttctgtgcataccccaagtctgctgtgattttaatgtgaacacccccttaagacacagaaaaaagagtcctgtgagaacacacccgtgtgaacacaccagcccacccggaagcctcagtgctcgtgctcacaggagccgactcctccttctttacaaggcgaaatctccgcgtggaatatcacncagtgtggacaaaacgcagagtctccagcgtgtgtgtgttgacaaggagccagacagaacccgtggagaggtgtgccgtgtctccaaagagagtctccctcgaggcgacaactctcatgtgtgggccccaagatgtgcaccccagacactctctcaagagtggcgagcccctctttaacagagatgtgagagacacaacagatctcttagttacccgtgagagaaatttctccccagagacaagaaaaagagagacacgtgtgtgcggcttattagtgctcatctctcgtaggaaaatttttgtgcacaatccctctcacgccccaagcccaaagtcttttactatctagagagcgggagcatatattcgcgcggctgatttgtttcaccctgtgcggcctaagttatataatcttccagggggtagtaacgccatatatagagcgctcctgtgtcggcgtcaatactatgtagagacagataatagcggggcgacaaatcatataacatcatctccccaccctgtcttttattcaccaaacacaccattctacaggaggcggttcctccaaaggagaaaatcgtgcggataccaaggggggaagacaccttgtgggtaagacacgggctcccctan

SEQ ID NO: 686623 - DNA, 392 bp, Homo sapiens
  misc_feature (320)..(320): n is a, c, g, or t
tcgcgtcccgggtctgccgcgacggtcgctcaccgcaggggtctccttcctcttctggcagcgagtgcgacctcttttatcctagcaggccaccaccttcgcggcaacaaacatcatttcctatgcagttgcaaagcatgctcccttgcaatcagcgatcaatactggcaaagtggctccaggataggaaaggtcgcacgtgtgttggtaaatggaaaggtttatgaggcgcaggtggtcgtgctccgcggagattgtggtattagcatgtcaaagacaaaacggaaccaaggtatacaggcacagagtctcttcctggngctccgggaaagcttggcacgaccctcttgagccttcagtttaaaatgaaacgctggcgccagatgtggcac

SEQ ID NO: 686624 - DNA, 1215 bp, Homo sapiens
  misc_feature (591)..(591): n is a, c, g, or t
  misc_feature (624)..(624): n is a, c, g, or t
  misc_feature (890)..(890): n is a, c, g, or t
tgtgtcgagctcatagcgtcctgtacaccaggcctgagtcgaacctactgtgtgttgtaagtcgaggaataggtatcaccataatcccttgaggtgaatcttggtggtaccatgacagcttcacccgagtgattggcttgcttgcaccgctaaggtagaacaggtcctagttaatgccaactgctagatgacgttacgggatcgtatacccttttgcgcggagagctgcgactttggacatgtacatccaacggagtcgtcacaccatatatccccaggggctagaagtaagtactgtcataagtccttaggttctctatgtccatggccgggcacgcgccctagttacgagcgtaagtgtacatctgttgtacgaaactacaatagactcttgataagaaaggacactgcgcatgggcatggactcccaagtggtggataatcaccccacggatagctttgacgatatttcgctcaggggaggatactgggtgtctgactctcagcaagtatcttgtcttggacacaggactgtttctctcacaatctatcgtaagtcgcttagctcactctctgtgaggtatgtgtgtnagtacagtctcaaggagataactgacacagagntgagagagacacgagatcgggtcgctgggtagatgccggcaggatcatctaccgaaaagggctatgtctaatcactgtgccagctagggttttatcgattcgcatccgtacattagtctgtggtagacgcgctatctgtataacgtagctcgttaagcatattgtcttgcttagactctcttgtcacctatcaagtcgaatcccgaggagctactacattcgccacgactgtaatgtatgaggtaccttatctcctatgtcagcantgttgggtgatgcacgtaggctatacgagcgccacgtaaattcgatcagtctgaccatgtcaagtgcagctacgtaggaacatcagagggtggtaatcgttgtcctttgcaaaatataattgggccacgatggtcactgcacctaggaaaagaaagtatacttcgcatattatcgccgcaataaatacacctacaacagtatagacatcttctggcactccatgatacagtgtctaacagttatgtagtacccgagttgtgacacagcatcactggtgtgtgcgaacgctaacgacgatcacagccccagggtcttccacactct

SEQ ID NO: 686625 - DNA, 105 bp, Homo sapiens
aagttacttagaaaaaaaagtggtagagataactatattaaaaatctgttaggtatttcctattaaaagctaggtagtttatttatatatttatccattaccttt

SEQ ID NO: 686626 - DNA, 390 bp, Homo sapiens
ctcccaagggagagtttggggtgtacctggtgtttgatggcagcacccgcccttatcaatgcaagatcaaggctcctggttttgcccatctggctggtttggacaaaatgtttaagggacacatgttggcagatgtcgttgccatcataggtacccaaaatattgtatttggaaaagtagatcggtgagcaggggaacaagcgtttgatcccccctgcctatcagctttttttgtggagcctgttcctcactggaaattggcctctgtgtgtgtgtgtgtgtgtgtgtgtgtgtgtgtatgtttgtgtacacttggctgtcaggctttttgggcatgtactaaaaaaggagaaattataataaattacccgtcttgcggccctaggccta

SEQ ID NO: 686627 - DNA, 163 bp, Homo sapiens
cgactctagaggacccgtcactttctacaccaagatgcaaagaaatcttctatattttctcctaaagtctttcttacaattctagattgacagttattttctctcatagtattgaagattttattccatttgtctagctgaataccattttagcttgtggaag

SEQ ID NO: 686628 - DNA, 380 bp, Homo sapiens
cctgtttttgcattgtatataaatagaatcacatattatgtactcttccatgactggcttttattctacattatatttgtgagattcatcagtatagttgtgtgtatttgtagatcttttattctcatttctgcatatattttattatgtgaatgtacaagttatttattctactgttgaatattttgagtagttgccagttttgagcttttataaatagtgctggcatgaatgttgtaaatcactgctgtccagtattgctggtagcagtaaaaatatggaaacaagtcaaatgtctggttctggttaattaaataaaactacatctatatggtgaagtactatgcagtgacatatgcaattgaaaatgtaaaatttgt

SEQ ID NO: 686629 - DNA, 183 bp, Homo sapiens
ctaaaaatacaaaattacccgggcgtggtggtacatgcctgtaatcccagccactcgggaggctgagtttgcagtgagccgagatcccaccactgcactccagcttaggcgacagggccagactgtgtctcaaaaacaggaaagaaaacaaaagaaaattgggactattgccaattacaaata

SEQ ID NO: 686630 - DNA, 1395 bp, Homo sapiens
  misc_feature (1197)..(1197): n is a, c, g, or t
ggcgtgctgcggtccggctgtgccgcaaggcgcagagcttgcgtgatgctgagcccaagactgctgccgtgcgggcctagtacatgcgaacaaagatgacacatgagggcggcgcacggtctggggcgctggcgggcggaatatccctcacgaagatgcccgagcgctgccgtcatacttcacagggtaggtcgacgtgaccagtcgctcgtgcttcgcttgtcgctcggaagacgctactcctagcacgtgtcgtgcgaggacttgcatacggtcccaggaggccgaagtctgccctgggatgcccgtcttagctgggcgctttgttattcacgagccaacgcgggcccctctgtgtctccactgagatcactgccggtgagccagcgagccaggccctgtgtgcgctgacttgcccgggccgtcagtcctcgtggcagtctgggacgcaggtcccttctgtttgacggcgcgcctgcttctttcctgtgcgaacaagctgggccccggcctggagaagacaattgtcagccacgcattattgacatttgaatggcgcaactccgacgtgagaatacgtgatccgtggacacgcgttttaacaagcccccttggtccccaaaagggaagagccacacggcgcggcttgccacacgttcccgaggcttgacctagaaccagtgccagcaaagcccggcttcgttttgcgcgaaaattcggccctaaacgcaaacgcaaagggcgcgctttgcgcataccacgcctttttgaccaacggcactccgcccttgggccatcacccatccgaagtagcaggcagggcgagcacgcttttgcttagattcagcattgacccatttcattcaccagcggccttccaggttagcctccggccgagccacgaccgcttgcaagacgggggccaagctttgggcatcggaagtttgcccctcggcggacagcacccaaccgtaggggagttaacactttgaacgcgcagcaacacaccacaggcccgaacaggttcctccgggcgcgccctcgcaaggacaagggtgcccccttttgcgatttcgccaccccggccttcgaaaggtttagccagcaaattacaaagcggttcagcacttccggtccttgcggcacccctttttggagcctgccgccgcttttttcttttctcttcaacgtaggttntggcaattctacccccacgaacggtccacccggcaggcggcgcatcggcccaggtatccccccggcgacgttccttttaggttcattgcgcaacctttacacctgggggcccgggggtccgtcagagaatgcggcggcgggacgcccgcgcggttgccattccagcaggcccccccggagtgcgccattctacgccct

SEQ ID NO: 686631 - DNA, 1429 bp, Homo sapiens
  misc_feature (454)..(454): n is a, c, g, or t
  misc_feature (661)..(661): n is a, c, g, or t
  misc_feature (739)..(739): n is a, c, g, or t
tcttccccctttggttttggagacaaggcctctctatgtggctcgggtggtcttaaaactctcactataagttagaccagacgaggccttcaaacttcacagaacattctgtgccctcactttgtgccctcgtggaagtgtgtggtgattaaattacgagtgcacgtgcttggcctgtggacagcagtgtggcttttgtgagtctccgaggaaaagtgtgactccttcttccttacttttataccttctcccacagtggaagcgaggcgaaggccttcaagcctcgtgaggaaagaagcctccattcttccgagagaggacaaagaaaaaccaggtctccccaaaagccgggttgtggctccacaaccgtggcgcctttgtggagaattcagcagtgtgattgagtggcttctcagtgtggtggaaggcagaagaagcttgtggaagaggttgnagttgtgaagggccagcattagcacagaggggagaaacagaggtgttctcatataacccccattcctgtagacttctctgtggactctcactctcattctcccagtgtgcgccctgtgggaagaaaacctctgtgacttgtgacagacaagcgtgtgcaaccgaaacgcaccagaagggggcattgtgcacacggggctctcagggnacaatcttctctcgcttatatagggtgggaatgtgacgggtgagaacgcggcgggccctcccagggggggacaattcncagccaagcaaatgtgctgtggtatcaaatcatttctccagtgggcaagaaacacaaggtcttccccctgtggcggagcccccaagggcgccttggccccaaggctattataattaaagctatccacgggttaacccaacacaagacacgggggcaagcaagggcgcccagggaaaagacgcgcacctttcgtggaatattccccgcaagtggggggcattgcataccggtgccacaggaagggatcataattcctccgcgggaaaaattggtagccttcttgggcacaactatgttctcaacattttccaggggcgcctccccacagagcaccccggggtggtggtgctccccccccgaaggggagaagccccaccctgctgtgtataggaccaccaaacaagaaggacgcaaggggggacagcaagtcagggggtcaccacacaaaaggggggccccccacgcccggaggggcccactagtggggcaagagcaagtctcgggcaactccacaaagagaaacctaacaaacagggggtgagggcgaagctaaccaaaagaatcgacccaacccagcggcagcccagggcgaggatggatgtgcaaaaccaaccaactcacagagggggaaaaagaagaagatggtcgaaacagacgcaagacacagaagcacgaagtaatggagagcac

SEQ ID NO: 686632 - DNA, 1039 bp, Homo sapiens
gatcagtaccatatgtgcaaaacgggttggtcagccacatactcgaggtgtcagcgcaaaatataccgcgataaatatgccaaatagggtgacaaggtacatagacttacaatttcataccgttgtcgaacttggagaccacgtagatacgggtcaatattgcacattactggccaatcatagaatcattataaattgatggtagtcttgtagtctaaaagagactactatagaaagaatcttggaataaggaagcgtggggagaggagttgggaaaagagggctcctgatcacagttttatcgcatgtggagttctaggtaaataaccatgtataagctcgaagttcgagcgaaagcaggagttatttgcagtacctattggagtaattcctacactttaggtggagaaatgtatgtgaagactacctagcagctgggtaacatactttgttagctacctcacttcgtttgagacctgtgcccaccatgggacgactcctggtcagcaaccttggctttcacatatacacattgcgttgaactttgcagcggggtgtgcacactcggtacacgcgtcttagattgggtatgccgtggaacccaagatattgtgagtgcaccgtggcgtgcgtgggtttagggctgaagccttttttgaaacgccgtggagttataccgtgcggtaaaggaacagtgtgaggcttgacccttcacaacaaagacttaatgtacctcttctcaacgcggccatgggaatcaacctcttctatgagtgtgtttgtgggtaaaacactgggatgcaaaaaaagtttgggagtacaggagcgggtttacacaaaaaggcgactgggggataatttgcggcatccgttgtaaaggggcgcttatcttcaggtaacaaatttggccatcggaaaataggcaggtcaattatgtggcaggggggagagccatcgaggatgtaaaagcgagtaagaggaaacacaagacacagtgtgtaaaacatagttacaggagagcaacaggcagcgtgggtgc

SEQ ID NO: 686633 - DNA, 107 bp, Homo sapiens
ctgccagtggatagccgggtacgcacatcaagcggatcgccagcggatctagcgaggaagccgcctactccaaccccagcctagctctggtgcaccctccgtcccat

SEQ ID NO: 686634 - DNA, 178 bp, Homo sapiens
cccacgtctcgtgtagggactatcgcgaaaaggcgcgaatacacagcctcccgcgagcacatgctcctatgcgggagatacctgatggatttcttacctcagcggtctcgccccctgcctgagctaatcccggagaaccccagaaaaactcattaaacgtagggggtaccgagctcta

SEQ ID NO: 686635 - DNA, 197 bp, Homo sapiens
actgggaatggaggccatgagcctgagcagcagtggtccagtatgcgtgttggaatcaataggcaggattatgatgttgactgtaacgcacagaggagactgtcaggaggcagccactcatatggtgtgcgacgtcgccggcaatctccccctgcagccgcctaggcaagctcagcaagtcagacgagcatgttgtc

SEQ ID NO: 686636 - DNA, 102 bp, Homo sapiens
gcagacagttttcgcttttattggtcaagaattcttgacagaacccacacacacacatccacacacacacacacatgatgcctgcccttctgtcgtcttctc

SEQ ID NO: 686637 - DNA, 117 bp, Homo sapiens
aaaccccctgggatttggccccctttaaaaattcatctttggattcccctaaaatttggaacagtattgtacatatggtagggacttaataaaggtttgaatgagtgtgttgattga

SEQ ID NO: 686638 - DNA, 400 bp, Homo sapiens
tcagctcggacccctcacggatactcaaatcgtgtaacaaaaaaaaaacccagaattgccatctatattctccaggactggcagtctgccctcaaaagctatcaaacacagattcatgattataagcctgaaaaggagaaacctacaacacccggaaatcggcctacgtccccatataattccctttacacctcagtacgaaactcccccatttatattagaaaattaaataaagggttcccataagttaagctcccagaaaaacacctttttgccgacctcacggatttttaccaaccacttcgcttccctgtggccttggcacacgggcatgcgggtctaggatcctctacgcacaacgcctgctcgcctcctccgtgtggtggaggtaactccgtga

SEQ ID NO: 686639 - DNA, 127 bp, Homo sapiens
gtgcagtagtacaatcacaccattcactactgcttgactttcccaaatgatgctatatgatgtgtttctgaaacaaatcatagcatctgttcttctaaccacctgccaccaattgtacaaacatgca

SEQ ID NO: 686640 - DNA, 630 bp, Homo sapiens
  misc_feature (1)..(1): n is a, c, g, or t
  misc_feature (23)..(23): n is a, c, g, or t
ntccccaagccaggtcattgccnactggaaaggccatggcccccggtgatccatgcttcaatgcccaccccagaaacacacccctcagtgtgtgcctcagtttactttggagatcagtggccgtttttagtgctcctttaggcttactaaaacagttttggaaacaaagctattttgaagtattcaagcagaggaattccctaacactgacccccttgtctttttttaatattcaggctgttttatatgcctaaatttttttcttaagatctaaacgaaaaatagtttcttgtttaaattcacataaggcaatgagatatggaaagatgacaagatacgtataaacattggtttgcattttattaaattattctaatgcaaatcttgtataaagaacccatgatgttttgtaactttctaattaaaatgttcaaaatgaggccgagcatggtggttcattcctgtaatctcaacactttgggaggccaaggtgggaggatcacttgagcccaggagcttgaggctgcagtgtgctatgattgcaccactgtactgtagcctgggtgacagagtgagaccctatctgttaaaataaataaataaataaataaaaaagtcaaaaaaaaaaaa

SEQ ID NO: 686641 - DNA, 242 bp, Homo sapiens
gaccttacatcaaatcgccacatactcgaagaagtaaattatggctgaatcatccgctaccttcaagccaatggcgcctacaatatatcatattatctgcctcttcctacacatcgggcgaggcctatcttacggatcatttctctactcagacaaacctgaacacatcggcattcatcctccatgcttgcaaactcatagcaacagccattcctaggctatgtcctccacgtatacaggcg

SEQ ID NO: 686642 - DNA, 435 bp, Homo sapiens
gcgcacccacccacacatatacacacacaggtacacagtcatgtgcacccatccacatacgtgcagtcatgcacacagccctgcacacagacctacacatacacatgcgtgcacacagacatgcacacacacagtaggggccctaagcaggcgtccttagcctttctgctctgagctctgcagcatcagaacctgctgccataactgagccaagtgaactcctgaagcaggagcatccccgggcgtggcaggggagcgcccaccaccaagattctgctgctgtgctcgggggcagttgtgccttttctgtttttctttctttctatatttccaggaaatcatgacattaaaaatgactttttcttatgacgaatattcattgtaggatatttagtgaaaattcacacaataaaaactgtgattcgtttgtgaaaa

SEQ ID NO: 686643 - DNA, 428 bp, Homo sapiens
agccataccaggcataaaacaagtgacataaagggagggtccctgtgtgtatatgtactgatattcctaggtgcctggctcctagcagcagggctgggcctagagagaaccaaggctcactgcagcgcgctcctaagacccctccctacaggtgctacgttagcagcccagcacataggcttgcctaatggctttcactttcacttttgtttaaaatgactcataggtccctgacatttagttggattatttgctgctacagacctggtacactctgatttaagataaagttaggctaggtgttgtcagcaggcaggctgaggaggccagtgtagtgggcttcctgctgggactgagaaggctcacgaagagcatccgcaatgttggtctcactgagagctgcctcctggtctcttcaccattgtagc

SEQ ID NO: 686644 - DNA, 333 bp, Homo sapiens
cccctttttcccctttgcaaggcaggaggggcggaagggtagcctcagggtccacgggttcaaagagctgggttccccgccggtgccccctttggtcaagggtggggggtcttttgatgagaagatgaaggggttggatgtgaatccgggctcgggggtccaggtccatgaggactgggggttggttggggggctgggccagggaatccgggagaagaaaggcctgaaggtccgggagaaggtaaaccgcctgggttagatggggggggcagggcagagctggtcaggggcgggcaggaccgccctttttcccaataaaggttcccccctgga

SEQ ID NO: 686645 - DNA, 754 bp, Homo sapiens
  misc_feature (1)..(1): n is a, c, g, or t
  misc_feature (93)..(93): n is a, c, g, or t
  misc_feature (123)..(123): n is a, c, g, or t
  misc_feature (137)..(137): n is a, c, g, or t
  misc_feature (139)..(139): n is a, c, g, or t
  misc_feature (260)..(260): n is a, c, g, or t
  misc_feature (307)..(307): n is a, c, g, or t
  misc_feature (348)..(348): n is a, c, g, or t
  misc_feature (584)..(584): n is a, c, g, or t
  misc_feature (626)..(626): n is a, c, g, or t
  misc_feature (628)..(628): n is a, c, g, or t
  misc_feature (643)..(643): n is a, c, g, or t
  misc_feature (651)..(651): n is a, c, g, or t
  misc_feature (653)..(653): n is a, c, g, or t
  misc_feature (727)..(727): n is a, c, g, or t
ntaagagtgggaaccaggggaacccagggatgggattccactgaaaacaaaccgtcctgctgttctgttgagggcccccacccacaggatgtngccatgggacagccacttagggtccaggtngaggggcggcagancngggaggcagggacagggaggggtcgccccagggcagttgcagggctggaactcgtcccttacaaccctgagccccagcaggggccccgtgttagaagcgagaaggccggtgggggtgcgtngacaaggggcagaatgaccctgcccccaaccagtttcgccaggcgcnggcccagtggccccaggccctggcagccggcgtctcccgcngccttccctctgccctgcgcggggacattcagtgcgccggggaggcctcggtgatggccccctccacccgcaggtaccagggctggatgtgcgttttccgcatcagggcaacgaatgcatccagcccctccatcacacgcagcacgccaaaaaccgccaaaacagcgagaatcggcttctggccccccatgaagggccggtccttgcccacagcagccacccactcgtcagcagcntcaaagaggtcctcgcgcacgttgtcctggaggcggtgcctncncttgagttgcttgcngaagaggnanaaggccgccgcacccatgttcttggccacggcaccctccacggctccgaacttgccctcgcggacaatgtagtnaaaggacgccagaacctcggtgggcgt

SEQ ID NO: 686646 - DNA, 140 bp, Homo sapiens
tgtatttatacacgaggaggaagcgcattacctaccctatgaggaatttggagtcacacccctgcgtattccccccggaaaggggaaaaaaaacccccgggggggttttataaatttcccgggaaggggcccaaaaaaaa

SEQ ID NO: 686647 - DNA, 138 bp, Homo sapiens
taaactactttcataaactgtacatcaacatggcacagactgtagcctacttttatttctactgcacaaaagtgaagcttgacacttctgtaactaagaaaacagttgcctacttagcatatataacatgactccaag

SEQ ID NO: 686648 - DNA, 129 bp, Homo sapiens
ctacttgtctcaaaaagtgtcaaggggcgccctgacgaggagtagatagcaatgccctgaatgccaactgcacttctacagaaaagtgcttgagtgccaaggatggtcttcccagtcataagtgaggct

SEQ ID NO: 686649 - DNA, 613 bp, Homo sapiens
  misc_feature (304)..(304): n is a, c, g, or t
  misc_feature (315)..(316): n is a, c, g, or t
  misc_feature (338)..(339): n is a, c, g, or t
tggggtgtggtgtttttccccccaacacccggggggaagttccacccaccctttttgtgtgggtcttcccttccccccccgggggtgtgttgggagagggggaggtgggtgtgtctcacaaaccctcccccccccctttgaaaacttttttttaaaaaagggggggcgcgcgaaacccggtggtgtcccctccccccccccggtgtttttttccacaaaaacggggagggccccccccttgtgggaggaggttttttttcccccccccccccccggtggtggggggggattggggggcgggganaaaaataaaanncccccccccccggggtggggtnnggggggctttttttttttttaaaaaaccccccggggggaaaaaggggggggggccggggggttctttttttttttcccttggggggaggggggtgggccccccccccccccaaaaaaagcctttcccttttttcgggggtaaggggggggggggggggggacccccccccccccggttttttttgtttggcgggggggttttgggggggccccccctttttttttttccgggggccccgggggggtttttacccccccccccccccctggggga

SEQ ID NO: 686650 - DNA, 508 bp, Homo sapiens
  misc_feature (389)..(389): n is a, c, g, or t
  misc_feature (403)..(403): n is a, c, g, or t
aatgataagttaattgctatttatattaggttgccaagaggctttctacagtatggtgggcagcaaatggatgaagtgctaatatctcagtagattttacttgtgttttgggggttaaattcatgttggggtttctgataattgagatgctgcttttgacatttctttaccacctcttagtatttaagagtttttccgttttatgtatactaggtttgtccaatgagtaagtctccatatgtggatcctcataaatcaggacatgaaatctgggaagaattttcgatgagcttcactccagcagtgaaagaagtggtggaatttgcaaagcgtattcctgggttcagagatctctctcagcatgaccaggtcaaccttttaaaggctgngacttttgaggttntaatggtacggttcgcatcattatttgatgcaaaggaacgtactgtcacctttttaagtggaaagaaatatagtgtggatgatttacactcaatgggagcagggg

SEQ ID NO: 686651 - DNA, 346 bp, Homo sapiens
acctttacccatgtatgacccaggtaaccaaatgggagatgagaataagtttctgtttagagctgtattccaatggctgctaacatcacagaaaaacaaccagatcttaggtgccttttgatagaaaagcacaccaggagttttgtttcgttaaaacaaaacaaacaaacaaaaagtggtagctgtcagaaaaaaaaaaaaaaatccagcctgaatttgatcaagcctcttgatctaactcccaaacatacaagaaacactaaggatgaagaaagatattaaactataccacagaaatccaataagcaaaacagactctaaggaaactcagcccagtttcttctat

SEQ ID NO: 686652 - DNA, 81 bp, Homo sapiens
gcggccgcttactactactactactgctcgaattcaagcttctaacgatgtacggggacatgtttgtatgtgtgaagctac

SEQ ID NO: 686653 - DNA, 1062 bp, Homo sapiens
  misc_feature (1050)..(1050): n is a, c, g, or t
aagcttggcacgagggacagacgggcaggcggggctgggcgcgggcggcggcggcccggaggagaacgggcggagggcgcgggccgaccgggcgcaccgaccatggcctccaaatgccccaagtgcgacaagaccgtgtacttcgccgagaaggtgagctccctggggaaggactggcacaagttctgcctcaagtgcgagcgctgcagcaagacgctgacgcccgggggccacgccgagcatgacgggaagccgttctgccacaagccgtgctacgccaccctgttcggacccaaaggcgtgaacatcgggggcgcgggctcctacatctacgagaagcccctggcggaggggccgcaggtcaccggccccatcgaggtccccgcggcccgagcagaggagcggaaggcgagcggccccccgaaggggcccagcagagcctccagtgtcaccactttcaccggggagcccaacacgtgcccgcgctgcagcaagaaggtgtacttcgctgagaaggtgacgtctctgggcaaggattggcaccggccctgcctgcgctgcgagcgctgcgggaagacactgacccccggcgggcacgcggagcacgacggccagccctactgccacaagccctgctatggaatcctcttcggacccaagggagtgaacaccggtgcggtgggcagctacatctatgaccgggaccccgaaggcaaggtccagccctaggctacagcggctctcatgatgtgggctcacctgcgccccagaccctgcaggggcccccctgcttggctctgctgggagagtgctcagccgcccagtcctgcctgcaagcccagggcgagtattggaggaggggcagccacgggcagagcaccatgcccatccccgagtctctggtgtgtctgccccctctggcatcctctgggcgtcccatgatcccttctgtgtctgcgtgtccgaatccccgtgtgaccctgtcccagcattttccgccgacctgcgtgtcccgtgggctgtcgctctcctctctgctgccaccaactncaatttatttat

SEQ ID NO: 686654 - DNA, 974 bp, Homo sapiens
  misc_feature (117)..(117): n is a, c, g, or t
  misc_feature (326)..(326): n is a, c, g, or t
  misc_feature (330)..(330): n is a, c, g, or t
  misc_feature (339)..(339): n is a, c, g, or t
  misc_feature (398)..(399): n is a, c, g, or t
  misc_feature (447)..(447): n is a, c, g, or t
  misc_feature (455)..(455): n is a, c, g, or t
  misc_feature (469)..(469): n is a, c, g, or t
  misc_feature (508)..(508): n is a, c, g, or t
  misc_feature (572)..(572): n is a, c, g, or t
  misc_feature (578)..(578): n is a, c, g, or t
  misc_feature (588)..(588): n is a, c, g, or t
  misc_feature (608)..(608): n is a, c, g, or t
  misc_feature (671)..(671): n is a, c, g, or t
  misc_feature (709)..(709): n is a, c, g, or t
  misc_feature (730)..(730): n is a, c, g, or t
  misc_feature (787)..(787): n is a, c, g, or t
  misc_feature (800)..(800): n is a, c, g, or t
  misc_feature (837)..(837): n is a, c, g, or t
  misc_feature (844)..(844): n is a, c, g, or t
  misc_feature (872)..(872): n is a, c, g, or t
  misc_feature (887)..(887): n is a, c, g, or t
  misc_feature (896)..(896): n is a, c, g, or t
  misc_feature (902)..(902): n is a, c, g, or t
  misc_feature (908)..(908): n is a, c, g, or t
  misc_feature (913)..(913): n is a, c, g, or t
  misc_feature (947)..(947): n is a, c, g, or t
ggcctctgcgcgcctcctggccccggcttcttggctgtcaaacagatgcagcaacgtcggctcctgccgaggagcccaaggggtcccgggatccgccgcacaggctggcactgcttnaagaggaggctactcggagactgcgccgcgcggtggattcattgccctcggaggttcaaccagttatgagtgagggattggccagaagatcggggcgcaggcaagcaggagtgctctattaggataagcaagtttgacaggaagaagctgctcttctccgaattacacagaggtgatgtgttcgtattgcacgtagacgtgtgtataanaggnctctccttncccgcgccccgccaccccgacacacacaggagctgcctaaagtatccttgccttgcagnnttgtgatggcttcctcaaaattttttgtgaatctgaggaatcaagcanaaagtganggtgccataggaangtgttacctgagttttgcaattgcacggagacccttccntggaaattttttcattttgcaaagtccggcttaaaccaaattttttgcatttgaagtccttagngctgcnttgcacatcntgaaatttggggcctattcnagggtaagtgtgcctcaaaagtttgaaacccgcatacaagcacaaactcaaagttttgcatcnagacttgggaaagcgaacttaaagccagcggttgcgtnggcccaggaagtggggaaagngaaatgggatgcctggaagtgggaaggaggtgggtgcagaggggggcaccgcccatngctgccctgcttncaactgctgcgcatagggggcggcaggggcggtgatntctacancttccaccccccgccggggctggctgcnctatcgcttgggcanagggcgacntgtgtnatgtgncctcngcccagcagagcctggcctcatctctgggatcangcgaactgcatgcgagcccggggtgat

SEQ ID NO: 686655 - DNA, 1230 bp, Homo sapiens
aagcttggcacgagggacagacgggcaggcggggctgggcgcgggcggcggcggcccggaggagaacgggcggagggcgcgggccgaccgggcgcaccgaccatggcctccaaatgccccaagtgcgacaagaccgtgtacttcgccgagaaggtgagctccctggggaaggactggcacaagttctgcctcaagtgcgagcgctgcagcaagacgctgacgcccgggggccacgccgagcatgacgggaagccgttctgccacaagccgtgctacgccaccctgttcggacccaaaggcgtgaacatcgggggcgcgggctcctacatctacgagaagcccctggcggaggggccgcaggtcaccggccccatcgaggtccccgcggcccgagcagaggagcggaaggcgagcggccccccgaaggggcccagcagagcctccagtgtcaccactttcaccggggagcccaacacgtgcccgcgctgcagcaagaaggtgtacttcgctgagaaggtgacgtctctgggcaaggattggcaccggccctgcctgcgctgcgagcgctgcgggaagacactgacccccggcgggcacgcggagcacgacggccagccctactgccacaagccctgctatggaatcctcttcggacccaagggagtgaacaccggtgcggtgggcagctacatctatgaccgggaccccgaaggcaaggtcatgatgtgggctcacctgcgccccagaccctgcaggggcccccctgcttggctctgctgggagagtgctcagccgcccagtcctgcctgcaagcccagggcgagtattggaggaggggcagccacgggcagagcaccatgcccatccccgagtctctggtgtgtctgccccctctggcatcctctgggcgtcccatgatcccttctgtgtctgcgtgtccgaatccccgtgtgaccctgtcccagcattttcccgccgaccctgcgtgtccccgtggcgctgtccgctctccctctcctgctgcccacccacctgccagtgttatttatgctcccttcgtgggtgatggccacgccctcaccatgtccctggcagagggcttccctccgggatcccctgcctggtgcccacactgcctcgcaagcgctcgccaccctcacgtggctcacctgctgttgagccttgtgctgtcaataaacggtttgaggattgcaaaaaaaaaaaaatttc

SEQ ID NO: 686656 - DNA, 267 bp, Homo sapiens
  misc_feature (9)..(9): n is a, c, g, or t
agcggacantttgccatcgtgccaagagagtcccagccagcacattacgagaagaggaaggatgatgatcctgatgtctactagactttgaatcagatcatgtggcactgaaacagaaacaagagattatcaggcgactataacatgaggatggctgtactcgagggctcagagtgtctcaacgcagtccaaggaccttgcaaagtttcaggcaggcgagcagcagagaagcactggaaaaatcccaattggattaggtggcaaaaa

SEQ ID NO: 686657 - DNA, 410 bp, Homo sapiens
tcccccgaggggtggcagtggccactgtgcacgaggccaggtcagtgagatggctccaggatggcggcaagaactgtgagtgcgaagcatggttcctgtagagccccgtgaagaatattcatgaacagtgtctgggctgcctaagaagcagtgcccctgtgatcatttcaagggcaatgtgaggaaaacaagagaccaaaggcaccacagaaagccaaacaagcattccagagcctgccagcaatttctcaaacaatgtcagctaagaagctttgctctgcctttgtaggagctctgagcgcccactcttccaattaaacattctcagccaagaagacagtgagcacacctaccagacactcttcttctcccacctcactctcccactgtacccaccccgtcgggtggag

SEQ ID NO: 686658 - DNA, 1087 bp, Homo sapiens
aagcttggcacgagggacagacgggcaggcggggctgggcgcgggcggcggcggcccggaggagaacgggcggagggcgcgggccgaccgggcgcaccgaccatggcctccaaatgccccaagtgcgacaagaccgtgtacttcgccgagaaggtgagctccctggggaaggactggcacaagttctgcctcaagtgcgagcgctgcagcaagacgctgacgcccgggggccacgccgagcatgacgggaagccgttctgccacaagccgtgctacgccaccctgttcggacccaaaggcgtgaacatcgggggcgcgggctcctacatctacgagaagcccctggcggaggggccgcaggtcaccggccccatcgaggtccccgcggcccgagcagaggagcggaaggcgagcggccccccgaaggggcccagcagagcctccagtgtcaccactttcaccggggagcccaacacgtgcccgcgctgcagcaagaaggtgtacttcgctgagaaggtgacgtctctgggcaaggattggcaccggccctgcctgcgctgcgagcgctgcgggaagacactgacccccggcgggcacgcggagcacgacggccagccctactgccacaagccctgctatggaatcctcttcggacccaagggagtgaacaccggtgcggtgggcagctacatctatgaccgggaccccgaaggcaaggtccagccctaggctacagcggctctcatgatgtgggctcacctgcgccccagaccctgcaggggcccccctgcttggctctgctgggagagtgctcagccgcccagtcctgcctgcaagcccagggcgagtattggaggaggggcagccacgggcagagcaccacacccacctgccagtgttatttatgctcccttcgtgggtgatggccacgccctcaccatgtccctggcagagggcttccctccgggatcccctgcctggtgcccacactgcctcgcaagcgctcgccaccctcacgtggctcacctgctgttgagccttgtgctgtcaataaacggtttgaggattgcaaaaaaaaaaaaatttc

SEQ ID NO: 686659 - DNA, 337 bp, Homo sapiens
cacactactatcgacagggagacacacacacgcattcattaaccaggtacacatttcatcagtccaaagacagatattcctgaattgtaactttattattctataaattcgagtcaatttgtgtacaggtctttcctcccatagtagaaaaatgaaatctagtttatttacaggtaaatgttagtatgttcatgatgtttatttacttaatgacgcaattacaatttaatttcagatagcttcagaatttacttaatgcccttctactccttttcaccaatattaattgccggtatttaaaaaaattattaaacaaatatggccataattaaccggg

SEQ ID NO: 686660 - DNA, 1225 bp, Homo sapiens
  misc_feature (470)..(470): n is a, c, g, or t
  misc_feature (503)..(503): n is a, c, g, or t
gccagatagttgtgaatcgcctgataacatgcatagtactatcgatcagaaaatagtggcaaagacgtcatgctgctacagaggaccctggagaaaacgtctgactcaatccagtagaaaagtcagtataacaacaggatggatcacgctctggtaattgaaactgcgtgatacgtaaccaactttgtcttagtaatccctacacgtgaacttgattgagaagttacttaaggatctagcaggatcatggacagggtaaatatccatcgggactcgagacgtacgcacgaaggatcccatttagtggaagtacacagaagtacctacgagcagtccgattcgtatcaagtactcgaacatgctggaatgcttctcagttcggatgctagatattcgatactgtcctgtaccaggggcatcgctagaattttgaagatgtaggaataagcactagggagggaattattccnacatgtattatttcacgaacagagatttgctgngtatagaactatcccaggatgcgcattgctaagtcggtcacctgtatatctaatacatgctccgcgaaagccataccaataggcaactcaagcctatgtatggacacacaaagatttcctttggatataatgatccaattcttcagggctaggaatatattcccctcttggttcaataaggagaggtttgtgcgcgtatagataaaagctttgctattatcggtcatccgcaagctcttacggccccttgtataattgtaatcactattcgataactatctatgtatcagaagccatagtttactctttaggttgaagccccaatttgcctgcttaacctcttaacgataatcacggaatggcgtttgaacatatatttccttaggagaaaccccttattaaccccaaatgtgaaaaccacagaagcaaaaagcgtaactcccgcattcatgtctagacgtgtacctagggaactttcagtccgaggtgtcccaatacttccctatgtgtgcaggagactgcaagtagtaaggaatatgtattctttgggttcattaacccaggggccgtgtgactggtttgattacacccgtataattgcgcaacctgttcgccaccgaactttgtcaatgtactcccgggatcctaattccgagggatgggaacactgggttgtaagtctcagcacatgtgattccttgttcagtgtgccccagcttccc

SEQ ID NO: 686661 - DNA, 1234 bp, Homo sapiens
  misc_feature (737)..(737): n is a, c, g, or t
aagcttggcacgagggacagacgggcaggcggggctgggcgcgggcggcggcggcccggaggagaacgggcggagggcgcgggccgaccgggcgcaccgaccatggcctccaaatgccccaagtgcgacaagaccgtgtacttcgccgagaaggtgagctccctggggaaggactggcacaagttctgcctcaagtgcgagcgctgcagcaagacgctgacgcccgggggccacgccgagcatgacgggaagccgttctgccacaagccgtgctacgccaccctgttcggacccaaaggcgtgaacatcgggggcgcgggctcctacatctacgagaagcccctggcggaggggccgcaggtcaccggccccatcgaggtccccgcggcccgagcagaggagcggaaggcgagcggccccccgaaggggcccagcagagcctccagtgtcaccactttcaccggggagcccaacacgtgcccgcgctgcagcaagaaggtgtacttcgctgagaaggtgacgtctctgggcaaggattggcaccggccctgcctgcgctgcgagcgctgcgggaagacactgacccccggcgggcacgcggagcacgacggccagccctactgccacaagccctgctatggaatcctcttcggacccaagggagtgaacaccggtgcggtgggcagctacatctatgaccgggaccccgaaggcaaggtcggtctcatgatgtgggntcacctgcgccccagacctgcagggcgcccctgcttggctctgctgggagagtgctcagccgcccagtcctgcctgcaagcccagggcgagtattggaggaggggcagccacgggcagagcaccatgcccatccccgagtctctggtgtgtctgccccctctggcatcctctgggcgtcccatgatcccttctgtgtctgcgtgtccgaatccccgtgtgaccctgtcccagcattttcccgccgaccctgcgtgtccccgtggcgctgtccgctctccctctcctgctgcccacccacctgccagtgttatttatgctcccttcgtgggtgatggccacgccctcaccatgtccctggcagagggcttccctccgggatcccctgcctggtgcccacactgcctcgcaagcgctcgccaccctcacgtggctcacctgctgttgagccttgtgctgtcaataaacggtttgaggattgcaaaaaaaaaaaaatttc

SEQ ID NO: 686662 - DNA, 105 bp, Homo sapiens
ggacccatgatagcggtgaggctatagtctgagcttgtcatagagggcactgtctcggtgggcttccagcagtcggaagatctcttcactggtcatcgacatcat

SEQ ID NO: 686663 - DNA, 698 bp, Homo sapiens
ttcggacccaagggtgagtgtagccagggtggtccacgatgtcttccctgccctccccttccctccactgttctcccgacccaccccagcggcctccctccacaggagtgaacaccggtgcggtgggcagctacatctatgaccgggaccccgaaggcaaggtccagccctaggctacagcggctctcatgatgtgggctcacctgcgccccagaccctgcaggggcccccctgcttggctctgctgggagagtgctcagccgcccagtcctgcctgcaagcccagggcgagtattggaggaggggcagccacgggcagagcaccatgcccatccccgagtctctggtgtgtctgccccctctggcatcctctgggcgtcccatgatcccttctgtgtctgcgtgtccgaatccccgtgtgaccctgtcccagcattttcccgccgaccctgcgtgtccccgtggcgctgtccgctctccctctcctgctgcccacccacctgccagtgttatttatgctcccttcgtgggtgatggccacgccctcaccatgtccctggcagagggcttccctccgggatcccctgcctggtgcccacactgcctcgcaagcgctcgccaccctcacgtggctcacctgctgttgagccttgtgctgtcaataaacggtttgaggattgcaaaaaaaaaaaaatttc

SEQ ID NO: 686664 - DNA, 572 bp, Homo sapiens
  misc_feature (372)..(373): n is a, c, g, or t
  misc_feature (430)..(430): n is a, c, g, or t
ggtgcgcgggccggcgccgggggttttggccccaaagggggacctccccccccttttcttctccacctaaaaggggttaagaccccttttttttttttggaccccggggggggcgcagccccaggggggaggtggattctcaaccaatcccccgggttgtgggggggatttttatgggttttttttctcccggccccggcgttaaaaggaattttttttttgaaaaagaaaaggggggggggcccccccccctggttttccctttttggggaaaacaccggggttttcttccccccccccggggggggcccgggggttttttttaaggagggtaattttttttcccccccccccctcccccccccccttttnnttgtttaaaaagaaaattatagggccccctttttttttgggaaccccccgggaaaanggggtttttttgcccccccaaaggggttttgggcccagttttcccccccttggggccccccccttgggtttgcccccttttcccccccctaaaaaaatggggttttttccccccctaaaaaaaacccgggtttggggcccca

SEQ ID NO: 686665 - DNA, 1283 bp, Homo sapiens
  misc_feature (479)..(479): n is a, c, g, or t
  misc_feature (621)..(621): n is a, c, g, or t
  misc_feature (638)..(638): n is a, c, g, or t
  misc_feature (663)..(663): n is a, c, g, or t
  misc_feature (939)..(939): n is a, c, g, or t
  misc_feature (1014)..(1014): n is a, c, g, or t
gggccccggatgttctccagacctctctcccggagggtgttttttgcctcctttgtgggtcctccccgggggggttccggggtgatatcccacacagtgtgttgacccacacccacggggggtacccacggtgttatttgcgccccacctttattggcgcccccttatttttttatagggtgggccaccaccctttgtttgtggggcacccccaagagtgtttggtggacccccgggatattagccccgagagcgttgggggtgacacccgggtttccctccggagaaattttccccccccgggggagaaaattttggtgctgagacacccacaaacaggcgggtcctccgggggggaaccccgcccgacaatgtgtgtcccccacgtgagaattttcttcgccgcgacaaaagtggtggcgcgagagcatcacacaacaaggggggagatatagagagggagagaggcgcgccccccnccgagaagtaatatatggtttctctcttatagcgcccttttgtttatagagaagacccacactgggagagattgtgtgtcccccttgtgggcgcacacaacaaaaatatatgcgcagaattctctatataagagagaaaggngggtagaaatatattgntgagagagacacacctacacagagngagatatgtggggactacactgtgtgtctcacacaaagagagagatatggcccccacacacacaggggggtgtcacacacagctgggccacacaaactcgtgagaaagagttttctacacacacatgtgtgtatacccgacgcgcacatcgcgcgtcgtgtgtgtgcgcacatatgtgtgtgtggtagtaacacacacacacacacgcgtttataagggcgacacacaagatttctttgtcaccacgaagaaaatttataatagtggcgctatatntgagagcaccactctataagggcacactctctataagagagcgccgcgagagatatagtctcttctctcgagaanacgctcgtgagaaggagaaaatgagatacacgagaaaaagagaatgagaaggcccacaagagagagataagaggaacctgggttctacaactaaagcgccacgcctgcgtccacacccacgagagagcacacacctttgttgaggagaaccacacatgtggagaaggagagcctgtaggctgctgggaacctatttctccctattgagaattcactggcacatataatataggtgtttaaaaaaaaaattaaggacctttggggtacca

SEQ ID NO: 686666 - DNA, 642 bp, Homo sapiens
tctagaggatcccgtagaagacgacaggaaggggagaaacggacagaagggagtaacaccggtgcggtgggcagctacatctatgaccgggaccccgaaggcaaggtccagccctaggctacagcggctctcatgatgtgggctcacctgcgccccagaccctgcaggggcccccctgcttggctctgctgggagagtgctcagccgcccagtcctgcctgcaagcccagggcgagtattggaggaggggcagccacgggcagagcaccatgcccatccccgagtctctggtgtgtctgccccctctggcatcctctgggcgtcccatgatcccttctgtgtctgcgtgtccgaatccccgtgtgaccctgtcccagcattttcccgccgaccctgcgtgtccccgtggcgctgtccgctctccctctcctgctgcccacccacctgccagtgttatttatgctcccttcgtgggtgatggccacgccctcaccatgtccctggcagagggcttccctccgggatcccctgcctggtgcccacactgcctcgcaagcgctcgccaccctcacgtggctcacctgctgttgagccttgtgctgtcaataaacggtttgaggattgcaaaaaaaaaaaaatttc

SEQ ID NO: 686667 - DNA, 426 bp, Homo sapiens
gcacgagcagaatccaggctcatatcttgtaaattattaatcctctttgagctgatattatccttagaattttcacttttggtcttgttttctggtagtttcgaatggctgggatcttcttcatcctgatctgtttcaggctcctcaaattcgaatgcatcctggaacaaaccgaataaatttagcatgtttaataattgtaaacatttttccagctctatccataactcacctcggtcgtctgtatttacagcaattccataatgtgccagtaatttatttctttcctcatcagtggggaaactatcggggttggtctcgttaatattccccgtgtcatgatattgctgcaaaatgggcagaaaatgtttcaggaggaaatggccagtctccgagtctctagtgagtgtcaaagggatctcattg

SEQ ID NO: 686668 - DNA, 407 bp, Homo sapiens
gagttttaatgctagcctttcaaaatcctattcgtttataaaagtaaggaaatttactcattccaggtaaaatgtagttaccaaagcagtttgagaggcagacttattaccattcaatctggggtctattgggctctggcacataagaacaagaaaggcaatggtgcaaagaaagcctgggttctcatccagccttcatctttaaaaagctctgagatcttggatagttcacttaatttgtctgttttcagtgatctcatctattaaatggacttactatcattacaaggtaaaatttaatcaatgttaccctttagttgtcatctttatctttctccctaagatagtgtagtatcctgtttctgccttggagccacgctgcctgggtttgtcatttatgagccatt

SEQ ID NO: 686669 - DNA, 960 bp, Homo sapiens
agttgttccggacacatagaaagataacgacgggaagagcggggccgctttggggtccaggcaggtttgggggcctcctgtctggtgggaggaggccgcagacgcagaaccctgtcgtcactttggattggagaccggttttcccggcaatcattgtaccccctggatctttaatgggggggctgggggagaacgagtatctcagctgggaaagggaccggggctcccagaatttgcggtcttccagacagccccgtgggaagtctggaaagcacaatggcacttgaaggaaaacccaaggagttggcagattgtgctggggctaacatgttgggcccgacgggttccccgatgattgtgttcaaggattacttcaccccacgaggccccggtgtgggcgccaggagatcccccacagcaaaggaagcgacacatggtcgcctaaaggaggtggggattaacttagcacatgtgcggccaggcacagtgggagggacctttgtgggacaaagggggcattcacccaaagaactccaaggtggtacattcgtggattcaagacaaaagtggcctttccccttcccaagagctcggagaaacgacaaggccctgtccactcgacgttgtggtgggtcccaacagaagccccccacacagccaaggggtttggacagtcactaccattggatagaaccgtaggaaagcactggggcaccagacggaccctgctggcttcgggacaagacaaagtgggtacatgggccattttgacggcactcgttgttttgaacggacgacacacgggccaaaatccgagttcaggacccctgaccttcccggctgggattttcacacaggttcccattaatcgtggaagatcaatctatcctctcccaggttggaaagattattccagttgagcccagcatgggtcaaattcaccgaacttcagaaaatacc

SEQ ID NO: 686670 - DNA, 1623 bp, Homo sapiens
  misc_feature (1126)..(1126): n is a, c, g, or t
ggctggggaccttggggcaggtggtctccctccagaagagccctgtgttcagccagccctgtcctccagagcaagccccacaggtagcaaagtcagggagggtaatggcttagccccaggctcccaagctgggcagaacagggcagggagctggagagggttggcagtgggcccatgaatccagcctgggcaaggccctgctgtgagggacccctagggacccctgggcctgccagggaggaagggctgcccagaaaaggtactgactgatgcctcctcaccatcttctgccttggctggcacaggtcccaagtgcagagggggagctggtcaggctggtcagtcgggcgggggggcggggggcatgtttctggcctgctgtcaccatggaaatggcagtggctgcagggtgtgtgtgcaagggaggagggtgctgccacagagagcccagccaggaccaccatgaaagccaggagcaccgagggcctctggttggctcacaaacatgcctggtgcaccaggcagagggaacagccgagaaggtgagctccctggggaaggactggcacaagttctgcctcaagtgcgagcgctgcagcaagacgctgacgcccgggggccacgccgagcatgacgggaagccgttctgccacaagccgtgctacgccaccctgttcggacccaaaggcgtgaacatcgggggcgcgggctcctacatctacgagaagcccctggcggaggggccgcaggtcaccggccccatcgaggtccccgcggcccgagcagaggagcggaaggcgagcggccccccgaaggggcccagcagagcctccagtgtcaccactttcaccggggagcccaacacgtgcccgcgctgcagcaagaaggtgtacttcgctgagaaggtgacgtctctgggcaaggattggcaccggccctgcctgcgctgcgagcgctgcgggaagacactgacccccggcgggcacgcggagcacgacggccagccctactgccacaagccctgctatggaatcctcttcggacccaagggagtgaacaccggtgcggtgggcagctacatctatgaccgggaccccgaaggcaaggtcggtctcatgatgtgggntcacctgcgccccagacctgcagggcgcccctgcttggctctgctgggagagtgctcagccgcccagtcctgcctgcaagcccagggcgagtattggaggaggggcagccacgggcagagcaccatgcccatccccgagtctctggtgtgtctgccccctctggcatcctctgggcgtcccatgatcccttctgtgtctgcgtgtccgaatccccgtgtgaccctgtcccagcattttcccgccgaccctgcgtgtccccgtggcgctgtccgctctccctctcctgctgcccacccacctgccagtgttatttatgctcccttcgtgggtgatggccacgccctcaccatgtccctggcagagggcttccctccgggatcccctgcctggtgcccacactgcctcgcaagcgctcgccaccctcacgtggctcacctgctgttgagccttgtgctgtcaataaacggtttgaggattgcaaaaaaaaaaaaatttc

SEQ ID NO: 686671 - DNA, 541 bp, Homo sapiens
agtcgtggcggacacgtaggtcggcgggaaaatgatgtgggctcacctgcgccccagaccctgcaggggcccccctgcttggctctgctgggagagtgctcagccgcccagtcctgcctgcaagcccagggcgagtattggaggaggggcagccacgggcagagcaccatgcccatccccgagtctctggtgtgtctgccccctctggcatcctctgggcgtcccatgatcccttctgtgtctgcgtgtccgaatccccgtgtgaccctgtcccagcattttcccgccgaccctgcgtgtccccgtggcgctgtccgctctccctctcctgctgcccacccacctgccagtgttatttatgctcccttcgtgggtgatggccacgccctcaccatgtccctggcagagggcttccctccgggatcccctgcctggtgcccacactgcctcgcaagcgctcgccaccctcacgtggctcacctgctgttgagccttgtgctgtcaataaacggtttgaggattgcaaaaaaaaaaaaatttc

SEQ ID NO: 686672 - DNA, 124 bp, Homo sapiens
tgagtcattagcttgtattcgtccatctgttgtcacatgacatatgggaacagttttccctgaatcagttgacaaatgttatcaacagataatttcattaggggaagtaaaactgtgatcttga

SEQ ID NO: 686673 - DNA, 751 bp, Homo sapiens
ggtgcttctgggagctgcgtgccctctcccccacggcgagccggcctgcacgttctggaagcctccaggtgatgggtcgggggagtctgtggactcctccctcagcacccaccttctgccccagcacgacggccagccctactgccacaagccctgctatggaatcctcttcggacccaagggagtgaacaccggtgcggtgggcagctacatctatgaccgggaccccgaaggcaaggtcatgatgtgggctcacctgcgccccagaccctgcaggggcccccctgcttggctctgctgggagagtgctcagccgcccagtcctgcctgcaagcccagggcgagtattggaggaggggcagccacgggcagagcaccatgcccatccccgagtctctggtgtgtctgccccctctggcatcctctgggcgtcccatgatcccttctgtgtctgcgtgtccgaatccccgtgtgaccctgtcccagcattttcccgccgaccctgcgtgtccccgtggcgctgtccgctctccctctcctgctgcccacccacctgccagtgttatttatgctcccttcgtgggtgatggccacgccctcaccatgtccctggcagagggcttccctccgggatcccctgcctggtgcccacactgcctcgcaagcgctcgccaccctcacgtggctcacctgctgttgagccttgtgctgtcaataaacggtttgaggattgcaaaaaaaaaaaaatttc

SEQ ID NO: 686674 - DNA, 350 bp, Homo sapiens
cccatctggcgaggcagtctcccaaagtgctgggattacaggtgtgattctctgtgcccagcccaacaaactgatattgagcctccactgtgttccatgcactgtacccggttcttgatgatacagctgagatcaaggtagacagatccctggtctcatagaccatctattctaatggggggcattgataatatagttataatgaaatcataggcgttgataagagtgccgcaagaagtaaagagggtgatgaggatgagatgaatcagaggaggctgacttaaaaatggtggtcagcacaggaccgtctgaggaggcacctttcacagagactgcctacacagaggagg

SEQ ID NO: 686675 - DNA, 1017 bp, Homo sapiens
aagcttggcacgagggacagacgggcaggcggggctgggcgcgggcggcggcggcccggaggagaacgggcggagggcgcgggccgaccgggcgcaccgaccatggcctccaaatgccccaagtgcgacaagaccgtgtacttcgccgagaaggtgagctccctggggaaggactggcacaagttctgcctcaagtgcgagcgctgcagcaagacgctgacgcccgggggccacgccgagcatgacgggaagccgttctgccacaagccgtgctacgccaccctgttcggacccaaaggcgtgaacatcgggggcgcgggctcctacatctacgagaagcccctggcggaggggccgcaggtcaccggccccatcgaggtccccgcggcccgagcagaggagcggaaggcgagcggccccccgaaggggcccagcagagcctccagtgtcaccactttcaccggggagcccaacacgtgcccgcgctgcagcaagaaggtgtacttcgctgagaaggtgacgtctctgggcaaggattggcaccggccctgcctgcgctgcgagcgctgcgggaagacactgacccccggcgggcacgcggagcacgacggccagccctactgccacaagccctgctatggaatcctcttcggacccaagggagtgaacaccggtgcggtgggcagctacatctatgaccgggaccccgaaggcaaggtccagccctaggctacagcggctctcatgatgtgggctcacctgcgccccagaccctgcaggggcccctggttggttttccctttcctggtgcccacccacctgccagtgttatttatgctcccttcgtgggtgatggccacgccctcaccatgtccctggcagagggcttccctccgggatcccctgcctggtgcccacactgcctcgcaagcgctcgccaccctcacgtggctcacctgctgttgagccttgtgctgtcaataaacggtttgaggattgcaaaaaaaaaaaaatttc

SEQ ID NO: 686676 - DNA, 331 bp, Homo sapiens
ttgaactgggtgtttaaaaatgtgaattcctggtattgtatactgtaattgattacaagggctgggggggtgtcaaaaaacttgacaggttgtgttgatgctcttagtagagtcttgaaaagaaaatattaccccggccaaaaaggcagaagtttcaaaaaattttttgtctttgtttgcattggataactttaacgagtgagtttaaaattatttaatttccttaaaaaaaaagccccctttggaaaaaaaactggggttaagaaaaacgtaaaagccctgtttttatttttattttaaaaaatttaaattgactttccccctgcgccca

SEQ ID NO: 686677 - DNA, 100 bp, Homo sapiens
acaaaaacacccattaccataaacttagtggagacccacgcaaacatatagagctcaactatgagcaaacttgacctcccgagtcgaggtcaggcctgtc

SEQ ID NO: 686678 - DNA, 351 bp, Homo sapiens
cgtaattacgcagttacacgcattcactctggatgcatttcacactgctgcatggaatccagtgcattaaatcacactgcatggaatccactgcattcaatcggtatcaattacaccaagctgcatggaatccacctcattcaattgagatatactgcagcactctgcatagaatccactgcattcaatcgtgcttcatggaattcactgcattcaattgggatcaattgcgccatgctgcatggaagccactgcattcaatcaggatccattgtgctacgctgcatggattccaatgcattcaatcaggatccattgggccaagctgcttgaaatccactccattcactc

SEQ ID NO: 686679 - DNA, 1161 bp, Homo sapiens
atgagcacagggcagacagttatgcaggggtcacagttattgataaaccattatgagcctgcaaggcacattttccagcatcattctatcaccatgcagcaaaccagccttcgaaccaagtcattatgtgcacagtgcactgcagcacatctcagccactatctcccactccgtagcctgccactttcacagtctccagccagcaagcatcacgcatccgtctagccttatctcatcagtgccctcaagaatcacctgcacagcattaatctctcttcgcgtcagcacagccaccagctgttcagcgcctatctctctcttgcgacactcgcagccaagccacgcctcgcaccgtgcacattttttccgatcacacgacacaactcttgggaactttgccagagcacctctcacattccttgtcacgtcctcttaagagaccacaccaaggttgcgcttctccaatcacacaaggcacggttcagttatcctaatacattcaaaaacccctgtggaacattggcaccttcacccagccaatttccttctctaagccgcttgccacagcagacagcggcatcgccacaggtcaaatagagttaggtaggtaacaatatggcttcacacaacaattttcaaacatttatatctccactcccttttctacattctattgccctttaccttcaaaaccacaagagtacccttggtttcatttcaacccccaagcgggcaccaaccgtcggcagcaacacgcttccgtcttctggcacaaacccagcgcacttaattttcaaccgccattcctttcaacgtcttcagcagcctcaatttcaccgcacatacagacttaacgactttgggcaagcaggccgtaaccttaaccccaccgtgggctacgggggcccttcacactagacttacaacaaaacctcaaacacccttcgactgcgacttttacaagcaaattttgggacagagtttacgttatcacgttacaagacttcacatttggctagaccactttacgttaaacacaaataggatatgataggctcccatacttaggtgggcatattctacccgtgtctcgcacgacagtacaatgtcttgccggcacacgacaagcgacctcggttcatggcacgaagcgttatgtgc

SEQ ID NO: 686680 - DNA, 191 bp, Homo sapiens
ttgcctggtgacacccggctcatgagaatgccgccggtagtccatgactggatgagcgccgccggaggccgccgctctgcgaatggaaaggaacggctcagacggatttacccacggccgatccaaaggccttggtgtggatatccgccttgcaaaccattcagaagccaacagtggcgaccactgtgggt

SEQ ID NO: 686681 - DNA, 238 bp, Homo sapiens
tctgctcttcttatggtgttttcaacacaaatctagcaaaagagagatattttgtaaatagaaggaatcaaaagaaaaaatgtgtaatatttatgattctagaatctgactaagacatgtctcttcagtctactaagtgttttcgagttcaggcacatccagataatgcctcttggttacaccagcatctctgcgataaggcttactatgtgcccctgcctgattcagcggggtcggg

SEQ ID NO: 686682 - DNA, 589 bp, Homo sapiens
  misc_feature (21)..(21): n is a, c, g, or t
  misc_feature (89)..(89): n is a, c, g, or t
  misc_feature (96)..(96): n is a, c, g, or t
  misc_feature (135)..(135): n is a, c, g, or t
  misc_feature (143)..(143): n is a, c, g, or t
  misc_feature (148)..(148): n is a, c, g, or t
  misc_feature (155)..(155): n is a, c, g, or t
  misc_feature (209)..(209): n is a, c, g, or t
  misc_feature (297)..(297): n is a, c, g, or t
  misc_feature (316)..(316): n is a, c, g, or t
  misc_feature (540)..(540): n is a, c, g, or t
  misc_feature (571)..(571): n is a, c, g, or t
  misc_feature (573)..(573): n is a, c, g, or t
  misc_feature (576)..(576): n is a, c, g, or t
tttaaacaactgaaccgcccnttacacatgactcttcttggccatttaggttaattcttgaactccaagctttaaattcctcccatgantcagcgntcacctcattcacacattttcatagagctccttggacantgaacttntaaanggaaagntctaccctggagccaggagcatcagggttggcttgggaaccatgagaggttgcncccagggctaagccttggccaggccccggcagcactgcttacttgggaggagccacttcacctttgtattagttattaaaaaatatantttgggctgggcgcatgtngcacgcctgtaatcccagcactttgggagtccgaggcatgcggatcacttgaggtcaggagttcgagaccaccctggccaatatggtgaaaccccatctctactaaaaatacaacaaagttagccgggcgtggtggcaggcgtctgtaatcccagctgcttgggaggctgaggcaggagaatcacttgaaccctggaggtggcggttgcagtgagcacagatcnatgccactgcactccagcctgggcaacaaananacnattcgtctcaaaa

SEQ ID NO: 686683 - DNA, 280 bp, Homo sapiens
accagagaatccggtattgtggacggggtgggtgtggtcgacagagatccttgtcagatatcctatctgcttgatgccgaagcggggggcccaggtacgatccagggcgatgtacattgtcattgtccaggtcacaggtctcgcaaaagcgggtggtgcaatgctccatggggatgaggggagcacgcaggtggagccagctcggtgtgggagaggtacccgtcaatggggtgctggtccatgctggccgaactgccagtgtacagtgaagatgtacatg

SEQ ID NO: 686684 - DNA, 341 bp, Homo sapiens
  misc_feature (68)..(68): n is a, c, g, or t
  misc_feature (81)..(82): n is a, c, g, or t
  misc_feature (102)..(102): n is a, c, g, or t
ttaaattcgcggccgcgtcgacgggagaggatcagaaaaatataactattgggtactaggcttagtancctgggtgacaannaataatctgtacaacaaacntcctgtttcttcttttataggcaaacgtgagtttgcctatataagaaacctgcacatgtacctctgaacctaaaataaaagtttaagaaaaaaaatacaaattaatgagatatcatctcacatccattgcaatggctattattaaaaagtcaaaaaataatagatggtggtgaggctgtggagcaaaaggaactcttatacactgttggtgagaatgtaatttagttcagccgtcgacg

SEQ ID NO: 686685 - DNA, 210 bp, Homo sapiens
atgcatctgatagtgatagcaactagagtagacacacgatataccacctccgctatcataatcatacgctataccccaacggcgtcaaagtatttagcttgactcgccacactccacggaagcaatactgaaatgatctagctagcagcgctctagagccctaaggatacatcttaactcatacaccgtcaaagctggactagacttggg

SEQ ID NO: 686686 - DNA, 373 bp, Homo sapiens
tcctcatcagtgcccatcctgttgagtatggtctcatatggtcaatagaagtaaagtcttcccgttacgcaggctttatgcatgtataaaacactctcatggcttgttctcaataggcttatgatagtacgactcaggttttgtttcagttcagcgtcacccactcatggtgcttgcaagtacacctggtaatcaaatactgggttgtctcagatactctccaaagtgtacttgttggaataagctggtaagaatcgagtataatacctgtggtccgtcatcattctctcggggtataacagagccatgtttcgcactagcatttcaccccagtgatgtacaatgaacggtgcttaagagagacacagtttat

SEQ ID NO: 686687 - DNA, 634 bp, Homo sapiens
  misc_feature (175)..(175): n is a, c, g, or t
ccccccccaccccccctcccttttgtgtgggcaccagagagtgggggcccgagggttttttttcccacaaaggggggtgaggaacccaggggagagggcaccctcttttctctcccctggtgtggggggccggtgtcttcttttattaaccctttgaagcgggcccgctctgtgntttttccccccccccggggggcgtcccggggtgttagggggggccttttttccccccccctggtttttttttctcttcccccggtgttttgggggggtagggggccccacctttttttcccaacccccccagggggagcccctttttcccctttgtggggggccttcccccctttatttgggtggccccccgggccctttccctcccccttggtttttttggggccaagcccccccccccctttttgggggggttgattggggtttagggggggggtcccccccccccttttaagggcccccccattttttgggcccttttccgggtgggggagcctttttggggcccccagggggtcctcccttggaaattttttgggggggggtcccccggggggtgggccccaaaaccctttaataaggggggttctttacttgggtttatttaacgggggttccc

SEQ ID NO: 686688 - DNA, 476 bp, Homo sapiens
ggcgattgggtaaggatgctgtgcaactccacccatgcatgtgagaccagcagttccctcttccttcccccagtgattctctggaagataaatctctacgctaaggtggataggactccatagtattcagtgacgtgctatatttattttttaaatgaatgtttcttggggcgggcacagcagagtgcatgagccctggagttcgagaccagcctaggcaacatggcaagagcccatgtctataaaaaatacaaaaaattagccaggtgtggaagcacatgcctgtattcccagctacttgggaggctgagatgggagaattgcttgaacccgggagacagaggttgtgagctgtgatcgcacctaggcggcagtgagaccctgtctcaaaacaacaaaaaaaacttccttgctttttattaatttttcactgtaggaagtttttaaaagactcaaagtcatataaaaaaaaaaaa

SEQ ID NO: 686689 - DNA, 131 bp, Homo sapiens
aaataggtcattacagatgtaattaggttattttaaaaaattaggaattagggcaattccagatgtaattagttaaaatgaaggtcatactcggatagggtggcccctcatccataatgactggtgtcctc

SEQ ID NO: 686690 - DNA, 206 bp, Homo sapiens
ctagatcatccgctaaccttcacgccaatggcgcctcaatataacttaatctggcctcttcctacacatcgggacgaggcctataataaacggatcatttctactactccagcaacctgtaacacatcaggcattattcctccgtgcttgcaacctatagcaaccagccttcatagagctactgtacctcccgctgacggccaaaa

SEQ ID NO: 686691 - DNA, 145 bp, Homo sapiens
  misc_feature (33)..(33): n is a, c, g, or t
  misc_feature (62)..(62): n is a, c, g, or t
tccttagtctgggaagctagagacccactaaangaagcaaaacagagactcagcaagggggnaaaagatacaaccaggcaccaagtgctgctggatggactggttctccagggtttgtaccagttgctggagccccgaatgattg

SEQ ID NO: 686692 - DNA, 298 bp, Homo sapiens
atctctagacggatcccctgcagcagacacagcatcaaatttttagatgttatcaaaccattctatgctgttctaccagtaattcagaaaccggacagcggaaaatccagtttagagagaaggttctgtggactgctatgacgctcttcattttcttcgtgtgttgtcagatcccactgtttggaatcatgtcatcagattctgcagatcttttctactgtactagatgtttttctggcttccaatagaggaactttaatggaattgtgtttctcctccattgtaacatctggtctga

SEQ ID NO: 686693 - DNA, 100 bp, Homo sapiens
tatccttatcactctttatttgctgctgtttaagttgccacctcccctcccaataaaaattcacttacacctcctgaccatttgtagttcttggtattca

SEQ ID NO: 686694 - DNA, 304 bp, Homo sapiens
  misc_feature (121)..(122): n is a, c, g, or t
aaggcagggggcctgccagagctgggtgtgggtatttaggccctcacgtgccatgcgagcagggccagaccttgaggaaagggagccccatgctggtctttttggatttaaaatgtttcgnntggcctgttgaactcagttccagtccggtcttgtttttagatccctgttcccatagagagtaggagatggggcccaggagacatgtttggggttccgtgatcatcgcatggcccccacccttcaccccttcgttttgtgcggagcccatgacaagaatctttaaatagaatcctgaactcca

SEQ ID NO: 686695 - DNA, 120 bp, Homo sapiens
aatatctgctaccattaattgcgtgtgagccatcatcacaccagtgcagtccagcctgtgtgcaacaaatgtgaaaccctttctcaaaataaaatacaaatgtgatgtgccatgtgcaat

SEQ ID NO: 686696 - DNA, 1017 bp, Homo sapiens
acagagaggctacttccccttatcatagaacgagcttatcacctattcgatgatcacggccgctcagtaatcattgaccttgatcgggcttcctagatccgtgatatgcccttttcctaagcgactcgatcgagacaaaaggtaagctaatagctaagatcttcagagcgctgccaggaacactcacgagaagctcgtctggatagctagtgccgtgtccgcgcgcactcagtgcactgagtcctcagtacgtgcctcccatcaccgtacgcgatccttaacgataacagacgaggtgaacgatcgctcccttaacatcaaatcgaataggccaccaatggtactgaacctgacgagtacaacgacatacggaggactagagtacgttcaactgcgctacagtatcttgcgcccgcattagtgcctagaaccaggcgagctgggacttcctgtgacgttgacgatcgagtagtactcccgacttgaagcccccattcgtataataagtgacgagtcgacaagcacgtcattgcactcatgagctgtgccgcagattaggcttatacaaacagatgcggattcccggcacgtctaaaccaagacacttgtcagcgctatgacgaccgggggtatactacggtcaatgctctgaaatctgtggagcaaacacagtttcatgcccatcgtcctagaattaattcccctagaaatctttgccctacgggcccgtatgtacgcgtatagaacgccatctacccctctagagcggaaaacatcccagaccatgagacaggaaacaggcagcagaagagctgaaacacaaagagggccgacgacccggaaaatcgagagacacggggcctcgcgaacacgacccatctgaggcccaccgcgaggaagacacgaggagaatgtcacaaggcgccagtacaggagacatgtgcacgcaggaaacgggcacccaaggaagacagacggaaaaaagacggaaaacagacactcggcgcgcgcgaacaa

SEQ ID NO: 686697 - DNA, 1010 bp, Homo sapiens
aagcttggcacgagggacagacgggcaggcggggctgggcgcgggcggcggcggcccggaggagaacgggcggagggcgcgggccgaccgggcgcaccgaccatggcctccaaatgccccaagtgcgacaagaccgtgtacttcgccgagaaggtgagctccctggggaaggactggcacaagttctgcctcaagtgcgagcgctgcagcaagacgctgacgcccgggggccacgccgagcatgacgggaagccgttctgccacaagccgtgctacgccaccctgttcggacccaaaggcgtgaacatcgggggcgcgggctcctacatctacgagaagcccctggcggaggggccgcaggtcaccggccccatcgaggtccccgcggcccgagcagaggagcggaaggcgagcggccccccgaaggggcccagcagagcctccagtgtcaccactttcaccggggagcccaacacgtgcccgcgctgcagcaagaaggtgtacttcgctgagaaggtgacgtctctgggcaaggattggcaccggccctgcctgcgctgcgagcgctgcgggaagacactgacccccggcgggcacgcggagcacgacggccagccctactgccacaagccctgctatggaatcctcttcggacccaagggagtgaacaccggtgcggtgggcagctacatccatgatcccttctgtgtctgcgtgtccgaatccccgtgtgaccctgtcccagcattttcccgccgaccctgcgtgtccccgtggcgctgtccgctctccctctcctgctgcccacccacctgccagtgttatttatgctcccttcgtgggtgatggccacgccctcaccatgtccctggcagagggcttccctccgggatcccctgcctggtgcccacactgcctcgcaagcgctcgccaccctcacgtggctcacctgctgttgagccttgtgctgtcaataaacggtttgaggattgcaaaaaaaaaaaaatttc

SEQ ID NO: 686698 - DNA, 873 bp, Homo sapiens
aagcttggcacgagggacagacgggcaggcggggctgggcgcgggcggcggcggcccggaggagaacgggcggagggcgcgggccgaccgggcgcaccgaccatggcctccaaatgccccaagtgcgacaagaccgtgtacttcgccgagaaggtgagctccctggggaaggactggcacaagttctgcctcaagtgcgagcgctgcagcaagacgctgacgcccgggggccacgccgagcatgacgggaagccgttctgccacaagccgtgctacgccaccctgttcggacccaaaggcgtgaacatcgggggcgcgggctcctacatctacgagaagcccctggcggaggggccgcaggtcaccggccccatcgaggtccccgcggcccgagcagaggagcggaaggcgagcggccccccgaaggggcccagcagagcctccagtgtcaccactttcaccggggagcccaacacgtgcccgcgctgcagcaagaaggtgtacttcgctgagaaggtgacgtctctgggcaaggattggcaccggccctgcctgcgctgcgagcgctgcgggaagacactgacccccggcgggcacgcggagcacgacggccagccctactgccacaagccctgctatggaatcctcttcggacccaagggagtgaacacccacctgccagtgttatttatgctcccttcgtgggtgatggccacgccctcaccatgtccctggcagagggcttccctccgggatcccctgcctggtgcccacactgcctcgcaagcgctcgccaccctcacgtggctcacctgctgttgagccttgtgctgtcaataaacggtttgaggattgcaaaaaaaaaaaaatttc

SEQ ID NO: 686699 - DNA, 358 bp, Homo sapiens
  misc_feature (171)..(171): n is a, c, g, or t
  misc_feature (188)..(188): n is a, c, g, or t
  misc_feature (264)..(264): n is a, c, g, or t
  misc_feature (301)..(301): n is a, c, g, or t
  misc_feature (355)..(355): n is a, c, g, or t
agaggtgatctagaggatcccgggacgagcatcgttacagaatccacttcagaatcccttctcgcgggtccctcctttttctcacctcccccaaatccaggatttcccggatcttttctatttctcgggcctaggtgtcccggtggcagtcatgaagggcccatggcctcngacactatagtgagacngagggtgggcatgttcttacggtgtattggtaggagaaagctttaaatccttctcttggttaagagtggaccatcngcaagacaaacggtcatctccacgatttggcggtgtnattatgcttaccgagtttccatctctttattttaccagatggttttaatctcanggg

SEQ ID NO: 686700 - DNA, 406 bp, Homo sapiens
gcgcacccataatactacgcacagctcacaccagtgtctccccccaacaggattcacgcgctgacggctactcctctacccgatagcgcactaatctctgcaccatgccacgcaggtgccaccggacgattccacctccacaatctacttccatttcagatactcactccaccgaccccgactctatcaggtcctgtcctcagatcccccccgcaccttactaataccacttccatattccgccctaccaggacgaaagtaccccctaatccatcttcccccggggtaagattaattcccgtatccccggactacactttccttctagattcccggtccactcccgccccctcctacgcctctcacttaaggtaagagctgctatagatgtggctgcgctgctacg

SEQ ID NO: 686701 - DNA, 1565 bp, Homo sapiens
  misc_feature (996)..(996): n is a, c, g, or t
aagcttggcacgagggacagacgggcaggcggggctgggcgcgggcggcggcggcccggaggagaacgggcggagggcgcgggccgaccgggcgcaccgaccatggcctccaaatgccccaagtgcgacaagaccgtgtacttcgccgagaaggtgagctccctggggaaggactggcacaagttctgcctcaagtgcgagcgctgcagcaagacgctgacgcccgggggccacgccgagcatgacgggaagccgttctgccacaagccgtgctacgccaccctgttcggacccaaaggcgtgaacatcgggggcgcgggctcctacatctacgagaagcccctggcggaggggccgcaggtcaccggccccatcgaggtccccgcggcccgagcagaggagcggaaggcgagcggccccccgaaggggcccagcagagcctccagtgtcaccactttcaccggggagcccaacacgtgcccgcgctgcagcaagaaggtgtacttcgctgagaaggtgacgtctctgggcaaggattggcaccggccctgcctgcgctgcgagcgctgcgggaagacactgacccccggcgggcacgcggagcacgacggccagccctactgccacaagccctgctatggaatcctcttcggacccaagggagtgaacaccggtgcggtgggcagctacatctatgaccgggaccccgaaggcaaggtcatgatgtgggctcacctgcgccccagaccctgcaggggcccccctgcttggctctgctgggagagtgctcagccgcccagtcctgcctgcaagcccagggcgagtattggaggaggggcagccacgggcagagcaccatgcccatccccgagtctctggtgtgtctgccccctctggcatcctctgggcgtcccatgatcccttctgtgtctgcgtgtccgaatccccgtgtgaccctgtcccagcattttaaggcgtgaacatcgggggcgcggnctctacatctacgagaaaggcccctggcggagggggcccggcaaggtccaccgggcccccattcggaggtcccccggcgggcccgagggcagaagggaagccgggaaaaggggcgaaagcggggcccccccggaagggggccccaggccagaaggcccttcccaggtgttcaccaccaacttttcaccggggggaaggccctcaaacaaggtttgccccggggccttggaagcacagaaagcgtggttcacttcccggttgaacacacgggatgaaccgtccctctatgggggccaggggatcttggcggcccgtggtcctggggcattggggcttgttgcgatggcccgccctttgcgcgcggcaaggagacacctgtgagtcccccccggggggcggccctcccccgtgagagcggggccctctcctttccccgccgggtgggttttacacccccggggttgcgtgggtggggcacgtctcacctcttttttatgacccgggggaacccccctatgggcaccggggtctagcccccccttagggtcttaaccgggggggtccccctt

SEQ ID NO: 686702 - DNA, 3081 bp, Homo sapiens
gagcggggggcccggaagtggtccctgtagaaccactgtggcaccgctactccgtgccgcgcccgtcgagcattgcgttgctgcattgcgccccaccgactccactatgttgaagaaattcgacaagaaggatgaggagtcaggtggaggctccaacccattccagcaccttgagaagagtgcggtactccaggaggcccgtgtatttaatgaaactcccatcaaccctcggaaatgtgcccacatcctcaccaagattctttatctcataaaccagggggagcacctggggaccacggaagcgaccgaggccttctttgccatgaccaagctctttcagtccaatgatcccacactccgtcggatgtgctacttgaccatcaaggagatgtcttgcattgcagaggatgtcatcattgtcaccagcagcctaacaaaagacatgactgggaaagaagacaactaccggggcccggccgtgcgagccctctgccagatcactgatagcaccatgctgcaggctattgagcgctacatgaaacaagccattgtggacaaggtgcccagtgtctccagctctgccctcgtgtcttccttgcacctgctgaagtgcagctttgacgtggtcaagcgctgggtgaatgaggctcaggaggcagcatccagtgataacatcatggtccagtaccacgcactagggctcctgtaccatgtgcgtaagaatgaccgcctagccgtcaataagatgatcagcaaggtcacacggcatggccttaagtctccctttgcctactgcatgatgatccgggtggccagcaagcagctggaagaggaggatggcagccgtgacagcccactgtttgacttcatcgagagctgcttgcgcaacaagcacgagatggtggtgtatgaagccgcctcggccatcgtcaatctgccaggctgcagtgccaaagagctggccccggctgtgtcagtgctccagcttttctgcagctcacccaaggctgctctccgctatgctgctgttcgtaccctcaataaggttgccatgaagcatccgtcagctgtgacagcttgtaatctggatctggagaacctggtcacagattcaaaccgcagcattgccacgctggccatcaccaccctccttaagacgggcagcgagagcagcatcgaccgcctcatgaagcagatctcctccttcatgtcagaaatctcggatgaattcaaggtggtggttgtccaggccatcagtgccctgtgtcagaaatatcctcgcaaacacgccgtccttatgaacttcctgttcaccatgctgcgggaagagggtggctttgagtataagcgcgctatcgtggactgcatcatcagcatcattgaagagaactcagagagcaaggagacagggctgtcacatctgtgcgagttcatcgaggactgcgagttcacagtgctggccacccgtattctacatctcctgggccaggaggggcccaagaccaccaatccctcaaagtacatccgcttcatctataaccgagtggtcttggagcatgaggaggtccgggcaggtgctgtgagtgctctggcgaagtttggagcccagaatgaagagatgttacccagtatcttggtgttgctgaagaggtgtgtgatggatgatgacaatgaagtaagggaccgagccaccttctacctaaatgtcctggagcagaagcagaaggcccttaatgcaggctatatcctaaatggtctgactgtgtccatccctggtctggagagggctctgcagcagtacactctagaaccatcagaaaaaccttttgacctcaagtctgtgcccctggccacggcgcccatggcagagcagagaacagaaagtacccccatcacagcagtcaaacagcctgagaaagtggcagctaccaggcaggagatcttccaggagcagttggcagcagtgccagagttccgcggtcttgggcccctcttcaagtcctcgcctgagcccgtggccctcaccgagtcagagacggagtatgtcatccgctgcaccaaacacaccttcaccaaccacatggtttttcagtttgactgcacaaacacactcaatgaccagaccttggagaatgtcacagtgcagatggagcccactgaggcctatgaggtgctctgttacgtgcctgcccggagcctgccctacaaccagcccgggacctgctacacactggtggcactgcccaaagaagaccccacagctgtggcctgcacattcagctgcatgatgaagttcactgtcaaggactgtgatcccaccactggggagactgatgacgaaggctatgaggatgagtatgtgctggaagatctggaagttactgtagctgatcacattcaaaaggtcatgaaactgaacttcgaagcagcctgggatgaggtaggggatgaatttgagaaggaggaaacgttcaccttgtctaccatcaagacacttgaagaggctgtgggtaatattgtgaagttcttgggaatgcacccttgtgagaggtcagacaaagtgccggataacaagaacacccacacgttgctcctggctggtgtgttccggggtggtcatgacatcctggtgcgctcccggctgctgcttttggacacagtgacaatgcaggtgacagccagaagtttggaggagctgccagtagacatcatcttggcatctgtgggataagaggccagcctgcataggacctcatacccttccccaacactacctggaagttgtgccttcctcatgaaactggcagaaaccccttcccaagcttctgtattgaaaaacaattaggaatcattgcagatttttttttattctgctcccacctcccacccgggactacttgctggtgacttttttttttttttttttttaaataggggatgattttagcttgtcctaaatcttgctgtccacccttccaggaaagggacattgtaaatgaataaaacattctcaactcctcttgaatctatcccccaagaaaccatcttatccctgtaataaatcagcatgtatttattgaa

SEQ ID NO: 686703 - DNA, 785 bp, Homo sapiens
aagcttggcacgagggacagacgggcaggcggggctgggcgcgggcggcggcggcccggaggagaacgggcggagggcgcgggccgaccgggcgcaccgaccatggcctccaaatgccccaagtgcgacaagaccgtgtacttcgccgagaaggtgagctccctggggaaggactggcacaagttctgcctcaagtgcgagcgctgcagcaagacgctgacgcccgggggccacgccgagcatgacgggaagccgttctgccacaagccgtgctacgccaccctgttcggacccaaaggcgtgaacatcgggggcgcgggctcctacatctacgagaagcccctggcggaggggccgcaggtcaccggccccatcgaggtccccgcggcccgagcagaggagcggaaggcgagcggccccccgaaggggcccagcagagcctccagtgtcaccactttcaccggggagcccaacacgtgcccgcgctgcagcaagaaggtgtacttcgctgagaaggtgacgtctctgggcaaggattggcaccggccctgcctgcgctgcgagcgctgcgggaagacactgacccccggcgggcacgcggagcacgacggccagccctactgccacaagccctgctatggaatcctcttcggacccaagggagtgaacaccggtgcggtgggcagctacatctatgaccgggaccccgaaggcaaggtccagccctaggctacagcggctctcatgatgtgggctcagcggttggtgcgggtacgcgagctcga

SEQ ID NO: 686704 - DNA, 759 bp, Homo sapiens
gagcggggggcccggaagtggtccctgtagaaccactgtggcaccgctactccgtgccgcgcccgtcgagcattgcgttgctgcattgcgccccaccgactccactatgttgaagaaattcgacaagaaggatgaggagtcaggtggaggctccaacccattccagcaccttgagaagagtgcggtactccaggaggcccgtgtatttaatgaaactcccatcaaccctcggaaatgtgcccacatcctcaccaagattctttatctcataaaccagggggagcacctggggaccacggaagcgaccgaggccttctttgccatgaccaagctctttcagtccaatgatgtaagtgcctcaacccagctttccttgagaggtggcagctgtaacaaggtggtgggagggccaaagagagccggcccaccagtcagtgtgggctgcctttgtggagacaggaggtatcttctcccaactctggcccttggtgagcccgggctgatagggcttttcccacctatttcccagcccacactccgtcggatgtgctacttgaccatcaaggagatgtcttgcattgcagaggatgtcatcattgtcaccagcaggcagtccatgggggtgtggggtggctccttctgatgggttcccttgacgacccattttcctttgtgtgttccccgcacagtgagacttggttgcttttggcaggtggcacccggggaagtcccggtcaggcccacccgggctccaggtgg

SEQ ID NO: 686705 - DNA, 820 bp, Homo sapiens
aagcttggcacgagggacagacgggcaggcggggctgggcgcgggcggcggcggcccggaggagaacgggcggagggcgcgggccgaccgggcgcaccgaccatggcctccaaatgccccaagtgcgacaagaccgtgtacttcgccgagaaggtgagctccctggggaaggactggcacaagttctgcctcaagtgcgagcgctgcagcaagacgctgacgcccgggggccacgccgagcatgacgggaagccgttctgccacaagccgtgctacgccaccctgttcggacccaaaggcgtgaacatcgggggcgcgggctcctacatctacgagaagcccctggcggaggggccgcaggtcaccggccccatcgaggtccccgcggcccgagcagaggagcggaaggcgagcggccccccgaaggggcccagcagagcctccagtgtcaccactttcaccggggagcccaacacgtgcccgcgctgcagcaagaaggtgtacttcgctgagaaggtgacgtctctgggcaaggattggcaccggccctgcctgcgctgcgagcgctgcgggaagacactgacccccggcgggcacgcggagcacgacggccagcacccacctgccagtgttatttatgctcccttcgtgggtgatggccacgccctcaccatgtccctggcagagggcttccctccgggatcccctgcctggtgcccacactgcctcgcaagcgctcgccaccctcacgtggctcacctgctgttgagccttgtgctgtcaataaacggtttgaggattgcaaaaaaaaaaaaatttc

SEQ ID NO: 686706 - DNA, 237 bp, Homo sapiens
taccattgccgttcaacaagccgtgggtactcccgcccgtatcctgcgaagatccttcttgatgcagatgatcgtcacgattctgccagctcagacgatgtcactggtggttggagttctggctggctgggcgatcaatgccgcgatcggatcgaccgacgcgaagcaatccttcgatcctactattgcggtgctgcccgttgctatgtgggtggtcagtgtgcttgccattatggt

SEQ ID NO: 686707 - DNA, 277 bp, Homo sapiens
ggaggctgaggtggtaggatcacttgagcccaggaggttcaggctgcaatgagccatgatggcaccgggaactccagtctaggtggcaaatcaagaccttatctcaaaaataaaaatttggctgagtgcagtggctcacgcgtgtaatcccagcacttgtgggaggccaaggtgggcagatcacgtgacatcaggagtggggagaacagcctggcgatatggagaaaccccgtgtctactaaatatacacaaattagccgggcatggtggtgcgtgc

SEQ ID NO: 686708 - DNA, 3572 bp, Homo sapiens
gagcggggggcccggaagtggtccctgtagaaccactgtggcaccgctactccgtgccgcgcccgtcgagcattgcgttgctgcattgcgccccaccgactccactatgttgaagaaattcgacaagaaggatgaggagtcaggtggaggctccaacccattccagcaccttgagaagagtgcggtactccaggaggcccgtgtatttaatgaaactcccatcaaccctcggaaatgtgcccacatcctcaccaagattctttatctcataaaccagggggagcacctggggaccacggaagcgaccgaggccttctttgccatgaccaagctctttcagtccaatgatcccacactccgtcggatgtgctacttgaccatcaaggagatgtcttgcattgcagaggatgtcatcattgtcaccagcagcctaacaaaagacatgactgggaaagaagacaactaccggggcccggccgtgcgagccctctgccagatcactgatagcaccatgctgcaggctattgagcgctacatgaaacaagccattgtggacaaggtgcccagtgtctccagctctgccctcgtgtcttccttgcacctgctgaagtgcagctttgacgtggtcaagcgctgggtgaatgaggctcaggaggcagcatccagtgataacatcatggtccagtaccacgcactagggctcctgtaccatgtgcgtaagaatgaccgcctagccgtcaataagatgatcagcaaggtcacacggcatggccttaagtctccctttgcctactgcatgatgatccgggtggccagcaagcagctggaagaggaggatggcagccgtgacagcccactgtttgacttcatcgagagctgcttgcgcaacaagcacgagatggtggtgtatgaagccgcctcggccatcgtcaatctgccaggctgcagtgccaaagagctggccccggctgtgtcagtgctccagcttttctgcagctcacccaaggctgctctccgctatgctgctgttcgtaccctcaataaggttgccatgaagcatccgtcagctgtgacagcttgtaatctggatctggagaacctggtcacagattcaaaccgcagcattgccacgctggccatcaccaccctccttaagacgggcagcgagagcagcatcgaccgcctcatgaagcagatctcctccttcatgtcagaaatctcggatgaattcaaggtggtggttgtccaggccatcagtgccctgtgtcagaaatatcctcgcaaacacgccgtccttatgaacttcctgttcaccatgctgcgggaagagggtggctttgagtataagcgcgctatcgtggactgcatcatcagcatcattgaagagaactcagagagcaaggagacagggctgtcacatctgtgcgagttcatcgaggactgcgagttcacagtgctggccacccgtattctacatctcctgggccaggaggggcccaagaccaccaatccctcaaagtacatccgcttcatctataaccgagtggtcttggagcatgaggaggtccgggcaggtgctgtgagtgctctggcgaagtttggagcccagaatgaagagatgttacccagtatcttggtgttgctgaagaggtgtgtgatggatgatgacaatgaagtaagggaccgagccaccttctacctaaatgtcctggagcagaagcagaaggcccttaatgcaggctatatcctaaatggtctgactgtgtccatccctggtctggagagggctctgcagcagtacactctagaaccatcagaaaaaccttttgacctcaagtctgtgcccctggccacggcgcccatggcagagcagagaacagaaagtacccccatcacagcagtcaaacagcctgagaaagtggcagctaccaggcaggagatcttccaggagcagttggcagcagtgccagagttccgcggtcttgggcccctcttcaagtcctcgcctgagcccgtggccctcaccgagtcagagacggagtatgtcatccgctgcaccaaacacaccttcaccaaccacatggtttttcagtttgactgcacaaacacactcaatgaccagaccttggagaatgtcacagtgcagatggagcccactgaggcctatgaggtgctctgttacgtgcctgcccggagcctgccctacaaccagcccgggacctgctacacactggtggcactgcccaaagaagaccccacagctgtggcctgcacattcagctgcatgatgaagttcactgtcaaggactgtgatcccaccactggggagactgatgacgaaggctatgaggatgagtatgtgctggaagatctggaagttactgtagctgatcacattcaaaaggtcatgaaactgaacttcgaagcagcctgggatgaggtaggggatgaatttgagaaggaggaaacgttcaccttgtctaccatcaagacacttgaagaggctgtgggtaatattgtgaagttcttgggaatgcacccttgtgagaggtcagacaaagtgccggataacaagaacacccacacgttgctcctggctggtgtgttccggggtggtcatgacatcctggtgcgctcccggctgctgcttttggacacagtgacaatgcaggtgacagccagaagtttggaggagctgccagtagacatcatcttggcatctgtgggataagaggccagcctgcataggacctcatacccttccccaacactacctggaagttgtgccttcctcatgaaactggcagaaaccccttcccaagcttctgtattgaaaaacaattaggaatcattgcagatttttttttattctgctcccacctcccacccgggactacttgctggtgacttttttttttttttttttttaaataggggatgattttagcttgtcctaaatcttgctgtccacccttccaggaaagggacattgtaaatgaataaaacattctcaactcctcttgaatctatcccccaagaaaccatcttatccctgtaataaatcagcatgtatttattgaaaaaaaaaaaacaaaaaaacaaaaaaaaaaaaaacaaaaacacacaaaaaaaaaaaacaacaaaagcgatcgcccacacaaaaaaccaccccgcggccaaccaaaatcaaccccccccaggtatatttaaaggaaaaaaggagggcacccaccaacaaggaccaggggaaaacaaaataaagagagatagaaacgggccccgcgtaaacagacacgtggcgtgagcagccggaaaccgatatcaaggacgggtgactctcggaggaagagcacctccaacgccgggggagcacgaaaagcggtccccagccgccacgagagagccaaagtcgccgacgagacacactctacacgtccgcaggatatcggtggacacaccacagcggtctgacgggagcgaccgtgcacatcccgcaacacgggtagataaggacaaatattaacgccggcccaggcgaatcataagagcagccgcggcactcgccccagccg

SEQ ID NO: 686709 - DNA, 642 bp, Homo sapiens
aagcttggcacgagggacagacgggcaggcggggctgggcgcgggcggcggcggcccggaggagaacgggcggagggcgcgggccgaccgggcgcaccgaccatggcctccaaatgccccaagtgcgacaagaccgtgtacttcgccgagaaggtgagctccctggggaaggactggcacaagttctgcctcaagtgcgagcgctgcagcaagacgctgacgcccgggggccacgccgagcatgacgggaagccgttctgccacaagccgtgctacgccaccctgttcggacccaaaggcgtgaacatcgggggcgcgggctcctacatctacgagaagcccctggcggaggggccgcaggtcaccggccccatcgaggtccccgcggcccgagcagaggagcggaaggcgagcggccccccgaaggggcccagcagagcctccagtgtcaccactttcaccggggagcccaacacgtgcccgcgctgcagcaagaaggtgtacttcgctgagaaggtgacgtctctgggcaaggattggcaccggccctgccaagcgctcgccaccctcacgtggctcacctgctgttgagccttgtgctgtcaataaacggtttgaggattgcaaaaaaaaaaaaatttc

SEQ ID NO: 686710 - DNA, 486 bp, Homo sapiens
  misc_feature (27)..(27): n is a, c, g, or t
tttaccatgctggacaggcagtaaatngaacaaaatcctttccctaatggagcttacctttatggtagaggtcacaggtttagtttttcccccagatagccatatgactagttcctaattttttcaggtctttactccaaaatcatttttctcttttaggaccttttttgccagcccatctaaagttacaaacagactcttctcctgacctcttattcatcttcctagctttatctttttaccttagtactcatgctgtctattatactaaatgtgtgtctacctgatgcttaacagttactcaaaaatatttgttaaataatgagtgaagtatatatttctagttagtaataactgttctccagacagataaagaaagactttgaatggactccatccatgtagtgtgaaccaaaatttgtgctccaatttttatcagtttcctaggtttcatcctttgatgaaataaaaaatatgtgtattaaa

SEQ ID NO: 686711 - DNA, 3027 bp, Homo sapiens
gagcggggggcccggaagtggtccctgtagaaccactgtggcaccgctactccgtgccgcgcccgtcgagcattgcgttgctgcattgcgccccaccgactccactatgttgaagaaattcgacaagaaggatgaggagtcaggtggaggctccaacccattccagcaccttgagaagagtgcggtactccaggaggcccgtgtatttaatgaaactcccatcaaccctcggaaatgtgcccacatcctcaccaagattctttatctcataaaccagggggagcacctggggaccacggaagcgaccgaggccttctttgccatgaccaagctctttcagtccaatgatcccacactccgtcggatgtgctacttgaccatcaaggagatgtcttgcattgcagaggatgtcatcattgtcaccagcagcctaacaaaagacatgactgggaaagaagacaactaccggggcccggccgtgcgagccctctgccagatcactgatagcaccatgctgcaggctattgagcgctacatgaaacaagccattgtggacaaggtgcccagtgtctccagctctgccctcgtgtcttccttgcacctgctgaagtgcagctttgacgtggtcaagcgctgggtgaatgaggctcaggaggcagcatccagtgataacatcatggtccagtaccacgcactagggctcctgtaccatgtgcgtaagaatgaccgcctagccgtcaataagatgatcagcaaggtcacacggcatggccttaagtctccctttgcctactgcatgatgatccgggtggccagcaagcagctggaagaggaggatggcagccgtgacagcccactgtttgacttcatcgagagctgcttgcgcaacaagcacgagatggtggtgtatgaagccgcctcggccatcgtcaatctgccaggctgcagtgccaaagagctggccccggctgtgtcagtgctccagcttttctgcagctcacccaaggctgctctccgctatgctgctgttcgtaccctcaataaggttgccatgaagcatccgtcagctgtgacagcttgtaatctggatctggagaacctggtcacagattcaaaccgcagcattgccacgctggccatcaccaccctccttaagacgggcagcgagagcagcatcgaccgcctcatgaagcagatctcctccttcatgtcagaaatctcggatgaattcaaggtggtggttgtccaggccatcagtgccctgtgtcagaaatatcctcgcaaacacgccgtccttatgaacttcctgttcaccatgctgcgggaagagggtggctttgagtataagcgcgctatcgtggactgcatcatcagcatcattgaagagaactcagagagcaaggagacagggctgtcacatctgtgcgagttcatcgaggactgcgagttcacagtgctggccacccgtattctacatctcctgggccaggaggggcccaagaccaccaatccctcaaagtacatccgcttcatctataaccgagtggtcttggagcatgaggaggtccgggcaggtgctgtgagtgctctggcgaagtttggagcccagaatgaagagatgttacccagtatcttggtgttgctgaagaggtgtgtgatggatgatgacaatgaagtaagggaccgagccaccttctacctaaatgtcctggagcagaagcagaaggcccttaatgcaggctatatcctaaatggtctgactgtgtccatccctggtctggagagggctctgcagcagtacactctagaaccatcagagagaacagaaagtacccccatcacagcagtcaaacagcctgagaaagtggcagctaccaggcaggagatcttccaggagcagttggcagcagtgccagagttccgcggtcttgggcccctcttcaagtcctcgcctgagcccgtggccctcaccgagtcagagacggagtatgtcatccgctgcaccaaacacaccttcaccaaccacatggtttttcagtttgactgcacaaacacactcaatgaccagaccttggagaatgtcacagtgcagatggagcccactgaggcctatgaggtgctctgttacgtgcctgcccggagcctgccctacaaccagcccgggacctgctacacactggtggcactgcccaaagaagaccccacagctgtggcctgcacattcagctgcatgatgaagttcactgtcaaggactgtgatcccaccactggggagactgatgacgaaggctatgaggatgagtatgtgctggaagatctggaagttactgtagctgatcacattcaaaaggtcatgaaactgaacttcgaagcagcctgggatgaggtaggggatgaatttgagaaggaggaaacgttcaccttgtctaccatcaagacacttgaagaggctgtgggtaatattgtgaagttcttgggaatgcacccttgtgagaggtcagacaaagtgccggataacaagaacacccacacgttgctcctggctggtgtgttccggggtggtcatgacatcctggtgcgctcccggctgctgcttttggacacagtgacaatgcaggtgacagccagaagtttggaggagctgccagtagacatcatcttggcatctgtgggataagaggccagcctgcataggacctcatacccttccccaacactacctggaagttgtgccttcctcatgaaactggcagaaaccccttcccaagcttctgtattgaaaaacaattaggaatcattgcagatttttttttattctgctcccacctcccacccgggactacttgctggtgacttttttttttttttttttttaaataggggatgattttagcttgtcctaaatcttgctgtccacccttccaggaaagggacattgtaaatgaataaaacattctcaactcctcttgaatctatcccccaagaaaccatcttatccctgtaataaatcagcatgtatttattgaa

SEQ ID NO: 686712 - DNA, 438 bp, Homo sapiens
aagcttggcacgagggacagacgggcaggcggggctgggcgcgggcggcggcggcccggaggagaacgggcggagggcgcgggccgaccgggcgcaccgaccatggcctccaaatgccccaagtgcgacaagaccgtgtacttcgccgagaaggtgagctccctggggaaggactggcacaagttctgcctcaagtgcgccgtggcgctgtccgctctccctctcctgctgcccacccacctgccagtgttatttatgctcccttcgtgggtgatggccacgccctcaccatgtccctggcagagggcttccctccgggatcccctgcctggtgcccacactgcctcgcaagcgctcgccaccctcacgtggctcacctgctgttgagccttgtgctgtcaataaacggtttgaggattgcaaaaaaaaaaaaatttc

SEQ ID NO: 686713 - DNA, 3371 bp, Homo sapiens
gagcggggggcccggaagtggtccctgtagaaccactgtggcaccgctactccgtgccgcgcccgtcgagcattgcgttgctgcattgcgccccaccgactccactatgttgaagaaattcgacaagaaggatgaggagtcaggtggaggctccaacccattccagcaccttgagaagagtgcggtactccaggaggcccgtgtatttaatgaaactcccatcaaccctcggaaatgtgcccacatcctcaccaagattctttatctcataaaccagggggagcacctggggaccacggaagcgaccgaggccttctttgccatgaccaagctctttcagtccaatgatcccacactccgtcggatgtgctacttgaccatcaaggagatgtcttgcattgcagaggatgtcatcattgtcaccagcagcctaacaaaagacatgactgggaaagaagacaactaccggggcccggccgtgcgagccctctgccagatcactgatagcaccatgctgcaggctattgagcgctacatgaaacaagccattgtggacaaggtgcccagtgtctccagctctgccctcgtgtcttccttgcacctgctgaagtgcagctttgacgtggtcaagcgctgggtgaatgaggctcaggaggcagcatccagtgataacatcatggtccagtaccacgcactagggctcctgtaccatgtgcgtaagaatgaccgcctagccgtcaataagatgatcagcaaggtcacacggcatggccttaagtctccctttgcctactgcatgatgatccgggtggccagcaagcagctggaagaggaggatggcagccgtgacagcccactgtttgacttcatcgagagctgcttgcgcaacaagcacgagatggtggtgtatgaagccgcctcggccatcgtcaatctgccaggctgcagtgccaaagagctggccccggctgtgtcagtgctccagcttttctgcagctcacccaaggctgctctccgctatgctgctgttcgtaccctcaataaggttgccatgaagcatccgtcagctgtgacagcttgtaatctggatctggagaacctggtcacagattcaaaccgcagcattgccacgctggccatcaccaccctccttaagacgggcagcgagagcagcatcgaccgcctcatgaagcagatctcctccttcatgtcagaaatctcggatgaattcaaggtggtggttgtccaggccatcagtgccctgtgtcagaaatatcctcgcaaacacgccgtccttatgaacttcctgttcaccatgctgcgggaagagggtggctttgagtataagcgcgctatcgtggactgcatcatcagcatcattgaagagaactcagagagcaaggagacagggctgtcacatctgtgcgagttcatcgaggactgcgagttcacagtgctggccacccgtattctacatctcctgggccaggaggggcccaagaccaccaatccctcaaagtacatccgcttcatctataaccgagtggtcttggagcatgaggaggtccgggcaggtgctgtgagtgctctggcgaagtttggagcccagaatgaagagatgttacccagtatcttggtgttgctgaagaggtgtgtgatggatgatgacaatgaagtaagggaccgagccaccttctacctaaatgtcctggagcagaagcagaaggcccttaatgcaggctatatcctaaatggtctgactgtgtccatccctggtctggagagggctctgcagcagtacactctagaaccatcagaaaaaccttttgacctcaagtctgtgcccctggccacggcgcccatggcagagcagagaacagaaagtacccccatcacagcagtcaaacagcctgagaaagtggcagctaccaggcaggagatcttccaggagcagttggcagcagtgccagagttccgcggtcttgggcccctcttcaagtcctcgcctgagcccgtggccctcaccgagtcagagacggagtatgtcatccgctgcaccaaacacaccttcaccaaccacatggtttttcagtttgactgcacaaacacactcaatgaccagaccttggagaatgtcacagtgcagatggagcccactgaggcctatgaggtgctctgttacgtgcctgcccggagcctgccctacaaccagcccgggacctgctacacactggtggcactgcccaaagaagaccccacagctgtggcctgcacattcagctgcatgatgaagttcactgtcaaggactgtgatcccaccactggggagactgatgacgaaggctatgaggatgagtatgtgctggaagatctggaagttactgtagctgatcacattcaaaaggtcatgaaactgaacttcgaagcagcctgggatgaggtaggggatgaatttgagaaggaggaaacgttcaccttgtctaccatcaagacacttgaagaggctgtgggtaatattgtgaagttcttgggaatgcacccttgtgagaggtcagacaaagtgccggataacaagaacacccacacgttgctcctggctggtgtgttccggggtggtcatgacatcctggtgcgctcccggctgctgcttttggacacagtgacaatgcaggtgacagccagaagtttggaggagctgccagtagacatcatcttggcatctgtgggataagaggccagcctgcataggacctcatacccttccccaacactacctggaagttgtgccttcctcatgaaactggcagaaaccccttcccaagcttctgtattgaaaaacaattaggaatcattgcagatttttttttattctgctcccacctcccacccgggactacttgctggtgacttttttttttttttttttttaaataggggatgattttagcttgtcctaaatcttgctgtccacccttccaggaaagggacattgtaaatgaataaaacattctcaactcctcttgaatctatcccccaagaaaccatcttatccctgtaataaatcagcatgtatttattgaatgattgctacttctgcagactcatgcttcagggctccaccttccccttcaaggcctcccctaaagaggcagaacacctgccctgtcccccttgcacccacagccctttggctgttgtagtcctgtgaggcaggaccctctccccgtcatcgctgtcccagcaccaagcccaggggtgggagcggtagagggtggttgagtgaatcagctaacaggcagagttcacactccctcccgttcgtgcttcttcacaacgcatcctcctttgatagtcgataaatggaggctcca

SEQ ID NO: 686714 - DNA, 662 bp, Homo sapiens
aagcttggcacgagggacagacgggcaggcggggctgggcgcgggcggcggcggcccggaggagaacgggcggagggcgcgggccgaccgggcgcaccgaccatggcctccaaatgccccaagtgcgacaagaccgtgtacttcgccgagaaggtgagctccctggggaaggactggcacaagttctgcctcaagtgcgagcgctgcagcaagacgctgacgcccgggggccacgccgagcatgacgggaagccgttctgccacaagccgtgctacgccaccctgttcggacccaaaggtgagctccggctgccctcggcctgccctgggacctgctgggaggggcgtggcgctggcgctggggagggctgggggtcccggccgccgtggatccccgcccagagtccctgccaccctggaaagcctagtgccccccagtccccagcgggccgttttctgagatgcccggtggccgcggctgataacaggaagagtgacacataagacaccataggcaacacggcgtagacgaggacaaagaagacgaaggataacaatccgagaaacactaaatcacagctcccacaccgctgcactgaccgttaacaaaacgatgcaagagcaacaaagaaccgagaaccctagagacgaccaaccacaag

SEQ ID NO: 686715 - DNA, 4194 bp, Homo sapiens
gagcggggggcccggaagtggtccctgtagaaccactgtggcaccgctactccgtgccgcgcccgtcgagcattgcgttgctgcattgcgccccaccgactccactatgttgaagaaattcgacaagaaggatgaggagtcaggtggaggctccaacccattccagcaccttgagaagagtgcggtactccaggaggcccgtgtatttaatgaaactcccatcaaccctcggaaatgtgcccacatcctcaccaagattctttatctcataaaccagggggagcacctggggaccacggaagcgaccgaggccttctttgccatgaccaagctctttcagtccaatgatcccacactccgtcggatgtgctacttgaccatcaaggagatgtcttgcattgcagaggatgtcatcattgtcaccagcagcctaacaaaagacatgactgggaaagaagacaactaccggggcccggccgtgcgagccctctgccagatcactgatagcaccatgctgcaggctattgagcgctacatgaaacaagccattgtggacaaggtgcccagtgtctccagctctgccctcgtgtcttccttgcacctgctgaagtgcagctttgacgtggtcaagcgctgggtgaatgaggctcaggaggcagcatccagtgataacatcatggtccagtaccacgcactagggctcctgtaccatgtgcgtaagaatgaccgcctagccgtcaataagatgatcagcaaggtcacacggcatggccttaagtctccctttgcctactgcatgatgatccgggtggccagcaagcagctggaagaggaggatggcagccgtgacagcccactgtttgacttcatcgagagctgcttgcgcaacaagcacgagatggtggtgtatgaagccgcctcggccatcgtcaatctgccaggctgcagtgccaaagagctggccccggctgtgtcagtgctccagcttttctgcagctcacccaaggctgctctccgctatgctgctgttcgtaccctcaataaggttgccatgaagcatccgtcagctgtgacagcttgtaatctggatctggagaacctggtcacagattcaaaccgcagcattgccacgctggccatcaccaccctccttaagacgggcagcgagagcagcatcgaccgcctcatgaagcagatctcctccttcatgtcagaaatctcggatgaattcaaggtggtggttgtccaggccatcagtgccctgtgtcagaaatatcctcgcaaacacgccgtccttatgaacttcctgttcaccatgctgcgggaagagggtggctttgagtataagcgcgctatcgtggactgcatcatcagcatcattgaagagaactcagagagcaaggagacagggctgtcacatctgtgcgagttcatcgaggactgcgagttcacagtgctggccacccgtattctacatctcctgggccaggaggggcccaagaccaccaatccctcaaagtacatccgcttcatctataaccgagtggtcttggagcatgaggaggtccgggcaggtgctgtgagtgctctggcgaagtttggagcccagaatgaagagatgttacccagtatcttggtgttgctgaagaggtgtgtgatggatgatgacaatgaagtaagggaccgagccaccttctacctaaatgtcctggagcagaagcagaaggcccttaatgcaggctatatcctaaatggtctgactgtgtccatccctggtctggagagggctctgcagcagtacactctagaaccatcagaaaaaccttttgacctcaagtctgtgcccctggccacggcgcccatggcagagcagagaacagaaagtacccccatcacagcagtcaaacagcctgagaaagtggcagctaccaggcaggagatcttccaggagcagttggcagcagtgccagagttccgcggtcttgggcccctcttcaagtcctcgcctgagcccgtggccctcaccgagtcagagacggagtatgtcatccgctgcaccaaacacaccttcaccaaccacatggtttttcagtttgactgcacaaacacactcaatgaccagaccttggagaatgtcacagtgcagatggagcccactgaggcctatgaggtgctctgttacgtgcctgcccggagcctgccctacaaccagcccgggacctgctacacactggtggcactgcccaaagaagaccccacagctgtggcctgcacattcagctgcatgatgaagttcactgtcaaggactgtgatcccaccactggggagactgatgacgaaggctatgaggatgagtatgtgctggaagatctggaagttactgtagctgatcacattcaaaaggtcatgaaactgaacttcgaagcagcctgggatgaggtaggggatgaatttgagaaggaggaaacgttcaccttgtctaccatcaagacacttgaagaggctgtgggtaatattgtgaagttcttgggaatgcacccttgtgagaggtcagacaaagtgccggataacaagaacacccacacgttgctcctggctggtgtgttccggggtggtcatgacatcctggtgcgctcccggctgctgcttttggacacagtgacaatgcaggtgacagccagaagtttggaggagctgccagtagacatcatcttggcatctgtgggataagaggccagcctgcataggacctcatacccttccccaacactacctggaagttgtgccttcctcatgaaactggcagaaaccccttcccaagcttctgtattgaaaaacaattaggaatcattgcagatttttttttattctgctcccacctcccacccgggactacttgctggtgacttttttttttttttttttttaaataggggatgattttagcttgtcctaaatcttgctgtccacccttccaggaaagggacattgtaaatgaataaaacattctcaactcctcttgaaaaaaaaaaaaaaaaaaaaaaaaaaaaaaaaaaaaaaaaaaaaaaaaaaaaaaaaaaaaaaaaaaacagagggccggccggccgtcatacaaacttcactccccccgcgcggcgccacccaactaaccgccgcccaccacatgctagtcttattgagagcagacgggcgcgcccccactagtacgcggaggcctactaccatctaacccagagcacgcgcacgcgtgcgcgccgcgatcttaaaaacagcgttaggcagcgcgacgggcaacaacaccgctcggctgcgccgagagcatcatcctgacgcgaagcgcacccccaaactatcctccgggtgctggaacaaacaacgaggcgcgcacaccgtacactacccgacaagcaattctcagcgccactaaggagcgaccaacaacacacaacccacacacgcgacaccgacccgccggcaacaaccaccacccacccacatatcactggcgccgcgcgcgcaagacacagcctacgcccctaccgcggagagcataattcggaacagacacatatacatatcacccacgccggacagccaccacaagacacaaccgccggcaccgcacacaacaccacaaccaccgacaccacaacacccagacacccaacacgcagcccacgaccacaccacagcactacccacaccacacgcccacgcccgagctgcatcgagagcgagcgctcagcacgtgcaagtacagtcgaaccgcggacagatcgagcgacaagagagcgaggcacgcagactcgcacggcacgagcgcaaagcagagacgcagcgcacaagaccacggcaacgacctgaaccacgacgcagagcacgaaacgcaaaagaacaagccaagccagaagacacaaccataagacggcgagcgaagaagcgaacggccacacagacgacggctggcgcgaccgagatgagagacacgagcagaggacgacacacgcacgagtcgacggcgcaccctcctcgccagagcccagaacacggaaggccgatggtcacgaagctgcaccgcacagcgaccgagcgacgatccgctccagagtgaggatacgtcgaggagacgaccagcaagcgaagacaacgcaggactgaaacgcagggaaagaccacagccagcgatgcgcatc

SEQ ID NO: 686716 - DNA, 204 bp, Homo sapiens
ctgggaatctcctcctcctggctcaagaatccttcactcagtctcctgagtagctggaaccacaagcacgtgcaccagggtgtgtgtgtgtgtgtgtgtgtgtgtgtgtgtgtgtgtgtgtgtccgtgtgtgtatcaggggttgcaatttctaaagtgagtgaacatgagatgtgaagagacctcaggaggaggaggaatgcgg

SEQ ID NO: 686717 - DNA, 2749 bp, Homo sapiens
gagcggggggcccggaagtggtccctgtagaaccactgtggcaccgctactccgtgccgcgcccgtcgagcattgcgttgctgcattgcgccccaccgactccactatgttgaagaaattcgacaagaaggatgaggagtcaggtggaggctccaacccattccagcaccttgagaagagtgcggtactccaggaggcccgtgtatttaatgaaactcccatcaaccctcggaaatgtgcccacatcctcaccaagattctttatctcataaaccagggggagcacctggggaccacggaagcgaccgaggccttctttgccatgaccaagctctttcagtccaatgatcccacactccgtcggatgtgctacttgaccatcaaggagatgtcttgcattgcagaggatgtcatcattgtcaccagcagcctaacaaaagacatgactgggaaagaagacaactaccggggcccggccgtgcgagccctctgccagatcactgatagcaccatgctgcaggctattgagcgctacatgaaacaagccattgtggacaaggtgcccagtgtctccagctctgccctcgtgtcttccttgcacctgctgaagtgcagctttgacgtggtcaagcgctgggtgaatgaggctcaggaggcagcatccagtgataacatcatggtccagtaccacgcactagggctcctgtaccatgtgcgtaagaatgaccgcctagccgtcaataagatgatcagcaaggtcacacggcatggccttaagtctccctttgcctactgcatgatgatccgggtggccagcaagcagctggaagaggaggatggcagccgtgacagcccactgtttgacttcatcgagagctgcttgcgcaacaagcacgagatggtggtgtatgaagccgcctcggccatcgtcaatctgccaggctgcagtgccaaagagctggccccggctgtgtcagtgctccagcttttctgcagctcacccaaggctgctctccgctatgctgctgttcgtaccctcaataaggttgccatgaagcatccgtcagctgtgacagcttgtaatctggatctggagaacctggtcacagattcaaaccgcagcattgccacgctggccatcaccaccctccttaagacgggcagcgagagcagcatcgaccgcctcatgaagcagatctcctccttcatgtcagaaatctcggatgaattcaaggtggtggttgtccaggccatcagtgccctgtgtcagaaatatcctcgcaaacacgccgtccttatgaacttcctgttcaccatgctgcgggaagagggtggctttgagtataagcgcgctatcgtggactgcatcatcagcatcattgaagagaactcagagagcaaggagacagggctgtcacatctgtgcgagttcatcgaggactgcgagttcacagtgctggccacccgtattctacatctcctgggccaggaggggcccaagaccaccaatccctcaaagtacatccgcttcatctataaccgagtggtcttggagcatgaggaggtccgggcaggtgctgtgagtgctctggcgaagtttggagcccagaatgaagagatgttacgcagcagtgccagagttccgcggtcttgggcccctcttcaagtcctcgcctgagcccgtggccctcaccgagtcagagacggagtatgtcatccgctgcaccaaacacaccttcaccaaccacatggtttttcagtttgactgcacaaacacactcaatgaccagaccttggagaatgtcacagtgcagatggagcccactgaggcctatgaggtgctctgttacgtgcctgcccggagcctgccctacaaccagcccgggacctgctacacactggtggcactgcccaaagaagaccccacagctgtggcctgcacattcagctgcatgatgaagttcactgtcaaggactgtgatcccaccactggggagactgatgacgaaggctatgaggatgagtatgtgctggaagatctggaagttactgtagctgatcacattcaaaaggtcatgaaactgaacttcgaagcagcctgggatgaggtaggggatgaatttgagaaggaggaaacgttcaccttgtctaccatcaagacacttgaagaggctgtgggtaatattgtgaagttcttgggaatgcacccttgtgagaggtcagacaaagtgccggataacaagaacacccacacgttgctcctggctggtgtgttccggggtggtcatgacatcctggtgcgctcccggctgctgcttttggacacagtgacaatgcaggtgacagccagaagtttggaggagctgccagtagacatcatcttggcatctgtgggataagaggccagcctgcataggacctcatacccttccccaacactacctggaagttgtgccttcctcatgaaactggcagaaaccccttcccaagcttctgtattgaaaaacaattaggaatcattgcagatttttttttattctgctcccacctcccacccgggactacttgctggtgacttttttttttttttttttttaaataggggatgattttagcttgtcctaaatcttgctgtccacccttccaggaaagggacattgtaaatgaataaaacattctcaactcctcttgaatctatcccccaagaaaccatcttatccctgtaataaatcagcatgtatttattgaa

SEQ ID NO: 686718 - DNA, 638 bp, Homo sapiens
aagcttggcacgagggacagacgggcaggcggggctgggcgcgggcggcggcggcccggaggagaacgggcggagggcgcgggccgaccgggcgcaccgaccatggcctccaaatgccccaagtgcgacaagaccgtgtacttcgccgagaaggtgagctccctggggaaggactggcacaagttctgcctcaagtgcgagcgctgcagcaagacgctgacgcccgggggccacgccgagcatgacgggaagccgttctgccacaagccgtgctacgccaccctgttcggacccaaaggtgagctccggctgccctcggcctgccctgggacctgctgggaggggcgtggcgctggcgctggggagggctgggggtcccggccgccgtggatccccgcccagagtccctgccacccccttggaaaggcctaaggtgccccacccaaggtccccaatgcggggccggttattcttgaagaatcgcgccgggtggcacctgcgggccggagaccaagacagggagaacaggcaagaagacgacgtgagagacaagtaacaggaaagggaggaacacaggaagacaaagacacaaagaaagaaaacaaagacaagagaggaagaagacaacagagaaacag

SEQ ID NO: 686719 - DNA, 394 bp, Homo sapiens
ttttttctagatttcactactggtccgtgtagaatttcacataatttaattatatttgtgttttaaccactcctatatctgtggtggtatcccctttctcattcccagtctttcagcccttggctatttcttgtttcccagctgtacctcccaatcacattccattcatgtccgtggtttttataaagaccaatctgggaccacaggcacccaccaccacacacagccaatttcgcgcattttaaccagacacggggcttcatcatcctggacagcctggccccgaactcctgacctcaagtgatccacccctctcagcctcacagagtgctgggaccacaggtacgagccacgagcacacagcccatttctccactctcatactcgcgtgccg

SEQ ID NO: 686720 - DNA, 3154 bp, Homo sapiens
gagcggggggcccggaagtggtccctgtagaaccactgtggcaccgctactccgtgccgcgcccgtcgagcattgcgttgctgcattgcgccccaccgactccactatgttgaagaaattcgacaagaaggatgaggagtcaggtggaggctccaacccattccagcaccttgagaagagtgcggtactccaggaggcccgtgtatttaatgaaactcccatcaaccctcggaaatgtgcccacatcctcaccaagattctttatctcataaaccagggggagcacctggggaccacggaagcgaccgaggccttctttgccatgaccaagctctttcagtccaatgatcccacactccgtcggatgtgctacttgaccatcaaggagatgtcttgcattgcagaggatgtcatcattgtcaccagcagcctaacaaaagacatgactgggaaagaagacaactaccggggcccggccgtgcgagccctctgccagatcactgatagcaccatgctgcaggctattgagcgctacatgaaacaagccattgtggacaaggtgcccagtgtctccagctctgccctcgtgtcttccttgcacctgctgaagtgcagctttgacgtggtcaagcgctgggtgaatgaggctcaggaggcagcatccagtgataacatcatggtccagtaccacgcactagggctcctgtaccatgtgcgtaagaatgaccgcctagccgtcaataagatgatcagcaaggtcacacggcatggccttaagtctccctttgcctactgcatgatgatccgggtggccagcaagcagctggaagaggaggatggcagccgtgacagcccactgtttgacttcatcgagagctgcttgcgcaacaagcacgagatggtggtgtatgaagccgcctcggccatcgtcaatctgccaggctgcagtgccaaagagctggccccggctgtgtcagtgctccagcttttctgcagctcacccaaggctgctctccgctatgctgctgttcgtaccctcaataaggttgccatgaagcatccgtcagctgtgacagcttgtaatctggatctggagaacctggtcacagattcaaaccgcagcattgccacgctggccatcaccaccctccttaagacgggcagcgagagcagcatcgaccgcctcatgaagcagatctcctccttcatgtcagaaatctcggatgaattcaaggtggtggttgtccaggccatcagtgccctgtgtcagaaatatcctcgcaaacacgccgtccttatgaacttcctgttcaccatgctgcgggaagagggtggctttgagtataagcgcgctatcgtggactgcatcatcagcatcattgaagagaactcagagagcaaggagacagggctgtcacatctgtgcgagttcatcgaggactgcgagttcacagtgctggccacccgtattctacatctcctgggccaggaggggcccaagaccaccaatccctcaaagtacatccgcttcatctataaccgagtggtcttggagcatgaggaggtccgggcaggtgctgtgagtgctctggcgaagtttggagcccagaatgaagagatgttacccagtatcttggtgttgctgaagaggtgtgtgatggatgatgacaatgaagtaagggaccgagccaccttctacctaaatgtcctggagcagaagcagaaggcccttaatgcaggctatatcctaaatggtctgactgtgtccatccctggtctggagagggctctgcagcagtacactctagaaccatcagaaaaaccttttgacctcaagtctgtgcccctggccacggcgcccatggcagagcagagaacagaaagtacccccatcacagcagtcaaacagcctgagaaagtggcagctaccaggcaggagatcttccaggagcagttggcagcagtgccagagttccgcggtcttgggcccctcttcaagtcctcgcctgagcccgtggccctcaccgagtcagagacggagtatgtcatccgctgcaccaaacacaccttcaccaaccacatggtttttcagtttgactgcacaaacacactcaatgaccagaccttggagaatgtcacagtgcagatggagcccactgaggcctatgaggtgctctgttacgtgcctgcccggagcctgccctacaaccagcccgggacctgctacacactggtggcactgcccaaagaagaccccacagctgtggcctgcacattcagctgcatgatgaagttcactgtcaaggactgtgatcccaccactggggagactgatgacgaaggctatgaggatgagtatgtgagtcacagttgaggatggacggaccttccttgagctggaaatgaccccgaggcaggagctgctctaagaccaactggaagatctggaagttactgtagctgatcacattcaaaaggtcatgaaactgaacttcgaagcagcctgggatgaggtaggggatgaatttgagaaggaggaaacgttcaccttgtctaccatcaagacacttgaagaggctgtgggtaatattgtgaagttcttgggaatgcacccttgtgagaggtcagacaaagtgccggataacaagaacacccacacgttgctcctggctggtgtgttccggggtggtcatgacatcctggtgcgctcccggctgctgcttttggacacagtgacaatgcaggtgacagccagaagtttggaggagctgccagtagacatcatcttggcatctgtgggataagaggccagcctgcataggacctcatacccttccccaacactacctggaagttgtgccttcctcatgaaactggcagaaaccccttcccaagcttctgtattgaaaaacaattaggaatcattgcagatttttttttattctgctcccacctcccacccgggactacttgctggtgacttttttttttttttttttttaaataggggatgattttagcttgtcctaaatcttgctgtccacccttccaggaaagggacattgtaaatgaataaaacattctcaactcctcttgaatctatcccccaagaaaccatcttatccctgtaataaatcagcatgtatttattgaa

SEQ ID NO: 686721 - DNA, 893 bp, Homo sapiens
  misc_feature (324)..(324): n is a, c, g, or t
aagcttggcacgagggacagacgggcaggcggggctgggcgcgggcggcggcggcccggaggagaacgggcggagggcgcgggccgaccgggcgcaccgaccatggcctccaaatgccccaagtgcgacaagaccgtgtacttcgccgagaaggtgagctccctggggaaggactggcacaagttctgcctcaagtgcgagcgctgcagcaagacgctgacgcccgggggccacgccgagcatgacgggaagccgttctgccacaagccgtgctacgccaccctgttcggacccaaaggaaggcgtgaacatcgggggcgcggnctctacatctacgagaaaggcccctggcggagggggcccggcaaggtccaccgggcccccattcggaggtcccccggcgggcccgagggcagaagggaagccgggaaaaggggcgaaagcggggcccccccggaagggggccccaggccagaaggcccttcccaggtgttcaccaccaacttttcaccggggggaaggccctcaaacaaggtttgccccggggccttggaagcacagaaagcgtggttcacttcccggttgaacacacgggatgaaccgtccctctatgggggccaggggatcttggcggcccgtggtcctggggcattggggcttgttgcgatggcccgccctttgcgcgcggcaaggagacacctgtgagtcccccccggggggcggccctcccccgtgagagcggggccctctcctttccccgccgggtgggttttacacccccggggttgcgtgggtggggcacgtctcacctcttttttatgacccgggggaacccccctatgggcaccggggtctagcccccccttagggtcttaaccgggggggtccccctt

SEQ ID NO: 686722 - DNA, 332 bp, Homo sapiens
acgggggaaatgagagtatagggtatgaggtccttggggggtcatcaaaagttctaaaatgattgtggtgatgggtgcacatatctgtgactatactaaaaacactgaactgtttttaaaataaatgaaccccactctcccaaactttcatgtatggcatactgcctagccggagatatgatgacttacaccttagaacaacaaaaaaaaacttccaaataacaaatgctttgtactaaatgacacattacttattgagcacttcgtatgtgcagggtcctatgttggtcatacacaggggttttctcttgtaattctccccacagccctga

SEQ ID NO: 686723 - DNA, 2745 bp, Homo sapiens
gagcggggggcccggaagtggtccctgtagaaccactgtggcaccgctactccgtgccgcgcccgtcgagcattgcgttgctgcattgcgccccaccgactccactatgttgaagaaattcgacaagaaggatgaggagtcaggtggaggctccaacccattccagcaccttgagaagagtgcggtactccaggaggcccgtgtatttaatgaaactcccatcaaccctcggaaatgtgcccacatcctcaccaagattctttatctcataaaccagggggagcacctggggaccacggaagcgaccgaggccttctttgccatgaccaagctctttcagtccaatgatcccacactccgtcggatgtgctacttgaccatcaaggagatgtcttgcattgcagaggatgtcatcattgtcaccagcagcctaacaaaagacatgactgggaaagaagacaactaccggggcccggccgtgcgagccctctgccagatcactgatagcaccatgctgcaggctattgagcgctacatgaaacaagccattgtggacaaggtgcccagtgtctccagctctgccctcgtgtcttccttgcacctgctgaagtgcagctttgacgtggtcaagcgctgggtgaatgaggctcaggaggcagcatccagtgataacatcatggtccagtaccacgcactagggctcctgtaccatgtgcgtaagaatgaccgcctagccgtcaataagatgatcagcaaggtcacacggcatggccttaagtctccctttgcctactgcatgatgatccgggtggccagcaagcagctggaagaggaggatggcagccgtgacagcccactgtttgacttcatcgagagctgcttgcgcaacaagcacgagatggtggtgtatgaagccgcctcggccatcgtcaatctgccaggctgcagtgccaaagagctggccccggctgtgtcagtgctccagcttttctgcagctcacccaaggctgctctccgctatgctgctgttcgtaccctcaataaggttgccatgaagcatccgtcagctgtgacagcttgtaatctggatctggagaacctggtcacagattcaaaccgcagcattgccacgctggccatcaccaccctccttaagacgggcagcgagagcagcatcgaccgcctcatgaagcagatctcctccttcatgtcagaaatctcggatgaattcaaggtggtggttgtccaggccatcagtgccctgtgtcagaaatatcctcgcaaacacgccgtccttatgaacttcctgttcaccatgctgcgggaagagggtggctttgagtataagcgcgctatcgtggactgcatcatcagcatcattgaagagaactcagagagcaaggagacagggctgtcacatctgtgcgagttcatcgaggactgcgagttcacagtgctggccacccgtattctacatctcctgggccaggaggggcccaagaccaccaatccctcaaagtacatccgcttcatctataaccgagtggtcttggagcatgaggaggtccgggcaggtgctgtgagtgctctggcgaagtttggagcccagaatgaagagatgttacccagtatcttggtgttgctgaagaggtgtgtgatggatgatgacaatgaagtaagggaccgagccaccttctacctaaatgtcctggagcagaagcagaaggcccttaatgcaggctatatcctaaatggtctgactgtgtccatccctggtctggagagggctctgcagcagtacactctagaaccatcagaaaaaccttttgacctcaagtctgtgcccctggccacggcgcccatggcagagcagagaacagaaagtacccccatcacagcagtcaaacagcctgagaaagtgacagctgtggcctgcacattcagctgcatgatgaagttcactgtcaaggactgtgatcccaccactggggagactgatgacgaaggctatgaggatgagtatgtgctggaagatctggaagttactgtagctgatcacattcaaaaggtcatgaaactgaacttcgaagcagcctgggatgaggtaggggatgaatttgagaaggaggaaacgttcaccttgtctaccatcaagacacttgaagaggctgtgggtaatattgtgaagttcttgggaatgcacccttgtgagaggtcagacaaagtgccggataacaagaacacccacacgttgctcctggctggtgtgttccggggtggtcatgacatcctggtgcgctcccggctgctgcttttggacacagtgacaatgcaggtgacagccagaagtttggaggagctgccagtagacatcatcttggcatctgtgggataagaggccagcctgcataggacctcatacccttccccaacactacctggaagttgtgccttcctcatgaaactggcagaaaccccttcccaagcttctgtattgaaaaacaattaggaatcattgcagatttttttttattctgctcccacctcccacccgggactacttgctggtgacttttttttttttttttttttaaataggggatgattttagcttgtcctaaatcttgctgtccacccttccaggaaagggacattgtaaatgaataaaacattctcaactcctcttgaatctatcccccaagaaaccatcttatccctgtaataaatcagcatgtatttattgaa

SEQ ID NO: 686724 - DNA, 3121 bp, Homo sapiens
gagcggggggcccggaagtggtccctgtagaaccactgtggcaccgctactccgtgccgcgcccgtcgagcattgcgttgctgcattgcgccccaccgactccactatgttgaagaaattcgacaagaaggatgaggagtcaggtggaggctccaacccattccagcaccttgagaagagtgcggtactccaggaggcccgtgtatttaatgaaactcccatcaaccctcggaaatgtgcccacatcctcaccaagattctttatctcataaaccagggggagcacctggggaccacggaagcgaccgaggccttctttgccatgaccaagctctttcagtccaatgatcccacactccgtcggatgtgctacttgaccatcaaggagatgtcttgcattgcagaggatgtcatcattgtcaccagcagcctaacaaaagacatgactgggaaagaagacaactaccggggcccggccgtgcgagccctctgccagatcactgatagcaccatgctgcaggctattgagcgctacatgaaacaagccattgtggacaaggtgcccagtgtctccagctctgccctcgtgtcttccttgcacctgctgaagtgcagctttgacgtggtcaagcgctgggtgaatgaggctcaggaggcagcatccagtgataacatcatggtccagtaccacgcactagggctcctgtaccatgtgcgtaagaatgaccgcctagccgtcaataagatgatcagcaaggtcacacggcatggccttaagtctccctttgcctactgcatgatgatccgggtggccagcaagcagctggaagaggaggatggcagccgtgacagcccactgtttgacttcatcgagagctgcttgcgcaacaagcacgagatggtggtgtatgaagccgcctcggccatcgtcaatctgccaggctgcagtgccaaagagctggccccggctgtgtcagtgctccagcttttctgcagctcacccaaggctgctctccgctatgctgctgttcgtaccctcaataaggttgccatgaagcatccgtcagctgtgacagcttgtaatctggatctggagaacctggtcacagattcaaaccgcagcattgccacgctggccatcaccaccctccttaagacgggcagcgagagcagcatcgaccgcctcatgaagcagatctcctccttcatgtcagaaatctcggatgaattcaaggtggtggttgtccaggccatcagtgccctgtgtcagaaatatcctcgcaaacacgccgtccttatgaacttcctgttcaccatgctgcgggaagagggtggctttgagtataagcgcgctatcgtggactgcatcatcagcatcattgaagagaactcagagagcaaggagacagggctgtcacatctgtgcgagttcatcgaggactgcgagttcacagtgctggccacccgtattctacatctcctgggccaggaggggcccaagaccaccaatccctcaaagtacatccgcttcatctataaccgagtggtcttggagcatgaggaggtccgggcaggtgctgtgagtgctctggcgaagtttggagcccagaatgaagagatgttacccagtatcttggtgttgctgaagaggtgtgtgatggatgatgacaatgaagtaagggaccgagccaccttctacctaaatgtcctggagcagaagcagaaggcccttaatgcaggctatatcctaaatggtctgactgtgtccatccctggtctggagagggctctgcagcagtacactctagaaccatcagaaaaaccttttgacctcaagtctgtgcccctggccacggcgcccatggcagagcagagaacagaaagtacccccatcacagcagtcaaacagcctgagaaagtggcagctaccaggcaggagatcttccaggagcagttggcagcagtgccagagttccgcggtcttgggcccctcttcaagtcctcgcctgagcccgtggccctcaccgagtcagagacggagtatgtcatccgctgcaccaaacacaccttcaccaaccacatggtttttcagtttgactgcacaaacacactcaatgaccagaccttggagaatgtcacagtgcagatggagcccactgaggcctatgaggtgctctgttacgtgcctgcccggagcctgccctacaaccagcccgggacctgctacacactggtggcactgcccaaagaagaccccacagctgtggcctgcacattcagctgcatgatgaagttcactgtcaaggactgtgatcccaccactggggagactgatgacgaaggctatgaggatgagtatgtgctggaagatctggaagttactgtagctgatcacattcaaaaggtcatgaaactgaacttcgaagcagcctgggatgaggtaggggatgaatttgagaaggaggaaacgttcaccttgtctaccatcaagacacttgaagaggctgtgggtaatattgtgaagttcttgggaatgcacccttgtgagaggtcagacaaagtgccggataacaagaacacccacacgttgctcctggctggtgtgttccggggtggtcatgacatcctggtgcgctcccggctgctgcttttggacacagtgacaatgcaggtgacagccagaagtttggaggagctgccagtagacatcatcttggcatctgtggtgggggggggggaataaataaaaagagaaaaggggggccagataagaggccagcctgcataggacctcatacccttccccaacactacctggaagttgtgccttcctcatgaaactggcagaaaccccttcccaagcttctgtattgaaaaacaattaggaatcattgcagatttttttttattctgctcccacctcccacccgggactacttgctggtgacttttttttttttttttttttaaataggggatgattttagcttgtcctaaatcttgctgtccacccttccaggaaagggacattgtaaatgaataaaacattctcaactcctcttgaatctatcccccaagaaaccatcttatccctgtaataaatcagcatgtatttattgaa

SEQ ID NO: 686725 - DNA, 224 bp, Homo sapiens
ggccctactctcaggatcccgagtcatggctgcggagtcatggctgtacaggacgcatgctggggaggcctcaggagacttgacatcacggcagaaggcgaaggggaagcagtgcacgtttctggccatggtttgagcggagagacaggagaagaggtgaaaggtgggggagggctgcacgcgtttttatacaaaacccaggatcccaaccaagggcgctccca

SEQ ID NO: 686726 - DNA, 433 bp, Homo sapiens
ttttttaaaggtgctcatgttttaatccctagtaccggagagtgtgtttctgatatggcaaaatggacattgctggtgtgattaaagtatggatcttgtggtgggaagattattcccattgaccatggattattcccatgggtcccatgtaaacaagtccaagggaggcaagaaggtcaaagtcagtagaagatggaacgatgaaagcagagcttgaagtgatgcattttgaagacagacgaaggggccaggagctaagaaatgcaggcagcctctaggagctagtaaagacaaggaaatgcatttttccctggagctgtgagaaggaacccagctctgccaacaccttgattttaaccctgtaagtcctattttggacttctgacttccagaaatgtaagagaataaattggtgctatcttaaaaaaaaaaa

SEQ ID NO: 686727 - DNA, 459 bp, Homo sapiens
ttttttaaaggtgctcatgttttaatccctagtaccggagagtgtgtttctgatatggcaaaatggacattgctggtgtgattaaagtatggatcttgtggtgggaagattattcccattgaccatggattattcccatgggtcccatgtaaacaagtccaagggaggcaagaaggtcaaagtcagtagaagatggaacgatgaaagcagagcttgaagtgatgcattttgaagacagacgaaggggccaggagctaagaaatgcaggcagcctctaggagctcacgacagcagaccacaccatcatctccccagcaaagtagcctctggaagggaacggctaacatttccttgagtatttaaaaggagaatcaacaaggtatatgagaattagggagcagaaaggaaggaacattttccatttagggtataactcattttcctccagccacaacaaaa

SEQ ID NO: 686728 - DNA, 197 bp, Homo sapiens
gcccaacatggtgaaaccccatctctgctaaaaatacaaaaattagccaagcatggtggtggacgcctgtaatcccagatgctataggaggctaagacagaaagaatacacttgaagatggagagacagagaatgcagtgagccaagaaatagaaactgcacaccagaaaagagaaaaggcgaagctccaaaacaca

SEQ ID NO: 686729 - DNA, 374 bp, Homo sapiens
ggcgggtggatcacgattgtcaggaagtggagaatggattttagggaggcaagagcaaatgctatagggctaggctgggcgtggtggcttatgcctgtaatcccagcactttgggaggctgagacgggttgatcacttggggccaggagttcaataccagcctgccagctgggcacggtggtaattccagcactttgggaggctgaggtgggtgaatcacctgaggtcaggagttcgagaacagcctggccaacatggcgaaatcctgtctctactaaatacaaaaaattagctgcgcgtggtggcaggtgcctgtaatccaggtacttgaggggctgaggcaggagaattgcttgaacccgggaggcagaggt

SEQ ID NO: 686730 - DNA, 1065 bp, Homo sapiens
cggcacagctcgctttcacagtcagaagtgggtctgttgggatctgtggtccctgtcctccctgtctgtcccttctggtggaggcttctccaccaggtggcagcccgcacaccggtctcccgtggccatatcttggcgtccactctggttcatggccctactcggatcgctcccaataatggatgcaccctctcaagtgactcactctgcgccatgtctccccagactcctggagatgacgttcctgtaaccttccatccgtcgtgaaataaaaggctcactgctcccaggagcggtcttatttattaagaccagatagggatgttcttcagtgctggatctccgagaatcacaggtatactggtctatgaacggggggcatttgctaatctctgagcatgttgcagctttatgtaaataaatgttgattattctcactgtattgaggtaactcttgtctatatgccagtaaatgagttagctacttgacagagcttaaagtaatagtcgccataggttgtagatgggtaaacgatgaaggcacgttctgatcaggatacttgtgatttggtagctggtaaggctgggaggacgcttatatataagagagatttaggaactaaagtagtttaataactatcggatgtgtcatcattaacagaggttaatcagtgtgtattacttttggagttctactaagagatcgggttgagggtatgaaaccacatgaacgggtgatgcatatgaaatccgggtaaagggccaaggttgaaatagtccggactggctggccaaacccaagtacgcggtatggtgtttgcgcccggcaagcatttatttgcgaacggtacgctgcgctgatgaaaccttcagtggaattgccacaggcattgcagcttatggcggaaggcagtgtggtcaccttagaactcttggccagtgccaacaccacagtgacgcgacgttaatactttcttcccccagtcttctttacagggaaacgaagactctacatttcttttgtgcaatgccaggtagggtggagcactagcatggtgctgcatg

SEQ ID NO: 686731 - DNA, 381 bp, Homo sapiens
tgacctgcgacgtttacacagggaaccgtgtatatccttgtgatctgggaaaacccctgtgtcgttctttctcctgagtcaacccctggtcttagttctagctcagagacggcggggccttcttatctgctcctcaggcactggtggttttctagcaccatagactgtctactgacctcatttttcttacggaatggagttagacatggggagcttcaaaaagaacagacctatgcaattcattatgagtaggggggacacaacagtcaaaagcctgttacaggacatgtaagattatgaaataacttgcataatgcaatacttgtattttttaacaaaaatgtaagtatttacaaaataagatccaaggtattttttaaa

SEQ ID NO: 686732 - DNA, 460 bp, Homo sapiens
gaaccggcaggtgaacatcatgccctacgaattgatccgggtgtgactgcagcccaaccgtggcgtggaagggctctgactacatcaatgccagcatcctggataggttatagacagcagaacgcctacatagctaacacaggggcctctaggcgagagcaccgaggacttctggcgcatgctatgggaagcacaaaaccaccataaacgtcacgctaaccaagctacgggaaatgggcagggagaaatgccaccagcacaggccagcaaagcgctctgctcgctaaccagtactattgttgttcacccgatggctgagtacaacatgccccagtatatcctgcgtgagtacaaggtcacggattcccgggatgggcagtcaaggacaatccggcagttccagttcacagactaggccagagcagggcgtgcccaacacaggcgagggattcattgactt

SEQ ID NO: 686733 - DNA, 312 bp, Homo sapiens
tcccctgtcgcgcgctggggctgtttctcgctccttccgagttaccgccgccgtcgccgccgctcctcctctcccggtcctgggtttccttggcgctgcggccgccgctccctctgcgacctgtatgaggaggaggaggaggaggatgtgaagatggcggagctgcagatgctgctggaagaggaaatcccggggggccgccgggcccttcttcgacagctacacaaatctggaacgggtggccgattactgcgagaacaactacatacagtcagcagataagcagagagccctagaagaacccaaagccta

SEQ ID NO: 686734 - DNA, 478 bp, Homo sapiens
cagaggggtgttcccagatagattgggctgagcagcccgtggggcagccactttgatcatgcgatctctttcttagcgccagcactgcccagagggtccatgctgtgagcagtttacagaagtcaagaagcggatcttctcaatggcaatgcgggttgcagcaatccagtgagccacaacctcatgtgcatacaacttcttcttgaaagctatccttggtgtggcccgttctagacatgatctgcaaagcgcgttccgccaaacctacggttctcatcctgaggtggattctgccaggtccaaggcgggcttggtagatttcaaatcccctagcttgacctagtataagattggtggcaggaagtcgcatttgattagagtggatctcaaaatgtcgtccatgaaaatcatcggtgtagccaaaaatggagaaaggccttatgatgtatactccaggtgtgttcaggggaacaagaat

SEQ ID NO: 686735 - DNA, 199 bp, Homo sapiens
  misc_feature (45)..(45): n is a, c, g, or t
cggtcactgcggtcgcggtcgattaggtgctgtacgtgccgcganctcgacagacggacaaacgctagtgctagaagcgcgattaagcaatgtgtgccgcgcgcctgcgttacttgcaaccggtgtatgtctcgtacaacagctgggttcgcgcagacgggcagcgggcaaaagctaaggcttgcaaaaagtacatgcg

SEQ ID NO: 686736 - DNA, 305 bp, Homo sapiens
  misc_feature (7)..(7): n is a, c, g, or t
  misc_feature (22)..(22): n is a, c, g, or t
  misc_feature (78)..(78): n is a, c, g, or t
  misc_feature (97)..(97): n is a, c, g, or t
  misc_feature (158)..(158): n is a, c, g, or t
  misc_feature (185)..(185): n is a, c, g, or t
  misc_feature (196)..(196): n is a, c, g, or t
  misc_feature (219)..(219): n is a, c, g, or t
  misc_feature (223)..(224): n is a, c, g, or t
  misc_feature (227)..(227): n is a, c, g, or t
  misc_feature (254)..(255): n is a, c, g, or t
  misc_feature (257)..(257): n is a, c, g, or t
  misc_feature (262)..(263): n is a, c, g, or t
  misc_feature (276)..(276): n is a, c, g, or t
  misc_feature (281)..(281): n is a, c, g, or t
  misc_feature (292)..(292): n is a, c, g, or t
  misc_feature (301)..(301): n is a, c, g, or t
gccactntggtaccctgagttntccttcggcagaacctgcccatccccttggagaactccgaggtgtgtggggtctancttgtgtgtctgtataganatctatgtgttgccccatgtgtatgtctggaggggagtctataaagaagaagaggaagaancttaaaccagatgtatgtggagctggngtttgctcctntccaccgagtactacgagggttntttnnatntcttagtggaatgtgtgttctaacttnntntctgnnatttagcagatgnaatanaatattatatntttttagtntttc

SEQ ID NO: 686737 - DNA, 325 bp, Homo sapiens
ggccggaacctctttccacagaaaaggatggctctgcttctcctttatcctatttctcctttctgtagctgtttttttcctgctgactctagcttcccattttagcatctgctaatttggtctctgcttctcctttttcctgtgctatctctttactcgctgctgttttcactttagctgtctctgccctacttcccccttctttcagcatctgttcatggcctctgcttctcctttttcctatgtttctcctttctgtagctgtttttttcctgctgactcttgcttccccattttagcatctgctaatttggtctctgcttct

SEQ ID NO: 686738 - DNA, 522 bp, Homo sapiens
  misc_feature (49)..(49): n is a, c, g, or t
  misc_feature (135)..(135): n is a, c, g, or t
tgcaagcaattaggacccccccaaggaagttttcttcaaaaccaccttntacccaccccgcggggacaccgccaggggctgaattctgggtgcttcgcacccggcttcctcctctgcgttccccctgtggcaaanataaggagtccagggcccagggcgggatgacactcattgattctaaagcatctttaatctgccaggcggagggggctttgctggtctttcttggactattccagagagccaaaggaagacttctctgtaggactagcacacccagaggaagagagtgacccaaattggtgctaggagcgaatgaatggggaagtgaactagacctcagccattcccaggagagagatgctgctgcctgggaaaagaaggaatggctttgctttgaggagtcctggagcccattactaagctgcagcatttggtatttgactcacactggccacggtagcgttggactcgcctgactggggagagaaatattaaaagttttctggaggaaaaaaaaaa

SEQ ID NO: 686739 - DNA, 280 bp, Homo sapiens
  misc_feature (81)..(82): n is a, c, g, or t
  misc_feature (86)..(86): n is a, c, g, or t
  misc_feature (145)..(145): n is a, c, g, or t
  misc_feature (149)..(149): n is a, c, g, or t
  misc_feature (227)..(227): n is a, c, g, or t
ctagtccacgctcggagccatccgtccaagggcccgcttgcagtctgtgcagggcttcggacgcaagaagacagcgacagnngtgngcactgcaaacgccgcaatggctcatcaaggtgaacgggcggccctggagatgattgancgcnaccctacaatacaagctgctggagcaagtctgcttctcgcaaagagcgatttgctggtgtagacatccgtgtccgtgnaaggggggtggcacgtggccagattatgctccaacaatgctcccaataaagct

SEQ ID NO: 686740 - DNA, 194 bp, Homo sapiens
  misc_feature (9)..(9): n is a, c, g, or t
  misc_feature (134)..(135): n is a, c, g, or t
gaatgcagnccaactactgtaaggcgcccacattcaacttccgggagtcaggcacttctatatgaggcgagtgggtctcagtctgcttgaatggtgatgagattctgctggatctcagcacgctgcacgtgtcnnaggagagcatgcagtcggacatggtgatccctaattcaggctctaagatgactggtata

SEQ ID NO: 686741 - DNA, 197 bp, Homo sapiens
catatccatccgctcatatgagagccatagctggttcatgagtttcaatacctctggcttctgaaatcgccctgcctgaccactggccgtctctcaaacaagggtttcgatgaccatcgaaaccctaaaccctcatatttcatgtctgcagcagagtcttgtccacttgcaaatttaacagccatagggtttgatga

SEQ ID NO: 686742 - DNA, 404 bp, Homo sapiens
ctttcctgtaacatatttctggtgaccacagaagggactatagtgcagaaacgttgacccaacggctacctttgcgtaagtgttggggtcctgtaacatatttctggcaaaccacagaaaggatgatactgaagaaatccccccaaccccaaagaaatagactgcagcactgattggacgactttgggtaagtgatggggtacccgagtaacaaatgggattgggttagaggcccaacttaggggagttggagtttctcctaagacagagtgagttagaggcccctcttaataaaaggcaaggacacttgactgacctcaggttagaggttactccatcctactctatggagtagctgtcctttcaccactttactttcttaataaacttgtttttgctttgca

SEQ ID NO: 686743 - DNA, 354 bp, Homo sapiens
  misc_feature (172)..(172): n is a, c, g, or t
gcacttcgcctatttgccgaccggattgtatgtatttgcgtataaaaaagatgtttatttgcgggtttgtacattgattattttctttgccgcattggtggcagtgatatcgggtgccagttgcctctatctggtacgcagagtgattaatcgtggtattgtggagaaagangccatcattaataaccattttgaacgcgtactggatggcgggcttttcttttcggctgccgatgtcaaaaaactctacagtatgtataactcggcgttcctggacgacctgaccaaagcaatgggcagaaaatcctttgacgagatttaaaagcgctgccggaaaaaggcggttatttgtgc

SEQ ID NO: 686744 - DNA, 524 bp, Homo sapiens
gggttcccatgccagccatgtctgttacatggcaatctccccagcacttctgagcctcagggaattatcagaaacattggtgtgataataattcacctttcagggcgggagagaggacaacagcagcgttagtcaggaaagctgtggctttggaggccgactctcctttgaatcctggagcttcctccttttggctgtgtgactttgacaagacactcacccagtgcgtcttcatttcctcaagagcaaaatatttgagacaacatcacgtccatgaaacactttgcactgtgtgtgacacacgtaaatgctggtggtaccagtgtggtcatatttacacatggaagaaaggccggaaggaaaattccagatactgtggtggtgttatggcaagtttcacttaattgctttaacaatgatgctcaccataaatgtatacaaactctatttttcaattaaaaaaagatgtgaataaaatttttcccaaattttatataatgaataaatgaatataagtatgtaaa

SEQ ID NO: 686745 - DNA, 173 bp, Homo sapiens
gcagaacacaggtgtcgtgataactaccccttataggccaaattgggataaggtaagactcatatcaacattgtcgtcattggacacgtagattcgggctagtcaccacttctggccatctgatctatagatgcggtggcatcgacaaaaggaccattgagtaatttgagagg

SEQ ID NO: 686746 - DNA, 306 bp, Homo sapiens
  misc_feature (103)..(103): n is a, c, g, or t
  misc_feature (198)..(198): n is a, c, g, or t
  misc_feature (246)..(246): n is a, c, g, or t
  misc_feature (256)..(256): n is a, c, g, or t
cctgcgagccatccagcaggctgtgggaagctccctgcaggggacctgcccaatgataaagatggctctcggtgtcatggccttcgatggcggcgctgccgangtccacggtcagagccccgttcccagggaatcagggggcactgacacggctactgtgttgggacatgggccacggacagcttcctcgcagggctnggtgagtgtcctgggatcccccggatacctgggggtttcccagccgcnggggaccttncggcctgggggaaaagttagggacattgttggagtttgttggctttaagg

SEQ ID NO: 686747 - DNA, 597 bp, Homo sapiens
gcaatatggtgaaaccctgtctctaataaaatacaaaaattagccgggcatggtggtgggcgcctgtagtcccacctacttgggaggctgaggcaggagaatagtttgaacccgggaggcagagtctgcagtgagccgagattgcaccactgcactccagcctaggcgacagagcgagactctgtctcaaaaacagcaacaactacaaacaaacaaaaaacagggttaacaaaagtatggaattcaattctttttatatgctgcagccatgttcctgccctagatttggctgggcatggtggctcacgcctgtaatcccagcactttagggggccgaggtgggcagatcacttgagtccaggagttgaagactagccagggcatcatagcgaaaccccatctctacaaaaaattccaataaagattagtcgggcctggtggtgcgtacctgttatcccagttactggagaggctgaggtgggaggatcgcttgggcccaggagctggacgttgcagtgagccgagatggccccgctgcactcttgttttaacaaagaaaatgaccagacaaaggacacaccgggatcctctagatcg

SEQ ID NO: 686748 - DNA, 236 bp, Homo sapiens
tgtagagtgctggagactgtagccgtgagactggaccagagctggaaaaccgcacctagttactacagggacgtaggcgatctagctggccacgaagatacgaggcctgtaggctgtgctgagagcatagtagttgctgggggctcatggggttcggctggcctggggacccaatctgctgcttcatctgctgttgctgcagaatccgctgctgcagggctatgctaggatagtat

SEQ ID NO: 686749 - DNA, 255 bp, Homo sapiens
atatactctagtaaacctggataccatggcataaccattgggtcatgccttctgatgccgtatctattcactctcacacttgttatgctttactagatctgcttgttcatctatttccgctgctgccgccgtcttggcttattgtgttgttgttggaccctcgtcggttcttcaagctctggtactgattcatcactatcagatccggaatatcttcactatcagatccggaatcactatcagatccgtaatatc

SEQ ID NO: 686750 - DNA, 173 bp, Homo sapiens
cttgggggaattttttttttcccaggccccggtgcccccttttgtccggggcgggttgggacccctgtttttggaaagggccccttttttggggttacctgtttactatgcccgaaattttttacccttttaaccccttttttaccataataattccccccttcggtttttta

SEQ ID NO: 686751 - DNA, 579 bp, Homo sapiens
gcaatatggtgaaaccctgtctctaataaaatacaaaaattagccgggcatggtggtgggcgcctgtagtcccacctacttgggaggctgaggcaggagaatagtttgaacccgggaggcagagtctgcagtgagccgagattgcaccactgcactccagcctaggcgacagagcgagactctgtctcaaaaacagcaacaactacaaacaaacaaaaaacagggttaacaaaagtatggaattcaattctttttatatgctgcagccatgttcctgccctagatttggctgggcatggtggctcacgcctgtaatcccagcactttagggggccgaggtgggcagatcacttgagtccaggagttgaagactagccagggcatcatagcgaaaccccatctctacaaaaaattccaataaagattagtcgggcctggtggtgcgtacctgttatcccagttactggagaggctgaggtgggaggatcgcttgggcccaggagctggacgttgcagtgagccgagatcgtaccattgcactccagcctgggtgacagaatggaatgagactctgtctca

SEQ ID NO: 686752 - DNA, 276 bp, Homo sapiens
ctaaaggggtggacgggttcacagctcagcgctcgggacagggagcagcagccgacacccgacctgaagccgacggccacgcaggtgggcaagagggtgagttcccagctgctggctccagccacgggatgcgcccccagaggcccagggaggctgcaagccgagagcgtgggccgcgctgttctcgtccctgcgatgtggatggtgtgctatccacggggctccaggagaaacatcctgaggctgccgcgcagctttgaaagcacttgctccggc

SEQ ID NO: 686753 - DNA, 392 bp, Homo sapiens
ggcttcctctctgctgagagctgcagagttgatgggatgaccagttgcaaagaggggctgccctttctgctgatagctgaacacttgtcaagatgactttcctagtacagaggagctaccctctctgctaggagctgaacactcatcaaaacaccctggctgtggaaaggagctgctccctgtgggtttcctctgagctgttctatcacttaagaagctcctctttgtcttgctcaccctccacttgtctggatacctcattcttcctggtcgcaggacaagaacctgggacccacagaatttgggaccccagaatggcaaggctaaaagagctataacacaaacagggctgagacatgccccttgctcgccatgttgcaggcaaagagaag

SEQ ID NO: 686754 - DNA, 400 bp, Homo sapiens
tttttccacttttattttagaaattggaaagtacatgtgcaggtttgttatgaagttatattgcgtgatgctgaggtttggagcatgagtgaatctgttacccaggtactgagcatagtacccaataggtagttttctttctaccttgcccccaggagtccccagtatctatttttcccatctttgtgtccatctgtacctaatgtttatctcccacttacaagtgagaaaacgtggtatttggttttctgttcctgcattaatttgcttaggataaaagtttctagctgcatccatgttgctgtgaaggacatggttccattctttttcattgctgtgtagtattccacggtgtctgtggggtttttttaaaggttgtttttgaagaatacttgaaaaa

SEQ ID NO: 686755 - DNA, 235 bp, Homo sapiens
gctcgcccataaatctggtccaacactcgcttcagatattgatggagaaataaacgtgtacgttgtgggtgagaaatgttggcatggacgagaggagaagaaggtatgaaatgaggaaagtgttattagccacaggacatattggattcagttgattcttataaaaactacaggtatcacggtatagccagtacatgaaatgtctaatacaactatcagaggtttagagatttat

SEQ ID NO: 686756 - DNA, 593 bp, Homo sapiens
gtggtggtgggaatatgggccagtgggaatgctatatgaatttgtaaagatgaagcaattttgaaggtggggaagctacaatgatttttggaattcaacaacccgtcttcaaattttggcccatgaagggaggaaattttggaggcagaagctctggcccctatggcggtggaggccaatactttgcaaaccccgaaaccaaggtggctatggcggttccagcagcagcagtagctatggcagtggcagaagattttaattaggaaacaaagcttagcaggagaggagagccagagaagtgccagggaagctccaggttcccccagatttgtgaactcacccaagcccagtggtggcagggcctagctgctacaaagaagacatgttttagacaaatactcatgggtatgggcaaaaaacccgaggccggtatttgtgcctaattgtatacccggttattttagtttctgttctgtggaaagggtaaagccttcccccaaagggttttaatgtagatttttttttgccccccctgctgttgattgctaaatgtaccagtctggtcgggcccctgaataaatgtctttttttta

SEQ ID NO: 686757 - DNA, 353 bp, Homo sapiens
acagagttttccatgcacactttctcaacccctcacgtgggtttccgattcagctggctctacacaagaatctggaccgggcgcgtggctcatgcctgtaatcccagcactttgggaggccaggttggattacctgagctcacgagttcgagaccagcctggccaacatggcaaaaccacatctctactaatatacaaaaaaatcacccaggtgcggtgatgcacgcctgtagtcccagttactcaggaggctgaggcaggagaatcgcttgaacccaggaggcagaggttgcagtgagctgagatctaaccattgcactactgcctgggcaacaagagtgaaactctgtctc

SEQ ID NO: 686758 - DNA, 378 bp, Homo sapiens
  misc_feature (58)..(58): n is a, c, g, or t
aatctttaccttttgggttatcatctcctaccagaaaagaaaaaagagaaaacagcantccttatctttttctacattatcttctgacttttataggattgtaaaatatcctagtagtgttagttaaatcaagttacattttcagagtcaggtgaccctcctggcgggggatgggggggagtgtttattaaaaatgcaatagcatgacattaaaaggtcacatgatcatcttttttgcctagtttctaagttttgggttttttgtttgtttgtttgtttgtttgtttgtttgtttttttgtttaacagaccatgacagaccataatatggggtacaataataggaaaaactaggatgatatcttaaagtcatttaatg

SEQ ID NO: 686759 - DNA, 714 bp, Homo sapiens
  misc_feature (155)..(155): n is a, c, g, or t
  misc_feature (160)..(160): n is a, c, g, or t
  misc_feature (249)..(249): n is a, c, g, or t
  misc_feature (262)..(262): n is a, c, g, or t
  misc_feature (268)..(268): n is a, c, g, or t
  misc_feature (417)..(417): n is a, c, g, or t
  misc_feature (423)..(423): n is a, c, g, or t
  misc_feature (432)..(432): n is a, c, g, or t
  misc_feature (442)..(442): n is a, c, g, or t
  misc_feature (469)..(469): n is a, c, g, or t
  misc_feature (531)..(531): n is a, c, g, or t
  misc_feature (605)..(605): n is a, c, g, or t
  misc_feature (657)..(657): n is a, c, g, or t
  misc_feature (691)..(691): n is a, c, g, or t
cttggtggagagtctaggaatgggttacaaggctcccagaggggagcccactaggctagattaattatgtaagatgaaagaaccagccttaactaaagcgataatgagaggagtgcttcgttcctgagaggttcagtagtggtggcccaccatangccanggtggatggtaggggtgctgtgatggaaccaggttctccagcatctgtggaaatgcttggattctggaatcacaggggccagctggcancacttaaccatcngaagtnggagatgatttttaacagcaggcagcaaggatggaatggcaaacagggggctttgaccccacagagacctgtgggggaaggctaatagaccactgcactcctgaagacaggccagatgggcagccgatgaaggttctgctcaaattctnaaaccnaaaagaccnagaacaggtnttgcaaaacctgctgttcaccactgcnatggaaacttgttggtctctcacctgctctgttaaacctaaaccagaacccattgattgttnggaaaggccaaatttctgttgcaggtgatttccattctccaaccatatccccccaccctacccctgttgttttnccttggccaacttccaaggcctttctttcctcccagggcttcctcttgctcncccaaaatccgctttttttattgtctactccccntgccctggaatttccccgaaatt

SEQ ID NO: 686760 - DNA, 687 bp, Homo sapiens
  misc_feature (650)..(650): n is a, c, g, or t
ataaccgtgtcatcccctatatatccatatagccaagcgtctaccatttaaatcactacaaacaatatactacctctttatcctttttcaacaatcaatttctccattcaattattacctttaaaaaccaccctacccctaataaattctacccctaactcactgtttacgctatccaaaatttatttttatttacgcgcagattcacctccccccccatatctctcacaataccttacatcctcttgaacagtacataccctttagaacagcattctctctaccccctaaaaaaaacaatataatgataacgtcatcaaagggtacgccactttacgaaattttctaaaatcccacctctttccattatacgtttcggccccgttcaacgcaccattaattatttcccaaaaaacaccctttttcccaaattgccttttatacataagcccttctctgcttacttaataaagggccctcctaacacgcttttttttccaaaacaattttttaaaacccccccttttaaaaaaaaccctttctcccagtttccatttaaaaacccccttttcaaaacttggaataaacctaaactcttccaaccttttaatattataccccccccaaaaattacttttaaaaaaggaaanttgacaagcccctttttctcccttttttcttgaaaaa

SEQ ID NO: 686761 - DNA, 318 bp, Homo sapiens
gaaggggagtaagaagggaaggatcataaagaactaaataaaagcagatatgtatatatatatacagacggtgtgtgtattatatatgtatgaactgtgaatatgaggaaattgctctgcaacatactgcattcaaaagttaccagttctagctatagagatgaaggggacattaaccttgtaagaaaattaatccatcacatcatccgccccatagtgaaaattgtgacaagcattttcaagcaactcttttaatttagtaaaatttgggtggtggtgtaattgaacattcactgcctttgaaaactacatctcatg

SEQ ID NO: 686762 - DNA, 758 bp, Homo sapiens
ggaggccccctgggttggttctgacagtctggggcaacggaacgggcacaatgatgatgaacagtatgcttggcgagtatcctgctggaggtaccttcactgctgcgtgctgaccatggtgagcccattggcaggggagtaccaaaagatgatcctccatcttaaagaagatcagacaggagtacctagaagagaggcgggtcataagaagtagtgaattgaagcattctcgaggttcataggctatcccatcagccctttattgtggagaaggaacgaggaggaatggaaggttagtgatgatgaggcagaggaagagcaatgggtgagaaagaagagggaagataatagatgatgaagaaatagcccgaacggtatcgaagatgtgggttcggatgaggaggatgactgcggtaaggatagacgaagaaggaaaactaatgaagatcaggagatgaaatatcattgatcaggacatgaactaaactagagcaagcctattgggaccagaaagaccctgatgacgatcactcgcaagaggagtatggacgaattctacaagatgcctcactagatgactggtgatagatccgacttggacagctccaatggcacctttgctgtcagcaagggtccagtagggaatgtcacgggccagtagcgtatatacttcctcgtcgggctccctgttgaccgtttaagaggaacagagcgagcaagaacgacatcaaactctatgtccgccgtgtgtcatcggg

SEQ ID NO: 686763 - DNA, 293 bp, Homo sapiens
  misc_feature (142)..(142): n is a, c, g, or t
  misc_feature (157)..(157): n is a, c, g, or t
  misc_feature (194)..(194): n is a, c, g, or t
  misc_feature (203)..(203): n is a, c, g, or t
  misc_feature (209)..(209): n is a, c, g, or t
  misc_feature (243)..(243): n is a, c, g, or t
  misc_feature (274)..(274): n is a, c, g, or t
  misc_feature (285)..(285): n is a, c, g, or t
cttttgcgcaggcgtcgcgccctggggccggggccgggcggcaaccgcggtgcgcaaacgcaaaaccgtcggtgggtcggggaatcggtcgcctgaagaaggtaatcaacctcttctgggctcaagaaatggacaacaaagnagcgcgctggcctangccatcatccagttcctagcatgaccagctccggcangggggcctntcgtcngtgctcaggagagttggaagtcgcctccagtgcntggagatgcgtttggggtgacggtagaaganagtgaacttgncgatacct

SEQ ID NO: 686764 - DNA, 588 bp, Homo sapiens
tgatgtgatctagaggatcccagcggggaacaatcacttctggtagactgaattggggattttttataaagagggcatggatgtaatggaatcctggaaggaggaagggagcttacggctgtgggaggagaggagatctgtgtagattatgagaactgtggacggtggtattctggctgaaagttagtttcctgctttctagagctaagcgggctaccacttctagtgctttaaagcaggctggctacccttggactgtgttatctagtggtttagagaggtaagctacaggggcaaaggaaggaggatttcctttctgtggtcctaagacacggagggctattcctcagctttcagcagtatagagagtgaaaggtggggagatatcaggtaaggacggagctgacgcagtgacaagagcagttgtggagtttgttggaagctggggagtatgtaatgtgaggggttaaggggttcattgggagggcctttggccacttcatagaggggatgagctaggagggcaaagttggaaatccatattctaaagaagcctgctagccctgggaaggaaatggattcgctttt

SEQ ID NO: 686765 - DNA, 815 bp, Homo sapiens
ggaggttccgggttgccgcacccaccgcctggcccagttcccgggcctgtccttccgcgggaggcggactccgggcgggtgggggaggcgcagcgggaaggagaggcgcctcccgggcccttggaccggcctgacggcccccttcggcccaggggtcccgggacgcgcagcctggacaccctgctcattgtccctggacacggcagtcttccctccgcccgcagcagcccccgcccgcgtgcaagtgggcgcgccattggccgcgccgggcggggtcggcggcggcggtgacctcattgcagtgccccggggacgcttggcaggcgcggagtcccaggtccccctgactggggctccccctgatagggcgcgggccgcccaggggcctggtgcaggtcccggggactgggggaggaacagacaactatttctggaaggccctttcccaggggtccagagggaccaggcattcctgggaagaggggtcactcctcagcgggtcgcctgtgtcctcgcggtggaggacgcatctgtgcccagaaccagcttctccagaaagcctgggaccttacagccaggccaggggcaggtccttgaggggctcacacatccccccatcggtggcagacacacaagcccccctcggtggcagacaccacatcccccccattcgagtggacagacgggcacagccgcgaccccataaaggaaggcgagctcgcacaacacaccccggaagagtaacaaaacactagccacagcacgcggcacggataagccacggacaaccacccagggagaaacaaaaacccacg

SEQ ID NO: 686766 - DNA, 164 bp, Homo sapiens
tggggcggggcagagggggcgggcttgttgtgagcggggtgcgcccccactccagtaagacttgcttgccttgcttgcgcctgtccccaaggaaggccgtgatccttggctgtggatgtcccggcagcccgggtttgggggcgcgcactagccgcggccatggg

SEQ ID NO: 686767 - DNA, 1304 bp, Homo sapiens
gagagcgggtactgcgaactgccgggcgatgctgtcgctgccgccgtgatacggagagcaacagttccccagcaacaccccttccccgacacaggcacacaccccccgtacaggcacgcacagcccgaccccacagtgcccggctcggctgcgccatcctcgtattggcccaggaagcccatccagacccctgaccacgcagtagcccagataggaaagaagagcctcatgcctgagctcgaggaggcaggcaccatggatctgacaaataactgggcattgatccagcatgcatgaagccctagccagatgccacggggacatacctgtgcaaaggcccaaccagacttgcggctgcggccagggcactattgaagcgactgctggtcattccatgtgtggatcaaggaccagagaaggtttccaagcgagacccaactggtgaccggtagcctatgggccattgaaaggcgaagcaagaaatcgtttgaggaattccctacataccacacccgacaaacgtagattccaagcaaacttagtaagcgtatattgagaccatatcacgtcatcggccaacaatgacacctttaagcaggacaaggacgtttacgatgccacagcttacttgcagtacttatcccatgcacaaccgcctttgtaaaagaggcacaaacacgtcaggcacgagacccgtgcgacattgaacccattgccctgggttattgtcggtggatcaccggaatgaaatccacgtgggcacaggaaatccgcgcggcgatagcgcatgggcgacgcgcaacaaccaagtgccagttgcacaccgcaactgacgttggagacggaaacctacatacaccgagtggggccacttcagagagaatcggatcgacgaattggaagccgacgtgagaagggcccgaacgcagatgggacgacgggaaatatgccgccggacgggacgccgcataggaaaacgcgacaagtaacggggagacgccagggaaacccggcggactgtccacgggagctacactcatttccagcagcggaaaacaatgaagtcattccacaatccattccgcagataaggagaccaagcgtattcactaagcgcgcctaacaggcgaaagcaacgtgagaggacggcacattacgcacaacagtatgcattaggacggactgagggagcaagcgggaaagcgcgattcacccatttcgggtccgccgcaatatcggtgttatgagcacgcaaggatactgacgcgtatgcacagtaagacccgagcacattgcaggctgag

SEQ ID NO: 686768 - DNA, 153 bp, Homo sapiens
  misc_feature (7)..(7): n is a, c, g, or t
agccttntactggaactgcgtctcctactgctaattcggagagtcagcggagcggcgcggaggctctgctcggatcgaggtctgcagcgcagcttcggttagcatgagttctgcagtgactgcagggaagctggcacgggcaccggccgaccc

SEQ ID NO: 686769 - DNA, 953 bp, Homo sapiens
tggtaaaaatggggtcttgttatgttcccggggctggtaattgaactccgggcctcaagcaatctcaatctccttcttgccctcagctttcccagaagggcgtgggatttacgggcctgtgggccacccaaacccaaagcagaggtttaaagagctttgggaaaaaccagcctctcgtcctccagtcttcttgtgtggtaagtggtgtgtggtttgtgaaaacagtgaagtctcttgtgcctcgtgtgtgtgcccagaggcgtggagagtgtgcaagggcgcatagtgactctctcgaggtgtccacgtgcaacctctctgtgcctctctctcggtgtgttcaaacacaatttctgtgtgtggcctacagccctccgggagttagcgcgtgggatttaccgaggtggtacattgcccacccagtggcgcgtgggtataattttgtgggtgtttttatagtgataaaagaagtgggggtttctcactcaacattgtggccccgaggggcgtggtctcttctaaaacttctcgtgagaccctcaagtggaatcccacgctgtggccttgcggccttcccaaaaagtgctatgaggatttacgaggggttggagcccaattggcaaccttgggcgcgtgtctccataacaagtcctttaatatttcaacaaccaggtttttggtgcccaagccatagagagagcctataaatcgtggtaacaaaatacttggaagggccagaggacaaatagcgattagcaccgagataaagggggacattaatggggggctattcattgcgaaagccagaaagatagccctccgtggctacctaagagccagccttgaaggcgcccaacaaggcagaaggaacaccatttgcgcgttttgaacctaaccatccgtacctacgaaaccattactgaccagactgcgggataaataccccttggaaa

SEQ ID NO: 686770 - DNA, 237 bp, Homo sapiens
cggggtccagttataacgagtatttggagggcagcacggtgctcacagtgtcgacggaacttgtacaggcaggcatgcaccgcagtggtgaatacacgtcgacctggctccatgtttgcgatattgggaggtgagcacggtgctcatgtatcgaaggaacttgtctagaggaggtatgcaccgcagtggtgaatacaccgtcgagctggaggcatgcatgcgtgctcgggtactgga

SEQ ID NO: 686771 - DNA, 95 bp, Homo sapiens
  misc_feature (82)..(82): n is a, c, g, or t
agcgttgagtcccctgtaaagccaaaccccctaaaggtctccacacgtgcgtgtttaacggcacacttgacaatggcttcanagcacgcttgaca

SEQ ID NO: 686772 - DNA, 448 bp, Homo sapiens
aagtgattacttaacctgtgtcctgcggaggacccttctggcgggcagctggaagcctgtgcacccgtcttcaaataatggcttttaatagcagactggaacgtttcggattacaaagcaaaccggaccctttcaaacctggttatctttgtgaagtagcattccacttaaaattgggagccctttaataacagagagaaatcatgtctatgaaactagagaagctgctcagataactgcaaaccagccatccttactggttttacgagtagtagtgttataaagaaagttgtccagttttatgagtcttgtaggtttgtttttttgtttttcaaatacagtagtgtacaaaaaggaagcagaatgtggttgctgtctcaatgtaatgcctcgctgggcctgagaatttgaaaataaaaaagtttttttctttccccaaaaaaaaaaa

SEQ ID NO: 686773 - DNA, 1575 bp, Homo sapiens
  misc_feature (324)..(325): n is a, c, g, or t
  misc_feature (334)..(334): n is a, c, g, or t
  misc_feature (336)..(336): n is a, c, g, or t
  misc_feature (338)..(338): n is a, c, g, or t
  misc_feature (341)..(341): n is a, c, g, or t
  misc_feature (779)..(780): n is a, c, g, or t
  misc_feature (792)..(792): n is a, c, g, or t
ctggaggggcctggcttactgtcagtcccaggcctcagtcacagcctttacacaccctgcctgtggggcaggtccctcctttccctctgcctccattagaacccagggcttttgccaagagaggccgggtgttctggcggcattttgtggcaggactttgctctcagccccaaccggagcagctgtccacagtgccctcccccttgtgccaagttcctggtcagggcccaggaggccatccaggaacgccaataaccatccatccctgctacagcacagccaggagtggggtggggtccacgttccctctgactatccaagaanntagagcctnanantanagccgtgttctgtgtacagtgttcctccctggacctcgcaagagtctgcccggacaacccagagtgaccttgagctgattcccaactctggcattggtgtgtcctggctggccggctcctggttatgtcgggctggtggcagcccctcctgccagcaaggtacagagcccagtgctggccggagcctgaccaacctgatctcctaatctaggttggggacacaggagcatgacaatcacaagtcaaaattaggtgtggaacctcagggcggagctggtgtcctgccagagatgcctgggggccggcgggaggacttggaggaggagaggctgcagagggcagggacacagagtagggggccacacaaagggtggctcagagtggaggaggggcataaaggaagagccatacataatcagcagcttgaggggtgtggannctgcagccacanaggacttcccagggagggaatggggcatagtgtggaagtggtgccctcattttcagaggctgcagacacttcgctggaaggcacacttgccacggggcaggcagtgtggcagtcagaaatgtgtgggatggaatgggcgcggtggctcacgcctgtaatcccagcactttgggaggccgaggcgggcggatcatgatgtcaagagattgagaccatcctggccaacttgacgaaaccccgtctctactaaaaatacaaaaattagctgggcatggtggaacgcacctgtagtcccagctactcgggaggctgaggcaggagaatcgcttgaacctgggaggcggaggttacagtgagcagagatcatgccactgcactccagcctggcaacagagcgagactctttcaaaaaagaaatgcgtgggacagaatggcgggtccatcctggacgggatggggcccctgacccctgtgtgcctgcgctctgccagctcctgcgcagagcaggtactcgggggagggaggatggtatgctccaaactcaaggtcccaacttggtgtctgacttggccgcaagaatccttggggtccgtggttacttcatacaatgcaatattgcgggggtaggggcttgggggtcacttactagctgagtctcaacttctgtcccccagcctggtaaatgggcctgaacctattcacctcttgaagggtctctgagggaatcaactttaggaactctgtccgttggtgttgatgtcacaaagtgctggaaaactggta

SEQ ID NO: 686774 - DNA, 184 bp, Homo sapiens
agttacaacattcgaggcgggcgtactgttgattctattaatatgaatatccaaataggcaaatccatatagacagacagtggattagtgattgtcagggctgggaaaatgggagattggggagtgacagcttaatgggtattggatgccctgccctttttgagttgatggtagtgatgatatt

SEQ ID NO: 686775 - DNA, 786 bp, Homo sapiens
  misc_feature (738)..(738): n is a, c, g, or t
  misc_feature (741)..(741): n is a, c, g, or t
  misc_feature (745)..(746): n is a, c, g, or t
  misc_feature (755)..(755): n is a, c, g, or t
cccttctactctctccttcgtctcctttcctcttttctctcctctcttccgtcttcctttcctctttctttcttgttttctcctctccttccctttttcctcttcctcgcgtctttccttctttcgttcttctcccttcttctttcttttcctctctgctccttcctcgtctctctctcccctctctttctctcctttctttcttcccttctcttttcctctcttcttttcccttcttcccttttttctcctccttttctttcccgttcttccgtctctcctcttttctctcctcctccttttcctttctttccttcctctttcgttcctcttctttttgtttttcctctcccctctccttcccttcttctttcttcccctttttcttttcctcccttccctctctctcctctcttctttcctttcttttctctctttttcccgctttctcctttttcttgctccttcctcctctctccttccgttttcctcctgctcctttcttttcttccttttcccttcccctctatctgtcttcgtccctctccctctccgtctccctcttctgttctctcctttccctctgcgtcttccccctcttttctcctttttctgcgcctgtggttttctctcttcttttcctcctaacttctcctcctccctcccgccccctgtctatattctcctcgtacctcttcccgatttcctccggcccttcgatgcgctcatggcgcgacnccncgcnnctcgatggnctcatgcggggtccccggcctagtcttcttc

SEQ ID NO: 686776 - DNA, 770 bp, Homo sapiens
  misc_feature (203)..(203): n is a, c, g, or t
  misc_feature (218)..(218): n is a, c, g, or t
  misc_feature (225)..(225): n is a, c, g, or t
  misc_feature (258)..(260): n is a, c, g, or t
  misc_feature (297)..(297): n is a, c, g, or t
  misc_feature (319)..(319): n is a, c, g, or t
  misc_feature (352)..(352): n is a, c, g, or t
  misc_feature (385)..(385): n is a, c, g, or t
  misc_feature (395)..(395): n is a, c, g, or t
  misc_feature (403)..(403): n is a, c, g, or t
  misc_feature (457)..(457): n is a, c, g, or t
  misc_feature (466)..(467): n is a, c, g, or t
  misc_feature (470)..(470): n is a, c, g, or t
  misc_feature (511)..(511): n is a, c, g, or t
  misc_feature (518)..(518): n is a, c, g, or t
  misc_feature (758)..(758): n is a, c, g, or t
acacatatacgccacacatgcacacacacaacatacacgcacacaaaggttatattctgaacaccaaagtgatagaaaaaagctttgaatgcgctaaatcaaataaaaccctttattataataaactgtggcatactgtggctatcatgaaaaatattgtaactattttaaaagccaaaggaaaaatactggcagtttgaaantagcagcaaaaagcngataaanatagaatggaagataacataagactaatatcannnttctaatgttgatactgtgtaggattgccctgaagtnattttaaattggttcttaaggnactcttaaaaagtcccttaaaaatattaaattnttgccccttacaaacagtggaaaagaaaaaaanagtatttggnatgttacncgcacccaccgaggaaatgtattaggtgctatcatcaattatggtctttgtttntgaccttcnnccngctttatccagcccccctttccgtgcccctgtcgtgaccgnccgttcncccttcctcccgccgcccgtctgaagtgcatttaccaggtctaagaatatatttaaaggttgggggcaaggcatgattgatgcacatttaagaagaaaaatatggaacccataaggtaggtcaagttctttggagagtgttgagaatgaagatgtattaaactctggctatcttggaggagattccaaagtacatggagttctccagctctttatcagttgaaatctgtttcatcgtggncaatagataatt

SEQ ID NO: 686777 - DNA, 301 bp, Homo sapiens
  misc_feature (9)..(9): n is a, c, g, or t
  misc_feature (19)..(19): n is a, c, g, or t
  misc_feature (51)..(51): n is a, c, g, or t
  misc_feature (71)..(71): n is a, c, g, or t
  misc_feature (98)..(100): n is a, c, g, or t
  misc_feature (104)..(104): n is a, c, g, or t
  misc_feature (106)..(107): n is a, c, g, or t
  misc_feature (134)..(134): n is a, c, g, or t
  misc_feature (152)..(152): n is a, c, g, or t
  misc_feature (156)..(156): n is a, c, g, or t
  misc_feature (166)..(166): n is a, c, g, or t
  misc_feature (171)..(171): n is a, c, g, or t
  misc_feature (179)..(179): n is a, c, g, or t
  misc_feature (199)..(199): n is a, c, g, or t
  misc_feature (219)..(219): n is a, c, g, or t
  misc_feature (244)..(244): n is a, c, g, or t
  misc_feature (264)..(264): n is a, c, g, or t
  misc_feature (268)..(268): n is a, c, g, or t
  misc_feature (280)..(280): n is a, c, g, or t
  misc_feature (282)..(283): n is a, c, g, or t
  misc_feature (292)..(295): n is a, c, g, or t
agcacaaantgggcttggnaaaacgtgtattttgtgtatagaaggaatttnaggagaggtattacttattntcatatgtattttaactgtttctctgnnnaaangnntttacttcctcctcctgttcctccccncctccctccttttccagntcantatttggagntcaanactgtctntcaatcagatcatcttgatntttttctttatctcccttcnccttcctaagtcccatttcttggtnataaatattgcattattcanactntcaaactgtgtntnncttacaatnnnnaatgat

SEQ ID NO: 686778 - DNA, 859 bp, Homo sapiens
gcagtgactccggggcgagcgccgcgagatcgcagtagttcgggccatggaggctggagcctgcgctctacccgatggcgggggctgcggtggccgcagggtcgacgatggacctgctcggggtcccggatcgggccctgaggccccgttggacgaagctgtgtgtggctgctgtaccccaacgtacaacgaggaggaggaggagcgccgctagctaccgctcgtaagcgcctgggcttgctcaatgaacgtgctgagttgccagcgccgggggcatgctcacctacgtgcgtctacctggtgcctcctgcagattcagctgatcctgcactacgacgtagacctaccgcgaggtgaagtatggcaacatggggctgcccgacatcgacatgcaaaatgctgatgggtatcgaacgtgactcccgatcgccgccctgctctacacacctgtgctcatcaggttttttggaacgaagtgtgcatgatgttcctcgctgtgggcatctacgccctctttgtctccaccaactactgggagctgctactacatcgcttgctgccctcggcttgtggcccttgggcatggccatcgtgcctctttgggcttccatgggcaactacatcaccaggatggcgcagaatgtaccatgagttactccctattacaaggagcagtgatgggcaggggatgaagcagcgtgctccgcggggctcccacgcgccctatcttcctggtcttccaagccatcttctacagcttcttccatctgagcttcgactgcgcccagttgcccatgatttatttccttgaaccactacctgtatgaccttgaaccacacgctgtacaatgttgcagag

SEQ ID NO: 686779 - DNA, 891 bp, Homo sapiens
gtgttcagctacagcttccttaatggtccttcgaattccgcctagaaatggaagctcttccatctgatatcagcgattgatgaaggcaaagttctaacagtagcctgtgcttttctacgggtgatcctaccccagaagtaacgatggtccgtgttggtggaagaaaaatccactggtcaagaacaggggatggtggccacattgaaaactagagatgatctgactaccctgatcatcatggaggtacagagacaagatggtggactttatacccgtgagtttagggaatgaagtttggatctgatctctgccacatgtgaatatacatattcgatccatttaggagggcctgtgcccttatgactctaccattcattcttaacttttcgcaaaggtttcacacggacataatcgttgtctgaacgtgtacctattcaatatgaacaaggagtaggtttgtatctagcctgaaatgagtcagagttcaaagatattcatttgaatcgttttcatagttgttgacctaatgaatataactagatttgtctagtggcatgtacatatctgtatatgagccggattaacggtccataagagtttgtagccagacatattctatgacgtgtcacaatgtgaagttttgcaactaactgtggtagggaggaaagtttctttgtgggatcgattacctgtgtcgaaattaatcaatctttgtggctcaaggctacgggaaggtcaggactgcgtcccagggtggagacaattcgcttgggaggctgtcgctcaaagaggggggggggcttcatggagggggggcaaacactgggaaggggggggggagggggttcccccgaggaaaaaaggtaccggaggagaaattgattcaacagg

SEQ ID NO: 686780 - DNA, 228 bp, Homo sapiens
ttccgggttgtgcatcagacctcctcattccttacgggcatgtagaaattccccttgacagtccggtagccggtcctgcagcctcgggctcccccaacccacctctaccctctccgcccgggacacatcatcgcatctccgggagccctcagaaccccctcattcactcaacaaatctccggctatgcccacggacccaccatttctctgggatgcccaaacccggaa

SEQ ID NO: 686781 - DNA, 104 bp, Homo sapiens
cagtcgtagacgtcgtagagtagtagtttctgcaccagtcccgcacaggccaccagggaaatggattattccatctatttccttgggcacatcttcttcctgag

SEQ ID NO: 686782 - DNA, 132 bp, Homo sapiens
ttggcttcagagagaatgaagcagagaccatcttcacatcgacgatcgccatgttggaggcagagcggctccctgtgtaactgacacttagggagatatggaagctggtgtgggctttgggttcatcacaag

SEQ ID NO: 686783 - DNA, 229 bp, Homo sapiens
acgtgttattatttcgaaaataatgttgtacttcatgccaggtactgacaaaagacttgagaccaggatggttactcttgtcagctaaggtcaccttgtgccttttggacccttttcttcctggacctacttgaaatcaagcttatcggattacagtgactactttctatacggcgacttgaaagggcaatacgttaaagtaatgacgcctgatgacgacgtttctgtt

SEQ ID NO: 686784 - DNA, 150 bp, Homo sapiens
  misc_feature (133)..(133): n is a, c, g, or t
ggcactgggataagatattgttagtcactcacagtaggaagaaactagcaatagacgattacaatatgatgtagaaaatgctacgcagagattagaagtgtcctattgcgtcttctgtcacttgttttcacantcctaccctcacaggcc

SEQ ID NO: 686785 - DNA, 416 bp, Homo sapiens
cttctcttctgaaagaataaaaatatgatgctacccagacaaggaaagaatcccaaattttgacgttaagacacccagaaccatgacctctgtgtccctcctgacagtccacctccctgtgcctggtctgtccctcactcctgcaaaagacgaggaggaaattaaattcaactcacatgggccagtcgatcaaatctggcaaagagctcgttgagcatcctgaccagctcctgagcagacaaggtcgtggagagccattttgccaccagggaaggaatatggaacaccacctatgattctctgcatggaccgtggctctgccttcacttctgctgacccctttgctcagaattcatgtatttgtgtttttcacttggctgacttcgtctcaaataaagccaagaagaatcaaaaaa

SEQ ID NO: 686786 - DNA, 191 bp, Homo sapiens
atctagaaatattgtaaaactttatatgtagtagtcgtatagtaagggtgtctgaatagttgatttatcataagcttgtgatttatagagtttctctttcatgtgaatatttcatttgtatatcaatgaatcatgtttttttaataatattttatttatatttattttatattatattattaaattattta

SEQ ID NO: 686787 - DNA, 326 bp, Homo sapiens
  misc_feature (35)..(35): n is a, c, g, or t
ttgggggggggggttttgggggggggaataaaatnttttttggggcccccccctttgggtttcccggggcccctttttttaaaaaaaaggtttttttttacccccttttggggttttcccccccgggggcccagggggtttttttttttaaggggaccctttttttcccctttttccctgggggggggggggtcccccccccccaattttttccgggggggggggggcccgggggtttttttttttttccccccccccgggcccgggggggggggggggggccggggttttcccaaaaaaaaacaaaaaaatttttttttttttta

SEQ ID NO: 686788 - DNA, 468 bp, Homo sapiens
ggcggaccggtcccatgcacagttcaaacattcaagtatccaacttcagtggtttagtatattcagagttgtgccaccattaccacaatcaactttacaacgtttacatcaccccaaaaaagaaaccccatactaattagcagtcacccctttgtcctccccaacccttcagcctaagcaaccactaatctgccttctctctatatatattcgcctgttctggacatttcatataaatgaaatcatataatatgtggcctttcatgtctggcattcttcacttgatatgttttcaaggtttttccatgttgtggtgcatatcagtacttcatctctttttttattgctgaataatattccttgtatggatatgccacgttttgtttattcacttgttagttgatagaaattagggctgtttcaattttgggctattataaataatgctgcaaagaacatctgtgcaca

SEQ ID NO: 686789 - DNA, 599 bp, Homo sapiens
  misc_feature (49)..(49): n is a, c, g, or t
  misc_feature (466)..(466): n is a, c, g, or t
  misc_feature (570)..(570): n is a, c, g, or t
cacctcgaaactagtcagggctccgttgtccagcagcttcccgcggtanatcttgtcctccaccacgtcggtccagtagagggcgctctggctgaggtggaagtccagggcgatggtgttgcgcaggccgggcaccaggacgctgtagtctcctttgtgaagatcgatgcgccggatttcatggcggttggagaaaatgatgaacggcttgaaggggtccaggctgcggcagctctcgccgtcaggttccaggacccagccctcgtagcaggagcacttcacgctgaacttgttctggtcgcacttttggctgcatttgagatgcttggcacagtagctctggatctggcaggtgtggttgtcgggccccagctccatgcccagagggcaggaacacacaatgccttcgccaggtgccactgagcagttgtggctgcagccaccgttattcagagagcactggtcncagagctcgccctcatctgagccgtcgccacagtcgtcgttgccatcacacagcttgtcagggggcaggcagactgaggtgttgttggcacaagggtgcgaggngtgctgcaggcccgggactcgcagttctc

SEQ ID NO: 686790 - DNA, 642 bp, Homo sapiens
  misc_feature (35)..(35): n is a, c, g, or t
  misc_feature (47)..(48): n is a, c, g, or t
  misc_feature (416)..(416): n is a, c, g, or t
gaagacccccgaacgggtgatgcggttgacgacgnggggaccgctcnnatgagtctgcttcgtgtgcctatcccacctgcttccccctgactcagtttacctgcaacaatggcagatgtatcaacatcaactggagatgcgacaatgacaatgactgtggggacaacagtgacgaagccggctgcagccactcctgttctagcacccagttcaagtgcaacagcgggcgttgcatccccgagcactggacctgcgatggggacaatgactgcggagactacagtgatgagacacacgccaactgcaccaaccaggccacgaggccccctggtggctgccacactgatgagttccagtgccggctggatggactatgcatccccctgcggtggcgctgcgatggggacactgactgnatggactccagcgatgagaagagctgtgagggagtgacccacgtctgcgatcccagtgtcaagtttggctgcaaggactcagctcggtgcatcagcaaagcgtgggtgtgtgatggcgacaatgactgtgaggataactcggacgaggagaactgcgagtccctggcctgcaggccaccctcgcacccttgtgccaacaacacctcagtctgcctgccccctgaca

SEQ ID NO: 686791 - DNA, 187 bp, Homo sapiens
ctcttgctgatatttagtttccttatcctgttcatgccttgtatcgccttttaccttgctatatcttctcgtttcttctttcctgctttctgcttaggtacgggctagcgaggcggtggctctgagctctactttcgggctatgtctttattcttatttaacgtcgtgaattctccttaaggacctt

SEQ ID NO: 686792 - DNA, 1506 bp, Homo sapiens
  misc_feature (49)..(49): n is a, c, g, or t
  misc_feature (466)..(466): n is a, c, g, or t
cacctcgaaactagtcagggctccgttgtccagcagcttcccgcggtanatcttgtcctccaccacgtcggtccagtagagggcgctctggctgaggtggaagtccagggcgatggtgttgcgcaggccgggcaccaggacgctgtagtctcctttgtgaagatcgatgcgccggatttcatggcggttggagaaaatgatgaacggcttgaaggggtccaggctgcggcagctctcgccgtcaggttccaggacccagccctcgtagcaggagcacttcacgctgaacttgttctggtcgcacttttggctgcatttgagatgcttggcacagtagctctggatctggcaggtgtggttgtcgggccccagctccatgcccagagggcaggaacacacaatgccttcgccaggtgccactgagcagttgtggctgcagccaccgttattcagagagcactggtcncagagctcgccctcatctgagccgtcgccacagtcgtcgtgtgcctatcccacctgcttccccctgactcagtttacctgcaacaatggcagatgtatcaacatcaactggagatgcgacaatgacaatgactgtggggacaacagtgacgaagccggctgcagccactcctgttctagcacccagttcaagtgcaacagcgggcgttgcatccccgagcactggacctgcgatggggacaatgactgcggagactacagtgatgagacacacgccaactgcaccaaccagggtgggcaccaggggcccgttggggtggggatgagatcgagccccctgcatcagacacccagcctatccatctgtctttcagacccacggtgtgtcggccaccatctgggagccagaggtagcctaggcatggctcttgtccttcaggagctcccggtcctgtgggagagggaggttgccgaaaaatcattgccacacgctgttaatatcatgcgctttgcagttggtggccttgggtttgagctccagctctgcagcttattatctgggtggccttgagcaagttacttaatctccatgggcctctgtgagtttcgtctgcaaagtggggtaataatagcaccaacatcacagcgctgatgtgggagtttagtgagatcacgcacgaaaagtgctcagcacacggctgtgtctggtaaatagtagcttgagaaaaggatgctgcaggcagggcatgaactgagcctgaagagacagaggagagagggcctggctccacaatgctcccagtgcctggcctctggggcccagcctcggagcgcggtggggacctaagtttctggagggatgggccctctcacggacatgctggcttccttagctctggaagcattgtgccagactttttattgtgaacaactaaccaaatttttaacactaccgtattagtttctcctcgtctcaccgttcctgcaggctggacgtcccaaacccaaatgttggcggttgggttcctcttagccgtgtga

SEQ ID NO: 686793 - DNA, 164 bp, Homo sapiens
tagcagtgcggggggaggcagaagccacggattctgcggcccgtgcgcacccgcgagcttagcacgtagttggggtccaggtcgtcgccgccctgcaggttgtcggggtagaggtcggtcttgtgctcatcactgggcttgtcggggctgtcgggctatcgggg

SEQ ID NO: 686794 - DNA, 1085 bp, Homo sapiens
  misc_feature (49)..(49): n is a, c, g, or t
  misc_feature (466)..(466): n is a, c, g, or t
  misc_feature (859)..(859): n is a, c, g, or t
cacctcgaaactagtcagggctccgttgtccagcagcttcccgcggtanatcttgtcctccaccacgtcggtccagtagagggcgctctggctgaggtggaagtccagggcgatggtgttgcgcaggccgggcaccaggacgctgtagtctcctttgtgaagatcgatgcgccggatttcatggcggttggagaaaatgatgaacggcttgaaggggtccaggctgcggcagctctcgccgtcaggttccaggacccagccctcgtagcaggagcacttcacgctgaacttgttctggtcgcacttttggctgcatttgagatgcttggcacagtagctctggatctggcaggtgtggttgtcgggccccagctccatgcccagagggcaggaacacacaatgccttcgccaggtgccactgagcagttgtggctgcagccaccgttattcagagagcactggtcncagagctcgccctcatctgagccgtcgccacagtcgtcgtgtgcctatcccacctgcttccccctgactcagtttacctgcaacaatggcagatgtatcaacatcaactggagatgcgacaatgacaatgactgtggggacaacagtgacgaagccggctgcagccactcctgttctagcacccagttcaagtgcaacagcgggcgttgcatccccgagcactggacctgcgatggggacaatgactgcggagactacagtgatgagacacacgccaactgcaccaaccaggccacgaggccccctggtggctgccacactgatgagttccagtgccggctggatggactatgcatccccctgcggtggcgctgcgatggggacactgactgnatggactccagcgatgagaagagctgtgagggagtgacccacgtctgcgatcccagtgtcaagtttggctgcaaggactcagctcggtgcatcagcaaagcgtgggtgtgtgatggcgacaatgactgtgaggataactcggacgaggagaactgcgagtccctggcctgcaggccaccctcgcacccttgtgccaacaacacctcagtctgcctgccccctgaca

SEQ ID NO: 686795 - DNA, 258 bp, Homo sapiens
gcctggacaacaagagcaaaactccgtctgcaaaaaacaaaacaaaagaaaacaaagaaaagaacttagtgacacagacagtcccaggacacatagcactccccagtaccagaatcacaggcacacacagggctgcccaggcacatgcaatctccgtgaagtatgcagagtcccttgaacacacaagtttaccctgacacacacagtctctgtgtcctacaatccatacagtgagactcatcccacaagcaattggtc

SEQ ID NO: 686796 - DNA, 1138 bp, Homo sapiens
  misc_feature (82)..(82): n is a, c, g, or t
tagatgagtcaatgccacttgttcagcccgcacctgcccccccaaccagtgctcctgtgccagtggccgctgcatcccattnctggacgtgtgatctggatgacgactgtggggaccgctctgatgagtctgcttcgtgtgcctatcccacctgcttccccctgactcagtttacctgcaacaatggcagatgtatcaacatcaactggagatgcgacaatgacaatgactgtggggacaacagtgacgaagccggctgcagccactcctgttctagcacccagttcaagtgcaacagcgggcgttgcatccccgagcactggacctgcgatggggacaatgactgcggagactacagtgatgagacacacgccaactgcaccaaccagggtgggcaccaggggcccgttggggtggggatgagatcgagccccctgcatcagacacccagcctatccatctgtctttcagacccacggtgtgtcggccaccatctgggagccagaggtagcctaggcatggctcttgtccttcaggagctcccggtcctgtgggagagggaggttgccgaaaaatcattgccacacgctgttaatatcatgcgctttgcagttggtggccttgggtttgagctccagctctgcagcttattatctgggtggccttgagcaagttacttaatctccatgggcctctgtgagtttcgtctgcaaagtggggtaataatagcaccaacatcacagcgctgatgtgggagtttagtgagatcacgcacgaaaagtgctcagcacacggctgtgtctggtaaatagtagcttgagaaaaggatgctgcaggcagggcatgaactgagcctgaagagacagaggagagagggcctggctccacaatgctcccagtgcctggcctctggggcccagcctcggagcgcggtggggacctaagtttctggagggatgggccctctcacggacatgctggcttccttagctctggaagcattgtgccagactttttattgtgaacaactaaccaaatttttaacactaccgtattagtttctcctcgtctcaccgttcctgcaggctggacgtcccaaacccaaatgttggcggttgggttcctcttagccgtgtga

SEQ ID NO: 686797 - DNA, 355 bp, Homo sapiens
tccgagggcttcattcaaatgacaatcaaatgagacaaagacgtttttgaaaggcaagaacttaaagctcaacacgcatgcatcccatattaaaaacagtaactattccaagtttttaaaaaatacaagaaaaatgacaatttaaagtataagaaacaacagcagttgagtaagacctaaaaggagcatagaaagctggaaagaaattgaaagaggattcactagatcttgatgattgggccattctctttgaagcagtttggtaataaaatactatgtttgcttttcccagtattcaacagcacctctagattccaaagtaaataatatttacttaataatattgcaaaaactg

SEQ ID NO: 686798 - DNA, 523 bp, Homo sapiens
  misc_feature (106)..(107): n is a, c, g, or t
  misc_feature (336)..(336): n is a, c, g, or t
  misc_feature (360)..(361): n is a, c, g, or t
  misc_feature (364)..(365): n is a, c, g, or t
  misc_feature (367)..(368): n is a, c, g, or t
  misc_feature (370)..(370): n is a, c, g, or t
  misc_feature (372)..(373): n is a, c, g, or t
  misc_feature (380)..(380): n is a, c, g, or t
ttcctggggtgttggaaacgtgctgtaccctcactggggtggcggttccacgggtgaatacatttgccgaaactcatgaagtgtacgctgaaaatctgtgcgtttnnctttaggcaaacctaagttttgttttgttttgtttttttaagtattacacagtgactgtggtggtggctggaagcagaagtcaggagtgtattcttttttttttttttttttaaaccggcagtgggggcgggaaagggggatgccaagtactttcctaagtgttgaatacaagtggaggcaaacttggaaacgttccacatttcacagggcgagggcagggtgccctgncagcggctagcaaagaacggcccnnctnnanngngnncggcccnactcggaccccaagtctccctagaggtcctatcgctcccagcggtttccgcagccacctccaccacctccgcagcaaaacgctagccggactggcgggccctcgccggcgtcgtgctgacgtaacgcgcgtgctgacgtcgcc

SEQ ID NO: 686799 - DNA, 186 bp, Homo sapiens
ggatcccgacgctctctgtggggcaaggtgaacgtggatacaagttggtggtgacgccctgggcagtgctgctaggtggtactacccttaggacccagaggttctatatgagctcctattggaggatcttgtccactacctgcatgctagttcatagagcaaccccctaagtgttgaagtgctcac

SEQ ID NO: 686800 - DNA, 294 bp, Homo sapiens
  misc_feature (51)..(52): n is a, c, g, or t
  misc_feature (59)..(59): n is a, c, g, or t
  misc_feature (66)..(66): n is a, c, g, or t
  misc_feature (118)..(118): n is a, c, g, or t
  misc_feature (154)..(154): n is a, c, g, or t
agtagccagggctctgctagtaaccaggacagtgctagcaaccagggctgnnctagtanccagganagtgctagtagccagggctgtgctagtaaccaggacagtgctagtaaccagngctgtgctagtagccaggatagtgctagtaaccagngctgtgctagtaaccaggatagtgctagtagccagggctctgctagtaaccagggctgtgctcgtaaccagggctgtgctagtaaccagggctctgctagtagccagggctctgctagtagccagcactgagctcgtgcc

SEQ ID NO: 686801 - DNA, 543 bp, Homo sapiens
  misc_feature (30)..(30): n is a, c, g, or t
  misc_feature (126)..(126): n is a, c, g, or t
aagcctgtctgtggtgacgatggccaaacntacaacaatccttgcatgctctgtcatgaaaacctgatacgccaaacaaatacacacatccgcagtacagggaagtgtgagaagagcagcaccccnggaaccaccgcagccagcatgcccccgtctgacgaatgacaggaagattgttgaaagccatgagggaaaaaataaaccccagttctgaatcacctaccttcaccatctgtatatacaaagaattcttcggagcttgtcttatttgctatagaaaacaatacagagcttttgggaatggactcactgattttcagtcttttccatctctttcctcctagactctgtgatctgagggtataaagacatctccaccaagtctgagccctcaaaatgtcctgattacaatgctgtctgtccaactgcctgttcaataaaagtaaactcagcagaacaccctttctgggatttctttgtcactatctggataatagatatttgcttttaaagaaactgaataaactctacccttttgtctta

SEQ ID NO: 686802 - DNA, 362 bp, Homo sapiens
cgtatcgctcacttctccaccaactacctggtccctgggctctgtacaggcagcccagctacaggcgcccggacggtcagcagcgcggacagagtatatacaggcgctgggggctctggttcccggatctccgtgtaccgctcaaccagcttcacggggcggcatggggtccgggcgcctggccaccgggatagccgggggtctggcaggaatgggaggcatcagaacgagacggagaccatgcaaagcctgaacgaccgcctggcctcttacctggaccgagtgaggagcctggagaccgagaaccggaggctggagagcaaaatccgggagcacttggagaacaagggaccccaggtcac

SEQ ID NO: 686803 - DNA, 565 bp, Homo sapiens
tatgggatgcatggctcatgcctgtaatacagcactttgggaggcgaggtgggggggatcacttgaggtcaggagttgttgaccagcctgccaacatagtgaaaccctgtctctactaaaaaaaaacaacacaaaaattagccgcgcgtggtggtgcgcacttgtaatcccagctactcgagaggctgaggcaggagaatcacttgaaactcaggaggtggagttgcagtgagccaatatcaagcccattgcactccggccagggcaacagagcaacactctgtctcaaagaaacagacaagaaaagaaaagaaaatggcatatctcatcccctaggcctcccctgcaaaggacagagaaccttcaagaggcagataacacagcctcactctaaatcaaagcagacaagagccctgctcaagattatcccagagaatggcttgacaaaacttctaaaacaacagccatgatttttggcagctctctcaaaacataatcagttcatatttgcgagtttcatatagagggcgaagctgtatcattacatagcaatgtatttcacaaa

SEQ ID NO: 686804 - DNA, 135 bp, Homo sapiens
cgtgatgtgtgcctgtgctttctgagtgctagcaagcccacctctgcctgtcacacacgttgcagtgttgcctctcaggttgttgcttgtcttggccttttcatgatgctttttcttatatcggcaatcaagctt

SEQ ID NO: 686805 - DNA, 654 bp, Homo sapiens
gtggctctggctctggagagccccgtggatggaggctggatgccctcggccctgcctgggatgaatcccagttgcgcagttatatgcttcccgactagtgcccattcctgcgtctgagtcagagctgacccccgggcagaggagcttattgagaatgagtgatgcctagtggttggctgacctgacagcaagatctttgtgtaatcctttgccctgcaaattgggaagccttgaataccttgcaaggagcaatattggcaatggagacttctctgtgtacagtgccatgcacccacaagttcttgtactatgatgcagaagaatgatggccaatttccatgaactttaagccgaggtccaacatggggaagacatgaaatttcatgagttcgttgagaaactgcagtgatatacagcagcgaggaggggacgagaggttgtatctgcatgcaaactgctcaatgacactgtgggctggaagatttgtcatggacttcttaggttttaacttggaactggattaataagcaacagggaaagcgtggctgggggcagcttacctctaacctgctgctcattggcattggaggacattggacacctgctcactattatgagcagcagaactatttgtcaaataaactgtacaactga

SEQ ID NO: 686806 - DNA, 284 bp, Homo sapiens
  misc_feature (58)..(58): n is a, c, g, or t
  misc_feature (135)..(135): n is a, c, g, or t
  misc_feature (211)..(211): n is a, c, g, or t
  misc_feature (228)..(228): n is a, c, g, or t
cactctacttttaatttatcttcagaaaatgtgaaaaaaaatcttaaataggcttttncttgaaagactgatgaccttaagtgtaattaaataactaaaagttaaaaatggttcttaatggtcattctgtttggngtcataaatgcattccacaaacaacccagtaacaattataattattgtataatctagttctataacaatacttagnttacaatttatattttnataaatgcttgttagctgaaaaaagatgtgttggtcaacccaaagttatctaggct

SEQ ID NO: 686807 - DNA, 94 bp, Homo sapiens
agaggcccctttttttttcccccggggttttgccccggggcccccccccccccccaggtggtttaaaggggccccgggggggtttgttttttta

SEQ ID NO: 686808 - DNA, 214 bp, Homo sapiens
atgtccctagctgggcaaagccaagaccaccaagaagcggcacagcgggacacatccaatgccttcgcaatgtttgaccagtcccagatccaggagtttaaggtgaggctttcaacatgattgaccagaaccgtgatggcttcatttgacgaaggaggacctgcatgacatgctaggcctcgcttggggacagaaccccacatgacgaataccg

SEQ ID NO: 686809 - DNA, 106 bp, Homo sapiens
acagctcaggaaaccgtgggctgtacagacattttcaaagtggccagtgttactttaatgggactgccttcgtaatttatttgctattgaaacttctaaaactagg

SEQ ID NO: 686810 - DNA, 164 bp, Homo sapiens
aaccgcctgcaactacgggccatccagtgggactccaaattgacagctacctacaccccgagaagccaagaaatagggcgcgagataatatcgctgtaatcacaaataatcaacccggcagcgcactagctgccgggcttcaagcggcatcacactcagcctct

SEQ ID NO: 686811 - DNA, 635 bp, Homo sapiens
  misc_feature (367)..(367): n is a, c, g, or t
ggccttacgataggcggcaaaaagggagccaagaagaaagtggttgatccattttctaatgaaaacgatgggtatgatgtgaaagcacctgctatgtgcaatataagaaatattggaaaagacgctcgctcatcaggacccaacggtaaccaaaattgcatctgatggtctcaagggtcgtgtgtttagaagtgagtctgtgctagattcgcagaatgatgaagttgcgattgtagcaagaattcaggctgatctactgtaagatgtgcagggtcaactagactgcactgactaatttccatggcatggatcttacccagtcgacaaaaatagtagttccatgggatcaatatacacaattgcgcangacgaaaatggagtttgcgacatggcgttcaagcgggtttcgaaatagttcgaaaggaacgtgacccgggactaggctctacctatgtctgtcctgtctggattctggtgatgagggtgtgttacatagacaaacgtcggaacaatcagcatacggtaagatgcatcttagtgctctagacaccgaacgaggtgcctgcataagtccgcgaagagagatgatcggaaatcatgaccctgagaggtgccagacaaatgacttgaaagaa

SEQ ID NO: 686812 - DNA, 205 bp, Homo sapiens
gagtggcatgggtacctcatctgtcacgtcgatgattctatatggatacctaaacaaaaatagaaggcgggactcttcccttcgcttgaatatcatccctgtatatggcatgaatgagagattacccatatttccatcagagtaatacaactactaccttgcttacttccttaccgcataacgtacaccatgactatacaacacc

SEQ ID NO: 686813 - DNA, 580 bp, Homo sapiens
  misc_feature (494)..(494): n is a, c, g, or t
  misc_feature (522)..(522): n is a, c, g, or t
gcgagacggttcaaggcgtctcactctgaaacacatccacgggcttctggtgccggagcatctcacatacgatgcgggatgttgcagaacgtgccactgcggcctcccccgttcaagcagtgcacaacggtgcggccttccccgccattgtattcctcttgccacttgtccacctggcgaatgagcttcaagaaggagcgcttagacactggtgtgtccctgtacatcggccagcccaggaactggaattgctgcaccatccgatatccatcttggggactggcggcattgtaaatgcggaatatcctgctgatgatgtcctcttccaggtcagcagagacaaattccacctggatggggccgtgtctgtgtactccgttttctggccagtactgtggacacaactgggcaggatccacatcatttagcataactacggatgtgcagtgataatccaggaccagtctccaaaagtctttcactgtgtttggcanaggatgctgcgtgactataaaagctganggctgtttatagctggccatgagggcagcattgatgtagttgctgctctccccatcga

SEQ ID NO: 686814 - DNA, 297 bp, Homo sapiens
ctgggaggtgcagtgcaccatcaccctcaaagcctggggttgccgcccatggcgcgggaagggttatcaaggcccccttgcgcaggtccaacggctcatagttgcgcaagttgaacgagcccattttcaaaaccctgcgctcttcgttctgttgaaccagccactggcccaggcgtttgccaattagggtgcgttcgtagttgtctaaaccaaggttgcagatataacgactggcctgggcgatgtcgatcacgatctcttgcttcatgctgatcgggtctaaccgcagttcgaatt

SEQ ID NO: 686815 - DNA, 311 bp, Homo sapiens
  misc_feature (26)..(26): n is a, c, g, or t
  misc_feature (33)..(33): n is a, c, g, or t
  misc_feature (67)..(67): n is a, c, g, or t
  misc_feature (189)..(189): n is a, c, g, or t
  misc_feature (228)..(228): n is a, c, g, or t
  misc_feature (261)..(261): n is a, c, g, or t
cgaaatatcattgcagatggcatctnagatctnatggagatgtacaaagaggttaatgttgtttttnatgcctgctaacacaacgtccgttcgacagcctatccatcaaagagtaatttcagatgctattatttaggaaatatattcttggccgggtgtggtggctcacgcctgtaatcccacactttnggagaccgagacaggcagatcacgcaatcaggagatcangatccatcctgggccacgtggtgaaaccccgtnttctactaaaaatacaaaattttagctggggtgggggcaatggcatgcct

SEQ ID NO: 686816 - DNA, 417 bp, Homo sapiens
gagatgccagcaggagatacgaagtctcccagccaaggaagaagcccaggacctaatggcttcactgctgaatttcaccaaagatttcaagaactaataccattcctactcaaattattctgaaaaacagtgaacagaatacttccaaacttattctgtaaggccagtatgaacctgttaccaaaaccagacaaagacacatcaaagaaagaaaattgtccaggcgcagtggctcacacctgtaattccagcactttgggaggccaaggcgggcagatcacctgaggtcaggagttctagaccagcctggccaacatggtgaaatcctgtctctaccaatactacctaacaaatttagccgggcgtgctggtgtgcgcctgtagtccccagttactcgcgaggctgaggcaagaacc

SEQ ID NO: 686817 - DNA, 115 bp, Homo sapiens
ccctctccaccaaaagctctagcccctttagccttccactgttccagcacaggtcatctgtgcaagcatcattgtctttgcatgcatccattcttcttaaataggtgtagaacag

SEQ ID NO: 686818 - DNA, 853 bp, Homo sapiens
  misc_feature (9)..(9): n is a, c, g, or t
  misc_feature (194)..(194): n is a, c, g, or t
  misc_feature (197)..(197): n is a, c, g, or t
  misc_feature (216)..(216): n is a, c, g, or t
  misc_feature (220)..(221): n is a, c, g, or t
  misc_feature (306)..(306): n is a, c, g, or t
  misc_feature (342)..(342): n is a, c, g, or t
  misc_feature (349)..(349): n is a, c, g, or t
  misc_feature (374)..(374): n is a, c, g, or t
  misc_feature (383)..(383): n is a, c, g, or t
  misc_feature (386)..(386): n is a, c, g, or t
  misc_feature (397)..(398): n is a, c, g, or t
  misc_feature (445)..(445): n is a, c, g, or t
  misc_feature (507)..(508): n is a, c, g, or t
  misc_feature (510)..(510): n is a, c, g, or t
  misc_feature (512)..(512): n is a, c, g, or t
  misc_feature (588)..(588): n is a, c, g, or t
  misc_feature (592)..(592): n is a, c, g, or t
  misc_feature (594)..(594): n is a, c, g, or t
  misc_feature (599)..(599): n is a, c, g, or t
  misc_feature (608)..(608): n is a, c, g, or t
  misc_feature (611)..(611): n is a, c, g, or t
  misc_feature (709)..(709): n is a, c, g, or t
  misc_feature (712)..(712): n is a, c, g, or t
  misc_feature (721)..(721): n is a, c, g, or t
  misc_feature (731)..(731): n is a, c, g, or t
  misc_feature (733)..(733): n is a, c, g, or t
  misc_feature (737)..(737): n is a, c, g, or t
  misc_feature (740)..(740): n is a, c, g, or t
  misc_feature (770)..(770): n is a, c, g, or t
agcgtagtnatcccacacttgttttaattacaatagaataagttaaccaagaaacaagttggaaaatggaaggcccctcccaggtttgcacccagaggcagggagaggtagaccctcaccagaaagacctccagtaataacacagatagccacctactatttggttttttttttttttttttttggaaatgganttncgtcttgtcgcccagggtngganntgaaatggcgcgatctcggctcactgcaacctccgcctcccaggttcaagcgattatcctggcctcagcctccctagtaatgggngattacagggcgcccaccatcacacccagctaattnattttangtaagagatggggtttcaccacgtnggccaggcnggntctcaaactcnntgacctcaggtgatccacccgtttgggtctcccaaagtgcggggatnacgggcgtgagccattgacccagccaccaccccattatttctaagggacttatatgtgtgannancngtagtaagcttggcatattttacctcgttaaatttcatctcaactctttgaagcacatttagccactcttcataantgananagggnggctctganaanttaggtgaccgcccagggccacacagctaaggggaggagctattaaccattatcactatggtcccccaggccttgagattctggataacctagaaaanttnagatgttcnaagtttaccnanaacntcntgaaaatggcgcggaaggtaggccatgtangaggtttcccggtcattgtgcaaaagatttatttacattggggaacggtggtactacagaaaaattcttagcgtgaatgtgtg

SEQ ID NO: 686819 - DNA, 531 bp, Homo sapiens
  misc_feature (106)..(106): n is a, c, g, or t
  misc_feature (109)..(109): n is a, c, g, or t
  misc_feature (111)..(112): n is a, c, g, or t
  misc_feature (115)..(116): n is a, c, g, or t
  misc_feature (118)..(118): n is a, c, g, or t
  misc_feature (120)..(120): n is a, c, g, or t
  misc_feature (122)..(123): n is a, c, g, or t
  misc_feature (130)..(130): n is a, c, g, or t
  misc_feature (165)..(165): n is a, c, g, or t
  misc_feature (198)..(199): n is a, c, g, or t
  misc_feature (228)..(228): n is a, c, g, or t
  misc_feature (248)..(248): n is a, c, g, or t
  misc_feature (257)..(257): n is a, c, g, or t
  misc_feature (352)..(352): n is a, c, g, or t
  misc_feature (424)..(424): n is a, c, g, or t
  misc_feature (458)..(458): n is a, c, g, or t
atcatagtgtccaagtgtgcactcaggtacctcatcatagtgtcccagtgtgcactcacccggcctcctcatagtgttccagtgtgcgctcactcagcctcgtcanagngnnccnntncncnntcacctngcctcatcatagtgtcccagtgtgcactcacctgncctcactcatagtgtcccagtgtgcactcaccnngcctcatcatagtgtcccagtgtgcgctnacctagcctcatcatagtgncccagtgtncactcacctagcctcatcatagtgccccagtgtgcactcacctagcctcatcatagtgcaccagtgtgcactcacctggcctcatcatagtgtcncagtgtgcactcacctggcctcatcatagtgtcccagtgtgcgctcacctaccctcatcatagtgtcccagngtgaactcacctagcctcatcatagtgccccagngtgaactcaactagcctcatcatagtgccccagtgtgcgctcacctggcctcatcatagtgccccagtgtgca

SEQ ID NO: 686820 - DNA, 424 bp, Homo sapiens
gtcgaatcacagaactcagaggaaaaaaaaaataaaatttaagctttcgggaaagcagcccctcttgggcaccatcaaacatttcttggttccccttaaattgggaactcttcaaatatcaggggtggtgcgggttgggccatacttttatctggggtccttgtgagtgacagaaatgggtgcggccgggaaaagatctccctccttaacatttcctcttctccctcctcctctttatactaaacccggtgcctcaccagacggggcagggcgctctggaaggagagatcccgggcccaggacaggagatgccaattctaatttatctcacggagggccttggaaaaaaacgcttcggggccaggctcaggggctcaggcttatataatcccagtatttggaaaagctgaggcatgaaaatagt

SEQ ID NO: 686821 - DNA, 363 bp, Homo sapiens
caaaaaaaaatcttcggttaaatcatcaagtcatggactggcttagtagccctgaaagctttcatgaatttagaaatccatggcccggcacggtggctcacacctgtaatcccagcactttgggaggccgaggcgggcggatcacgaggtcaggagatcgagaccatcccggctaaaacggtgaaaccctgtctctactaaaaatacaataaattagccgggcgtagtggcgggcgcctgtagtcccagctacttgggaggctgaggcaggagaatggcgtgaacccgggaggcggagcttgcagtgagccgagatcccgccactgcactccagcctgggcgacagagcgagaatccgtctca

SEQ ID NO: 686822 - DNA, 215 bp, Homo sapiens
ctttgtaaacagattaccagtttttcacttgtgggtgtgactcttcaaaatatttctttattcataattaaaattaggtttaaattttcataatatgagactattctataggcagtgcttgcttgaaaagtcttatttttaaatctcccttgcatgaggtgcctacttccccttttcaaatctatcatatatcatactttgcttctaaaaaaaaa

SEQ ID NO: 686823 - DNA, 527 bp, Homo sapiens
cagaatatacgcacagacaagccatgcttgtatctgcagcacagcatcctaactcaaaccaatggcctataggtaacgatgggattggaccacgacatggtatagggctctaaccatgtggcaccatttcctatacaataaatatgacaaagtactaggttctcttataatctgacccttgtaaaagtgactccatcaatttcagaggtacccaatgtaaaccagaagggcagaatatctgcgtgttcaagttaggttttatcagatatatagtggaaactaacagaggaaaaaacacttaacatacaaattttgtacatatatttgatttacaagagagacccgaaacattcatcatagcagggctatatagggtcccagaaacatgttggatggtacaaaagagtacagggtacttcgacgtgtgacattacactaagggactatattatgtcgggtaattgaactgacctaacaaatgtgctgtatcttatatagcacagatacgtatatgagtccccgactgg

SEQ ID NO: 686824 - DNA, 334 bp, Homo sapiens
gagacggagtctcgctcttttcgcccaggccggagtgcagtggtgctatctcggctcactgcaagctccgcctcctgggttcacgccattctcccgcctcagcttcccgagtagctgagactataggcgcccgccacagcgcctggctaattttttgtatttttagtagagacggggtttcaccgtgttagccaggatgttctcgatgtcccgacctcgtgatctgcccgcctcggcctcccaaagtgctggcattacaggcgtgagccaccgcgcccggcctttttttccttcttgttcagtttattaatgatgccccttctgtcgtcttctc

SEQ ID NO: 686825 - DNA, 170 bp, Homo sapiens
ggcacatgggctctgggcaaggagtgggagcgtgggtcgctcacctccctctccttaccttgaggctctatggaggaccccttggttctgccccactcccatttaaagatgaggaaactgaggctgtgttgtggcagggagggctaagggctcgcgtggaaccggagctc

SEQ ID NO: 686826 - DNA, 376 bp, Homo sapiens
  misc_feature (38)..(38): n is a, c, g, or t
  misc_feature (186)..(186): n is a, c, g, or t
  misc_feature (316)..(316): n is a, c, g, or t
  misc_feature (322)..(322): n is a, c, g, or t
tacaggtgcatgccactgcacccagctcattgcctttngttttgtatgttaaagcagatttagcccatgaacttggagacagttttgctgagcagaacttcatctcttggctttgctgtttgtttgccttgttttttttgttggttttacttagttttgtttttggagctaacatccataactttngctatgtatgatataatcccctgtatgaccctgggcaagtaacttaacccattcagggtccaggttcctcttatgggaaaggggatgcttgataagacactgttcatggttccttgcagttttactattnatgganaggatattcggatggacctaaaaatttaaacccagtttccctttttccaaattt

SEQ ID NO: 686827 - DNA, 312 bp, Homo sapiens
  misc_feature (18)..(18): n is a, c, g, or t
caggcaaaaacgtccccnaagccagcagttgtagagactgtttcaacagccaagccccagcagatccaagcgttgatggatgaagtgccaaaacaaggaaccattgtccgagaactgaaagcccaaaaggcagccaagaacgaggttgctgcggagggggcgaaacttttggatttaaaaaaacagttggctgtagctgaggggaaaccccctgaagcccctaaaggcaaaaaaaaaaagtaaaagcccttgggtcataaaaagtccctttaatagatagggccagtaataaataaatgtccaatttttata

SEQ ID NO: 686828 - DNA, 899 bp, Homo sapiens
aaagactgtaatttcatgttcgttttgaggaatctaagccagtttaggggaacacaatctgcttctggggaaggaggtgcaatttgcccaggtgtgagtaaactttccccataataagtaggatggaggcttcacagtctgctctgtgtggccaagctctctaacatactgtggctccatttcagctcctccaggttcctcaagggcatcttctcttagaaggagccaaacacatggcttggtagagatgctcatatgtaagtcatcagctaggatgacaattacagtgcttccatctaagcagtagtatgtcctcttttctttctgagatctaacagtgaatgttatagaccaggtccagtgggctctcattgcatgccttcttattccagttcctgtgagaggtgagacaagccactcaggatttttttttttaaacctttcttggctgtgagatattaacaacatttccttgtttcatattcttggtaacaaaaaacaaaaagggtcgggggggatacctaattggccaccaagtactgggatatattaaagcctgcgtcactgatgattcacctaagaaaaaaacacaagaaacgaacaagaacacatagtttgagcacacgatgagggcaccatagagagatgttttgaaaaacgaaagtgctgagggcgcgggacacaaatgataagagatgaaaaagggggagaaaagagagtgatacataaagaagaacccgggggacaacaaaacagtggtgtagaagtctccacagaatagaaaaagcgcccggggcgaacacgcaaaaagtcgttcagaaaaacacagaaagggagatcatgaggggcaaaaacgggagtactaaacaagagaagacgagaggcgccataacaaatac

SEQ ID NO: 686829 - DNA, 296 bp, Homo sapiens
tagcatgttgtacagccatttaccaagattgttgtaggttaagaagggcagatttattagagaaattgtgaaacatatgttgcagtgggcagctcagcatagaaggggctacctgcaaggaggctaggttctggaggaaagtttatagggtcctgcgttaagggtgctatgtgtgaaatgaggtcattgtgcccgcaggttgtttgtgattagctgtctctaacaattgttcatacaataattgttcattattgttctcaacttggggctctccccaacctggggacccttcctta

SEQ ID NO: 686830 - DNA, 789 bp, Homo sapiens
aagcagaataaaatatttaatatgtaatttacaatgtatttcaccagctcagcgatacaggatgtatacagattatatcaaagtagtagacagttacgggcctgtgcaaaccctgcaacaaatagtacttcagatatctgcgtaattaatagaacaaacacacagcttatgctgttgtagaatgtgatacaatttcaactaccacaaaaatacaaagggctgcaaaaatgtgaccattccaacaacatatataagttattaaagtaagagattcgattctgaaagaatataaagtgaagacgtttaagtaggtctttgtctacatgcatattattcctcattagaagaaacaatatatgtaaaaaggccatggggtaattgctttgttaacatttgtatgcgccggagcatcggtggtctcacgcctgtaatcccagcactttgggaggccgaggtcgggcggatcacaaggtcaggagatcgagaccatcctggctaacctggtgaaaccccgtctctactaaaaatactaaaaattagccgggcgtcgtggtgggcgcctatatgtcccagctactcgggaggctgaggcaaggagaatggcgtgaacctgggagggtggagcttgcagtgagccgacgatcatgccagtgcactccagcctgggtgacaagagcgaggactccgttcaaaaaaaaacgaaaaatactcagacgccgcacacctttgtcgaaaaaggccattctctggcaaaaatcaattatctaagcctttaaggctccgaggcca

SEQ ID NO: 686831 - DNA, 118 bp, Homo sapiens
  misc_feature (3)..(3): n is a, c, g, or t
gcncgcggacgtggtgggcgtggcgctttggtgcttgccttgttttacggtactacgcttttctacgtcacggttacggtctacggacggcgtcgcgggcactgctttggcctctgga

SEQ ID NO: 686832 - DNA, 442 bp, Homo sapiens
gcgcctgtcttggtctcgcaaaaggcgagattgagctctgatcggcctgcacccgtctgggaagtgaggagcgtctctgcctggttgcccatcgtctgggatgtgaggagcccctctgcctggctgcccagtctggaaagtgaggagcgtctctgttcggccgccatcccatctaggaagtgaggagcgcctcttcccggccgccatcccatcaaggaagtgaggaggcgcctcttcccggccgccatcccatctaggaagtgaggagcgtctctgcccggctgcccatcgtctgagatgtggggagcgcctctgaccgccggccccgtctgggatgtgaggagcgcctctgcccggtcgtgaccccgtctgggaggtgaggagcgtctctgcccgggcgccccgtctgagaagtgaggagagcctctgcaatgaacccacg

SEQ ID NO: 686833 - DNA, 1050 bp, Homo sapiens
cactccaccttactaccagacaaccttagctaaaccatttacccaacactaaagctataggcgatagaacatgaaacctggcgcaatagatatagtaccgcaagggaaagatgcacacattatcaacccaagcatactatcagcaaggcactaacccctataccattctgccataactgaattcaagctcagcaacatcaactctcgcaaggcagagccaaagcctaagacccccgcaaaccagcacgagctacctaagcaacagctcacacacgcagcaccacccgctcctatgctagcaaacatcagctggcgcaagatctcctcacggtcagaggcgcacacaaccataccgcaggcccagggactgaaatagacctggcacgctaccaacgcactcagacaatctcgagccgccaaaactagaaaacaaggggcccaacagaacaacccaatcatacaactacccacatggcgaaaactgaaaacatgataagatccaccacagacggccgcaagcgtctgccgggcccccacaacgcggacaaaaacaccccaggtaaacagaagccgatcacacaaactcccacccaacaccccaaaagcacaggcccctcccaccgcacccacaacaccacaatccacagcaccacgacgatcacccaggaccacccacccgcaacccaacatacccgcgcaacaaccacactcgcacaacacaagcataaataccactggacacacagcagtgcacaaacccaccaaaaataggcccccacagactcaaacaaacgacagaacgcgcacaacaaacgacaaaaggagccagaaacatacaggacaacaccatgacaaacaccaaacctcacctaaccgcgatcaccaccaccgccacgccaaagccacccacacaatagaaccaggacacaccgcgaacaagagcccccagacaactaaagcaaccccaaccaacacaaagacacatagataccccctcaagatggaacacccacaaaccagagccgggtcaacacgcaaacgggacaaaag

SEQ ID NO: 686834 - DNA, 302 bp, Homo sapiens
ggtcgactacgcaggaggctgaggcaggagagtaggcgtgaacccggaaggcggaccttgcggtgagcagagatcgtgccactgcactccagcctagctgggactaaaggtgcccgccaccatgcccggctaatttttgtatttttagtagagacggggtttcgccatgttagccaggatggtctcgatctcctgaccttgtgatccacccgcctcggcctcccaaagtgctgggattacaggcgtgacagccgcgcccggccggttgcctttacttttcaatctgttgaaccaagtcgacg

SEQ ID NO: 686835 - DNA, 346 bp, Homo sapiens
gacccccacccttggaccccgctgtccttttctagttgtttactgggtgggggcagccagtctgaccttgtctgggggtctggacggtccctaaggtgtgtaactttcagtattatctggtgacagatggttcggtggtgaaaaaggtttattatatcccttatggcggccttgtacaaaatccgttagaaacgctaaggtaagatatcagatttctaacaagacaaaaacagcatcatggagtcaaaagattttcacagagggggtctggatttgggaggtgagcgggttttcagctctcaagggtggtcacttaaataaaaaccttcttggcctttaaaaaaaa

SEQ ID NO: 686836 - DNA, 444 bp, Homo sapiens
  misc_feature (1)..(1): n is a, c, g, or t
  misc_feature (301)..(301): n is a, c, g, or t
  misc_feature (432)..(432): n is a, c, g, or t
naggaaaagtgggcgcaggggacccgcgtcagcatacggaggacccgcgccggcaccagcctctgagttccctcagtatttatcgatcattatcgggcatttctgggagagcgggatgtggcaggacaatagggtaatagtggggagagggtctgcaggaaaacatgtgaacaaatgtctctgcatcataaacaagttagagaaaaaagtgctgtgcttttgatgtgcatatacataaacatctcaatgccttaaagagcagtattgctgcccgcatgtcccacctccagccctaaggcgnttttcccctgtctcagtagatggaatattacaatcgggttttacaccgaggacattccattggcccggggacgaggcagggacacagatgccttcctcttatcttcaactgccaaagagggcttccttccnttttactaattt

SEQ ID NO: 686837 - DNA, 452 bp, Homo sapiens
  misc_feature (216)..(216): n is a, c, g, or t
  misc_feature (392)..(392): n is a, c, g, or t
gagtggttggtacatgggctgctgctgctcctccatgtctcattagcctcctctgtccctgagccccgctccacctcggggtacacgaccacacacatcttctggctcaccagtgttagcagctcaatgaagtcactgaaacacttgggcttgtgttgccagtaaacacccaggaaatagacaggcactcctgtcagcagtgatggccatggccanatgccactactaccagccggctctgtaccacatggctgacagaccacgcaggcaaggcccagtaacagcacagtagcatgatggggaacacgcaggttgactcttgactggcggcgggggactatcacggcttcttccacgcgaaggactatctcgtccagcataccgtgaccccnatagaaagaggtagttgatgaagcccacatagttgatgagtgtgtacatgtcgctggtga

SEQ ID NO: 686838 - DNA, 250 bp, Homo sapiens
  misc_feature (185)..(185): n is a, c, g, or t
ctatcacattatcaaagagcacatatgtacaatgcattttacaagagaacagaacattaccaatatcagctggcagtaagggcaagctgaagaataaatagactgatgttgcctgggcaatgtctagtcctcaaacgacatccaaacgtgcgttcaggcgagctgaacacagacttcttgcccangtgacaaggcatatgtggctcagtaatacaatacgatggatacattgtgactagccgggctaccg

SEQ ID NO: 686839 - DNA, 127 bp, Homo sapiens
aaggttgtgtgtctccaacagcttgtttatgttgggcctctggttctccggccactcgcatccgcccgcacacactctaaccgctcctcccagcgtagaagcacagggtctcggcaaatgttccctg

SEQ ID NO: 686840 - DNA, 152 bp, Homo sapiens
caattctattttcagagttgactgtactcttttcctctgaagatacacgtataaacgcgaccaacgaggtctctcgtcctaataacaggttcaggcatgaatcaccgtctaacagctatttaaacaccgcctcttcatagaagtaacgccga

SEQ ID NO: 686841 - DNA, 986 bp, Homo sapiens
  misc_feature (18)..(18): n is a, c, g, or t
  misc_feature (115)..(115): n is a, c, g, or t
  misc_feature (166)..(166): n is a, c, g, or t
  misc_feature (187)..(187): n is a, c, g, or t
  misc_feature (352)..(352): n is a, c, g, or t
  misc_feature (583)..(583): n is a, c, g, or t
  misc_feature (610)..(610): n is a, c, g, or t
  misc_feature (678)..(679): n is a, c, g, or t
  misc_feature (720)..(720): n is a, c, g, or t
  misc_feature (736)..(736): n is a, c, g, or t
  misc_feature (752)..(752): n is a, c, g, or t
  misc_feature (802)..(802): n is a, c, g, or t
gggaaagggaagaagggnggaagagaagaaaggaaggggaaagaggaagggagaaaggaatagaaaagaaaatttatgaaataacaaagaagaaaaattttaaagacaaaagccnagtgaagtgtgagttagtcttataatataataagatgaagaggaaaagatnaagtaagaggaagaaaagggnacatggagtatcatagctaagtttaattaagacaaaacacaaacaacaacaacaagagaaggacgacaatgtctgagggcgtcacgaacccagagggatggatcgcatgtagtaacagatatgtaggtccaacggggctgaatgccaagacatgttcgggatagnaagagatcacgaaagacacacgccgagtcagtaggaaaggtatggaagaggtttgtagctagagcaaccggcatgtttattaagcacagaggccccatcatactaaccgaatagagatagatgtagctcccgcgcatgaagcgatataagaaaagaatgagtggagcgctgaggagaccgacccaatttatagtaatgtcatataaaatagtatgatactattaaaaagtnctagagcaaatatggaaatagagaatnaacaagaacctagtgtgaggtatttcagactacgcggcccgcgacttctgcggcgcatgggagaattnnttaggtactgggtccgaagtaatgcctattttattaagtgntagaggaaaagagtgncaaaaaaaatgatgtnaccctgagtgcttaagagtacttcagaagccctctcttaggtctagtcanccacccacaacatcaaacagatccaagagcagcgttccccctttctcccagaaattgaactaagaccacagaagactagttgcctcaccaagacaggacactacctcaaacgagacataaccgaaagaaaactaattataccaaaatcccaaaaatagaagcacaagtgaagactatagcgagt

SEQ ID NO: 686842 - DNA, 1919 bp, Homo sapiens
  misc_feature (89)..(89): n is a, c, g, or t
ttcttgtacttctgtggttttttcatatggtttttgtgttttcgtgggatcctctcctcgtgtctggccgttgtgtactatctcttgcntgctccgttttcgtcgtgtgcttgttctgtctgttgtctgttacagagttagttgtagttctatcgctggtctactacttggtgcttagtttttccttctatgtgttggcgtcgtgtccttctgcggtgggtgttctgttatgcctgcttcctgttctttgggccccttatacaaggggctaatttctccgttgttttgatgggtccccctggtgtggtttcccttgtgttccttccggggtggcgctcgttgtgactcctcctcattgggtggatgtttattgtgctttctcggccgttcaatcgtcgtctgtgtttctttggactacagatagtcttttccctggtgtgtccttgcggtgttgtgctccctctgttaatgccggctactcgcgcatgtttggtggtgaacgtcccctcttgctgttcgtcccatattgcgtttgctgtgtcttgctcttgtggtggggttatttcctcccgtcggtcctctcgtcctccctgctgtttttgtgagtgatgtctactattcggatgttattcctccacatagtggccacccacacccccccggggtggtttgaatataggagagtgttctttattatgcctcacatattgtactcaagctgttgtttggtagagttcttagtatgactctgtgtcgtcgtgtagttaaactacggggcgtcctaccacagagtctttgtgaagaagaagttgttctttgtatagaggggggtagcaactcctcgctgagatattgattcttcgtgccgcaccagtccgtcacaatatttgtggcgcccgacaaataggagttgtatattagattataaccctagaggcccctcccctagatgaatctcttcttgggcctccgctctctccgcgttgattacgccccagggtatagtataaggagcccgtgtgtcacatcagttgaattttgtatttctctatgtgtctccagcactccacctgggtgtagataagaggcctcccaggatctccgccacaattgtgcgtttgggtcccggtataaggacgcccctcataagtggtcttttttaaatgcccttgttgaagaccctttatgatcctcgggtatcacgcttggggctgctgtcttagcactgtttctgggaacacacgcacacacatataaatggtggagagaatagtccagcacacacgccagtgtctcaactgtggtagcactgtttgtgtccccgcgagcaccagcgtgtattgtgttcttagatcccgcgtttgtgtctcccccacatacagtgtgctccccctagaaggacattcctcccacacacactttatctctttatggtgcgctcgtctccatacctctgtgcggtatagttctcacaccagaccatgggtgtgcttctcagagccctatgggggtgtaatatatagtggagcgccctcttacgcctgatagctccccacgatgtcccaagagggacactccagaaatccactctgtcccagatgggagccagccagagaatagtcccagggttccagaatagccaagattttgatagaggaacattgtatcggagtccaagaatgagatttaatggagactgggcttggcccgggtaatctggggacaaaggaagccagatatttcctgattttggctttagcttcccctcccagattttggtttttggtttgtttatttgaacctttagagtcggtgtaataaactcacccgtggccaacctaaaaaaatatgaaataaatattacttcgagcagtatatgctcgggctgagaagagtagatagtccttggtgtttctcgt

SEQ ID NO: 686843 - DNA, 159 bp, Homo sapiens
  misc_feature (93)..(93): n is a, c, g, or t
cacttgtgaaaccacccggcagcccctctccgcccctcgtcgtaatgccttcccgcatttcataggaattcattggaccagacctgtcaacgncgatttctcgctaaattttttgtcatttttgaatcttcgtccagagaatgtagaactccttcagcc

SEQ ID NO: 686844 - DNA, 166 bp, Homo sapiens
gtcgtgatatcacgctggggcgcaggacggccaagaggtggacaacagcaggctaggccccaggtattgccctccacggaaccctaagtcccacccttggctggggtctccctgccttgaatgagcgtctgaggaggggctgccaagcagggtttgtaggagcact

SEQ ID NO: 686845 - DNA, 957 bp, Homo sapiens
cgctttgtgcccatttacaatatctgtcaaatgcagtaccctctcaaaatacactcttcccccccataggcccctttataacaaaatacggggtctcacaacattcggttttccccttgaaaattccccagttgcacagaaccccctctcggtaattttaacccacattgtcgaattggtgaaatgacgcctaaattcgaaacattgtaataatttgttggcgcactttctttaaaaatttgccaccttgtcgcaaaactccaaattgtttcaaacaacatgcccccccccccacttagttcttttgggtcacgcaaatatccaatacgccaaggattcttccgggaaacctaacttgtgcgccaacaaaatcatcctttcccgctccaatagaatctctcatcgcctccgatacactaaacctttgcaacaaaaaaaatactattctggtagcaaaagtctctccgcctttaacatgcgagtcccccaaaatacggcggtattattttttttgcccccccactaatatcaaatcgcgcaaatggagacatttgaagtaatttccccaataccctccacagacagctcaacaaagaatttttcattctatgtacgtcccccacttgtttctatataaaactcccctgtgataaagacaataggggatgaacacttaccactcacaaaaagatggcagctgcccccgtaaaagagtgttatgtctccgttgacgggaagaaaccatgtctttcccgcgggcaacacccaactggtgagaagtttataaaaattctcatgttggcccgagcggcgcggtggagctccccacgcccggtaagtccccacccccgccattggaggagtggctaagagggggtgaggaggacacaaccacacattccacagaaggttaaacccagtcgcccacggggaacccccttttcgccccacaaaaca

SEQ ID NO: 686846 - DNA, 747 bp, Homo sapiens
agaattgtgggcagatttaaacactctgtggcattgtgaagcggctcgtacatataaagaaagatagacacaagcacacatatttaattagcactgcttgatggagactgttcaaaatctccttgggtgtaaagcatttgttttgagcattttaaataaggagtgcttctggaaaaataagggttacttatttaggccctttgaggttgaaaatggatttttctttccaggacttgattccttccgagtgcaaataacaacggcatcacttgtacttcgataagaggtctgcttgtgtggcttccagaaagagcagcaggagatgtgaataattttacagtgaggaagttgcaactgcagattagcctttgtgacagcttcaacctgtggccccagataaccagtgattaattgcctgccctgggtcccttccttttttcagactccaggtttcccttgagcctgtattgagacggtgaatttcgttctgagggttctgcgtgggccggcgtgttgtgtggagccgcgtggcgcggggagcgcagcacggtcacgcagaccgaagctttcactgcacggccggactcgttagtgcgaatgagcctgtgtcccgcgtgcaccgagggagccgagcagcgcaggcggccctctagccccgcacggccagcgcgccgtgggggatgcgtccctttgcctccgccacgctcacctctacccgaccgctgcctctgtgctccgggcggccgc

SEQ ID NO: 686847 - DNA, 480 bp, Homo sapiens
  misc_feature (1)..(1): n is a, c, g, or t
  misc_feature (108)..(108): n is a, c, g, or t
  misc_feature (111)..(111): n is a, c, g, or t
  misc_feature (201)..(201): n is a, c, g, or t
  misc_feature (220)..(220): n is a, c, g, or t
  misc_feature (296)..(296): n is a, c, g, or t
  misc_feature (309)..(309): n is a, c, g, or t
  misc_feature (321)..(321): n is a, c, g, or t
  misc_feature (366)..(366): n is a, c, g, or t
  misc_feature (387)..(387): n is a, c, g, or t
  misc_feature (390)..(390): n is a, c, g, or t
  misc_feature (407)..(407): n is a, c, g, or t
  misc_feature (435)..(435): n is a, c, g, or t
  misc_feature (472)..(472): n is a, c, g, or t
ngccgcagctgttggttttcggaatcaccacttcaaagccctgcgcttcatactgtttacggatgttgttcacttccgattcgaagctaatcagaacatcgcccaggncgngctcggaaaaagtggtggtcgcgccacgaccgccagtatcgaacacttcaacgtttttcaggaactgggtcataaactgttcggttttgnctttgtcaccaccgtcagntttatccgctgcgccccatgccgtcagataggtataacgcgcgttacccgacgttttcgggttcgggaaaatcagnttcacgtcggagngcaccaggtcgntccaatcgtggatattcttcgggttacccttacgcaccaggaagnccatggtggagtaggaacggngancttttattcgggaaggngggactgccagtcgggccgggatcaagnttggcttttatcggggaaggattttggtccgtcgggncaacctgg

SEQ ID NO: 686848 - DNA, 609 bp, Homo sapiens
  misc_feature (381)..(381): n is a, c, g, or t
  misc_feature (386)..(386): n is a, c, g, or t
gggacaagacagaaatttgagatgaataattccaccaccaccactagtagcagcaactccaaggattgtggaggtccggcctccagtggggctggtgtaccgcagccttagctgatggcctaaaatttgcttctgttcaggcctctgctccccaggggaattcacacaaagagaccagcaaatcaaaagtgaaaaggagtaaaacttctaaggatgctaataaatctctgccttctgctgccttgtatgggattcccgagatcagcagcactggcaagaggcaggaagtccaagggcgccctggagaggcaactggcatgaattcagcgctgggtcaaagtgtgagcagcggcggcagcggcaacccaaacagcaatagtnccagnaccagcacctctgccgccaccgcgggggcaggctcctgtgggaaaagcaaagaggagaagccaggtaaaagccagagcagccgaggcggcgtgcaccgagggagccgagcagcgcaggcggccctctagccccgcacggccagcgcgccgtgggggatgcgtccctttgcctccgccacgctcacctctacccgaccgctgcctctgtgctccgggcggccgc

SEQ ID NO: 686849 - DNA, 546 bp, Homo sapiens
gagtccgagtggactgagcgatgctgagtggttgtgtgagtcgcgtctcggaaaaccggtagcggttgcatgtatggatgatctaagtgtacatgattagtagtcgagattgcgagaatgtcgacacagaagctgtgttcacatgattatgacgaaagcatggttgatggcacacttataatgaaggaaaggaaatgggggaagcatgtaatggagtatgctccttggggggccatggtatagtcccgcgacgagtgaaagttaagagatttactagcggacattgcattaaatggacagctagagtgctgtagtgtttgaatgagctctcaatttgacttcccatgtacacttctcttgacatagtgatggctgagaaaagtggatagacacatgactagtgatagaagaaagttagagaatgcattccgggtgtttgatagggatgggcagggctatatcagggctgcagaacttcgccatgtgatgataaaccgtgggtgagaagttgacagatggagaagttgatggagttgatcagggaag

SEQ ID NO: 686850 - DNA, 1358 bp, Homo sapiens
  misc_feature (381)..(381): n is a, c, g, or t
  misc_feature (386)..(386): n is a, c, g, or t
  misc_feature (847)..(847): n is a, c, g, or t
  misc_feature (860)..(860): n is a, c, g, or t
  misc_feature (876)..(876): n is a, c, g, or t
  misc_feature (1269)..(1269): n is a, c, g, or t
  misc_feature (1326)..(1327): n is a, c, g, or t
gggacaagacagaaatttgagatgaataattccaccaccaccactagtagcagcaactccaaggattgtggaggtccggcctccagtggggctggtgtaccgcagccttagctgatggcctaaaatttgcttctgttcaggcctctgctccccaggggaattcacacaaagagaccagcaaatcaaaagtgaaaaggagtaaaacttctaaggatgctaataaatctctgccttctgctgccttgtatgggattcccgagatcagcagcactggcaagaggcaggaagtccaagggcgccctggagaggcaactggcatgaattcagcgctgggtcaaagtgtgagcagcggcggcagcggcaacccaaacagcaatagtnccagnaccagcacctctgccgccaccgcgggggcaggctcctgtgggaaaagcaaagaggagaagccaggtaaaagccagagcagccgaggcgccaagcgggataaggatgcggggaaatccaggaaggacaagcacgacctgcttcagggccaccagaatggcagtggcagccaggccccttccggggggcacctctatggctttggggccaagagcaatggaggtggcgcgagccccttccactgcgggggcactgggagtggcagcgtcgccgctgcaggggaagttagcaaaagtgccccggattcagggctcatgggaaactctatgttggtaaagaaggaagaggaggaggaggagagccacaggcgaatcaagaaactgaaaactgagaaggttgaccccctgtttacagtgccagcgccaccaccgccgatttccagcagtctcacgcctcagattcnaccctcctacttntccccatcttcatccnatattgcagcaccggttgaacagcttttggttcggactcgttctgtgggtgtcaatacatgtgaagttggagtagtgacagagccagagtgtcttgggccctgtgaacctgggaccagtgtgaatttggaagggatcgtgtggcatgaaacagaagaaggtgtcctagtggtcaatgtcacgtggaggaacaaaacgtacgtgggaaccctactggactgcaccaagcacgactgggcccctcccaggttttgtgagtcaccgacaagtgacctggagatgagagggggccggggcagagggaagagagcaaggtctgctgctgctgccccgggctccgaggccagcttcacagagtccagagggctgcagaataagaacagagggggggccnatgggaaaggaaggcgggcagcctcatgcagcggacgaagaccccccaattgtgctnntgagatatcaaagtcagctcctcctcagtac

SEQ ID NO: 686851 - DNA, 89 bp, Homo sapiens
ccgcagctcttttcgtattcttgctgaacttatattcgcgtcctatcgagcattaggccaagagctttgatcagatgaatcaggcagga

SEQ ID NO: 686852 - DNA, 1342 bp, Homo sapiens
  misc_feature (381)..(381): n is a, c, g, or t
  misc_feature (386)..(386): n is a, c, g, or t
  misc_feature (847)..(847): n is a, c, g, or t
  misc_feature (860)..(860): n is a, c, g, or t
  misc_feature (876)..(876): n is a, c, g, or t
gggacaagacagaaatttgagatgaataattccaccaccaccactagtagcagcaactccaaggattgtggaggtccggcctccagtggggctggtgtaccgcagccttagctgatggcctaaaatttgcttctgttcaggcctctgctccccaggggaattcacacaaagagaccagcaaatcaaaagtgaaaaggagtaaaacttctaaggatgctaataaatctctgccttctgctgccttgtatgggattcccgagatcagcagcactggcaagaggcaggaagtccaagggcgccctggagaggcaactggcatgaattcagcgctgggtcaaagtgtgagcagcggcggcagcggcaacccaaacagcaatagtnccagnaccagcacctctgccgccaccgcgggggcaggctcctgtgggaaaagcaaagaggagaagccaggtaaaagccagagcagccgaggcgccaagcgggataaggatgcggggaaatccaggaaggacaagcacgacctgcttcagggccaccagaatggcagtggcagccaggccccttccggggggcacctctatggctttggggccaagagcaatggaggtggcgcgagccccttccactgcgggggcactgggagtggcagcgtcgccgctgcaggggaagttagcaaaagtgccccggattcagggctcatgggaaactctatgttggtaaagaaggaagaggaggaggaggagagccacaggcgaatcaagaaactgaaaactgagaaggttgaccccctgtttacagtgccagcgccaccaccgccgatttccagcagtctcacgcctcagattcnaccctcctacttntccccatcttcatccnatattgcagcaccggttgaacagcttttggttcggactcgttctgtgggtgtcaatacatgtgaagttggagtagtgacagagccagagtgtcttgggccctgtgaacctgggaccagtgtgaatttggaagggatcgtgtggcatgaaacagaagaagagactccaggtttcccttgagcctgtattgagacggtgaatttcgttctgagggttctgcgtgggccggcgtgttgtgtggagccgcgtggcgcggggagcgcagcacggtcacgcagaccgaagctttcactgcacggccggactcgttagtgcgaatgagcctgtgtcccgcgtgcaccgagggagccgagcagcgcaggcggccctctagccccgcacggccagcgcgccgtgggggatgcgtccctttgcctccgccacgctcacctctacccgaccgctgcctctgtgctccgggcggccgc

SEQ ID NO: 686853 - DNA, 1541 bp, Homo sapiens
  misc_feature (381)..(381): n is a, c, g, or t
  misc_feature (386)..(386): n is a, c, g, or t
  misc_feature (847)..(847): n is a, c, g, or t
  misc_feature (860)..(860): n is a, c, g, or t
  misc_feature (876)..(876): n is a, c, g, or t
  misc_feature (1326)..(1326): n is a, c, g, or t
  misc_feature (1398)..(1398): n is a, c, g, or t
  misc_feature (1504)..(1504): n is a, c, g, or t
gggacaagacagaaatttgagatgaataattccaccaccaccactagtagcagcaactccaaggattgtggaggtccggcctccagtggggctggtgtaccgcagccttagctgatggcctaaaatttgcttctgttcaggcctctgctccccaggggaattcacacaaagagaccagcaaatcaaaagtgaaaaggagtaaaacttctaaggatgctaataaatctctgccttctgctgccttgtatgggattcccgagatcagcagcactggcaagaggcaggaagtccaagggcgccctggagaggcaactggcatgaattcagcgctgggtcaaagtgtgagcagcggcggcagcggcaacccaaacagcaatagtnccagnaccagcacctctgccgccaccgcgggggcaggctcctgtgggaaaagcaaagaggagaagccaggtaaaagccagagcagccgaggcgccaagcgggataaggatgcggggaaatccaggaaggacaagcacgacctgcttcagggccaccagaatggcagtggcagccaggccccttccggggggcacctctatggctttggggccaagagcaatggaggtggcgcgagccccttccactgcgggggcactgggagtggcagcgtcgccgctgcaggggaagttagcaaaagtgccccggattcagggctcatgggaaactctatgttggtaaagaaggaagaggaggaggaggagagccacaggcgaatcaagaaactgaaaactgagaaggttgaccccctgtttacagtgccagcgccaccaccgccgatttccagcagtctcacgcctcagattcnaccctcctacttntccccatcttcatccnatattgcagcaccggttgaacagcttttggttcggactcgttctgtgggtgtcaatacatgtgaagttggagtagtgacagagccagagtgtcttgggccctgtgaacctgggaccagtgtgaatttggaagggatcgtgtggcatgaaacagaagaagtatttcagctagtacaagggaagtgcctattagaagcaatgggccgcttgaggacatggattgcatccagtagtggcgcattcaccaaaaggcagatgaaaataatctgtaccaacaaggatcacaacaggaaacatcatgtgaattttccactattgacaatcttgactatctagcctgggatttgcattgccaagcaacacgttaaataattttgtatctctttgaaatcaatttctggtgatcacacatgcagattgaaaactatggctttaagatttacgttcagtnaataaaatttacgttccctgaaaggcaaagaaggctgtcatttcatgcctcctaaccttcattgtctatttncctttggtacacacaagcaacctagtacgcacaaacgtacatgcccattatggagagatagctttctgctctgtcaactttgttttataaaagctctgttttcttnattgcctttatcctattacatctgtaaattttatttt

SEQ ID NO: 686854 - DNA, 401 bp, Homo sapiens
  misc_feature (44)..(44): n is a, c, g, or t
  misc_feature (280)..(280): n is a, c, g, or t
  misc_feature (317)..(317): n is a, c, g, or t
ttattctaggctgatagtttgatactgcttatataatggaaatngcccaccgagctttctcgagatggccctactctctattccgtggcgcactatgtagcaccggatgagaataagggctaatacggcagctattctggcttcttacccccaatctaggctaaggctttgacgagcagagtcttcttactgatgaccatcttagctgcgctcttgggcttgaaaagggccgtagaatccggatccctatgtcgccttacacccgcggtcttacggatanatggacgattttaaatgcctctcccaaggtaagctcnagagctaaattaatagggattaaattctctatgcttaatgagctaaggcaggcgacggcggcttatttctcttgcagggcgtgg

SEQ ID NO: 686855 - DNA, 304 bp, Homo sapiens
tgcatccgtgggaggagcttcacgtcggcgtctcacgtcccgcgtgtgtattgccgggactcggagttcctgtggtgagcgacgggctcctggccatgagggctcaggcgctgtttgagcatcctcacagcatggtggccacttcctaattgtcctccttactgaactgtaagctccacaaagaaacagtaggtgttcctatacagtctgtggttggctgaatacacagctgagcttgaggggaaggcatcacaagtgcaaacagtaaccgatgcttttcctccagcagaggctggaacatact

SEQ ID NO: 686856 - DNA, 226 bp, Homo sapiens
gggtgatctagcaggatccttaagacagacactcggggaaagaaggaagtttatgtcccaaggggaacaaggattgctgcttgaccttccacacagacttctccaacgaggagaatgggaccatcatgtctacaagggcttccttggcctactaccaatgctgtggaccttgatgaattgtgcttcccggaatcaaattagtgggatggaggatccccatgcccca

SEQ ID NO: 686857 - DNA, 311 bp, Homo sapiens
  misc_feature (5)..(5): n is a, c, g, or t
  misc_feature (31)..(31): n is a, c, g, or t
  misc_feature (78)..(78): n is a, c, g, or t
  misc_feature (123)..(123): n is a, c, g, or t
aagcnttgcaaaaagtttgagcctatgaacnatcaagaatggaagtctattaattcttaactacactgaagttaaagncttttttagaactaagccaccatacagacagagtgcagccttccncctagacccctgcccctctcttcactagcaggcccatggctcataatcagaacagtaccccaccatggttgagcatcccactgttagtgacacagagttccctgggaagaggtcccaaaggacacagagaaaagaagaccaatgaagacaccagtaattcaaataccagagtgtcacatgcattaaat

SEQ ID NO: 686858 - DNA, 402 bp, Homo sapiens
tccactcttggcagacgggaaaggggaagctggcatcccatggcaagaggaaggaagcaagagagaagggaggagataccaggctttttccaacaagcaggtttcatgggaactaacaaggcgagaactcactcatgacccaaggacagcaccgagatgttcacgagggatctgcactcaggacccaaacaccttccacgaggctccatctccaacactggggatcacatttcaacgtgagattgggaggggacaaaaatcccaactgtatcaccccatgcccaggtgggggaccgtacttatgaagagggggggtggccttgtcagaaacaggccatcactgtctgaacgacagggctcatgcctgaaagcctatcactgctggcaggcagaggcgcgtcg

SEQ ID NO: 686859 - DNA, 1097 bp, Homo sapiens
  misc_feature (622)..(622): n is a, c, g, or t
ggaacccggccgacagaagatggcggatgatgcagcgtgcagggttttctcccgtgtggctcacatctctcgttactgtgctgggcggttgcttcctctccgtgctgccctgtggggagtcagactccaggttcttcagccttgtggcccctggggctctcgggcctgtggaggactggactaggagcacacggtgggcctctcgtggttgtgggggccttgggacgtggcgggagccctgcagcttctgtgcggcctgtcctgggggccgtccgcgttgaaaacgccagccaagttccccaaggtaagctccctggcagacgacgccgtggatagcctgttgggatcccgcacctttctgcgggaatattacaagtagcaattcttctaactcacacagcagcagaacggagcatacgggcagagactgaagcagttccactccaaagaacatttctcattcctacgggatcaccgagttccccctggggattacagggcagtggttgaccgacactggtggtgacaccactcaggaaagacgcgggagaaattcacgtgggacccttttcaagattcatgtggaagaacttcaaggaggttccatgtggttgttggggcnagaggtttatttataacagcggagatgtaaaaataaaggggagaagagacacatgggttaagcgcaaaggtctgtcagaaacgcaatgaacaagcattaatatgtgggacgcagagcggtacaatgccgaaacaaagagcctggtagcaacacgggtggtaatgggccccccacgggtttttgaaacacaacggcctttggagaaaacacaaattgtggcgcgcagcatccacgataagagcaagagaggagcacacacccaggcggaaaccaaccaagagtcagaaacgagggatgcgagtggatgatacaccgacgaagagcaagacatcacatcatactaacaacgaacatatgagacaaacagctacagcatcacacgtaacacgatagcgaaaaaccatcaaaaccgctgtttctgttttcctcttttttatttttcattttttttttttatgggagacaccaagcgagg

SEQ ID NO: 686860 - DNA, 306 bp, Homo sapiens
tttctgtctggtcatcatggaactgaaaatcctcaaatgccttcactcttttacctaactcctagtctttttgggaagtagttaagatatgcctgctatctttaactttggaggtagtatcaaaattttacttctttggttgtttagtgaattaatgttgaatattttctactgtcatctatacatattcccatgaagtattataaggaaccttagcacattatttatacacaagatacccaaatatttaccttttcatcgagatagcttatatatggatgatattttttacacctctcacctgga

SEQ ID NO: 686861 - DNA, 268 bp, Homo sapiens
  misc_feature (135)..(135): n is a, c, g, or t
tgaggtgtcactgtcaaaatcagggggagggggacgccatagtttgatgtaggccttgtcagtcattttctctaagggcttgggaggcaaccatcttcgggcatatggctgttaatgtgtgtttacactaactgncaaaatgtggctgttgtaagtttggttaaaacttttatcttagtattggaaatatataggcagttttaagtcattactgggttacttgttaccccttaccgaattaagaaaaatagccacaggtggaactcaa

SEQ ID NO: 686862 - DNA, 388 bp, Homo sapiens
aaagtttgggggtccccccctttttaccccacccgggaggaacgcccagggccccgggcttgtttttccttttgttttccttttgggcagtttgatcaccgatcgagtaaggaatgccctttaaattggcgcgccttcggttttttttttttttttttttttaacccaagaaggatttccccggcttccttctcctcaccattttcccagagggagttcaaaggccacttttcaagcagcttttggccccttcagcctcagagtggaattttttaaagacaggacccctatgtccaggaaaggggaaaaggaactttgccaatgatagtgaccccagcaaaagcaaataataataatattaataataataaagagaaataaaataata

SEQ ID NO: 686863 - DNA, 379 bp, Homo sapiens
cgagaaagatgatcactgatatcacagtttattaaaatgactttatggcaatcagaaagaagggagaaaaacggaataaaggagagaactgtccaaataagtgtctgacactgtggaaggttgtttgaggatggcgattgctgaaaagtttccataaaatgattctctagagggaactatgccaataccatatctgttaacatcttagacccacagggtcatatcgtaacctttgctagagtctgagatggaaaaacattaactcgaatagtaaacgtcaagaccgcaaaattaatctgctaatcagaattttgtcttttgtgttgattcttacacttactccctggggatcttggatttaactgatcagttgacactc

SEQ ID NO: 686864 - DNA, 292 bp, Homo sapiens
  misc_feature (190)..(193): n is a, c, g, or t
  misc_feature (195)..(195): n is a, c, g, or t
  misc_feature (198)..(198): n is a, c, g, or t
  misc_feature (205)..(205): n is a, c, g, or t
  misc_feature (216)..(217): n is a, c, g, or t
tagggaataaattcgtataactggacatacggcggagacaagatcatgaaccgagaccagtgcccttgcagcacaccagccatactcgtctctactcttgtacatctcgtctctgcgggggatcctctacagtgctatctgaccatgctttgccagctaggcagtgggcgattcgcactacaaagtcgtnnnntnggnaccaggntgcgagtagannacaaccagaaatttagacaggatctcttacctttggaaaataggggttaggcatgaaggtggttgtgactatcgg

SEQ ID NO: 686865 - DNA, 1463 bp, Homo sapiens
ggccgcagacgcggggacgctggctcgctccctcactacctccctccgatgcgatcaaatgatgccgagaggtaaaaatttcctcacgacagtttgtgtggtgtaaagaaacctcctcagtgcgtcactgtgacgtccaagatacttctggggctggttgaattgcagctgatcaaataaggtgagatggatagatccgcatcaaggaaatgtatgcgacccgtgagcaggggtcggggactccagacggtgtgttggctgcagcgtgatgggggccattggttggcgcatatcagtgcgttcaaggaaaaggcgtggcatcaaagggtacttgatagatcccacgcgtatcccagatgatggaccccatcgttgtggagcccaaattgagcaatagcactatcacgtggcggcactacagtaggcgtcacagcctgcatttcctattgcgtaatcgaatggacggccactaaggggatttctcgcaatccaacagtgggcataatacactcgaagagtcgagtgtggtgcgatctagagactagtagtgcctttgccctggggaaggatgagactgccagtagacaatacacgtaataatactacctatgtgttgcccaatgccacctatatgacacgtaacaggctacctgtcctttacgttcctgggtacacatgagaagagtgtagctgaattggcaaggatagatagataaactgggtggtcttgatcttcacagtcttaacacagtgactcgatcaccgagaggactgggttggatgttccgacaaagaggagttctaacccttcaacttatggattactagagtacagttcgcgtaccgaagtccactaactgggattgcccatggatccaatggagcattttgtgaccgaaaggtcggagcagacagtggcggtgcactcacttgtgggaacagcgtactcctattcgccagaaaccgtaggtttccatgaaaaatggtccacctcaacgtcggaggaagtccgagaaactagagtcgcaaacgatctaagggccatgcggacacctgaagagtgtcgcagagaccccgagtcagcgggatcaggtgcaggtggcctttgtcaaggacctaaggcgccttttagagaacgacccacaacgcagggctcagaattccacatgcgcggccaagggaggtcacacagacaaacacatggggtccaaacactgggaggacacacgccggatcatgctggctagagaagcccaaaaattcgggtggaacgctggatgcacgcacgacctgataatccccgggcaaccacgtgaaaggctgcgcgcgggagaaagccacgtgacttgggacgcaggaagtcgcacaggcaccccgagaaacggggcaacgtgacacagcgcggggggagacgaaggcgcgactggctcaagcacaaaaagaacaagcacaccagcgcatag

SEQ ID NO: 686866 - DNA, 773 bp, Homo sapiens
atttgctattttctatttactatagttcatttttgaaaaatcgtgttggcaatccactaggtttgattttacaagcttcagtgggtctcagctttcagtttaaaaaagcaatagaaccaagcacagtggttcatcgcctgtagttctagcactttgggaggccaaggcgggtggatcagcctgaggacaggcgttcagagaccagcctggccaacatggtgaaatcctgtctccactaaaaacacaaaaattagctcaggcgtggtacgtgggtgcctgtaatcccagctactcgggacggctaaggcaggagaatcacttgaacctgggagggggaggttgcagtgagccaagatcgctcagtggccctccagccgtgggtgacaagaagcaaaactccaatctcaagaacaaagaaaaacagcacaaaaaaacaagaaacaagatggagggggagacgaagagacaccgaaagaaagagaagggcgaaagcacacgcatcggagcgagaggcgcagcacggagaccacagataagaaagaagcgtagacgacatagggcaacagaaagaataccgcgcagcaaagagaactacccggggaccaacaacacaaagggtacaggaaagatgatcgcaaaacacggtgaaaaaaaacgcacgccgggaaacacccagggatgtactgaggcaacacccacgaacagaggggaaacgagagacttaaaacgggggagacagaaaaaaagggaggtcacgcacggagcacgcacaa

SEQ ID NO: 686867 - DNA, 242 bp, Homo sapiens
actgaagacgactcacctccaccaagagagtgatctttgtggccatccttctcccttcgtttcttgcgcagacatttctccttgcttgttatgaagccgctctaactcgtgtcctaagatagtacatcttcttctgtgcgggcttccctgtgtcattctttacgtttaacccatctacttcaatacaccctatttgcttcttgggaagacaccggattctctctcactcagaagactcgttc

SEQ ID NO: 686868 - DNA, 709 bp, Homo sapiens
ggtcgtgtctcttgcttgccaacagtgttaggtacaggacacagatccaggggcgcactctcttgcagctctcctggaacgccctccggtattgtcctctcgcgtcttgtacatcgctccgggatcttgcttctcggtcactcgtccgtgcttctagtgaccttggcagcaccggttctcgtaggttatgccttccttcttgtctaatccattagccatgagctcgccgagattcgtctgaatgtgttccaccgttggtggaggcagtcgaacgatcagctctggtcaaatatgtatctgtcagagcctcgctagcacctatgctctacattcatgggcctcttactagtttctgaccgtcgcatggtatctgggcctctgcgaagtgccgttgttatctagttcttccgacgataattggccgaggagaagcgcgagggcataagagacgatctccttgaagatgctgaaccagcggtggtggaccggattctctttccaggtagtatcagtgaagccatgctgtatgatgtagtggggtaggatcccaatggacgccatgaaaggctgccatggctcctgtgctgacaaaagcttgaactcgaggcctttatggatcttcatgccctggggtaactgcgcgaagggaacctagctgtgatgatttcttggagagtcaataacctaatgaggagtagaagcttatcga

SEQ ID NO: 686869 - DNA, 177 bp, Homo sapiens
agtagctatctgttagacgcttattcatttccctacgaaaataaatgtcgaacgtgataattaccacattataatacttttaaaaaaaagatggccaaggagagatgacacataaaatagaaaatccatgaaaagttgaactctgctgcaaaatatgaatgtcattcacaaaccttg

SEQ ID NO: 686870 - DNA, 121 bp, Homo sapiens
tacgaggtggatacacagcatctcatctttcccgtcaaaaatggttggtaagatgttgacttcaaaccgttcgttgagacatgctggcaactgtgcactgggaaatccgcggtgatttagg

SEQ ID NO: 686871 - DNA, 416 bp, Homo sapiens
  misc_feature (13)..(13): n is a, c, g, or t
  misc_feature (16)..(16): n is a, c, g, or t
  misc_feature (28)..(28): n is a, c, g, or t
  misc_feature (46)..(46): n is a, c, g, or t
  misc_feature (54)..(54): n is a, c, g, or t
  misc_feature (65)..(66): n is a, c, g, or t
  misc_feature (72)..(72): n is a, c, g, or t
  misc_feature (74)..(74): n is a, c, g, or t
  misc_feature (78)..(78): n is a, c, g, or t
  misc_feature (97)..(97): n is a, c, g, or t
  misc_feature (104)..(104): n is a, c, g, or t
  misc_feature (114)..(114): n is a, c, g, or t
  misc_feature (118)..(118): n is a, c, g, or t
  misc_feature (120)..(120): n is a, c, g, or t
  misc_feature (123)..(123): n is a, c, g, or t
  misc_feature (134)..(134): n is a, c, g, or t
  misc_feature (136)..(136): n is a, c, g, or t
  misc_feature (139)..(139): n is a, c, g, or t
  misc_feature (147)..(147): n is a, c, g, or t
  misc_feature (157)..(157): n is a, c, g, or t
  misc_feature (161)..(161): n is a, c, g, or t
  misc_feature (171)..(171): n is a, c, g, or t
  misc_feature (174)..(174): n is a, c, g, or t
  misc_feature (177)..(177): n is a, c, g, or t
  misc_feature (180)..(181): n is a, c, g, or t
  misc_feature (192)..(193): n is a, c, g, or t
  misc_feature (218)..(218): n is a, c, g, or t
  misc_feature (240)..(240): n is a, c, g, or t
  misc_feature (249)..(249): n is a, c, g, or t
  misc_feature (260)..(260): n is a, c, g, or t
  misc_feature (263)..(263): n is a, c, g, or t
  misc_feature (270)..(270): n is a, c, g, or t
  misc_feature (284)..(284): n is a, c, g, or t
  misc_feature (297)..(297): n is a, c, g, or t
  misc_feature (300)..(300): n is a, c, g, or t
  misc_feature (302)..(303): n is a, c, g, or t
  misc_feature (320)..(320): n is a, c, g, or t
  misc_feature (325)..(325): n is a, c, g, or t
  misc_feature (328)..(328): n is a, c, g, or t
  misc_feature (330)..(330): n is a, c, g, or t
  misc_feature (400)..(400): n is a, c, g, or t
taaaatcaagggnggnttttattgaggngcccccagagccacccanaatttggnagggatgaggnngtaaananagtnatcatcaccaaagcaaatnaaaaaanaaagtttatntgcnanggntttgcagtganangangccttcanaaattaaggnaacnggccacccgncanagnggnncacttcagggnnttcacgaaatcttcccccttcttgngggggggcttcagcccgggggngggatccgngaacatcttcnccncaaaagnggggactttgccgnggcccaggttccnctngnngccctttttcccaagcngcggnggngnggggaagtggggacattccgtttcctgtgacttaacgaaggaacattccacaacaccttcctttccattnattgcatccacaaggg

SEQ ID NO: 686872 - DNA, 237 bp, Homo sapiens
gacctcgccggtgacaccgagaccctcatggttgacaaatcccgcaaccgtgggcaggtcgccgacccgttcgcgggccccggcggcgatcgccttggcgatcggatgctccgaagcatcctccaacgccccggccacctgcagcacctgcgcctcggacaccccggcggcggtgtgcacgccgatcaggctcatcttgccggtggtgactgtgccggtcttgtccagcacgaccgt

SEQ ID NO: 686873 - DNA, 266 bp, Homo sapiens
gctccagggactgtacacggcaggggtaagctatgtgtatgtcaggggttgagcatgagtgtgcggcgtattataccatagccgcctagttataagagtactgcggcaagtactattgacccagacgatgggggcttcgacatgggcttaagggcgtcataagtggagtccgtcaacagcaggtctctttacatcatcaacagctcattgtgtcagcggcagtcatcttcaagttgtaggctcaggagatttgatagtactagggc

SEQ ID NO: 686874 - DNA, 161 bp, Homo sapiens
gcttccacgagggtttcagcttgttctcttacttttaacccagttgaaattgacctgcccgttaaagaggccgggacatgacacagcaggacggggaggaccctatggagctttaatttattaatgcaaccattccctaacaaacccacaggtcctaaatt

SEQ ID NO: 686875 - DNA, 1513 bp, Homo sapiens
  misc_feature (587)..(587): n is a, c, g, or t
ttgccttccccctgagcagcaggccctgctaggaaggtggcggaagccgtaccaatgtggctgaagccctccagtcagatgaacaacggccgaggagaacctgctatgtggtcctggcctacagatgagatgcgacctgtgtcatcttgacgtggggcgtgtctaggtctaatggtacactgccggcccctgccctggtgacggttccagagacggctttccatggtaggaggtggatgctgcaggctttgggaacttgttcgatgcgaccgaggaaagcaattgagcccatgcatgatccgatgaacagtcaaagagccatatggccttggatggtagggacgcgtcgctggcccccatgtcgatgcgatggcatgtgttggcctggtcgggctactgctgttgctagggagcaagtgcctgagaccctccgcaccccctgtgcctccttgcctttgtcccattggtattgcatccacactgtacaggggtacttggccccggtacctccgcagttgcactgcccctgggcatgggatcgctttaggcgcagaccccaacgaggcgaatttctccttgatcatccnattcttgggtaggggcttcggtcgctttagtgcccagaagggagcgcagtggtggctcgtagtggcccctgctcaacacgcacgtgggctccgcgattcgcttttgggtaatttggagccccaatgccctcttttggcccttacttggtaaccaggtgcggccccctaatggacgccgatgacttgatagtcggatctcactcccttcactttccttcacgaggtccgatgcgttccttattaacagcgggggagatgtgcggtgtagagctatgcacataggggtctccttgtgggccttagggacggatgtgaggttccccttgggggctacgtaacctcgtttggtggtcagccgctacttcgttgggccactccgagcttggggtcccagtatgttggtccttgactctggtctgaacgttaagggcgtgagggaaccgtccgtccaagtccccctaggtggccgtccgtttccggcgtcgtttggagacgcggtctccggggcgcggggcttggcatgcggcgagcattttgtgtgtggcatctgcggcatgcataacgaaatccccgtcaccaggttaagtaagggtatcaccccccacccccccagggtgactatcgccggggggttcccaaggggggcgcattggtgccgtctcaaggggggcccctccaattggggtgctggtcttcacactccaggttgggcctgtacctatcgacgggacacggggggcttcaacgtgtggtttatcccgtgcaccgttcgccacagagtggtttttatcgtgtgcagcagtgctgacatttactgttgtccccgctggagccttgggacatctcaggcacgtgactggcgcctgtcagccacatcgatctagcgggctttgtgggctacagtagttggtgtgtgggcagcactg

SEQ ID NO: 686876 - DNA, 880 bp, Homo sapiens
gctgccagacacaggtgcagccttcctctcagaacatcttctgtatcctgaaagcctccaggtgggttcatccttcaatgttaatggacaggaaaactaagaccagtgaggaatcccaacgctcatcctgccaggatagaaaggaaagcccagaggcattgcaaagagtgctgaagagcagggattgtgctgtatggggacaagctcttgctttgtgtttcaggacaggtaacccaggagtgcaaacctcagtcaggtgcagtccagagtcctgtcttgagcataatggctgctctgctctgctccccgagcctcaccacctccagcggggttcatcatcccagtttatggacagaaaaactaagactagagggggagggcttagctcctgctcggaggagaccttcaactccttcacctgcctggacttggcaccctcccaagagactgcaaccaaggttatgaaaatagcatctactcaccatccttcctcagtgacacccccaatcaatccatccctcaggtcccaccccctgtcgtcaaggagactgagccccgagaagcggcaagctcctgggagctcctcaatcgtcggcagctgccttccgtggtctatctgcaatgtgctcaagtccttttccctcctcctcatccaagagatccaagaccgtgtctcacctcacccctgctccaggaagccccccttcagtggtctggggtttcactccctgtcattgacgtccggcctcaccaggaaagcaccaagccttgcaaatgctctctagtagttaattgccgtggcacagagaaggggtgaggggaagcattcgtttcgtggctattccctgttcatctcgcaggctggccctgccttcccagg

SEQ ID NO: 686877 - DNA, 346 bp, Homo sapiens
tagcattagacattgtaaagatctacataaaatatactctataattgcctctagatacggggtatgacaatctagataagtagcagactatggagaaaaatgagttacctggagggtcaggtaacttgcgaaactaaaaagtatgttagttgaggcaaagtcctaagcaaggttgtgctatcaaggctcagacataccttcgtgggccatggatatacacaacactggaaatgcctgccaactaatcttggatagatactttaaggcatccacttagctgccagttgagacaatcaccacagttattacccaaatactatgaacatatttttgtaaaccagtcatt

SEQ ID NO: 686878 - DNA, 205 bp, Homo sapiens
ttaatgaggacgggtatgaagactcggggctggagcgctcagtgcttatggaggaacagcccttacacaagatagcacggtgtgctactgagagggaatgcaggttcgtggagtccccaagtcaagatcaaagacttcaggcacagcggcttcgaaaccctgatgtgcgaggttcactacagacgccccagttcagacccggcct

SEQ ID NO: 686879 - DNA, 975 bp, Homo sapiens
ctattttgcctagttgttgtggggcacacccattccgcggcattcactccccccgggtgccccccttgggcccctttcataagttgggcccgttttttttgggccccttttcaacccatgcggcaatttgctcctttcccgagggtcttttaatctcgttggtgtcgccgcacatataggtgtgttgttctctgtcacttttctcatctggagagcgtgttagcctcatagtgagctcacttgggcgctccaccgagtgtgggttcatcgcctctcgcgccgcacacacattgttgggggcgctccacagaagggtggcacactcggtgttgctcctctgtgagattgtggtccgcttctcgttggtcaccacagggaggtgcgttctcaccgccacatattggcgcgccctatttggtatccgccacctttgaggggagcttttacctttttttgtgtgttttttgagaagtgtttctgagagggttaccaccgcgaagaatctctggccgatatgtagtttgtaactctcgctgtatggtgaccacaaaatgctgcctgtggtgcttcttctatggtgaggcccccgtagattttgctttcctctctgacaccaggttaccctcaccctcatattttttgccttctttccaggaaatgagaattctttggcccacctcgggagaaccccctgtgtcagtatttttctattctgtttatatattccactgccgctataatttttgagccacaattacaatagtgggagagatatactgtctaacttggagaggccagagaagaccccatagtgtccatctgtttactagggtcctgtccactggtatttggggctataagtcactcccaccccccctttggaccaaagaacctggggttaaatttgggttgggcatcccccatcccgattataaagacttttttaaacatgaattaaacacctgttttttttta

SEQ ID NO: 686880 - DNA, 556 bp, Homo sapiens
tatgggccgtagtgtacgagttcatatggaatgtgaagatcgacagcgttgcacatacagtacgtgagccattggaggcattgatagcaataacgcactgcgtagcagggcaaggcgcagaactaacagccctcgaatattgatcgtagaaaggaagccgactaaagagctaggcataagcatacaagctgagtccctgggctgactattgtatgcgttccaatatctgcatgcattcaacaattgacatgcagcgaatggcaacttttgtaggcaatgcgcgaatagattcgcatgaagcgtgatgacaatgaatccaaaggagcggacatagagcccatgacatctggagaaagtcgtcttctgccgaataggccgaaaccgcgagtaatacttcgtcaaacggctctgtcggaagcatcccttgcatctttggaggcggtagaagacgaatggcagtggaagctttggcatactgttccgggagtcaacacatcggtggcaacaatatcttttagttctaacccaaagacacaaatagtacttgaatctaaat

SEQ ID NO: 686881 - DNA, 897 bp, Homo sapiens
  misc_feature (218)..(218): n is a, c, g, or t
  misc_feature (897)..(897): n is a, c, g, or t
caggaaagctaacggctactcaaagccacttagaaaacaggatagcgagcagatgcagcaggaacagtggtatctggaggtccttaaatccagagcgatggcagaggagctgcgacggaagtcataatcatgtgcctaacatagcacagggatgttccaatagaccacacccagtcttccccgaaggtcatccaaagtcaacgcgattacagtccagnacgttacacgtatctaagaagtaacagctgattaaataagaactggagcaagtactcttaagtgctacattaacctggttagaaaggctggtggattccagattgctattgtaaaatctccatcatgatgtgtaggagtgaaggattagatggttaatatccaagcagtcctactagatatttggtaaccagcttcccttaactagctttttctttaaatactcgttaataagctattccacaaacctccagttaacctaacacatgaccctaacctagccatttaccatacatcaaactagctaaaggaaaccaacctaaggaagtgaacacagttgtgatttatttcatctagctaacttgtctctctatatagagaaagtacctttaaggctagcattccaaatagactagaatagcgttctgccagtttatcctcataccttatgaccaacttagcagacaaacgcagttaaacaagctctttggagacgtaagtgccagtgacccggtagctcattctaaaaaacctcaatgagttgaaaagccttcgagtaaagcagtccagtaagagccggccgggtgtcctttctccggagcaagaccctaaagttgcagcgtagaaagactcgaggccatgtagagccacgcacctggaaacgtttcctagaaaccggtn

SEQ ID NO: 686882 - DNA, 184 bp, Homo sapiens
ccgatatgcggcgcgcacttatcagagagcagctcacagtggaactcagaaagtattcgaactgcaaagacaatgacaaataccttaacattatcgccttacgtctacatacttgagataaaggaaggcttaaattcatgaggcaagcacccaatacgagcagtttgcgatggcacatagcaaa

SEQ ID NO: 686883 - DNA, 100 bp, Homo sapiens
ctctgtctgttccggtgtcacgtactagactatattataatcccatgtatgtatgtatgcatgtatgtaatgtatgtatttattttgagacggagtattg

SEQ ID NO: 686884 - DNA, 381 bp, Homo sapiens
  misc_feature (163)..(163): n is a, c, g, or t
  misc_feature (172)..(172): n is a, c, g, or t
  misc_feature (354)..(354): n is a, c, g, or t
cccagctaactccaatcattttcaatgtggtattacttctgcacttggataataactaattttcccccaggatatcctgtctactaatagataacatacaaagccctcttttaagaaataggccagacgtggtggctcacacctgtaattccagcactttggnaagccaagncgggtggatcacctgatgtcaggatttaagaccagcttggtcaacatgctgaaaccctgtctctactaaaaatacaaaaatttagctgggcgtggtggtgggcgcctgtaatcccagctactcgggaggctgaggcaggagaatcgcttgaacccgagaggcggaggttgcagtgagctgantcacgccactgccgtctgactggtgac

SEQ ID NO: 686885 - DNA, 141 bp, Homo sapiens
cagtgtgccccctttccaatcatattcctctctctcaccctaataggtaaccactaccctgacttttgtaatgatttccttgctcccaaaatgtagtcctaggactgacctgaaagacacatgcctcgtaatacccagcca

SEQ ID NO: 686886 - DNA, 118 bp, Homo sapiens
gcactataacagtaacttaaaggaataattttctttagagggactctctccaaaaaggaaggggatagtgggaaaactggtccttttattcttcagatcccctagcagaaatagactg

SEQ ID NO: 686887 - DNA, 416 bp, Homo sapiens
ttccgtctgtgatagctttctcatgcatggggaccagacagagatcacacatctggtgaagcacatcaggaaagactctgattaggcaaagggcaagaagggacaaaagggaagcctctccacgggcggaaatactcttttttctatacttgctgttgtgttaaaccactgtgacctcaatggcatgaataccatcctatataggcatccttcctaaactctcctagactaggcacataatagggacagcaggagagtggcagtggctaagcaggaagactttagcaattatgcaaaataggtttgaatttggctctgccaccacttagtgcaacgtggggtaggtaagtcactccctaagccccagttacctcatctttaacgcagagatagtggcatcgataaacaccgggtac

SEQ ID NO: 686888 - DNA, 193 bp, Homo sapiens
cctttttaaaaaggggggttttttttttttgaaaggtagcccccccaaagcaggggccatgttttttggatggttttttgggcctagggccccgttaatgccccattaattttttttatggggggccgtgggttttttttattaggggggggaacttgaattccccaccccgttttgttggttgttttttttt

SEQ ID NO: 686889 - DNA, 94 bp, Homo sapiens
  misc_feature (36)..(36): n is a, c, g, or t
cccaaatcttttggggacttttctttttttacccancctccgcccctgcgaggagttgaggggccagttcggccccgcgcgcgtcttcccgttc

SEQ ID NO: 686890 - DNA, 387 bp, Homo sapiens
  misc_feature (2)..(2): n is a, c, g, or t
tntgtcagtcatgagtattgactgacatcctaaatgagcatgtgcttactgtatgggactggcagaggtaaagcaaaaggagcagaaataaagacaacaaatgaagttgttttggctgtggagtttcacccaacagatgcaaataccataattacatgcggtaaatctcatattttcttctggacctggagcggcaattcactaacaagaaaacagggaatttttgggaaatatgaaaagccaaaatttgtgcagtgtttagcattcttggggaatggagatgttcttaccggagactcaggtggagtcatgcttatatggggcaaaactactgtagagcccacacctgggaaaggacctaaaggtgtatatcaaatcagcaaacaa

SEQ ID NO: 686891 - DNA, 340 bp, Homo sapiens
ctagaggatccccattattggtggacgaatatatggacaaatattacaatggagcaactgctgtagcattggacgtatgaaaaacctttctaatgactcaaaccccaaatagttcacaaataaaaactatgataaataaatttatataaaaagtcaaaaggcaagacgacaaatacagaaaaaaagaactcatcagaaaaaggattcatctttctttatataaagaggcctaaaaattgatcaaataaagaccaatgacttaacagaaaattggcaaaggacatgggctattcagagaaaaaatgcaaatgatccttaaatatatgaaaagatctcatcc

SEQ ID NO: 686892 - DNA, 268 bp, Homo sapiens
acagattgaagtcacatttgagatagatgtgaatggtattcttcgatgtgacatgctgaagacaatgggtactgggaacaaaaataatgatcacaatcaccaatgaccagaatctgcctgacacctgaagaaatcgaaaggatggttaaatgagggccgagtagatgcaggcgagctcgtgagccagaggccaatggcgcgggcgagtagtagggctggcgcttgccggaacgccgggtcgttagtccgccggaatgaacggtgaggg

SEQ ID NO: 686893 - DNA, 185 bp, Homo sapiens
agcatttccaattctggttttgcggacagcaggtcttagcttgtccggcgagggttggagttggtcccggcggagattcagttggaagagcccgcggcttcccggggcaacttccccacttggaagggattctgaaagaaaatgaagtcagccttagaaattaagtgtgatctgccctctcgcct

SEQ ID NO: 686894 - DNA, 541 bp, Homo sapiens
  misc_feature (453)..(453): n is a, c, g, or t
  misc_feature (466)..(466): n is a, c, g, or t
  misc_feature (473)..(473): n is a, c, g, or t
  misc_feature (476)..(476): n is a, c, g, or t
  misc_feature (486)..(486): n is a, c, g, or t
  misc_feature (527)..(527): n is a, c, g, or t
gggcgctctttttcctggtgactactattcacgctgaactctgccatccagatgcagaaaatgcctttaaagtaagacttagcatcagagcagctcttggagataaagcatatgtctgggacacggatcaagaatacctcttcagagcaatggtggcattctccatgagaaaagttcccaacagagaagcaacagaaatttcccatgtcctgctttgcaacataacccagaggtgtccgttctggtttgtggtcacggacccttccaacaattatactcttcctgcagctgaagtacagtcggccataagaaagaataggaaccggatcaacagtgcattttttctggatgaccatactctggaatttttaaaaattccttctactcttgctcccccgatggagccatctgtgcccgtctggattattgtattcggtgtgatatttgcattgntacagttgcaatngcctacnggntctatctggnatcggcaaagcagaaaggaacaacaaaggaccactggagtngaagatgcagaaga

SEQ ID NO: 686895 - DNA, 593 bp, Homo sapiens
  misc_feature (472)..(472): n is a, c, g, or t
  misc_feature (535)..(535): n is a, c, g, or t
agcgggccgttgccactcccgggagcatgaaggaccgaacccaggagctccgcacggcaaggacagcgatgatgatgatgatgtcgctgtcaccgtggaccgagaccgcttcatggatgagttctttgagcaggtggaggagattcgaggcttcattgacaagatcgcagagaatgtggaggaggtgaagcgggaagcacaggtgccatcctgggcatcccccaaccccggatgagaagacgaaggaggagctggaagaactcatgtccggacataaagaagacagcaaacaaagttcgttccaaggttaaagagcatcggagcaggtccatcggaggcaaggagggaaggggctggaaccggctccttccggctggaacctggagggatccgggaagacacaggcactccacggctggtccagaaagtttgtggaggtcatgtcggagtacaacgccacgcagtccgaatntaaccgcgaaggcgcttgcgcaaaggcgcgcattccagaaggcagcttggagaattcaccggncgagggagccacgaaaccagttgagggaggctggcgacggagcattgctgggaagaag

SEQ ID NO: 686896 - DNA, 163 bp, Homo sapiens
cgggtgatctagaggatcctgcctgaagaacttcctccatctcacagggcagattactggcaacaaaccccaaaacttttgtctgaggaagtcttgtgtgggactaggtctcactctatcacccaggctacagtgcagtggcacaatcttggctcactgcagc

SEQ ID NO: 686897 - DNA, 449 bp, Homo sapiens
caagaccttcaacttgttaaaggaaccatggttgccacgtatctcgcactcaacaggtccaaggcccccccccaggttaagcccattgagttatccattctgggccaacggggagtgaggaagtttccctccccccccctgttaggccccagggcatttgggccccagggcggtgctagctttacacagtcagcatgctttccaaagggagcaggccggaaccccagggccaaagggagctggaaccccaggggccggggaaactgccagccccaaacccccctaattagggtgttaaaagtgccttttccttccccaggatgggcttttttcgggtcagggtttggtggtggaaaacgattccctgtataaactttttttccttttttccccagctggttactcagggtttatctgtccctggcccttttaataaactgtttagttta

SEQ ID NO: 686898 - DNA, 674 bp, Homo sapiens
ggaggaattggtccatagtattccttagcgaggagttcgttccgggctctgcagctcttgacccggctggtattgtctccatagcgagccaattcctctgaaatcagcacacagcaaagggaaagaaaccttccaagtgaaagattgactgcgggatccaggaggctccatcagaaacttccagccaagttctagaaaagcacagcaaaccaaagacgcagcaaaggaaccaaacaagaggaaacctttgctaagggcatctgcaggccaagtgcctaaacggtggaagaaggataccaagggaggcagaacgaaacggagcaagccctcctccagcgaggaagatcgagggcccaggagacaagcaggagaaggcaacccagacgacgtccgcatggccgggagcgcgcgggtggcctccagggtggtcttataacagacggagatggtggcgaaggtgattgaagtgctcgacggcgccaggcccactacacgttgcgaaagcctgcttcccaggttgggagaaaaatcccaactctaattgcgcttccaaatagacgaggatgacgcctagagtcgaggctcgctgccagaacgcgcgaggcaaaagcccccccactattcaaccaagaccctaaaggctgcagctccagcaacttgactaccaggaaccc

SEQ ID NO: 686899 - DNA, 110 bp, Homo sapiens
ggcaacctctacctctggggttcaagcaattctcttgcctcagcctctgtgagtagttgagatcaggcccttgcactacgggctgggtgacagagtgaacggggtaccga

SEQ ID NO: 686900 - DNA, 461 bp, Homo sapiens
ggagcttaagaggacaaggaggatgtcatctatgttaggatagagggcatagaaggccaggagtcaggagaccggggttctggtcctgggattatacaccagctcactgaggagcttggtcctctctggatcaagagtcccaccgtgaaaatgaaggaacgggtccagataacactggagccctttcccccaagatgcattggcattcagaggagggggcaggtccagtcctctacggcctgtggggtggatgctgcctgggagggtgctgggtctatgagagaaatgagggtactcatgtgttccaaggtaaccatatttctgataggtccggggatcgtcggtctcatcgtcggcacggtggctttcagccagcagaatccaggagctcacggggggcccatcccaattcttaaggcatgggtaattcagccaggcctcagtttcctgggtgcctctgg

SEQ ID NO: 686901 - DNA, 272 bp, Homo sapiens
gatcaatcccccagtgcaaaacagggctaacggcccctgcaggacaacagcacgctccatccctcatggtcaactgcctttgcggccccggaattttgcccttcatttgcttttttttactttcctgagcctagcccgtccgtaagctccctcccctggttggttcccagggcaggctgactcagttgactgcttggtccaaacctggccctggcccttgtcagggtcagcctaaggaaatgggaataaaaaggccaaagagcccccagtta

SEQ ID NO: 686902 - DNA, 3100 bp, Homo sapiens
actcgtctctggtaaagtctgagcaggacagggtggctgactggcagatccagaggttcccttggcagtccacgccaggccttcaccatggatcagttccctgaatcagtgacagaaaactttgagtacgatgatttggctgaggcctgttatattggggacatcgtggtctttgggactgtgttcctgtccatattctactccgtcatctttgccattggcctggtgggaaatttgttggtagtgtttgccctcaccaacagcaagaagcccaagagtgtcaccgacatttacctcctgaacctggccttgtctgatctgctgtttgtagccactttgcccttctggactcactatttgataaatgaaaagggcctccacaatgccatgtgcaaattcactaccgccttcttcttcatcggcttttttggaagcatattcttcatcaccgtcatcagcattgataggtacctggccatcgtcctggccgccaactccatgaacaaccggaccgtgcagcatggcgtcaccatcagcctaggcgtctgggcagcagccattttggtggcagcaccccagttcatgttcacaaagcagaaagaaaatgaatgccttggtgactaccccgaggtcctccaggaaatctggcccgtgctccgcaatgtggaaacaaattttcttggcttcctactccccctgctcattatgagttattgctacttcagaatcatccagacgctgttttcctgcaagaaccacaagaaagccaaagccattaaactgatccttctggtggtcatcgtgtttttcctcttctggacaccctacaacgttatgattttcctggagacgcttaagctctatgacttctttcccagttgtgacatgaggaaggatctgaggctggccctcagtgtgactgagacggttgcatttagccattgttgcctgaatcctctcatctatgcatttgctggggagaagttcagaagatacctttaccacctgtatgggaaatgcctggctgtcctgtgtgggcgctcagtccacgttgatttctcctcatctgaatcacaaaggagcaggcatggaagtgttctgagcagcaattttacttaccacacgagtgatggagatgcattgctccttctctgaagggaatcccaaagccttgtgtctacagagaacctggagttcctgaacctgatgctgactagtgaggaaagatttttgttgttatttcttacaggcacaaaatgatggacccaatgcacacaaaacaaccctagagtgttgttgagaattgtgctcaaaatttgaagaatgaacaaattgaactctttgaatgacaaagagtagacatttctcttactgcaaatgtcatcagaactttttggtttgcagatgacaaaaattcaactcagactagtttagttaaatgagggtggtgaatattgttcatattgtggcacaagcaaaagggtgtctgagccctcaaagtgaggggaaaccagggcctgagccaagctagaattccctctctctgactctcaaatcttttagtcattatagatcccccagactttacatgacacagctttatcaccagagagggactgacacccatgtttctctggccccaagggaaaattcccagggaagtgctctgataggccaagtttgtatcaggtgcccatccctggaaggtgctgttatccatggggaagggatatataagatggaagcttccagtccaatctcatggagaagcagaaatacatatttccaagaagttggatgggtgggtactattctgattacacaaaacaaatgccacacatcacccttaccatgtgcctgatccagcctctcccctgattacaccagcctcgtcttcattaagccctcttccatcatgtccccaaacctgcaagggctccccactgcctactgcatcgagtcaaaactcaaatgcttggcttctcatacgtccaccatggggtcctaccaatagattccccattgcctcctccttcccaaaggactccacccatcctatcagcctgtctcttccatatgacctcatgcatctccacctgctcccaggccagtaagggaaatagaaaaaccctgcccccaaataagaagggatggattccaaccccaactccagtagcttgggacaaatcaagcttcagtttcctggtctgtagaagagggataaggtacctttcacatagagatcatcctttccagcatgaggaactagccaccaactcttgcaggtctcaacccttttgtctgcctcttagacttctgctttccacacctgcactgctgtgctgtgcccaagttgtggtgctgacaaagcttggaagagcctgcaggtgccttggccgcgtgcatagcccagacacagaagaggctggttcttacgatggcacccagtgagcactcccaagtctacagagtgatagccttccgtaacccaactctcctggactgccttgaatatcccctcccagtcaccttgtgcaagcccctgcccatctgggaaaataccccatcattcatgctactgccaacctggggagccagggctatgggagcagcttttttttcccccctagaaacgtttggaacaatgtaaaactttaaagctcgaaaacaattgtaataatgctaaagaaaaagtcatccaatctaaccacatcaatattgtcattcctgtattcacccgtccagaccttgttcacactctcacatgtttagagttgcaatcgtaatgtacagatggttttataatctgatttgttttcctcttaacgttagaccacaaatagtgctcgctttctatgtagtttggtaattatcattttagaagactctaccagactgtgtattcattgaagtcagatgtggtaactgttaaattgctgtgtatctgatagctctttggcagtctatatgtttgtataatgaatgagagaataagtcatgttccttcaagatcatgtaccccaatttacttgccattactcaattgataaacatttaacttgtttccaatgtttagcaaatacatattttatagaacttc

SEQ ID NO: 686903 - DNA, 373 bp, Homo sapiens
tgcggcgggaaccgggctggtggggagcggggcggagctggccctgcctctgcctggcctggcgcctgcagtcggctgcgggcctgctgccctgctgcctggccaactgccctgagctgcttgctgagtgccgagggagactgtctggggccttgcaccttggcagggcagccttgccctggctgtcgttgtgccccccctgcatgtgcaatgcgtgtgtgctgttttggcccatcggctgacagcctctccctgcttgcctttggaaaacccctggtgggttgttggctgtggccttgtgggtgtgcctgtagccctggccaagtgcaggggctttgggattttcccccaatttcccccccccctttttggg

SEQ ID NO: 686904 - DNA, 693 bp, Homo sapiens
  misc_feature (424)..(424): n is a, c, g, or t
  misc_feature (432)..(432): n is a, c, g, or t
  misc_feature (490)..(490): n is a, c, g, or t
ggagccccactgctgctacctggggaatggggcgcctgggggccgaggcagagggaagggggtcctcccgattagggtcgagtgtcagcctgggttctagtccttgggtgcggccccagtggccttttcccttcaggctctgtagcgtccctcctctgacagtctgcacgaaggcgccagtctggtgtctgcatgggtgtcggcaggctgggagtgatcactgcacgcccatcgtgcgcacctgcccatcgtgcaaggcatccgatggtgctacaccatgtagtcctccatgagcgacatgggaagggtaggagttgccgcccgtggcgggagggtccgcgggctgtcacctcatcgccctgtctgtgagcttctgggcacccctcgctggaaggttagcatactgtgtgaacatgcctctganaacgcagngtgccagggggcactgccttctcacagtttggctttgcgccggttcacccatgtgggngttccccttcaaaggcagttagagctttccgagtcgtggggtttccaagttgaggccttcaaagcgtggagagggagccccttggggggcaggggtggaggtaggggggtcggcgtgggcatgggttttcccccaatagaggctttggaaggcaaggaagcaattgcgccaaatttcattctagggcggagattatcgggcat

SEQ ID NO: 686905 - DNA, 124 bp, Homo sapiens
  misc_feature (42)..(42): n is a, c, g, or t
  misc_feature (68)..(68): n is a, c, g, or t
  misc_feature (70)..(70): n is a, c, g, or t
ctttcttaatgaataataaacaatcttctaagcctgaaaatnttaagtcatcattccaaatacgtagntnatgtaacctgcatggcaatttctttaaataagaatggttgtaattctgtaatca

SEQ ID NO: 686906 - DNA, 192 bp, Homo sapiens
tttgtatttttagtagcagccggggttttgccatgtggcaggctggtctcgaactcttgacttcagatgatccatctgccttggcctcccacagtgctgggattacaggcgtgagccaccatgcccggcctctttctcacctttacacctgtcttcttatccttacatctgttttcacatttggcgggggca

SEQ ID NO: 686907 - DNA, 949 bp, Homo sapiens
  misc_feature (148)..(148): n is a, c, g, or t
  misc_feature (156)..(156): n is a, c, g, or t
  misc_feature (174)..(174): n is a, c, g, or t
  misc_feature (227)..(227): n is a, c, g, or t
  misc_feature (412)..(412): n is a, c, g, or t
  misc_feature (429)..(429): n is a, c, g, or t
  misc_feature (445)..(445): n is a, c, g, or t
  misc_feature (537)..(537): n is a, c, g, or t
gggggcggggcgcgcgggcccgggcaaggcaagcgccggtggggcggggcgccagagctgctggagcgctcggggtccccgggcggcggcggggcgcagaggaggaggcaggcggcggcccggtgtgctcccccccggacggtgcgcnggcccggnccgtctcgcgaactcgcnggtggtcgcgcggcccctgctgctgctccgaccccgggcccctccgccgcgcnatggctcggccgctagtgcccagctcgcagaaggcgctgttgctggagctcaaggggctgcaggaagagccggtcgagggattccgcgtgacactggtggacgagggcgatctatacaactgggaggtggccatcttcgggccccccaacacctactacgaggggggcgtacttcaaggcgcgcntcaagttccccatcgantacccatactctccancagcctttcggttcctgaccaagatgtggcaccctaacatctacgagacgggggacgtgtgtatctccatcctccacccgccggtggacganccccagagcgggggagctgcctcagagaggtggaaccccacgcagaacgtcaggaccattctcctgagtgtgatctccctcctgaacgagcccaaaaccttctcgccggcaaacgttggacggcctcgtgatgtcaggcaagttggaaagagagcaaggggaaggatcgggagttcacagacatcatccggtccttgggaccaggttggacgcgtagcgttgaggggttaaagggtcccaacaaggcttgggcggagttactgcgtttaagagcaatggggcgggcgcccgatagggggtcagacgtttctagggagagtaattacgaggacgggaagttgaaggagcaggcggaaagttgttcggggacgatgaagattacttttggcggaggagtcctgaaagaacatga

SEQ ID NO: 686908 - DNA, 444 bp, Homo sapiens
tttttcccaacagtggataggctatttattactgcttcaatttccaaactcattattgtctattcagggattcagtttcttcctggttcagtgtagggagggtgtatgtgtccaggaatttatccttttcttctagatttttctagtttatgtacatagtggtgtttgtagtattctctgatagttgtttgtatttctgtggggtcagtggtgatatcacccttatcacttctgattgtgtttatttgaatcttttctcttttattctttattagtctagctagcagtctatctattttattaatttttttcaaaaaaccagctcctggattcattgattctttgaagggtttttcatgtctctgtcttcttcagttctactctgattttggttatttttggtctcctgctaactttgggtagggcggggtacgagctcgaatt

SEQ ID NO: 686909 - DNA, 101 bp, Homo sapiens
tgtagatatcaggtatgtacttcgatttttgaataaaccagatgtgattccagatgtctgaacttatagattctgtttatccagctgcgtttcacttccga

SEQ ID NO: 686910 - DNA, 396 bp, Homo sapiens
tcgtgccgaattcggcacgaggtccgcccgtcttctccttctgcatcgaggctttggcggattccacctaaacacctaacagtcgcggagccggccgcgtcgtgagggggtaggtacggggagtcgggcggtcttgtgcatctgggctacctgtgggtcgaagatgtctgacatcggagactgatttaggagcatccccgggatcacgctctattggttctccgccaccgtctccgagcccttggtcggcaaacttggcctcattttccccgactaccttttcctctgggcggaaggctttatttattcctttcatatttggaggccaatcactgtcactctttattttcctgtgggtgcaggaactggatttccttagttaggcaattaaattgt

SEQ ID NO: 686911 - DNA, 246 bp, Homo sapiens
gaccatccgacagccgaaagataacaaaacactacatgtacagagcgcgagcagtgcaggacatggtggctggagcatggctttgagaagcccctagacatgtgccatgagtgctgtgtgagtgatacctgatgtcagagtgcagtgctgcaaaagaatgaccccgagaaagtgctgaggacactacgacgagaaccggcatgctagatacacaatgaacgctcttcttagacgaactgaacaact

SEQ ID NO: 686912 - DNA, 123 bp, Homo sapiens
tccccggggagttggcgagagaaagccagaccatcgtaatttgatcaacatccaggcgacccagtcaactaactgcgtgttcttgtatgcttgtttcatactctcgttctggacgtttactcg

SEQ ID NO: 686913 - DNA, 273 bp, Homo sapiens
ggaattatatattcatcattctacaagttaagcagtcttgcgcaatcttgaaggatgtcacaggcaatgtgacaaaagttaggaagggatgtcctattagattgcaagaataaaacaagagacgataggtggtaccttgatcttacctaaagaagaaaatcattcttttgcactaacatgaggtcctgtttcaacaatacctgtcttaggtctgaaggctaagccagtcaggcacacatgaggtgtctgccaactcaggcaagagcatgtctg

SEQ ID NO: 686914 - DNA, 682 bp, Homo sapiens
  misc_feature (158)..(158): n is a, c, g, or t
aaaaaggaggttcaaggccggaggaaatcctccctgaaggttttaaacggacaaatttcggccaaaagaattagaagaggccttgttaataagtctccaaccgtttagaacgaggacgtccacttttattaaatttctaaaaacgggctcatggttgncaaaaaacgttaagggcctcatcacggcggttggctgctactaaaaacagtgtgccgccgtagcatagaggagctactaaatgcctcgtggaccgtagggcatgctgcaacccccacaaaaagctggttgcctttttacaacagatgttagtctcatagaatacagcacgatgcatgacacattcaagagtcaacagtatgctcacgtcctgggatatcagcatgactgcaaacgtagtgtcagagcacagtgtggcatgttccgcttaagtctgggattcgcagacaagaagcgagatcaagcgacagcattgtgccgatcctaaaaatgggcactactttctccactagacataaagggacagtttgactctcacagggatcacttctgctgcttgcatgtatgaaaacaggaatgtgaacgccctgttctcatgggagaccgaaagtctcaagcacctacatgtattggaagccttgtttggcatcagcataaatatgatggttcttagaatgaatacacc

SEQ ID NO: 686915 - DNA, 352 bp, Homo sapiens
agtgaagaatgggatgtgccggccagggtttggatgttaggggtgcttctcactattggggtgtcgctgctcttaagctctcccagtggattaagctaggaaatacatgtttgcatacacaccactttttaaaaaaaatttttttttttgagacggagtctcgctctgtcgcccaagctggagtgcagtggcccaatctcgctcactgcaacctccacctcctgagcaagttcaagcagttctcctgcctcagcctcccaagtagctgagactacaggcacctgccaccacacctggctaatttttgtatttttagtagagacggggtttcaccatgttggccaggctggtc

SEQ ID NO: 686916 - DNA, 480 bp, Homo sapiens
cacgaggggcgaagctaagcagctctacctccgggttttgtgctgccagccgcgccttggcacagtctacttttagctggcctacgtcggcactgctataaagtagctgccggggtaaattactcaggctaacccggtcatcatcggccaagagcaactgcccgacaccggcgccagccagataggaagcaacgatactgcctaagccgcctaagccaacaatcagcacactttgatttgctaaatgccattgccgttgctcactcatgtccggtaataataactgtgcgctataacggagttgttgtgccgggtttaagctggcagtagccgccgcacctttgctactctgtggcattcgctttctccagtaactgcattaactccagcgtactttgctcaggatctgccgcttcgggtatagccgtgaccaccgcaataccattaactccgctagcagcaacagccactaaccgctga

SEQ ID NO: 686917 - DNA, 358 bp, Homo sapiens
cattgagtatgatactgaacatagatacctgtctgcccgtgttgtagagggtctggtgtaatagtatcgcttgtaagagctgaccatgtattggacagtgcacatagtctaggacatctaggtatgatcatgggctctcactagtgtgtgaggcatagatccttcagcaatcagttcttcatggatccatgtgttttgcatgcagtaaggatccccattccatttatagtagtgctacagacagatgtctccaggtacattccattctagtgcgtcagttatcgtaatcgacagtaggtaacaccaggtagataacaagagaatagtggtgttagacaacattatctgtccatgacac

SEQ ID NO: 686918 - DNA, 165 bp, Homo sapiens
aagaagcatcctgagtctagtggatccacttccagaggctgcaccctcgttaaaatgctcttcatatctgttaaatggaggaagtgaaacatccttatgtttgaaggcagattggtgtcttacgtagcaaggaaggggtgtagcaaactgcagatccaagagtac

SEQ ID NO: 686919 - DNA, 388 bp, Homo sapiens
acagcccaaggcatcgagcgctatcccgagtggcgccaaacagagatccttgatatcacctgcccttgcgtcagcctgtatgggcgcgaagtcgcagcgcccgacaaagttcagttcgccttcgaccatcccaatcggcgcgtttgactcgcgctagaaggagcgtatctagcgcgttcgcgtcaggctatggccgttggggagccgcctcacgcctacgggcggtcgcccgcatgaggttgaaatgatcggtctggtgatcgtcactcacggacgcctcgctgaggagttcgtcgcggcgatggaacatgtggtggggccgcagccgggggtccgcgcgatttgtatcggccccgaagacgatatggagcaacgtcgcgccgatatc

SEQ ID NO: 686920 - DNA, 84 bp, Homo sapiens
acatctgtgtacttctgtgcgagcacgtatccggatgaccaaagacatcagtacttcggcgccgggacccggctctcagtactg

SEQ ID NO: 686921 - DNA, 637 bp, Homo sapiens
  misc_feature (63)..(63): n is a, c, g, or t
  misc_feature (91)..(92): n is a, c, g, or t
  misc_feature (158)..(158): n is a, c, g, or t
  misc_feature (311)..(311): n is a, c, g, or t
  misc_feature (373)..(373): n is a, c, g, or t
  misc_feature (416)..(416): n is a, c, g, or t
  misc_feature (431)..(431): n is a, c, g, or t
  misc_feature (453)..(453): n is a, c, g, or t
  misc_feature (465)..(465): n is a, c, g, or t
  misc_feature (480)..(480): n is a, c, g, or t
  misc_feature (482)..(482): n is a, c, g, or t
  misc_feature (494)..(494): n is a, c, g, or t
  misc_feature (515)..(515): n is a, c, g, or t
  misc_feature (523)..(523): n is a, c, g, or t
  misc_feature (556)..(556): n is a, c, g, or t
  misc_feature (576)..(576): n is a, c, g, or t
  misc_feature (602)..(602): n is a, c, g, or t
  misc_feature (609)..(609): n is a, c, g, or t
  misc_feature (612)..(613): n is a, c, g, or t
  misc_feature (616)..(616): n is a, c, g, or t
  misc_feature (626)..(626): n is a, c, g, or t
  misc_feature (630)..(630): n is a, c, g, or t
  misc_feature (635)..(635): n is a, c, g, or t
gaattcggcacgagaaaaaaaaaaaaaaaaaaaaaattctgaggaaagaaaggcatgcatganggctccattccttttcaaacataatttnntttctttattcttggcttttgtttgttgtcatctcttgggtctttgctcagcttctctcaattgtnccagagtacacagggacctctcatctactaatgagttctccagcaacataggaaaacccagaccagatattgatgtatgtggtagccttgaatcggaatctggcagactccaagtgcagggcgcataactgatcaagggccccagctactgtnctctgcagtcccttgcaatgttggtgcaggggtgcagaggccatgtttctcactgactaatnccagccagcggcccaatatgactgacattgggcttgacaactnccctggggtagcctnggacctgtcttaggctgtgtanagttaagggggncaccttcctcccttntncttaagtggggnagcttcaattccctttttttnagggtttntttgaccatttgtttttaaccaggggaattgtnttttggcagggtacttaatncctaaatggccactgtaagccctccncatgttnaannttntaaagtggantttngtccngg

SEQ ID NO: 686922 - DNA, 345 bp, Homo sapiens
ggcccggagtaaatgcacagagaaaggaagcaggcccgttggcaagtggttgtgacaagcccgagcaagtgtgtgagaagcctggtggcttgccctggctctctgtctcctcccatcgggaggacacagagagccaggaccaaagctccttatgtaagcagaccccagcctggagcataagagcatcaacgatccaatgctaaactccacttggttcagtgactgtggttgctcttacttcaatgccagctgatacctgtgcaatactgcacggcatctcaatcaggaagcacctgccgcagtacaccactgaatcgaccgcaaggactattctaaatatttctt

SEQ ID NO: 686923 - DNA, 656 bp, Homo sapiens
  misc_feature (648)..(648): n is a, c, g, or t
gagacgacgcatcgtcggcgtcggaggctgaggggctgccgcggcgggagcgcccctcgcgtcggtcctcgctccgcttggtgtcatgtgagttctcgtgagggacgcacgctgggtgagtagtagatgctttcacgtggtggacgaatggactggaccgccgcaggctgccatcccgatcatcaacgatagatagctaggtgcggatccagtgcagaggccattgcgaagaagcatggtatcgtgattcctgagacacgagtggtcactaggtgaagaacgggaggagtgcgcaagagcgaaacgagtgtttgctaggacgtcgcctggaagggctcgatagtttaatcgcactgtgcgctgcaatcggaccaaacgcaacaagtccggatgtctgagggcgctggtagggatagagataggtgaaagaagaaagtgcgccacccaggaacgcccctcttgcactccctaggcacaatggtctgtgtcgttgtgccgccgcgtccctggagacagtcctagttcactcctgacaagaggtgacagaaatgtaaagacactggcgagaagggagttgtatagacctatgtgacagtgtgagagaaagctgagccaatgaccgaaatgtgagaacaatcttgtgggacntttattgc

SEQ ID NO: 686924 - DNA, 561 bp, Homo sapiens
  misc_feature (349)..(349): n is a, c, g, or t
gcaccggatcctgagtatacagggtgtggttggagtcaccatgtggagtgagaagagggagggtgaaggtctgaggctgtgaaactccatcgtccacagatcaaaaataaacaaggccgggtgcggtgctcatgcctgtaatcccagcactttgagaagccgaggcgggtggatcacctgaggtcaggagttcaagaccagccttgccaacatggtgaaaccccatctctactaaaaatacaaaaattacccgggtgccgtggcgtgcacttgcaatcctagctactcaggaggctgaggcaggagaattgcttgaacccagaaggcggaggctgcagtgagctgaggntgcgcgctgcactccagcgtgggcaacagagcgagactcccggccaactgagtacacttcaactaatgcacatcacaggactacccaggtaggcgcagcgcgaaaaacctgaaaaggccccgtagttctgagggccacacgccgacgtggcgggtgtccccccacctcctcccagggctgacgcgtctgctgctccccctacacgcgactgc

SEQ ID NO: 686925 - DNA, 1378 bp, Homo sapiens
  misc_feature (561)..(561): n is a, c, g, or t
  misc_feature (842)..(842): n is a, c, g, or t
  misc_feature (844)..(844): n is a, c, g, or t
  misc_feature (855)..(855): n is a, c, g, or t
  misc_feature (923)..(923): n is a, c, g, or t
  misc_feature (938)..(938): n is a, c, g, or t
  misc_feature (940)..(940): n is a, c, g, or t
  misc_feature (960)..(960): n is a, c, g, or t
  misc_feature (1018)..(1018): n is a, c, g, or t
gctcaggagtctctggtagcctgcagaagtaagcctcatcatcagagcctttcctcgaaactggagtcccagatgtcatcaggttgagtgttattccagccactaagaatcgccctctgcttgttaactctaggaattagtgtgcttggagccgagatcgtaagcatctctgaatactctgccctctagagccttgcagccttaatggaaggttggataccaaggagggtgtaatggagcatcaagccagctcggcaggcagtgatggagctataactaagcatcctttagggttctagcctctccaggcatttagccgcgtcacatatagcatctaagttagctgtaggtaatgggcgtaagtacctgtcagacatttggaggcaatcctaccttgcttttgcttctagagcttagcatatctgatggtagtcaggccatattatcacatgtgtgactttccttgagtactataagaagcgtttcgtggccaccccgtaaactccagggtgggaccatatgtgccaattgcaatggcgacccctactcacatacacacanacctagccagctgtcaagggcagaatgaatctatgctggataagaaatggtggaactgcgttatgaagagctaatttactggacaaagaattccaaagcaaaaccagaacagtatgaatttgagcaggtctcataggttgagcaatttccccctaaaccaactgaaggctaaaaagcaacaggccattgtgaaccaatgctaagacgccctctatcatggtgaaaagctccatcaatgaggtatcttctttagtggtggtatgtaatggaacttagccatntntcaaagcaatngaaatgcattgctctggatctgttccttggcagtggactcagaaagccaacatgtggctcctcccagnccataaccagtattntngctgcttctgaatacaaatnggttggttttgacttcagattgaacttactgtagcctcagatgatttcccccctccgnctccaggaagaaagaatgttactgccttaatgaaaccattgaaaaagagagtgatgctcaaacagtctttcctacatgtaatgttaccctacagtagtcacacatagtgctgttcaatatagtttaggagtcagaggtctcgtgaaaaactctaaatgcgaaatcctatgccgcggggcgacttgtgacataataataggcagtggtcagggtacttggggaaaccctgggtgaggcgaattagcaggaaccttccctgagataaatcacccaagtgcaaaccaaagttgttcaagccttgtaactcgggtttctagcgggacactggcgcttatgcaaggctcgatcgtgacacttgaa

SEQ ID NO: 686926 - DNA, 344 bp, Homo sapiens
aaatgaccatggaaagatgataaatgatatttacctcatatgtcatgataactgttttttaaagaagatatctgtgccctctgttatcaggggtatgggaacatgcatcacttacaaacactcaatcaccgtgacataaagaaatagcaaaccttgaacatgtcagaacagtgcctgttcaatctacttctgtttcttgaacaccgagtttattctcaatattgtatccccaaaacaagtggtctttagaatatgatgtttactttctggtgagacttttgtgaaacatgtaagcgggtatatgagtatacacagtatgtaacaatttaataaaaatatattta

SEQ ID NO: 686927 - DNA, 1413 bp, Homo sapiens
  misc_feature (561)..(561): n is a, c, g, or t
  misc_feature (877)..(877): n is a, c, g, or t
  misc_feature (879)..(879): n is a, c, g, or t
  misc_feature (890)..(890): n is a, c, g, or t
  misc_feature (958)..(958): n is a, c, g, or t
  misc_feature (973)..(973): n is a, c, g, or t
  misc_feature (975)..(975): n is a, c, g, or t
  misc_feature (995)..(995): n is a, c, g, or t
  misc_feature (1053)..(1053): n is a, c, g, or t
gctcaggagtctctggtagcctgcagaagtaagcctcatcatcagagcctttcctcgaaactggagtcccagatgtcatcaggttgagtgttattccagccactaagaatcgccctctgcttgttaactctaggaattagtgtgcttggagccgagatcgtaagcatctctgaatactctgccctctagagccttgcagccttaatggaaggttggataccaaggagggtgtaatggagcatcaagccagctcggcaggcagtgatggagctataactaagcatcctttagggttctagcctctccaggcatttagccgcgtcacatatagcatctaagttagctgtaggtaatgggcgtaagtacctgtcagacatttggaggcaatcctaccttgcttttgcttctagagcttagcatatctgatggtagtcaggccatattatcacatgtgtgactttccttgagtactataagaagcgtttcgtggccaccccgtaaactccagggtgggaccatatgtgccaattgcaatggcgacccctactcacatacacacanacctagccagctgtcaagggcagaatgaatctatgctggataagaaatggtggaactgcgttatgaagagctaatttactggacaaagaattccaaagcaaaaccagaacagtatgaatttgagcaggtctcataggttgagcaatttccccctaaaccaactgaaggctaaaaagcaacaggccattgtgaaccactaaagaagatacctcattgatggagcttttcaccatgatagagggcgtcttgcattggtgaaaagctccatcaatgaggtatcttctttagtggtggtatgtaatggaacttagccatntntcaaagcaatngaaatgcattgctctggatctgttccttggcagtggactcagaaagccaacatgtggctcctcccagnccataaccagtattntngctgcttctgaatacaaatnggttggttttgacttcagattgaacttactgtagcctcagatgatttcccccctccgnctccaggaagaaagaatgttactgccttaatgaaaccattgaaaaagagagtgatgctcaaacagtctttcctacatgtaatgttaccctacagtagtcacacatagtgctgttcaatatagtttaggagtcagaggtctcgtgaaaaactctaaatgcgaaatcctatgccgcggggcgacttgtgacataataataggcagtggtcagggtacttggggaaaccctgggtgaggcgaattagcaggaaccttccctgagataaatcacccaagtgcaaaccaaagttgttcaagccttgtaactcgggtttctagcgggacactggcgcttatgcaaggctcgatcgtgacacttgaa

SEQ ID NO: 686928 - DNA, 965 bp, Homo sapiens
  misc_feature (247)..(247): n is a, c, g, or t
  misc_feature (311)..(311): n is a, c, g, or t
  misc_feature (314)..(315): n is a, c, g, or t
  misc_feature (317)..(317): n is a, c, g, or t
  misc_feature (816)..(816): n is a, c, g, or t
ggaaggtggggctgctggcctcccctgtcctacagccccagcctacctctgtctcctcagcaggaaagcaaagctgcggcctgagatctccttccaccaactcctggcatggccagaaagttagccagaaacaccagaaagtgccaggcagctaggaagcatggggagagccccctgaagctgcgtgtgtagtgcctgcttccgctgccatcccagaaatggacgagcttcaccctgagaacccagncacaccactgggacacatcctgacagtgacatgcacactcttccctggccccagcctggagagnagnntncggcacgagcaccagcctttgctccttctcccagtgggagtggagagaactgactgctggagtggagacagtcaaggctgtccttctgagggagcacagcacagggtctggtgtcccagggaggcaatctgaaattcaagccaggcctccccagcggagaggacacacccctcaccatgcagagtgacgtttagtaaactctcaaaagagagcacagagccccactcctccagccgacccatactctgcctccccactccagaccagtgaacaaggtggattgcccttaagccagctcagaggcaaagtccaaagacctcaggtgagtcaaacaataaaaacaaagaattaagaagaatccagctgggtgcggtggctcacgcctgtaatcccagcactttgggaggctgaggcgggaggatcacgagcaggaggtcgagaccatcctggctaacacggtgaaaccccgtctctactaaaaatagaaaaaattagctgngcgtggtggcgggcgcctgtggtcccagctactccggaggctgaggcagaagaatggcgtgaacccaggaagcggagcttgcagtgagccgagatcatgccactgcactccagcctgggcgacagagcgagactccgtcttcaaaaaag

SEQ ID NO: 686929 - DNA, 911 bp, Homo sapiens
  misc_feature (247)..(247): n is a, c, g, or t
  misc_feature (311)..(311): n is a, c, g, or t
  misc_feature (314)..(315): n is a, c, g, or t
  misc_feature (317)..(317): n is a, c, g, or t
  misc_feature (762)..(762): n is a, c, g, or t
ggaaggtggggctgctggcctcccctgtcctacagccccagcctacctctgtctcctcagcaggaaagcaaagctgcggcctgagatctccttccaccaactcctggcatggccagaaagttagccagaaacaccagaaagtgccaggcagctaggaagcatggggagagccccctgaagctgcgtgtgtagtgcctgcttccgctgccatcccagaaatggacgagcttcaccctgagaacccagncacaccactgggacacatcctgacagtgacatgcacactcttccctggccccagcctggagagnagnntncggcacgagcaccagcctttgctccttctcccagtgggagtggagagaactgactgctggagtggagacagtcaaggctgtccttctgagggagcacagcacagggtctggtgtcccagggaggcaatctgaaattcaagccaggcctccccagcggagaggacacacccctcaccatgcagagtgacgtttagtaaactctctccagaccagtgaacaaggtggattgcccttaagccagctcagaggcaaagtccaaagacctcaggtgagtcaaacaataaaaacaaagaattaagaagaatccagctgggtgcggtggctcacgcctgtaatcccagcactttgggaggctgaggcgggaggatcacgagcaggaggtcgagaccatcctggctaacacggtgaaaccccgtctctactaaaaatagaaaaaattagctgngcgtggtggcgggcgcctgtggtcccagctactccggaggctgaggcagaagaatggcgtgaacccaggaagcggagcttgcagtgagccgagatcatgccactgcactccagcctgggcgacagagcgagactccgtcttcaaaaaag

SEQ ID NO: 686930 - DNA, 251 bp, Homo sapiens
  misc_feature (144)..(144): n is a, c, g, or t
aacgggtgatgcggttgaggactacaggtggacgaagatggaggtagacgcgggtgaggatacaggtggcgacacgactggaggtagacgcgggtgaggactacaggtggacgaacgatggaggtagacgccggatgagtgctncaggtggacgaacgactggacggtacgaccgcggactgacggatacatggtgagagaagactggagtgtagaccgcggactgacggactaccacggtggacgaacga

SEQ ID NO: 686931 - DNA, 994 bp, Homo sapiens
ggacgcgtgggtcgacccacgcgtccgtatcttcattgaatctatgaagtaactaacttgattttgattttacaggctcataggaagaagggcctgccttgtctaagataagacttggacttggacatttgggttaacgctggaatgagctaagacttgggggactgttagaaaggcatgatcatgttttaaaatgtaaggacatgagatttggaaggggctgggggcagaatgatatggtttggctgtgtccccacccaaatctcaccttgaattgtagtttccataatccctacatgttgtgggagtaacccagttggaggtaattgaataatgggggtggttaccccatgctggtctcatgacagtgagtgatacctgaaggttttataaggggcttttcccctttcgctcagcacctcctgctgccttgtgaagaaggtgccttgattcttgtttggcattcaccatgattctaagttttctgaagcccttcccagccatgctgaactgtgagtcaattaacacctctttcttttatgacccaaaaaaaaaaaagagcaacacgctcaccacaattcatcataaaaaagggggggggccacaaaaaattaccccagagggggcgaacagagtatcgtgggtaccacgatttttggagagaggggtggccccgaaggggggatgcataaaacgcaagacgacggccgcaccccaccaacactggagggcaacatcaacggggggaccgtgagaggacccaacttacgggggccaatcagggaccacacacccagcaaagaagactcgggaaaaaaaaatgaacggtgcagtggtcacaccacccatgacgcgtgcgaacagagctcggatacgaaaatgcgcaacgagacaaacacacgagcacgacgagcagccgagacacgacgacgagacggcagcacgaacacgcgcactccaagagcacccagagcacgccacagagccgagaaat

SEQ ID NO: 686932 - DNA, 140 bp, Homo sapiens
ttctttaatgaacatcatctcgacactgatgcttgtctaaactgcaggattcccgagttaatgtcaaatcctccatacttcgtagtcaagaagcaggaacaagctcatcatacgcctcagagttatcgcatgaaggagtc

SEQ ID NO: 686933 - DNA, 253 bp, Homo sapiens
aatgtatagtgtctggctgctgtaacaatactacaaattgtggcataaaaaaaaaatcgatccctaagttctggatgtcagaactgggtgactttctcctgagactgtcctgatttttttttttttttttttttttgggctggaaagttggttgggggtaaggaaaatgaagggaaacgccaaggggagtttttttccagggaattggttgactttgggtggaaatttgatgatgggcccaaagaaggcccat

SEQ ID NO: 686934 - DNA, 375 bp, Homo sapiens
gtccctaggctactctagagatcccctgagtcagtagggcgctaaggattcaaacctggccaatgctctatcacctttgctcacgtgctcttcctgcccttcctggatctataggtgcagggtcatgttgctggctctgacccaatcccacaaagagcttgtgatcctgctctggcaccatggaagattaagcggtgatgaatcacccaggttttgatgtcattcctacagcaacagggagcccttggactcccagcaggggttggggcctcagagggtacatgaatcttaccccctgccctgtaattcctttgtcatcacaatgatagattcttttattattttttattttagagtctgtattaactgcttggg

SEQ ID NO: 686935 - DNA, 192 bp, Homo sapiens
gagtatccccatagcacccgtaccaagttacgtatttcacttcacaaatctaatatgtcctacctaaaaaatatggttggtaaatcttactctcataatttcaaatatggtatacagatttggttgaattctgttacacatttctacttactaatcagaatcgttattccatttaatattttaaaatggaat

SEQ ID NO: 686936 - DNA, 280 bp, Homo sapiens
aattcttctttgggaattactgtgttgctgttgctgatgcaaagaaggtctctaggaactcaattccaaattaaatcccacctagctatgcttgaaggacaagggattattgtgaataaccatggacaaaaaactatgctgctggccctagaaacttttacaggaagagcaaaaattaggttagggcaggtgcttaatttcaagttgtctggattaaaagggtgtcaaggaggttcagaattggctcagaatctaaggtggtgggctcatcagtcaaaaa

SEQ ID NO: 686937 - DNA, 126 bp, Homo sapiens
taggcaaatatacatcatcagagggccttatggaggtcacagcttaggagggcccatgagcagcctcgtcgtccgggggcccctcgatacaggcagctcgcaagcgagtacttcgtgggaccgtca

SEQ ID NO: 686938 - DNA, 541 bp, Homo sapiens
  misc_feature (242)..(242): n is a, c, g, or t
  misc_feature (259)..(259): n is a, c, g, or t
  misc_feature (262)..(262): n is a, c, g, or t
  misc_feature (295)..(295): n is a, c, g, or t
  misc_feature (314)..(314): n is a, c, g, or t
  misc_feature (323)..(323): n is a, c, g, or t
  misc_feature (335)..(335): n is a, c, g, or t
  misc_feature (346)..(346): n is a, c, g, or t
  misc_feature (376)..(376): n is a, c, g, or t
  misc_feature (385)..(385): n is a, c, g, or t
  misc_feature (387)..(387): n is a, c, g, or t
  misc_feature (418)..(418): n is a, c, g, or t
  misc_feature (430)..(430): n is a, c, g, or t
  misc_feature (480)..(480): n is a, c, g, or t
  misc_feature (488)..(488): n is a, c, g, or t
  misc_feature (523)..(523): n is a, c, g, or t
cccggctaatttttgtatttttagtagagatggggtttcactgtgttagccaggatggtctcgatctccagacctcatgatctgcccgcgttggcctcccaaagtgctgggattacaggcttgagccatcgcgcccggccctcttttttaaaataaagtagaatactactagaagaaaactctttctacagaagtggttgatatgcagataaatgtaacaaacatccttttttctctccttnaattttatttgaaggangcngattatttaaaagcaaataaaagttgtaatctntaataggatttattaggtngatagttgnaaaatatgccanaaactacccanaggccagaaggcaaagtggaggttacctgnaaaaattgntnaattttatgtgatgtgaatcacattattatnattcctaaagtncccctaaaaatctaatcattaaaatatatctagtgaaaaggctattagangaatttanaatccatgctatttaaattaagaaaggatgaaatnagtattccatagacacca

SEQ ID NO: 686939 - DNA, 304 bp, Homo sapiens
taatcccagcacccttgggaggatgaggcaggcggatcatgaggtccagagaaggagcaccatcctgccccacatggtgaagccccgtctgctacgctaacaaatgaccacaattagctgggccacctggtgagaaccatctcccccaaataagtttaagaaatcagccgggtgcaatggcaggcacactatggtctcaactattcaggaggcggaggtaacaattgccttgagcctccggaggtggagccccatgaccaggttgccccccagccctccagcccggggacagagccagacctgt

SEQ ID NO: 686940 - DNA, 186 bp, Homo sapiens
cagtcaataatctccatgggctctggcctagttttagaagtttcaatagcatcggggaggggtgctcctgaaggccaggcatggccaccacgtgacgctgttcttagtgaaggtttaagtaatattgagattatgcttttatgttgactttttatatttgggcctttatttactgctagtctgact

SEQ ID NO: 686941 - DNA, 441 bp, Homo sapiens
tgtggtcgatctctagcaggatccccagagcccaacctttctgttggcctatgccatacatgtgccgcgtgtcctcatggcgctaaagtgcccactactgaccagccaaccgtgactgtgaacttctcgaaagctgtttgttgaactctattcttcgaggcgattttcgatacactgcatcccgatgatgattaggtttttgataagaagctcttcgagatggattaagcttcttcggcgtagtatacgaggacgccttatggaatagctggaacaggctctggacatagctccggcggcgctctttagcggatatctctagtttattgttacagttgttctaactgaagatgttatcttaggctatgctgcatgactgtttggtccggtaccgtgctctaatttctaatcgtggtcctggctgttttctgtttgacatcc

SEQ ID NO: 686942 - DNA, 166 bp, Homo sapiens
cgttatgtctgctgtgcgcttcacaaaaaagccatcaatgacctgactgtggtaatgcctgcagcagtgtgctctcaggaaggctgaggttgtggacggaaccatgctcttccatctaggtatacccggcgctccagaccacagcgcttcagtcggaacttcgtgt

SEQ ID NO: 686943 - DNA, 789 bp, Homo sapiens
ggatcatgaggtcaggagttcgataccagcctggccaagatggtgaaaccctgtctctagtaaaaatacaaaaattagccggatgcagtggtgtgcgcctgtactcccagctactcgggaggctgagggaggagaatcacttgaacctgggcgacggtggttgcagtgagctgagatcatgccactgtactccagcctgggcaatagacaatagaatgagactctgtctcaaaaataaataaataaataaataaataaataaaattatgtcactttctacatatccagagatccttttaattcttgcaggactgagtttaatgataagcaataataatttgtttattgaagggatcatttgatttttacttttgataggtggcaagattttttcagaatatgggcttaaaaataaacttgctacattgggattatggctctctttttctgccctttggactagggaaatggacccaaccctgatttctggagataattcaagctttcagggcctacgtgaaagataatactggaacacacccacgctgccatcacatgctgtgttgctaggctgggactttattatttatgagctacttctgtgaggtgcaggaattaagtgaactggaaaaaacacatgggcagtaacacttagaaacatgggtggatctttaaatattaaaatccccagatggtgttcattcctggttcggggatttctgtagggcaagatatccaaggcactgtggcttttcactgtcttatcaagtatgcttctaatcaaatcct

SEQ ID NO: 686944 - DNA, 355 bp, Homo sapiens
aaccggtccttctccaacgcagaacatgcccgctttagaagaggtgtgcagatgtgctctctcacttgcccaccctactctttgtccacttcattaaggtaccgtacttgcctgtttcttacaagtatttgaggttgggtttggtttacgtgttccttaaaggacagtgggaacagacttggttagaaggagtcagcaagggccgggactgggtggtgatctttctgacggaaactcttggtccaagtgacggcaacgggactgacctgtttcccaggaccctttcggtgtgatagacaatacgcagctacgttgactaccccataggtggttttattttttttttttttttttt

SEQ ID NO: 686945 - DNA, 423 bp, Homo sapiens
  misc_feature (71)..(71): n is a, c, g, or t
actacggtagatatagagatactgtgagatacggacatgagtgttactcaggaaactctcagaataggganctcagtcgacacagtctactgtagtctataacacacttgtaagacactctctctgtcatcacatgtatggcaaagatgtcttcgtggtctccggaagacaaatctgaaatcagcgtgatgactggttttttatacctctccgactggtgttacagcgagggtgtggacccgaacaagcactgtggagtccaggacccggagggcaaaaggtcctgcacgcgatcactcacctgcaaggtgaagacaactgacctctaacctcacttcccattggttacacagcttattctgaccatcagttcgcataactttatttggccttgtgtgctttatattccttgataccagggaa

SEQ ID NO: 686946 - DNA, 81 bp, Homo sapiens
accgaggacacggccgtatactactgtactagaggatatagtggcgcggcgctctatgcttttgatatctggggccaagga

SEQ ID NO: 686947 - DNA, 347 bp, Homo sapiens
tacatattcgactcgagttagtaccagcgtgttcgcggccgacatatagttacacttgtgccatgagagagcagaattagtgcagaatgccaatggtccaggtcagcgggcccgcgggactgtcctggtgtgtagataattgtcctcatattcccagctgatctcggcgaggtgacattccgggtctactgagacttattaccgacagcagcatacagtccaaccacttgttccgggcttcagcatcccttacttctgctcccgcaggcttcgtgggtgcacaagatggtttacttggacctctgcctcatctttcttctcttgcgcttcagcctgcgcattctctt

SEQ ID NO: 686948 - DNA, 116 bp, Homo sapiens
  misc_feature (21)..(21): n is a, c, g, or t
tcggcctattatcggcacgtnctgctgtctatatcaaccaacacctgtgccgcataatagcgaggtgcgatgaatagcgaagtgccgatgaatagcgaggtgccgatgaatagcga

SEQ ID NO: 686949 - DNA, 426 bp, Homo sapiens
ggaaggaaggatgaagcctgcagcctgcatccatgtgcccgcagaagacatgatctcatagcagaatgactgtgtaatattccatggagtgtattgaccacatttgcttaatccagactgtcattgatgggcatttaggttgattccatatctttactgttgtgaacagtactgcagtgaacattcacgtgcttgtgtcattatggtagatagtcttcctctgagtgtatacccggtgatggtattgcagcgtcaaatggtagccctgcttttagttctttgaggaaacgctatactgctttccacaatggtagaacagatttacactcctaccgacaatgtatcagggtctccacaacttcgcaggcatctgttattttttgactttttaataatagccattctgactggtgtgagatggtatct

SEQ ID NO: 686950 - DNA, 140 bp, Homo sapiens
aggattatggtttcccgatactgaacattgacatgcaatatctcaaagcattctatcagaagatgtatggtatctcccatttgccaaggccatccgtgcgactaaaccacaagtgagattgactgagcaaatccgtggtg

SEQ ID NO: 686951 - DNA, 200 bp, Homo sapiens
  misc_feature (20)..(20): n is a, c, g, or t
  misc_feature (30)..(30): n is a, c, g, or t
  misc_feature (80)..(80): n is a, c, g, or t
  misc_feature (82)..(82): n is a, c, g, or t
  misc_feature (90)..(90): n is a, c, g, or t
  misc_feature (105)..(105): n is a, c, g, or t
cccgagaatcgcacggaggnggagaccccnctcatggcggccgacaccaggtggatgaggtccccagtggcgggggtggncngcttgagngagcggaaacagatntctgagagtgcctcgttgcgatgcatgaggcctcatctcgtattctccaccagctggtgcacagacagcgatgcgttgcatggctccaccaccgt

SEQ ID NO: 686952 - DNA, 253 bp, Homo sapiens
ctccagactgtatccaagtacttcttttctttcattcattcattcattcattcattcagcatttactatgtgcctctgctgggctaatgctgtggatataacagttaaggaggcagactgtcctgataaaatagctggctgggcatggtggctcactcctgtaatcctagcactttgggaggccgaggcgggaggattgcttgagcccaggagttcgagaccagcctgagcaacatggcggaacctcattttt

SEQ ID NO: 686953 - DNA, 133 bp, Homo sapiens
agtctagaatccctgggatctctgcagcaaattcgggcctaaggtgaagattgtacagccacttgacctccatctcttgacctcaagatcagcctgagtaacaaagtgagacctcatctctacaaaaaataga

SEQ ID NO: 686954 - DNA, 888 bp, Homo sapiens
ggctaatgggtgtgttcctggctggacttgatgtccaggcctgaggggttttctcgccgagtctcctggggcggtccggagctcgtgccctgtgtgtggggcccccatttgccgccgcatgcccaggccgccgccccccatcatcagctcggtccagcacgctggttctgtcatgagactagagctagatactttctaggtgcgggaagcaattatgtgcaggacaccgaaattatcgtgtctggacgactgtgatagaaacagacaccaacaacgattggggtcatactttgctgacaggcatgttttatactcaacaagaagtaggggaacttcttgtggccgctgtgatctgtgaattcagaaccaacagatgggacaagaagggatcctcggggtttattcgagcggattcagcttagggacgtcaggggtaggtcaggttcttaagaaggctatattatgggtgttcactaacttaaaagggaggaaggatggggggaatattggaggggtcattgcaatctattaaggcgtccggaagatgaccagattatggatcctattataacccaaatgggattctgtacgggttaacttcactccgttggatggaaggctaagggtattttaaggaagttttttccaagagtggtgggcctaatttaaagcgaattttagacttgaagtaacaggcttatgattgggtcccactcatttaattataaatttccatgggtttggggaatggcctggggagatttgtaaaggcaggaagagccaaaatgtgggacaggaagagttggatgttggggaagaaggggtatacacaggcggagggggaatgggacttgagagggcgctttatatttttgagggggacatgag

SEQ ID NO: 686955 - DNA, 118 bp, Homo sapiens
agaggtgatcagaggatcccgagtgtcgcgctggatatatagtacagggacttgccgtacttactcttgaattcagacctaatttacaatcatgtccacattcactgcgggagacact

SEQ ID NO: 686956 - DNA, 437 bp, Homo sapiens
  misc_feature (47)..(47): n is a, c, g, or t
  misc_feature (74)..(74): n is a, c, g, or t
  misc_feature (88)..(88): n is a, c, g, or t
  misc_feature (104)..(104): n is a, c, g, or t
  misc_feature (113)..(113): n is a, c, g, or t
  misc_feature (146)..(146): n is a, c, g, or t
  misc_feature (180)..(180): n is a, c, g, or t
  misc_feature (299)..(299): n is a, c, g, or t
  misc_feature (358)..(358): n is a, c, g, or t
  misc_feature (383)..(383): n is a, c, g, or t
  misc_feature (394)..(395): n is a, c, g, or t
gaccctgatgtgtgggttatgatatccatttaggagaaatctttttntcctaaactagtgtagcaggctctgtntcgtcactggaatntgcaccatcttagaanaatcactanaaatcgaaaactcatccaaatgctttgaaattntaatgcgtcgtagaattttgaagaaactttgatntccaagtggttttaagtcgtttggatctcaggtttgggagaaattgcatttctcccaaacaatatccagatcccgtgactactttaatgaacagagcataacttcggctacactaatcnaaatgaggcaacctcgggctctaattgaagctaacacaatttaaagaacattttgtganataacactttttccaattcaatgtncaagcacctcnnatgcctgaatttcggttgagcaggacataacaccacacaatt

SEQ ID NO: 686957 - DNA, 179 bp, Homo sapiens
tgagaccctctgtcctccgtgagagctcccttggctatatcaccgtttctctgatcactggttttcttatctgtagcttctgttctcctggttctttaacaggaccagtcgggcttcttccaatcgtagctcatccctcagctgcttgataagctgctgccgctccaaagcctgttagg

SEQ ID NO: 686958 - DNA, 119 bp, Homo sapiens
tagacatatacgaatcagctcgtacccggtgatgatgcaaacaattactgatcgtggattagagtgtattagtcacgcgtgtatgggaagtagtctctggtaatatctatgctgctggc

SEQ ID NO: 686959 - DNA, 488 bp, Homo sapiens
ctgacccagaggatccctaggtatatgtcgtgcctcaccaattccagtggtgaagagcttgagaagctcaggacagaggctgtgctgctggatggaggcgtctaggtacagaaactgtctttgttctatgccttttgtaatgagagtttcaagggtgcccacagcacgcatagcatggaaatgccttagaattcacaggctagcttctatctcgggagccatctttctcgttcccaaataaacctgccagcccctggggtaacttctcatccatcattctcttctctccaggtctgtctcttttctctctcattattctggccaagcacatacatgaaatgagaacaggagtgctgcttttttctggcagttttcaggatccaagaggaggaaatgaattgaggaagtagacagagaggaaagagcgcccgtagacaccatatttcttagatggggcaggactacggtatgcacgacatatacctagg

SEQ ID NO: 686960 - DNA, 105 bp, Homo sapiens
  misc_feature (19)..(19): n is a, c, g, or t
cagaagtcactgctgaccnctgtcagtggtgctgctgatccatggtaactgaatgtatctgaggggctgtgaagagttgatagacttagaggttacacctaaaga

SEQ ID NO: 686961 - DNA, 217 bp, Homo sapiens
cggactccttcacagacatccttcgtgccatcctgctgtcattggaagtcctaatcgaagatccggagcttcagataaatgcgcttcattttaattatagactggagtaatccctcccttcaaacaacggctccaaacctgacacccttcaatcccttaaacctggccattcgaaggggcagcacagacagtaaccccctggccccctttgtgacga

SEQ ID NO: 686962 - DNA, 542 bp, Homo sapiens
  misc_feature (36)..(36): n is a, c, g, or t
  misc_feature (63)..(63): n is a, c, g, or t
  misc_feature (100)..(100): n is a, c, g, or t
  misc_feature (103)..(105): n is a, c, g, or t
  misc_feature (118)..(118): n is a, c, g, or t
  misc_feature (170)..(170): n is a, c, g, or t
  misc_feature (194)..(194): n is a, c, g, or t
  misc_feature (201)..(201): n is a, c, g, or t
  misc_feature (209)..(209): n is a, c, g, or t
  misc_feature (232)..(232): n is a, c, g, or t
  misc_feature (248)..(248): n is a, c, g, or t
  misc_feature (403)..(403): n is a, c, g, or t
  misc_feature (408)..(408): n is a, c, g, or t
  misc_feature (410)..(410): n is a, c, g, or t
  misc_feature (415)..(415): n is a, c, g, or t
  misc_feature (430)..(430): n is a, c, g, or t
  misc_feature (432)..(432): n is a, c, g, or t
  misc_feature (511)..(511): n is a, c, g, or t
tggttaatgctttcggggcttttgctttcccccccngatcattgtgatttgctagtgctttgnttttcttaacacaaactccgggctctttggataaganaannngtgaacttctgcngggttctttcctggatgatgcgggcccttcattttttatgttgtcatttttnttctcaaattgggtaagggtattnggggggntctctctntccccttcttttttaaagggggnaatccattctgaaggnacattacaactgaccagctctcttgtcatggctggattttcagtaaagtttataattagtttcataatctgtatcttggtgaagtgatttcccaggaataacaaagcaaaaaagtctggaaaagaataggaaagcaaatgttggtaatgattagncacantnatgtnggttaacagtcttancncagccatctgcacagctgtgtccaagcgacagaccatggtgtcatcacacacttgactgatgtacgtcttaatcttgcnctgattttctgcgttcacactcaagttattt

SEQ ID NO: 686963 - DNA, 413 bp, Homo sapiens
atttcgggcttgggttttttttttgggtttgccgcccttttgggggggcccccaccttttggtgttgcccccaaaattttttttgggaacccagggggggtgaaaaggggttccttgggccccccccccttttttttttttgcccatagggtgggggcctttccccggttttcccaaagcctttttttaaacccctcccccaagattgggggaaatgctgggggtgccccttttttttttggccgcccggcgggtcccttacccgttttggcccattaaaatttcttatttgtttgcccccccccgtttaactccgggcggggtgcggttccttgcctggaaagggggccttgtccccccgatcctgggttttgggggggggttttttttccaaaaagtttttattttggtta

SEQ ID NO: 686964 - DNA, 121 bp, Homo sapiens
agatcctactaatgctgatcacagatgtgatctgatgtgttgttttaagttatcttgatctgtaacatcatgactgaggcgaatattcttagacagcctcatctgcttgtatccttagata

SEQ ID NO: 686965 - DNA, 1544 bp, Homo sapiens
gagagagctaggcacgtcaacaagttctggttttactcagctggtggagtagactcaacagctcgtacagcttgctaaatcgcgcttgaaccaagaacaagtcattgctgtgcacacttgataatggctttactgagaaaacgagaaagccagctctgctcgcaagcaggccgctcaacaacagcctggacattcaggctcaacagtgactaaactgctgctcacttctttctacaatggcacacaacaaccctaccaactatcagaatgcaagactagcaacccaccaacggcaacacagcaacttcagacacaacaccggctctcaaactaactgaaccccatccacagcgtcccctgcacacgcagcacacaccacgctcacacacacactcgactccgcgcgcgcactaacctctctatgactactaacacgcactctggcgcaacacctgcacacgctcaacactctgcgcagcaacacacttgcacaccatctgcaacaacccaagccaagcgccacgcgcctactcaaccccaatactggaccacccaacacgggtaataacccatacacatagcagcgacacccactgggactatcatagcacgctacctgccacacacacgcgcatgcccactcacacctatcgccacgggccaccacggccagcgcccacccaccgcacattcggacaccccgctccaacctcgctacactaacatcccccgcgcatcatccagacacaccgtaggaaacccaacacacgggcacgccccatcaagcttcagacgcaccacaaccgcctaccggcacccgcaaccgcaacgccgacacgcccgagctacccctgacacgcctcacccttaacgcacattccccccctttcagttggctactacaacgcgaaaccttcctcacaccaaccctcacacactcggctacacttccagcaccgcgctgggaccggcaaaaaccttcactctcagcacccgcccacgcctcgccaaaccccccctcttcggccgcacccgtcttcctccccaactgcacaacgctcactggtctgtacagcgcctattctacccctccgtgcacggaccacccattcccaacagcctgaacctacctcccaacagcacgccgaccccacccgtatgagaccgccagccccaaacgagcgcgctaccaaacaccacctcacacagcggatacccgcgtagaaaaccccttcgacgacatactggccttacgacgccatatgtggagacaccacacaaatagacaaccaaccctgcccactcgaacctcaaccccatcctcgcccccgcggaccacaacccgcagcggaaaccaactcttaacacacccacctcctggacaatcatagacccgcccaccaaatcacacaacacgaaatcaagatcgataccctctgggacgcaaacacaaaactcttaacccccgaacaacgcgcccacaaacaactgaaacactcctaccaccacagcgcccaaccccacccctcggccgccacaccacc

SEQ ID NO: 686966 - DNA, 208 bp, Homo sapiens
agcaccaggcccttgtggaaacagaaggcctgcaggggaggtgagagccataagcccccaccaccagggtcacgggcccattggcagtcccacaagggggttacccggactttaccgcacaagaactgcagccgatgtcccctagggcaggggactggcggggtggagagcagctcagggaattctgggtgctaaaccctgaggggca

SEQ ID NO: 686967 - DNA, 359 bp, Homo sapiens
ctctctagaactgaggacacactgaccaatctggcaggttaagcttcaggtaacccagttccctagggaaggggacaaacccctggacaggagctccctgctgcgtcacctgtacccccagagccccccagctcacctctcccagctgcacaccctgctcccctctggaccccagtactgctgtgctggttgcaccatgggctgtgtagtcctgctccttctccagagtcccctctggtgagctccagtacatcctacggtacggaggtctggagcacaagcacaccttgccaacctcatatccagaccaacccatcctccacacaaacagcgttgcactgttctcctccgtctaaaga

SEQ ID NO: 686968 - DNA, 1205 bp, Homo sapiens
ctcgacatcgccagtcgcggcccggccagctctctcagtgctaccctcctgcttcggcacaacttcacagccagcctcctcgaccctgcggatcaaggtcgaagaaggggctcgcatcgtcgacagccgcccgcccagcccagcccacactctggactcgccaagctagaccgctctcaagggctccaggcaccacaccaccctcatcaccgtcgccaccgtgctcggcgctcacagagccagattccagcagtcccctctcaactcgtctcgagttcctatcgggtcggactcccgcgcgccggagcaatcagcactcggctcggagggcgtcagccagtcacctcgcccccgctcacgtcgcgcagctcggcgctaccacagggcccagcgcccctcgacacgcaccgcacgaccagcgccacaaccaccggccgcccgcgcgcaacatcccccggcgccggctcctcggagccgcgacgaaccatccgagcaagacccatccactccccccacctcgcgcccgaagcgccccagcaccggacgccccgcgccgcacactcacccaccccacccccaactcacgcaccctcgcgcacgactcgccccccccaagcaccaatcgcacccccccgcctagacgccccctacgattcccaccctcgcaccgcggcaccgcgcccgccccccccgctcgccccccccgtccccccacccaccgcccacccgcacacacccccacccccacccctctcccccgccacccctgcaccccaaccccacccccgcccccatacaccacgccaaacctcacccacgccgagcttccccccccattcacccacaaacccgcgcaccctgccctccccccacgcacccgaactggcacccatcctcgcgcaccaacaacccacctggctcacccactcgtaccagcgccacatccctgccccacggaccgccccatacgagaccacaacaccacggccgcacgccacaccggaccacacagacgcgcatcgcaccacagacacccccaccccccgccaccccgcgccgcacccgcccacccgctccctccaccacgtccacctcggcccgccaccacccgcacccacccccaaagagcaacacccaccgcggaccaagacaacacccgagcacggacccagacccacccccccgccacacagccacccgccagt

SEQ ID NO: 686969 - DNA, 1048 bp, Homo sapiens
gctgaattgtaacaatgatgtgtgcagcggatgtgtcgtgtcattattaatggctagctcccaatattctcccatgggcagcaggaggactatggcgtgacaggataggtagagaacttgacactgttgccctttgagatgtgatcaggaggctggtggaatctcatgccttcattcccttcagtcccctgtgaactaggtgggggtgcattgcgggctcggtcaagcgtccgtatcatgcgaatgattgcatcgatgatttgcatggatagtactggacacatctggctatagacgtcactcaagagtggttgtagctgtcctattccctgggctagccttcgtctggatcagtcgatactttgtgactggcacatgttcattacgaggatcgcatacaagggttaactctcgtacatccttcagtaccacgtacgtgaggaccagagaaaatactgtactaaacagcacgcctaggtccgtttgcgctcatttgagcgtcgtgttggagctagagacttcgtcgcgtagtatgccatatgtacagcctaggtgcccttgaagttcatccttggagtcaaactgtgaaccttgagagtgtcttaccagaacatgggtggtcgtgacaaaggaattgggaaattgtagtgataagcacacgagacaagactagctatgttgcagagttcacaggctggtgacagcatatcaccgtacccaagttttatccataccccacgtggagggacatcatggtacgttacgaagtaactcgtcccttttcgcatctgcgcgcgtggaactacgttacgagagggactagggagcaccacaagtgtcggcgaatccgtgacggaaagaagatgcgttttgactgacacgcgttgggatgaccttttgcctttttacgcatctgagatggtgtcattccatcttctccagggccttggcgtgcccatatgaagcgaaagtgtcgcggatatttaaggagccttagccgaaggcgaagcccacatgcgagtaacctgtgtacggagtgactatggag

SEQ ID NO: 686970 - DNA, 434 bp, Homo sapiens
gaaaccccatctctactaaaaatacaaaaaaattcggagggtgtggtggcgggcacctgtagtcccagctactcgggaggctgaggcaggagaattgcttaaatctggaggttgcagtgagctgagattgcaccacttcactccagcctgggcaacaagagtgaaactccatctcaaaaaaaaacaaggaatatagataaccaatttctggcccccagttatccttttaaccttgcaaaactccttccttttggctagaagtgaagtctttggctgggagatccactttatgttcctattgagctttggaagcagaaggtctgaaggaaccgacaaagaccctcacagttgtgaagtctctgtttataccgagcagtagcggctgcttcgcccgtctcaaactgcggggacaggaagcatatggagccagttga

SEQ ID NO: 686971 - DNA, 178 bp, Homo sapiens
atcctatccgctgatccagcagctaggactacaggcacacgccgccacatccagcatggtgaaaccctgtctctactaaaaatacaaaaattaactgggcgtggtggcgggtgcctgtaatcccagctactcgggaggctgaggcaggggaatcaattgctggatcagcggatcgagt

SEQ ID NO: 686972 - DNA, 752 bp, Homo sapiens
  misc_feature (6)..(6): n is a, c, g, or t
  misc_feature (104)..(104): n is a, c, g, or t
  misc_feature (119)..(119): n is a, c, g, or t
  misc_feature (134)..(134): n is a, c, g, or t
  misc_feature (157)..(157): n is a, c, g, or t
  misc_feature (167)..(167): n is a, c, g, or t
  misc_feature (172)..(172): n is a, c, g, or t
  misc_feature (210)..(210): n is a, c, g, or t
  misc_feature (214)..(214): n is a, c, g, or t
  misc_feature (250)..(250): n is a, c, g, or t
  misc_feature (253)..(253): n is a, c, g, or t
  misc_feature (257)..(257): n is a, c, g, or t
  misc_feature (259)..(260): n is a, c, g, or t
  misc_feature (262)..(262): n is a, c, g, or t
  misc_feature (271)..(272): n is a, c, g, or t
  misc_feature (279)..(279): n is a, c, g, or t
  misc_feature (283)..(283): n is a, c, g, or t
  misc_feature (320)..(320): n is a, c, g, or t
  misc_feature (339)..(339): n is a, c, g, or t
  misc_feature (392)..(392): n is a, c, g, or t
  misc_feature (411)..(411): n is a, c, g, or t
  misc_feature (419)..(419): n is a, c, g, or t
  misc_feature (437)..(437): n is a, c, g, or t
  misc_feature (455)..(455): n is a, c, g, or t
  misc_feature (460)..(460): n is a, c, g, or t
  misc_feature (463)..(463): n is a, c, g, or t
  misc_feature (473)..(473): n is a, c, g, or t
  misc_feature (478)..(478): n is a, c, g, or t
  misc_feature (486)..(486): n is a, c, g, or t
  misc_feature (528)..(528): n is a, c, g, or t
  misc_feature (537)..(537): n is a, c, g, or t
  misc_feature (618)..(618): n is a, c, g, or t
  misc_feature (664)..(664): n is a, c, g, or t
  misc_feature (683)..(683): n is a, c, g, or t
  misc_feature (696)..(696): n is a, c, g, or t
  misc_feature (705)..(705): n is a, c, g, or t
  misc_feature (724)..(724): n is a, c, g, or t
  misc_feature (731)..(731): n is a, c, g, or t
  misc_feature (733)..(733): n is a, c, g, or t
ctagangccatatctgcgcttcacagaggggcactgcacctattgcgcaggaatgtttcgaccttgttcatgtgcttcctgaagcagttgagcagcccgtagtncttgagcggtgcgtnatggttgtgcgagtntgtgtgagagcttgctgtaggtntgcttgaggntctgnccagttcggcggctgccgtttttctgcctccccttttncgtntggatgtccttcctctagtgtcctttaggagggganagntatngnngntcgaggggnnagaaatnaggntgtgggcgtacatactcctgtggaaacgcacgggctncagctaagaattgatgagnagcagggatgtagtgcgtgagcagctctagattgtgattactgttggcgtttntctctcatgtggtgagtgngtgttggnaatagaagtttgaatatncagaatggagtgtctggngagtnatngcagagaatntaatnctctctgngtccttttggggataataggttttcttacaaactctctgggnagggtgttnaatgggccagccgggtgcgcgcgtaaggggcttgtgagcaatagcgtgggtcaaaaaagcctgtgatatacgggaacggtnttgggacgggcacctagcctcttagaaagccaggggcaggcgagancaggggcaaaaagccaggnagcaggggacgtncggggagcntgggagccatttgccactngggtgancngttcacaggaccctgaatt

SEQ ID NO: 686973 - DNA, 341 bp, Homo sapiens
cgagctcggtaccccggcccgagcctgctgaaccaagagaagaccgaagccgtcgaggctgtggagcggcggctcgagttcatcgacaaggaggtgtaagctcccgccatctaacctcatttctgtgactgagctaatctgaggctttcgctccgatgacagtgagcgcataaagaagcagatcacggacttacaggacaagcaagacggggcgcgaaccgaaatgtttgcgctgcaacagcaatcacagcaggcgcagaccgtgcaggcggcgtagtgggtgcgacgagcagtgtacgatgtcaaaagcgaaacgagggaattgagtcacgaagctggtg

SEQ ID NO: 686974 - DNA, 949 bp, Homo sapiens
gtggggacgccgaagacccgggccgctggtgcccaacggactgtctgaaggcttagcgaggcaactgtatatccctagtggtccaatgttgcggtcaaccctttcttgggatagcaataaatggatgtcactgaggaggtgttcggacaaagacttctggacattaatgtgatcggccccaagacttgcgatgacaaagggcagctggtgccaagaaatggagaaacgaggagcggctccaagtgtgtgattagtgtcttcccatagtcagccttcagtccatctcctggcttcagtcctttacaatgtctacgttacaacagcctcgctggggccttgactccaagatcctggcctatagagctggccccaaggaacattagcgtgtaactgccaagcacctggaacttatcaagactagccttcagcaggatgctctggatggacaaggaaaaagaggaaagcatgaaagaaaccctgcggataagaaggttaggggagccagaggattgtgctggcatcgtgtctttcctgtgtctctgatagatgccagctacatcactggggaatacagtgttggtgcggtggaggtaccccgtcccgcctctgaggaccagggatacagcccacaggccagagttgggctctagctcctggtgctgttcctgcattcacccactgccctttcccacctctgctcaccgttactcttcaccacaggtcaaatgagttctgccctgtgtaaagatccagcttccgtgccgtaaaggtggcgtcttactcaggattccgcagctgctgttcgtggccttgggtaaggcctcccctgagtacacagacaggcctgctgaaaggctgagatcttaccttaggcaaagaccaagatattttatcatgcgccactggggaatctggaggagtgatgggagagaaggaaccctggaggtta

SEQ ID NO: 686975 - DNA, 84 bp, Homo sapiens
aagacagcagcatatatctctgcagcgttgggctatttaactcctacgagcagtacttcgggccgggcaccaggctcacggtca

SEQ ID NO: 686976 - DNA, 546 bp, Homo sapiens
atgtgcattactttgatacggccgaggcagtacaattcacctgtatctcaggatttcaaggtatcagcttggtcaacataatgtgaccagagtctctagcaaaaagtatcaatatataaaaaaaaactaatacgtgcatcattgtaccgactggctgtccgtctacacacaggagggagggagagaggccagagcacttttagctacagtaccctttatactcttccttctttttctctttttttaaacaatgcccaagttttactttttcaactaaaagtaagtattcttacaaaaagagggtggtagcaggtcacagacccagctgggctgcagaaggtggctttggctacttactgtcaccccctaatcctaactgtgccttccacacccctaacagttcctcctcctcccattctttctgcattaccctggttcctggctctgcaactgtagccaggacggcctcagaagttccctgaacagagcttccaggcaggactttgcatacaggtgtacaacacacactgctggatacccacacac

SEQ ID NO: 686977 - DNA, 389 bp, Homo sapiens
atattgctagtctggcgcttccaattaggtgcatgagtaggtggcctgcagtaatgttagcggttaggcgttcgaccagggctattggctgactgagtagactgatggtttcgatcatacctagtattaatcttagagcgaaagcctataatcactgcgtccgctcattagcggatgtccatggctaggtttatagatagttgggtggttggtgttaatgagtcaggcagtagtccgagatggttagttgtgaccatataaatgattaagcatactagtataagagctcaggttagtcccttagtggtgtgtacggttatcatctgtcttcagattagtttgattagtcattgctggctgataatcagtcgggtgttaatgagatattt

SEQ ID NO: 686978 - DNA, 518 bp, Homo sapiens
tccgtgaccgttgtttactcatgtggccaggacagcctcctcctagctcccttcctggggggcaggccagcacttcctgtgtacaggatctgcagagaggggaaccagggcccaccaacctctaaaccaaagttcgtcacacaaatttagagaccagactttggagatgataaactgtccctttcatctgttaggaaactcagagacaggaagggcaagggactgtatttataaggaaaaggcaggacaaatatttcagaccccaggcttagctgcacagagccagggttcttgccaggaatccttgactaccaaatcatgatcttgcttcctttatcactgctcattaggacctctgaggaggctcaacagaaagaagagggagggggctggcaaggcatcagtgaaaaggcagtgccggtgaaccgggaagccagtgcttgctaatgagctgtgggctcctccaaggcccacactctgaaggttcccttccctccagacaggtgcaagcgtaaaat

SEQ ID NO: 686979 - DNA, 575 bp, Homo sapiens
  misc_feature (1)..(1): n is a, c, g, or t
ntcacagagtgaatgtcatttttgacttaggtatgagccttgtccgacaaccgcatggggaatcatttcgccccagaggagttggaacattgctcgccaacctggcatatagattgctggccgttggttttttgatctgttttcggcgagggttgctcgtgattgttaatccctttaatgcaccaaaattgtctgccaaacggttacgaaacgcactggtgacgggctctgccctgttttgcctgttcggcgcgggtcaactgtgggcgttcagtctggatgatgtgtcggccaaggcaaaagagctggctgggcagaaatacgaagctccgcgcagcaatttgccgaacgaattccgcgaaatgaaattcgctgactaccagaagattcgtttccgtaatgaaaaagccgagtgggccgatcagaacaccccgttcaagctgtccttctatcaccaggggatgcatttcgacaccccggtgaaaatcaacgaagtcaccgccgacagcgtgcatgaaatcaaatacgacccgacgcgtttcgatttacattcactgtgtacacattcatctgta

SEQ ID NO: 686980 - DNA, 296 bp, Homo sapiens
gacctaaggaaggaggaagtgtttgtaaactatgcatctgacaaagtctaatatccaagatctataaggaacttaaacaattgaacatgcaaaaaacaaacaaccacatttaaaaatggacaaaggacatgtaaagatacatattacccaccaaggaattatgaaaaaagattactcacattactaattcattaggagaatgctaattcaaaccccacaatgagaaccatcacacattattagtcagattggttactattaaggtcaaagtttagcaattgctggccaggttcttg

SEQ ID NO: 686981 - DNA, 211 bp, Homo sapiens
ttctgcatgatgaattactagaaatcactttgcaggagaggcaagctaagagccccgaatacagacgagctacctgagaacagcttaatagagcacagccgtctattttgcccaatagtgggcagatttttaggttgaggccaaaaacctaccgagcctggtgatcgctggttgtcccagatagaatcttagttcaactttaaatttgccc

SEQ ID NO: 686982 - DNA, 691 bp, Homo sapiens
  misc_feature (15)..(15): n is a, c, g, or t
  misc_feature (23)..(23): n is a, c, g, or t
  misc_feature (50)..(50): n is a, c, g, or t
  misc_feature (117)..(117): n is a, c, g, or t
  misc_feature (277)..(277): n is a, c, g, or t
  misc_feature (300)..(300): n is a, c, g, or t
  misc_feature (387)..(387): n is a, c, g, or t
  misc_feature (402)..(402): n is a, c, g, or t
  misc_feature (412)..(412): n is a, c, g, or t
gctccctgcctccgngtcgcagnccccgccgtagccgcctccgagcccgncgccacatcctctgagcagaagatggctgtgccacccacgtatgccgatcttggcaaatctgccagnggatgtcttcaccaagggctatggatttggcttaataaagcttgatttgaaaacaaaatctgagaatggattggaatttacaagctcaggctcagccaacactgagaccaccaaagtgacgggcagtctggaaaccaagtacagatggactgagtacggnctgacgtttacagagaaatggantaccgacaatacactaggcaccgagattactgtggaagatcatcttgcacgtggacttaagctgaccttcgattcatccttctcacntaacactgggaaaanaaatgctaanatcaagacagggtacaagcgggagcacattaacctggtctgcgacatggatttcgacattgctgggccttccatccggggtgctctggtgctaggttacgagggctggctggccggctaccagatgcattttgagactgcacaagatcccgagtgacccagagcaactttgcagttggctactgagactgatgaatgccaggttcagcactaatgtgaatgacgggacagagttggggcggctccatgttaccagaaagtgaacaggaagtggagaccg

SEQ ID NO: 686983 - DNA, 735 bp, Homo sapiens
agcggaaacggcgcggggtccgctatggtcggcggcgagtcgagggcgtactggcgacccggagtgatgagcccgcccgagagcgatgccgcgcgtggagacagctgaggaagcaaaggagcctgctgaagctgactatcaacttgagcttctgccgggacgtgttcttcctagaatggccacgttgacctgacgtggggaacgtgacggcctacccagttgaagtagctatagagctccgtggagagatatatgagataagctctaccagctttgcaagtatcttgcagaatgcaaaggatattggctatcaaagcattagtcaggaacattaaaggactgtaaaccaagaaatatggctgggactgcaagcctttagtctggagttcagatccaatgttcgttgtcagagccaggtgagcagctcttgagtcgggcgagcttacaagttggatgcatattcagaataactggccagagtacaagatagctggagaagcgcatgagaatacttatttctatgggacagagtcttattgggttctaagatgtggaaggagtgttttataaagaactgaagtcctgaggatgatgaaatgtgtgaaaattcctcgaatggagtttatgctggtcatcacaggaacagtctcaaggatatcgagtaaagtggaggactgtggctattctgtgaagcttgtttgagacatgaatccctcagaatctcagatttaatat

SEQ ID NO: 686984 - DNA, 438 bp, Homo sapiens
aagaaggctagcacatggactctgatggatcatcttgaggttatagaacctcttctagccaacctaggaaaccattccctacaatcactagaagataggtctcccctttgaatgaactcttgccattttaagtgaaaacccatggactcaaaacagtgttcttgagacacatgcttgaatctacttctattctgtggaatgtattctatgctgttactctcaagttcaataaatctacatatactgttagtattaccacttattacttagtactcatttctttgaaataaccttcatatcatgtcctgcttccctcccaccacacttctgggtaacagaaaggtgtttgtagttaatttgaagcttttaattatatttctcctttattgtttgagaattttatatatgtatacattgtgttattgtgttttgattaaa

SEQ ID NO: 686985 - DNA, 203 bp, Homo sapiens
  misc_feature (3)..(3): n is a, c, g, or t
  misc_feature (187)..(187): n is a, c, g, or t
tanttaaaaataacatagagaatgtaattggattgtttgtaacttaaaggataaatgcttgaggagatggacacctcattcttcatgatgtgcttatttaacattgcatgtctgtatcaaaacatctaatgtaccccataaatatatacacctactatgtacctatacaaattttttaacataattnaaaattaaaaatacgt

SEQ ID NO: 686986 - DNA, 539 bp, Homo sapiens
atcactcaattgaacaagatactaagctctggtcacagcttcttcctctgtcttgcccttgccttaccaactcctgccaaagagcctttgcccagggctgttatttcagatttgggaggccacctcggcctcccaaagtgttgggattacaggtgtgagccaccatgcctagccaattcaacagaatttgtaaaaggaaatgaaaccagatgtctagtgtggctgccttctgcttgagtggctggttagcctcattagagctttgtctaagggtgtctcctcaccaaagaaggcaatgttcccccaggtgacttaagtgacaaattctcttttatatcgtgaatttattcattctttcagtacactgttcagcatctaccttttaccaggtcctgcacttggtgctgaaatgcaaagatgaaacagacatacttccttgactgtgtagtagaggaaatgcaatatttatttattgtttcatttgttacataaacctatagcgaattgtattccagatgctatattaaagaaatgatatc

SEQ ID NO: 686987 - DNA, 208 bp, Homo sapiens
tacacacacaggggtaatagggaatttggcacacaccctgtccctagaaaggacagctgtaggtggagagtagcatactataagttataggaccatccaacttttcacacaaagctagaaaatagtatagttctctttaaagtataccaatatataaagcactagtgtgagtcaaacaaaactacttcaaacaaaacaagaccacata

SEQ ID NO: 686988 - DNA, 1283 bp, Homo sapiens
tggggccaaaaggggggaagggggggggcatcgaggggaaaaaaggggcgccctttattaaaaatatattttgggggagaattcatttcctcgagagcacgagagggggtataaaaagtggtggggtggcgccccacaaaatattaaaaatcttgtggcccgcggatatcccccgccgggggtgtgtgagagggggaaaagagggggtggggtaaaagaccccggggaaagggactctgcgggtcaaaccccacagggggggcaacccccagagagagagcggcaaaccttctcgggggagggaaaatatataataaaagaagagagggggggtaacaagagaggggagaaaaacacacccagagggcgaaaacaaagaggagacacaagagagacccgcggggcacaaagaaaaaaggagggggaaacacaggcgggccgcgcgagacgaacacaaacaaaaaacaaccgcgacgcgcaaaagagagcgagagaaaccaaaggcgaggtctcaaaacaacgaaaggggaggcccacacagagaacacagggaggatacagaggagcgagcgaaatccacaaaacaacaaaaaagagagaaaacgagtacaaagagagaagaattaaacccgaaaaccgtaggagcgagcacaaagagaaaacacaaaacgaaacaaaaagacgtgggagagacaagaaaaaacccacacaaaagggaaatcataatactcctcaacacacacagtctcgtcaaaacaacgacaagaacaacacagataaaaagcataggaggcgggaaaaaaatatattgtacctccaacagcagggagttacacacgaagcgccctaaaaacaaaagcagacaaaactagagaaaaaagagtcatattcaaagagcgggagagaatatatctaaacaacagagacaaacaacagcccacactctattagaagaggtagagtatagaacgcaggccaaaaagagaaataaactcgaatatcacaagacaagaccacctcatacaacacaaaaacacaaaacaaagaagtacacggaacacaaagcaagagacacgaggaacaaccacaagaccaaaaacacaggaaagagacagagacaaaaacagacaaccgaccgaacacacgaccgaacgaacgaaaaggcaagaagaagaagaaagcgagacacaacaacgagaaggagacgacaaccggggcaacacgagagcacacgagagcgacaagcgaagaggcagagcacgacggtcgcgctcgccccgttt

SEQ ID NO: 686989 - DNA, 427 bp, Homo sapiens
  misc_feature (334)..(334): n is a, c, g, or t
  misc_feature (352)..(352): n is a, c, g, or t
  misc_feature (371)..(371): n is a, c, g, or t
  misc_feature (389)..(389): n is a, c, g, or t
  misc_feature (404)..(404): n is a, c, g, or t
  misc_feature (422)..(422): n is a, c, g, or t
ttcatcaaaaagctttgtaggcggggcatggtggctcaggcctgtaattccagcactttgggaggttgaggtgagcggatcgcctgaggccagatgttcgagaccagcctggccgggatggcggacccgtctctactggaagtacaaaaaattggctgggcatggtggcaggggcctgtggtcccagctattcgggaggctgaggcgggagagttgcttgagcctggggaggtgggggctgcagtgagctgggatcgcgtcatcacactcctgcctggggcaacaagaatgaaactccatctcaaaaaaacaaaaacaaacacaaactaacaantaaaaaccccaaaaaagnttttttagttgttttcctntccactttaaacatggcnttttctgttgagagnattttaccatttcacttngagtt

SEQ ID NO: 686990 - DNA, 403 bp, Homo sapiens
ccagcctggagactatttgatttacatacaaactactaccttagaaacttttcaccgaagagccacccctcaggtctcatggctatgctcaagtggccaatgctctcactccttgacattacataacctccccgacatgcctactatagtttctcccataaagggtgactgtttaatcctaattctatcccatgtgtgacggttaattttatgtatcaactcgtctggactaagggatgcccagataactggtaaaacatgatttctgggtgtgcctgtgaggatgtctatggaggaggttagcattagaatcagtaaaccaattaaagaagactgccctcaccaaatgggtaggcataatgcaatcctgtggaggatgtgaatttaaccaaaagtgcaaagc

SEQ ID NO: 686991 - DNA, 852 bp, Homo sapiens
  misc_feature (203)..(203): n is a, c, g, or t
  misc_feature (278)..(278): n is a, c, g, or t
  misc_feature (308)..(308): n is a, c, g, or t
  misc_feature (316)..(316): n is a, c, g, or t
  misc_feature (325)..(325): n is a, c, g, or t
  misc_feature (328)..(328): n is a, c, g, or t
  misc_feature (330)..(330): n is a, c, g, or t
ggggctggggggtcggtgcggatattcagtcatgaaatcaggtagggacttctcccgcagcgacgcggtggcaagatgttgtgtgcgggcgcggacttcaaggtgatttacaacgagatgctgctctccatagggatgctcatgtgtcagccacacaagtctacaccatcttgatgtccagctcttggcattcttaaacctantgctgtagaagcagacattttagcatataactttgaaaatgcatctcagacatttgatgacctccctgcaagatngggttatagacttccagctgaaggtttaangggttttnggattaacncanangaaatgcctgtgaacccatagtgcctccaccagtaaacagacaatttcatctggcactttcatcgtgttaattagaagactgtgatgtgtaatttgatatacacggttttaaatgcacagagagcaggatacaagggaggcatagttcaaccaatgtgtgattctgatgactcattagcatgggatccaacggacattggggtcctacagaaaatgtgacattccattctggctttattggggatcatcaggtattttggaggatgatttcattgaaaagggggcctattaatcgaataggtttcttgaatataccaaattccttctatataggggtggtcgtggaggtttcggtgcaacatggtggggaatatgtggaaaagttggagcttaacgtggttatacaagggatgttgtcgggggtagggggaccacttctggttatgggtgtgtgtaaagtggtggaaaaaatgtctgtctgtggggtgtgctcgtgtatgttaggatgttacgtgagaggag

SEQ ID NO: 686992 - DNA, 763 bp, Homo sapiens
  misc_feature (747)..(747): n is a, c, g, or t
tgctggctctttgtagcgcgtgttgctccttggtttttctggtcctcttgtctgggtgtgtgggtcgcggtccctgtgttgttttcgttatcgccctttgggtgccccggtggatatgtttgtgttgtgtatcatttctttttggttgttgctccctcgtgttgttgtgttgtgtacgtatgtacattgtggtatatgtccttgtgttatagaaagcctgttatcgacacctggttcttgattcttgatgtgtcttagcaagtaggcttagtctatagattggtatggttggccgcgatcagttttttgaggtgtagcatgtgtggacttgtctgagttgatccagtcaacatctggaactctcgatggttgcgttcagaccaagtatcatatgtgggattcatgtgctccagtcagcccgtcctcgccatggagtcttctgtccgtgtccgtgcgcattagatgactgtacgttatgatagaatacccaggaagatcttttggtgacgtgtcactgggctgctttttctgcgcttcagttaatcaagtgttggcaaacgatgactttctcctggcccctgcctgctggagatcagcatgtcctgtcctttcagtctgatccatccatctctctctttgcctgaggggaaagatgagatgggccaggcagagaatcagaatctggacggcagtccatctagggaagtgggactgtgaggccatacgtgtgaaacgtctggactgtanctcagagtctttagtt

SEQ ID NO: 686993 - DNA, 830 bp, Homo sapiens
  misc_feature (181)..(181): n is a, c, g, or t
  misc_feature (256)..(256): n is a, c, g, or t
  misc_feature (286)..(286): n is a, c, g, or t
  misc_feature (294)..(294): n is a, c, g, or t
  misc_feature (303)..(303): n is a, c, g, or t
  misc_feature (306)..(306): n is a, c, g, or t
  misc_feature (308)..(308): n is a, c, g, or t
ggggctggggggtcggtgcggatattcagtcatgaaatcaggtagggacttctcccgcagcgacgcggtgggacttcaaggtgatttacaacgagatgctgctctccatagggatgctcatgtgtcagccacacaagtctacaccatcttgatgtccagctcttggcattcttaaacctantgctgtagaagcagacattttagcatataactttgaaaatgcatctcagacatttgatgacctccctgcaagatngggttatagacttccagctgaaggtttaangggttttnggattaacncanangaaatgcctgtgaacccatagtgcctccaccagtaaacagacaatttcatctggcactttcatcgtgttaattagaagactgtgatgtgtaatttgatatacacggttttaaatgcacagagagcaggatacaagggaggcatagttcaaccaatgtgtgattctgatgactcattagcatgggatccaacggacattggggtcctacagaaaatgtgacattccattctggctttattggggatcatcaggtattttggaggatgatttcattgaaaagggggcctattaatcgaataggtttcttgaatataccaaattccttctatataggggtggtcgtggaggtttcggtgcaacatggtggggaatatgtggaaaagttggagcttaacgtggttatacaagggatgttgtcgggggtagggggaccacttctggttatgggtgtgtgtaaagtggtggaaaaaatgtctgtctgtggggtgtgctcgtgtatgttaggatgttacgtgagaggag

SEQ ID NO: 686994 - DNA, 372 bp, Homo sapiens
gcggccgcctactactactactgctcgaattcaagcttctaacgatgtacggggacatgtacatacgtccagatggcctgaagcaagtgaagaatcacaaaagaagtgaaaatggcctgttcctgccttaactgatgacattaccttgtgaaattccttctcctggctcatcctggctcaaaagctcccccactaagcaacttgtgacacccacctctgcccgccagagaacaaccccctttgactgtaattttcctttaccaacccaaatcctgtaaaatggtcccaaccctatctcccttcactgactgtcttttcggactcagccagcctgcacccaggtgattaaaaagctttattgctcgcaaaaaa

SEQ ID NO: 686995 - DNA, 388 bp, Homo sapiens
  misc_feature (9)..(9): n is a, c, g, or t
  misc_feature (68)..(68): n is a, c, g, or t
  misc_feature (100)..(101): n is a, c, g, or t
  misc_feature (128)..(128): n is a, c, g, or t
  misc_feature (132)..(132): n is a, c, g, or t
  misc_feature (134)..(134): n is a, c, g, or t
  misc_feature (143)..(143): n is a, c, g, or t
  misc_feature (146)..(146): n is a, c, g, or t
  misc_feature (148)..(152): n is a, c, g, or t
  misc_feature (154)..(154): n is a, c, g, or t
  misc_feature (191)..(191): n is a, c, g, or t
  misc_feature (212)..(212): n is a, c, g, or t
  misc_feature (219)..(219): n is a, c, g, or t
  misc_feature (226)..(226): n is a, c, g, or t
  misc_feature (231)..(232): n is a, c, g, or t
  misc_feature (234)..(235): n is a, c, g, or t
  misc_feature (241)..(241): n is a, c, g, or t
  misc_feature (260)..(260): n is a, c, g, or t
  misc_feature (262)..(262): n is a, c, g, or t
  misc_feature (292)..(292): n is a, c, g, or t
  misc_feature (297)..(297): n is a, c, g, or t
  misc_feature (311)..(311): n is a, c, g, or t
  misc_feature (323)..(323): n is a, c, g, or t
  misc_feature (334)..(334): n is a, c, g, or t
  misc_feature (336)..(336): n is a, c, g, or t
  misc_feature (341)..(341): n is a, c, g, or t
  misc_feature (359)..(359): n is a, c, g, or t
  misc_feature (361)..(361): n is a, c, g, or t
  misc_feature (369)..(369): n is a, c, g, or t
  misc_feature (371)..(371): n is a, c, g, or t
  misc_feature (375)..(375): n is a, c, g, or t
gaaaaaatnagtaatttaaaaatctctataaaaatctgaacacataaacaaatctgtactaaaacaanaacaaccttctcactctacatataattaaacnnacagcatcaaccatctgaagtagaaancaanancacctccangantnnnnngnccccgacaaaccatgtagatggacaaacaagattggnggtctttagttgcgggcggcngccgggnctgcggnggggnncnngagccngcgggggggggtcggcttncngtccgggcggggtgggggggggggggcggnggggngtcgggggggggcngggggccggggngggggggcggngncggcngggccgctgcgggcgggngngcgccccngngtgncggccaggggcga

SEQ ID NO: 686996 - DNA, 442 bp, Homo sapiens
  misc_feature (264)..(264): n is a, c, g, or t
tggcggcggacggacagggtcttgctctgttgcccaggctggagtgcactggcgcaatcacagctcaccacagccacaaactcctggactctggtaatccttccaccttagcctccggagtagctgggactacaggcacgtgccacaatggctggctaatcctttaatttttgccgatacaagatctcgctgtttctcgggtcgacaatttcttttcttttttttttttgagacgaagccgctctgtcgcccaggctggagcgnagtggcgcgatctcggctcactgcaagctccgcctcctgggttcacgccattctcccgcctcagcctcctgagtagctgggactacaggtgcctgccaccatgcctggctagtttttttttttggatttttagtagagacggggtttcaccatgttagccaggatggtctcaatctcc

SEQ ID NO: 686997 - DNA, 381 bp, Homo sapiens
tggcaggcagggctgggccacggaactgggtcccaggcatcaaggccacgtgcgaggccagggagggatgcttcctcacgaggcgcgtcacgaagcgagcgaagggacagagaagccctgcggtccagtgggcgcttttgtcactgtttagcaatttgaggtgtgcatgagcactgtacagagcctcactctctctgtacattccgtccctggaggtgccctggtccccgctttggggatgggagttttgtagactgtactataaatcggcagctctatgttcttgtcagctcagtagttctgttaagtctggaatatgcagacagacgtaaagatgttttagcagaaattggacgacagacatagaacattgaaatcaag

SEQ ID NO: 686998 - DNA, 351 bp, Homo sapiens
  misc_feature (264)..(264): n is a, c, g, or t
tggcggcggacggacagggtcttgctctgttgcccaggctggagtgcactggcgcaatcacagctcaccacagccacaaactcctggactctggtaatccttccaccttagcctccggagtagctgggactacaggcacgtgccacaatggctggctaatcctttaatttttgccgatacaagatctcgctgtttctcgggtcgacaatttcttttcttttttttttttgagacgaagccgctctgtcgcccaggctggagcgnagtgagaactctgtctcaaaaaaaaaaaaaagaaaaaagaaaacacactgtatcaaagaagcctacacaaaaggctacatattatat

SEQ ID NO: 686999 - DNA, 110 bp, Homo sapiens
gcgtatgcccatcataacagtctgggcacaaaagctggcgggtctctctgatttgattgtacaggtgacgacgtgcaggcagttgagcagctgccgcttgactcgtggat

SEQ ID NO: 687000 - DNA, 539 bp, Homo sapiens
taccaatgtcagccttcccaggtagctgggactacagctggatctaccagtgaaagacttggtgaatccaggaagagagactgactgggcaacatgtaatacagtgtgggaacatccagttgcaggaaaacaagcttaacaggcccactgattctacattatgggtctccctctgtggtccaaggctggagtgtagtaagtgctatcgcaggtgactgcagcctcaaccttccaggctgaagggatcctcccagctcaaactcccaggtggctgaagactacaggtgctagccattatgcccaaataacatttggaatgttcgtatacgtggattctagaggggggtgacagcgaaaggtgggaccatccagttgcaggaaaacaagcttaaaaaacgcgcccctgattctacataatgctcctacctccggggcagcctctccagggcccagaaactttctccagtcagcctctacagaccaagctcatgactcacaatggcctatttagggccataccctacgtcacgggagcctcc

SEQ ID NO: 687001 - DNA, 198 bp, Homo sapiens
atggaggcccccagaagctgatcccgatacatcgacgaccaggttgtgagcaccaaaggggagcgattcaaagatgtgcggaaccctcaggccgaggagatgaatgccacatacatcaacctcaagccagccagaacgtaccgcttccattgaggcactcgccggactctgccctacgccttctaggctcagatccca

SEQ ID NO: 687002 - DNA, 142 bp, Homo sapiens
caaaacatatgatcccattaactcgatgctaagatatctacatggatacattaaatatattgatgggggtggcaactatgctggcaactggaggcaacagaaagaaatgaagtgactcagctttctggctttctctgcttac

SEQ ID NO: 687003 - DNA, 579 bp, Homo sapiens
acagaccaaggcactggtcatttttcatacatactaacttgacatgacactgtgcctcttagctatggcaccataaattgtgcctcattctgtgccacactccataacttgctcagttcagcatactgtccaacagacactataagagaatctattctaggttgaatcaaatacaaattttagatacacaccaaaatttggcagaatacctgtatgccattgctacacaataagctaccacactagccctagggattcacatcacctaattggaaaagtgtcaaatcaaagtctcaacatttgcacaagtgagagattaagctctatttcacatatgcagttcatcccacccataaacatgccaagacagagtcaacatcgtgtttctaatgcagcgactattcctggaatattccagtgcaactattcctgaaatagtttctttcaggaataaaaaaccaaacacaacttaaaaaaagaatcactaaacgaaacctaaagacagcacaataaaactgccaaaacgactgcatttctgtctacttggtagacctctaagggactctccctaaaagaaag

SEQ ID NO: 687004 - DNA, 199 bp, Homo sapiens
tatttgagtctgcttctcaggaggtttgtgaccaggcacgactcaatgatgacctggagatgtcacagattcctggcacagcgtgtcccagggcttcccaaaagtgtttgttgggcataatccccttaaggttgaccttggtcctgtacctttgtttattaattgctatggaactttctaaaattagggggattcttct

SEQ ID NO: 687005 - DNA, 195 bp, Homo sapiens
agactctagaggaccccctttaaatgttggatgtcacgcttgacccgcaactccgggttcgcggccacgtgttggagggatagttctgactgtggcgaactcctcctaaagagtaccggaggagcacgaaggttggctaatcctggtcggacatcaggaggttagtgcaatggcataagccagtttgactgcgag

SEQ ID NO: 687006 - DNA, 248 bp, Homo sapiens
  misc_feature (222)..(222): n is a, c, g, or t
tagtctcagtacagcataaaaggaagtagttgaggaaggggacagggaaatgttaatagaagctttaattttccagttcctgagttaaagctttatagactattcagatgcccccaatagaaacgtacctgtttgagtaaaagccaaagagtgtgtggggtcagagtggttgcttacttccaaaggatgatttggataaactggtaaactacattaatatanttgaaagcttagtttattcactgtgg

SEQ ID NO: 687007 - DNA, 520 bp, Homo sapiens
ccaatgggaaaggttctttttttttttcccaatttccctttttgggaaaaaaaaaaaagcctcccaatccatggggcctttttttaaaggaaataggaaaataaatttttatttggtttccaaggggggttaaattaatcggcccaggttttcttttgtttgttggcccggcagtatatatgaatttaaacccgggttttgaaaaaaaaaagggggttttttttttgggccctttgggaggctttggaacattaaaaagaacccttttcccactttttattttgggatacttttaagaggggggaaaaggtaaatttttcctaaggaggcttttggggagatttttttcaaaaaatgggggctcaaaggtccgggggggaaactggcacttaaaaagggggtttactaaaataaaaaatacccgggggatcttactttgttttgaaaaaagggtggggaactccaaaagttttaggcggggggggggaatttttaaacccacttttgtgaaggtgggtaa

SEQ ID NO: 687008 - DNA, 1034 bp, Homo sapiens
ggttgctgtggaaggtcggagaacgtgctaaggtggctgcgggagatgtcagttccaggaacgccggcgccggttgcgaggatgaaggtcttaaaggccgagctgcgccagttgcagtcctggagtgaacaggcagcggcaggaaaggctcgagagttcactccgcggcagcggtcaggaagcagccatcccaacggttctagtgacgtaagtacgtgggccgaaaattccggggaggctgcagctgttcgtgggccatgggggccctgaaagtccaccagtctctccaagggacaagtcaataccggatcagcaatgctgcaagactgtagcagcaatggcgataggcaagcaatcggtgggaatccgtctttggattgacagcccgaagtcatcttcctttcgcttttgcttcgggatgtcgccaggctggggttcacccactgacgccactggaacggagccgggcgtcccttggggctcggtggacccggagtgttgtcgcccagcgtcggtcgcgtgctcgcggctagtgcaccttgctgtacggcgcgtgagccagtgttcgacgccggattgcggtgctacgggcttgccgcgcccttgccgggttgcagcggtcggggtgggagcctgtccccggcaggtggccccaagttgtcccggcgtttggtccatggccgccgacttcgcgggatgacggccggtgcagagaacgggaggcgcgcctcagcacagtgtttgccacaatccaaaggcgtacgagaggaaagggtgcacagggaagcagcgagaagaatccgacgggatgggtaggcagcaagttgcaccctaggccgcatgcttacacgacaagtgctttgatgcacacgggcctaagtctggtgcgcgagaacctcccacaacgatgctgcgccgcttttattcctgacagcccggtcccactgagtcctcggtgcggcgaattccagggcgcatgaccaatccgcttcctgttccaagaatcagtgactcgaggctgtgtccctcgtaca

SEQ ID NO: 687009 - DNA, 392 bp, Homo sapiens
caaaaattagaaggaaaagtaaggcgttacatcaatgacaaatgtactgacgtagataatcatgctctagtaacgtaagagaacacccttatacttagagaatacacatggagatataataggggtaaacgaacattatgtatagcaacttccactacagatgtatcagaaaaaaagaaaatagtagtaatagatatatactacacaaatgtaaaagcaaatggagtaacaatgtaaaacaaaaggtgaatctagagtacatgggtatataaagattattagtactacttatacttgtaaatataaaaggaatattagaaatagtatactaaaataaaaggtaagaataaggagacagaatgtgcaagagaagaagcacgaaggcaggagag

SEQ ID NO: 687010 - DNA, 1036 bp, Homo sapiens
aatcgcagagtggcgttcactaatgcttaccgaacgaaaaatgctaggctatatacaactacacaaaggccccatccgttgtatggccccatacgggactactgacaacccttcggctgatcgccataaaagctcttcaccaaagagcccctagaaaccgtgcacatcatactcatcaccctctacatcagcgatcctcgaccttagactcgtcaccatccgcgtcttctagcgtagtgaagccgccgctcatccccgattaccctaaagcgacacttggctcagacgcgacaagacataagtgccatctggattaggctaattcttatgccagctcttcctatgtccggtaatacggatgtactgcatacatccttactgattcacgggatgagaagtctagaagcctcgaaagatcataagcctcatgagccggacgcacgcgagaggatagatacgtgcaagacaagtgtcctattatgaggacccctcacgtgaagtcattcgatcatgacttcatcgactccttgacatattgacacgttggatctcttgtagagcactctcactgtcacataatatcaaccgtatagaaaatgaagcatcgatcttagagtatttcgtcacttgcgcgagacaatagatctcgctctgggccttgaactatcgactatgatcctcctacaaggtcgtctaaggcctaagacggaatctccccatcctgaatcgtaagccagtcaggggcgatggtcctcgataaaagcgtctagagtcttacaatcactcggtacttcaccgtcacaggagctacacatatgcgactcttaatgctttgcattagcccgtatatacctctaagatccaggatacggataacactacctcaaacgactataatgctcacataacgggtggacaatatagagcatagcatgcgagaaggtcttacaggggtctatgtccccaagcaaccagtttgacgtgcccagtcgtgaagccgaaggaacccgggccgggcaccaggataagcacataa

SEQ ID NO: 687011 - DNA, 139 bp, Homo sapiens
cgcaggaattcctggcggtagggtgcgctccacccggcgtggcacgcccagtcttcggcgtcccttctcctttacatgatgtccagccatgacaggggaggtacggagtccacatctctcctttgctatgatcgcaggg

SEQ ID NO: 687012 - DNA, 166 bp, Homo sapiens
tcttgttcccaagaactttccccttttgccaaaatgttacaattgaaaggcatctatctgggttttcagtttcctgatatttttttaaaagatctagggtcctttttggaccctaaacaggggaatgctgacttttttcattctccaataaatttccctgaactga

SEQ ID NO: 687013 - DNA, 331 bp, Homo sapiens
cagaccctttatcctcatttgattgagctacagtctcagctcccaggacattgtattcttttctcagggttttctttttgcatatttcacatgcccactgggtctttccaaattcgggtagtctcaccatcagaatcatctcacatttcctctagtgtcttgggagggactgctgtgtcgtctcgctcctcaacaggcacagcatgaatgaacacaatgtcttctggtggtggtaagaacggctcctccttctgaccgatgttttattctactacagctattttgcagagtacatagggtagaatggcccggtctgccagggaatcctagc

SEQ ID NO: 687014 - DNA, 156 bp, Homo sapiens
aggattttcgttggggaaggaggagaccctggagagggacagcttcaagtcgcgttcacagaagtgtttactggggtctctatatattacccgtcgcgtacaagacctcagagtgactatcgagatctcccttcaccatttccagcgctatctctt

SEQ ID NO: 687015 - DNA, 268 bp, Homo sapiens
  misc_feature (73)..(73): n is a, c, g, or t
  misc_feature (77)..(77): n is a, c, g, or t
  misc_feature (96)..(97): n is a, c, g, or t
  misc_feature (114)..(114): n is a, c, g, or t
  misc_feature (117)..(117): n is a, c, g, or t
  misc_feature (136)..(137): n is a, c, g, or t
  misc_feature (157)..(157): n is a, c, g, or t
  misc_feature (206)..(206): n is a, c, g, or t
  misc_feature (217)..(217): n is a, c, g, or t
  misc_feature (265)..(265): n is a, c, g, or t
cctcccacagacgctgtccacctcccacagacactgtccacctcccacagacactatccacctcccacagacnctgnccacctcccacagacactnnccacctcccacagacantgnccacctcccacagacactnnccacctcccacagacactgnccacctcccacagacactatccacctcccacagacactgtccacctccnacagacactgnccacctcccacagacactgtccacctcccacagacactgtccacctcncac

SEQ ID NO: 687016 - DNA, 485 bp, Homo sapiens
tagtagagacaggtcaccatcatcatctccatggctacaaactttcatttaaggctacttgtcatcactcatttgatgtcactgtaatagccacataacatcttcccagatccgttcttgccttactccaaagtattttgcattgtgtatcccaagttatctctaaaaagcacaatcttatgtcactcctaggtggtgagagcaggactgggttgacgtgcagaggagcagcttggctgtgtagggccggggtggggatgcagtgtccagtggggagtctaagcccaatttcctggtcggggaccgtctgggagcagcccttcttctctctgcgaccggacttcgatgggcagtctcctttcctagctgggctctatcgctgggatggagattctacttccagcttggtatcttccttacctcatttgcccagtactcggagtgcggccatgcctttcagattggccaagcacatgtcctcatga

SEQ ID NO: 687017 - DNA, 231 bp, Homo sapiens
cgcaggtggttgtggaggttgtagtgagccgagattgcacactgcactccagcctggcgacaaagtgagactccgtctcaaaaaaaaaagaaaaaaagaggcggggggtcgattctagggatgaaaaagataacaaagaaaaataggatttaccttcccaccaggggtgtataaatttaagaaaaatttaccatcccttagaaagatgctatagctacccacaaccccctg

SEQ ID NO: 687018 - DNA, 274 bp, Homo sapiens
cccccgatttttccagaccattgcctgatgccaatgcaagcaagcaagaaaaccaggaccaaaattagagagccgattttaaaatcttgatgtaaaaaggacagataaaatgaaagtgctgataatcgatgatgaagaggattttcgtgtcgttgcggcctcctgcctcggtttgctgggtggtgtggacgtggccgaggcatcgagcggcaaggtcggactcgagatggccctcgccgaaaaaccggatgtcatactgctggatctttgcatg

SEQ ID NO: 687019 - DNA, 201 bp, Homo sapiens
gaggcatatgtctattgttccccacaaatatttcaagaaaaaatctgtattttctcgggatatgtcatggcaagaggaagaactgggtgatgaaagcagtatggattcgtgaaatgcctctcactcttacaagatagtgggcttagagataataaacttaccggtgtcatttaacattgaaactggcctatagaaaacaag

SEQ ID NO: 687020 - DNA, 130 bp, Homo sapiens
gtgatgcatcatcacataacgtgagatgatgcacatacatatgacatcacatcacaacccatcgtgtcacaaccatgcatagcacatcatgtcgcatcacatcgcatcgtcgcaccttaggcttggcgac

SEQ ID NO: 687021 - DNA, 230 bp, Homo sapiens
gcagcgtcctacagtgtagcctccgccttccgattgactggcctgcttgggcaaggcaagtaggcggcggcgctttcaaggatgcgcttgccttgaacacggtctaatgcttgctgcggggcccttggccaagcttgcacggtgcaagggaccttcttggttggccgaggccttcacaagcagattcagatggcagcgaacctacaagtatgttgaacaagcaagatccg

SEQ ID NO: 687022 - DNA, 395 bp, Homo sapiens
ccgttgttgattatatttgccttcgttggatgtcacacactacatttcaggttggtcaggatgactatggaggtccatggttttcattaccaacattttcagattctgaatgtcgatggagtctcactgaagagtcaccaaaggtgcctgccctcctcccctgcttgggaagtgtcagttggagactgtcccaagggtgctgcaagcaatccagtggcctgggtgttcttgtgctgctttcccatcttgcagtgtgggcatgggcaggggttgttccatgcatccattttgtgcatcatagccaatctcactcttgagcaaatgtgaaccacaaggcagtccacctcatcccctcaccacttcataattccacaaagcatgcactaaaacccatg

SEQ ID NO: 687023 - DNA, 336 bp, Homo sapiens
cggaccggatcggaattggtaggtttaggttacagtatggttgtcaagctagtgaaaggtgacaaagtctaaatgcgtgcagaacagtataattttaattaaacaagacagcgtgtatggtacaggtgaggtcgtgatggtgttaaactgatgcctatgtgtatggccagccacaaaccttggggatgtttattacctgtacatatatatacaaatatatcccatacatatgtatgcacacaggcatgtattaatttatgcgtgaaacttataaaattatatatacaaacacatacatgcacatctatctacatatacctacctatttcacaatcg

SEQ ID NO: 687024 - DNA, 1425 bp, Homo sapiens
agaaccgcaaggacacaccaaaaagacacaacaagccaaaaccccgcacaccacacgacataaacgacaccaccgacgcgcacaccgcaacaccgcccccccgcgactccacacaccacatcgcaaccaccgacgacaaacgacaatatgacaacaagcacagaacaaacagacacaccacacacgacacacacgcccccgcgcgcacacacggccacacccaccccaccatacaacacacaacacaccataggcacacacacaaccacaaccaacacaccaacgcaccgcaaccatacagacaacagaagcccgcagcaggcactcaccacatagcacacacacaaacacacaaagcacgcagacgcagacaccactcacacaagcactcgacacaacgcccaaagaacaaaggatcatagctaatatcatagcgatgacgcgacatcagacatcatacctgagaacccgccacacgacagcaacgccgagtaaaaggaagacaacgagaaacacacgcaccacacaatcaaatgtagagtacaaggaaaaggaccgatcagcatcgaaataccgaggggaacacaacatataatcgaatcagaaacaatcgaagaaatcgcacacacgtagctcgcaaagcaaacagagacaaagcagaactagaacggaagaccggatcccagacgccaaaatcaccaacaacgaatcgaccctcacatcacaccacagagagagacacgacgacgagcacagcgcatcacagatagcccagacggagcgccagatcgacagagagcaagacgcgcgacctaggaagctctcaatgatatcatgacagaggctgtagagaatttgatatagtatcgctataacagtagtaatagaacaaaacaaagcatgaccagcattagagtacagagctagcaacatcgtcgacgagataaagaaaagcagcgacatcagcagacagataccgccagacgacgcacgctttcgacacactaccaccacctacacaacaatcgaaagtgcaaaatagaccgcaacaagcaaggagatcacggacgacgaatcccacaaagccgacaccacacgcaccgtatgtagatcccccgagagcgcaaccaccacaatacgaacgagaaaatagacacctatatacatcactagccgcacgcagcacgagagccaaaccgcgagcgaacagatcacacaatcagaaccatgaacgcatctcagagcgcatgcaacaatctaagaacaaacagatacgacacagacacacaaaccagacacacagcaccgccgaccccgcaccccaccgacgacaagcccaaatcacgcaacggatcgccagaagacatcaacacacgacctcccgtaagcacgaccagcctactcatgcaagacatacacacacag

SEQ ID NO: 687025 - DNA, 126 bp, Homo sapiens
agctgagagtcagatctctcctaagtctcttctgttcagatatttgtcacctttacagtattacacagtgtcccctgggcccgggggtcatggccagaacgcagagactttatgatgaggacggtg

SEQ ID NO: 687026 - DNA, 201 bp, Homo sapiens
tgtaccggactcgcctttgtccgggtagtgtgtactgtgtgcacatgtatttgtgtgcctgtggagcagcacctgtgttgccacatttggttgacggtacatccatgcactgggtctgcaggtgtatttgcgagtgcgtgtgtctgtctaacacactctgtagatgtcgctcggccgtgaatgagaggggtaccggagctc

SEQ ID NO: 687027 - DNA, 1000 bp, Homo sapiens
gtgtggtaacgtgggtggaaactgggtgaagtgggtgaacctgatggtgcaaccatgtgggaatgatgggtgtgctggaggtgagagcttgtgggagccaaggagcaccttgtgacatctggatgtcttggcagtgagtgatgacgaggtgtgaggtggctagctcgacgtgcagggctggttgtgggccgttgagtgccatgtgatgtgatgttgttgtgatgtatgtgttgcccatgtgcatctgttggcatgacatggggctgacatcagctgaggtgactgatagtgtgccctgcatgctacggtggcttgtggaaatgaatgttgttgtgtgagccacggcattcactccctggtcactttttgggttacagtgactgttggcaccacttggtttgtgacctggatgtgtggcacggctggagtgtggcacatggttttggatcccatgaggccctggggcaactggaggttgtaagcttggcaaagtaatgcatggggcaaagggtgagggaccccatctgccctgggcatagtgtgaagtccctatcccatcccccaagagcctcgctttccccagtccttagttgaaatggacaggcgacggttatacggtggattccagatggggctggccgcggtgggatgacaatgcaccatcatcccctctgcaggccagtatcggtgtgcctccagaaatggcggtgcatcgcgccgcatgcttacgcacactgagttgacaatccatatcttctgcgaggcggatcgcctgaagaacattgcagcaaatagcattggggtagagccattagcgcccgttcacaatgggcgcacacatgacgcataacggtcctgcgtagggcaacgccaattggtctggccagcgtatagggtccaagcaacatagatggatggaaccacaaaggcatggagtcagaacaagggtcaatggactgggagtccctgaccaaaggtgcccaccttagaccgtactcaa

SEQ ID NO: 687028 - DNA, 1169 bp, Homo sapiens
ggagagagagagaatagtctcgattttgttgttttttttatttttccacgctaaatccacttaatttttctggtataaaacccctattttgtacccacaggtggaccctgagtccgctgcgcggaaactcggggtgggggctctgacaagggtgtccagtgaaaccccgagaaaggggaaaactgggggaaatacgagtcttccttccagaaggtcgggggctcaggtaccggataggcctaaaaaagggcctcaagaggtggcatggcaaaatttgcccagggtgtggcccggtgccacccccggggtctgaaggttgtaacagttacatgcgaataacagagcccaatcatggacacacgttctctaagggccaccggttgccggaaaaccaatcccagttgcccctcgtgggttgcacagggaaatggagggcgttacccagccaaaagacacccgggacggggccttgttcacctttgcaaggggacacgttggtggggctttgccgagctcttgtgtctccccccagatagccctcgtgccccggggggacagattggagacgctttggccacgagaggattggccccacgggatttggcgggggcccaccctcccttggagagcactttaaaaccccaagaagcgaagttgtggcccacttgatggtccccccaaaaatgaccaacaaagtgcctttagaacccttggtagcgcaggacccaggacagggggctcctggcataccggcaccgtggcaaaacatcctttcaaagaccctcacctccttgagaaaaggtggccccccaggaagaaaacacaagtgagccccgcaataccctaaagtgggccagggaaaacaacaacaaatcattccctcacggggacgatgaacaaatacggtgccctgacaaaagagggccaccacattgtctagacggagcataccacccacaaaaatcccagacatgaaaccagaaaaccccgggcactcagccacggacgtcaaaagcgcgagaaaccgccccggctgacacagcgaaaaccccgggaaacaggggccaccaacaagagacaggcccctaggcccccccgcaccgcagaaccccaaatattttatttgaaacaccccagtcgaaaccgcgacagaacaagacacaaccacg

SEQ ID NO: 687029 - DNA, 522 bp, Homo sapiens
tttcacctcaagttcccgcacagtgcccacagaagtatgtccgacaagcgtggcagaaggcagacacaatacaccatgggcagccacgcgatgggccaagaagattgaagccagagaaaggaaagccgagatgacagattttgatcgttttaaagttatgaaggcaaagaaaatgaggcacagaataatcaagaatgaagttaaggagcttcaaaagtcagctctcctgaaagcttctcccaagaaagcccctgggacttagggttctgctgcttctggtgctgctgcagcggctgttgattgttgttaaagttccagcaaaaaaggtcccctccgcgagtgaaaaggctccagcccacaaggttcctgccctgtaagccgcaggccagagagcagcgcctgctcccagagctcataagggtcaaaaagctccagcccagaaagcgctcgctcccaaggcatctggcaagcaagcatcagtggccatcatggtaagtaataaaggttctttttgacctgttg

SEQ ID NO: 687030 - DNA, 538 bp, Homo sapiens
tccgtactggcatttggtgaaggtgctgaggaggactgagttgagtttacaaatcagccttcttgacccttcggcttagcattttcaagtcattgacattctcttatacctgtgccgctgatctctagacctgccatgagtgtgaaagaggcttcgtttttaagtgacactttacccaaccaattttcactcaagaatcttcatattctattgtctcacaatcagaataaattggcattttcctcactcagtctactaggtgctttaattgtgtttagaaatagccttttgattcttttggatttgttttttgccctaagagtcttgatttccgtactaaattacctgacaaaactcactctctccaacatcaattaaagggatttaaaaaatataattacacttaaaacactagaaagagtcaagtttttagcatatgttatggcttgccagtacgagaaaagtgacttaacatccaaataaagaaaaatagttagccaatccattcattatgttgatatgatcaggtctccaagat

SEQ ID NO: 687031 - DNA, 291 bp, Homo sapiens
caaaaaaaaaaaaaaagaaaattagcctgatgtggtggcgggcacctgtagtcccagctactcgggaggctgaggcaggagaatgggtgaacccggcaggcagagcttgcagtgagccgagatcgcaccactgcactctaacctgggcgacagagcgagattccgtctcaaaaaaaaaaaaaaaaaagattgccaggcactggctggtcatgacgggtggggctgaaaagggacggcagcagtgctccacggctcctcttgtggctcccacctctgcacccaacgcgaacg

SEQ ID NO: 687032 - DNA, 407 bp, Homo sapiens
  misc_feature (255)..(255): n is a, c, g, or t
  misc_feature (305)..(305): n is a, c, g, or t
  misc_feature (320)..(320): n is a, c, g, or t
  misc_feature (350)..(350): n is a, c, g, or t
cgacagtgtgcataaaactctaacctggaagccttggggagactgattgagtgataaccccagttctcccatgtggttggtctcatgtcaattaaactctgctctactgcagtgaattcattttatctgtgcagtgggcaagaagaacccatctggcaattacagaacctagaacaataacagcatttctaaaaagtgttttcgagaaaaagaataatacacacatccccaaatgcacattttgtcttacttttnattcattatatcccttatatatataatattacaatatatttatggtattntttgtttttgttttnaagatggagtctggctctgcgcccaggctnaagtgtggtgcaatcccagctcactgcaatctccgcctcccgggttcaaatggttct

SEQ ID NO: 687033 - DNA, 473 bp, Homo sapiens
ctttattaattgacgcacactgaaatgaggtttaacgatctaagcaaatatgaaaatgcgacggggagttggcttgacaccagcggacaaggcaaacggacgaatgagggttcgagctccatccgtcccccttggacacatggaaggctgctatgctggggatgtgatgttataagcctaacgcagttagacattgctgcaacaagtttattaccctcctcggaaaagcaggtctccgtaacgggaggcttggggcacttgtctacaaaaactgcgaaatgatccataacagatttcagttgctctctgggtgcctagggcttgtgtttcaccagctcaacaagcgcagggtgtatattgatttgcacgtgcttatcataaagtgtgcatacatcatggtggaaagcgaatgttttagtattaaactctttgggaacgtatgtgagatggtcttccagagctgacaaggacgg

SEQ ID NO: 687034 - DNA, 249 bp, Homo sapiens
agcggctcccgtagcatcttatcctcaatactgtgcttttcttatatatgctattcttgtttcatgactgcaatacttgctctcacctctctaaggacagttaactttgctcctgttcactttttttttttttcccggttttttgggcccacccttgtggcttttgggggtccccgggctagggtttaagggggacctccggttcgccgggtttacaccgcacccacagcattggggaactcaacccgg

SEQ ID NO: 687035 - DNA, 177 bp, Homo sapiens
acgttgatcgaactgatcgacgccttcaatcctaagctcgtgtatggacggcttcatagcgcatactcagcgctgacttcgtgcgccactacaacgggcgactgctgaatatccacccgtccctgctgcccaaatacaaagggttacacacccaccagcgtgccctggaggccggcg

SEQ ID NO: 687036 - DNA, 323 bp, Homo sapiens
  misc_feature (138)..(138): n is a, c, g, or t
  misc_feature (165)..(165): n is a, c, g, or t
  misc_feature (185)..(185): n is a, c, g, or t
gggggggggggggccttttaaggggtttttccttttccccccggggggggggggaatttttaaaaacccccggttgttggggggcccggggccccccccccgggggcggggacctttttttccccaaaaccccctccncggggggggggggggggccccccccanaaagggggcccctttttttnggggccccgggcccccccccccccccgggggggggtttggggggggggttttccccccccccccccccccccgggggttttttttttttttttttttttgggggggccccctttttattggggtttggggccccccca

SEQ ID NO: 687037 - DNA, 643 bp, Homo sapiens
  misc_feature (110)..(110): n is a, c, g, or t
  misc_feature (585)..(585): n is a, c, g, or t
  misc_feature (588)..(588): n is a, c, g, or t
caacacgaggcacattctcttctccatttccctctcttattttttggctctaataaaacatttcttctcacaagtctctatccctcaatacgaataattaacccaaatanatatctacaaacctctactaactttttaacagacacaagaacttctcaattttattgtaattactacaaactatggtaaaagtaacgacaaaatttacttactaagatctggagggcatacatggaaaaagcacttaattcgaactcaaggaagtgagcatggggagctggaaggattcctaaaagacaatacaacaaaactgataacctaataaaaaatggcaattagctaaactacatggacccttaagaagatatatatacttaaaacaagctttataacagctcagaggtgagaaaagaaaacacatttattcataagattcacattctacccttcttcaaaagcccgacccaaacatcttttatccttctcttctcttttcccattaatctatttatacccctcttttacatttatcacattaaccttctattataatgattgagtaacatatccatctgcccttactanaanaagaactcattatagattctaccttatttttcatatcctacacattaataacccg

SEQ ID NO: 687038 - DNA, 342 bp, Homo sapiens
  misc_feature (112)..(112): n is a, c, g, or t
  misc_feature (132)..(132): n is a, c, g, or t
  misc_feature (196)..(197): n is a, c, g, or t
  misc_feature (235)..(235): n is a, c, g, or t
  misc_feature (244)..(244): n is a, c, g, or t
  misc_feature (272)..(272): n is a, c, g, or t
gtcctttcacatggagtccaacccttgggcagaaccccagatttttttcagtacttcacatgttctctcgttggcctgttccagatccctcttcatgttgcagcacaccaangctttggattcctccagcantattcgattacatgagacaagcttcttgatctgagccaccaatttcctgagtgaaggtccaggnnccaaacagctgggagagaaggccgttgccaaatgcctnctgtgtgancagtttcaacccactgagcatcgtctcncttgcagctggtcgtcccatgatttcggaaacgtaatggtagatcagctatctggaatctgcccagaggt

SEQ ID NO: 687039 - DNA, 233 bp, Homo sapiens
caaaaaaaaggtttcccagggggggccccaaaccccccccgggggtttttttttccccccccggggttttctgggcccggccccccattggggttcccaaaagggttttccccctggtttttttttcccccctaccagaaaaattttttttttttttttttttccctgaagtttgggcccccccccccccggggggaattgggtttaccccttaaaaattttggggtggggga

SEQ ID NO: 687040 - DNA, 155 bp, Homo sapiens
  misc_feature (155)..(155): n is a, c, g, or t
gcctacacgccgcccgctttgtgctgcagccatgtctctagtgatccctgaaaaggttcctgcatattttccgtgggtacttaacaaccaacaatcggatgggcggtcggaaaatcagccctttccaatacctgccacatcagggggttgggccn

SEQ ID NO: 687041 - DNA, 1366 bp, Homo sapiens
cataccacatctggcaggcttctcattcactggtggcagcacggcccaaccctccggtttcaccattggctcagcagggcaattcagcccagcccacggcacctgccacgtagcccttcattccggccaggccagccagcccaccacagcagtgtgccacaaagccagctggcatcccaacacacacagcccaccatacaacagtactgggcccagcctcttggcgtccaatagcaactggctcacaacctacatctggccaccactgggctcctccgaaactcccttcacccttcacagtcgattccacaccccagaccctacgaggacttacccacaacaatgctcgcacttcgcgcgccaatttctcaccacggacgctcagattgcgcaccgcacactacaaccggcacgacaactgtcgcgtctctctatataccaccccagcgctcattatacacacacctgcggcacctcgcgacctccctcactactcatattcacactatacatccagcacacgacacgccgcaacgtccatacaccattgtgcacactgacccacgccaggcacactcaccactaacacacccacacttcactcaccaccactacacccctacactctgcgcccccactctggttcgaacaaccacgcctctgacactctcccattatcaactcaccacaagcaacgtgccaactcacattccaacacccccacaaccccacgcctgagcaccaactcatggacgaccacacctaaaacaaccacactaccactacggacagcccccaacaacaaatgctatcaataccatcagatcccaccacccatattatacccgcgccacacgcacaacccccatcacctagacgaccacctacctacttataacacacacaaccaacacaccatcgcggcaccacccgccgcgtctccacacacacagtccacggacacacacacattctcaacttcttcaacccccttcaacacgtccacacgaccgtccgaacaaatcacaacggagcgcgataacacatcccacaacacatctctcgtctaaccactcccccaactccaccacagtaaccacgacgacgactttacactaaactctcccaccgtctgcaacacccatcgtatcaacccaatttacgcgacaccgcacgcgcacacacgtctaccccatatcgtacaccactctcaacacaagaatctatatcacacaacacaccacaccacaggagctcctatcccaacacacatcacactgctctactacacacccacacaaccagcccgtaccactagccacactgaacaccaagacgatgaccacacacaatacaattacatacg

SEQ ID NO: 687042 - DNA, 690 bp, Homo sapiens
tgatgcagagactcactaagatactccactagaagattagacccaagacacataatcatcagattctccaaggttgaaatgaaggaaaaaatgttaagggcagctggggagtaaggccaggtaaactacaaagggaagcccatcagactaacagtgaacctctcagcagaaactctacaagccagaagagagtgggggccaatattttaaagaaaataattttcaacccaaaatttcatatccagccaaactacataagagaaggagaaataaaatcctttccagacaaccaaatgctgagggatttcatcactacctggcctgtcttgcaagagttcctgaaggaagcactaactatggaaaggaaaaactggtaccagccactgcgaaaacacaccaaaatatcaacatcaacaaagaccaatgacactatgaaaaaactgcatcaactagtgtgcaaaataaccagatagcatcacgatgacaggatcaaattcacatataacattattaaccttaaatgtaaatgggctaaatgccccaactaaaagacacagactggcaaattggataaagagtcagactcatcagtgtgctgtatttgggagacctatctcacatgccaagacacacataggctccaaataaaggatgcagagaacccagaaaaacataccaagaaacacaatc

SEQ ID NO: 687043 - DNA, 1070 bp, Homo sapiens
  misc_feature (376)..(376): n is a, c, g, or t
ctttcgtctttgttcttgttggtattgctgcgttatttctcctggttttgttgttttttgttttttctctttttttcgttgtttttcttgtgttgtgtgttttttggcttcttggtggctgtttggtgcgctttggttgtcgtctgtctttgttttctttttttttgttttttttctgtcttgccccctctttgtgtctcactctgctgtgatcttcttcgtttctgttgctctgttccgcgtgtgttctcgtcgttgggtctgggtgtttgtttggggccccaatggcctctttgattatccggccctcaggtctcaccatgtcaagttgttgcccttcagggactttcctgctcccaagtcacgaaggtggaanccgttgtgtgccccccgagccctgtgtttttgttgaaaggcctccactgtggctcctctgttttacatactccttagtaaatgggaggtcccctggggcaaccagaccactgcccaccatttcagtgttgtgttcaggcccaggggaccggttctggaccaggccagctttaagtgtgagattttagtccaccaactcctggagtgtccccgctctcctgcttaccttaggaggtgagtgcccagggataattaccccccaatgctttctagtattgtttccccacctttaaatagtcctcgcttaaattcaccactggtgtggtctgatgttttgagagcactcacgggaataccaccctctttgcccacatttaccctcttctccccggattccccaggtggtctcgttgctctggcttccgcttcattgttcttaggccttccatggagtggatagctgcctccctccctcggctcgtttttgtgcctcttttgaagactactgctgcctcccatttctggggaagaccctttgagagcctagccccaggcctaagggctatagtttggtgacccagtgattttgtctttagcttttctatagtgattgtgcccgtcatatctgttttaagctcatggatccatggatttgtttaccatgtgatattttttattaaatcccgtattttcca

SEQ ID NO: 687044 - DNA, 604 bp, Homo sapiens
  misc_feature (24)..(24): n is a, c, g, or t
  misc_feature (32)..(32): n is a, c, g, or t
  misc_feature (37)..(37): n is a, c, g, or t
  misc_feature (50)..(50): n is a, c, g, or t
  misc_feature (74)..(75): n is a, c, g, or t
  misc_feature (103)..(103): n is a, c, g, or t
  misc_feature (122)..(122): n is a, c, g, or t
  misc_feature (179)..(179): n is a, c, g, or t
  misc_feature (190)..(190): n is a, c, g, or t
  misc_feature (214)..(214): n is a, c, g, or t
  misc_feature (250)..(250): n is a, c, g, or t
  misc_feature (329)..(329): n is a, c, g, or t
  misc_feature (401)..(402): n is a, c, g, or t
  misc_feature (414)..(415): n is a, c, g, or t
  misc_feature (507)..(507): n is a, c, g, or t
  misc_feature (510)..(510): n is a, c, g, or t
agaagaatgttgaatgcctaaganagaacccngattngccactttatganactcctttttaaaggagggaagtnnctggtggcccaagaaggatgtccaccantgcctatagcaccccggangctggcacgacccaagaaatgtgccccacccttcaatgtcactgaaggcccactgcncgttctttccnagttcccgaggctacgtgaaaggnaccacgctttgccctcggagacactttctaactggnaccctacccacatgagggtattccacgtattctccgtgattaccttcatctgcccccggagattgtgcctgcccccctncgcccgtagccgtcccgaagactggccggcctcggcctaaaggtttggagggtgagcgacctgcgagactcnnccagaggggaannctgaccagagatacctaccagacggagtgctgtgccccctggtgccgaccagaaagccgaggctggggctgggtcagccaccgaattcccgnttnagaggcggatttggtcgtggacgtggtcagccccctccagtaaaattggagaggattcttttgccttgaataaacttaccagcccaaaaaccct

SEQ ID NO: 687045 - DNA, 169 bp, Homo sapiens
tttagggctacctcgaaaaccaatggcagagtcttgaacagcagatctttctgcccactaggggagcaaagagctggaatttcggtgacttgtctttccaaacttttcctgtgcctggcggagaagattccagatggcattcttcttggccattcacacttcgtgccac

SEQ ID NO: 687046 - DNA, 334 bp, Homo sapiens
ttgtgatcgagctagagtataggataaggagtgcatgactggaagtggtatgtgctaagagtggagctgggggttccatcatggagtgcgttaggtgttgtgtagacccatgcagagtgtgaaggaggatgagtaataggaagagaaagcgaaatatgctgaagaggccttagagccagagcgagaaggagcagacagactctcatacataaggagttctggtgaaccagaatttctgcgagagattcaattatagcaaaactttatggaaccaaaaagcttacaaaccacatcagaagtttaatagataaactgcaggagagaatggatgcac

SEQ ID NO: 687047 - DNA, 171 bp, Homo sapiens
  misc_feature (109)..(109): n is a, c, g, or t
  misc_feature (137)..(138): n is a, c, g, or t
aatggaggatgagcagctgaaggtgtgggatgtgatcggccgctgcctgattattgatgagggagaagatgacctgggccggggaggcatcccttatccaagatcacanggaactccggggagaggttggcctgtgnnatcattgcacgctccgttggcctacagcacatg

SEQ ID NO: 687048 - DNA, 91 bp, Homo sapiens
ccgcctactactactactgctcgaattcaagcttttaacgatgtacggggacatggaaataaagcacccattgcttccctgggcccctgcc

SEQ ID NO: 687049 - DNA, 265 bp, Homo sapiens
gcccgatattttccatgcttatctaaacatttcatggtgcacgagaagaccttgatgtcctgagtgaccaatcctttcacgagggtggcgaccgctgtgtctactcgccttgtccctggggtcatggcggtggggtgcaagagaggcagttcttgtcgctgtcatctaaacacggttttctgataggagaggagcaagcatgcctctcttgatctcctgccttgacctctgcatgtaacagtttcctttcctccctcacaacgag

SEQ ID NO: 687050 - DNA, 105 bp, Homo sapiens
  misc_feature (86)..(87): n is a, c, g, or t
tttctttaaaatgtgcatctgcactcaaaaattcacacctaggatacagtaattatacctcctcaagaaaacacaaatattccaannaaaacgtgttgccagatc

SEQ ID NO: 687051 - DNA, 466 bp, Homo sapiens
aggatctggtacaacgcattggtgatctgggtctggccatgtctatggagttgtgactctggtacatgatataacgagtctgggtgtgttcgtgtctgaggaggtaggatctggtgcatgtattaggatctgggtctgtccatgtctgcgagatcggatctggcctgatctcaggactctacgtctctctcgaatgttctcgactaaagtcgatctggcccttgtcttgcgtgatctcgtgtctttcaatatctgaggaggtaagcagtctggtaccgtgtctgaggatctgggtctgtcaatgtctgaggaggtaggacctggctgtggtatatggatctgggtctcttcatgtctgaggaggtaggaaactgttacaggcctgaggatctgggtctgtcattgtctaaggaggtaggatctggccccagtatgaggatcggggtctgtccatgtctgagaaaac

SEQ ID NO: 687052 - DNA, 835 bp, Homo sapiens
gctgcatgaggggtccatacggcgttgtgcgtggattcccgtcgtaagcttaaaggtgaaattgttcagaagtgtccggagccacttgatgtcctgcaagatgaaggagtgaggatgtccgttaaggttcgcttgcatgcagagaaccgcactatagtggtggctagccgagatcgtatgacttctcacgtatggaacaggtacaatcgtatagagaaggaagatagtgagtggcgagtctaataatcagtaatactctcaagcatggaccgtgggatgaagcttctgcatggcatactcgtgcaagttgttgccacttgaaaaccctgctgatgtcagtgttatatcctcacaggaatactggccatgatgggcgtgtgcgtgaagtttgcgtgctgccacatgtgagccacgtccaagttgctggccgcttcactcctggaaccttcagctaaccagtatccaggcagccttccgggagccacggcgttcttgtggttactgatcccagggctgaccatcagcctctcactggaggcatcgttatgttaacctagctaccattgcgctgtgtaacacagattctgctctgcgctatgtggacattgccatcccatgcaacaacaagggagctcactcagatgggtttgatgtggtggactgctggctcgggaaagttctgcgcatgcgttggcagcattttcccgtgaacacccatgggatgtcatgcctgatctgtacttctaacagagatcctgcaagcagattcgccccccgaagagccaggctgcttgctgagaaggcagtgaccaaggtaggaattccgggtgaactg

SEQ ID NO: 687053 - DNA, 834 bp, Homo sapiens
tcgtgggaggagctgaagcagtgccaaggtagatcgaggacgccgagaagtactccttcatggccaccgtctaaccaaggcgcctccactaaagcaaaagggtcaaagtcacccagttttgcttgatgacatgcagagtagattcacccaaattccccgagccaaaactggccgaagatcttggtctcgcgtcgatctcacagtcctccactggacagcctacgcgttcagcgtgcatcctacacagaatagtctcgtgacactgcactttggaaagggggggcttgtttcactttcccccccccccggcaagctaaggaacaagccgatgcgccaacaaccaacgccgctaataatgtccctctctacacgggggtagtgcgcaacgggcgtaaccgcccaccaggactgcttatccgctggcatgcttggacaaggcaaagccgacgcttccaccagcggccccacggcggcccaagagggacgaccttaatctggggcacgcgggcccaccggatgaggaaggaaccttttgcacgggcaccattctgtcgccccaacggcgcgaaccctgcagcccaacaacactagcgaaaagccctccaaaccattcgggcttccccgttctggcggccaccattcccctgttggggtacacgattctgtctttcctcaacacaagttacccacactgctggggacatcaactagccacccgggcgtttggtgctccactcccacaatgtgctgtgcctgctcggccttccatacgcgcaacagacacgggacgcctaccagtatctgtggcagtcccccattgacggacttgtgcac

SEQ ID NO: 687054 - DNA, 269 bp, Homo sapiens
ttgggaaactttttttttcccccccccccaacacccccccggggggggggcccgagatgggtgggcctgggccccccttttccccaaacccataagaaccccccgtttttgtttgaccccggccccccccttagtcccaaaaaaagggaaggggggggtttaatttcaaagtcccggccctagggtggggcccccccccaaaaatccccccggggggggggggggttttaaaaagggaaaaaaaaaaaaaaacccttgtttaaatttta

SEQ ID NO: 687055 - DNA, 537 bp, Homo sapiens
tggagaacagaagtcttgctctgtcgcccaggctggagtgcagtggcacgatctcggctcatggcaacttctgcctcctgggttcaagcaattctcatgcctcagccttctgagttagctgggactacaaggtgcacaccaacatgccttggcttaaactttggggtttaagatagagacagtgtttcgccatttgggccaggactagtctgtgaactgttgacctcaggtgactctgccaacactcaggcctcctaaaatcgctgggatcacaggtgtgaacacaccatctatgcccggccaaataatggatttgcacaattctggtccaagtgttcgtcatacgtaatatgcacggagagtatagtcataataccagtgttccattgtgatcactaacataatattagtgggaaaaaccaagaatactataaatttgttataaaaagttgaagttcgagaagtgggtaaaaaattatgactggattaagtgaatgacactgagatactaatataaatgataattcttaagcatgc

SEQ ID NO: 687056 - DNA, 112 bp, Homo sapiens
  misc_feature (1)..(1): n is a, c, g, or t
ntcagtcagacgtggcgaccgttgagtaatatgcttaaattcagcgggtcggcaggtttgatctgaggtcgcgcgggtttggatgcagtctgtcatcggctttggatgccgt

SEQ ID NO: 687057 - DNA, 258 bp, Homo sapiens
gtcacggatcttagctttggtcaggacaataaggaagagaaagaaataatggatttcaaataggaagagaggaagtcagattgtctctgttcgcagatgacatgatcatatatttagaaaatccatcatctcagcccaaaatctccttaagctgataaggcaacttcagcaaagtctcaggatacaaaatcaatgtgcgaaaatcacaagcattcctatacaccaataaaaatgaaatgacagtttgaacatacaaaa

SEQ ID NO: 687058 - DNA, 930 bp, Homo sapiens
acagaggaagtaggagagtagaagggcagacggtatgtcgcgaacaggggtggggggtctattagacaggggacagggtgacaaccgacgtgcgctgaaggttgtggaagaatggagtaatagtgctagggacgattggaccgcacacacaccgtgggggggacccgcacctgtaattgaagaggcgttggtcaaagaagcggccactcggggaccccgtggcgcaaaagccaaattatgagtgcaacagagccacggtcgcccggcaaggacaccatgttttggccgcactttctggacgaccgggtcttcgttaaaaacccgcccccaaacggccgggaaacaaattgtgaggggcccgccccgccgccccaaaaaataaaggacgcgtgggtaacccccctcccggcaagccgtgacccaaaaaaagcccccccaaataactaggttgcaagaaggaccccgcctgtcaaccgtggaagcaacctcagggatctaagactcaaaggctgcggtgataagtggccgagaaaaaaaatttggcgccgggcccaaaaaattagaaaaaacaattggaaaaggcgcccctcgcgaacaagcaaaaagattgcttcgagcgcatccccgcggcaggtgacaactgcaccctggttcaaatggtggtacagcaaatatttccgcaaaagagactcatggaccatatggatgggacacaccatacccgtacatgcggagttgtgggctaatgaactaagggcaccgactgggtgtggcgcccgacccagaatacgcaccgacgctgtttgatacaaaaatccgagaagcatatcgacacaccatgggaaaatatcctttgtgtttaaagaaatgccttcccggggggtacccgggaaaaagtttttttttaaaaaaggccccagggaaaaaaaa

SEQ ID NO: 687059 - DNA, 146 bp, Homo sapiens
tatctctaacattaaacaaacatacatagtaaacctttaattagtatacactcaaggtacatacatggttttcctttctccttctaaagcatggaagagatttttttttttaaataagctgacaaaatatgaaaattaaaagaaca

SEQ ID NO: 687060 - DNA, 88 bp, Homo sapiens
  misc_feature (69)..(69): n is a, c, g, or t
tttaaaggcaaaaatcttttatttcaacttttagggtagccagcagcctcttctccacatctcagaagnacaaggagacaccctgatc

SEQ ID NO: 687061 - DNA, 147 bp, Homo sapiens
agtatgatgaaagcgtgttgactttcctcatctgtgtttccagtgcggtccaattcacggtggttgccaagcgcctcgttccatgtcaggtgaccagaggccgtataaaaggcagcctggaaagcagaggtacctctccgccccttc

SEQ ID NO: 687062 - DNA, 649 bp, Homo sapiens
  misc_feature (12)..(12): n is a, c, g, or t
  misc_feature (78)..(78): n is a, c, g, or t
  misc_feature (86)..(86): n is a, c, g, or t
  misc_feature (94)..(94): n is a, c, g, or t
  misc_feature (98)..(98): n is a, c, g, or t
  misc_feature (105)..(105): n is a, c, g, or t
  misc_feature (108)..(108): n is a, c, g, or t
  misc_feature (112)..(112): n is a, c, g, or t
  misc_feature (114)..(114): n is a, c, g, or t
  misc_feature (116)..(116): n is a, c, g, or t
  misc_feature (126)..(126): n is a, c, g, or t
  misc_feature (129)..(129): n is a, c, g, or t
  misc_feature (135)..(135): n is a, c, g, or t
  misc_feature (137)..(137): n is a, c, g, or t
  misc_feature (150)..(150): n is a, c, g, or t
  misc_feature (159)..(159): n is a, c, g, or t
  misc_feature (195)..(195): n is a, c, g, or t
  misc_feature (204)..(204): n is a, c, g, or t
  misc_feature (206)..(206): n is a, c, g, or t
  misc_feature (214)..(214): n is a, c, g, or t
  misc_feature (234)..(234): n is a, c, g, or t
  misc_feature (243)..(243): n is a, c, g, or t
  misc_feature (258)..(258): n is a, c, g, or t
  misc_feature (275)..(275): n is a, c, g, or t
  misc_feature (277)..(277): n is a, c, g, or t
  misc_feature (296)..(296): n is a, c, g, or t
  misc_feature (313)..(313): n is a, c, g, or t
  misc_feature (318)..(318): n is a, c, g, or t
  misc_feature (320)..(320): n is a, c, g, or t
  misc_feature (322)..(322): n is a, c, g, or t
  misc_feature (325)..(325): n is a, c, g, or t
  misc_feature (333)..(333): n is a, c, g, or t
  misc_feature (337)..(337): n is a, c, g, or t
  misc_feature (339)..(339): n is a, c, g, or t
  misc_feature (344)..(344): n is a, c, g, or t
  misc_feature (352)..(352): n is a, c, g, or t
  misc_feature (358)..(358): n is a, c, g, or t
  misc_feature (396)..(396): n is a, c, g, or t
  misc_feature (421)..(421): n is a, c, g, or t
  misc_feature (429)..(429): n is a, c, g, or t
  misc_feature (435)..(435): n is a, c, g, or t
  misc_feature (450)..(451): n is a, c, g, or t
  misc_feature (455)..(455): n is a, c, g, or t
  misc_feature (495)..(495): n is a, c, g, or t
  misc_feature (499)..(499): n is a, c, g, or t
  misc_feature (511)..(511): n is a, c, g, or t
  misc_feature (518)..(518): n is a, c, g, or t
  misc_feature (527)..(527): n is a, c, g, or t
  misc_feature (562)..(562): n is a, c, g, or t
  misc_feature (570)..(570): n is a, c, g, or t
  misc_feature (579)..(579): n is a, c, g, or t
  misc_feature (614)..(614): n is a, c, g, or t
ggtctcctgccnaccattaggacacaatgttctgcgtctggccagacatctgtggaaaggctggatacaggacaacgnacccatcnttccatcnatancaactanccnaggncncngagaccccanttnggagcncngtggaagtcagtntctggaggnagttctgacgcagagggggcaactgagaatagagcncaaagcccncngggagcgnggaattgggaagcttatagngcaggaggngctgccggagacccncatctgccagcagccangngttctgcagcatactctcngcgggcagctttgaccncatcngntntcngtgggttntgtntnaagangaagcgantgacangagccacagccacagcatagagcacggggcaccaacgngggcggacgcaccagttaccagggnccggaagnagagcngaaggagggccaggnngtcntcaggaggcactgtgtaacactccagggacacaggcaacngggncagaggcaggcncagagcncgcaaggcncccacgtgttccccaaagagggcaaggcgcaaggngacacttnaccgacgcngcaggggcaggaggaccagggcccaaagaggtggncccaaaagagacagcctcaaaatgatccaggaagt

SEQ ID NO: 687063 - DNA, 698 bp, Homo sapiens
tatatatcgtggcagtgggtcatgtttggccaacatcacccctatagtgtgggggagcataccaagaggggcccactttgtgtgccaacaccaagatagtgtgtgtctgcctttggccccaagatgaacaacatttggccaggggtgggattgacaaatgggacaatgtggccctaagtgctccggagaggggtggttgggttcctaggaggactattcacccagcataaaaggacttgtaaagcccgaagcatggtgccagtgcaagtcgaatgtcttgtcacaggagggggctacaagtgatctacacattagcatctgaaatgtgtgctctgggacctgtataagtgcggtgtatgcccatacccaggtgtgctccatcttttgttctccccattacaagaagttcatctcagaccatggctttgcacagaccagtctagttatttgtaagttcccatccatggccaaggtggatgaattcaaaggtcacacatcccgggtcctgagtctgaccatgagcccagatggggccacagtggcatccgcagcagcatatgagaccctgaggctatggcactgttttgagttggaccctgccgtgagacggtatcgggataaggccagttcagccaaaagcttcctcatccagagaggcgtcctgtgaataacgaacccatcaccgcggcagtttgtta

SEQ ID NO: 687064 - DNA, 290 bp, Homo sapiens
ctgctgctcaccttagtctcatcacacactgtctgccggatggatccctcttcaatgaactacatgaaggcaccaatttcggcgtggaccagagccaggctgtgaagatggctttgcacatggcaagtggcatgatcttcctacacacactagagcccctcatcccacgacatgcactcaatagccgaagtgtaatgattcgatgaggacatgactgcccgaattagcatgcgcgatggcaagttctctatccaacgtcatgaacttgccagttctcaaaacccgagagc

SEQ ID NO: 687065 - DNA, 977 bp, Homo sapiens
agcggcgaagcgcagctagcctggactgagaagtcagaagcgagaggaggaggagacgaaagcggagttcgagcggcagtcgaaaacattcgacatgcatagaacatagaagataaaactcactcgagggaagaaacagcacgaagagtagaagaacttggctagcaaacaagggtggacggaacgaactggagcaactaggaaggactgaacacttgacacgagatagttctccgacagggtggacggaagccaatacgcatcatgcgaacatagcagattgcgtcgtaagaactcgatgcgacagaggacaatgctgatgctttgcctgcacaataaagcttagagatggtacacgcatcggtcgttgtggaacacgtacgatgacagtcctatggcagagaatctttcacgtgtcggggttctggcctccttgctcaagttcgagaaaggagatggacatacacgacatatctagattctctttctgcgtctacaacggtagacattggctgcgaaaaggttaactttgttataggcctaattcgagacagttgcttgacgtggataaacttaaacacagtctgcgaatgctattctactaaagacattattcacaggcatacctttcttgactttacatggacactggcctactttgaggaaggtgtgtgacaacttttgtccatgagctgcagcgacttaccattcttttattgggaggacggtgagggaagaccaggcacgtgcgtaacacgcgtgacacacggttacaaaatccacctgtggttgtactattcttctatttctgtcactctgttaccttaggacctgtgagcaggcttttgctttcagtcagatttacaaatgtagcagggccctaaccattgcagtggaaaagcacctgcttaggctcaattaggattctctcactctgtctgttgtacacctatcttctataccctcactccgtcccc

SEQ ID NO: 687066 - DNA, 114 bp, Homo sapiens
gcggagcaggccgtgaagcacccccgcctgctgtccttcacgtcgcagctgaaggccggcaagggcctgaccatcgtgggctcggtgctggaggggacgtacctggacaagcac

SEQ ID NO: 687067 - DNA, 120 bp, Homo sapiens
tatgagagaagagcttcctgggatggaccccaccatctctgcaccttacgccactgcaagatgctggcctcggtgggccagccagcccctactactgagacccacccccatcctgggcat

SEQ ID NO: 687068 - DNA, 114 bp, Homo sapiens
cgaaagaatctggattatgaaggaagcaatggttcaggcagaggaagcggctgctgagattactaggaagctggaaaaacaggagaagaaacgcttaaagaaggtccaggtatg

SEQ ID NO: 687069 - DNA, 592 bp, Homo sapiens
caaaagagcaatccttatcagaattctaagtggcatttttcacagaactagaacagaaaaatcctagaatacacaaggaagcacaggagagcttgagtagccaaagcaattttaagaaagaagaaccggtcagacgcatcacatttcctggtttcaaattatagttcacaaagcgtacagtaagtcataacagtgtggacgtatggacctgagatagaaagagggacacagaccagtggtaacagagaagagcccagaaataaaccacacaaacaaggtcaactaatcttcaacaagggcctaaagcatacatacaataagcaaaagatattctcttctataaatgatgtagggaagactgtatattcacatgtaaaagaactactgccatacaccatatacaaaaattaactcacaatggattaaataattacatataagatctaaaactacaaaattcttagaagaaaacataaggaaaaagctcctcgatgtaggtcttggcgatgatatttgggacatggcatcaaaagcaaaaataaacaaataggtgtacacaaactaaaaagttctacatggaaataatcaatac

SEQ ID NO: 687070 - DNA, 162 bp, Homo sapiens
caccagctcagggcgagctggagagctgggctgggtcgatcactcaccgccaacagcgccctggctggaggttgagagggacaatctggcacagtgacctgtgccacttgtgagtgcatgaagctccatgtgatgaaacacaaccgtgatggctggaatcct

SEQ ID NO: 687071 - DNA, 586 bp, Homo sapiens
aagtccggactgtctaacggccaataacgaacggccgatatagcctttagtactctatacggagccctcagagtcaaccgaaccagattactaattcgcgaccatcacaactattagcgatccgcaataaaagcataactagccacgtcccgacagaagaccggccgactaagacggtcctaacgacgtagctaaatggaggcggacgtggaggaacgtgggcgatagctcctaaatatattccaccgatcgcagaagagaaactctcaagcggaaatgaagacactgcatgaacgtctaggaagatacagtctcctccaagaaccgctccgacaaagtatatatggacggccacataatctatatcacctgggacccaagatcgtaatctctaaaggtccacgtaaacgaaaaagaaccccggtgctctaaaagctgcaagatacggtcagtaggcggggactgaaacataaagcatcctcccgtcctcattaaaatcaggacggtaaggaactgcacgcatctaacctacgatgacgatggaatgaaatataggggaattaactgtccaggggaagcggtataa

SEQ ID NO: 687072 - DNA, 1221 bp, Homo sapiens
ggcgcacggactcggcgacctctccgaaccggccgccgacggccatgcgagaccaactccagcctctatcatgcgcgctacgctcctctgcccgtgcatggcaatgcaccacagacaatccgactggcgtcgatcaggaatcaccgacatgacacaaagattcacgtccatccgctcggatccatgatcgagatgttgggggctctgtggaggacctgattgccaaaggcaccctgtctcattaagtaactcaccagggcgaggtgaccagtcactgatgaaccgatggaggcccagttctcgcgaagagtgtcctcaatgaactatcgatggactgcccagtactaacggggagatttggcatcgaggacgcctctcctacagtgtcttcaacagtcgtcttctgatcagagggtctcctgccaacctgatgggatcccctaccaatccatctgacaaagctagcgtggagcattaggctttgcttggaatccgactcaccaagttacaaacagtggataacgtccagtcacctacgtgcaacgaatggtaccttcgctatgacatccagctatggctcgggcaagcctctccgggtaccgtgagccaggacactgtgtcaggtgcccctgccagtcagcgtcgtcaagcctctgcccctggagacggtgtcaaacgtggcacgaggcacggtctttgcacgcaaggacaaccaagcacacaaggaatcaccttcactcgcaaccacagttcgactaccatcctagggactgagcaacccaccagcatctacgctcaacaaacgtgctggcccggactacgacgcaccctgatgaacgcgcgaagatgatggcaccaacccatctactcattcataattgagccagtgaccagaatcgcatcttgacgtaacatgcctgccagacggacaaaaaccgccatgtaacgggatcctgaaacaccaaagagacccccaaagaccacgccgtcacataaccacttataacatactacacaatacacaccataaaatgaaaaacatacccaactctccacaaccaactaccaaagaccacaccataacacaacaccctcaataataacactcaacatcctactaaaacaccagtaataactaaatacaataaactaaatcacataaaaacacaacacccacaaccaatcacctcacatatagactccctcacttcctcacacata

SEQ ID NO: 687073 - DNA, 983 bp, Homo sapiens
  misc_feature (206)..(206): n is a, c, g, or t
agaacggtctcagcaactgtctgttctcaatctggccatttaagtttagctagtaaaagactggttagatgataacaattgcatcgtacaaccttcataaaggaacaggagaatgtttttgtggaccacttgtgggttattctttctattagcgcttgtggcagttcttaagttattaggtttctaatatatcagtactttttaantggataacatagcttgaccacagaatatttgtcacaagaattttgagacccatttaataaaagcttaggaactgatgaacattacacaatacaaagagacagaagagacacattataataagcgggaggtcccttgttcctcataatcattcccctcgtgggggcctcgagtattactgcgtcccctgcctttgtctttttgttagcaagggggccctcccattaatggcgtatgtcctctccgatgaggaccgaaattagtccatgtctggattggagaccaacgagtgagagttaagcggagaacaatactgagtccggccgagtgcccaattttcggttgaggaacagcactctagtttcgaggtggaggtcgtgcaattgagggcgtgacctcagtaaccactaagaacacacattcctacaagcgacgcatatcgtgttaacccttttacaactttctttctgtcgctctttcagtttgtttgacagccacttcaggcagtaatcgtctcagctttccttgataacatttgtctgggcaaaacggggatctatgacttttcccgcctaattgtatttctacctcccagctgtttgtgtaaaaaaaacccttatccaacccctttaattaacccaacttccaacaaaacggcccttcggctttaaaattctccttcctttcttctccctttaattgacattaaacactaattctccaccagacctcctaagcgaccagaaaattatacctaagcaaacctttaaaaaccctcc

SEQ ID NO: 687074 - DNA, 1954 bp, Homo sapiens
  misc_feature (14)..(14): n is a, c, g, or t
  misc_feature (71)..(71): n is a, c, g, or t
  misc_feature (75)..(75): n is a, c, g, or t
  misc_feature (77)..(77): n is a, c, g, or t
  misc_feature (81)..(82): n is a, c, g, or t
  misc_feature (132)..(132): n is a, c, g, or t
  misc_feature (153)..(153): n is a, c, g, or t
  misc_feature (155)..(155): n is a, c, g, or t
  misc_feature (190)..(191): n is a, c, g, or t
  misc_feature (202)..(202): n is a, c, g, or t
  misc_feature (216)..(216): n is a, c, g, or t
  misc_feature (233)..(233): n is a, c, g, or t
  misc_feature (239)..(239): n is a, c, g, or t
  misc_feature (245)..(245): n is a, c, g, or t
  misc_feature (249)..(249): n is a, c, g, or t
  misc_feature (252)..(252): n is a, c, g, or t
  misc_feature (342)..(342): n is a, c, g, or t
  misc_feature (374)..(374): n is a, c, g, or t
  misc_feature (422)..(422): n is a, c, g, or t
  misc_feature (441)..(441): n is a, c, g, or t
  misc_feature (447)..(447): n is a, c, g, or t
  misc_feature (463)..(463): n is a, c, g, or t
  misc_feature (474)..(474): n is a, c, g, or t
  misc_feature (520)..(520): n is a, c, g, or t
  misc_feature (530)..(530): n is a, c, g, or t
  misc_feature (539)..(539): n is a, c, g, or t
  misc_feature (543)..(544): n is a, c, g, or t
  misc_feature (547)..(547): n is a, c, g, or t
  misc_feature (550)..(550): n is a, c, g, or t
  misc_feature (565)..(565): n is a, c, g, or t
  misc_feature (572)..(574): n is a, c, g, or t
  misc_feature (578)..(579): n is a, c, g, or t
  misc_feature (581)..(582): n is a, c, g, or t
  misc_feature (610)..(610): n is a, c, g, or t
  misc_feature (684)..(684): n is a, c, g, or t
  misc_feature (797)..(797): n is a, c, g, or t
  misc_feature (804)..(804): n is a, c, g, or t
  misc_feature (806)..(806): n is a, c, g, or t
  misc_feature (808)..(808): n is a, c, g, or t
  misc_feature (831)..(831): n is a, c, g, or t
  misc_feature (884)..(884): n is a, c, g, or t
gtccactccgggcnggtacatcatccccctgcaggccctgcctcacaaccacagagtcccgccagcagccnatgncnttgnntgtggccctgaccaagggtggagaggcccgaggggagctgttctgggacnatggagagagcctggaatttntnttgcgaggggcctacacacaggtcatcttcctggnnaggaataacangatcgtgaatgagntggtacgtgtgaccagngagggnggtggngtgnagntgcagaaggtgactgtcctgggcgtggccacggcgccccagcaggtcctctccaacggtgtccctgtctccaacttcacctacagccccnacaccaaggtcctggacatctgtgtctcgctnttgatggaagagcagtttctcgtcagctggttttagccgggcggagtntgttagtctctccagaggnaggctngttccccagggaagcngagcctgtgtncgggcagcagctgtgtgcgggcctggaggttcgcatgtgtcacctngagctgggcnctaaccatnccannccnccncatcgcttgtttccncctcctnnnccgnngnnctggcccccaacgtgtctaggagagctntctccctagatcgcactgtgggccggggccctggagggctgctcctgtgttaataagattgtaaggtttgcccncctcacctgttgccggcatgcgggtagtattagccacccccctccatctgttcccagcaccggagaagggggtgctcaggtggaggtgtggggtatgcacctgagctcctctntcgcccntncngctctgccccaacgcgaccgctncccggctgcccagagggctggatgcctgccgtccccgagcaagcctgggactnaggaaaattcacaggacttgggagattctaaatcttcacgtgcacatctactcctttacatcaaacagcgggcaattaggcacatcgaccaacaccaacacaaaacaacaaagccaacacaacaacacaacacaaacaacaaacaacacaaaccacaaacaacaagaagaccacaccacacaacacacggagcgccggcgacgacaaggccacacaactctacacggcagaggccacgcacacacccaaacaggcgccgagacgaagggacggaacacggaccagcaccacaacggagccgcacgaacacacaagcaggcggggacaaacacacgacagctacgagccaaaaggcagcgggcgcagcagcgggccacacaacaccgggaagacacaagacgccggcaacaacaaacgggaaacgacaaacggagcggagataggagggtggaagcggaacggacaaaaccaacaacacgacgcgcgcaggggagggcgcagacaccaccgcaacaggccgcgacccccgacggcccggagagagagcagcaacccgcacgcaccgcgcgccgaccgaccggccgcccacaacaccaccggcaaaacgcaaccacacagcacgcaacaaacaaacacaccaagacccacgccgccgccgcgaccacacagcacacgaaacccacgaacacaacaagaaagaaacaacccgccccacgccgcacacccccccacacgacgcgccgcagcaaacgaacaacaaagagcgcaaaccacgcgcgcccaccagaaagaccagcgagggagcacgcgcggcgtccaaggagacgaacgcagaaggagacagccgaacgcgggggcgggacgagagaggaccagaaacgccataagcaaagcgacgagaggactcagcgcgagcgagagaggacagcgaaagagcaaaaagacaaacggaacaaaggacggagacgagggcgggcgtcagataaaagaggaccagcgacagaacagaccggacgacggaaagcagacacgaccgaacagagggagcgggcaacggaagcaacgcgaag

SEQ ID NO: 687075 - DNA, 162 bp, Homo sapiens
ttttttccggtttttccccccccggggggccataaatttttttttttcccaaggttccctttcccaaggaaataatttttgggggggggcattgtttcttaaattttccgggggttaggggggacttttttttggccccttctgggggggggaaaggttcca

SEQ ID NO: 687076 - DNA, 166 bp, Homo sapiens
gacactagtggatccaaaggcttcggcacgagagaatggcaagacaagcagcaagaacaagaaaggttttaaagaaagatgttgcttactatgagtttcaaggtgacggatgatgccagctcctcctaaggacacagggctgggttggtaaagagaaggctatggt

SEQ ID NO: 687077 - DNA, 221 bp, Homo sapiens
gtataagcatgcaagtctcatgtcacagcattatacataatagtgccaactgggatccaacagagaactgagttacacactgaagcataatactaagtgtgatactcagtgtgatgtatggacaactaataaaacaagcaatgtgaggctgggtgccggtgctctcacctgtaataccatgcaactaagggagggcgggagcttagaatccaagtgcaata

SEQ ID NO: 687078 - DNA, 915 bp, Homo sapiens
aaagctgaaactatgatagccagatgggttgtaacctcagggttaaccggtatctgaagaatgacacattaccttgggagtagcctggctgggaggcaaactgactcactgcgtcccggtaatgcgagcagtgcctccacaagagcgcggaccggttacgtagacgcaatgaagttattgagggagtgccaccgcgggggctgtgcctcggtcacatattgtatcaagacccgatgatcggtcatcttcacttggagagttcctgtttgatggaatgtagatctcttgagtgaccgtggtgcgctatggttctccactctggttgatgcttgccgtccatgttcctcgctgacagtcctttgttttgtgcactctcatgaaatgttctcacggactaactccctcacaaagggcacatagtgtggattttggagtgcttcgagcatttggcaatccccttgggacagaagagagagcacaatgggtatggaaccaggagtcccagaataaagattgaacgagagacagtgattctaattgaaagcggcccgaagcggtggaattgggcaagaaaagatggagaaaggtccgacgtcgtaatggcttaacggcctattggatggatataccctaaaagtcgcaattctacaccgcttttaactcactgcattaaaccgaaaggggggactaagcgaacaggtgggtggtcactggcttgaatttcgagaatctaaagccaagtgtttgtccacacaaattgagaacccctttaggaattggaacggttacacaatggttttggaaaggggttgaggtgggacttcgcaaggccaggccaaatagggcgttctagagagaattaagaatacaggggaagagacagacactcattccgagaaaataggccatctaagg

SEQ ID NO: 687079 - DNA, 422 bp, Homo sapiens
  misc_feature (107)..(108): n is a, c, g, or t
ctccataatgtgtgcccatcattttgtatattcttccaggaaattattattttctttttttttggagacaagagtcttgctctgtcgctcaggctggagtatagtgnngccatctcagctcactgcaaacaccacttcctgggttcaagcgattctagtgccttggcctccctagtactgggactataggagcgtgccaccacatccagctaatttttgtatttttaatagagatggagtttcaccatgttggccaggctggtctcgaactcctgacctcaacagttccacccacactggcctcccaaaatgctgggattacaggcgtgagccaccgcgcccggcccgtttgcatctttttcagaaggggtatcagtggcttagaattagtgatagtattactagttgtatgtacaatttca

SEQ ID NO: 687080 - DNA, 102 bp, Homo sapiens
gcggccgcctactactactactgctcgaattcaagcttctaacgatgtacggggacatgcaattttgcatttgaataaagcctgctttttaagtgttaaaaa

SEQ ID NO: 687081 - DNA, 896 bp, Homo sapiens
tgagattctcgccctgagcaaggagcgacggtctgacgtcggcggaggggagccggcccaggctcggtgaggaggcaaggttctgacgtgggacacggctgacctggaggaccagaggtccccggaggagcactgaaggagaagatctgtccagtgggtcgtccattgcccaggctcctggccacagctcccgtctgttgtccgtgagcagagtcatcatgcctcttgagcagaggagtcagtactgcaaggctgaagaaggccttgaggaccgaggagaggtcctggggcctggtgggtgcgcaggctcctgctactgaggagcatgaggtggctctctcctcttctagctcgtagatggatagtcaggcctgggggaggtgccctgctgtcgagtcacgcagatcctccccagtagttcctcatgggtagcctccagctcccgcgatctacatgaactactcctctctcggagccaatcctatgaggactccagtaaccaagaagaggaggggccagggcaacttcccgtgactggagtccgagttccaagcaagtactcaggaggaaggtggcagagtggtcccagattctgtcctcatagtatcgagcggaggctgctggtgacgcacggcagaatttgggggggacgtgtcgtcgtccatgtggcaggatttggtatcctgtgatcgtcagcgagagtgccggttcgtgggggggcttggatcggcgtgtggggtgggccctggcctgtccttttgcactgctgggtttctagaggctggggtggcgtgtcagccgggggctggagcgggcatcagaggggtgcccggggaaggggggtgttgtggggcggacttggtcaccgccctgggtggccgcacttgtttcgccca

SEQ ID NO: 687082 - DNA, 221 bp, Homo sapiens
  misc_feature (213)..(213): n is a, c, g, or t
atctatacaggatccccgtgagtcgtttaatgtcccggcaggctgttgaatggtccaccattctccacttgttggtgtttctaccgtgtagtaccgtcacttacaaaaatgtctagttcaccgtatgggatgtgtccagccaggaccagatccggccgctctgtcggcattactacactggtgacccaaggttctcattcttcgtactgaacngtcgtccg

SEQ ID NO: 687083 - DNA, 162 bp, Homo sapiens
ggatccccacaacatgtcggggctgggagaaacactggcacgttaggaaccctcaggtagttcggcatcagtaccaagtccaccagatgagggagggacactggccatagaccacatgacaaagggcctctgatccatgctaatgaggtcagcatgttctga

SEQ ID NO: 687084 - DNA, 196 bp, Homo sapiens
catgtgccagctgactgcatccaatgcctgtgtgctgttccttctcgctgcggcccttgatgctcttagtctgagtgtccctgctggggccctgaagctgtttacttttgaaaacaattagactgtgttcaaatgcattgccctgagcctgcactgtgatacctgcagcctattgacataattggaatagtgacct

SEQ ID NO: 687085 - DNA, 390 bp, Homo sapiens
cgctcttttggctcccctggggatcttcttgaaactcgggttttccctccttggttccgttgttttcgggatggggtcccggttggcttccattcggtcctcccttggtgtccctggggggcttttttgggggccccttttcggcccccaatttccccggttgtccgggtccctggtgtataatggcccgctttttccatataccctgtgtatctcctcccggagattttaactcatctccgggtcccttttaatccctaatacggtgttattgctccgtggttctttggtgtttttatttgtattatttttattgttgccttgttattttttttctggtttattttcattccgtggttggttggttgcccggtttgggtttatttcaga

SEQ ID NO: 687086 - DNA, 544 bp, Homo sapiens
acacacgacaaaaatgtacttcaataagcaatgcacccctacccattattttccattatactgtggaccaatgtgaactgctatttacaaagtaattttattttttggtaagaacaaattaactatcagattagcaaaccttttttttaaattttttgttttttttttggtttatttaacttttaaatggagggtgacccggggcattaagataacttccacttctttcaataaagacatttggtggcatgctatttattggtttaaatcatcggtcatgccttaacaaaaacctcctaagaatgtccgaattgggattggtaggcacgtgcaactgagatcttataaacattagtggtcacttcatgggttggacctaagtgacaatatgcgggtaccggccaggcttggaccaactatgataacaaacagttaaacagcactaatcagagatttatcccttaatttcccccaattaccctaccgggcgaatgtccggtaacatcatgaaggccaacacattaactatttggtggctatggtc

SEQ ID NO: 687087 - DNA, 927 bp, Homo sapiens
gaaggatgttttccgtctcgtagcgggccctgcggcccctctttggtttctctgggggccccacacgtggggcccctctctcgcccggtggggacccccgaatatgccgcttctttttacaggagattttctggggttccaccgctttctcgggaggggggttttccccgctgtattgtgggggcccacactggcgccgaggtgttatttgggcccccctgttggccctccccgcgtccttttggtgggaccccccaatggtggcggcgcgccctcttattaccccggggggtgtttccgggcggtattaccccacgcggggggtgttcgggggattcgcggcccccccttgtgtgcccccctggggcggttcttcccgggggtgtgtgccccccttttccccccgggcggaagtttgcggctgtccaagacccccgggtgggtcgtgggtgggggatatcaccccggcgcccaccctagtggagcgcgtccttctcgggcggcactgtggtatacttattccgcggggggttttttcacccggcggtaattacaccctccgggcccccccgcgcgggtggggccgcccccccacgtgtgttgctcctctccccccgcttcccctctgtggggagccccccggtccccttgggggccccctttcccatgtgttcacgccgcttttcccaggaggtgttccactctcccccgggtacccttggttattacggggcacactcttggggcacccgacagtgccaatttcgtcggtgggatcccccccctgtcgtagctctcttccgcgggaggagccaccaccacggcccccccggtgtccccccccccccccccggggtttttttgtgaaaaaatgttttttttttttttctcaaaaaagggtcaagacccccccccctctctcttcta

SEQ ID NO: 687088 - DNA, 285 bp, Homo sapiens
tgtgtaccttctcgaggaggacggggatggcctccctgttgtggtgctccttgtggccttccttgaggaggagcggggatggcctccctgattggggtggtccttgtggcttcccctgaggaggtggtggaccttgttgctgctggcctccttgtcggggtggtccctgtctgagggccatcattctggttcccaccaccagcagagggttgagattgctgtcctcccaaaggtgatgtcggtcctgacgctcctcatctatgaactgctcagagtctcctccca

SEQ ID NO: 687089 - DNA, 293 bp, Homo sapiens
agatacatcacgtgtttagcgatggttgctggcactcagcaagtgcttgacaatattcgctatcattatctcacaaaggggtggacaaaacaccaggtgtaggctctaggtcatgctgctcacagcacagaacgccactcacggaagaaggctatcattgggcgctgctgctgaggagactggttcaatctcaaatccatctccttgaccagctacacatcacgggcgttacagtaacagggaacgaaatgtaacaatgtgtacacgaaaacaggagtacaacctgccggtgg

SEQ ID NO: 687090 - DNA, 395 bp, Homo sapiens
gatcgaccaggacccaacgttataacccacggtcgtgtcatcgcccttgagggtgacccgtgtctctttgccgttgttcaaggcaccggtggccaggttgttctggagcttcgcctcgaacgggttcagcgtcgggccgccccccacagataggtaatcattgacccggtagacgagagtcggttgcagggtgatcgcctgggtcttgctataggcgccaaaatagcgaccttggaagctgctctcataattgttgaccagaccgaatggaacatagagccccaggccggctgaaaaaccctcgtcaagaggtgttgaaaaataggcgaaggggacggcggacaaggggacggattacccttgctcgttcctgtggcgtcgacgcggccgcaatt

SEQ ID NO: 687091 - DNA, 132 bp, Homo sapiens
gcggcgtagtgaatggtgcattgagggtctaacagtggcaggtccagcgcagatgaaagggttccaccagatgtcagtgaagaacctggagtagaacacatctcagcacactccagtgagtgagcaggtgta

SEQ ID NO: 687092 - DNA, 371 bp, Homo sapiens
  misc_feature (30)..(30): n is a, c, g, or t
  misc_feature (37)..(37): n is a, c, g, or t
  misc_feature (137)..(137): n is a, c, g, or t
  misc_feature (341)..(342): n is a, c, g, or t
  misc_feature (346)..(346): n is a, c, g, or t
  misc_feature (349)..(349): n is a, c, g, or t
  misc_feature (366)..(366): n is a, c, g, or t
ttatgaagctgccttacggaaaaagctcgncgctgtnagacccaacctcctcgtaaaaggccattttcagcagctggaatgtgcaggagcgcagctggagcccgtcctgcaggagctggtccacaggggtctggaanctgatgcgcttctccttggtcagcgcagccaccgggaaggagcggaccaccacctgctccccaaccagggggtccgtgggcatccccgtgaagatgacccggtacgtggtgaggaagacggcgccctcagctgggagcaatgtggtcccccagcactgccccccgcgccctcctcacgcccatccggcagcaggtagacgcgcnntttntancagcacacacttctcancccgg

SEQ ID NO: 687093 - DNA, 940 bp, Homo sapiens
tgagggcgacgctgtcctgcctgggtgcgtctccggtggggcggcgggggtggttatatttacgcccgccgggggggcgccgagtttgtgcgcacgccggcgtgtcttgtggttgctcagccggtcgggtgttggtgtggtggactcttcttgcggcggacacgaaggggcgtggtttcgaatgttttcgttgtggggggcgtcgcatctgatgtttgttcctccctccgtgtgtgtgagatatacacagggtggtgtggcactcgcacgtacgttgttggtggctggtgaggagaacccttctcctcctctgtgtttcctgaccgagatagcttggggggcggcggctcgacatggagactcactcccaccccgtctgggtgggggtgctggctcccctcctgctggtggtgggttggggtgaatagaggagggtggtcgtctcaggatggatggaaatcagtggtggtgtgtctgttattaagatagataggtgcggcggcctttcgagataaaggagtgttgtttattgagagcgaccgctgtctgtctgtgtatgcacacacgcaggggtgtttgtcttgtttctctgttgtgtgtggtgcgagtggtgtcgtgcggagtatagtatgtgggtgtgtctgcccccggggtccctcccacccgggtgttttctgttgttgtggttttgcgttggtgcgcgtggtggtggatttcacctctgtggtggggtagtgttgttgtttggtggtatgcatttattctggtggtcgacgggccacttggttctcgcccgcctccttgtttgcccatttcattctggggggtcgtctttttggtgggaatataatttcttttggaaaaaaaaaaacaatttttcccccccccggttttccccacttttaaaaaatttttttttaacccccccctttttttttta

SEQ ID NO: 687094 - DNA, 602 bp, Homo sapiens
tactcaacggaactttgtcaagcattagatggttgtaggtgtgtagctttatttctgggccctctattctgttccatatgatctatgtgtctgcttttgtaccagcaccatgcttttgtaccagtatcatgcagttttggttactgtagccctgtagtatagtttgaagttgggtaatgcgatgcctccagctttgttctttttgcttaggattgctttggctttttgggctcttttttggtttcaaataaattggaatgcttttttttctgattctgtgaagaatgttattggtagttggataggaatagcattgaatctataaattgctttgggtagtatggccattttaacaatattgattcttcctatccataagtatggaatgtctttccatttgtgtcatctctgatttctttcagcagtgttttgtaattttggtagtagagatctttcatctccctggttagctgtattcctaggtatttaatccttttggtggcaattgtgaataggattgcattcttgatttggctctcagcttggatgtcgttggtgtataaaaatgctaccatactttgtatattgatttcgtctcctga

SEQ ID NO: 687095 - DNA, 1313 bp, Homo sapiens
  misc_feature (801)..(801): n is a, c, g, or t
atatacacccctttttcggagaaaccccccacccacccgtttttttccgtgagacaccacaagtttattcgttatcgttaataacccccacaaaaacggtgtagtagtttcccaccgcgatgagatgtttattgcccctcatctccttctccctctcctctttatccccacaaaaaatattgtgccctcgtgttacacaacagtgtttgttccacgccttctttataaaaagatatttccctcttttgtaagataaaaaacggttaaagctggtctcgaacaattttgttttaaattgtttgtttgtccacttttatggagaagctttaccccccacacgttataaagaagattgggtttaagagccccctttctgtaggaaccccccacaaatttttgtgggtccccacctttctttctaaaccccccccgcttccaccacacagacctcgggcttctatcaccccggaaatatgtgggagttctcacacgggtgtccccccccccgccttataatggtttaggaagagggtgtgagcaccccaccctctatgaaatttggcgctcttttttccctcggccctctcccccctctcgagatacgagaaagaggagaaagagagacagagagatagagcccgtctttggggttttttgttggcgccacccctcgagattttttatagcccccacatcgtgtgtaggagaaacctccatcattctctcacatgtatcccccctcttctttttctcggcgcggttgttgaaaaagctctcgcgctcgctttctctctatagaanaaagatgcgccactctctccacacatttgtgcgctctgtgttatatccacagctccacgctgcgctcgcgaggagaatattctctgagaatatagcctctatatgtacacacacaacactctttttataaatgttatataaattatttttgtagaaactcttgggtcttgggtgtttgtgggcacaccctcggccacccccacttctcggctcgtggaccacgcctctctcgcacagtgccctgcgggctgggcacagttttgttgattctctttaaagtttccttccctaccccgtccccctattttctggttaagagttttcttagagagagttctgtttagagtgtacctcctcgccacctttatatggctttaaaatagttactctccccttttatagtggttcttctttggggcccattgggagaaagagaaatccatagtgccactgttttgatactgaatattgacccagatgtccttttgtaaatataagaacccgtcccctcc

SEQ ID NO: 687096 - DNA, 363 bp, Homo sapiens
cgtcagttacatgaatattcatttaacaaaaaccataaattatttacttagaaaacagtaaatgttactgtaggggacaccttaataaacgtgattataaacataaatcctaagcatctaaaaaaaaaaaaaaagggaggaggaggggacccagaccccccccattctatttgggagacccttaaaaagaaaggacctcattcttaatttggttaaaagaaaaatataacaggattggaatatatttagctgggatattttagggcctgctagcactggaagccagagttcactgggagcattctgactaggaaggagaaatctcaatcagtttacacaaattcagggcatgctttaggggta

SEQ ID NO: 687097 - DNA, 811 bp, Homo sapiens
gaagcgcagcgggccgtaggagcggtccgctgagccttgagcgggccgcggtgtgaacatgagagctctaaacgccgtgtcccttgggttcatgccgcgcgccctagggccggcctcggtgcgggctgcgactagcgacgcgagtgagactgagctgtgcgcggcgggccggcgtgagcgcgttctcatggcgttggctgggacgatcggggaccctgctcagatctccgtcttgtggtggtagaggtgctggggcttcgaccagggatctggtgaggcttgaggatcattgttgtgcacgatttcgtaatactaatctaggttctgcctagcgagcactcgatgtgcatcgccaggttccctcggggttggtcgactaccgaggataggtacatggtcacctaagcagaagcgggttgctgaggggcctttcaggcttgggttattgcgcctcgaatcgttggcactggacgtcccgtgggttgcccgttgcttgaccctgtttgagccacaaggtctctctctgagccagcaagttgtgccattggaaacgggccaccagggaccccaaattggaagcgtggcgaactacaagtttgcgcacaagagtggtaaaccacctgtaacaagaggggaagagagcgccgatgggagatagtaccacccgttgctggtggtttggaacgcccattgtgatttacacgcgtggacggtttccattttgttgcggcaagatagttgccaaatacgttctcttctaattaccccgtggaaacaaatttacccatttgtgttacttggaacgttcgaa

SEQ ID NO: 687098 - DNA, 116 bp, Homo sapiens
tgggtctagaatccagatgtccccgatttctgcttgctgagagataaagtttttttcagtcaagggcaatatcagtcatcccgtgacatgtttggcttttgggagtttgcccagga

SEQ ID NO: 687099 - DNA, 901 bp, Homo sapiens
attatatttatgtgtagaactaatatatgaaataagtaagtgtagctcccacaaggtaaacttcatggtaagatgcactgttctgattatgtaagcattgtacatcttcttggaaataaaagataaaagagcgatacacaaagctttcttttctaacttttccaagcaaaatctaaaatgttttatgacatttgttctggctgtgatcttaaaataattcatatctaaatagtatttgtctaggagatgctttctctctagtagttagaaattaaatctgtgtcagcattcctattaatgtctcactttactttcaagtaatattggtgctatttaacattttacagtaaatgttacttctgatactttagtacaatttcaactacagtgattcatgtagacgagaccggggacgtttgttccctctggggtacttgagctactatgtgtcaatactactaaaacttactagctgctaccaaatttgaagatctctctaatatggtatgtaccacaggataaagttattcttgtcatttgaactgtagagtcctatccagtgtgatgactcactgtgctttgacacaatctcattattctgggccgggaaatggtggctcacccctgtaaatctcagcacttgggaggccaaagcggggtggctcatgaggtccaggagatcaagaacatcgggcaacatgtggataccccgtctttataaaaatacaacacatagttgcgcttgtggcatgcacctggtatgcaaacaccgggaggctgacaaggaaatgctgaaccgggaggaaggttcaggagccaaatatgcggaaccgcggcagaaaaattgttctcaaaaagaaagaaacaaaaaagggggtaaaaacaggacaacaacgcacat

SEQ ID NO: 687100 - DNA, 381 bp, Homo sapiens
attatagggcttctgcctaagcctctccctccagccataggcagctttcttaactatcctaatttctctcggaccaatggaacacagatcaagactcgcccatcaaatgccctcctaccatttgttactaaagggcattattgagtatatgctcaagagaaaccaccacattctggcagaatgctactttaacacgattagcatctatcagagtgtaggatgactctttaatcagagctcttatctattcagttacacaaaccagaaatccactacctttactattactcctatttaaccaattttcaagtcctgtaaatgcaacctcctaatttctctcggaccaatgtggtgacgagcgcggatacgtaatagtcatcg

SEQ ID NO: 687101 - DNA, 244 bp, Homo sapiens
aggggggggggggggggcccttttttccccccgttccccccggggtttttttttttgggggggggctttttcccccgtttttgggggccccccccccccccttttcccttttttttaaggcccttttccccggggggggggggggggcccttttaaaaaaaaaccccccttgggggggggggggaaaaagcgggtcccccttttgaattttgggggggggggggggccccccagggttcccaat

SEQ ID NO: 687102 - DNA, 421 bp, Homo sapiens
cccgtattaaccacaggccttctaagcatgaatgctgcatggcaatagacacaatgagcagaaagttagacggagcgacacagcgtgcgggatggggctcttcggaatatagactgctgccataaggcaagaaaaaatagaataggaaaggattttatcttgacgtcaccttattagaaagcgacgcaaactatgtgccagcagccgcgataatacataggtcgcaagcgttatccggaattattgggcgaaaagcgcccgtagtttttttgctaagtctggagttaaatgctgaagctcaacttcagtccgctttggatactggcaaaatagaattataaagagggtagcggaattcctagcgaagcggtggaatgcgtagatattaggaagaacaccaataggcgaaggcagctaactt

SEQ ID NO: 687103 - DNA, 478 bp, Homo sapiens
cgcttggtcccacaccacttctaataccgctcgaagcagccctgaggaacatcgcccattatctctccatactaccccccaaaattttcaccactccaacacttcaacactattttgttttatttttcttattaatataagaagacaggaatgtctggcctctgagccaaggcctgcatgtatacatccagatggcctgaaggaactgaagaatcacaaaagaagtgaaaatggctgattcctgccttaactgatgacattaccctgtgaaattccttctcctggctcagaagctcccccaccaagcaccttgtgacccccccgcccctgcctgccagagaacaaccccctttgactgtagttttccactacccacccaaatcctataaaactgccccacccctaacaccctttgctgactctctcttgggactcagcccacctgcacccaggtgaaataaacagctttattgctcac

SEQ ID NO: 687104 - DNA, 211 bp, Homo sapiens
  misc_feature (34)..(34): n is a, c, g, or t
ctggggtgcagcgctcgcgacgttttagcaaggncgagactaaggctggtcagtgattatggggaagagtcagggcccatcagaggaatgaagtggctaagggtgcctccagtcccaatagccacaagtgaattctgttgaaagggagttctagcatctcacaggccgaggggagccatcagatggagaccgaagtccagagagcgtcctc

SEQ ID NO: 687105 - DNA, 173 bp, Homo sapiens
ggggctgcctgtaggtacttgttttcggggttcggcagagatgtgtttaagctgctgtggccagaagcggggggagggggggtttggtggaaacttttttgttatgatgtctgtgctggaaacgcggctgtgcacgacattcaattgttattattactgctaacaaaaacaac

SEQ ID NO: 687106 - DNA, 399 bp, Homo sapiens
cctagaggatcccttatatgctgtctcatgatatgctgcctcagcctcctgagtaactgggattacaggcaccccctgccacacccagctaagtttgtatttttagtggagacggggtttcactatgttggccaggctggtctcaaactcctgacctctggtgatctgcccacctcggcctcccaaagtgctgggattacaggcatgagccaccatgcccagccaaagatcatttttttatatagacttcagccctttgtaaatattgtaactggggagtatagagtagaaaaaaagtataattaaaacatttgttctacaaattaacctttaaaaatataattactgctaaaaatagagtgctgttacacttaaggaaaattagtgccattttggaaa

SEQ ID NO: 687107 - DNA, 202 bp, Homo sapiens
cgtcgactgggtctcaatggaaacagttccgcccccttaggtcgaccttggaaatagggtaggagggcatttttagttgttccagtggccaggggtgctactggcatttagtggcctggagccagagatgctgctaaatgctcagtgcccagaacagccaccccacctccaagaattgtcctaccccaaatgtcgtcgacgc

SEQ ID NO: 687108 - DNA, 443 bp, Homo sapiens
  misc_feature (424)..(425): n is a, c, g, or t
  misc_feature (430)..(430): n is a, c, g, or t
  misc_feature (433)..(433): n is a, c, g, or t
tgggaagtcctcatggtatatatattttaagtgcaatggaatttttaaatttaaagatatagctttatgaattgagaaattaggcctagctgtaggctatgttacagaaatatagtcattgaatgatacagacatataaaggtagtagttgtctcattgttaattcgctgctgggagagcagatgagtcataccctataaggagtaggcatgccttgtaacgtatgtccccagagctgtcatttgcataagctgcaggccatagattcctgattccctcagtaactgaccgtacgacaatggagctgatccgcggcactctagattttcagggtagggcgcggcacccctgctttcaaaagattcgtgggaaagaatggttggaggaatgagtttcacttccaaaaaatgaaaaaaagaaagcnnggcgnccncccccccggg

SEQ ID NO: 687109 - DNA, 560 bp, Homo sapiens
ctcccggacgtaggtacgttgtggggccgggtactgaggcctgcgctgtctctgttagcttttccgactctagggccacgaatgcgcgccagtagccgcggagcctgggcaggaggttgcaggccgcggctgcgcggagaagctctgtaccttcgactgtacccatatgaaggctacgctgtaggcttactcaggaactatacggcatattctagatggcgaactaggtagttgttaacaatgtacagcacgatcgagctttagttacacaagcgtcaaggcatgtaaaacgacagatgtgacgtaaagattcccgacatgtacaagctaactgcgaccttactggtcaggcctaaaggcataggctccgcaactcgcttgaaccactggcaagacctgtggagtgaaatagggttgtgtgaaacactgatagcaccttgtgtcccgatggtaactataagcggacaggtaaacgctcatcgttttgggaactttcagccaggaaacagtggtttggtgaccaggaacaggtaactcttattggtcaatcgtaaagtgga

SEQ ID NO: 687110 - DNA, 1389 bp, Homo sapiens
  misc_feature (685)..(685): n is a, c, g, or t
gatcctgtctccgccagtggggtgtgcgcgctctctgatatgcggtgtactaccgaaaagggggagtcgtctgggaaaggagagtcatctattgtggtgcgtgtattgcaagggtatcttattcgagcaggatattgtgatagttttgaaacagaggcacatgttggcgcaagaaggagacagagagccttatgcttgtcaagagaatttacggagggtcatgtcagacctagtgatgatgtcatagtggcgtatctcggcgactacgcatgagtagggcatcgaaattccctcagagacgtaacggacggagctgagttggggaatcatcacctctgcgatcttgggggcatgtgggtagactttgctatgtgacaggagcaatgcttgttctgggtgagaatggcacgcatagtggtatagggaacccaggactccataaaatgcctttgggttgcccctttttgggcgccagtgtcggattggcaggttgtcagatggcgagagccccgaaataagaggcgaggtaaacgacacgaatccgtagatccccgtaggtgcccgttgcaggttggacacgtgctaggacactgcgataacgcaggactaaccgtaggcggatctcacgttggtctttgacaccaggggctccacacctacgcgtgcaggtatcggcaggggcaanagggcttttactcattgtccaaccgattgtgacatgtatggggtcttaggattttgcacactgaatgacaacagggttgcgcaacagggggacttattggaagaggaaatggaatttcagaagggcagaatgcctatgataatttaggggttacgccgtttaactaaggaaaaacgcttttaaacggtactccttgggacaagtggaccttagtgccagaacacgagggggttcgtaattggtgccttacgtgcgaggcggaagtatttggcacgaatgtcattggtgtcctggaacggggtcggaacagaaattgggcagacaacagagcccggattccgtgacgcccgctgtaaatacccgcaagtgtcgtggcccatgaggtggtgatcacacctgtgtggccgactttcgacatgcgtgaacgtgtaagttggcaagtggggaattacgagtggcggttaattaacagtgtcaaaagggggatctgttttggagaggaaaaagagcacatttcgtcaatgtgggacacagttataacacttgcttggagctattagacagttgggtagagacccacgggactgtgaaaacgcagatgagtatgacaagtgcgattggtcttcgcatgtagtgggggagaacaatgatgaggggacacagattaatcgttgtggcacattttggtgatacactgtgaagac

SEQ ID NO: 687111 - DNA, 1105 bp, Homo sapiens
  misc_feature (367)..(367): n is a, c, g, or t
gccctttcacgatacgtcgggatctcccgatcccaggtgtgtgacctggtactcgaatgccgtttggcgactcgcgtctctcgagtcttctgctccgtgggcttcttccctgtgccggccggggaccctgatccgtgggcgttcttccccgtgccgtgactctgcgcagtccggcgggcgccgcaagaatgatgcatggcggcgtcgggggcgcgcatggtgcggggagacggggtgctgggcctgagaggcgtgtcggtcggacaaaaggcagtgggacttgggaactagtctgctgtggcacggccatccgtgcccctggacgtatgacaggactcgagagccactagttcgacctgctatctanctagttgaatacctccggtacctatacttttccgtcgcttatccacggccaattgcggcttttcctcactgttgggggcgcgtctgttattgtagcccttgacaccgaagctaggcgagcttgggctacttttgccacgggccctgggacatgttctggtgggggcccttagcgcccctgtgtgtggcccgcaccaaaaagtcgcgccgggagccccggtatgaggcttggaggcctcgctaggcgcacgttcaccaagaatttggcccacgaacgctcgcacgcaagggccaatggtacccggaggaggaacaggtggcggcgtcgttttcacctatagtgcaatgttaactaggaaccttattgcaaggaaccccagtccccgggcgaaaacagattccgtgaacatgaggcctaccgagacgaaccaggaattttccttagccggtttgccggagagtttgtcagaccgaactgggggcccaattggccgggagtaactgtgggaaaaaccatttggcaccggggttgaccgaggattggaggcttggggcctttaggtgccaaggccaaaaggttagttatcttccttaagccaagggcaacggctggcaaaccccagtttggacccccgggttttccccttaaatatgggtcccctttggcccggcgaaagggcacaggccccttgggggaaccaccaaagtgggccattggcgcatttgaaaggcctggccc

SEQ ID NO: 687112 - DNA, 276 bp, Homo sapiens
agcccaggaattcaagaccagcctaggcaacatggcgaaaccctatctctacaaaaactacaaaaattagccaattaggtgtagtgacgcatgcctgtagtcccaactactcgggacactgaagtgggaggattgcttgagcccagggaggtcgaggctacagtgtgccatgactgctccactgcactccagcctgggtgagtccctgtctcataaaaataaaaaataaaaaggtgaagtttatggtaaagtgtatttcaataaagctgttatttt

SEQ ID NO: 687113 - DNA, 435 bp, Homo sapiens
  misc_feature (54)..(54): n is a, c, g, or t
  misc_feature (177)..(177): n is a, c, g, or t
gagcgggtactccaggtgccaggctccgccccgcccctgaacggcgctttccgngatccggcgggtgccggaagtgggcgggcggcggctggctttgctgcggctggacgtgccggttggacgagaccggtagccttgggggacgcccaagccctgtggcaacgtccccggccttcnccgtccccccccccggaaggcaaaggggaaagccccgggctttggccggaacggcggaacgggccaaacggacacaggcccagacgcgggttttcctcggccggtgtcccccctgctggcaacaggtcccggggggcgcgaaaggccctggggggcccctttttggacaaacagggcccgggggggggcgcgcccccccggggacaaacagagcgcccccctttttccccccccctggggccccccccaaaaacttcg

SEQ ID NO: 687114 - DNA, 345 bp, Homo sapiens
gaccagtagcgtgatcagagctatctcccgtactgtgccgcagcctacccagatcacagacgatcaggtggctccatagattccagtggagtgaacaatcttagggcagatagaacctggcggagataccaatgccactgaaggcacgaatatttggtggcaaagaccgagcgggcactattgtaagtggcagtgaggttttgtggaaagatcaactgctagccgggaagacattctgattctcactcagtcctacgcacacaagagcctctgactcctatagtgaatacgttgcttatcgcgtccatgtggatggctaccttgctctttccaccttacaggctg

SEQ ID NO: 687115 - DNA, 106 bp, Homo sapiens
tctcgggcgactgccaaccgccaaacgcagctcggtggggatgtacctattaagctcatgaaccatagaggtatctcggtggcccctcattaccatatgctgttct

SEQ ID NO: 687116 - DNA, 281 bp, Homo sapiens
cacgaggtgaatggtcaaatgttacttcatcacagtatgactggcgtcagccactactaaaagctgatgaggaacctcttaaccttgattggggtgaagatcaagacagtgccttagatgacgaggaagacgatgctgttggtttagcgatgaaaacttcatatgacatggaaaaacgataaacaatcatatcacacggcctcagaccctaacatgttacctaatacctcaggaagaggatgatcctgaaggtgatactgatgttgactgtgcttgctgcc

SEQ ID NO: 687117 - DNA, 827 bp, Homo sapiens
ccctgggaataaatgccaagccctgacagaccacctgctcacggcaggctggcctgcagactttgtgtttgctagaaagagcggactctgtgacgaggcccctcggcctcccaagaaggccatggactactcgtctgtccagcagaggagtgtggaaatggcagtgagtgactgacggatggagtgaatggcgaatggctgggtgccaagcatgatgtgtgtgtatgcatgagatacccctgtggtggcctgcagcgatgggtgatacatgacatgctgtcaggcaaccatgtgtggtccacagacgtcgaggagatcacctggtgacccaggccccatacggggtgcggcaccatggttggtccagctgcacccctgaagaggagctggaacctgctgcattgcttgacagagaatgggtacacaaacctgcctgactgtggtccagcccagacactcacccaccgagaacagcaaaaggccaaaagcccaccctcgaaggctgggagtggtgactaaccagttctcgtggggctggtacaaggccccttggactatagctcgttcacggatgtttgtggatctaggggatctaccagacctgtgaggcatgaggggggacaagctttcacccaatcacagcacctagtgaatgacggagggacaacacgggtcgaccaggcttacgttctgacgagaggaagggtacatgtggacaaagtgaaatccaacaaacccgggcccattgtagacccctgaaccgtaagtacacacggatcaatcggggatgcgtgcagctatgggggtacctcatgttgtccgtaacg

SEQ ID NO: 687118 - DNA, 840 bp, Homo sapiens
agggatgatgttactgtgccgagtcggagaaccgacgggacgagattatctgaattcttggtgaaaggtggatcacctctcccttaggccaactgtcaagccttaacctgatcctcataggcagaatgacttcttttaacttgtcatccctttgtaatatatgtagacatgtccaagtatatagtagtatatggatattcttaacgctactttctagagggcataattgtaaagaagggcgtcatgagctagatgttcacccaagatatactttcagcaacgaaggtctaggactagacgaatgctgatatgagaacgggaagtgtggtatgtacttggtgcgcaccagagaggtctgtgcgcagtcaaatgttaagcaaccgatgtgggatagttcacaaagtctgtccaagcaccgatggtgcttaattggctactacacagttggaaacagcctatcgttgaagatcaccctgcattttatgcttcaaggaacactgtgatggcttgctaggttctaaatatatctatacagtgtggtatctatgggatatcaagttgcccctccgatttacttcagtgaacgccgttaaaagcctttgggggaaggtaccacagtgagcagtaacacgatcttttcacacggttgctggagaaggcggacaatccccgcacagtgtaaacagctcaagtcatttaaggaagatatacaggatgaacacaattataggaataaagagccattataatgcgcagatatgggacaagggccttggacaagaattagatctaagtatggcgacatgatttcaaaggtagggccaacgaggatgaaggtgc

SEQ ID NO: 687119 - DNA, 498 bp, Homo sapiens
  misc_feature (74)..(74): n is a, c, g, or t
tccccccactgggttcgagttcagtgaggcacagtgtcggactatggtttatttagttggagtcggggggaggncaggggtattttcagataatggattttatcccttagagcaaaatctattagtctctctcagtttatcaatttaaatggctttaggcttatagggggtgtaaactttaagaatataattctcccattcaagtttacagcaaacatctagccaccttcaaaacaaagaagatacagaccatcatttagcaatactaatacatgattttccttggggatggcaggtttgagaatcctttagcaacaggacatacttcccctaaattacagtgaattatttataacgagataaagctttcaggtacaagctgaaggtggggtgtctaacaactaaaaactatcactaaatctcaaagagaaagttcttgcaaaatatgtaaagttcacaaggcgcagacattttccttctttaggcttttatctaagg

SEQ ID NO: 687120 - DNA, 199 bp, Homo sapiens
taatttaattgccacagaacctctaatccctgtaattaactgttagtcaaagaggacagctctttggacactaggaaaaaaccttgtagagagagtaaaaaattaacacccatagtaggcctaaaagcagtcaccaattatgacagcgttcaagctcaacacccactacctaaaaaatcccaaacatataaccgaactc

SEQ ID NO: 687121 - DNA, 248 bp, Homo sapiens
agagatctcaacacgactcacacgatcacagtctgtgttcacacataattgtagtaaatgatgcaacggcagtagatatagccactccagaaggtaccagaccgaagttagggtaaatagtaaatacaatacctctggtaagttaatcatcagttaataaaggtcatatatctatcttctgctggtgacaacttgttgtctcagtatagtctgtctcaagaaagaactggttcagattgcggtgtttg

SEQ ID NO: 687122 - DNA, 931 bp, Homo sapiens
tgtcctattttggcgtaagaaataatggaaactcagagaaatggaatgctcttgcctctagtgtgtcaaccaggagaccatgaactttctaactcatgcatgggatggactggtcatagtccccgtcctactgtccatatgtcaatgtaagcttggctaaggttttatttctgtctatagtacaaatcaggagcactaatgtgctcaatgaatgtaatgcagactagaagaggtgtttaggcgagagactattctctccatcctcattcacaataatgttacaatagttgtgtgtatggtaacgttactatatgtaaaatcatgaaagtggtaagttctagtagatcagacaaatgtgtttccattgatagggcatgccttggctcatggaggctgtcttcgtatcaggctgttaatgaagagacatcatgactacgatgaaaactagagtacatgatatgaatgtgggcataattactgaggagaatgaatactgtggacaggaatttaaggtataaaaatacagttttttggaatgttaggattataggttagatgtctagtattcattttgtagggatgcaaaggtgtgatcaaggttgcaagtctaaagttccttggaggcaaggttctgggacagctaaactgtttgaatcatggcatattggatcatgctaatacttactttaggtaccccacagaacggaggtaaggggcgggggggatgccatgaggatggcacacggaccccggtaccgtcaaacgggtggacgaaccaacgaaaaaagggtgacccacaccgaaaaaggaacacaacagaacaaaggccgaagggctaaaaatcacaaaaaaaaaaggcaacacgcgacaacagaaaagagcgaaagaaggacaaggagaaaccagagaaacgcggacaccctacaacgtg

SEQ ID NO: 687123 - DNA, 908 bp, Homo sapiens
  misc_feature (885)..(885): n is a, c, g, or t
  misc_feature (887)..(887): n is a, c, g, or t
  misc_feature (889)..(889): n is a, c, g, or t
  misc_feature (893)..(894): n is a, c, g, or t
gctcttgcgctgtcctgttaatggcgggcagtagccgctgaggggatgcagataaccgcttcccgcacggggaaagtctaccctgcctgccactttctgctcgccgtcagcgccggagctcgccagcatgtctgtggtaccgcccaatcgctcgcagaccggttggccccggggggtcactcagttcggcaacaagtacatccagcagacgaagcccctcaccctggagcgcaccatcaacctgtaccctcttaccaattatacttttggtacaaaagagcccctctacgagaaggacagctctgttgcagccagatttcagcgcatgagggaagaatttgataaaattggaatgaggaggactgtagaaggggttctgattgtacatgagcaccggctaccccatgtgttactgctgcagctgggaacaactttcttcaaactacctggtggtgaacttaacccaggagaagatgaagttgaaggactaaaacgcttaatgacagagatactgggtcgtcaggatggagttttgcaagactgggtcattgacgattgcattggtaactggtggagaccaaattttgaacctcctcagtatccatatattcctgcacatattacaaagcctaaggaacataagaagttgtttctggttcagcttcaagaaaaagccttgtttgcagtccctaaaaattacaagctggtagctgcaccattgtttgaattgtatgacaatgcaccaggatatggacccatcatttctagtctccctcagctgttgagcaggttcaattttatttacaactgaattcctgcgcagtggagaagtaaaagaagccgcttgtctctgtgagcacagctatatacagtgtagaataaatntngntagnnaagttaaaaaaaaa

SEQ ID NO: 687124 - DNA, 384 bp, Homo sapiens
  misc_feature (12)..(13): n is a, c, g, or t
  misc_feature (361)..(361): n is a, c, g, or t
  misc_feature (363)..(363): n is a, c, g, or t
  misc_feature (365)..(365): n is a, c, g, or t
  misc_feature (369)..(370): n is a, c, g, or t
gatcaaaaaganntggaggagttggagtaagattaatggctcccatattgtttgtgattttatagtaattgtttttctttgtgttgtctgcacatattacaaagcctaaggaacataagaagttgtttctggttcagcttcaagaaaaagccttgtttgcagtccctaaaaattacaagctggtagctgcaccattgtttgaattgtatgacaatgcaccaggatatggacccatcatttctagtctccctcagctgttgagcaggttcaattttatttacaactgaattcctgcgcagtggagaagtaaaagaagccgcttgtctctgtgagcacagctatatacagtgtagaataaatntngntagnnaagttaaaaaaaaa

SEQ ID NO: 687125 - DNA, 320 bp, Homo sapiens
  misc_feature (16)..(16): n is a, c, g, or t
  misc_feature (37)..(37): n is a, c, g, or t
  misc_feature (95)..(95): n is a, c, g, or t
  misc_feature (300)..(300): n is a, c, g, or t
gtaactcataccgttnttgctcggtaatcaccgtcantaatacggaacggccttcaccggtatagccaccacgtgcatcattaataatggtcacnccacggcgcattttatcataaatgccttgcaccatttcatctggtttggtcgtaatgatcatgacctgcatttgctgctgacgggtataaaaggcatcaatcatgcgtgaactgacaatcacaccaacaattgagtacagggcgtatttccaaccgtaagtcaaacccgccccaatcataatcagtgcgttaaagccaggattgnccggtcctatcttaagccaa

SEQ ID NO: 687126 - DNA, 262 bp, Homo sapiens
tcgatctcatagcaggatccccccggtaaatgtgatactgtgagcgcagaggcatctacagtctcatgagactgtgtgggactgagagtgccttcagttcctgcaacacggaaggaaagacacatgtcagtcaaagcctcgtgttgtgttgaaccgtgaagagactagatgaaggatcacaacaattcaactcccatacttctgtccatacagcgtggtagaggtattctgaagaccttatcccgtgaaactgtccaccaga

SEQ ID NO: 687127 - DNA, 394 bp, Homo sapiens
aaggggagaaatggggcttattcagatggtcctccctaaatggacagatgagtccagagttcctactgctaaaagtagttactctgcctccccttaaaaaggaatggcgatggccgggcccggtggctcccatccgtaatcccagccctttgggaggccaaggcgggcggatcccgaggtcaggagatttagcccatcctggttaacatggtgaaaccccctctttcctaaaaatactaaaaagtacccgggcatggtggcgggcccctgtagtcccagctactcgggaggcttaggcgggagaatggcgtgaacctgggaggtggaacttccagtgagctgagatcgcgcccctgcactccagcctgggggacaaagcgagattccgtttcca

SEQ ID NO: 687128 - DNA, 716 bp, Homo sapiens
  misc_feature (693)..(693): n is a, c, g, or t
  misc_feature (695)..(695): n is a, c, g, or t
  misc_feature (697)..(697): n is a, c, g, or t
  misc_feature (701)..(702): n is a, c, g, or t
gctgaagcctgcaagcattagtgtgtcgctcccattcaccgactttccgaggtaccctcttaccaattatacttttggtacaaaagagcccctctacgagaaggacagctctgttgcagccagatttcagcgcatgagggaagaatttgataaaattggaatgaggaggactgtagaaggggttctgattgtacatgagcaccggctaccccatgtgttactgctgcagctgggaacaactttcttcaaactacctggtggtgaacttaacccaggagaagatgaagttgaaggactaaaacgcttaatgacagagatactgggtcgtcaggatggagttttgcaagactgggtcattgacgattgcattggtaactggtggagaccaaattttgaacctcctcagtatccatatattcctgcacatattacaaagcctaaggaacataagaagttgtttctggttcagcttcaagaaaaagccttgtttgcagtccctaaaaattacaagctggtagctgcaccattgtttgaattgtatgacaatgcaccaggatatggacccatcatttctagtctccctcagctgttgagcaggttcaattttatttacaactgaattcctgcgcagtggagaagtaaaagaagccgcttgtctctgtgagcacagctatatacagtgtagaataaatntngntagnnaagttaaaaaaaaa

SEQ ID NO: 687129 - DNA, 192 bp, Homo sapiens
aagtcgagctctgtacccccctcggcactgggagatcgcgggcgtcccgtgccgtggactggacgtacttccccgacgccgaccccgcctttcctgccgacgtgactgcccggatctgccagctggcagggaccgacggcatcctgggcaactgccacgcatcggggacgcaggtcatcgacgacttcggcg

SEQ ID NO: 687130 - DNA, 1175 bp, Homo sapiens
gctcttgcgctgtcctgttaatggcgggcagtagccgctgaggggatgcagataaccgcttcccgcacggggaaagtctaccctgcctgccactttctgctcgccgtcagcgccggagctcgccagcatgtctgtggtaccgcccaatcgctcgcagaccggttggccccggggggtcactcagttcggcaacaagtacatccagcagacgaagcccctcaccctggagcgcaccatcaacctgtaccctcttaccaattatacttttggtacaaaagagcccctctacgagaaggacagctctgttgcagccagatttcagcgcatgagggaagaatttgataaaattggaatgaggaggactgtagaaggggttctgattgtacatgagcaccggctaccccatgtgttactgctgcagctgggaacaactttcttcaaactacctggtggtgaacttaacccaggagaagatgaagttgaaggactaaaacgcttaatgacagagatactgggtcgtcaggatggagttttgcaagactgggtcattgacgattgcattggtaactggtggagaccaaattttgaacctcctcagtatccatatattcctgcacatattacaaagcctaaggaacataagaagttgtttctggttcagcttcaagaaaaaggtaagttattttgttttcaaaggtagccatctaaaaattctgtagaataatttcaaggatacctctatttgtgttttctcaaagttccttgaacttttgggtttattgtaaaactaaagatgtataccatgcttttagtttcaaatctgtggctaggaaatctaccttgaaagacacaaccaaaatgtattaatgagaattatcttttttcttacactttttattaaatgtaaaattggtaatttatattttagccttgtttgcagtccctaaaaattacaagctggtagctgcaccattgtttgaattgtatgacaatgcaccaggatatggacccatcatttctagtctccctcagctgttgagcacgtacagaaagttgaacattctttgggtcatccatattaactgtcaaatttaacatattctgagccacttgtgaaggtatagttcatgaattatgggctttaacgaaactaagaaagtagatagactcttaga

SEQ ID NO: 687131 - DNA, 562 bp, Homo sapiens
  misc_feature (422)..(422): n is a, c, g, or t
  misc_feature (459)..(459): n is a, c, g, or t
  misc_feature (480)..(480): n is a, c, g, or t
  misc_feature (512)..(516): n is a, c, g, or t
  misc_feature (518)..(518): n is a, c, g, or t
  misc_feature (520)..(521): n is a, c, g, or t
  misc_feature (524)..(524): n is a, c, g, or t
  misc_feature (526)..(526): n is a, c, g, or t
  misc_feature (530)..(531): n is a, c, g, or t
ctgtcttcccagcacaacgaacaaacttcgtaattgagcatcgatcttatcaaactcttttttcaaggactttaggctttgggtattctcatacagctcgttcgtatatgccccacagagcaacctgccaattgtatctctagtgtctttttgctcaaactgctcaaacctaaagatttcatcaacagggctcaactgatcagcgtaaagcaaacgcagaacctgatgcatcgtaatattgcctgaaatctccagagaaacatcaggcattccgagtaatctgaacagcgcttgagaaaaactttcggtcgttaatgagcgacggtacggatatctattccatgcattagccggctgctttaaagatagttcatatgcgccactaaatatatccatcggagagccagccgttttggatatanccctagccaaagtaacaaccataccattaagctcganctctaaatagacacgactgcnaagaagcgcagcagtgctccaatccgtgagannnnnancnntcnanagtnnataaaattaagtatggtagactttccgtatg

SEQ ID NO: 687132 - DNA, 793 bp, Homo sapiens
  misc_feature (770)..(770): n is a, c, g, or t
  misc_feature (772)..(772): n is a, c, g, or t
  misc_feature (774)..(774): n is a, c, g, or t
  misc_feature (778)..(779): n is a, c, g, or t
gctcttgcgctgtcctgttaatggcgggcagtagccgctgaggggatgcagataaccgcttcccgcacggggaaagtctaccctgcctgccactttctgctcgccgtcagcgccggagctcgccagcatgtctgtggtaccgcccaatcgctcgcagaccggttggccccggggggtcactcagttcggcaacaagtacatccagcagacgaagcccctcaccctggagcgcaccatcaacctgtaccctcttaccaattatacttttggtacaaaagagcccctctacgagaaggacagctctgttgcagccagatttccttcaaactacctggtggtgaacttaacccaggagaagatgaagttgaaggactaaaacgcttaatgacagagatactgggtcgtcaggatggagttttgcaagactgggtcattgacgattgcattggtaactggtggagaccaaattttgaacctcctcagtatccatatattcctgcacatattacaaagcctaaggaacataagaagttgtttctggttcagcttcaagaaaaagccttgtttgcagtccctaaaaattacaagctggtagctgcaccattgtttgaattgtatgacaatgcaccaggatatggacccatcatttctagtctccctcagctgttgagcaggttcaattttatttacaactgaattcctgcgcagtggagaagtaaaagaagccgcttgtctctgtgagcacagctatatacagtgtagaataaatntngntagnnaagttaaaaaaaaa

SEQ ID NO: 687133 - DNA, 883 bp, Homo sapiens
  misc_feature (655)..(655): n is a, c, g, or t
gggaatgaagtacgaggtgggtgtggttggtggtgatgatgactatcttagtgctggataatggagcttacaacgacaaaatcggtgacagccatgacatatgtgtcgggtattcctaatgtcagttcccggtcacaaagagcacgtcttaaaacttttagctggcaagccagatagatgaaataccagagacccttctggactcttttacatcctcccttttcaaaagggctacttggtgaatcgggatgttcagagacccagttgggattacctttctggcacccggacctgtatcaggtgatgtcttagatacgtaagtattattatcagcgtgaaccatagtttaagcttgcgacttcaattacaagaatctaatgaattgaaagttctattggaagaatacctagtttccgggcagtattaagagtaaaatgcgtggggctctccagggcacataggtatgtccgagataatccttccgaattatgctgtatcatgtagataggggatattcctttagggacatatagtaccttatggtagcaggtcaacacgacagaaggaagcaatattcggataaacgtggggaggaaaagcacttaagcaatcatctgaaggagaccatatctgcacagggcgctactgtttggtngcacccgccttgtgatttccccagtgacgcacagctggcacgggttcccacgatcccccagacggcttggcaagcgcaagggagagacaacgcatgttcacgtgggcgccgactccgaccacaaagggccggacccggcacagggtccggcaacacctcggcacaccgggcgcgcaagggggcgaaacccacccagacgaacaggaccaaggcgacaccagagcatca

SEQ ID NO: 687134 - DNA, 974 bp, Homo sapiens
  misc_feature (963)..(963): n is a, c, g, or t
  misc_feature (968)..(968): n is a, c, g, or t
gctcttgcgctgtcctgttaatggcgggcagtagccgctgaggggatgcagataaccgcttcccgcacggggaaagtctaccctgcctgccactttctgctcgccgtcagcgccggagctcgccagcatgtctgtggtaccgcccaatcgctcgcagaccggttggccccggggggtcactcagttcggcaacaagtacatccagcagacgaagcccctcaccctggagcgcaccatcaacctgtaccctcttaccaattatacttttggtacaaaagagcccctctacgagaaggacagctctgttgcagccagatttcagcgcatgagggaagaatttgataaaattggaatgaggaggactgtagaaggggttctgattgtacatgagcaccggctaccccatgtgttactgctgcagctgggaacaactttcttcaaactacctggtggtgaacttaacccaggagaagatgaagttgaaggactaaaacgcttaatgacagagatactgggtcgtcaggatggagttttgcaagactgggtcattgacgattgcattggtaactggtggagaccaaattttgaacctcctcagtatccatatattcaaatacaaggccgggcgaggtggctcatgcctgtaatcccagcacttcaggaggccgaggcgggtggatcacctgttgaggtcaggagtttgagaccagcctggccaacatggtgaaagctcgtctctactaaaaaatgtaaaaatcagctgggtttgatggtacaagcctgtaatcccagctactccggagctgaggcaggagaattgcttgaacctgggaggcagaagttgcagtgaaccgagattgtgccattgcactccagccctggacaacagtggagactccttctcaaaaaataaataaataaataggaacaaatacaaaagaaggagagaatgggtaaaagtgnatganttgccg

SEQ ID NO: 687135 - DNA, 442 bp, Homo sapiens
  misc_feature (162)..(162): n is a, c, g, or t
  misc_feature (186)..(186): n is a, c, g, or t
  misc_feature (246)..(246): n is a, c, g, or t
  misc_feature (313)..(314): n is a, c, g, or t
acttgggcaagagtcttctgagggagtccacatttttaagttggatatatttaaattcgggacccaaatggaaggccgctgagacagcctatgattttagagcagttaaatttagtgaaacactggaaagaatcacaaatagagacaacttttgggaagagntctgcaggaagatttgcccaactnccccgcccacgaaaagttctctgaagggagacaaaaagatgggacgtacacaaatagccnggcggaaagagccacacatctccacatggaaacatgagagttgagaaaatcctccaataagccaacnngccctgagcttcctgggtctctagactcgaggaagggaatttttcaataaaatatttcatacacagagagagtcaaagctgtcacaatttttaatttatccatcacaaaattcaacacgaaaaaaagg

SEQ ID NO: 687136 - DNA, 551 bp, Homo sapiens
  misc_feature (298)..(298): n is a, c, g, or t
  misc_feature (320)..(320): n is a, c, g, or t
  misc_feature (335)..(335): n is a, c, g, or t
  misc_feature (337)..(337): n is a, c, g, or t
  misc_feature (339)..(339): n is a, c, g, or t
  misc_feature (350)..(350): n is a, c, g, or t
ggagtttagttataatgaaattgatttgtagtctgttttgccgtaaacttgtttgtctttaaattgttcttacagtgatatcttactatttttaactgtctggggtttctgatatggggatttcagcccctggttaatcagtcttgtccctacaagtccctgatgcagtatgtttatttgtgatgtttaaagaacatttcttggctgggcgctgcggcttgcgcctgtaatctcagcactttgggaggctgaggtgggtggatcacctgaggttgggagttcgagaccagcctgacanaaacatagctggaataccccgntactcctaacttaanananacttaccaaanacaaactctaagctgggggcgtggtcggtgggttgtccctgtaatcccaagctattcgcggaggctgaggcaggagaatcgcttgaacccgggaggtggaggttgcagtgagctgagatcctgccactgcacttccaaggtccatggggggttgacagagcaagactccatctcaaaaaataaattacaattacggaaaaa

SEQ ID NO: 687137 - DNA, 275 bp, Homo sapiens
gtccacccacctcgtcctcccaaggtgctgtgattacgggcgtgagtcactgcgcccggcgactgtctcattctgtctggcccgctgacatgtaagacatgcctttcctcctcgttcaccttctgccgtgatcgtgaggcctccccagccacatggaactgtgagtccaggaaccctcttttgtttataaattacccagtcttgggtatatgtttatcagcagtgtgacaatggactaatacagggggacagacagacagaggcaggacaagcag

SEQ ID NO: 687138 - DNA, 842 bp, Homo sapiens
  misc_feature (169)..(169): n is a, c, g, or t
  misc_feature (176)..(176): n is a, c, g, or t
tcaccttccgttcctgtggaaaaaactcccccggaagtgttttgaagaaacacttttgcccacaagtggttccccagggccttttgtggcctaactccgtctgtcaactcggatggctgcaaaaaaccttgggcaggcacacccatgggcagtaaacacttgttctggncccacgnccacgcatttctccaagtaagcgaacacaaagtgtaagtgcacacccggcaccaccactggggcagacagaggagggctgacccccccttatgagtgggagaacaaattgaagagggggtacaccgactcgtgccacgaagccacagacacattatggagccatcattacctccacttctgggaaaatatcttagaaggagtatgaccacaaaactctacgggggaccatttgtttctataaccgccggaatccacacaggtgcgcaaacacattatataggttgccgtagataattgcatgcacaccttgagaaactataaggtggactctattaaacaaagcacactaatggcccaccgggaccatttttaatagactcggaatatgggtgttccttgcagtagggtaacaacacgattgaactagtaacacttacagggcgcgctgcaatactgaaggagagcgcttttttaacccccttgtaaaacaaggtgcagcaaagcgaaacgacagctggggtaacccacatagccctggagaacacgcttttggttggtcctcctacaagaggaaggggcgcacttcatcatccacagaattcatgctggtgggccccgcataaattcgttacaatcaaaaaaaaccagatcttctggaggacgaa

SEQ ID NO: 687139 - DNA, 315 bp, Homo sapiens
cagggggaaaccgtgtctctactagaaatacaaaaatcagccaggagtggtggcacaggcctgtaatctgagctactcaggaggctgaggaacgaacattgctcgaacctggaagccagaggctgccgtgagccaagatagtgccactctgctccagcctgagtgacagagtgagactgtctcaaaaaaaaaaaaaaaaaacccctcccaaaaagaagccctaaaggtacccgtaatgcagcaagcaataagtaaggtttggtatgtgtgtggaatataatgccgccagacagagctcttggggaggagactgcc

SEQ ID NO: 687140 - DNA, 167 bp, Homo sapiens
aattacgagatctacatctagcttagccatgagtcattaccatcccatgctgtgccactgtggtggccttgacatagccctcagcgatagtaaagtgcatggtgggcacgacgccactcaagccaagtcccaggaacacgcctgctcttgtctgccggtgaaattct

SEQ ID NO: 687141 - DNA, 1231 bp, Homo sapiens
cgcagaccagacttcgctcgatactcggtgcgccatcgcttcgcattttcctccgcaaccatgtctgacaaacccgatatggctgagatcgagaacattcgcatcacagtcgcacacactgcacgcacagcacagcagcacgccagcagcaaaaaatccactgccttcccaacgcacaacgatggcacccaggcagaagcaagccaggcgcactcgtcactgcaggcgatgcggcctgacacacctatgcagctgataacagtttcacagcaacgccactaggcccatatcatttacttattagcattacgtattatagacctggttttaaaccatatagctaacagacatgccccaacgcagggttgtgggactcacacgtttatacccgtgcaactggtggctggccccccctgattccaccagtcaaacgaaaccatcacttgcaccaacgcgcacagggaccgacgtcacctggaccatatgatccacaatcgtggtcctactcctactctgggctgggccaggggacccggaaacgcaaccacttgagcactggctacggcgttgcacccggaccgcacacgtggagagttgggcccacgacccaagggcggaacgggcgaccggacaaggatgaccacagtcctacaggacttacaacacccaaaccgctgggaaccccacaggggtggtcccctggcaagggcaggtacaagtggcaccgacaaacactacacggacgttgccaccgtcataagcaagcagcacgggacacacacatttgacatactgaccagacgactagcggcaccgtgtgcacaacaaaaacaactaaagaaacaggcccacaacacacaacacacctgcaacacagacacacacaaaaacacaaaagcacaacaacaacaaaacaagacaagaacaacccacacgacacacacgcgaagcaaccaaccgaaaagccacacgagcaaccccactagaaagagcaagagcagagaaccagcgaagaagcacagggacagctagaggaagaagcgcggtcaccaaagaagacacaagaaacacaaaaaacagagagagactagaacaaccacacaaccaaacgaccagcacagacaacaaacgacactcggcaacaaccggacgagagcagagatagcaaaccagacaagaaataaaagagtcgacaagagagccatgcacaccaatcacaccacagagataa

SEQ ID NO: 687142 - DNA, 509 bp, Homo sapiens
  misc_feature (23)..(23): n is a, c, g, or t
  misc_feature (93)..(93): n is a, c, g, or t
  misc_feature (99)..(99): n is a, c, g, or t
cctagaggatccgtatagagcantacctcacaagcttcttagtcatccttaggtgtctttgacatgcatccctgctttacatgctctagtgtnccttcncagggcttttgtcggccccacgtgggcagccagaatgttggggtgatcagatccaacaccaggccttggggcaacgaagtctggcagagtcaaaggaaagagaaaagacagtttgagagagaaagtgggtccaggtggccaacgcaagtatggaggctgtgaaggccctgagctctggaagcccagactatttattggtggtcaaacaaagaaacaggtggtgagaatgtgtgggtcaaaagggcaagcacatgatctacagctgtgatagtttagcatttcctttgaagcatatggaacatattctgctacttgagataatagggagcatgttcttccagtttaagctagaagcaaggagccagcaagtctagactcattccagaggccacgaggggtatggctctgat

SEQ ID NO: 687143 - DNA, 226 bp, Homo sapiens
  misc_feature (73)..(74): n is a, c, g, or t
gctcttttgtcacattcggcttgctcctgctgccccacacacactaagcccaagccatacttccgggtggacnnccttcccagcccaactgttgtattttcagttcttccagtgtgaatcagttaatattctcgggaacgagggagaggttgatcctattagggaatcaaccacagtgaaaaggctttggccgctttttgttttcgcgctcctctttgttgaacac

SEQ ID NO: 687144 - DNA, 752 bp, Homo sapiens
gggaacgcgcaggctagccgttggcaggcgcaggtccgggagctcatggcggtggaaggatggaatgacatgtgtgaagttctgcgtctacgtgcgtcgctgtcgtggccttttgcggccgtgtgcacgctgtggactgattcgccgtgggtgtcgggggacagcttgttcctgagtctgaccatattccagggggcatacccgctggctctctgctgtgccatgtggatcatcaatcgcacgctgggtgtctctccgtcgttcctggtggctttttgtgggctgctgcggggtcatgccaggatgaacctagttgtcttactgatcaacggtttgccgactctttctgtctcttattcatgttgggggacggtggccgccggccatgtgtctggctatgctgttctacgagactacaggtgatgtccaggaagtttacataacaagacttcacggcagcagactggaagaacttacccgaacaaatcaatccatcagcatgcttcgcatcctggagcaggagtgcatggcacgattgttaacgtgcgtgtgcgggcatgctagactacgacgagattggagaggaaacatcgcctgtccagtgtcgcatagcagccgagctccctcgacgtcgctgctggcattgaactgtttactggtgcggcatgtcgaggatgtacttgtcatacgcagcaaagggcgatgccgataatggacgggctcgtgttgcgcgacagatccgggcggctgag

SEQ ID NO: 687145 - DNA, 130 bp, Homo sapiens
  misc_feature (82)..(82): n is a, c, g, or t
tgagcccatcttggatatgaaggaatgtccccagcaaggtacatatattgcatacatcctctgacggcaaaaagagtatgtnataaagatcccattttttcccttgtgtgtgggtctagcctaacgtacc

SEQ ID NO: 687146 - DNA, 457 bp, Homo sapiens
accctggctgttcaagctgacacgtcggttgtgacgtacgaacagactgcgtcccagatgagtttccaggcttttgacttgatggctgattgcagaaggagtcaggtgcagctcatcggctgccaggctgaaactctccagccgggcggccgattcaaaggctcgtagccaggcgaaattagggatggctcgcatgagggtgccttaaacaggtgaatatttttaatcaatagctgaaaaagcttcgtttgtcattcatggttttcgacctctaccatggttttacgtttcacccgtacgctgcgctggatgggctggcgtgcgggcaacgcaacatcttgccgaacccgaaggagaccttcccatgaacgctaaacccgatatcaatgaaattttggccatgacgggccgaaagtcgatttatcagcccgaacagcaaggcctgatctgtcgacgc

SEQ ID NO: 687147 - DNA, 326 bp, Homo sapiens
gtattaccagttgtaaaaagtatagtaactataccttttgaaagactttcctccccatctaattaggactaaatagaaccatctcttagaagcaccatctatcgatagtcccttgcccacattcttaagtatctgctagccattatgaggaaatcagtgtactttatgttcttagctcccacaatttagcctaaatatttgccctggcatgcttataccggtccaagcaagcattagctcatagcgtattcctcttccttatttaaaagtgttcttacctttctcagcattccataagttacttcctttgttctcctctatctttg

SEQ ID NO: 687148 - DNA, 390 bp, Homo sapiens
  misc_feature (96)..(96): n is a, c, g, or t
tcgcgccaggcctgtggcagacggacgctcatgatccaggataaaaattgtcgcgacggcagggggctggcaggggagtgcgctcccaggcacatncgcttaaagtgtgttaatgacttgtcagcaagtttctttaccttcccacacccctcttctcaacgtccccccagagtcctcaggggggccttcgacctgcaaaagcctcatatgagtgcgaggggccccagctcccagggcggccgatggagcctcacacggtcaccttctccatcacgctttcagccacgtggacttcgtctgcctggacggtgacagctgctgactggccgcatatgtgctggtgatctacccagtccttgcgttggcagaaggtggagcagtagttgaccc

SEQ ID NO: 687149 - DNA, 133 bp, Homo sapiens
  misc_feature (2)..(2): n is a, c, g, or t
anttcatggcagctataccacagactcagaacactcacactcgaccacactgcccaggactactccaccctcacctccgtctcctcccacgatctcgccgactgctggtgtgccgacagcccacccgcctgtt

SEQ ID NO: 687150 - DNA, 817 bp, Homo sapiens
ggcagtcgccggtacatcggggatatctggctctttcctcttcgccttaaattcgggtgtcttgtatgaataagtcaaagagcagcaaaagccaacgctatcaggccagcgttttaaaactagaaaaagagatgaaaaagagaggtttgaccgcttactcagtttcaagactgtatttgattgcaagggcttaatctgaaaccggatactgattgggaagcagtgaggctaagttgtctgtgatgcttcgtggagcaaaaacctttgatttagccgtgcgatatgcgagaaacgactcttgtgacattctggtggctggtggaatgctggcccgaggtggtacacgtggccagatgacagtgatgcgtacagagtgtctgcgtgtttgcagcgccaaggaagatctagagagcatgcaagcattttgctcaggttttggaacaagtaaatcaggggctacaaatagctggagaaaggtttgaagagtgaagtagaaaagctgtgatgttcctgagaggttttcagagtcggagaggaacaagctagcgatgtgactggtgttcttctgggctaatgaacactttaatgcatccattcttaataggctgttataatgaaaattgtgtttaaaagaaaggaggttcaggagcgtttgtgggaagctcttgaaatcactggtgactggaaacgattcaaggaagtaacggaaagtttcggaaaatcgcatggtgagagaggtgggaactctctggcaaatagaagggggcacgtaaaaatattctgggcggtgaagagtaaaatgtggaagaccaggcga

SEQ ID NO: 687151 - DNA, 389 bp, Homo sapiens
  misc_feature (35)..(35): n is a, c, g, or t
  misc_feature (40)..(40): n is a, c, g, or t
  misc_feature (120)..(120): n is a, c, g, or t
  misc_feature (370)..(370): n is a, c, g, or t
tttaagtttaactccatcctatttaaaaaagtgangttanaaaccagatgagtttttaaggtcccatctcaacctctaaatgagatactagcaaaaacaaggaatccaccacttccaganccttatgaaacccaggaaaaggtggggcacagtggctcacctgagggcaacagttggagaccagcctgaccaacacagtgaaaccccatctctactaaaaataacaaaaattagctgggtgtggtggcggacacctgtaatcccagctatttgggaggctgaggcaggagaattacttgaacggggtgtgggggtggggggtggaggttgcagtgagctgagattgcaccattgcactctagcctgggcnacagagcgagactgtctca

SEQ ID NO: 687152 - DNA, 335 bp, Homo sapiens
agaatgtgtcagagtcaagagaatcaaatttgctctttaaaggagcagggtcaaagtcttcccggttggaatcaagaatcagaatagctcctcttgcagaactgccttcgtcccccaaagcagagatcaaagggctgatcatctggcctgacggcagcttgtagggccactctcaatgggcttgaaatgcctcctcagcatagcgataagtgacgaatccgtagttgtccccttggacacggaagtgggtggtgcactcctcaatctctccagaacaggagaaccactgttacagctctgaatcgagtcatgcggacaggtatctttccaatgaa

SEQ ID NO: 687153 - DNA, 157 bp, Homo sapiens
cccagctccagactgaagtagaggaggcaggacaggaagtccaggaatgctgaggcgcaggccaagaaggccatcacggatgccgccatgatggcagaggagcttaagacggagcaggacaacagccgccacctggagccaatgaaggagaacatgg

SEQ ID NO: 687154 - DNA, 154 bp, Homo sapiens
taagatacaaaccataaacccttctgtttgtttaacagagggaggtcaatctttttcatgaaaccacatgtggccttccagaaagtcaaaggttctgcaggaactagattttacagacaaagaaaagaagttgaagaagaaagaaaacatcatt

SEQ ID NO: 687155 - DNA, 210 bp, Homo sapiens
  misc_feature (130)..(130): n is a, c, g, or t
  misc_feature (155)..(155): n is a, c, g, or t
  misc_feature (159)..(159): n is a, c, g, or t
  misc_feature (162)..(162): n is a, c, g, or t
  misc_feature (189)..(189): n is a, c, g, or t
agctactcaaaagccaagaactgccctcaccccaggctgagaagagcctccccaagctgcgtctggagatcatcgacaaggacagcaagactcgcagactggacatccgggaccactgacccttgagaangtgtgaacaccatctagagccaccntccntgncctatgtcccttcatatccaataaagncccattggctgtggcatggca

SEQ ID NO: 687156 - DNA, 158 bp, Homo sapiens
tttgaaaaggccctttttttttcccccccttttaaaagaacccatggtcccgttagcttttaaagggaaagggggctaattagtaaaaaatttaaggccaattttttctgctggcctgccaagtttttagggttttaaaaataaaaatttttgaaata

SEQ ID NO: 687157 - DNA, 216 bp, Homo sapiens
taatcacagcagcactgatgaaagcctccaggagtgataaggccactgtctagcaaggggtaataaagcctgtctcatctggtttagtctatcatcactttcttcctacttcctacttacttctgaggattcttcatacagataggttccagattccccccaaggggtccgaatcaatctacttcttacctcagtacttggtactgaaattcacga

SEQ ID NO: 687158 - DNA, 584 bp, Homo sapiens
ctagttctagtcgcgacggccgcccttttttttattttgtggccttacaaatgatcaatttccaaatggacttttctgtaaaaatgtgtatacccaaaaatcggccaagtatgttctcggtcatcgcctatctctttaaaaaggattcatgataggtattattagcacaaatcttcgggattgtccaccttgatgtagcagtatgtgatactttgttttaccgaccagctcctatgctacgcaacgtaatctgtatgcagttgcattcattgttagcacttataagattaacattatgctacttaccaaacagcaaacgcccgggtttgattacacacatacagtatgggacgagacctctgaagtcgaagtcagcgcacaccctggtatcacgcgcgtcagcgtatgtctcatatatcgctctttgctcaatttgcctgtccacactcactctcgaaaattagttacaccaccgcacatgtatcacccgaactaccaatccactgcatcaatatgcaacgacaccccgtacacacaccataccatgaaatatgactaccaaccgctcatagtgccagctccac

SEQ ID NO: 687159 - DNA, 239 bp, Homo sapiens
  misc_feature (143)..(143): n is a, c, g, or t
cgctcagagctaccacgctcacatctgaggccctgggaggccttgatgagagtcccacagacgctacttaacgggggactgcgaggccgtctctgagtccccagggcctaagggtaaccacgcacacacttagggctcagggntctcgagggcaacccctgcagcctccgatgccgtgtcttgtgtcgtctcgaccatgggctgccagaaggtgctgcctagtggtgcacgaacgtagc

SEQ ID NO: 687160 - DNA, 366 bp, Homo sapiens
  misc_feature (299)..(299): n is a, c, g, or t
tgatggcgctgatgacacccgaagccgccgccaagaaatggatcaaggacaacccaggcaagctggatgcctggctggccggcgtgaccaccgtggatggcaaacctggcctggaggcggccaaggccaagctcacgcaataacgaaccacgcaatagcgctacctcggggcaggaccgtgcctgccccgggttgatttcaatctatgcaggtggaagctcgctatcatgcttatcgatcaaaaaatacccctgggccagtacatcgcgtcgttcgtcgagtggctgacccagaacggngcgaattacttcgacgccatcgcgcaaggcctggagttcatgatccatggtgtcatcagcgccatca

SEQ ID NO: 687161 - DNA, 1210 bp, Homo sapiens
gcaacttgttggcaatgccacgggcaaagtgggtgtttcagcacatgctatagtgagctccggcttcgctgtctatataaccagactccactaatgtgtcactgggtagacggagctggactctatatttagccaggaagcctttgcctccttttcaggcagtcaaaaactgggtctaggtcaattgctctttgtctgttgatggagcgagcagttgtgaggtctggactctcgttcgaggtattgtgcctgtgagcttgggcgttgcgagtcgtggcttcagaatcaagtgttgggaaacccccgcacccctcagcccgatcgtgaaacggacagctgtcagcctgggtgggcgggctgctgaggatggtgtcagcacggaatggggctgtggccctgaggtttatactttaccgagccaatgtgaccctggtaacatgccaagtaaacactgccatgatcctggggctaagagctgcctttagggacaggctcgtgtagatccagtatgaccctgagagatgcacctgaccaggggcccgtcagatggctgaaaaccacggtggtatgtaagtgtttccaggcagttgtcagcagctgccgggtagtgtgtagtgtgcgacagcaggagagttcctggaggacaagggactggggaccacatctccaacggttctcctgcttgaatcaacgtgatgcgtggaccagacaggcacagacaaggcaagggtcaggctggataaagtaggggaaacgggacggagcccactcgtccttcacaggactgtggacccaaaactaaggcgcaacacattaccctaccacaggtcacaggagaaagaacgacatgcaccacaagagcctgaacggcctggacaccactgggtgcactggaatggcgcctcatagacggagtggcccagcagtagtaccgccaggtgaactaacacgcagaaaccaagcggtggccccgtcaaagaggacccgtcaccggagaaccacaagcgttcaaattgtggaccaggacaagggggtccaacacaacgcgaagaaacacacataagaggaggacaagcacgaaacatatcaatgacgaccacgaccacaaattaggcaatcgaggcacatgacatcatacataacgtacaacgcactagagcagatacgataaacatagcaccactcgtgaccgccacccgtctgtctataa

SEQ ID NO: 687162 - DNA, 138 bp, Homo sapiens
agaggaccccctcccattatgagaaactgactaaaatttgccctcccatcccgttagagttatttaggctctgtaacagattgggggataaaaagatgttcagatcatttttcgtttctacctcccacgaacggatct

SEQ ID NO: 687163 - DNA, 1521 bp, Homo sapiens
  misc_feature (360)..(360): n is a, c, g, or t
  misc_feature (1393)..(1393): n is a, c, g, or t
atcgagccaaggcactccagcatgggcgacagagcaagacttcatctcaaaaaaaaaaaaaaatgtagctgggcttggtggcatgaccctgttttcccagctacttgggctgaagcaggaaaatcgcttaaatccgggaggcaagacggttggttagtagacgccggaagattcgcgcgccattttcccagccttggcgcaaccaaggaggggaaacttccgggtcttcaaagacaaaaacaacaacacaatacgagacagcgcacacacgagacacccctatacgcttttcacaccgccaagggcattttgttgctacaagttaaaaaccaccttcggtgtgtatacacatcagcggcnacacatcggggcgctgtggcatcgtcacacaatcatacgaactccacgcccccataacacacaggggggaggctccaccgggcgaaccaagtctctcgtgtgcacccacgggggaaaaactcgcgcggaatcacccggggtgttcaccccaaaagaacctttgtttggccccccacaacaaacaccgcgaggcagaaaataaagagaccccccccttgtttattctcgaaccaccgctatataaccccccccaaataaagaggggtgcaccagtcatcggcgaccaacaagcagctgtgtgtcttcgacaacaacgacaattgggtggcgccccttctgtagaacgacgaagatgatcatcccaccattgtgttggcgacaaacacactacgtcccgttgaccttctactaaacacgcgcacatacaactcacacagcgtgggggaggcacaactccaccccaccagccgctttaattacaaccacgacggggggcgtcacaacccacacgtgttgtgcataccacgacagcccacacaataatttcgtcacccctcgcagcagacactctggcggaccaacaacaacaccatactctcagtgcccgctggacgtatctcggcggcaaaacaaaaaacaacacaccacttgtgatagacgcgccctcatcgaacgcaaacgaaaattcgtagtgccgcgaagcatctaaatataacagagcacccacccaactcttatctggacagcacacagacaggcagttactgactcgaggaagcagtaataatctacacgcgcccccccgcactatctattaaccaggggtgtttgagacgacaaacatcagtcgtcgccacatcggcaacagcttgtcgcacacacccccacctatctgaggaggatgaccgacccccaccacaaaaaccacagctgtggtccgacaaaacacatcgctcccacatgttgtgtgggtcgaggagcacaatttatcgctaacgacagaccgacgcagtgtttaacacaatcatgtcgncgagcatctacccaaaaaaaaaatctcccccaaagagatgtatgctgatttcacgccaggaaacaacttgtggctaaaaagtcgggccacacactattgttgtgagacaaccggaaggagtgatactg

SEQ ID NO: 687164 - DNA, 1045 bp, Homo sapiens
  misc_feature (1045)..(1045): n is a, c, g, or t
agcggagcggcggcgtacagagcgagcgctgcgcagtgggccgactcatgggggcccacgctcgagcacgttgggccatatggtgctcttcccagtctggtaccttgatacagctcgtgcgtcatgaaagctgtaaccagccgtcatccaacgccaaatcgcgatcgacccatcgaagaagcccgtgaaagatcgaagttacccagcgtagcggcatcatcgtactcggggtcagatctatcaaagctcaatgagactcgcggcgtcttccgcattggcccctgcgcgacacccgcatcacactcctgggcctccctgtcgggccagtcagacagtcgtacctctcggctctagattgattggaaacctaggtcagtgcggccctataacgacactatcttccacgcgagttaattgatcaagggctttcgtagtgacactttggtacagtcaaaagggtgtttacatttcaacagtgtacaaccgcaatcccgcaaagattaatctccccgcctgagatgcgcgcaaagattggtcctcgaggataacccttgagaacgaaggcaatcggcgagaagtattgagacgaaacaaccagactttgcaaggttatccatgggggtgccaccaagattgaagttcaatagctttagggatcctttacccccaagtgggtgccaaaacatcgtggaacaagctaccggcactaatttacctgaacccttggaacagattatcaaagggtccaaagatcacacgcttaattccaattcacaatgaggtaacctaagggtcgaaataggagatgcgaaagagttagagtagaccattgtcgaagttcctggccaagaggcgaaacgtagagataaacaaaggcgggtccaagatacaataccccacaaagaaaatcggcccataggtccacagtgcattatgaacgtaccccctgacaggccccaactaccaaatatgggacaaaaggtggacaccccacttggaaagttgagaccctaactagcattagggtggtttaacccaatcacan

SEQ ID NO: 687165 - DNA, 143 bp, Homo sapiens
aaaaaaaaaaagcttcaagagagtccccaaggaggaacggagggaaatgaaaatatttctgatctcctaaaatcccttcagaaggcgtgacaaggagagaaacgaaggataactagagaaaaagttgaatcagaaaatctctg

SEQ ID NO: 687166 - DNA, 453 bp, Homo sapiens
  misc_feature (199)..(199): n is a, c, g, or t
gtgatcggctgggagaggccatattaccctgactcctgaagttctggaacagctcttcctgtacccagtgttacccttgttattttgtaaacttacaattcaggattgctcatggatattttttgggggggttgcgggcaggtggatccacattagtgatgattatcttggcataggaggcctgtgggtgtaaacttgnagcaaaaggatcagatacagtgtcttggaggggctgaaataacctatgaattgttgctgatagcctgttcaacctttagtagggacttttcagcctcaggagtcagaaccctaatggaattaggatcagggctacccttcagaattgcaaatagaggttttaaatcaccggtggttagcttaaggtaaggtctaagccaattaatatcacccaaaagtttttgaaaatcatttaaggtatgtagctgcgatcac

SEQ ID NO: 687167 - DNA, 216 bp, Homo sapiens
gtgatcggctgggagaggccatattaccctgactcctgaagttctggaacagctcttcctgtacccagtgttacccttgttattttgtaaacttacaattcaggattgctcatggatattttttgggggggtgggcaacggtatgtgtgtgtgtgtgtgtgtgtgtgtgtgtgtgtgtgtgtgtgtgtgtgtacagtccttatgtcctgcgatcac

SEQ ID NO: 687168 - DNA, 945 bp, Homo sapiens
aagaaatggcagagacggggcccggtgcttatgacgatggaagattgcagtgaagacgcagactagaggaagctggatggcataccacaaagaacggagacagagtgtgtctgtgatgtgcgaggacgatggaaagctgattcgtcttccaaatgtctctgtatgctgactcagatgtgcgaaaatgacagcacatacagactccgagagcagcagctcttccagctcctcatcctcctcctcctaccatcgtcctcatcctcctctgtcctcttcatacctctgagtcctcctactgaagatgaatgatggaatgaggagctggccagcagcccttccctcagcctcccctgcccccagagaaagtcccatgtgcccaacgccatgcaccattgtgtaatgtgtgccatgtgcctgtgaacatgtggtttgcatgtgctaccccagatacagcaacctccatgcactgaagcatgtgattgactatactcacatgacataaggccttgcagtgaccccatctgtgatgtggatgctcagaccccatccatgatgactgcacatacattaatggatatatacaccatatgcataaactactacttgacgttgggtgatccacaagattattattaaaaataaaaacaaaaaagataaatatatattacttgactctccaccaccactcttaccaatcatttactataacaactaactctcacctcacacactccacaactcccatctcgaatactgctcatacccgcctcttatctctgtatcacaactactaacaactataataacattagaagctaaccattcactcacgaccagagacacttataaccacaaagcctgtgtcaaaacactttaactaacgtctctccctccttcatcaacccatcaaaataacatacttccacactacccttactacaccag

SEQ ID NO: 687169 - DNA, 241 bp, Homo sapiens
  misc_feature (130)..(130): n is a, c, g, or t
agctcattggcagaaaacggaactacttgtgtgtgaagtagataggactcgaaaggcaccaggtgtagtcacaatattgaaatttccgaatgagggagagacaggtacctgtggatgtggtcgagatganagaaaccctcatagcctttggctgggaaccaaatggaagtaagtttgctgtgctggacggagaggctccgcggctatctttttttttctaccacggtccaaaacaacggga

SEQ ID NO: 687170 - DNA, 449 bp, Homo sapiens
atggggaattgacctgaggaagatttacactgggtctcgtggtggtgcgggtcaggggaatcaggtgtggggaagatcaactctactctcccgattcacgcgcaagtgagttcatgccacgacagccgcaccaccatcggggttgagttctccacccgcactgtgatgttgggcaccgctgctgtcaaggctcagatctgggacacagctggcctggagcggtaccgagccatcacctcggcgtactatcgtggtgcagtgggggccctcctggtgtttgacctaaccaagcaccagacctatgctgtggtggagcgatggctgaaggagctctatgaccatgctgaagccacgatcgtcgtcatgctcgtgggtaacaaaagtgacctcagccaggcccgggaagtgcccactgaggaggcccgaatgttcgctgaaaacaatggact

SEQ ID NO: 687171 - DNA, 982 bp, Homo sapiens
gtgtggtgtggttcatgcctgtaaacccagcactttggaggccgaggaggaggatcaagcctaggagttcaagtgatccctccacctcagcctcccaaatgctggaattacaggatgagccaaagactggcatatatggtatatttcaatttttctttaaagatacaggaatgaatatgttcaggtatcatgtaaaaatataagaattcagaaacaattgtgatcacttatggctgctaaaaattattggataaaatctaatatctgaggagtgtggtgtggtcaatgcctgtaaaccagcattttggtaggcgaggcagtaggatcaagcctaggagtcaagaccaggctgttgcagcacgcgcaaaaccccgatcttctacaaaatacaaatactagcaaaaccaagttagggcaatgggtgggcaccattgctttgttactgccccaagccactttaaggcagcgatcgatcgtcgcaaggattgccgcaaccgtccccagtccaataacttggtggtatctgtaccacgcacgcgcagtcctcgatagcttgccctgggtgggtcttcgaactccctacgattacacggggttcctcgcaacttcagctcccaaacgcgtggggacttccaggcaattgaccaaaagaactggcaataatatggattacatcacacttttgcttctacagactccaaggaccgtacatctggccagggcaccggcttaactctcagcagtcacaacagtgtgcctcatcgggggtcaacaacacactgcacaacttccacactgggagacgaggagacaaggaaaaatgaacctagctggctgctgacacccacacagcactcacagccgcgccacacactacttgatctacagcgcacatgtgcacactcgccacatgacgcccacaatgtctcctacacccaccgcactcgttcgtcacttcgcttccacgcacccaacacacgtc

SEQ ID NO: 687172 - DNA, 512 bp, Homo sapiens
ttgaagacaccaccatgttttattccaagatcctgggcatggaggtcactactttcaagggaaaccggaaagcattgtgtttcggagaccaaaaatttaacttacacgaggtgggaaaggaatttgaccccaaagcagctcaccctgttccaggctccctggatgtttgtttgatcacagaagcacccctggaggaggtgatcgagccctaaaggcttttgatgtccccattgaagagggcccagtattcagaacaggagcaaaggggcctattctatccatctacttccgagatccggacagaaatctccttgaggtgtccagctatgtcacttcatgattgacactggctttttcttctattgtgatccacaaaatgtcattttacctaatttcctacaaatcccagagacctcgaagaactgagaacttcggcaacaggtttatggtgcaaacgtttgtgtctagaaagcctccattcaagctactccaataaacgacaaatctctcca

SEQ ID NO: 687173 - DNA, 331 bp, Homo sapiens
catttttaacgagtatactggagtgtcagcacggctagctcacgtgtcgacggaacttgtacaggggaggcatgcaccgcagtggtgaatacacgtcgaccaggatccatgtatgcgatatttggacgtcatcacggatctcatatatctaaggaacttgtctagggaggtatgcatcgcagtggtgaatacacgtcgagctggaggcatgcctggatgcttgggtcctggaggatccttctagagtcgaaccaggctccagctataaccgactatttggagcgttcagcacgagatgctacacgtggtcgacgtgaacttgtccatgggc

SEQ ID NO: 687174 - DNA, 398 bp, Homo sapiens
  misc_feature (46)..(46): n is a, c, g, or t
  misc_feature (63)..(63): n is a, c, g, or t
  misc_feature (125)..(125): n is a, c, g, or t
  misc_feature (137)..(137): n is a, c, g, or t
  misc_feature (174)..(174): n is a, c, g, or t
  misc_feature (181)..(181): n is a, c, g, or t
  misc_feature (188)..(188): n is a, c, g, or t
  misc_feature (314)..(314): n is a, c, g, or t
tccgttttgtctcccttcctttcctccctgtcccttctgtttgtgnctttgtgtttgcctttncttgtttggtgtgtccggcggcggggtggtgtggtccttgtggtggcgctttgtgtggggcnggtggcgggctntgtgccgtttttttcctttgtcggttttgtttggggngtggctnccgtggntgtttgtccctttttcttttgttgccttgtcttcctttttttccgtggctttttgggggcttgcgtcgtttttccccgtcgttggctttcctttcctttcttttcgggctctcctctggcttcgtngtgcttggtgttcgttcctgttttcggggggctctgttggtgggcggcgtcggcttgttgtctcctcgtcgctccttttttttt

SEQ ID NO: 687175 - DNA, 212 bp, Homo sapiens
  misc_feature (141)..(141): n is a, c, g, or t
tgcatggctgtcgatgcatggctggcgagtgcatgctaacacctgtaatcccagcactttggaggttgaggaggtgatgtcacctgaggtcggtagttcaaaatcagcctgaccaatttggtgaacacccgtatctattanaaaatacaaaaaaataagctgggcgtcgtggtgtgcacctgtagtcccagctactcgggaggctgaggtgg

SEQ ID NO: 687176 - DNA, 369 bp, Homo sapiens
ccaaaaagtgcaccagtccagtaatgcagtgcatatgccgaaagtttcattcagagggtattgacaggtaaaaagtttccaacaaagacaactctgtttattatctcattagcagcgcgcattcgtgccacagagccaatgtgattggtcatagtaactatagtagctctagccagatcttctttactgactgattctcgcttctccttatcagtcatattctcagtgctagatgcatcagcgcaacctgttcagaccaaatctttcataatctcctccataaatatcacctctctctctctctctctctctctctctctctctctctctctctctctctctctctctctctctctctctctctctctc

SEQ ID NO: 687177 - DNA, 1293 bp, Homo sapiens
ggagccagcatgggatgctgggatgctgggggaaacgactgccaggaaagctatctgcgccatgagagggctgactggggcgctcgggaagcctgacagggcttttgcgcacagcttgcctggctggctttgctaccctgtcctgctgccagcccccgagtaactgctgctgaccatgtgcaccccagttcctgtgtcacctgcatgctggagatgctcgcctgctcgcgtgcttggggggtggtgccctggagctggcccctgcagtggaccctccccgagaaccgcctgtggcctgcccggtatgtgcactagaaatggaacagcccttctaaccaacgacgactcatacacagctacgggatacggccgggcccctggtggcctctcatttacacagattacaaactccttgaaacctgagccttggcggtgtcaacctgtgccgagccccttagccgtgatgtctcaaaggcgccttgggtgctcgcgggtaccctggccccatgagtggcggcgtgtggctggctaggctacttttcgtggtccagggctccggacacccggctgcgtctctcagagctcgcctcttcggacgctggaacggccttgattgtccccgaacagcaacggcggtgactcacgacgtacgccttacacccccccggggcacagtactttttacccccgcggcgcgtgccaagcggtggacggtgcagcggggcgcagggggcggcgtccccgaggagcaggagggcttcgcccgcggggccttttgtccacaggcccttggacgaatcttgccatggtattaaccctcgtttgcatcccccaaggtgtctctgggcgcctaccgcgggggccccgggtgggcccggggcgtttaagccggccggtagccctcccggtttacccggctcagcaggcgttattccccaggcctttgtcgctctcgggaagcggcccaggcattcgtcagcgtggaccggggggcccgtctacccgcgagccgccctcatgggtgtcgtcccccaggggccgccgcctttctggggcgggcccccggcaccctttgttttgtggcgggggcgcccacccccatatgtgggagcgcgccccgcttcttgcgtaggcagagctcgttgagctccgcgtgggttcgttctatcgttccgtacccgccccatctgttgcacgtgtccgttagcccggagttgcggagctgcgctcccagcgcgctggcccgctgtgtgcatcgtctgctatattcttatgaacacgccagccgccgtc

SEQ ID NO: 687178 - DNA, 319 bp, Homo sapiens
cactcgaatctacaggatcccccagatgtcgcaaacgacgacaatataaagaatgactagcgaccggatgaaactacaggaggttaggtctaaaaatggctgtaactacaagggctatgtaggctgatagaagagtatgcaatgagcgatttacggtctgtttgtcgtaggcagatggaactatgtcataattatgcctcatagggatagtacaaggacggggtaggctatgtgttttgtcacgggggttgcagaatgagtgtgaggcgtataataccatagccacctaatataaagagtactgcggcaagtactattg

SEQ ID NO: 687179 - DNA, 863 bp, Homo sapiens
agcggagtagcgatagcagcggcgtaaaggcctctgctatgcttactttatccatccctttttcccacctgttcgccaccccaagccgctaatccaccaatgcagcaagcgcagaaccaagagaaagtatccgtctgtgagcattgtctctctgatagacaaaccacattacggctgccataaattcctctcgagcacttggacttcaactaccagcaggccatgcagcatcacgcccttgcctctggcgtaggaactgcaagatccagcatgcattgcggccctccttcctcgcactcaggaccaagatagagccaacccaagcctcactttgatttaaaaaaaaaaaaaaaaaaaaaggccgggatgccttctttccctggtggtggagggaactctaaagccaaagcctattattaggactgggaggtgtatttatcaacacctatcaggggcatatggtggccctcaattctccatatatcagattatcttcaagcatttaaaacaccgggacagtcgggcgccgggggtacgcgtcggtaatcccagacacttggggaggccgaggcggggtggatcgttggaggtggggagttcgagaccaacctggccaactggggtgaaagcccgtctctggttaaacaatttacaacacatattacccgggcgtgctgaagggcgcctgtaattccagtactcgggagcctgaggcaggacaattgcgttgaacccgggagcgcaaggttcgcattgagccaagatcggcgccaatggcttccaacctggggcgaaagaacaaggcttgggggcggaacaacacacaacaaacaagagggacaaaacaacaagacacacagggc

SEQ ID NO: 687180 - DNA, 382 bp, Homo sapiens
tagaatctgcaagtgtatattgggacttttttgaggccagctttggaaacgggatttctatgaagatattgccttttccaccataggcctcaaacggcgctaaatatccacttggaaattctacaaaaagagagttactaaactgctctatcgaaaggaagcttcaacgctgcgagttgaaagcacacatcacgaagaagtttatgagaattcttctgtctacttttgtatgaagcagtcacgtttcaaacgaaggccacaaagaggtcaaaatatccacttggagattcaacaaaaagagtttttcaaaactgctccgtcaagaggaatattcaactctgagagttgaaggcaggtatcccaaagtagttcccgtcgacgc

SEQ ID NO: 687181 - DNA, 281 bp, Homo sapiens
tcacacagggtgttgtgggcccaagtgttaaaatcttttccccctgggcccccattggtaaatttggccctaaaaagcccccccctgcccccgtgggctttgggggcccaaaatttggattttcccccccccccctttttaaaacaaagggggggggagccaaaacccccttcctttcccccccccgtccccccaggataacagggtttccttggccgctgttttttgggggtggggtgttgctttttaaaaccctttttttaatttttgggccaggccca

SEQ ID NO: 687182 - DNA, 720 bp, Homo sapiens
agctgacccgtagaaggcggtggaccagcctgctgccagctcttctgggagaagaagctgagcggcctgaacgccttcgacattgctgaggagctggtcaagaccatggacctccccaaggtgcctgcagtggtggtggtgacctggtctgcacggagtgatgacgctgctgtctggccatcgccagtcgccctgcacactagcaccatgcccatcactgggacatgctctcgtgcctgcctgtggatgaatgaacccctggctgtattggctcatacaccactgcagcccctagtgcaaatgccttcatgtgtgacctgactgagtgacactcagtgaatgcaggaagagcttggtgcagcagtgtgcggaatgcggctggatgtgaggctgctgatggccgacatgctggctgcacgtggatgtgagctggcccgtgacggggatggcgccgctggacaaggcctgcgctgatggactgacgacgagtgaagactgagtgaggaggaggagtgagtgagcccgaccctggacccggagatggagcacgtctagggcagtgtgctgcggtggccactgtgggtgctccctggacgtcggggtcctggcagtgggggactgcctggtgaacacagatgtgcttgggatgacgggtgctcccaacagcttccatctccctagaagagccaagcgtcccgtcccgtggagtcgctaagccag

SEQ ID NO: 687183 - DNA, 430 bp, Homo sapiens
acccggatatgattaatgaagtagatgctgatggtactggtagaattgattccgtgaatttctgacagtgatgggcatagacaatggtgaagacacagacagtgaaaaagaaattagagaagcattccgtgtgttggataaggatggcaagtggcatatattagtgctggaggaagcttcgccatgtgtatgacagaataccttggagagaagttagatcagatgaagagatgttgatgaagattgaatcagggaaagttagatatagatggtgatggtgcagtgtaaacctatgatagagtcgtgacacgtgatgaccagtaaagtgaatgacctgttcagaatgtgtttaatttcttgtgcacaattgtctatttgccttagctgtgtagtagctaatcggtaaacggttctccctgtgtcagaaaat

SEQ ID NO: 687184 - DNA, 238 bp, Homo sapiens
agaagcaagaagtggaaatacccagtgtcatcagatgagttggagagatgtgagtagatgcatgatggagtatgattcagcacaaaaaggaacgtgaggcgggcacggtggctcatgcgtgcaagtcccagacactttgggggtctccttttagtcaaaagcgagaaaatgacaagaaagagattaaaattccatgtttcccccccccgccctaaacactaaaattttaaaaaagatg

SEQ ID NO: 687185 - DNA, 374 bp, Homo sapiens
gagggggtgaggggtgacacccttggggagggggcctgcatatggcactgcctgtgtgcacatggtgtatgtgggaatcggtcctggggactattatgtgtgtatgatgccacaattgcacgactgctcgctattccaatgctcctgacttgaccccgccgacccccctgctcagctcggggccctgtccacacttcatggcctgtgtatgcgcgcagctctaggagctccactgacatatagacaagatgtgacttacattaagtttttcccttgaggatattactattatcttgtacagaatattatcctcttctgtgccaactgctgtccgtgctgatgacattgccccctgtagggggggtgcggcccct

SEQ ID NO: 687186 - DNA, 706 bp, Homo sapiens
agcggtcaagagatcgagaccagtctggccaatatggtgaaaccccgtctctaccaaaaatacaaaaattagctgggcttggtgatgtgcgcctgtagtctcagctcctcgggaggcggaggcaggagaatcgcttgaacccaggaggcggaggttgcagtgagtcaagattgcaccactgtactccagcctggcaacagagcaagattccttctcaaaaaaaaaaaaaaaaaaaaggtttacctccaaaaaattcatccccttccaaaatcctttggcctcttcataacttatcagtggctcacttgggacttggcgccttgctggggcgccaaagaaaggatttccatttgacctctgaggggttctatctaaaatcactggacaaaaagcagattcaggggagaaaagacttccaaatttggtgaatgtgtacttgggaagcccttcaaattgaggaacccaagagatccacgaaatactggtcctttttttaatgcctcaggtttcaaccaacgttatggcccagctgttgtcgcaacttttgcttgggacaaaagggatttaatctagttctattagactaatggtcctatagaggcctgtctgtctgggattcttctgggacctctctgagcttacattttctccctccgggcgtatgggcgcagacccttcctgaacgggcgggaactcttataaccta

SEQ ID NO: 687187 - DNA, 1001 bp, Homo sapiens
cttgctatagtctatcaggtacttgagctacctgttcgctcccttggatacagctgtgactctttaatcagtcctcctgaatagattgctagccctgtgggcacaataatgtgccagtgtgatggaaaccattctccggttggctttactaggccaggcgaatcccagtcgagaattgatggaagcgttatttacctgtgagttaatgtgcttgtattaggaatgcttgaatttcctaattagaccaatgtgggacaggaggtctgggggggttcttgctcaatttagctgttagataccacctaaactattttgtattagagaagcagtatcttttagtgaatacgtcttgtgtaatatatattcgaaaggcatctgtggcatattttagggctgtattataatttgcaaagggtttaatgttggattctgcatgtctacacatacaaatgacgcgggctatgctcctcgtgacagagagtgatggaaagagcaggttctatggagtctatggtcattgaagaataaccatgaagattgggtcatcgctgtggtcatgaaatgcgaggcaaagtttggtgcaagatttaacatagtctcttatttattgttttgtgaattggataaagatggatttctatgtaaatagactgttgaatcctgaattaccacggtactaaaaaaattaggtgtgtaaagaaatgctttcttgatgtgaggtaaaagtagttatgtacgtcttgaaatggactgtactttggttcgtccttatgataacatggtaatcgtaattggttaaaaccatccatgttgtaatcgtaatacttataaggaattaagaaggtggttggtcgggacttgacaggatgggggttttcaaaacacttgtttttaataaggttttgtgtgggatgcataaatagtttgaaggcgggaaaaaaagcgtctcgttgagggagaagggttgaaaaaaaggaaaaaaagggatattaaaagtggtt

SEQ ID NO: 687188 - DNA, 418 bp, Homo sapiens
  misc_feature (134)..(134): n is a, c, g, or t
ccttctccgggggggggtgtccagaaccaggtgtctctttctttttgtggaagagggttttatccccaccacctctcccttggtgggtgggagctattgggggccggggaacaattcaaaaccccccccccccngtgtgggttcccaggggccctttttttcttttaacaggcttcccgggggccaaaaccggtgggccccgggggaggttttttttttttcctttgggggagggggttttgcccaccccctaacccagaaaggccttttcctttttccggggtttttggtttggcgggcgggcggcccccccttcccggggtttttgggttggccggggggggtttggggggtcccccttttttttttttcccgggcccccgcgtggggttttaggccccccccccctccttgggga

SEQ ID NO: 687189 - DNA, 149 bp, Homo sapiens
ctggggctggggcagtcttttcctggcttcctctgccaagcttcctggctctggtagagtgagacttcagacgttctgattgccttccggattgtcatctctccctgccccagggaattgggaaggattgttgagggatcattctaatt

SEQ ID NO: 687190 - DNA, 357 bp, Homo sapiens
  misc_feature (21)..(21): n is a, c, g, or t
  misc_feature (335)..(335): n is a, c, g, or t
cacctggctggagtgcagcgncgtgatcatagcttactggagcctcaaactccctgtgtattagttcattttcatactgctgataaagacatacccgagactgggaagaaaaagaggtttaattggacttacagttccacatggctggggaagcctcagaatcttggtgggaggcgaaaggcacttacatggtggcagcaagagaaaatgaggaagaagcaaaagtagaaacccctgataaacccatcagatctggagtgaataaatctatagacttattcactatcatgagaatagcacaagaaagaccagcccctctgcattgcatttacctncccctgggtcttttcccacaac

SEQ ID NO: 687191 - DNA, 318 bp, Homo sapiens
atgtcttatgggctaaaggacaccggaggtagttgatagatcgagaatacacaaggacactcacagtcacacatagaacctagaaacaacactccccaaaacagatgtagattcaacaaaatactatcaaaagccataaagcatattcagtatatcatgtttaaattgttccgacaggtatattgtgtgtatacccgcacaaatgttactgtcattaaactaatgatcctattttcttcttctcaaaaaaagtcctagaaatctgtatgtgatggcttgatgaagtttagtcactttataacaggttaagcttttaaa

SEQ ID NO: 687192 - DNA, 1188 bp, Homo sapiens
  misc_feature (122)..(122): n is a, c, g, or t
ggttatgtgccgctgtgtgcttctcgatgtcgaatctacacaccgtatccagcacatgggatctgtgcatgtgactgcacgacaaaatgagcgctttagccgatatactcggaggatacctnggaagtgagggatgcgacatggaggagatgaggtactggaattatgtagtgtattccctcttacagctaagctagttgaggagagtcgatagtcgaggcaagcttcgagagcaaattgttgtaaataggtgcacctgggagagtccggtctaaagcacgcctacgtaggtcgcattgtaggaccgataggtatcgcgtacgtgctggaatctatctagtaacaggacacggacgtgcaatttggctagccgggtacgcgcaagcctccatttctagtagctttccctttgaccaattgcccgaagagggatcccaatattggccagttagcggtccaccagccgacaagacgcgcggtccgatatcaagacccaacaagcctttgtgcaatagcacgttagacaacatggaatggaatgaggaaccgctaatactgaataatcgaaatccacccgccggagtgttaatcgcttattcgaggaatccaaatataccatggtgatgacgacactttcgcacagggaaaagccactatgttccagtccgctgtttggtaacttgcggatcctttctcgtcgggcgccacaatttggattcatacacccgatattcgtagatcgcagattctaaacgtgccaattttcaaacttttcgtagggaattgagacatttataaaggcgacatggtccatgaacacaggcgcttttacacaacatcaacgtgtttgccaaatagcgcgcccatttccaacactttgtggtggatactcccacatggcggaactatatatcaaagcgggcctcgttggtggacctcacggacggataaacgctctttacattgggacttgggcagcttttttcccggtgcggaagaccgctctgggaacccatgtatccgccgacatattccgattcacacagaaagtttcgacgaaacaaacggggatacacccgccataacgctaggaaagtttcccctttggccagagaagaacagcacaccaagaagacgtgccaccgaccacgaagcgaacacacggtcccaatcagaaatcgaatcaca

SEQ ID NO: 687193 - DNA, 104 bp, Homo sapiens
ttagcttgtaccgtttttcttgtccagtgtcttgtgtgaggagggtctttgtaggagcacaacgcttgtgaccatgcacaacctgtgtgaccatgcacaacctt

SEQ ID NO: 687194 - DNA, 330 bp, Homo sapiens
  misc_feature (95)..(95): n is a, c, g, or t
  misc_feature (212)..(212): n is a, c, g, or t
  misc_feature (230)..(230): n is a, c, g, or t
  misc_feature (234)..(234): n is a, c, g, or t
  misc_feature (236)..(236): n is a, c, g, or t
  misc_feature (244)..(244): n is a, c, g, or t
  misc_feature (249)..(249): n is a, c, g, or t
  misc_feature (259)..(260): n is a, c, g, or t
  misc_feature (262)..(262): n is a, c, g, or t
  misc_feature (271)..(271): n is a, c, g, or t
  misc_feature (274)..(274): n is a, c, g, or t
  misc_feature (278)..(278): n is a, c, g, or t
  misc_feature (282)..(283): n is a, c, g, or t
  misc_feature (285)..(286): n is a, c, g, or t
  misc_feature (288)..(288): n is a, c, g, or t
  misc_feature (290)..(290): n is a, c, g, or t
  misc_feature (295)..(295): n is a, c, g, or t
  misc_feature (299)..(300): n is a, c, g, or t
agtgcaaggtcctgggctctaggtgatcatttcataagtcctttacagataaagaaaaagtagtgtttgtatgtttgtttttaagtaaccccaanacaaatttatattgtattcagcaaaattggaattcaggtgtttaattttagaacatgaagtgcctgctgttttaagcattgacttgtataaaaagaattgcatgtcataaaagtaancttatgggttttctcctntctncngtatatgnccccntcatcatgtnncncccaccccnttncccncccnngnngngnagtanaggnnctttgttgcaataaagatgctgctgaaatt

SEQ ID NO: 687195 - DNA, 186 bp, Homo sapiens
catagccccacatttattcgagcaccagttctcagtgacaatctcaactgagcaaactcttgcagcgggggcataacttctgccagtaggtagataacccccattatctgctcccccatccacacggaatcacatcagcaacatgtgcgtacaacacattaattttctcaccagacggcaccatga

SEQ ID NO: 687196 - DNA, 147 bp, Homo sapiens
gtgcagcctgaggtcgatctcgaggatccctgttaacatagtttcaaatttaacgtcacgttaactctaccaaatacagagtgccagatagcagaggcttgtagggggtctaggccctacatttacactaatgatgtctcgcacagt

SEQ ID NO: 687197 - DNA, 125 bp, Homo sapiens
ctggacgtcacccaatcaactgtttcttccccatctatttttagttgctcattgcttccagacagctctgcctcgttctcttaatctaatcagataatagacttctacaaatactttttgaacag

SEQ ID NO: 687198 - DNA, 979 bp, Homo sapiens
  misc_feature (501)..(501): n is a, c, g, or t
  misc_feature (513)..(513): n is a, c, g, or t
  misc_feature (528)..(528): n is a, c, g, or t
  misc_feature (531)..(532): n is a, c, g, or t
  misc_feature (677)..(677): n is a, c, g, or t
gccccatgttgtgtgagagagatctcttcgtggtttaattgtggcccacccgggttggacccccccccgttttgtgggggacaattctctttttacgtgcgcttttttttgaaccccccaactgtgtggtcctgcggtgtttccttctgagatattaaggggggtataccggggggggcaacaacagtagctttgtaggtgttcttttccccccagaagttggtctcttttcttgggaagggggggccccccctgggcgtttgtttccacgacccctgggacccccccagcgtgttggccgccagaacccagcgccccatgccccccagcccccaaggccccaaaaatgtgttacaaggggaccctccttgccccagtgctccccgaacacgccaagcgcgcttcggaggggcccccaaggggaaaatggcacccaggaaagcgtgaagacgccccccactgtcctcgggaagccccacggccacaccgtggtcacattcncgtacctttttnaaaaaatgaaagtanagnnaaaaaaaaacctgcaaatctagaaacctttttagagaaaaactatttaaaactgtcagatcctgaccagcaagcccccccccagccccccttccaagtgactccgtgccttgagtgtgtttgcgtgtttacacccgtccctttgntggccgcccccgtgcgagcggcacccctgccctgccctccacaaaattgggttccaagggctgttccagacaactgccaacgtcactgagggccctgccccagcggccctggccccaggctttattaacctaaaatgtagctcccctagcgctaacctaggaacccccgctgcctgctggggggccacgcccctcatgcccttgtcccaggcccggggccttcagcgttgaacacttccttgcttttttcacatgttttatggaattgttcacctggtttgaaataataaaatgtagaaaga

SEQ ID NO: 687199 - DNA, 415 bp, Homo sapiens
gagagactgaagagctgttccaaacaaggagactgaagagaagtactagttaggagcagtgtgtgatgctgttgttataaaggatattactgagataactggtcaaaatagagtggggtgggggggtgccgtgcacagtggctcacacctataatcccagcactttgggaggccgaggtgggagggaggattgcttgaggccaggagtttaagaccaacccgggcaatatagtgagatcccatctctacaaaaaatttaaaaattagctgggtgtggtgacatgcacctgtagtcccagcttctcaggaggcagaggtgggaggatcgcttaagcccaggagttcaaggctgcagtgagctatgatcacaacactacactctagcctggacaacagagtgagaccttatctcaaa

SEQ ID NO: 687200 - DNA, 1605 bp, Homo sapiens
  misc_feature (501)..(501): n is a, c, g, or t
  misc_feature (513)..(513): n is a, c, g, or t
  misc_feature (528)..(528): n is a, c, g, or t
  misc_feature (531)..(532): n is a, c, g, or t
  misc_feature (677)..(677): n is a, c, g, or t
gccccatgttgtgtgagagagatctcttcgtggtttaattgtggcccacccgggttggacccccccccgttttgtgggggacaattctctttttacgtgcgcttttttttgaaccccccaactgtgtggtcctgcggtgtttccttctgagatattaaggggggtataccggggggggcaacaacagtagctttgtaggtgttcttttccccccagaagttggtctcttttcttgggaagggggggccccccctgggcgtttgtttccacgacccctgggacccccccagcgtgttggccgccagaacccagcgccccatgccccccagcccccaaggccccaaaaatgtgttacaaggggaccctccttgccccagtgctccccgaacacgccaagcgcgcttcggaggggcccccaaggggaaaatggcacccaggaaagcgtgaagacgccccccactgtcctcgggaagccccacggccacaccgtggtcacattcncgtacctttttnaaaaaatgaaagtanagnnaaaaaaaaacctgcaaatctagaaacctttttagagaaaaactatttaaaactgtcagatcctgaccagcaagcccccccccagccccccttccaagtgactccgtgccttgagtgtgtttgcgtgtttacacccgtccctttgntggccgcccccgtgcgagcggcacccctgccctgccctccacaaaattgggttccaagggctgttccagacaactgccaacgtcactgagggccctgccccagcggccctggccccaggctttattaacctaaaatgtagctcccctagcgctaacctaggaacccccgctgcctgctggggggccacgcccctcatgcccttgtcccaggcccggggccttcagcgttgaacacttccttgcttttttcacatgttttatggaattgttcacctggtttgaaataataaaatgtagaaagaaaacaaaaaaatatataataccacacaagaaatggaaaaccgacacgtaaggcaagttgagccaagaacccagcacaaaagaaggaagcgggggactcgaaatagtattgtgccacctgagtgaggactcccaggacagctctgattggtttattcgaacagggggcaccgcatgaagtggcagcctgtatgtctgatcgaagccacgacgacatcatacacccggatgaaagaacattgagtgcttgagcttgggccggagcgcctcatgccgtgggtggttctccccgtaggccacaggaactcaacaaatttgctgtcctctacctgtgaagtactgctcaaagtacgggcggtagtcaccacgtgtctttcagccgtcttggacaaagttgtgacctacgacatctcaggaaagaattacgaggaggcagatagaaactcttgagaaattggcagcgtaaaaccaagttttccgaacccggttttgggcaaggttccttacataaacggtatgaagaacctctcttcagatgaaaatacgaggatacccacggcgtccagcaaacaaaacggagcacaccccacacgaggagctaatcacaggaacggccaccacatatcgc

SEQ ID NO: 687201 - DNA, 1409 bp, Homo sapiens
  misc_feature (961)..(961): n is a, c, g, or t
  misc_feature (1150)..(1150): n is a, c, g, or t
gcggtggctttgacgccaaaagacaggtgtgcctgaaacactacccctacgagcccaatatgggtaaaggaggacgcactcattagtcgatcattgtcagctcacttgagacatcgctaggacttccggcgcatgagttgcacccacatacgtggctccaagtctgtatctactcaaaatgcgtgtggccagtcgtactcaacagtaacctattggaatagcacatgttcgaggaagggaatcgcgtgcgtgaggagtgtgcacaaagggtgctccctttgaaggtattgcactgcgggtccttcgtgcatcaacccttgcatagaaattttgcaccttgttggcacactgttgggctcatccactccatcttcgtataatcccgttcatctaggtcggtgtcgaggcattcatccgacgcactcgccacggcatacacggttatacctccatatgatagcacgctcaatcgcgattaggactatgggccacctacgggcactcacacttgcagactatagttgtaaattcaacacaaaacacacacttcgcatttgaacattggaggcacacttgatctctcggaatggctttgcgacatgttaagctctagtgcgcgcttgccatagagactcttggccttgactcttgtcgttggtaggagctggatcactaaacggacacgcatcgggcttaatcattcccctatgagcagcttaggggtcaagccacggcgtcacaattaggacacgtggctccgccaatatccatagaggcatgcaaacacgaggaacgcttgttcgccagctctacatcatacccacagctgttgcagcatcttggtcgacgcgttagattagtgcaagcgacaccacacttgttcgaattgtccccataaagttggcgttgagcacgcttccccgtcaatgccatgccgcgtgtgaaaacatacacccactcncttgtacaggtgccacacacgtcacgagttcgcaccgtgccgacacctcatcctcacacgcaggccattgagcacgtagcaaacgacacccaacacgtcttgcgcgcctcactcccatattccctccccgcctacctccacgccgcatctttagtcccagcctctttcctgagctgtgccctcatccgncttatttgtaaggcggttcaggctcatcgcacccgcaccgttgcacagtcatagtcagacgttagccccgcagagctccttccctacggtaagcaccaacttcgcacagttcgtaccgactgagcgtcttcgcatcgtacttcggacgttcgcaacgaccagtatctaccctccgcgctccccgacggacacgctcgctcatctccttccagacacgtgctcgccaactcagccttcaactggctcactagcgtcaatt

SEQ ID NO: 687202 - DNA, 800 bp, Homo sapiens
cagaaaaagagactgaggcaagttttagagcaggagtgaaagtttattattaaaaagctttagagtgggaatgaaaagaaattaaaatacacttgaaagagggccaagtgggcatcttggaagacaagtgccccatttgaccttggacttagggttttatatgttggcatacttctggcatcttgcatccctattccattgattcttcttttggggtgagttgcccacatgctcagtggcctgctagcacttgggaggggagtgtgcacagtgtatttactggagttgtatgcatgcttacctgaggtgttgttgcttaccagccaaatgtccctaggaggtcatattcataaactccatgattttgcctctaaatgtgcatgcttgagcccactcacccaactcctgggatcttatcggaaagctgccgatcgctagtttcaggtgtttctatctattggaagatggcctttccctgatgctggctgcaaccaattattactttacgagagagagcatgagagctgtctcaccatcatcacctgatggttgcctgacattcctggtgaggttgggaggatgcctgtcctgccctgctcatgcctgaatagctacctgctgtaacaaaagtactatctatggtagctgtagccatagggaaatgcatttcttcaggtgaaacttacaagtcaaaattagtcttttaaagacaacattgaatctccttgttaaatctccatcagagctcttggaagaaccaggtggcttattagtgcatgagtaagttttaaaaggaatct

SEQ ID NO: 687203 - DNA, 1098 bp, Homo sapiens
  misc_feature (796)..(796): n is a, c, g, or t
gttccggtctcctgatgttctcggcctttttcgtggcgcaccggccctggcggatggccacccgcgcacttgggtaccctccctacctctggggaaactggggctacagaggttctcgctccccgtcctgtcttccccgcccgcttttgctccctcagttgcctgttcgtcggttctcgagttcctccctgtcccgctcagctccaaagctacggggacggggttgtccacaggcgctgccatgtgttgaagctctgccccttggtctgagaatgcaggtacatcggccactggtaccccccctttgggcaatatgttctgcgtctttaaccatggtcatgttctagtgacgaaggggaaggggggacacatgcttaggtctcccaaggctgcctctaggacggggcccctgcttctccaagcctggacccccagcatttgcccgacaccagcccgctgccgccagcccaagttccagaaatgctttaacagggagcctcctgcaccagtcccccaaccccaagccggctcggaggccccaaacggaaaaagcagcacacgaagcgtgagacgccaccattcctgggaaccacagtccacactggctcattctcgctagctttgttaaagcacaattggaagtaaaggttcttcatatagactgcaaatctagaaacctttttagagaaaaactatttaaaactgtcagatcctgaccagcaagcccccccccagccccccttccaagtgactccgtgccttgagtgtgtttgcgtgtttacacccgtccctttgntggccgcccccgtgcgagcggcacccctgccctgccctccacaaaattgggttccaagggctgttccagacaactgccaacgtcactgagggccctgccccagcggccctggccccaggctttattaacctaaaatgtagctcccctagcgctaacctaggaacccccgctgcctgctggggggccacgcccctcatgcccttgtcccaggcccggggccttcagcgttgaacacttccttgcttttttcacatgttttatggaattgttcacctggtttgaaataataaaatgtagaaaga

SEQ ID NO: 687204 - DNA, 1724 bp, Homo sapiens
  misc_feature (796)..(796): n is a, c, g, or t
gttccggtctcctgatgttctcggcctttttcgtggcgcaccggccctggcggatggccacccgcgcacttgggtaccctccctacctctggggaaactggggctacagaggttctcgctccccgtcctgtcttccccgcccgcttttgctccctcagttgcctgttcgtcggttctcgagttcctccctgtcccgctcagctccaaagctacggggacggggttgtccacaggcgctgccatgtgttgaagctctgccccttggtctgagaatgcaggtacatcggccactggtaccccccctttgggcaatatgttctgcgtctttaaccatggtcatgttctagtgacgaaggggaaggggggacacatgcttaggtctcccaaggctgcctctaggacggggcccctgcttctccaagcctggacccccagcatttgcccgacaccagcccgctgccgccagcccaagttccagaaatgctttaacagggagcctcctgcaccagtcccccaaccccaagccggctcggaggccccaaacggaaaaagcagcacacgaagcgtgagacgccaccattcctgggaaccacagtccacactggctcattctcgctagctttgttaaagcacaattggaagtaaaggttcttcatatagactgcaaatctagaaacctttttagagaaaaactatttaaaactgtcagatcctgaccagcaagcccccccccagccccccttccaagtgactccgtgccttgagtgtgtttgcgtgtttacacccgtccctttgntggccgcccccgtgcgagcggcacccctgccctgccctccacaaaattgggttccaagggctgttccagacaactgccaacgtcactgagggccctgccccagcggccctggccccaggctttattaacctaaaatgtagctcccctagcgctaacctaggaacccccgctgcctgctggggggccacgcccctcatgcccttgtcccaggcccggggccttcagcgttgaacacttccttgcttttttcacatgttttatggaattgttcacctggtttgaaataataaaatgtagaaagaaaacaaaaaaatatataataccacacaagaaatggaaaaccgacacgtaaggcaagttgagccaagaacccagcacaaaagaaggaagcgggggactcgaaatagtattgtgccacctgagtgaggactcccaggacagctctgattggtttattcgaacagggggcaccgcatgaagtggcagcctgtatgtctgatcgaagccacgacgacatcatacacccggatgaaagaacattgagtgcttgagcttgggccggagcgcctcatgccgtgggtggttctccccgtaggccacaggaactcaacaaatttgctgtcctctacctgtgaagtactgctcaaagtacgggcggtagtcaccacgtgtctttcagccgtcttggacaaagttgtgacctacgacatctcaggaaagaattacgaggaggcagatagaaactcttgagaaattggcagcgtaaaaccaagttttccgaacccggttttgggcaaggttccttacataaacggtatgaagaacctctcttcagatgaaaatacgaggatacccacggcgtccagcaaacaaaacggagcacaccccacacgaggagctaatcacaggaacggccaccacatatcgc

SEQ ID NO: 687205 - DNA, 277 bp, Homo sapiens
tgcaaccacaacagccgagacaggcgagagagattaaaggaagagagagagagtagaggaagagagagaggagaggaagagatagaggaggggaatagactgaggacaggaagagagcgaggaggggaagcgagacaggaagggcagatagaggagaggaagagagagaggagaggaagagagaggaggggcgtcgagacatggagtgtacgacgacgttttacggacacgacgacgaggacgacggaagacgacgagacggaggggacggagacga

SEQ ID NO: 687206 - DNA, 85 bp, Homo sapiens
cccccccccccccccccctggggtaccatttggaaggggggggggtcccccttttttttttttacaaaaaaaccttaggcgggga

SEQ ID NO: 687207 - DNA, 884 bp, Homo sapiens
  misc_feature (9)..(9): n is a, c, g, or t
  misc_feature (118)..(118): n is a, c, g, or t
  misc_feature (120)..(122): n is a, c, g, or t
  misc_feature (124)..(126): n is a, c, g, or t
  misc_feature (129)..(129): n is a, c, g, or t
  misc_feature (139)..(139): n is a, c, g, or t
  misc_feature (142)..(142): n is a, c, g, or t
  misc_feature (144)..(144): n is a, c, g, or t
  misc_feature (147)..(147): n is a, c, g, or t
  misc_feature (151)..(151): n is a, c, g, or t
  misc_feature (157)..(157): n is a, c, g, or t
  misc_feature (171)..(171): n is a, c, g, or t
  misc_feature (186)..(187): n is a, c, g, or t
  misc_feature (190)..(190): n is a, c, g, or t
  misc_feature (196)..(196): n is a, c, g, or t
  misc_feature (209)..(213): n is a, c, g, or t
  misc_feature (220)..(222): n is a, c, g, or t
  misc_feature (224)..(224): n is a, c, g, or t
  misc_feature (237)..(237): n is a, c, g, or t
  misc_feature (250)..(250): n is a, c, g, or t
  misc_feature (253)..(253): n is a, c, g, or t
  misc_feature (255)..(255): n is a, c, g, or t
  misc_feature (257)..(257): n is a, c, g, or t
  misc_feature (285)..(285): n is a, c, g, or t
  misc_feature (293)..(293): n is a, c, g, or t
  misc_feature (309)..(309): n is a, c, g, or t
  misc_feature (357)..(357): n is a, c, g, or t
  misc_feature (379)..(379): n is a, c, g, or t
  misc_feature (774)..(774): n is a, c, g, or t
  misc_feature (791)..(792): n is a, c, g, or t
  misc_feature (881)..(881): n is a, c, g, or t
taaaaatanaaacaataaaaaaaaaaaagcaaaaaaaaaaaaaaaaaaaaaaaaaaaaaaaatttaaagctcatctcgatccctcaatggggtatacctatattcccggggggcccgncnnncnnnggngcgctcgggnggncngcntgcnccatcnggggcttgccctcngggggctgtctcggnnggntcgggnccatgggggggtnnnnngggcggnnntncagaatgtaagtnaaatacgatttgnttntntnttccggggtttaatacatctttgaggtntccaaacncatacatatgcctaangctgtcaatagcgattacaggacaatctgctggtgttttctgtatgtncagaagaggatgtctaaatttntcacaatcggcatgtaaaaagtttattgtacctttttcacttattaattgccgagctacttcattctggaatatttctaaactttctgtatcttctttcatgtgaaagagtatgagaaaaggcagtccttcttctgtcaattcctctccattttcaaatgttatttctcggacaagaggaacacatttatcttgaatccaattgtaagtcacatcaaaatttgtcatagctcccaagtacaccatatccggagcagaatgccctggtggtttgtagattatgttgtcgccactatatctttccggttttgaaacatccccaaatgcagaaagaaaggcacagtcatcatgcgaaatattcgctactcgttcaaaaactctatagttgtccgagtncttttgctcaaaatatnnaatgatatttcttttgctgcgatcaagagtggtgatttctgctaagtcccgaatttcttgaatggggtcacttttttgttgcctgaagnaat

SEQ ID NO: 687208 - DNA, 549 bp, Homo sapiens
atggctaagtgattcggatcatggtcttcagagtcgtgaagacagtgcgctggtcaggatatctcaggttcaggcaatgagatgactagtctttctaattctgaatcatccttgtccttagtcaggatagcgtgacagaattgaggaatgtcagctttacaggctgttcttaacatggggtttaagcggtaatctgtgttctgggtgatctggcgcatggttatcatctgtgtgcatttgatatccaacaattcactgtttttattttgcttcaagcatccccccatggttttagaatctgcttccggacagaacctctttatcatctgcttgcaaaccctcatgagggtgtagtctagctctgggtccatcatctctgtctcctgcagcttaaatactttttggtggcagcggatgcttagctgcttcttgttttctttcagacattcgataatctgagcgttgcatattgcaagcggaacagaagttttgatgtcactcttgcaggttcgtatagatctggtccaagcgatgtctcagaattccagt

SEQ ID NO: 687209 - DNA, 179 bp, Homo sapiens
atcctagaggatcccctgtatctccgtgccccagacgttgccaagatatccctaggaggtcatacatgggcccctggttagagaaccgactgtctctaacaccctactgacaacccctgatcgactactagccaacatcatactcccataactactactcctaccctacactatccacc

SEQ ID NO: 687210 - DNA, 204 bp, Homo sapiens
gcctgacttagaggatcccctaaatggctgttacctaaatggctgtacctaaatggctgtgcaagaggtggtgaggtcgatcggggttaatcgatttacagaacaggctctctagagggatatgaagcaccgccaggttcctttgagttttaagctgtggctcgtagtgttctggcgagcagttttgttgatttaactgttgag

SEQ ID NO: 687211 - DNA, 185 bp, Homo sapiens
  misc_feature (54)..(54): n is a, c, g, or t
gggggagggagtttcaccatgttgcccaggctggttttgaactccagggctcangcccacctccacctcccaaagtgctggagattataggtatgggccactgtgcccagccctatgaagaatatcttcaaagtatataaaatactgctttttgaaaataggtacaacctcttcatcttgacaac

SEQ ID NO: 687212 - DNA, 521 bp, Homo sapiens
  misc_feature (421)..(421): n is a, c, g, or t
aacttttaaaaactctcattggagtaagtcttttcaagatgatcctccacaatggaggcagcgttcctacttgtcatcacacagctgaagacattgtttcttaggtgtgaaatcggggacaaaggacaaacagagacacacggcattgttcatgggaggcatcgtcaccctcctgggtgtactgtgggaattttcctgtgtgatggaaaacagtggccacacgggttgtgctgtacccacccttccccggcagagatggccctcggccatgtgccgcttgcattccacctctctgccactccactggcaggcttttggtcatgtttccggcacttgccctcatgcccttgaactctcatccggcttggtaccctagcctgctggaccccgtccgaccttggaggccgagccctatgtctcnaggcccagccctagccctctttctcgctcaaattctaaagtagttgttcctcgtttacggtttcccttgcgctttgtcgaaattgggatcatgtgtcata

SEQ ID NO: 687213 - DNA, 145 bp, Homo sapiens
cggacgggctgtggcatctttgatggtgttcacctagagtagatgctagtttgtcagacagggttatcctcgtgaggttgcagtcgagccgagatcgcaccattgcactgctgcctgggacgacctgagcacgccacgcctggct

SEQ ID NO: 687214 - DNA, 180 bp, Homo sapiens
cgggaggctccagagactactatagcagccgggaggtcaggagttcggtgggctacaggtgacccgggaggctcggggcggggtcctacaggaggacaggttatggacaggttgacggttacacacaacggaggtgaaaaaccctttccctggcttccagggatcggtgcctttccatat

SEQ ID NO: 687215 - DNA, 212 bp, Homo sapiens
ttgtaggccgtggaggcaaggccggtgcggtgacagcacttggatcaccgtcgagcgcaccaatcaacacgccctgtgttcaccaaacggcagacggacgtagttctgcattacccactgttcaaaccagcccaaaatatcgctcaaagaaagtcgcaagcttgtccagcaccgtctgcttcttggctgcatggccgttgtttttggaaaat

SEQ ID NO: 687216 - DNA, 915 bp, Homo sapiens
cgtgcgcgggtgtcccgggcggggggggtggatagtggggtctgggccctgtctgggggcggagggcgggcccgctagtcggcggggttggagggtgggccgcgcgacccgcgcctggttgctgcgtgtgcctcccgcccgctgctgcggcgccggggggcgcccgtttggttcttccggcggggtttggtccgcgccgccggcccaggccgcgcaggcgtgctattttggtggctcccgccggctgccccgtgcagtggttgcccgcggcgcgggtaggatgccggcgcactgtttcccccgagagatcgcgggggcgagtgccccaacggcgactctgtgtgcggtgcgccctgggccggcgttccctcctcgggggcgcccgctcacgtcggcgctcggacacatgctgggtgggaccatttggacgcttgaggcgccggggtggtggaatgaggattcgcgcggcgtggcttccctcttgcctggtttgtgggcacccgctcgctggaggccgctcgcccccgtggggccgcctctgctggcggggagagtgtgtgtctcgcgagaggttctctcgcgtgagcgggtgccgggcgcatctccccacgatccacgatctttgtgtggaaccccctgcgtgtgtgagaaaagagtctaagtgtgagtagccctcgcgcagagaagcagcacgctcgagtgacaggtgacagggaacacaccgagtggatgggtggacatcccgttcacgtgagcacccgccccctgctgattcgcattcctcaagacttgcgggcgacgcactgctatgcacccctccacgccccagcaagttggaccacgcaccaggtgttcccctccgctccacgcccgatcataatttttttcttgtctgggacccgcccacatagtcaa

SEQ ID NO: 687217 - DNA, 426 bp, Homo sapiens
atatgtattcataggggcaagtaaaatcatggaaaactcaaaaagaaggggggacatggtcagtttaagctaaaagaaactttctaaacaatgtataggtacacagcaaaattaaacaaatccaacaatatctgaagcttagtgtacatagagtggtaggttgttattcaataaaattattcccaaaagtgtatctcctaagagtgcagttcccatgagtcacttcctgaacccattgaccaaaggtgggacagaaacaatcctgtagaccttgacattcagacagatagtgagctgcttactgatcatatatagcatacgttactttacagcagaggaaaccattgtccacaaaactagatgttcttttggggtattatgtacagacttgtccaatacatgtgtgtggtacctgcgagttgctga

SEQ ID NO: 687218 - DNA, 1190 bp, Homo sapiens
  misc_feature (1)..(1): n is a, c, g, or t
  misc_feature (387)..(387): n is a, c, g, or t
nctctgtattacttctcgctttgctgcgctattacgcagtatcatcgtgttcacggtgtgtagctccgtattctgtgctcagtgcggtagtactactgggttttctctccccctagtggcgccattttccatttgccgccaccgttgttatactcgtcgtgcaccccccccgaatgtgggttttcgcacccggccccgtggttaggactccccaacggctttttcccgggcggtcttttcttagttgggagatcccccttgggtggtgttcccaccagaggagtttcttgttccagccggcgttaaattagtgtgtgagaaactgtcgtcgtgtcgagtggaaggggccactttccacacagggagataatcccccccttcttgggngccccaagaatgttttctcaggagtgtaatatattagccttaattttagattttccttggctccatttgttcacgagatatacctttccacggaagagatggccactttatgaactctcacgccttttggtgtctccacggtattatacagccccacttataaggtacccacttgtgagcccactaagaaggggagacccactgctcgtgttttctgagttggcaccacgtgtgttctaatgtgtttaaacaacctcgaattgtggtctttcgcactgttgcactaaaaaggcgcccacaagtgttaccacaggaccccactggaaccactgtggtccacatgttttctcttatggctaagaccactattataacttaatttttcccaacactcgtataagaattttggggtataaaaagttgttctccacgttgccttcttccccacttccacaatgagcgagaaaaaaaagcttaattgtttaccacttatacttaattttctaaaacccactgtaactcccacttgaaacaccactttttcacaacttaaaggttctgcactagcacgagcttttaataaccctctgggatttattctcggtagaaccacatatgtgttctacactttttttcactaattatatattgtgtatgttaaaactattttccacgttgttttgtctgtaaaactgtctttatcacataatgcttaatggttctttgtaccacacttttgaaaagtttctacctgtatataatggatgttaacccgtatccataaatcccttcgtataatctta

SEQ ID NO: 687219 - DNA, 638 bp, Homo sapiens
  misc_feature (306)..(306): n is a, c, g, or t
  misc_feature (471)..(471): n is a, c, g, or t
accaaggacccgccaagatgggccgtgttcgcaccaaaatcgtgaagaaggcggtccggtgtcgtcagtagaaaagtactaacggcgcgcgcgtgggtcccaatgaacttccgacacgtagactagcgacgttgatgctgaaggaaggatcgctcatatataccgccagacgaatatacacgtctgccgtcagacaagcataggcagtgtttactgtcagctgcgatctggagtgtagaggcgtaacttgcgagagagtgccctagtaatgaggtagtctgtcctattacagagacgtgccacggnaaggaaggagagatgacgtaacaaggaggaaagagcgaaatatactgctctacacgtggagagatcgtctagacacttttgggataccagggacgagtgtagtggcaagctgagaatacctgagcaactactgggagattgacgtgaatgcgttgtgggcatctntgcggcacagtatcatagtccaacagcgttcaggtgtcatcgtcatgtccgtaccagtttggggagatgatagctctcaaaaattgcaccatcgggaggtaacctgatgtcgacatttatatagctgttagttggctgcattagtcttcgatgacacattctgggac

SEQ ID NO: 687220 - DNA, 345 bp, Homo sapiens
  misc_feature (4)..(4): n is a, c, g, or t
tttnggattttaatccgcccctctatagggattttggcccctgaggccaaaaatttggcccgaggaggaattggggccccccccagtgcccagcaaccccttgttcccccgctctttcccctgtgggccccggggttggtttcccccagtgccaacccgagagctccttttggaccctgcccagccccccgccctgttgccccctgcccctgcccccgtggggacatggcagcccaaagccaaggttgggtgggcgggtgccccaaggaccctttttgggaaccccttttccccgggctgggaccaataaatccacccttgtttttgcagttggtgttgccccca

SEQ ID NO: 687221 - DNA, 427 bp, Homo sapiens
gtattcgggtgggtgtataaagtgagtcttcctctctcagctgtggctcttgcctccacttcatatcctgctgaagcctcacagatacagcactatgtcttggattctcaatctcagactgtaagcaaatatacttctgttattataaattacccagtctgcaggattctgttacagcagcacacaaggaactaaaacacactctataggcagtgactactcactgtttttaccggataactgctgggcaagggactggcttcaatgaagtactttctcagcagatgtttgctgggggtcaggactactccacgcaagatgtagtgaacagaaatagggcccattgctgaagcaggaaatattgcaacgtcttcattccctgacttgatgggcgcatacaggtggcagcgcacgatgacagggaact

SEQ ID NO: 687222 - DNA, 304 bp, Homo sapiens
cgtcgacctttcctgttacacgggccaagtgagattgtgggtaactatacaaaacatttctattatcttctaatgtgattaattttcaaggacacagaacctaccagaatatgtaatcaatcttggtgttagaaaatttcctagtaacagctaaaacacatgagagtgtttccttacaatggcaagctagccaagtaactgctacctaggccttaacattttgtctaggccttaatactttacctaggttccaacaaatcctagtgaacttaaaaggaaaaactcacacatgtgccgtcgacgc

SEQ ID NO: 687223 - DNA, 351 bp, Homo sapiens
atttttggagcccctccggtttgaacagaagatggtaccggtggagtgctaaaaccccccctatatggtaaatatattttgggttatgtagtaaaacaaatatgcatgtcattgtgacactttatttgttaaaacatggtagataatcacattttctgggccctgtaaaatagtgttactgtaatactctgttttgccccctgccttgtttacattaaacaggatatttggtaaatttttttgtatggaaagttgtgtaggttactgccagttttccccgcgtctgaaatttttggcccccccggggagaaaccctccagatggtctttgtttccctaccctctctccaaa

SEQ ID NO: 687224 - DNA, 243 bp, Homo sapiens
gtagaacacggccagcagtagatgcaacctttccataaacgtgtgtagctgtggtggtgccttctggcagaaaagcagagaatacactttgccttgttcatcacgaggggctgccgaaccccctcacccttaaatgtatgccgtcttcccagcccaccatccccatcgtggacatcattgctggcctggctgtcctgtcctgatcctacctgtcctgtccttatgctaggcgcgttaccgcac

SEQ ID NO: 687225 - DNA, 482 bp, Homo sapiens
  misc_feature (188)..(188): n is a, c, g, or t
aggatccggtctccccttcgtcggaagggatcactccacgtccgctcaggtggtagctagctataacagacttctgctcggaggagagtgcagcgaagaagagactagctctcaacgccgtagaacagaccggagagtgcccagtggcgcgccgtcggcgagtcagtttagcctgtactggaccgtgnaaccctgagcgctgaggctgtggggtcgcgggattctactgggcctcgccagcttccacagtctgctgcggtctgtggaatggggaaggataaaatacagactttggtttattttaaaaaatggtattctgcctgaactaccaggtccatggtttgcttttggcgcttgcagaagcaccaggacgatctttccaaaaatttctgcagtagtttaactaaccaatgaaataaatgaaggttaaaaaaccacaacagatcattttctcctcttgccctttatattatatttgttaa

SEQ ID NO: 687226 - DNA, 191 bp, Homo sapiens
tacgagtagccctccatttcacatccacatattcatcatcagccatttcaccatctccacttcccaggcaatcatcagtcatcatcgcgtccacacctccatcatcctccctcactcatgcctcagcacaggcacatcaatcactcatcgcatgttccattcatcagccacactcgcacacagcccccaca

SEQ ID NO: 687227 - DNA, 389 bp, Homo sapiens
tgcacttgcatttgcggtcgactctaaggtcccccgttacgaccctccgtaacgacgcctccgtaacgtcctaacgacgcctccgtaacgacgcctccgtaacgaccctccgtaacacgcccagactccacaagctgcgctggcgctcccgtaacgagcgccagcgcagctggtggagtctggggctgttacggagggtgttaggagggctcgttacgctgttaggaggcgtcgttacggacgagcgcccaactggtggagtctgggcgtgttaggaagcgtcgttacggaagcgctgttacggaggcgctcgttacggaagcgatcattacggaggcgctcgttacggaagctgttacggagggctcgttacggagggtaccgagctc

SEQ ID NO: 687228 - DNA, 125 bp, Homo sapiens
cgaatgacgacacgatatgatgctgacgtgctgcaattacagatacatctggcacatcatctatactctctgaaggagtcacctagtgagcgagtgcagatgacgcatggacatgccgcaagatg

SEQ ID NO: 687229 - DNA, 824 bp, Homo sapiens
  misc_feature (34)..(34): n is a, c, g, or t
  misc_feature (95)..(96): n is a, c, g, or t
  misc_feature (108)..(108): n is a, c, g, or t
agcggggctctcggcccaggctgcggtaaatccnggcttgcggccgctggcgtagtctgtggccgggtggtcgttgctgcgcgccccgagccccnngagccatgcagntgtcctacgccatccggtgcgccttctaccagctgctgctggccgcgctcatgctggtggcgatagctgcagctgctctacctgatcgctgctgtccggcactgcacgggcaggaggagcaagaccaatatcattgagcttctttccccacgaccccacggtccagtaggacacaggtcaaggacgcagctaccgcaccgcgctcggcctctggcaggcgtcctaggacgcctcccggccgacctaccccgcgatctacagcgcggccctgcctgaccgaaccacccactgcgacccacacacgagtgctgcatccctgcgcacaaggcaccgcccaagacgatgcaacaaccccatggcctgacaacccttgctccccgggctacctgacttgggcacagcggcctacgcgaaaccgagccaccctggcgctgatccccgctccgcttccccgaccagtaaccagcccgggccccaacccacaaatggcacgcgacacagccgggcaacgccctgccgcccacactcgcctagacaaggggacacacacaacaggctccggactagtggaacgcccacagggacaccactctctggggaagcccaccagacaaaaccattgggacgcgccagctctgccatgccgggccactcccggctccagagccggccaacagccgatcgcgacagggtcctgggaccaccccgctttccgg

SEQ ID NO: 687230 - DNA, 242 bp, Homo sapiens
  misc_feature (103)..(103): n is a, c, g, or t
ctttttattttttgtagagatgaggtctcattacgttgcccggactggtctccaactcctgggctcaagcgaactgcccccctaggcctcccaaagtgctggnattacaggtgtgagtcaccgcacccggcctatcttgactaattcttaattgtccttctagcccaactcaagcatcatatcctcagggaacttaccctgaaggtccaggttgacctaaatgtcccttctgtcgtcttctc

SEQ ID NO: 687231 - DNA, 355 bp, Homo sapiens
aggcccttttccctttttaaatctgccaaatctgattaccttgatgaattccggtgtattggatgtgtgaatataaaaatttgaattctcccggggggcttggtttttgtccaaggatgttggcagtgggcccttagttttcctccggaattgccatcatgttagactatattcggaaaaaatgctgggggatataattttgggtactgatataaaatcctccagatggaagtttagccgaattgtcccgggtagtccctagcgcttttatatgccttattttgtaatttgtttggtctgcggcccctttttataccttccatgtttccttttataaaaaaaataagccagtcca

SEQ ID NO: 687232 - DNA, 192 bp, Homo sapiens
gttccattggtctacatgtctgtttttatgccaataccatactgtttcgattactgtagctttgtaatacattttgaaaactggaaggttgatgccttcagttttttcttttgctcaaaactcctggccgggcgcggtggctcatgcctgtaatcccagcactttgggaggccgaggcgggcggatcacgag

SEQ ID NO: 687233 - DNA, 397 bp, Homo sapiens
ccttagagctctgtcatgacacagtagagctgttgcccacggcagctgactaactctgacttgcgctgaccagagaatacagcatgaattgtagccatgctgttgctgaagttactgtcgcacagtttcctgtttcaagcggaacgtgcttatgcaggcacaggatgatactatttaacacacttctttacaattagtagaagctgtgacaatacgtctgagatacagttagatgcttgtgtagcatgctccatatgagttccagtgcccttccacgcctgaggttgtattgcttggttatccctactgccggagtcgaggacctctttaggctactgagttttcctctggtgcggctatttctagacgttctccagttcttatagctcttttcctc

SEQ ID NO: 687234 - DNA, 367 bp, Homo sapiens
tcggaatcctcctcctcctgggtgacagagcgagactccgtctcaaaaaaaaaaaggaaaaagaaaaaagaaaaaaaaactggggtaaaggttgggggaccacttacactttaatttctatttcccatttttatggggctcctccacatctctccatgaccctctatggattatgacccctgtttcaaacttaatttacttaaggtttacttgggccatgaaactataatacccaataccggcttacaaactcctccgatatagtcattccaatatcctattggtcttcacaaagtctctggaaatctggcaaaattggtgaagggaagtaaggggcaaggagtgagctaaaacagcaagataggag

SEQ ID NO: 687235 - DNA, 159 bp, Homo sapiens
gaagacccagaattcgcagaggggactgggcgcaatgtcacacgaggacacacggaaaccgcctaacgatgaggagataatctcggaaaggttacggaaacctgggaattcggcgaatccctgcgatcagggtaaaatcagaagcagcggatgcggccg

SEQ ID NO: 687236 - DNA, 1025 bp, Homo sapiens
cgacgtggactatactctacaaaccacaaagacataggaagactatacctattattcggcgcatgagctggagctcctaggcagagctctaagcctccttattcgagccgagcatgggccagccaggcaaccttctaggtaacgaccacatctacaacgttatcgtcgacagcccatgacactttgtgaataatcttgccgttcatagtaataccacatcataatcggaggctttggcaaactgactagttcccctaataatcgggtgcccccgatatggcgtatgtccctcgcagtaaacaacagtaagcttctgactcgttacctccctctctccattacatcctgctcgcatctgctatagtggaggccggagcaggaacaggttgaacagtctacccgtcccttagcagggaacatactcccaccctggagcctccgtagacctaaccatcttcttccttagagctgagcaggtgtctcctctatgcttaggggccatcaatttcatacacaacaatatattcaatataggaaatcccctgcataacccaagtacgcaaatcgccccgtcttcgtctgatccgtcctaatcgacagcagtccgtacttctcctatctctcccagtcctagctgctggaatcagtatactacgtaacagaccgcaactcaaagcaccttcttcggaccccggccggaggagggagaacccaattctatggcaatatcgtatatctgagtttggcggtcaccctgaagttatattcttatgctaacggggttcggaatatttccaatgtaactactactccggaaaaaaggacccttggtcctcggcttggctgggcaatagaatcaatggcccagggtttcggggtgcgccgccatttttagtggaaaacagtcaccccgcggattatcccgggacaaaagacgagcccgcgagaagagtgtgcgcccggagaaaaacagaggcgcacacaaaatccggcggcgcgtggcaccacagactctgatcaaacgg

SEQ ID NO: 687237 - DNA, 111 bp, Homo sapiens
tcatacctgcactgatgtcatacctgcactgtagttcatacctgcactgttgttcatacctggtcgctgtatcggggggggggagagcgcggtgacgggtctcgctccctc

SEQ ID NO: 687238 - DNA, 335 bp, Homo sapiens
tctggcaaggaccctaagcaatggtatattctagtctgtaggctacttcttagatgcatgggaaaagcaatggctcccactaagggagggtgaaatgccagaattactctagcagctgctggaagaagggattgaaagattcacagaagtggtcttgctgtcgccgacctaccacctgaggccagtatactccccaaatgatacactcttcacgaaagccattttcctttcctacgcggctcaccagtctcactataaacccccgatgccccttctcataggcatctcatctgctcaatcgctgttcccagacccctcactacctttcctttcta

SEQ ID NO: 687239 - DNA, 473 bp, Homo sapiens
  misc_feature (473)..(473): n is a, c, g, or t
ctaattggttcttcgatgacgcctccctttggctgctacagccctcctgctctcttaacatcaggatttaagcctgatgttaaatgctgtaacatcagggagggatgtgaggtccctcccttgctgttaccctaggtttacagattttcattcagctctttttacaaactgcagattataaaaagcagtgacaaatttccactcgtctcgtcatcgaagaaccaattagcttctacgtctcatcactggacattcagggctcttctgagagccaggatgggagactttccctagctcgcctcacgaaggggatttcctgcagatgtgaatctgtttacctcaggttgggacttgaatccatgtgctgggacttgaacccagccaaaactcacagacctagtttcaggacctaatgaagctcaggttcttgatgtcttattgcagaaagaattcagtgatgagacgtagaaggn

SEQ ID NO: 687240 - DNA, 569 bp, Homo sapiens
aaatacaacatagaccgaaagatgtaccaatgcatagtagaagcacaggagtcccaatgcgcggcgatagcggatgaaattcaagccgaaaagctcacgtgccggcgagacggcaagtgttagaatgagaaaacggaccgtccagagcccgagaagctgctcaaaggccttgaccgggttggctccaagactgtcggttgcccccaagtaaaaataccaaacccctggcgttaggccgatgacgtaaagcagccagaccgaggcgctcttccagtgtcttgtgccagtgaacatgacggccatcagaagttcttccgcaggtccatgccggcgtaaaggctggcaacgtcttccgcatagccattgaacatcaaggttggacgccggtccgaactgaagaagccccctgtcccgatgcgtcgctcagttgcctggctccatcggggatgatcgacctcaggattaacgttggcaaaaaaaccatactcgcttggcgcgacgatattccaggtgttctttggctgcgtatcggtcaacgaaatacgaacaatcgatttgcgtcccttgaa

SEQ ID NO: 687241 - DNA, 371 bp, Homo sapiens
tcaaaaacaaaactaaaacaaaaaccaacacaaatgtagtacacaaatgaaaataattactgtgttaaacacagtttcatagaaaataaaagaccaatcaaatacaataagctgcctttttagatgggtatgttattcttctttcacagttaaagaaacaggctcagagaatgttatttgattggaccgtgttgcatttctggacagtgcagctgagatcagactttgtgtgtaactccactagcctaccagggtgcctctcataaagctaagaaatgtaaatttggactaatatacaaagttgccagggcagcactgggtcaattctacatacagtacttctatgttcatcaagggaaaccttacgggaa

SEQ ID NO: 687242 - DNA, 140 bp, Homo sapiens
tgacatggactgattccaacacagtgctctctttcccccttccctgacatcagcggaattgcagcatccctgcatgcctgtccatatacaacccctctttgaaaaaatgacacatgagaataaactcctacgaaagccct

SEQ ID NO: 687243 - DNA, 491 bp, Homo sapiens
  misc_feature (36)..(36): n is a, c, g, or t
  misc_feature (77)..(77): n is a, c, g, or t
  misc_feature (84)..(84): n is a, c, g, or t
  misc_feature (103)..(103): n is a, c, g, or t
  misc_feature (138)..(138): n is a, c, g, or t
  misc_feature (142)..(142): n is a, c, g, or t
  misc_feature (160)..(160): n is a, c, g, or t
  misc_feature (231)..(231): n is a, c, g, or t
  misc_feature (253)..(256): n is a, c, g, or t
  misc_feature (259)..(259): n is a, c, g, or t
  misc_feature (262)..(262): n is a, c, g, or t
  misc_feature (264)..(265): n is a, c, g, or t
  misc_feature (267)..(267): n is a, c, g, or t
  misc_feature (275)..(275): n is a, c, g, or t
  misc_feature (280)..(280): n is a, c, g, or t
  misc_feature (282)..(282): n is a, c, g, or t
  misc_feature (285)..(286): n is a, c, g, or t
  misc_feature (288)..(288): n is a, c, g, or t
  misc_feature (296)..(298): n is a, c, g, or t
  misc_feature (301)..(301): n is a, c, g, or t
  misc_feature (304)..(306): n is a, c, g, or t
  misc_feature (309)..(311): n is a, c, g, or t
  misc_feature (315)..(315): n is a, c, g, or t
  misc_feature (318)..(318): n is a, c, g, or t
  misc_feature (322)..(322): n is a, c, g, or t
  misc_feature (324)..(324): n is a, c, g, or t
  misc_feature (328)..(328): n is a, c, g, or t
  misc_feature (330)..(330): n is a, c, g, or t
  misc_feature (337)..(337): n is a, c, g, or t
  misc_feature (353)..(353): n is a, c, g, or t
  misc_feature (360)..(360): n is a, c, g, or t
  misc_feature (363)..(363): n is a, c, g, or t
  misc_feature (369)..(369): n is a, c, g, or t
  misc_feature (394)..(394): n is a, c, g, or t
  misc_feature (408)..(408): n is a, c, g, or t
  misc_feature (423)..(423): n is a, c, g, or t
  misc_feature (491)..(491): n is a, c, g, or t
agggatttatagcaaaccctatataaagtgaatganttaatacacagagtgaagatgactagggtagaataatttcngaaaatntcaaattacagcacttganacaaagactgatgataactatctgtaccataaaantttncatgccacgaaaacattnatttttaattttaaatttttatgtaaaacatagttataaaaagagtattacatttattataaaccagtganttactcagagaaatatttatcnnnnccnacncnncnccagtaantattncnccnncnggcccccnnnagnagnnnccnnnactntcntttntngggngnggggggngggcgggggggggggngttttcnggnggctgngtctactccttgatattttggggcngcttcaacaaatgngactcaataacctgntgaacacttctatagcctagggctacagctagatccatagaattatatccagagtcagtttcaattgn

SEQ ID NO: 687244 - DNA, 314 bp, Homo sapiens
ctatgatcagactagtctaaccaaatactctttatactctttcttttttttgggtaagagagggggtctccctatgtggcccaggcgggtcctgaagtcctgggctaaagcaatcgtctggctctcacctcccaaggggcgggcagatcacctgaagtcgggagttggagaccagccggaccaagagggagaaacccggtctctatcacaaaaggcaaaatgaccggggcgggggggggggcaccttgtaatcccagccatttggaaggctgaggcggaagactggcttgaatccaggaagcagagattgcagt

SEQ ID NO: 687245 - DNA, 949 bp, Homo sapiens
  misc_feature (1)..(1): n is a, c, g, or t
  misc_feature (66)..(66): n is a, c, g, or t
  misc_feature (93)..(93): n is a, c, g, or t
  misc_feature (120)..(120): n is a, c, g, or t
  misc_feature (124)..(124): n is a, c, g, or t
  misc_feature (126)..(126): n is a, c, g, or t
  misc_feature (128)..(129): n is a, c, g, or t
  misc_feature (148)..(148): n is a, c, g, or t
  misc_feature (150)..(150): n is a, c, g, or t
  misc_feature (160)..(160): n is a, c, g, or t
  misc_feature (174)..(174): n is a, c, g, or t
  misc_feature (187)..(187): n is a, c, g, or t
  misc_feature (210)..(210): n is a, c, g, or t
  misc_feature (215)..(215): n is a, c, g, or t
  misc_feature (225)..(225): n is a, c, g, or t
  misc_feature (232)..(232): n is a, c, g, or t
  misc_feature (268)..(268): n is a, c, g, or t
  misc_feature (283)..(283): n is a, c, g, or t
  misc_feature (285)..(286): n is a, c, g, or t
  misc_feature (290)..(290): n is a, c, g, or t
  misc_feature (298)..(298): n is a, c, g, or t
  misc_feature (302)..(302): n is a, c, g, or t
  misc_feature (334)..(334): n is a, c, g, or t
  misc_feature (353)..(353): n is a, c, g, or t
  misc_feature (382)..(382): n is a, c, g, or t
  misc_feature (386)..(386): n is a, c, g, or t
  misc_feature (388)..(388): n is a, c, g, or t
  misc_feature (407)..(407): n is a, c, g, or t
  misc_feature (424)..(424): n is a, c, g, or t
  misc_feature (430)..(430): n is a, c, g, or t
  misc_feature (435)..(435): n is a, c, g, or t
  misc_feature (480)..(480): n is a, c, g, or t
  misc_feature (494)..(494): n is a, c, g, or t
  misc_feature (536)..(536): n is a, c, g, or t
  misc_feature (540)..(540): n is a, c, g, or t
  misc_feature (547)..(547): n is a, c, g, or t
  misc_feature (552)..(552): n is a, c, g, or t
  misc_feature (556)..(556): n is a, c, g, or t
  misc_feature (578)..(579): n is a, c, g, or t
  misc_feature (593)..(593): n is a, c, g, or t
  misc_feature (605)..(605): n is a, c, g, or t
  misc_feature (609)..(611): n is a, c, g, or t
  misc_feature (643)..(643): n is a, c, g, or t
  misc_feature (666)..(666): n is a, c, g, or t
  misc_feature (670)..(670): n is a, c, g, or t
  misc_feature (682)..(682): n is a, c, g, or t
  misc_feature (718)..(718): n is a, c, g, or t
  misc_feature (731)..(731): n is a, c, g, or t
  misc_feature (745)..(745): n is a, c, g, or t
  misc_feature (752)..(752): n is a, c, g, or t
  misc_feature (866)..(866): n is a, c, g, or t
  misc_feature (916)..(916): n is a, c, g, or t
naacacattgcattttccacttacaatacagtgtttataaagcgcaatgccattcccctcccctgnccatatgtcccatattcaagtattganaatgcccagtaacttactatagcagcntaantntnnaaaactgccacaaaatttncnacgaatttangtccttcaaatgtnttaaatgtgtggnacaatgctacatctacacttggntgggntggtcggccncttgggngggggggcctgggggggcgccacggggggggggggntccaccaccaggggntnncccnggggttcntccngggatgcgtcctgcgctctggtacagcttggngatggtggggttgcgaacnttctccagctctttctgttggtgttcaanttgntncttctcggcagtgtgattnttatcaagccagtgganaatttngttanacttgtgcagaatcttctgtttgtgctcatcgttaatcttagacntatgaaggtttctnaatcttcaacagttagactattcatgttagaagagcaatagngaantccaagnggaantctngggatgaacaccttgtgccctnngtcttctcaatctntcaggctttganactnnncagacttcctgggaccataagtttcaatggtnttcacttgtctcaaaaggaaccnagancattagatgaanagataatcttgcttctctttttcccggtactcttgntccacagcagagnacattgagatatancattggncatcaatgtacaaaagtgactttcaatctgaggaacacctcggggtgcaggaggtatgcctgtgagttcaaacttgccaagcaggttgttatcctttgtcatggcacgctcgcnttcataaacctgaataagcacaccaggctggttgtcagaataggtagtgnaggtctgtgtctgcttggtaggaatggtggtat

SEQ ID NO: 687246 - DNA, 139 bp, Homo sapiens
tgtcagtcgctctggcctctcctcccagttcaacccaaaaaggcataattaaactttacttcctctctttcttcttctcctcttcttctctctcttgcctctatgcctgtatttctggcaatatgacaggcctgcctac

SEQ ID NO: 687247 - DNA, 205 bp, Homo sapiens
  misc_feature (111)..(111): n is a, c, g, or t
tggttttgtatgaggtcagtgctggtggttaagcagcggcgtgccgtcccgcaggcccctggtacagtgaacttgtcagtgactttcagaatgttgctttcgtgcttcttnaacatttcctctcttgagctaggattgttacagaaccccgggtgcgtactagcctgatataggtatcatgtggtcctggctaagacaggaggaa

SEQ ID NO: 687248 - DNA, 200 bp, Homo sapiens
gggtgggtcagggtagaagcggggaagggatcacacgtggaggaagaagtcagaagcagagacaaacgccggtgtcactgctgtaccaagatcaacctagggggttacacaccacagtcgtgtattcatacggggctgtctgtggacactgtcgggctagtcgggggggtagcgaggcgtcgaggttcgtaactcatggt

SEQ ID NO: 687249 - DNA, 440 bp, Homo sapiens
cgactactactactaaattcgcggaagtcgagaaaattcttaaaagaaaaaaaaatgaaagcgggtctaagagacagagacaacttttttccccaatataacaaaccagcttttggaggtagagatttatttcttattaaaaaatggaaaataatatttatttggccaggtaaggtggctcacgcctgtggtcctaggactttgggaggctgaggcaggcagattgcttgagctcaggagttcgagaccagcctgggcaacatggtgagaccccgtctctacaaaggtacaaaaattggccaggcgtggtggcacttgtctgtagtccaaggtacttgaaggcctgaggtggggggatcacttgaacctgggtggtcgaggctgcagtgagccgagatcgcgccactactccagcctgggtgacaaagtaagaccctgcc

SEQ ID NO: 687250 - DNA, 174 bp, Homo sapiens
ctcccaagcaaggcagctgtctcacactttagcaaggctgtgagagacacatcagagccctgggcacgtcactggttggagcctgagagtagctccctccttttctatcgtgagctcttcctcctccacctcacagcagcgagcacagctccagcgaacacagctccaaagaga

SEQ ID NO: 687251 - DNA, 475 bp, Homo sapiens
tgccacacacatggattgttccattccccagcacctttccacaatagccaaagaccatagaatccaatcctaaagggccccatgataacagattgggttaaaagaaaatggtgggtatgtataccatccatgggaatactatgcagcccagaaaaaagaacaagatcttgtctttgcaggacccatggatggagctggagacccattatttttagcaaactaatgcaggaacagaaaatgccacgtgttcccacttatacgtgggagctgaatgatgaggactcatgagcacaaaaaagggaacagcaaatactggggcctccttgagggtggaagctgggaggagggagaggagcggaaaaaataattattgggtactaggcttagtacctgggtggtgaaataatctgtacgacacacccccatgacaagaatttacctatgtaacaaacccgcacatgtaccccagagtcta

SEQ ID NO: 687252 - DNA, 832 bp, Homo sapiens
  misc_feature (90)..(90): n is a, c, g, or t
  misc_feature (95)..(96): n is a, c, g, or t
  misc_feature (99)..(100): n is a, c, g, or t
  misc_feature (112)..(112): n is a, c, g, or t
  misc_feature (126)..(126): n is a, c, g, or t
  misc_feature (134)..(135): n is a, c, g, or t
  misc_feature (141)..(142): n is a, c, g, or t
  misc_feature (153)..(154): n is a, c, g, or t
  misc_feature (161)..(161): n is a, c, g, or t
  misc_feature (163)..(163): n is a, c, g, or t
  misc_feature (216)..(216): n is a, c, g, or t
  misc_feature (224)..(224): n is a, c, g, or t
  misc_feature (524)..(524): n is a, c, g, or t
ttcaggtggtggaggaaaaggcgctccgtcatggggatccagacgagccccgtcctgctggcctccctgggggtggggctggtcactctnctcgnnctnnctgtgggctccnacttggttcggagntcccgccnncctcanntcactctcctnnaccccantnaaaagtacctgctacgactgctagacaagacgactgtgagccacaacaccaanaggttccncttgtgcccttgcccaccgggccaaccagcacgtctggggctgccgtgtagggcaaaccagtatcgtaccgtctccagcccggaattgatggcagcgctggtcatcagggccatacactcctgtcaccaggtgatgaggatcaaggctatgtggactcgtagtcatcaagcgtctacgctgagagggctgtgcaccccaagatttcctgagggagggaagcatgtctcagtacctggatagcctgaacggttggggactgctggatggagctttcgggggccaagcgggcttgcgtcacnttacgactggaaaagggcagtataaacagttcagcccaacaagaaatcgtccaccagaaccgccgagctggcgtaagaaacgtgggacatgattgccggcgggacaggaatcagccgaatgctacggctgatccgggccatcctgacagtccctgaagatccaatcccgagtgctttctgcttgtgtgccaaccagtagcagagaaaggatatcatcttgcggggaggacttagaggaactgcaggcccgggtatcccaatctgcttttaagctctggttcacgtctggatcatcccccagaagactg

SEQ ID NO: 687253 - DNA, 139 bp, Homo sapiens
cacaggctttggagcttctcaccatctatgcctgggagcaggggagtggagtgcctggattttgacactgccgaaggtttccggacgtcctggcgctggtcacactatgtcgggtgctctgcatcccctgcgaggttta

SEQ ID NO: 687254 - DNA, 242 bp, Homo sapiens
  misc_feature (227)..(227): n is a, c, g, or t
tctctccacacgggaagtgaaaagagtaatatgtctgcttctcagcttacattaggtattcttatttttctatgatagttcaattatattaatatttattacagccataaatgtttcagaccaacacaatctatttttggggggtggggtgtggtaggaggagaaaaaggaagataatcctagggcaaatggagagaattctagaagaataacctatttagatgttngccagtgtggagaga

SEQ ID NO: 687255 - DNA, 337 bp, Homo sapiens
  misc_feature (90)..(90): n is a, c, g, or t
  misc_feature (95)..(96): n is a, c, g, or t
  misc_feature (99)..(100): n is a, c, g, or t
  misc_feature (112)..(112): n is a, c, g, or t
  misc_feature (126)..(126): n is a, c, g, or t
  misc_feature (134)..(135): n is a, c, g, or t
  misc_feature (141)..(142): n is a, c, g, or t
  misc_feature (153)..(154): n is a, c, g, or t
  misc_feature (161)..(161): n is a, c, g, or t
  misc_feature (163)..(163): n is a, c, g, or t
  misc_feature (216)..(216): n is a, c, g, or t
  misc_feature (224)..(224): n is a, c, g, or t
  misc_feature (247)..(247): n is a, c, g, or t
  misc_feature (257)..(257): n is a, c, g, or t
  misc_feature (260)..(260): n is a, c, g, or t
  misc_feature (267)..(267): n is a, c, g, or t
  misc_feature (329)..(329): n is a, c, g, or t
ttcaggtggtggaggaaaaggcgctccgtcatggggatccagacgagccccgtcctgctggcctccctgggggtggggctggtcactctnctcgnnctnnctgtgggctccnacttggttcggagntcccgccnncctcanntcactctcctnnaccccantnaaaagtacctgctacgactgctagacaagacgactgtgagccacaacaccaanaggttccncttttcccttcccacctcccacnacacactttntcntcccttnttcaaacaaaaccacccccccaccctaaattatgtgcatgcctttgacaacatgtgccaaanacaccttg

SEQ ID NO: 687256 - DNA, 305 bp, Homo sapiens
catcaccccttcttctgcttccgatctcctgcgatcgctgggcatcccggcgccctgcacccgcctggctcatttatttgtatttttagtagagatggggtttcactgtattagccaggatgctctccaatctcctgaccttgtgatccgcctgccttgaactcccaaagtgctgggattacaggactgagccaccacgcctggcctattttatttcagtataagttactgtagtaattaactggaaactatgtacctggcagtgaaatctattcacagcaaacttactccctgaatatcccccc

SEQ ID NO: 687257 - DNA, 106 bp, Homo sapiens
cggatccgttgcggctgcagctctgcagtcgggccgttccttcgccgccgccaggggtagccggtgtagcttcgcaagtttagcgcgggtgttacccgaacccatg

SEQ ID NO: 687258 - DNA, 798 bp, Homo sapiens
ctggtacgcctcggagtaacgggatagtgcgctgtgctcgaggggtgcctggccatggcctgagcgagcgagtctagccatgcaggggtgagggggctgctggctgtctgtgcggactgagacaggcgaacccgacgcagaagagtccaccaccggacagccagcacatccacgatggagcgtcttgtcgcccgtggtgaccttcccagatactattgtgctgcaccagcgcctgcctgcgagcgctcttcgtggccggtggaccacgatggagctgagccgcgagctgcaggccctgcctggccgagctgaactgccgaggaccagaaccgcctgggattacgacttccagcgaggacatgcctgctgctggggcccttggacgcctgcagtggaccgaacgtggacatgcgactcggtgcccgcgttctaccgcgagacggtgcaggtggggcgctgccgccttgctgctggtgccggcggcccgtcgcggtcgcgggtggcatgtcatgccccggacacgtcggagaccgggcgcggctgaagtcccctcgaacgggcttccgagggggaagggcggcaccgggaagcataggcattggccctatagggttgatcccccgggaattccccagtgggtcacagtgagcgatatggaacgcgaccaggagggactagtgagccggcggtggacactgggatatgcacaggaagtagggggacggtaggaagtaccgcgtgcacggtgagtcagctagagataacagaaaacactgatgactacggtgagaggcggta

SEQ ID NO: 687259 - DNA, 180 bp, Homo sapiens
ccggtctcgtacgtgctgtcgcgcttgacgtggatgcggcggacacggtcccgcagttccacggtctcctcactcttcactgggggaagcctggctgcggctacggcttgtggactccaacaaggagttgtcggggacgcggggagtctacatagagtaggacgttgagtgtctcctcat

SEQ ID NO: 687260 - DNA, 369 bp, Homo sapiens
ccagaatctgtttggcaagtcagggttctcatacaggagacttagtgaacaaagcaagagaaaatgctcagggtccaagtgcagtggctttatgcctgtaatcccagtactttggaaggccgaggtgggcagatcacctgaggtcaggagtttgagaccagcctgaccaatatgatgaaaccccatctctactaaaaatataaaaattacccgggtgtggtggtatgtgcttgtaatcccagctactcgggaggctgaaatgggagaatcacttgaatctgggaggcagaggttgcaatgagccgagatcgcgccattgcactctagcctgggcaacaagagtaaaactccatctcaaaaaaaataaat

SEQ ID NO: 687261 - DNA, 184 bp, Homo sapiens
atcatgaagtgagcaacattggggtttcctggggacaaggtggagtcgggcaatgggagagccctgtctgttcacatggactcagccttctcagcacctggtctggctttggtgctgacaaagaatagccttgtatcagatcaacacggagcctgatgggcctctcggaagtgctgtggacaaa

SEQ ID NO: 687262 - DNA, 1078 bp, Homo sapiens
gcctcatgtagccattcgtaatcgcaatgggattcctaatgcttaccgaacgacacattctaggctatatacaagctacgcaaaggccccaacgttgtaggcccctacgggctactacaagccttcgctgacgccataaaactcttcacccaaggagccccgtaaagacccgccacatcgtaccagtcaccctctacatcaccggcccgagcttagctcgtcacaccatcgcatcttctactatgaacccccacatccccagtagccaagccccatggatcaaccgtcaacgctagggcctcctgctttattgctacgccacactctgcgcctacgacgtatactcacactcctcatgatcagggtcgagcatcaaacctcaaacctagcgccctgactcggcgcacatgcagagcagtacgcccaaaacaatctcatctgaagtacagcctaggcgcagtcattctagctatcaagcatggacctaataagtggctccttgaagcgtcatccaaccttatcacaacagccagaacacctcctgaatgactcctgccatgcatgacccttggcataatatgcttgatcgtccaaaatacagacagagacacaaacgaaaaccccatacgaacattgaccgaaggggagatccgaacataagactccggactacaacagtcgaatacagcacgaaggcacccataccgaacctaacatacatagccagaaacacacaaaacatgcactgcataattaaaacaccacttcaagcactcacaggttcttgcctagagaaccaagcatatgaccgcaccgtctccccatgaaaatctacgagcaaccatcatctaaggccaccacaaggagacctaaagagagtacaccactcagcagtggcgtaatcgaagtcgagcaacaggcgataccccccgggaaaccagataaggagacgacgacaacaccagagcgcccgatgacaagacagtgcgtaagcagagaaaaacaataagcaatagcagagcctatgcagactggctccagtaacacagaaccaaggatccgagcaatccccggtcaa

SEQ ID NO: 687263 - DNA, 175 bp, Homo sapiens
aaatctgagtatttcgtgtgctggtgagaggacagcgctgcccagaacatactgaaatacaggaggcatctccttaagctggtttgcaagtggactgcctgtaacatctttgggcacatcaaaaatcttttcaatttttgggtatgcgcacttgtcagccggtaaaatatgtgca

SEQ ID NO: 687264 - DNA, 400 bp, Homo sapiens
cgtcgacagaacctatgtgaagaattcttcctgttggatttgtttatttgttttgttttctgagacaggggttctctgtgtagttcttcctgaaactctgtgtaggctttcctaaaactcaatttctaggacagacagacttgcctccagctcagagatccatccatctgcctctgccacctccgtgattggataaaaggtgtgcaccactgtgccccagcgtagatagaatttttaaaaaactgtttaatatgtagtccaggttggctttgtgtttgtttggtttggtttgaaacagggtctctgtggagccctggctggcctggaactcagtatgtagaccaggctggcctcgaactcagagatccgcctgcctgggattaaaggggtgcgtcgacgc

SEQ ID NO: 687265 - DNA, 248 bp, Homo sapiens
ctcgataagggccaagcgtgtaatccagcacttggggagaccgatgtgcagccaccacgtcctttttattttattgtagagatgaggtccttgctatgttgcccaagctggtcttgaactccggggctcaattgatctccccaactcagcctcccgagtagctgggactgcaggtgcccaccaccacgcctggctaattttttgtatttttggtagagacggagtttcaccatgttggccttatcgag

SEQ ID NO: 687266 - DNA, 105 bp, Homo sapiens
gttacaaccctatggaagaagggaccgccactccaatcatgtcacaaaaactttaaatggcaatcgcattcaccgaagggcgaaggacaggccgagctaaatgca

SEQ ID NO: 687267 - DNA, 1036 bp, Homo sapiens
  misc_feature (77)..(78): n is a, c, g, or t
  misc_feature (120)..(121): n is a, c, g, or t
  misc_feature (155)..(155): n is a, c, g, or t
  misc_feature (166)..(167): n is a, c, g, or t
  misc_feature (176)..(176): n is a, c, g, or t
  misc_feature (181)..(182): n is a, c, g, or t
  misc_feature (203)..(203): n is a, c, g, or t
  misc_feature (205)..(206): n is a, c, g, or t
  misc_feature (221)..(221): n is a, c, g, or t
  misc_feature (253)..(253): n is a, c, g, or t
  misc_feature (257)..(258): n is a, c, g, or t
  misc_feature (260)..(261): n is a, c, g, or t
  misc_feature (314)..(314): n is a, c, g, or t
  misc_feature (363)..(363): n is a, c, g, or t
  misc_feature (411)..(412): n is a, c, g, or t
  misc_feature (478)..(478): n is a, c, g, or t
  misc_feature (493)..(493): n is a, c, g, or t
  misc_feature (563)..(563): n is a, c, g, or t
  misc_feature (641)..(641): n is a, c, g, or t
tgtcctgaatggtgagctgtgagcgcagcctggcctgtggtgcccggtcgagcccgcgccatggcggccgaggtganngctgtggccggaagcggggctgttggcggctgcctggccaanngacggcttgcagcagtctaatgtgccctggacantaccccaaaannggcggcgcncctcnntcgctgtcgcgtgacgccgangnngccgagcctaccaantggtgccgggagtacttgggcggggcctggcngccnnanntgcatccctgatggagctgagtggtttaccccgtgagcggaggcctcagcaanctgctcttccgctgctcgctcccggaccacctgcccagcgttggcgagnagccccgggaggtgcttctgcggctgtacggagccatcttgcagggcnntggactccctggtgctagaaagcgtgatgttcgccatacttgcggagcggtcgctggggccccagntgtacggagtcttcncagagggccggctggaacagtacatcccaagtcggccattgaaaactcaagagcttcgagagccagtgtngtcagcagccattgccacgaagatggcgcaatttcatggcatggagatgcctttcaccaaggagccccactggctgtntgggaccatggagcggtacctaaaacagatccatgacctgcccccaaatgggcctccctgagatgaacctgctggagatgtacagcctgaaggatgagatgggcaacctcaggaagttactagagtctaccccatcgccagttgtcttctgccacaatgacatccactcctcatcctgactccaccctcccactccttggatttctcctggagcctccagggcaggaccttggagggaggaacaacgagcagaaggccctggcgactgggctgagcccccaagtgaaactgaggttcaggagaccggcctgttcctgagtttgagtaggtccccatggctggcaggccagagccccgtgctgtgtatgtaacccaataaacaagcttttttttca

SEQ ID NO: 687268 - DNA, 398 bp, Homo sapiens
gtcattacctggcagaggcaaagaaaggtgagaccctctcccaagaggagcagagaaaactggaagaagatttgctggagatgtacagcctgaaggatgagatgggcaacctcaggaagttactagagtctaccccatcgccagttgtcttctgccacaatgacatccactcctcatcctgactccaccctcccactccttggatttctcctggagcctccagggcaggaccttggagggaggaacaacgagcagaaggccctggcgactgggctgagcccccaagtgaaactgaggttcaggagaccggcctgttcctgagtttgagtaggtccccatggctggcaggccagagccccgtgctgtgtatgtaacccaataaacaagcttttttttca

SEQ ID NO: 687269 - DNA, 1055 bp, Homo sapiens
ggctatttctgacgggtcgctccgcgaatatgcagctcaattgccgatggacgatcaaacccgtagatgctgagatcgataagtgctgtaaccctgggcctgggggtcgaccgcgtcgcaggtgaggcgctttcgtggaacgctggcgtggggcctgcgagaagaaggacgtcctcgtggcgctcggctggccagtcgcactgccatgacgcgcatggtgactgactgtgttcctccgtcacggcccagcagtgagaagcttcagagaagagagaacgccgattgatatgagcgtgatacgggatcgaatggaacgttatgtccatagaaagtagtactttcatggaagggcccagacccattcggggaactctcccttggttcgtgtaccaaatcgggactttacttcaactgcagcgtggaccaaataagtccaagaacagaacgtgaggacttctgagcgatcgtgatcacgtgtcgtgaaaacgagtatctcgtttactgagatagctagatgagaccacagtggtccgcctgaacagacgagaggcaataatggcttctgcaaagcgaactgacggccactacagggcacgtcccatgattgccgtgggagccgcgaacggccaattgctcgcggtacgactgatcaatggctgacacttttcgcattcttctaatctcctgctatctaagcacacctgtgggcattgcgcccagcccctactagtgcatactttcactggcaccgacgtggccctttgctcgcggctggacaaccattgcgcgcccacgcttccacgaaggcacacgctgtggctggacatggcaccgccttgtcccacacggctcctggcaccgaacacaaatttctacctcgcaagcccgcttgcaggccacacggaggaaatgtacccggctatcctcttgccacgcttgggcttcgtcttgcccaccgggcagccctcaattcgcgtcttggtggggaagtgggaccttctcggcttggattttccccccatacgttcccctttcacaccatcgaagcacatatc

SEQ ID NO: 687270 - DNA, 121 bp, Homo sapiens
tatagcagctttattcataattgccaaatcttgtaagcaaccaagatgttcttcaacaagtgaatggataaatgaactgtaatatgttcatacaatgaaatacggcagggcttgatggctc

SEQ ID NO: 687271 - DNA, 993 bp, Homo sapiens
gtctttcccttcggtgtgccactgaagtatcctggtgtcgccatgggacgcgcccgtccgtagttaccggtatggtaagaacaagccgtacttgcaaagtctcgtatttcggaccggggtgtccctgaatgcgcaagattcgcattttagatcgggagtgcggaagaaggcagaagtgggatgagtatctcgcgtcgtttgatggtccatcaatgctggtcagaatgagatcatggaggcagggtgatcgctctgcaaagacccatggcagggcgtggcgcggagattgtgtgccagaattaaagatagctactgtgctaacacaaggtttgtgagctaagagagtgtgctctccagttatccggggtgcggcatccatccccttccacagtcaatttcgctttcaaactagattgttgtcgctgtgcgtggggctggactaggctccaaagcgaggcaatgcgaaggggcctttggatcaggccccaaggggcaactgtgcgacatgggctgtcactatatggcgaagttactcagtgtccatccgcaaacaatgcgtgcgagaactaaggaggcgatgtgatttgaggccctgcgaggggccaggttcaagggtttcctgagccggcagaagatccgcagctcagaggaggtgggggttgcaccagagtctcgatgctcgcgtgaattgtgcggactctcgcggggtggcagaagccggtcaagtcccagaatgggctgggggggggcacgggcagtcccccaataggtgggccttctggtggagggggggggcctgggctcgtaaaggggccgagtggggggggccccactttatatccgaaaaatgtcctgccctgtcacaaaaaagggaaaagggcacaacgaggacaccagggagaagacacggaaacagaaatgtacaaaaaaaaacaggggggggaaaaagaaaatgcggcgcaaaaagagggagacgggggcaacacgggaaaa

SEQ ID NO: 687272 - DNA, 971 bp, Homo sapiens
gcaatatggtgtgcaggcgcttcgtggaggttggccgggtggcctatgtctccttatggacctcatgccgtggtgaatggtcgcgcatggtagatgtgatctgatcagaacaggtctttggtcgatggaccttgccctcaagtgaggatgacgggccatgcctttcaagtgcatgcagctcactgatttcatcctcacagtttccgcgacaaggtgcccaccagaagtatgtccgcacaagcctggtccagcaaggcgagcacatcaatactgaaatgggtagccgacacgatgggccacgaagattgaggccagaggaaaggaaagccaagatgacagatttgatcgtttcaagagttatgaaggcaaagaaaatgaggaacagaataatcaagaatgaagttaagaagcttcaaaaggcagactctcctgaaagcttctcccatgaaaagcacctggtactaagggtactgctgctgctgctgctgctgctgctgctgcgtgctgctaaagttccagcaaaaaaagatcaccggcgcgagtaaagaggctccagcccaatgaaggttcctggccagaaaggcacaggccagagagcagcgctgctccaaaagctcagaggggtcaaaaagctccacgcagaaagcacctgctccaaaggcatctcgcaaggaagcattaagtggcagtcattacaaagcaaacgaggttctttctgacccgtcgaaaagagaaaaacaacgctccggggccatcatggcggggccgcggcgaggggacggatggccctggcttagttggtccgacccttttttgcccaagtggaaaacggcggcccatagggaggctaaacgaacgcgtgacgacattccacaaacaggtgtgcacccgggcgctccagtcggagtgcaacaaacaccccagatccaaacatgcacagtgctgtctcaacccacatattactacaacca

SEQ ID NO: 687273 - DNA, 936 bp, Homo sapiens
tgaaacaggccttcttactggatgtacagaatataagagccatccaccagcatctcctccctcctgtgcagcaatcactgaaatttgtgagggtgaggaatacgttaagacaaagtgtctggaccctccagcaaacaagcaacaagttgccggagaaagtgaagaagatccttgcctctttggactctgttcagcatttcctcaccaataacgtttccctcatcgttatcggggaaacgaagaagtttgggaaaacaatactaggctactttgaacattatctgcactgggtcttttatgccatcacagagaagatgacatcctgcaaacccatggccaccgcgatggactctgctgttaatggcattctgtgtggctatgttgcggaccctctgaatttgttctggttcggcatagggaaagccacggtgctcttacttccggctgtaatcattgctatcaagctggccaagtactatcgcaggatggattcagaggatgtatacgacgacccgtctcgatactgacaactggagttgaagctgcttgaacaacaagatagtcaacatggaaagcatcacagattttggatagttctgagtcttctagaacgttccaagtgcagaagaacactgggtgggactccagcggcactagaacatgggatccgtggtcttacggtagccctttgtccgatgaaccgcttcatggtgttaattcccccttttccttgccattctgaatgatctccgccgggtgggctcacctttctttcccggtttccatttgcacctaacttgtggggctgttcccgggggaatttccgtgaacccttccgggcaccggccccctctccttgtgtgtggtccccccccaaagtttgttggacagcttttcttccccgtcagaacctttaccagagggggggccccgcac

SEQ ID NO: 687274 - DNA, 202 bp, Homo sapiens
gattagttcgagtcggatgacccttcgttgaggtctccgagttgtgaataggcggggacaatggacgagccgggtgggctggaggtgaagtgtcgtgatgctatgggtccagggtagtggatgaggagctgtaaatgagatgaaaggtatgtctgcttggggaagaagttgggccagtatgagtggggcagtacaaggttat

SEQ ID NO: 687275 - DNA, 266 bp, Homo sapiens
aatccgtaccaaaataaaatcaaaaaaagcctgcatagatggatcacagccaaatctaccagacatacaaaaaagaactagtactaatcctgctgaaactattccaaaaaaaaaaaaaatcagggaggaagggttcctccccacttcattctatgacgccagcctatgcgtgataggcaaccaaaacaaatatttcctactgattgggcaaatgtgtcatgacaaaaattcccaagtgtatattccccattcataacatagattgg

SEQ ID NO: 687276 - DNA, 866 bp, Homo sapiens
aagctactttatctccgtacgccttctctcctacctaagtgcgtgccgacacccgatggaagattcgagtggacatggacatgagccccactgaggccccagaactatcttatcgcgttgtgcactaacaggccgacaaagcattatcacttataaggtggataatgatgaaaatgagcaccagttatctttaagaacggtcagctttaggggctggctgcaaaggcatgagtatgcacattgtctgacagcagcaggcaatgcaattacgcacaggcagtccacattaaagtaacactggcaacttcgacaaatgtactgtacagcacaaccggtttacccgttggagggccttatgacaataacaccacacagtaggtctataaggtctgaacgtgtaggtatcagggcccagtgcatattcagtggcaccagcaactctagctaagctgcaggcaggaagcatgcccgcagctcagcacagatgcaagaggcagcgaggcatggtgaacctctttcacagtatatactggacacagcgcgacgatgcccacatgagcaggatgggcaggcacagggatcccaccacgcagaaaaaaagccaccacaacctggcacgaatcaatgacacactgaccagacgaacgaatgcatagcaagacgcgactggaaagacctgcaagggaactgaagtgagagaagggaaacccagaaaatagacacagaaatgcgaggacaacgccgacgaggacacaaaggcaggaaccagaaggaaaggaaacgagcagtaaaaagggccaaaaatcggatagccaaggcaagacacaatagccacaaaacagcacaaaacagaaagaaccatggga

SEQ ID NO: 687277 - DNA, 298 bp, Homo sapiens
gggggacattttgtcttgaggcgggtctgaccgtcgccagccatgaagtgtagtggcgcgatcttggctcactgcaacctctgcctcctgggttcaagcaattctcctgcctcagcctcccaggtagctgagattacaagcgcacaccaccacgctcggctaattttggtatttttagtagagacggggtttcaccatgttggccaggatggtctcgatttcttgacctcatgatccgcccccacctcagcctctcaaagtgctgagattacaggcgtgagccaccgtacccgacctc

SEQ ID NO: 687278 - DNA, 117 bp, Homo sapiens
tgtgggtctcttcttgacagaggtagagcatcgatccatagttggaggagatgagacagagggaagtgtgagagggagtgcctaaggatttgcccagaggtgaaggtgcatgactgt

SEQ ID NO: 687279 - DNA, 186 bp, Homo sapiens
taaggtgcgctttctataggagtgtgatctaatactcaagcctgaaggaaaactggaattattcaggtgaatgggcgggtgtcaagaagtgtagagagtatgacatttgagaacccttgaaagtagttcagatgggccttcatgcttagacggaggagggagtatagtgcgaaaccaacagacggt

SEQ ID NO: 687280 - DNA, 337 bp, Homo sapiens
  misc_feature (332)..(332): n is a, c, g, or t
ttttgagatagatcgagtctcactctgttgcccaggctggagtgctgtggcgtgatcccagctcaccgcaacatacgcctcctggaatcaagcacctctcccgcctcagcctccggagcagctgggattacaggcactcgctaacacgcctggctaatttttgtattttagtagaggcagggtttcaccatgttgaccaggctggtctcaaactgctgacctcaagtgatcccctgtcctcgggctcccaaagtgctgggattacaggcatgagccaccacgcctggccgagaattgttaactaggaatcaagttgataaccaggcaactanaaagg

SEQ ID NO: 687281 - DNA, 1060 bp, Homo sapiens
  misc_feature (694)..(694): n is a, c, g, or t
cccctaaaagcctaaatgggaaaaggaagagactcatatcaatcattgtcgtcagttgggactactgtaagattcgggtcaagtccagcctagcgtactggtccatctgatctataaatgcggctggcatcgacaaatagaaccattgacaaaattctgacgaaggaggctgctgaggatgggaaagggctccttcaagtatgcctgggatcttggataaggctgaaatgctgaggcgtgaagcgtggtgatcaaccaattgatatctccttgtggacaattccgagaccacggaaggtactagtgtgactactcattgatgccccaggagcacgaggagactttatcatcaaactatagatgacgaggggagctagtctcagggcttgactgctgctgtccgtgactagtatgctgctgcgtggtccggttgacatcttgcaaagctgtgtactcgtcccacagaacacttgggtcaggaccctgtaggagcgatgccgcttctggtcttagcacatctgggtgtgatatactaaactaattggtctgcgctgtttaaccaagaaggtgggacttgccagctggagaccatccacgtaacagtgcgcagtagagaggagtaatgagggcagatgttcgcttaacgcggaaagttcagggaacgtttgagcattttaacgcagcaagttagggnctagcaaacctgccgtacaccaagatacgtcaatctttggttgcccaaatattgccgtgggtttgcgcacattgcgcttgtaccaacctcattgcggtgggagagcccaaaagctggaataaaccacttgcgcctattgggttcccacccggcgaatcggggaacaagtgtccaccacggcggcacaggggattgggcccaatggccccgagtaggtaacccactctcttccatttgacaggcgtctttagggacactgggcattcgcttaaacaaagcaagtgtcggtcgccaaaaacttcgtacaacaagccccccttttgacggctctgtgggcgaaccccccaggggtattgctctcaacga

SEQ ID NO: 687282 - DNA, 480 bp, Homo sapiens
  misc_feature (126)..(126): n is a, c, g, or t
  misc_feature (167)..(167): n is a, c, g, or t
  misc_feature (201)..(201): n is a, c, g, or t
cagtaaggacaaaattaaatgaaatgtgcaaaataactgcacaaactctgtgctgggtgcctggtgacgcggaaccgtcggctggcacgatgcgcccccacgtggaagcttgcaaggactgtgttntggacaaggacctcctgaggcacccatgctgcagttcccanaggcttaaggacggctgcgggacgtgtgggcgtntgggttgggtcacctctccaaggatgccttctctgaccacccagcgtagttccccaggcactccgtcactgtcctgctgtaaccccttcctggcgatcctcttcgcctgatatttttgtgccccctgatggatgagctctgctcatgaaaatgcaaagtcccttaagagcagagtctgtgtctgttcttttggctgcactgttacctgcacagagaagagtgcccaaccgagattgtgcattcaatacgtatattttattagttgaaataaatgaatga

SEQ ID NO: 687283 - DNA, 321 bp, Homo sapiens
  misc_feature (10)..(10): n is a, c, g, or t
  misc_feature (35)..(35): n is a, c, g, or t
  misc_feature (46)..(46): n is a, c, g, or t
  misc_feature (62)..(62): n is a, c, g, or t
  misc_feature (64)..(64): n is a, c, g, or t
  misc_feature (125)..(125): n is a, c, g, or t
  misc_feature (136)..(136): n is a, c, g, or t
  misc_feature (139)..(139): n is a, c, g, or t
  misc_feature (142)..(143): n is a, c, g, or t
  misc_feature (147)..(147): n is a, c, g, or t
  misc_feature (162)..(162): n is a, c, g, or t
  misc_feature (179)..(179): n is a, c, g, or t
  misc_feature (198)..(198): n is a, c, g, or t
  misc_feature (211)..(211): n is a, c, g, or t
  misc_feature (213)..(213): n is a, c, g, or t
  misc_feature (219)..(219): n is a, c, g, or t
  misc_feature (230)..(230): n is a, c, g, or t
  misc_feature (232)..(232): n is a, c, g, or t
  misc_feature (234)..(234): n is a, c, g, or t
  misc_feature (237)..(238): n is a, c, g, or t
  misc_feature (241)..(241): n is a, c, g, or t
  misc_feature (252)..(252): n is a, c, g, or t
  misc_feature (261)..(261): n is a, c, g, or t
  misc_feature (320)..(320): n is a, c, g, or t
taaaaagaanaaattttattccaattcttcaaaanttaaacgtaanatgttgtttccaaaangnaagtaaccctttaaaaaaaagttttattatttcatctttctttgaaagttttttttttcancttttctttanggntcnncagnagaagccagaatctngaggggcccagtaaggngcccctgacccgccaatcngattaagtttctncncaaaantcagggccaanancnggnntcnaaaggaaaggntttggggcntttcaaacacttgcggaaagggggagaatgcattgttacccaaaaccacaagacccaant

SEQ ID NO: 687284 - DNA, 484 bp, Homo sapiens
  misc_feature (126)..(126): n is a, c, g, or t
  misc_feature (167)..(167): n is a, c, g, or t
  misc_feature (201)..(201): n is a, c, g, or t
cagtaaggacaaaattaaatgaaatgtgcaaaataactgcacaaactctgtgctgggtgcctggtgacgcggaaccgtcggctggcacgatgcgcccccacgtggaagcttgcaaggactgtgttntggacaaggacctcctgaggcacccatgctgcagttcccanaggcttaaggacggctgcgggacgtgtgggcgtntgggttgagatggagaaaacatagcatgctggagcagaagggagattgaggagaagaatctggcccagcaaagaaaaagaattccaattttccttccctcaaggacaacctgcccatagataagcgccttgagaccaaagcccattatggttgctgccaggcagcttggagacacaggaatggcctcccaacatccctgacctcggtttttgatacctttgtaaatgatatccctaatctgtctgctcctgaaatccccccctcgttttaaaatgttttccta

SEQ ID NO: 687285 - DNA, 114 bp, Homo sapiens
cagatggaataatgtgaggccagtgataagtgaagcaatgggaccttcaccctgcccccactgctgcagacagaaggctgctcagtgccctgaaggggtcagtacactctgtct

SEQ ID NO: 687286 - DNA, 354 bp, Homo sapiens
tctatcaagcccaatatttacacttgtgcaagttacacatgtattgcccacataaatattcatcaagatttcttgatgtaaatctgggtccaattgaattaaaggatagttacactgccgtttaatatgagacagtgaaagcagctagacccctaccctgtaatccccatcaaggctcgtcacagatttcacagacaattggggtaaccgtgtggtcgtttactgcacatgacaacagcatctgagtgtgttaatgattaaacagcctggtatctcttacacaacttttgtagcacatcaagaagtggctcctagaacttctatagtgtctctatatcctatatgtagtgtcca

SEQ ID NO: 687287 - DNA, 238 bp, Homo sapiens
  misc_feature (4)..(4): n is a, c, g, or t
ttgnaaacttcgatattcgtatttgaatatatggtggctccgacaggaatcgaaccagtgacacacggtgcttcaaaccgttgctctacctactgagctacagagccataatggcggtccagacgggaatcgaacccgcgatcttctccgtgacagggagacgtattaaccactttaccactgaaccttattggttgcggagacaggattcgaacctatgaccgataaagcttcccga

SEQ ID NO: 687288 - DNA, 882 bp, Homo sapiens
  misc_feature (568)..(568): n is a, c, g, or t
  misc_feature (575)..(575): n is a, c, g, or t
gccgccaaggtgctcggttcttccgaggaaccgctaaggctgcgttggggtgaggccctcacttcatccggcgatagcaccaggtcggcagttccaagccactagactctgcaccgctgcgactggcctctgctctccgtagctcgtcctgacatcatacttcgtggcacctcgagttcgtagcgactgaagcgagtgatggtgactaagtacaacgggatggataacgatcagagtgccctcgattcaacagcagccgtgtgttgaatgtttgcatgcctgtattcgtgcgcttgtggcttgtgttggcaaaaaggtccctggacgcgaagcgtacaatcgatttggcgagctctacgatctgtctattgctacgggggccgggttgtgagccgtgcttctcaatgcaggctgagctgtctgtcagccatgactgagacggtacctggcccgcgccgtcgcaactggcgtgcctgactaccagctctgatggacgcatagaagatggcaaatgatcaatatgaaatgcataggatatctcgatggacgttctgagtgactgagccantggtggnccttttcgggatcttttagtgtggacctaaacggcgctgcatgtgtataagtacacccgtgtgttccacatgtatatgggcacgccttgcatcggtgtcttacatgaaccacgatagaagacatatccacagccacctttagtgatcccaagggaaatggattaaaatcccggggttagtttggcagcctacttaataagattcccttgcacccccaatggagagtcacgccgaaccataacgtttcaaattggctccgtagaaacgttgaggcttttataccggaggtccgtccgctacaaaaaag

SEQ ID NO: 687289 - DNA, 1296 bp, Homo sapiens
ttttcctgcgcaggagcctgcatggggcgtaggcagccatgtgcctgcccagccggaatggcatggtcttgaagccccacttccacaaggactggcaagcgtgctgcgtggccactgtggttcaaccagcctggccctggaagatccgcagactgtaatgtgccctggcaatggccaattgctgcgcctgcatctgctcctgcgcccctgctgtctgggtcccatcctggcccatctgtgcgcatgccccacggttctggtaccacactgaagtgtgcgctgcctgtgtctggctggcttcagccttggaggagctcatgtggtggcacggcattcacagagaatgtgtgtgccctggaccatcggcatttcttgtggatccgaggaggcggaacaagtccacggatgtcccctgcaggccaacgtgcaagcgtgtgaaggagtacctgtccaaactcatcctcttccccaggaagccctcggccccaagaagggaggacagttcttgctgaagaactgaaactggccacccagctgacccggagcggtcattgccctgtccggaacgtctattagaaggagaaaagctcggaggtcatcgactgaggaagaggcaggacatttcagaagccttcgcgtaggtctcctgtactgggccctgtgcacaaacagccccgggctcgtatcgggcaattacgggggcgaaaaaggatgccaagggaaagcccggcagaaacagggatgtctgaagccagaaacaacttaacgcgccttcctggggacttgggagtcacgtcgggcaggtcattagttgggagtcatccagacggtggatgtgtacggtggcagaaccaagcttggggccctggcgaatcggggcttcagctgctttgtggaactaccgtccctgccacgcgggattttgggcggcttaacttggaacagcaccaggtcacagcgccgtggataactggctttaactttcctggtggttaggaagggcaccctggtggggggatgattaagggggaaacaggtgacactgactggagcagcggggggggttagcctatggtagtcgtgataggagtaaccaagatagcgattgaagttcaaagaagtgggacagcttgtgttatactgtacgatgtattataagcaaacggtaacagtgattggcgcaggatgttcaaacaggtggttgaacccagggccggtgagacaattgggtgggaagagtacgaagcgaggctgggagcactgtatataaagacatggataagaagaggagagatg

SEQ ID NO: 687290 - DNA, 744 bp, Homo sapiens
tggaaaaaaatttccactcctgtgtcccccagggggggagtgcaaggactcactctcagttcagggaaaccttgtgcctcccaggaaaatcgttgtgaacccgggaggcaaaggtaatagggacctgagaggctcccgccagtgtgccctctccagccgggtgcaccagagccgagaacctcagtctcttcaaaacaaaaaaaaaaaatttttattggcgtgcactcacagaggacagaccagttttttctcccgaccattactcatcaaagattttacgttggtgtattattatagatacacataggtgcttttacatagagcaggttgcaggttgagggctcttaaataggtttcacaagtgaaaacgttttcctctcgtgggactcattacagaaaaaaaaatttttttgtcttcacaacttcataacaacgcgtgggaacacctccatgagggttttggggatacattttgtgtggaatgtgcaccgtggggaaatcttataatatacgcaccaaaatatcatctctcgttggcagacctacaaaaatcttacacagagggggacctctttaccattaattgtatagtcttcagaagccaaccagaggatggtgccttatattccccacactttgtactgggccttgttgcacggttgcggctttttgggcccccgtggcccaggtgtggggacagaacccctgtgttggtgacataggaaatttgactgtgttcccagt

SEQ ID NO: 687291 - DNA, 269 bp, Homo sapiens
  misc_feature (25)..(25): n is a, c, g, or t
  misc_feature (113)..(113): n is a, c, g, or t
  misc_feature (115)..(116): n is a, c, g, or t
  misc_feature (125)..(125): n is a, c, g, or t
  misc_feature (140)..(140): n is a, c, g, or t
  misc_feature (166)..(166): n is a, c, g, or t
  misc_feature (169)..(169): n is a, c, g, or t
  misc_feature (185)..(186): n is a, c, g, or t
  misc_feature (200)..(200): n is a, c, g, or t
  misc_feature (230)..(230): n is a, c, g, or t
  misc_feature (249)..(251): n is a, c, g, or t
  misc_feature (254)..(254): n is a, c, g, or t
  misc_feature (258)..(258): n is a, c, g, or t
  misc_feature (260)..(262): n is a, c, g, or t
agggttgtcctgagggtctaggggntggagggggtggaggtttgtgttcgggggtttattgttgagggtgtgggtgtggggatttgggggtggtgggtggtggtggattgggngnnggggggtgncgagagggtttttgngggggtttgggctgtgaggtgtgggntgngggagggggggggggnntgtggggggatggntgtggttttgctgggggttgtggggggagntgttggggtgcagttgttnnnggntggngnnnggggtgt

SEQ ID NO: 687292 - DNA, 133 bp, Homo sapiens
gagaaaacagataagcgtcgggtgtagtcaggtttctcttttacaggcttatactcatgaaaatctagtctgaagcttttgagaggcagacagccaagatcctggagaaatagtagataggcaagttagtggg

SEQ ID NO: 687293 - DNA, 764 bp, Homo sapiens
  misc_feature (395)..(395): n is a, c, g, or t
  misc_feature (426)..(427): n is a, c, g, or t
  misc_feature (441)..(441): n is a, c, g, or t
  misc_feature (444)..(444): n is a, c, g, or t
  misc_feature (455)..(455): n is a, c, g, or t
  misc_feature (472)..(472): n is a, c, g, or t
  misc_feature (489)..(490): n is a, c, g, or t
  misc_feature (495)..(495): n is a, c, g, or t
  misc_feature (497)..(497): n is a, c, g, or t
  misc_feature (534)..(534): n is a, c, g, or t
  misc_feature (547)..(547): n is a, c, g, or t
  misc_feature (553)..(553): n is a, c, g, or t
  misc_feature (558)..(558): n is a, c, g, or t
  misc_feature (566)..(566): n is a, c, g, or t
tatataaacagtttatttactctaaacagcaacacagacaaaaggccatataaacacaaaggaaggggcgcaaaaccgaaatgctgcccgggggtctgaggctcaaaagcagcacagcccaggttctagaaaggttctagagaggagcggcaggagggagggtgcatttccatacagccagctgaggccaagtgcagctctgcacggtgagaagcatgcctgcattcccagaagcgaggaactcgcccctgggggacttacccaagtattaaaagtttataattttacagcagtgtgaaatactgacatcaatattaaaataaaagcgagttttacattaacaatcaaaaatacaaaagaccgaaggaagagaccctgtttggaaacgggcaatncagcgaatcgagaccgacacccgggggggcnngggaagatggggcncgncaaaccccccngggtgactagtctggtntggagcaactttagatnngcaanantgttgtaacagttcttgccaaaccatcccttcctttngacgatgccacanggtcgntgctnatgagggngcaaacttctgggctggtgctcggacccttttctcgtactccactctgtttggcgcagtaaatcgtgtaggcctctgcttgagctgggtctcggatatgggggccatttagaaagtcctgtatacctaataggacctgttgattgtgatgggtggctccagtccttgcctcctctaagatggacgggcccactgtccc

SEQ ID NO: 687294 - DNA, 920 bp, Homo sapiens
  misc_feature (119)..(119): n is a, c, g, or t
gctgtgcacctgctcattcgccgagcccaacccggcccttggggggcaacccacggggccccccgcagtgtgctttcccccgggggcgtggtgtccacccctagtgacgcccccccccncccggggggattcctggggcccttctcgccggggctcgcgcctggacgcgtttctctttctaagccacgcagcgctctcgctcacgcacgtaggcgtttgtgcacggcgccccccggagcgcggtttctccccgaacacacccggcaccccagaaaatggcgcgagcactccccgaacggggttgggcacccggctctttcagggcgcgccggggcctcataaaactttccgcgcggcaccccacagcacacagcgcgggcacagccacaaagttcatgccggtgggcgtcaaaaaccggccgggctcaaaggccacacattggctttccgcaccgttgggttagcacaccccactcggcgcactagggagatggccgcgcacacagacagaatttcttggggagactgtcgaaacagagagccttgcgaggtcacacccctgagaagaacctcccagagtcccatgagcccgtgacggagacaaatgttgccctgcactcctagctgcctcggggaaacgcgggagacaggggtccacgggaaggctataatgggtggctctagccgagaagtgtttctgggggacccacaaacgagggtccccataaggggctgcatccccccaacaacaagggagaggggacaaatggggagactttttttacccaatcacagagaaaaccggtcccttttttttaagggcttccattattgaaaaaagaaacaaaatgccccccaagcactatgctggtcatgaactgcttccaaatggtggaggtaattaaatgcccactgtgtta

SEQ ID NO: 687295 - DNA, 1137 bp, Homo sapiens
gctctcttgtctgctcctccttctccagtgctttccctatctggcccctcttctgggcctcttccctggggcctcccttccgcaaggccccttccggggggtctttccttgacggggggccccctcgtagttgtctcgccccaccaggggggtccgtttccccgtggacggctgctgtgtggcatttgagggtctgacctatcgacggcatgcccagggcgccgcagtctgctggaatggaacggaggacaacggcgccgagcgcctcataaagaggccctcctggatgccaggactggcacggatatgatcaccaccttgcaacgtacatgccgggccacctgtctccagggaggacgaccatctctagcccctagaggacatgtaactagagcatctcccgaggagccgcgaaaggaccgggacagcaggccccagggacagccccgccgcacaggatgtgcgctcctgaggcctagaaccatttccaagctcgagtttccttcccagactcctcctacccgctaggtgtgcccccttgagcctccggaggcgcggcgctctgggcctgtatctcagaagggacggggcacagctacacagactcaccaaaggcccgcctgcacatgtgtatctctcgatcattgggactggtatgcactgtcacaaggtgcacacactcgctcagtgctcacactgcccatgctgagatcgttccctgggcctctgccctggcctgctgtcccatgcacacacttctttggcctaaagggcttctctctcaggacctctaatttgaccacaaccaacctgggcttcagccacatcaagtgggcactggaagctaggggtgcatcattggggcatgctcacattgcccacacatctcacagcacagcacagggtccctgcaccagattcagatttacatgacctgactctcctcacgttcccgccctgctgtccagagctgaacatagacttgcacattgagatgtcatcctggagtgtcacatgggagtgcttataggcagcatcataccataggcctactgcttgcatatggggccaaaaccagtgatacagccaccttcttggaaagggtatgcaaattactcgcgggggatggaaaagacc

SEQ ID NO: 687296 - DNA, 366 bp, Homo sapiens
cgagtggatcacctgaggtcgggatcacctgaggctgaggctgaggcaaggagaatcgctggaacccaggaaagaggttgcagtgagccgagatcgcaccattgcactccagcctgggcaacaagagcaaaactccgtctcaaaaaaataaaaaagatgttcagagaaacagttccatttactaagtcactgctggtggccaaagcctagttaatgttctgaaaatctccatcgtgtttgttcctcttctgtgattcttattttctcttctattttcacctgccatattttttcctgaggctgacaactgtttggtaggatataagaggatttaaaaattagtaaagcaaattacttgcctttgtt

SEQ ID NO: 687297 - DNA, 165 bp, Homo sapiens
ccggtcgcttttggatctgggatttgagtctacaccaagtggttttagaagttaattctatgatcccgagttggttgcaattctggacgtctgacagaagcaatgcagatccttcctggagggacatagtctcaacctaggccttatagaattcccacagataag

SEQ ID NO: 687298 - DNA, 764 bp, Homo sapiens
  misc_feature (401)..(401): n is a, c, g, or t
  misc_feature (404)..(404): n is a, c, g, or t
  misc_feature (406)..(406): n is a, c, g, or t
  misc_feature (408)..(408): n is a, c, g, or t
  misc_feature (411)..(411): n is a, c, g, or t
  misc_feature (413)..(413): n is a, c, g, or t
  misc_feature (415)..(415): n is a, c, g, or t
  misc_feature (417)..(417): n is a, c, g, or t
gggcccccgggctctggtcgaaatcatgtgatttcccttctgcgcagggttcccggatcccgacatttggcccccaaggtcagcccattcacgtgtaacttgaccggtctttgccaaccaggggcacccaactcaactggcgtgatttgacgaacggttttccggggcggcggcccaaacggagggcgagtccttgtagcccccgatggccgcgtcctgacaggttccgtccgccctgaggtttcgatgtaggcgttccacccggccatggcgctgctactggggctgctttacggcgctgctgctggggcccggactgggctcgaactgcctcggcttgcgggcggggggaggcggagagcttcggggcacgcgcttgccgttcgggcccggctcccttnctntncngcngncntngttgcggcgacatggccaaacgtaccaagaaagtcgggatcgtcggtaaatacgggacccgctatggggcctccctccggaaaatggtgaagaaaattgaaatcagccagcacgccaagtacacttgctctttctgtggcaaaaccaagatgaagagacgagctgtggggatctggcactgtggttcctgcatgaagacagtggctggcggtgcctggacgtacaataccacttccgctgtcacggtaaagtccgccatcagaagactgaaggagttgaaagaccagtagacgctcctctactctttgagacatcactggcctataataaatgggttaatttatgta

SEQ ID NO: 687299 - DNA, 371 bp, Homo sapiens
  misc_feature (7)..(7): n is a, c, g, or t
  misc_feature (24)..(24): n is a, c, g, or t
accaggntccccgggccgaacatnggcccaaaaccgttccccagggaaaattcggggatccttcggtaaaattacggggaccccgtggggccttccctccgggaaaattggtgaagaaaattgaaatcagccagcacgccaagtacacttgctctttctgtggcaaaaccaagatgaagagacgagctgtggggatctggcactgtggttcctgcatgaagacagtggctggcggtgcctggacgtacaataccacttccgctgtcacggtaaagtccgccatcagaagactgaaggagttgaaagaccagtagacgctcctctactctttgagacatcactggcctataataaatgggttaatttatgta

SEQ ID NO: 687300 - DNA, 400 bp, Homo sapiens
tgagaagagaagaagggatgaaaatcaatatggacagaatcggagggaaagcagcaagcgactccgtgagccactggatggagatggacatgaaagcgcagaccgtatgcaaaggacatgaaggcgagcgtggagccggcgcctccagttagcagagacacgttttcctacatgggtacatcttccttgggttttcagattttaatacaacagtcaggaaaatggtaatgtgtaaaaggtgtttcccacttgatggggggagtttgagctggtgtttatcatcttcattcttatgtgtaaagattatttagaaatcactaaggccattatttataatcaagtagtgcatgcacagggaatactagtatttcaaacagattacagttgttcatttaccatg

SEQ ID NO: 687301 - DNA, 1468 bp, Homo sapiens
  misc_feature (69)..(69): n is a, c, g, or t
  misc_feature (100)..(100): n is a, c, g, or t
  misc_feature (127)..(127): n is a, c, g, or t
  misc_feature (130)..(130): n is a, c, g, or t
  misc_feature (207)..(207): n is a, c, g, or t
  misc_feature (212)..(212): n is a, c, g, or t
ggtgactctcgctagatccctccaaagcagaccggtggcgatgtcagcggatgtccacgagctcgttanctgcgttcggggaaggttggggcgtcagggnagctctcggatcacagcagcccccgcnctntcctaggcctggcccggcagagcccccagagtggaccccccagcgactggggttttttccccactcctccctccttntggtntgatgcggcagcgcgggggctgcggggcctgtttgggacgaacagagctctcccttggtaagacttattttgttaataaatggaatacttggctatattcaaaaaaaaaacaaaaaaaacaaaaaaaaacaaaaaaacaaaaacaaaacaaaacaaaaaaaacaacaacaacacagcacagaaaacacaacaacacaacacaacaaaccaacaacaacacaacaacaaaaacaacaacaagaagagacatgacgatgagcgggcggcaggcggggagaggggaagagccacggttaaactacatgacaaagatgtagtgagcggagcggcgggcgacggagcccgccggagggagaagaacggcgtgagggagagtcagcaacaaggcatgtctgcacacatcgtcagccgatgaggagcacgaggcgaggagagaggggggcagagagaccacaaataagacaagaatacagaggcgagcgggcagagagccggagagagaatacagcgaacgtggcgagacctccgcgacgaggaaaaggctgagaatctagtgtagatgatgagacgcgatggcgctggaagagaccaaccgagataaagagcgaccggacagaaacaacaaaaacaacaagaacacccacgaggggtcaggggagcggagaggagaagacagcacagaggacgcaagaacagaagccggagggagaggagagagagagaagaggaagcgagaagacagcgcaggccgagaagggaagagagcgcagagaaagaaggaggaagagggaggaggagacaaagagacgaaaagacgcagagaaaggaaacagggaagagagcggggaacagagacgggacggaaggacgaggaaggagcggggggaggggaggagagggggggagggagggggccggagggagagcggggggggaggcgagggggcgagggccagaggagaagggagcagagagggacgaggcgagagaagggggccgaggcaggcgggaccacgcgaaggcaggggagagagaagagcgaggagcgcaggagcgggagagggagaggagaggagacacgagcgcgggagcggagagggagggaacgacagggagcagggaggagagaggaaggagacgaaggaagagacagccagaggaacaggaggagcgcagacacagcgaagcacgtgagggatagaataggagcgagacagaaacaggcggggggggaggaagaggagcgaagaagagcg

SEQ ID NO: 687302 - DNA, 502 bp, Homo sapiens
actcggacgaggtaaggactactgctgttggcctgcgagcagataaagtcgatccggcaggatctgacgggtgcagggcatccgcaccgagtccacgggtggaggtgtacgagacccatgcccggatcgccttggagaggggtgaccatgaagagtttacccagtgccagacgcagctcaagtcgctgtacgccgagaacttgctgggaaatggtgggcagagttaactggcctaccgaatcctctattatatcttcaccaagaactcggggagacatcaccagggagctggcatacctcacacgagaactgaaggcagatctttgcgtggcccatgctttggaataaaggacagccggggccctggggcaactaccaccgtttttcccggctctactgccatgcacctggcatgtctggctacctcgttggacaagttggcagatcgggagcgcagggtcgccctcaggggcatgatcaaacctgtttgcggggccaagtc

SEQ ID NO: 687303 - DNA, 1535 bp, Homo sapiens
  misc_feature (69)..(69): n is a, c, g, or t
  misc_feature (100)..(100): n is a, c, g, or t
  misc_feature (127)..(127): n is a, c, g, or t
  misc_feature (130)..(130): n is a, c, g, or t
  misc_feature (274)..(274): n is a, c, g, or t
  misc_feature (279)..(279): n is a, c, g, or t
ggtgactctcgctagatccctccaaagcagaccggtggcgatgtcagcggatgtccacgagctcgttanctgcgttcggggaaggttggggcgtcagggnagctctcggatcacagcagcccccgcnctntcctaggcctggcccggcagagcccccagagtggaccccccagcgactggggtcctccctccggaaaatggtgaagaaaattgaaatcagccagcacgccaagtacacttgctctttctgtttttccccactcctccctccttntggtntgatgcggcagcgcgggggctgcggggcctgtttgggacgaacagagctctcccttggtaagacttattttgttaataaatggaatacttggctatattcaaaaaaaaaacaaaaaaaacaaaaaaaaacaaaaaaacaaaaacaaaacaaaacaaaaaaaacaacaacaacacagcacagaaaacacaacaacacaacacaacaaaccaacaacaacacaacaacaaaaacaacaacaagaagagacatgacgatgagcgggcggcaggcggggagaggggaagagccacggttaaactacatgacaaagatgtagtgagcggagcggcgggcgacggagcccgccggagggagaagaacggcgtgagggagagtcagcaacaaggcatgtctgcacacatcgtcagccgatgaggagcacgaggcgaggagagaggggggcagagagaccacaaataagacaagaatacagaggcgagcgggcagagagccggagagagaatacagcgaacgtggcgagacctccgcgacgaggaaaaggctgagaatctagtgtagatgatgagacgcgatggcgctggaagagaccaaccgagataaagagcgaccggacagaaacaacaaaaacaacaagaacacccacgaggggtcaggggagcggagaggagaagacagcacagaggacgcaagaacagaagccggagggagaggagagagagagaagaggaagcgagaagacagcgcaggccgagaagggaagagagcgcagagaaagaaggaggaagagggaggaggagacaaagagacgaaaagacgcagagaaaggaaacagggaagagagcggggaacagagacgggacggaaggacgaggaaggagcggggggaggggaggagagggggggagggagggggccggagggagagcggggggggaggcgagggggcgagggccagaggagaagggagcagagagggacgaggcgagagaagggggccgaggcaggcgggaccacgcgaaggcaggggagagagaagagcgaggagcgcaggagcgggagagggagaggagaggagacacgagcgcgggagcggagagggagggaacgacagggagcagggaggagagaggaaggagacgaaggaagagacagccagaggaacaggaggagcgcagacacagcgaagcacgtgagggatagaataggagcgagacagaaacaggcggggggggaggaagaggagcgaagaagagcg

SEQ ID NO: 687304 - DNA, 444 bp, Homo sapiens
acgcgaccgcgcgttcaaaaactggcctgggcaacatggtgagaccctgactctacaaaaattcaaaaaattagtgtggtgtgactgtacatgcccgtagtcccagctactcaggaggctgaggcaggaggatccctttagtccacgagttcaatccatcagtgacctatcattatgccactacactccagcctcggtgacaaagcgagaccttgtctcaaaaaataaaaataaggccaggcatggtggctcacacctgtaatcccagcaatttgggaggtcgaggcgggtggatcacctgaggtcaggagtttcagaccagcctgggcaataggtgaaaccctgtctctaccggaaaaaaaaaaaccaaaaattagccgggtgtggtggcaggtgcctgtaatcccagctactggggaggctgaggctcaagaactgtttgaa

SEQ ID NO: 687305 - DNA, 309 bp, Homo sapiens
  misc_feature (155)..(156): n is a, c, g, or t
  misc_feature (160)..(160): n is a, c, g, or t
  misc_feature (188)..(191): n is a, c, g, or t
  misc_feature (198)..(198): n is a, c, g, or t
  misc_feature (200)..(200): n is a, c, g, or t
  misc_feature (203)..(207): n is a, c, g, or t
  misc_feature (209)..(210): n is a, c, g, or t
  misc_feature (212)..(213): n is a, c, g, or t
  misc_feature (216)..(216): n is a, c, g, or t
  misc_feature (224)..(224): n is a, c, g, or t
attcagccacaccactggccttcccttccccagggcccccaagggtgtctcatgctacaagaagaggcaagagacaggccccagggcttctggctaggtgaagaaaattgaaatcagccagcacgccaagtacacttgctctttctgcctgtcannctcncctggctccagcctcccctacccagggnnnntgaagtnanctnnnnngnngnngtnggagtggnttaaagagctggtgtttggggactcaataaaccctcactgactttttagcaataaagcttctcatcagggttgcaaaaaaaaaaa

SEQ ID NO: 687306 - DNA, 274 bp, Homo sapiens
  misc_feature (2)..(2): n is a, c, g, or t
cnaggatcccggctatcacattatctacagaaacatactttgactataatgaaattaaaaaaaaacacccaaataatatttttcttacttgatatacccaacttagtttaagtagataatgggaataccaagtatacccattgccccgaaaatacccatttactgtcccatttaaaactttggaattgctgggattaaagtgatccaaatgccgaaatactaaaggaaatccattgttccccgggtaactaccactttgtattgatctaccagt

SEQ ID NO: 687307 - DNA, 382 bp, Homo sapiens
  misc_feature (32)..(32): n is a, c, g, or t
  misc_feature (35)..(35): n is a, c, g, or t
acacgcgttgtcggtgtgtctgggctcggacntangtcgcggcgacatggccaaacgtaccaagaaagtcgggatcgtcggtaaatacgggacccgctatggggcctccctccggaaaatggtgaagaaaattgaaatcagccagcacgccaagtacacttgctctttctgtggcaaaaccaagatgaagagacgagctgtggggatctggcactgtggttcctgcatgaagacagtggctggcggtgcctggacgtacaataccacttccgctgtcacggtaaagtccgccatcagaagactgaaggagttgaaagaccagtagacgctcctctactctttgagacatcactggcctataataaatgggttaatttatgta

SEQ ID NO: 687308 - DNA, 437 bp, Homo sapiens
  misc_feature (32)..(32): n is a, c, g, or t
  misc_feature (35)..(35): n is a, c, g, or t
acacgcgttgtcggtgtgtctgggctcggacntangtcgcggcgacatggccaaacgtaccaagaaagtcgggatcgtcggtaaatacgggacccgctatggggcctccctccggaaaatggtgaagaaaattgaaatcagccagcacgccaagtacacttgctctttctgtggcaaaaccaagatgaagagacgagctgtggggatctggcactgtggttcctgcatgaagacagtggctggcggtgcctggacgtacaataccacttccgctgtcacggtaaagtccgccatcagaagactgaaggagttgaaagaccagtagacgctcctctactctttgagacatcactggcctataataaatgggttaatttatgtaacttttttttttttgccttgtttgtggttaattaaaacatttggtgtgtgttcta

SEQ ID NO: 687309 - DNA, 109 bp, Homo sapiens
gtcgatctacgatccttctgctccctcttcactctaggcttatatctgttctactgaaacagctctatacctggctggtgaatgacttcttgtcttcaggatcagttct

SEQ ID NO: 687310 - DNA, 515 bp, Homo sapiens
  misc_feature (32)..(32): n is a, c, g, or t
  misc_feature (35)..(35): n is a, c, g, or t
acacgcgttgtcggtgtgtctgggctcggacntangtcgcggcgacatggccaaacgtaccaagaaagtcgggatcgtcggtaaatacgggacccgctatggggcctccctccggaaaatggtgaagaaaattgaaatcagccagcacgccaagtacacttgctctttctgtggcaaaaccaagatgaagagacgagctgtggggatctggcactgtggttcctgcatgaagacagtggctggcggtgcctggacgtacaataccacttccgctgtcacggtaaagtccgccatcagaagactgaaggagttgaaagaccagtagacgctcctctactctttgagacatcactggcctataataaatgggttaatttatgtaacaaaatacactacataaaagaaagcccaggactctctttgggttgcggaaaagaggtcttgaggtgccacatgttcttgacttgttacgtggcccatgtttcgtgatcgcggggtccatccgccggttgcct

SEQ ID NO: 687311 - DNA, 386 bp, Homo sapiens
  misc_feature (32)..(32): n is a, c, g, or t
  misc_feature (35)..(35): n is a, c, g, or t
acacgcgttgtcggtgtgtctgggctcggacntangtcgcggcgacatggccaaacgtaccaagaaagtcgggatcgtcggtaaatacgggacccgctatggggcctccctctcgtgcaaaagtggtgaagaaaattgaaatcagccagcacgccaagtacacttgctctttctgtggcaaaaccaagatgaagagacgagctgtggggatctggcactgtggttcctgcatgaagacagtggctggcggtgcctggacgtacaataccacttccgctgtcacggtaaagtccgccatcagaagactgaaggagttgaaagaccagtagacgctcctctactctttgagacatcactggcctataataaatgggttaatttatgta

SEQ ID NO: 687312 - DNA, 425 bp, Homo sapiens
  misc_feature (32)..(32): n is a, c, g, or t
  misc_feature (35)..(35): n is a, c, g, or t
  misc_feature (383)..(383): n is a, c, g, or t
acacgcgttgtcggtgtgtctgggctcggacntangtcgcggcgacatggccaaacgtaccaagaaagtcgggatcgtcggtaaatacgggacccgctatggggcctccctccggaaaatggtgaagaaaattgaaatcagccagcacgccaagtacacttgctctttctgtggcaaaaccaagatgaagagacgagctgtggggatctggcactgtggttcctgcatgaagacagtggctggcggtgcctggacgtacaataccacttccgctgtcacggtaaagtccgccatcagaagactgaaggagttgaaagaccagtagacgctcctctactctttgagacatcactggcctataataaatgggttaatttatgtancaaaaaaaaaaaaaaaaaaaaaaaaaagtcgtatcgatgtcg

SEQ ID NO: 687313 - DNA, 346 bp, Homo sapiens
gattgcgggcattagcagatctgcctctcaaattttttttgagacggatcttgctctgtcgcccaggctggagttctgtggcgcgatctctggtcaatggcaactttggctcccgggctcaagtgattcccctggcttaagcaactggagtagcttggattaccggtgtggtccaacatggccggcaaatttttttatttttagtagagattggggtttcaccatgttggccagcctggtctcgaactcctgaactccagtggtttggctggttcgggctcccaaagtgctgggattacaggcttgagccactgtgccaggccaaggactaaatccttctaagttg

SEQ ID NO: 687314 - DNA, 279 bp, Homo sapiens
aagcaaaatcattcactatcaactgtaaagtttgcccagatcaaactgtatgtcttaaaatcactggattggaccatgtgcgtatttaataataaaacaatcaatctctcaaatacctttataatgtaatgaggcgaaagtcaacttagtaagattacaacagatatctaagtagataaacacgggaaactaatagtaggtgcatgtctgtaaagctcttcccatatttcacttttaacaatgtatagggacaaaaattagaagtattggccattattc

SEQ ID NO: 687315 - DNA, 178 bp, Homo sapiens
actctgctgctggcttgttgtacacacctgtttctccaatccaggccacgtgccttcacctagcgggagacacccagctgtcagggggcaggtcaggctgcagagtacaacccaggcaggtggccaggacacagagtgccatccccaccagaccccaagcaggagcagcaggaggaat

SEQ ID NO: 687316 - DNA, 1158 bp, Homo sapiens
tggcaatgtttttttcccataatattaactgttttcccgatgttaaaatatttattcttcggggaaccccaagtttcttttacagggccccgggatcaatttaaaacagttgggaacaccggtggcactggttaaactggtctttctggggcagcctctttagctgggggggcttgtagtcacagctacagtcttctatcaaccttaaaaacggagtgactctggaaatctcgagctattattgaaagaagttctgagaatttatcaatctccaacaactttgccagtggatttaaccagcaagatgtaaggtggcatgggttgaatcaaagaggaaacagccgttacacccaacacatttggctttaggcgtcttagaggacggcgcgcaaattgcacaacttgggaacgcaggtcaaagggttcctggagcctttgtgactatagaacagggcatggcttgttagcatttggtaaccttggtgagcgccttgtggcacttatacaaaatatgttcgctgagaaagagtaatttgggcagagatctactctgggcgacgacataattatatacctgtgtgggagcaccctgtgtacgcgggaacaacgcaagagagatatacacgcttcagcaacgacgggttatacggcacagtctcccgcaagagcacttgtggggaccccccattgtggtcctcggatcgattggacatgtgtgtctagcgcacacaacgcgtcttgtttgtctcaaccttttggaatttcctggggggacacccctgttgtagaaagaaagcttggggttctacactaagtaactaaaaaacgtgaggggggaccataaagggccacccaatttttggggacggcggaattaagtcacccaggggggacattaatggggggaacggtgcgaatagagaggttcgtgggacacccccagaaagcacagtcccacaggcacagaggacaatggggcacttataaagatgcaaaaccaaaccaggtgggctaaaggacgagacacaatagtactaggccaccacagcggaccgaccaagaatctcgggggacacaaaagagccacccatgagaaggaaatacccctgaaaagaagtgggtctccgggacgaggacaacggggatactaacacaaat

SEQ ID NO: 687317 - DNA, 890 bp, Homo sapiens
ggcggtgtaatcccgcctaatcctcggcgggtatatctcgctgatcatatgttccctgtatgttgggtctgcacattcgtgcctcgtgccacaatgttgccccccctggtacgttttctaaaaggcgcacagaacctttagggaacattgctgcctttaacaatagcagagtctgagattgttcccagctgccccaatagagatggtcaccgccgcggtagttcttaacacaatttctataacaagcggggtccccagtctgcaacaccccccgtgagtgctttcattttacgggggccacaatttatgggcacatgttgaccaattgtggggggcccaaatggcaaacgaaagagacgaaggcaaggagtggcttccccaccgccccgatggatcatgcgagtaggggccccccaaagccggcagcactccaagggttgccacgccgtggtgtaaaagaccaacagggcacataaggcacgccaaacaacaaaggggttatccccccacatggaacctaccacgcctctgggcagagaaaaaggacagataaaagaataccctcgtgttcgtaaagagtacccatttaaagacggataaatacacggggccaaataataaagggggcaacaaaatatcttgttctaaaaataagacagtgtgacaataacaatgttacgtaaacccgcggggggtacaaacttaagatgctggtgaaatttctaagagagaccccccaaaataacgcgtgttgggatccacgatcggttagatgggggtaattcgactgcaactatgaggggagtattatctccctggcggccaatagggcccgagcgccgtcataaacccccccccccccacccccattaataagatagcaacagaca

SEQ ID NO: 687318 - DNA, 118 bp, Homo sapiens
  misc_feature (49)..(49): n is a, c, g, or t
  misc_feature (63)..(63): n is a, c, g, or t
gttaagaacaaatttaaagtttcctggttctgcaggatggtgcaggctntgaaacagtatatnactatttaaaattctgcctctaatttcgttgtttactttttgtagttattgtcat

SEQ ID NO: 687319 - DNA, 898 bp, Homo sapiens
acacgtatcctgaaaactggagggcttcaaggctctcatcgctgctcagatacatcgtgggctcaggtccgagtgctctccggaccaccccacttccatattggccagaccaatccgcacccctgaatatctccgcaaatttcctgcacggcaaggtcccagcatttgacggtgatgatggattctgtgctgtttgacgagcaacgccattgccttactatgctgagcaatgaggagctgcggggaaagtactcctataggcatgcgagcccagcgtggtgtcagtgggtgatgcgtttgctgataccggagtattatgtgccccacagcactatgtacctgagatgttccccatccgttgggctatcatgcaaccagcaaagcaaacagctacgggccccaatccttggaaggaacattggcacataggcggcaccgcacacgatcgcatggggctggaattttcatcggtgcgcattggcattgggcacttgcctctcacgtatggatacgcaacgaaggggcagcgtattttcctgagattgagagacgggaaagcaggaagctgaccactatagagtcgttgccacaattacaccatgcttgggttcctgtcatcacacattgttttgtggggcttcctatataagactaggtttacctaagcatgtccctatactttctgccagatcgaagtcgcatttcactcgatagtaagcgctaatcccgccttgtgatttcccttgcgaaacgtggggcaattcataccacaggatccccaagattttacccgggtgcctgtctttggggatcggaaagtgaacatagctgcttgtggaactaagaatggggccccagttttggatggccttaaacaagtttttgccattaagaatac

SEQ ID NO: 687320 - DNA, 719 bp, Homo sapiens
agacgtcagagttgagagacagaggcaccccggacagagacgtgatgcactgaataagtagatcataatgactgaaaaagccccagagccacatgtggaggaggatgactatgatgagctggacagaaagctcaattatacgccttcaccacagaaggccctgaaagagctgtaggaaatggacaaagatgatgagagtctaattgagtacaagacaacgctgctgggagatggtgctgtgttgacaagatccaaaagcccccaatgcatgtgttacccgattgaccctggtttgagagagtgcccaggaaccaatcaccatggaccttactggagatctggaagccctcaaaaaggaaaccattagtgttaatggtagattctgaatatagagtccacacctacaggactggggtgaaagtggataaagcaacatttatggttggcagctatggacctcggcctgaggagtatgagttcctcactccagctgaggaggctcccaagggcatgctggcccgaggcacgtaccacatcatgtccttcttcaccgacgatgacacgcaggaccacctcagcttggagtggaacctgtcgatcagattgagcggacagaatgaatgatacacccctttccccaccttgtcacctgaaagattctctcaggcgtggtcagcaccctggccctcttcctgtccacaggtgggtccgttttacat

SEQ ID NO: 687321 - DNA, 1073 bp, Homo sapiens
ggcatatcgcagtgaatggccgtgagtaatcgcgtgacgagcacgccatgaacgggctcgggacacagcatcgagagtacgaggtagaggggagttggtcggagctagatcacatacattgactactaccgtcacagtacgcatactaacgcagtagtgactagatacttcgtgtcctaactcatgtttgtacggtaagtatcgtcttctgggatatccattatgatactctcaagagatagatagaatgaagacatgctcttcaggtggagattagacataacaagttgagtgcggtggtgataaaagagtggaatggtactcacgcattgcgaggggtagaaatgagacatggcttgaggatccgttggcattggagcttacgagatcacctggaaagcgaggaacacgagccaaaaatgatactcgtgaggtaaataatcaggtgtaacatagacgcactcgctatggcagccctcgttttaacacatgctgcgtacccggtacggacactgtgaggacgtgccaccgggaagaccaaagtacccctagctggccccaccgcgcagctcacatgaatggtaatttagatagatggtggaacacggactgacttcggcacgagcgccaggtacatggtggcaccagctcagttgactggggacggtaccagagggcaccgttaccacagacacggaacactctcgatcggaccattccaagagggacaccacacgacatggaccgagccaactcggaggaaatccctggactgcccactggcttatgacaggcaggacgccaaaagacaattgcaaccaaagaccagagacagggagaccaaaaacactcagaaagccattcagtaagggaacgtacagggggccgcgcaagccaggccacagggagactcggtggccccccgaaatacagtcaacagtccacaggcaaggggaccacaggggcaatacacagaaaaaccaggagtgaaacacaaaccgcaacacggcaactcgccaaccacagcgctcgggccaccagcacgacaatcaaggagaggcaacacaagcaag

SEQ ID NO: 687322 - DNA, 286 bp, Homo sapiens
gaaagagcaaaagagatcctaactggttccaggtctgggctgtttagacttatgatgctgaaggactaaaggacctgttcagggtccagcccagtgcctggctgacaaaggcttggtctaggaagagctgacgggagacaccaagagtcagtctttgggtgcaactaaacctgccccaagtcacttagattctgagaacctaaaggatgctcagaaataatctggcttacctacccacttagaaaaactgtggagttttcagatttttttctcagagagggagtct

SEQ ID NO: 687323 - DNA, 350 bp, Homo sapiens
tgacagatcatcaggcattagattcttgtaaggagtgcacaacatagatcccccacatgtgcagttctcagtagggttcgtgctcctatgagaatctaatactgctgctgatctgatagcaggcagagctcaggtggtaatacaagcgatggggagcagttgtaaatacggatgagagatggggagtggctggtgaatacagatgaagcttcacttgcttgcccaccactcactttctgctgtgcggtccagttcctgacaggccacagactcgtacgggggttggagacccctgtcttcaaggattaagaaatcatgggatagtgaaggagagtagggacaactcttgg

SEQ ID NO: 687324 - DNA, 356 bp, Homo sapiens
taggatcccgggtgacgtgctacgttgtatcccagcactttgggatcgaggcaggcagatcacctgaggtcgggagttcaagaccagcctggccaacatggtgaaacctcgtctctactaaaaatacaaaaattagccgggcgtggtggtgcccgcctgtaatcctagctactcgggaggctgaggcaggagaatcacttgaacccaggaggcagaggttgcagtaagccaagatcgcaccaccgcacttcagtctgggtgaccgagggagacgccatcaaaaaaaaaaaagggtaagcccggggtccccccaaaggccaggtaaaacccaaaagccaggggtaacccaaaagccc

SEQ ID NO: 687325 - DNA, 132 bp, Homo sapiens
gatctttctactgtgacaatccaggaaaatggaagacaacgtatctgggatggagatgttgtggcttcctaagctgttcatgggtcaaataccgggtttctgttctgttttctatttcttagaacatcatga

SEQ ID NO: 687326 - DNA, 434 bp, Homo sapiens
  misc_feature (164)..(164): n is a, c, g, or t
  misc_feature (198)..(198): n is a, c, g, or t
  misc_feature (294)..(294): n is a, c, g, or t
  misc_feature (333)..(333): n is a, c, g, or t
  misc_feature (376)..(376): n is a, c, g, or t
  misc_feature (413)..(413): n is a, c, g, or t
  misc_feature (421)..(421): n is a, c, g, or t
cttgccgggagctctaggcactgggaggctgtttcaggaaagtgagactcaagaggaagacagaaaaggttgtaacgtagaggaagtgagactggtgaattggtttgatttttttcacatctagatggctgtcataaagttttagcatgttccccctcacctcnccccacccctgccacttgaaacttctactaatcnagagaaacttccaagccaacggaatggtcagatctcacaggctgagaaattgttcccctccaagcatttcatgaaaaagctgcttctcattaaccntgcaaactctcacagcaatgtgaagagcttgacaagtcnttcaaaataaaaagtaacaacttagaaaccggcaaaaaaagancatgcctctcgcaaagggattctccttcatccctctncagagganggagaagaggaac

SEQ ID NO: 687327 - DNA, 643 bp, Homo sapiens
  misc_feature (408)..(408): n is a, c, g, or t
  misc_feature (417)..(418): n is a, c, g, or t
  misc_feature (424)..(424): n is a, c, g, or t
  misc_feature (463)..(463): n is a, c, g, or t
aaaagggggtccgttaaaacctccttttaatccttgcaaggacagttatctttaattatttcggtttggccaaagatttatccttttcttacttcttgtgttttcaatcacatttaaaacaaatcccaatgcactcaaatgatgttgtccccctgcagatggcctaaggcttcttcaggtgaatattcccttttatttgagaaggagggagctccagacattttatccccacacccccccgggggttaaagccccccaagagattattttttgtgtgggcccggggtgggggttcccaaaaaaaggtgtggttttacaaagggcaacttgctcccccacagtttggttttttttctctgcgggccagttgggcttcaaagtggaaaaaaaaattttcttttcccaagnggggggaannggggtnccccccccaacccttttcccccccttttttggccccccnaaaaccccgtttttataaattttaaggggtgtttcccttcctttttttcaagggaaccgaaaggaaaggaaaaatttttcccatttttcttcttttttgggaagggctttccctttccctttttaaggttctggggttcccaagaaccaaggatttttttggtaaagttttttttgggca

SEQ ID NO: 687328 - DNA, 518 bp, Homo sapiens
tcacgctttatacttcacccctaaacacatttaagggttggattaacatattattttctattaaggggtggaagtggatcagcagtaaaattcctgctacaactacagcgctagagtggagtagggctgagactggggttggaccttccatggcggaaggaggtcaggggtagaggccaaacttgagctgacctttcccgctgctgctaagacgaacggccaattaatggcagatcaggggtacggatttcggatacactgctcgttgcggttctcatgtattgtacagatgacgacggaactcatgctactagctacaaatgaagccacatatcgcccatgcggttatacagcaatcgcttggagggctgctgtattagcatctgctcagctgtgtcctcagccagttagtaaaaccagacataattcctacaccttctcatctgatagccagttgaaccaatgttgttggtggtacctagactccctatcgtggtgcggcacctaagtaaatattt

SEQ ID NO: 687329 - DNA, 352 bp, Homo sapiens
acagcccaaggggcccactgcccccccagaaaaggagctcttctgcaactgcagacccctgtgtgtacaaggagttccctcctgaggcttgtgggtgggcgggctcacactcggtgtgaatctcactcacctcaggcctactggcatggtgctgaatgctcagacccagggcccagcctgactggcccgctgggacaggaactctcagtcttctcttgccaccacctgacagtaggtacggatttaacatggcaaattctctgcctacctgtgtgttctgcacaaggctgcccagccaccagagttaacaagtcctgttctttccctgctaagcaggctccaaggtcgacgc

SEQ ID NO: 687330 - DNA, 687 bp, Homo sapiens
  misc_feature (515)..(515): n is a, c, g, or t
  misc_feature (580)..(581): n is a, c, g, or t
tatcaatagctgaatcgatcaagtggaagaaaggatatcagagattgaagattaactcaatgaaataaagtaagaagaccagattagagagaaaaaaaaaaaagagtgaaaagaaacaaataaagcctccaagaaatatggaactatgtgaaaagaccaaatctacgtttgattggtgtacctgaaagtgaccgggagaatggaaccaagttggaaaacactcttcaggatattatccaggagaagttccccaacctagcaaggcaggccagcaacattcaaattcaggaaaatacggagaacaccacaaagatattcctcgagaagagcagccccaagacacataattgccaattcatcaaggttgaaatgaaggaaaaaatcttaagggcagccagagagaaaggtcgggttacccacaaagggaagcccatcagactaacagtgaatctctttggcagaaaccctacaagccagaatagagtggggggctatattcaacattcttaaagaanagaatttgtcatcgagaatttcatattcaggccaacctagcttgataaactaagggataataaanntccttcagacaagcaactgctgagagatttttgtcacaacaagcccttgcttataagagcttcttggaggaagcacctctttggaacccttggtccttaccctgtg

SEQ ID NO: 687331 - DNA, 336 bp, Homo sapiens
ggtggtgacatcagcaaccgccagttcttgtccatcaacaagccccaattcttgcaaggtttgggagagattgggtctggttcgttcttcagtagaggtaaccgagggtaagtaaagtgttctatttttaccctctaggggggctgtgagggctggagatttcatgggcagagaagcactattggttagataatccaaaatctcctgtagtttagcggatggagaaaactgaatatcgtgaggaagcgggctacgagctgggcagttttcctttctttcggcttcagatgtgtatgtatacagcccatctacatcattaaacaccaagtaattact

SEQ ID NO: 687332 - DNA, 263 bp, Homo sapiens
gaatggcatgttggttgattgtatatattgtttgttgtgagttcttcgatcaatggctcatttagtgcgaaaagccggttagtgggggcaggcctcctacgtgagagagaaggtggatggaattaatggtgttagtcatgttagtttgtttcatggtgtgagatagtaataagggttgtggtgtgctggatgtttatgttagattaagtaggaatgcagggagtaagttagtgaggccattcaaccgcctccgtggggatcct

SEQ ID NO: 687333 - DNA, 183 bp, Homo sapiens
gccctcgggattgagcccgctcatcacgtgcttgacggtgccgtccttgcccgccgcgtcgattgcctgcagaacgatcagcaatgagcgttcagcttgggcgaagaaccgatcttggagattgaacagagtcgcggtcgcctcggccaattcggccagcccgccttgcttggcgagttcctt

SEQ ID NO: 687334 - DNA, 410 bp, Homo sapiens
gtcaccagtattgcccagagacagtgagtctacaatgtcgcatgatgcttagtctcagattctcatgatctcattgactgactgcactgtgaatctgtcaccctgactgacatgaccagtcaggagctccccggactacatatacattgaggctttgtcagcatcatccaaggttctaactcacctagagcctgtcagaatgcgccttaatcctacaccgacagcctggccaccattgcaacagtaccaggaggtcgatcttcctagtgagcatcgatacagacgtctgcagagctcatgaccacagaccagagctgacactcacgatgaactcctggagggcacggatgtgagccttacggataccacggaggctcagatccatcaaggcttgcaagctcatctattcc

SEQ ID NO: 687335 - DNA, 228 bp, Homo sapiens
  misc_feature (12)..(12): n is a, c, g, or t
  misc_feature (138)..(138): n is a, c, g, or t
aagaaaggcatncaaaacccacaagcagagagtggaggacttcaacagcacctggacacactcacggagcattacgacattccaaagtcagctggacgaatagccgcctgccccagtatgagcagcatcgagggttcncaaaggcacactggggttgtgtgtgtttctttggataatcctggaacatggctcacacaccttgcatcttctgctacagactgctttcga

SEQ ID NO: 687336 - DNA, 257 bp, Homo sapiens
tctcatatcttgtcgctcggcacacagcagaggttgagcaggagcttactgagttcctcccccgtcagatcagcagcagcattagattctcatagaagtgcgaaccatatggtgaactggtctgtgagggactctagagtgccatgttcctcaagagaatctaatgcctgatgatctgaggtggaacagttcatcctgaaaccattcccccatccacagaaaaattgtcttccactgaaactggtccgagcggagga

SEQ ID NO: 687337 - DNA, 523 bp, Homo sapiens
gtacacgtgatcctacagaagtggagctggatgatcagatagtgtactgcgacctagagcaatatctggtgatgaagacagggctacagagacctgtctagactctgtgatagaaacaagtgtctacacagttgtggtcccactcgtatatagtggttagaccaaaatggtggaaacagccttaaccccggatgccggctatcctgactaatttatgtcatagctgtttgctgagctctttttcttgagaggctctccattttgattcagaaagttagcatatttattaccaatgaatttgaaaccagggctttttttttttttgggggtgatgtaaaactaactcccggccaccaaattaattaaaatagtcacttggtaatcttaataaggtaatcgcttcttacttttatgtccatactctaggtatcaaaatcttccagttatcaggctcacctgaaagaggtatgctctcttaggaatacagtttctagcattaaacaattagacaaggggaaccccg

SEQ ID NO: 687338 - DNA, 407 bp, Homo sapiens
ggcatatacaagatgcccagtatgaacatgtgtattacacctctacagttccctttgtggatttgtcacacactctcacatcatgcgttctaagcagttgctcttgtcagtgtcactagtgatgttaattaatctgcatataccaagtgctcagaactttctaaatatggtcatcagtatgtgtcaccaacagagtgtcctgctacaaatgattatgcaaatcgcaaaaatagatacacttccactgatatgctttaatcatgtatccgggcactctcatcgtatggctcttcctcatctaagtacacagtgggctcctaactctccttcatcagctttgaccgcgttatgactcttgacgggcccgtagaatgtgcgctctgtggtcacgtgggacacctagccgt

SEQ ID NO: 687339 - DNA, 252 bp, Homo sapiens
cctgctcatatagctattggtgtcacatgacaatgctggcagtatgatcttgaaaaggccaaaatcgatcggggagagaactatcagtgccacagttgtgagaggcgctctcctgtgtatcatatttttctccaaaaagtacgggagcagagagggagacagaggagtcatcacagaccgaggaggtggatcacagcactatcctgaggagcgacatgtggttgaacgccatggacgggacacgaatgttca

SEQ ID NO: 687340 - DNA, 101 bp, Homo sapiens
tgcggcgcaagacccgcgcgggggggatgcgtgcatttatcagatcaaaaccgccggcgcccgccccccaggccggtggccggagacgggtgctgaccgtg

SEQ ID NO: 687341 - DNA, 372 bp, Homo sapiens
gcgtcgaccccgggcgatcaacaggcgttgcttctggcccgaggacaattgcacgcccatgggtccgagcaaggtattgaagccattgctcagtttcaggatgctttccagcaacccggcctgctcgacacagctctgcaaacccgtgccgtccagcgggtcgctgtccatcaggatgttctcgatcaccgtcccggcgatgatctcgtcgtgggccgtgacataggccacgctctggcggtacgagcgcaaaccgaaatgccgcatcgcctggccgttgatcctgaagcgcccggtgtccagggcatagaacccggcgagcactttcaggaaggtgctcttgccgcagcccgaaggggagatatcggcgat

SEQ ID NO: 687342 - DNA, 305 bp, Homo sapiens
aagttgatgctgactccagctttaccctgattagttcagtaaacatttccagctcgtgaagaaggacggtattcccatagcgttgtgataggttttaaagatgccacaggagaatcgccacttctagattggcacgaaatacctaccacttatagaggtgcatctttgatcttgagtgggtttgtactatgcagtaagatctgcatgaccagaagtggctcgaataacactttttctctgtccacgggtaggtcattcaaggggtgtccacattgtagtgggctgagatatcaacccaagtaccc

SEQ ID NO: 687343 - DNA, 491 bp, Homo sapiens
agcgcggagagccggactcccaggcggcggcagcagcggcggcggcggcgacgacggcgaagagtgagtgccaaggttcatatgggaaggactttggggtgagcatcttctctatttccagctggcttttctgattcaccccaccatttaaaacctggaggcactgggccacacaaagccttgctgattttcagaaagaagactcatcaaagatgtccagcaagacggcaagcaccaacagcatagcccaagccaggagaactgtgcagcagctgagattggaagcctccatcgaaagaataaaggtctcaaaagcatcagcagacctgatgtcatactgtgaggagcatgcccggagcgaccctctgctgatgggcataccgacctcagaaaacccgttcaaggataagaagacctgcatcatcttatagtggaccaggaagcgccccttgcctcttaacgcaaaccacagcagcaacctgaagggattc

SEQ ID NO: 687344 - DNA, 441 bp, Homo sapiens
taccacgaccgtgagtgtcacaggcctgacgagtttcagagtgtcgagagtaaaagataaggacgaagataaacacctgaaatagcgtataactcatgaatgagatagtgcatcttctgaggtcaatcaaaaggagaagaaatacaatttctcactttgcatttagtccaagagaaaaaatgctttctagcagaatgaaagagaacatgaaatgcttctttctcagtttattggttgaatgtgtatctatttgagtctggaaataactaatgtgtttgataattagtttagttggtggcttcatggaaactccctgataaactaaaagctgtcagggttatgtctatgttcattctatagaagaaatgcaaactatcactgtattttaatattggttattctctcatgaatagaaatttatgtagaagcaaacaaaatact

SEQ ID NO: 687345 - DNA, 576 bp, Homo sapiens
  misc_feature (81)..(81): n is a, c, g, or t
cagagttgtatttataaaagggttttaataaatggatacacttcaccaagggaactgaaaggcagaaagctgccacaagtnactatcagtacacacacacaaattttcctcaatcagaggctctgataagcagcgtaagggcgcaatcgttatcctgtaaccagcctttcgttggatcgtgattgggatatttggatgacttcattgctgttcatccacatttccatacacacaattgtgggcatccctccccagtggagatgcagccttcagattctcttgagctataagcctgagtcagagattggcttttagcttatcactttcaacgattctatctgagtgcagctgaaggatctcttcctgactgaatccatactctctaagcacttctacggtgtgctcccctacagaagggtcccttttggcagatgggacggcaggagttctggaaagcagaggtgcagggcgggggctcgggagctgctccccatcagtgatgaaggaggcccgttctctgttgtgctggtggtggagggcctcctcaaacgtcagcactggggtcacacacgcatc

SEQ ID NO: 687346 - DNA, 323 bp, Homo sapiens
ccgttgtcagtgcacacctgtggtcccagctactcgggaggctgaggtgggaggattgattgagcgcaggagtttgaggttgcagtgagctatgattgcagcactgcactccagcctgggcaactgagcaaggccttgtcaaaaaaaaaaataaaggaaaggaaagaggggagagagagagacacagagagagagagagaaaggttcaaactgttttcaaaatcatttgggtccaatctttctatcttcttattaaaaggctcctggattctgttcaggatgttaatgctgggcttgctgtccaccatgttcactgacaacgg

SEQ ID NO: 687347 - DNA, 197 bp, Homo sapiens
  misc_feature (1)..(1): n is a, c, g, or t
  misc_feature (10)..(10): n is a, c, g, or t
  misc_feature (26)..(26): n is a, c, g, or t
  misc_feature (70)..(70): n is a, c, g, or t
  misc_feature (166)..(166): n is a, c, g, or t
  misc_feature (175)..(175): n is a, c, g, or t
  misc_feature (193)..(193): n is a, c, g, or t
nttcggcacngcgggctccgggcctngaatagatggggtgcggggacggagacaaatgacggcctttggntcggaatacccacctttctggtaatgcagcccagcggtccccagcctcgttttccagccctcactcaaaattgagtcgctcttgttcgaacgcctntgacaagtntgtatctacgtgtcaggnccat

SEQ ID NO: 687348 - DNA, 194 bp, Homo sapiens
atcgtccccgtagtatcagacagcctggcaacgtggtaaaccccatctcgacacaagttaactgggcatggtggtgcgctggtagtcccagctactcgggaggctaaagtgagaggatggcttgaacccaggaggcggcaggttgcagtaagctgagatcgtgccacgtgtactctcagctatgggcaaccaga

SEQ ID NO: 687349 - DNA, 159 bp, Homo sapiens
agtggcatagtagtttgcaagactcatcagtaggcttcgtactacatcgacatgttctacgttgtagcccagttccactttttcctatcagtaggagctgtatttgccatcattggaggcttcattcactgttttcccctattctcaggctccatcctt

SEQ ID NO: 687350 - DNA, 404 bp, Homo sapiens
tggggagcccccgctccagggctcgctccaggccctttttcccaaaatgacttgctcgctgttacctgcttcccccgttttttttgaaaaaccccaaattagggtgggaaaagctttgtttttaaaagggtcatatttcctttttagggggtttgttgttttccctgttagtttttaggagcaggaagctcatgggggcttttgtagcccccctcaaaaggggttttttttttgagaatttgaagctgaacccccttttaattttcagaatgttttttttgaaaagggcccccaccccccaatggaaaactgtttttaaaaaatatgatgttttttgattgcttttgttttttattttccgggggttcaagttttaaaaaataaaattttttacccgaccccca

SEQ ID NO: 687351 - DNA, 1507 bp, Homo sapiens
  misc_feature (1)..(1): n is a, c, g, or t
nttcgcaggtttttttgtccgcatgtgtctcctcgcatagctactccatgaattgtgcgtttgtgtagcgacctctgttcgggtggtagtttctccttgtgcccgtgtgggttggggaaactcgagtgggagtgccccccgcgtgttgtgttccccgccccggccgaggcgttggccgcacagtgtgttcggtgttctcgcaagtatgccgcccctacgggctctgttgtttttgcgcgtgccccccgcagccgtttttggtgcccccccaacgtcccccgggggggtctctcatgtcgctccacagagcctcctaggatcatactccccgtgggcctagtcctgttgtggaccatcctcgtgttggcggccgctagtaaggggttgttctattccatcctccgactgcgcaacagcaaatgtagtgttttgcaaagttgtcctccccatcacggggaaactacacacttctgatgtggtgtggccgttgtgctcctgtgtgggcgtgagatcatcccccccccgctctcccccccttggttggtgcccccccgcttttatcgccctcgtagcccggcggtttttgtgccgcccccccccgcttggttttctccaacgcgggggggccccgcccacctcggtgtctcgcaacctgtaaatagggagagcgcttggtggatatggagagcccccacaatatggcgcgtgttaaaatatggattccccaccacacaacaccacatcatattactcacgcccaccgcgctcatcatatgttcttgttttctagaagattttgtggagatttcccccttcacaccaccacacatggtgtgtagaaatcaccaccgcgcccgtcgtgtgtcttcggtgggagaacactttcccgcccccgcgccttcttcgcgcgggggggcttataatatacagatttgtgtcccgccccccacacgcctctgtcacatttgggggcaccgcacacgcgccccggcgcccatctcttccacgcgagacccttgtgttctcaagccgccactttctctccgcatgcccacgctttttctccgcgccccactcgcttttccgcggcgccccaagggcccttgtcctcgccacactgtgttgatacaccgcgggcgagaggtgcgcactgtgaccgcaggatgtgtgaggatttttctccccgcgcgggctcccgaggaggccacacccctgaatgcacccttggttgtctccgaggtacccccgccacgtatcccacggaatcccaccacgcccgaaggaaggaagggccgaagttccgaaggaaggaaggcctgagaggaagagaggtggcctatgaggccttcacgtccctggggaaagcccgggagaaccacgtgtgtactctttatttcacctcccacgcctgtcctgtggcctgtccccctgtgtgcaccttgctgtttttccccgtccacatccctgctgtacagaccccccccctttaagccttttcatagtggta

SEQ ID NO: 687352 - DNA, 187 bp, Homo sapiens
gctgagtgtaaaggtagggcgcagtgtaatctcagcttactcgggatgctgagtgccgcgagaatcagcttgaacccaggagtcggaggttgtgttcagccagagattgcgccattgcactccagcctgggcaacaagagtgaaactccatctccaaaaaacaccaaaaaaacaactcaacaccaat

SEQ ID NO: 687353 - DNA, 168 bp, Homo sapiens
  misc_feature (151)..(151): n is a, c, g, or t
gatgtcgcgtgcagtatagtactacaagtacacattgctcttacatttcatgtaagtctacatgtagatatgatcgattaccattctagggggagagggaacacaggtgtattatcatcagctagatgtgctcactgtatgcactgttatntatattgcacgcacgcg

SEQ ID NO: 687354 - DNA, 203 bp, Homo sapiens
acgtgttgcactttcggcttcagtgactccatctcagacaacaaatgctgccgatgagagagctgctccttgagattgagacgtccaaattctggagaagtcagtgtcgcctgggcttgctcccaaaggcagcttgtaaactttttctacagcagttccctcatacggtataatcaaaattgtatttccttagaagcattcag

SEQ ID NO: 687355 - DNA, 397 bp, Homo sapiens
tgtgagaaatttactaaatgaactttcctgtcttttaatctttttcttattttttttttgagcggagtttcatgcttattgcccaagctggagtgcagtggtgcaatctcggctcattgcaacctctgcctcccacctcccgggttcaagcaattctcctgcctcagcctcccgagtagctgggattacaggcacccgtgggtcacacctggctaatttttttgtattttttttttcacttttttttttgagacggagtctcactctgtcacccaggctggagtgcaatggtgtgatcttggctcactgcaacctctgcctctcaggttcaagtgattctctgacctcagccaccacgcttggctattttttgtatttttaatagtgatagggtttc

SEQ ID NO: 687356 - DNA, 526 bp, Homo sapiens
gatcacctaaatgagccagagtcatgtggctaaagcccgtactccgcagtcactttgggtagagcatgattacactgagaccagtagttcacgatcaatctggtcaacatgatgagtccctgtctctactagaatacgaccggtatcttagagtgttgagggttgcaagcctttcgagctactcaggaggctagggcgggagaattgcttgaacttggggaggcggaggtcgcagtgagtggagatcgtgccactgcactccaggctgggcaacagagcaagaccctgtctcaaaaagaaaagaacagaaaagaaaagccaggtgcagtggctcacgcctgtaatcccagcacactttgggatgctgaggcggttggatcactggaagtcaggagttcaagaccagcctggtcaacatggtgaaaccctgtctctgctaaaaataccataattagctgggcatggtggcacacacctgtagtcccagctactcaggaggccaagacggacagatcacttgaggcca

SEQ ID NO: 687357 - DNA, 307 bp, Homo sapiens
tgggagactgaggaaggagaattgcttgaatctgggaggcggaggttgaggtggagctgagatcgcgccattgcactccagcctgggcaacaagagcgaaactccgtctcaaaaaaaaaaaaaaaaaaaccaaaaaaaacctacttttcaaatttactttgaaaaaaacagggaaaaaaaggggaaaaaggatgtgtttaaacctggaaaagggtcaaaaatcagaaagggtttccctgaagtttttaaaaaaataaaaaaggggtggaaccatttggaacattgtaaaatttcattcagaaacctg

SEQ ID NO: 687358 - DNA, 146 bp, Homo sapiens
taatctatcagctcaggcgctggcgtattttaaatataaaaatgggtgtatttacattttttttggtcaggtgatattgggtcttctgtggacattcggggtgatccgtgtctgcgctgtgtacaaggtgagatctgtgcgttctc

SEQ ID NO: 687359 - DNA, 1239 bp, Homo sapiens
agcggataatttggaatgtgggtggagggggatcatagttctccctgagtgagacttgcctgctcctctggcccctggtcctgtcctgttctccagcatggtgtgtctgaagctccctggaggctcctgcatggcagcgctgacagtgacactgatggtgctgagctccccactggctttggctggggacacccgaccacgtttcttgtggcaggataagtatgagtgtcatttcttcaacgggacggagcgggtgcggttcctggacagatacttctataaccaagaggagtacgtgcgcttcgacagcgacgtgggggagtaccgggcggtgacggagctggggcggcctgacgctgagtactggaacagccagaaggacatcctggaagacaggcgcgggccgcggtggacacctactgcagacacaactacggggttggtgagagcttcacagtgcagcggcgagttgagcctaaggtgactgtgtatccttcaaagacccagcccctgcagcaccacaacctcctggtctgctctgtgagtggtttctatccaggcagcattgaagtcaggtggttccggaacggccaggaagagaaggctggggtggtgtccacaggcctgatccagaatggagactggaccttccagaccctggtgatgctggaaacagttcctcgaagtggagaggtttacacctgccaagtggagcacccaagcgtgacgagccctctcacagtggaatggagagcacggtctgaatctgcacagagcaagatgctgagtggagtcgggggctttgtgctgggcctgctcttccttggggccgggctgttcatctacttcaggaatcagaaaggacactctggacttcagccaacaggattcctgagctgaagtgcagatgaccacattcaagggggaaccttctgccccagctttgcatgatgaaaagctttcctgcttggctcttattcttccacaagagaggactttctcaggccctggttgctaccggttcagcaactctgcagaaaatgtccatccttgtggcttcctcagctcctgcccttggcctgaagtcccagcattgatggcagtgcctcatcttcaactttagtgctcccctttacctaaccctacggcctcccatgcatctgtactccccctgtgtgccacaaatgcactacgttattaaatttttctgaagcccagagttaaaaatcatctgtccac

SEQ ID NO: 687360 - DNA, 173 bp, Homo sapiens
gtcgacccagctactcaggaggttgagatgggaggatcactggagcctaggaagtcaaggcggcagtgagccactgcactccagcctgggtgacaggaatgagactgtgtctcaaaaataaaaaacaagttacagcttttgctttagaaaacttggaaagtacagaaatatat

SEQ ID NO: 687361 - DNA, 1149 bp, Homo sapiens
agcggataatttggaatgtgggtggagggggatcatagttctccctgagtgagacttgcctgctcctctggcccctggtcctgtcctgttctccagcatggtgtgtctgaagctccctggaggctcctgcatggcagcgctgacagtgacactgatggtgctgagctccccactggctttggctggggacacccgaccacgtttcttgtggcaggataagtatgagtgtcatttcttcaacgggacggagcgggtgcggttcctggacagatacttctataaccaagaggagtacgtgcgcttcgacagcgacgtgggggagtaccgggcggtgacggagctggggcggcctgacgctgagtactggaacagccagaaggacatcctggaagacaggcgcgggccgcggtggacacctactgcagacacaactacggggttggtgagagcttcacagtgcagcggcgaggcagcattgaagtcaggtggttccggaacggccaggaagagaaggctggggtggtgtccacaggcctgatccagaatggagactggaccttccagaccctggtgatgctggaaacagttcctcgaagtggagaggtttacacctgccaagtggagcacccaagcgtgacgagccctctcacagtggaatggagagcacggtctgaatctgcacagagcaagatgctgagtggagtcgggggctttgtgctgggcctgctcttccttggggccgggctgttcatctacttcaggaatcagaaaggacactctggacttcagccaacaggattcctgagctgaagtgcagatgaccacattcaagggggaaccttctgccccagctttgcatgatgaaaagctttcctgcttggctcttattcttccacaagagaggactttctcaggccctggttgctaccggttcagcaactctgcagaaaatgtccatccttgtggcttcctcagctcctgcccttggcctgaagtcccagcattgatggcagtgcctcatcttcaactttagtgctcccctttacctaaccctacggcctcccatgcatctgtactccccctgtgtgccacaaatgcactacgttattaaatttttctgaagcccagagttaaaaatcatctgtccac

SEQ ID NO: 687362 - DNA, 769 bp, Homo sapiens
gtgtggaatgcgacatcaatggtctgcgcaggatgctggacgaactgacccttgccaggagctgacctggagatgcagattgacaggctgaaggaggatctgggctacctgaagaacgaaccacgacggaggagatgaatgccctgtagaggccatggtgggtggatgatgtcaatgtgagagatggacgctgcacctgcgcgtggaaccatgaagccgctattctgaacgagatgcgtgacctagtatgagaagcatggccatgagacagaactcgcaaggatgccgcagtgaatggttcttcgaccgaagacagaggagctgaaccgcgaggtgggctagccatagagcgagctggtgcagagcgtgccatagagcgagatctccggaggctccggctgcacctatggcagaagcctgcgagatctgacgctgctaggtcccaggctcagcatgaacagcatccctggagaacagcctggtaggagaccataaggtcagctactagccatgcagctggcaccagtatccagtgatgctgattggcatgcgtggcaggagcagtctggcccagctccgccttgcgagcatggatgccacgcagaaccagggagtacaagagtcctgctggtacgtgcaagacgcgggttggagcaggagatcgccacactacctgtcgtctgcatggagtggcgaggacgcccaacctcgtccgtcctcccagttcgtcctctggatcggcagtcatccagagatgtgaccctcctcc

SEQ ID NO: 687363 - DNA, 400 bp, Homo sapiens
aagaaggaaaaagatgcttcgggcgaactactccaccgtttgagccaacgacgccaggtgtttatttcctgtctttttccaaatcatacaaaagggggaggtatacatataaaaatgcagttacattgttgacagatttgatattttgccttcttcactgaatataatgggcttgtgttggtctcctgtccccttatatagctgcagaatttatattgggcaaaaaactctttcattgactgaggggtgaccataatcgtaaaataattcacgagtatgtatggattttatacgcttttaaagggatagtgctgggatatacattatttcccgggtaagatgttgaaagtgataaggtggaaatatatggcatatgtgtaacaacgggatgcgggccggg

SEQ ID NO: 687364 - DNA, 1336 bp, Homo sapiens
agcggggatcctcctccagctcctgcttggaggtctccagaataggctggaggcggggagggggtcccaaaagccttgggatcagaaggggttttcccgcctggtcccccagacagcccgttcgcctcaggaagacggaggatgagcctctgggctgcgcgtggtcggggttatggttgggatcagttaaggttccagtgcccgcaccccgcccaggagccccggatggcggcgtctctgtcagtgtcttcccaggaggccgcccctgtgaccggatccttcgtgtccccacagcatgtttcttgcagcaggataagtatgagtgtcatttcttcaacgggacggagcgggtgcggttcctggacagatacttctataaccaagaggagtacgtgcgcttcgacagcgacgtgggggagtaccgggcggtgacggagctggggcggcctgacgctgagtactggaacagccagaaggacatcctggaagacaggcgcgggccgcggtggacacctactgcagacacaactacggggttggtgagagcttcacagtgcagcggcgagttgagcctaaggtgactgtgtatccttcaaagacccagcccctgcagcaccacaacctcctggtctgctctgtgagtggtttctatccaggcagcattgaagtcaggtggttccggaacggccaggaagagaaggctggggtggtgtccacaggcctgatccagaatggagactggaccttccagaccctggtgatgctggaaacagttcctcgaagtggagaggtttacacctgccaagtggagcacccaagcgtgacgagccctctcacagtggaatggagagcacggtctgaatctgcacagagcaagatgctgagtggagtcgggggctttgtgctgggcctgctcttccttggggccgggctgttcatctacttcaggaatcagaaaggacactctggacttcagccaacaggattcctgagctgaagtgcagatgaccacattcaagggggaaccttctgccccagctttgcatgatgaaaagctttcctgcttggctcttattcttccacaagagaggactttctcaggccctggttgctaccggttcagcaactctgcagaaaatgtccatccttgtggcttcctcagctcctgcccttggcctgaagtcccagcattgatggcagtgcctcatcttcaactttagtgctcccctttacctaaccctacggcctcccatgcatctgtactccccctgtgtgccacaaatgcactacgttattaaatttttctgaagcccagagttaaaaatcatctgtccac

SEQ ID NO: 687365 - DNA, 398 bp, Homo sapiens
gaaagtagagtcaggacttaaaatggagctgatgagcttgctctaaatatgttgactaacaccactttcacccctacacatcacatgccaatgattatgtcaccttcactccttttaaagaccccaagatgcacctagattaataacatgctctatgtccttaatacagagcaggctaattaaaaattgtatgctggctgacaatgaatacatgaagcagtcatcatattcaaaatcaggcaacttcacctgcagaaggagccaaataaaagctcagtggggaatgcaaaggcaatcattttgagccttttccacccaagcatgcaaacatatgcatgacacgttgtcatccacagtgcataaggtcctggggtcaagcaaggctcttgcacaggacg

SEQ ID NO: 687366 - DNA, 1218 bp, Homo sapiens
agcggataatttggaatgtgggtggagggggatcatagttctccctgagtgagacttgcctgctcctctggcccctggtcctgtcctgttctccagcatggtgtgtctgaagctccctggaggctcctgcatggcagcgctgacagtgacactgatggtgctgagctccccactggctttggctggggacacccgaccacgtttcttgtggcaggataagtatgagtgtcatttcttcaacgggacggagcgggtgcggttcctggacagatacttctataaccaagaggagtacgtgcgcttcgacagcgacgtgggggagtaccgggcggtgacggagctggggcggcctgacgctgagtactggaacagccagaaggacatcctggaagacaggcgcgggccgcggtggacacctactgcagacacaactacggggttggtgagagcttcacagtgcagcggcgagttgagcctaaggtgactgtgtatccttcaaagacccagcccctgcagcaccacaacctcctggtctgctctgtgagtggtttctatccaggcagcattgaagtcaggtggttccggaacggccaggaagagaaggctggggtggtgtccacaggcctgatccagaatggagactggaccttccagaccctggtgatgctggaaacagttcctcgaagtggagaggtttacacctgccaagtggagcacccaagcgtgacgagccctctcacagtggaatggagagcacggtctgaatctgcacagagcaagatgctgagtggagtcgggggctttgtgctgggcctgctcttccttggggccgggctgttcatctacttcaggaatcagaaaggacactctggacttcagccaacaggattcctgagctgaagtgcagatgaccacattcaagggggaaccttctgccccagctttgcatgatgaaaagctttcctgcttggctcttattcttccacaagagaggactttctcaggccctggttgctaccggttcagcccttgtggcttcctcagctcctgcccttggcctgaagtcccagcattgatggcagtgcctcatcttcaactttagtgctcccctttacctaaccctacggcctcccatgcatctgtactccccctgtgtgccacaaatgcactacgttattaaatttttctgaagcccagagttaaaaatcatctgtccac

SEQ ID NO: 687367 - DNA, 243 bp, Homo sapiens
  misc_feature (149)..(149): n is a, c, g, or t
  misc_feature (173)..(173): n is a, c, g, or t
  misc_feature (192)..(192): n is a, c, g, or t
ctttctttctatggccttgttcttcatctgcaaaacaagagtgaattagaggcaagattcttttcacttctgggattgaaagaaccagcatttgtgaagtgtttatataggcactacagtgatacattcctgtttaaggattatgacanctgcttgtcctctctatctctctnggcgacttgatggcatttntgcttagcagattgtacatatgttttatacgtctttcttcacctcatatgt

SEQ ID NO: 687368 - DNA, 893 bp, Homo sapiens
  misc_feature (41)..(41): n is a, c, g, or t
  misc_feature (78)..(78): n is a, c, g, or t
  misc_feature (88)..(88): n is a, c, g, or t
  misc_feature (206)..(206): n is a, c, g, or t
  misc_feature (229)..(229): n is a, c, g, or t
  misc_feature (240)..(240): n is a, c, g, or t
  misc_feature (261)..(261): n is a, c, g, or t
  misc_feature (263)..(263): n is a, c, g, or t
  misc_feature (266)..(267): n is a, c, g, or t
  misc_feature (279)..(279): n is a, c, g, or t
  misc_feature (283)..(283): n is a, c, g, or t
  misc_feature (287)..(287): n is a, c, g, or t
  misc_feature (293)..(293): n is a, c, g, or t
  misc_feature (315)..(315): n is a, c, g, or t
  misc_feature (320)..(320): n is a, c, g, or t
  misc_feature (353)..(353): n is a, c, g, or t
  misc_feature (356)..(356): n is a, c, g, or t
  misc_feature (358)..(358): n is a, c, g, or t
  misc_feature (361)..(361): n is a, c, g, or t
  misc_feature (368)..(368): n is a, c, g, or t
  misc_feature (381)..(381): n is a, c, g, or t
  misc_feature (391)..(392): n is a, c, g, or t
  misc_feature (400)..(400): n is a, c, g, or t
  misc_feature (415)..(415): n is a, c, g, or t
  misc_feature (450)..(450): n is a, c, g, or t
  misc_feature (459)..(459): n is a, c, g, or t
  misc_feature (462)..(462): n is a, c, g, or t
  misc_feature (497)..(497): n is a, c, g, or t
  misc_feature (500)..(500): n is a, c, g, or t
  misc_feature (521)..(521): n is a, c, g, or t
  misc_feature (526)..(526): n is a, c, g, or t
  misc_feature (529)..(529): n is a, c, g, or t
  misc_feature (539)..(539): n is a, c, g, or t
  misc_feature (706)..(706): n is a, c, g, or t
  misc_feature (813)..(813): n is a, c, g, or t
  misc_feature (872)..(872): n is a, c, g, or t
ttaaaggaatccatataaaaagaaaagcaaatccattaganattgatataaacagttgattttatctggaaccaagantgtgaatganttggaagcctagatgtcctaacctgtttctttgcataaaatggccagtagatattttgaaatttgatgatggcaattatactttattactttacatagagctttgtttttagctaatnttttagagacagattacccaaanttacctaattnggttcccacttcattccttcncnaannccaaccctaaanccgngggnggccgnccgtggtggcccccgcctgtcntcccngccctccgggaggccgcggcggggggccccccnggncnggngtctgcnccccccccgcccnccatggcgannccccgtcnctccccccccccccncccccacccaggtgtggcgcgccccccgcctgccntccccgccnctnaggaggccgacgcacgcgagactcgcttgcccccnggngccggcggttgcgcgcgacgncccgnccncgctgccacngcctccagcctgggcaacagagcaagactctgtctccaaaaaaaaaaaggaaagcagaagggggcattttcctgtcttcaaaatacaacctcctgctaagactagcaagtcagcagaaactcattgcatttgggcttctggttactaaatgaattaagagacaccgngttccatccttagatgtccacatagatcccattgatcaaataatccagtcttgagtaacgtttcctgcggagtgattccgagaggattctacccaggaggacgaggnctatcaccaggaacaggacaccaaagagcagggaccgataagaagcatttttcaatggnaaggcgttctgattttctgga

SEQ ID NO: 687369 - DNA, 496 bp, Homo sapiens
ttaattaatacatataaagcacctgctacagtatctgggttcagtaagtactctgtaaatatttgcttgtgatagaaataacttttcttttaacccctgtggagaggtaggaggtagtgtcatcaatgactcagtgacagtgagagaaagggtgaggttgatggtaacttcttaccttggtagtagcagcagtctcacaaatgcctcctgaggaaaagggataactgggagctcattctttagggtcaaatagacccaaacaggaaatctttcctattgtgaatgaccttgcgcaagttatttcactaaaaagtctcaggtgactcagtgttaaaaagggaatagcagtatctacttaacaaaagtgttctaaggatgaaatgagatcctgaatgtaaagtggttccctctttacttttggagattgttgcaagggctcaccctaaggattaactggattcaaagctcattccttgactactgtcttgtactatct

SEQ ID NO: 687370 - DNA, 1255 bp, Homo sapiens
aacagcgaactgtttatcatgaatacagaatgtgggcaaactcgcttctgtgccggccgccagaaggtttgctgagggcaatcactccctggtgccgggctccttgaggttatgcactgggacatctagagcctattgtttgaggaatgcagtcttgcaagcctgctctggatcaagccacagactgaaacacccccgaagagcaagcacgtttcttggagcaggctaagtgtgagtgtcatatcttcaatgggatgaagcgggtgcagtacctgaacagatacatccataaacgggaggagaacctgcgcttcgacagcaacgtggaggagttccaggcagttacggaactggggcggcctgtcgcagagaactggaacagccagaagggcatcccggaggagaagcgggacaagatggacgactactgcagatacaattacggggttttttgagagcttcacagtgcagccgcgagtccatcctaaggtgactgtgtatcctgtatccttcaaagacccagcccctgcagcaccacaacctcctggtctgctctgtgagtggtttctatccaggcagcattgaagtcaggtggttccggaacggccaggaagagaaggctggggtggtgtccacaggcctgatccagaatggagactggaccttccagaccctggtgatgctggaaacagttcctcgaagtggagaggtttacacctgccaagtggagcacccaagcgtgacgagccctctcacagtggaatggagagcacggtctgaatctgcacagagcaagatgctgagtggagtcgggggctttgtgctgggcctgctcttccttggggccgggctgttcatctacttcaggaatcagaaaggacactctggacttcagccaacaggattcctgagctgaagtgcagatgaccacattcaagggggaaccttctgccccagctttgcatgatgaaaagctttcctgcttggctcttattcttccacaagagaggactttctcaggccctggttgctaccggttcagcaactctgcagaaaatgtccatccttgtggcttcctcagctcctgcccttggcctgaagtcccagcattgatggcagtgcctcatcttcaactttagtgctcccctttacctaaccctacggcctcccatgcatctgtactccccctgtgtgccacaaatgcactacgttattaaatttttctgaagcccagagttaaaaatcatctgtccac

SEQ ID NO: 687371 - DNA, 159 bp, Homo sapiens
ttagaatgggagtccaacagagtatgtgctaatacactgcttcctataatagcatgtaatttgttaaaactccataaacatagaagtctagttaagtattttacattcatagacccgcaaaggcaatacaactgttacgttttaataagcgacattcta

SEQ ID NO: 687372 - DNA, 1224 bp, Homo sapiens
agcggataatttggaatgtgggtggagggggatcatagttctccctgagtgagacttgcctgctcctctggcccctggtcctgtcctgttctccagcatggtgtgtctgaagctccctggaggctcctgcatggcagcgctgacagtgacactgatggtgctgagctccccactggctttggctggggacacccgaccacgtttcttgtggcaggataagtatgagtgtcatttcttcaacgggacggagcgggtgcggttcctggacagatacttctataaccaagaggagtacgtgcgcttcgacagcgacgtgggggagtaccgggcggtgacggagctggggcggcctgacgctgagtactggaacagccagaaggacatcctggaagacaggcgcgggccgcggtggacacctactgcagacacaactacggggttggtgagagcttcacagtgcagcggcgagttgagcctaaggtgactgtgtatccttcaaagacccagcccctgcagcaccacaacctcctggtctgctctgtgagtggtttctatccaggcagcattgaagtcaggtggttccggaacggccaggaagagaaggctggggtggtgtccacaggcctgatccagaatggagactggaccttccagaccctggtgatgctggaaacagttcctcgaagtggagaggtttacacctgccaagtggagcacccaagcgtgacgagccctctcacagtggaatggagagcacggtctgaatctgcacagagcaagatgctgagtggagtcgggggctttgtgctgggcctgctcttccttggggccgggctgttcatctacttcaggaatcagaaaggacactctggacttcagccaacaggattcctgagctgaaatgcagatgaccacattcaaggaagaaccttctgtcccagctttgcagaatgaaaagctttcctgcttggcagttattcttccacaagagagggctttctcaggacctggttgctactggttcggcaactgcagaaaatgtcctcccttgtggcttcctcagctcctgcccttggcctgaagtcccagcattgatggcaggtcctaatcttcaacttatgtgttaccccatacataatcggttgttccaggggagggggaagctttcctctgtatttgttgccagtgaaattccaataaatgggatttgaaataaacaaaaaa

SEQ ID NO: 687373 - DNA, 159 bp, Homo sapiens
aaaaatgtttaaaacccgttttttaaaattttttcggttttgggcccccccctttccccccccggaaattttttaatttttttccccccattttaaaaaaaaaatgttttgggggggggggttttttttttttaaaaatttaagggcccccccccttta

SEQ ID NO: 687374 - DNA, 672 bp, Homo sapiens
  misc_feature (147)..(147): n is a, c, g, or t
  misc_feature (417)..(417): n is a, c, g, or t
ctcccaaatcgctgagctgctgtttaaaaaaaaaaaaaaggaaaaggaaaaagcatgacatggggtatcgatttttggtggtggaccaaaatcacacacattggaaacttgtaattccaacagagggggaaagctcagcagattctngggcttcagtcattcactaaatcaggcagggattggtgccaatgggagcacactatatcagaattaattcccctttaccaggggttccttaatgggcatcctaaaattcactggcacatcaacattcatctaatcccattcaatccagggtggaattcaaacatttatgtgatttacacagttattcacacagtgcacatggcctcagccgatttaattgggaaaaccgtggtttggggtgaaaaccatgtgtgtcttaacccccagaanaaagacgtcgtaggccaattcttccatatataaagagtataccatattttacacaacaaacttttaaaggggcttaatttatttatcaaatgtgttcaaaaagggttaattttaacattttatcttattgtgtctcaagaggccagcttttaaagagggggagaaattctttcagagaggtttaaaaaagtctagaggggccaggtgttttcgtgaagcccaaacagtgggaaataaattttcttaaattgtgga

SEQ ID NO: 687375 - DNA, 1752 bp, Homo sapiens
agcggataatttggaatgtgggtggagggggatcatagttctccctgagtgagacttgcctgctcctctggcccctggtcctgtcctgttctccagcatggtgtgtctgaagctccctggaggctcctgcatggcagcgctgacagtgacactgatggtgctgagctccccactggctttggctggggacacccgaccacgtttcttgtggcaggataagtatgagtgtcatttcttcaacgggacggagcgggtgcggttcctggacagatacttctataaccaagaggagtacgtgcgcttcgacagcgacgtgggggagtaccgggcggtgacggagctggggcggcctgacgctgagtactggaacagccagaaggacatcctggaagacaggcgcgggccgcggtggacacctactgcagacacaactacggggttggtgagagcttcacagtgcagcggcgaggcagcattgaagtcaggtggttccggaacggccaggaagagaaggctggggtggtgtccacaggcctgatccagaatggagactggaccttccagaccctggtgatgctggaaacagttcctcgaagtggagaggtttacacctgccaagtggagcacccaagcgtgacgagccctctcacagtggaatggagagcacggtctgaatctgcacagagcaagatgctgagtggagtcgggggctttgtgctgggcctgctcttccttggggccgggctgttcatctacttcaggaatcagaaaggacactctggacttcagccaacaggattcctgagctgaaatgcagatgaccacattcaaggaagaaccttctgtcccagctttgcagaatgaaaagctttcctgcttggcagttattcttccacaagagagggctttctcaggacctggttgctactggttcggcaactgcagaaaatgtcctcccttgtggcttcctcagctcctgcccttggcctgaagtcccagcattgatgacagcgcctcatcttcaacttttgtgctcccctttgcctaaaccgtatggcctcccgtgcatctgtactcaccctgtacgacaaacacattacattattaaatgtttctcaaagatggagttaaaaaaaaaaaaaaaaaaaaaaaaaaaaaaaaaaaaaaaaaaaaaaaaaaaaaaaaaaaaaaaaaaaaaaaaaaaaaaaaaaaaaaaaaaaaaaaaaaaaaaaaaaaaaaaaaaaaaaaaaaaaaaaatttgggcccccttggcccaagccattttaaacctgaaaaattttattcatggcccccaaatttgggccaaattggccaaatccccctaaaggggggcgattaaaaattaaagggcccggtttttaaaaacgtggaactggaaaaaccctggggttacccaaataaaacccctttgaaaaaaacccctttttcccaagtgggataaaaacaaaaaagcccccaccaaacgcctttccaaaaaatttcccaacctaaatggcaaaggaaaattgaccgttaaaattttggaaaaaatcccggaaaaatttttgaaaacaacctaatttttaaacacaaaggccaaaattggaaaaacccctttaatattaaaaaaaattccccgaaaaaggttaaagggtttccacagttggaacacaagagccctcttttaaaaaccgggccttcaccctaaaaagcgaacccttataaagggcaaggcccattcgggcctcccct

SEQ ID NO: 687376 - DNA, 232 bp, Homo sapiens
cccccacaggggggttttttccccggggggggggggggggcccccctttttttttttccccttttttccccccccccccccccccccagggggtttttttttccacaatttattaggggggggttttcccccggtttttttccccaaaatttttttgggttttttttggggggttttccccccccccccccccggggggggtttcctttttttaaaaaccgcggggggggga

SEQ ID NO: 687377 - DNA, 318 bp, Homo sapiens
ataatcctgagtataccatcgatcggcgagtctgaatggtctatctttgatgaattgccggcgccggatgaaatatccaggacggttaggaattagaattgtctgctacatacaaaggctatgtgaggtgtttgaagagtatgcaatgaacgattttcggtctgtttgtcgtaggcagatagagcttgtaataattatgcctcatagggatagctacaagggaggggtaggctatgtgttttgtcagggggttgagaatgagtgtgaggcgtattataccatagccgcctcagttgtcagagtactgcgacaagtact

SEQ ID NO: 687378 - DNA, 1363 bp, Homo sapiens
  misc_feature (231)..(231): n is a, c, g, or t
cgacatgttaccaaggatgataaataggtgccaagtggagcaccagctgtgatgagtgccctcacagtggactggagtgagaagctttcgtgacctcataaagtgaaggcttatcttcagtcattgtgttatatattttacgtgcattagtcctcatataaacccaagaggtaaattagtataattatcgttcattgtaggtgacaaagttgagacacagaagaatcaaanaactcttccaggatcaaccagtaaaaggcagaccttggattcgaaccaggcaacctggctcaaatatcagttttaattactacactctgtactttccaagatttgtaaacagtttgacaatgcatgccgatttaaaactatgaagaaacaaacacaatttttcacaacacctctcaaatctaatgggtcctcactgtcaagattaaattccaggctgatgacactgtaaggtcacatggccagctgtgctataggcctggtcaaggccagagcctgggtttgcagagaagcagacacacagccaaaccaggagacttactctgtcttcctgactcattccctctacgttgtttttctcctagtccaacctaaggtgactgtatatccttcaaagacccagcccctgcagcaccacaacctcctggtctgctctgtgagtggtttctatccaggcagcattgaagtcaggtggttccggaacggccaggaagagaaggctggggtggtgtccacaggcctgatccagaatggagactggaccttccagaccctggtgatgctggaaacagttcctcgaagtggagaggtttacacctgccaagtggagcacccaagcgtgacgagccctctcacagtggaatggagagcacggtctgaatctgcacagagcaagatgctgagtggagtcgggggctttgtgctgggcctgctcttccttggggccgggctgttcatctacttcaggaatcagaaaggacactctggacttcagccaacaggattcctgagctgaagtgcagatgaccacattcaagggggaaccttctgccccagctttgcatgatgaaaagctttcctgcttggctcttattcttccacaagagaggactttctcaggccctggttgctaccggttcagcaactctgcagaaaatgtccatccttgtggcttcctcagctcctgcccttggcctgaagtcccagcattgatggcagtgcctcatcttcaactttagtgctcccctttacctaaccctacggcctcccatgcatctgtactccccctgtgtgccacaaatgcactacgttattaaatttttctgaagcccagagttaaaaatcatctgtccac

SEQ ID NO: 687379 - DNA, 337 bp, Homo sapiens
  misc_feature (21)..(21): n is a, c, g, or t
  misc_feature (40)..(40): n is a, c, g, or t
gactctagagcatccccccgngagacgaccttgtcattgngatttttttaagttctgggattcatgtgcaggacatgcaggtttgttacatgggtaaacgtgtgccatggtggtttgctgcacctgtcaacccatcatctaggtattaagcccaacatgcattagctatttatcctgatgctctttctcccctcatccctgacaggccacagtgtgtgttgttccactccctgtgtccatgtgttctcattgttcagcccccacttagaagtgagaacatgtgcgatttgtgttttttgaccctgtgatattttgctgaggataatggctttcagct

SEQ ID NO: 687380 - DNA, 1966 bp, Homo sapiens
  misc_feature (231)..(231): n is a, c, g, or t
cgacatgttaccaaggatgataaataggtgccaagtggagcaccagctgtgatgagtgccctcacagtggactggagtgagaagctttcgtgacctcataaagtgaaggcttatcttcagtcattgtgttatatattttacgtgcattagtcctcatataaacccaagaggtaaattagtataattatcgttcattgtaggtgacaaagttgagacacagaagaatcaaanaactcttccaggatcaaccagtaaaaggcagaccttggattcgaaccaggcaacctggctcaaatatcagttttaattactacactctgtactttccaagatttgtaaacagtttgacaatgcatgccgatttaaaactatgaagaaacaaacacaatttttcacaacacctctcaaatctaatgggtcctcactgtcaagattaaattccaggctgatgacactgtaaggtcacatggccagctgtgctataggcctggtcaaggccagagcctgggtttgcagagaagcagacacacagccaaaccaggagacttactctgtcttcctgactcattccctctacgttgtttttctcctagtccaacctaaggtgactgtatatccttcaaagacccagcccctgcagcaccacaacctcctggtctgctctgtgagtggtttctatccaggcagcattgaagtcaggtggttccggaacggccaggaagagaaggctggggtggtgtccacaggcctgatccagaatggagactggaccttccagaccctggtgatgctggaaacagttcctcgaagtggagaggtttacacctgccaagtggagcacccaagcgtgacgagccctctcacagtggaatggagagcacggtctgaatctgcacagagcaagatgctgagtggagtcgggggctttgtgctgggcctgctcttccttggggccgggctgttcatctacttcaggaatcagaaaggacactctggacttcagccaacaggattcctgagctgaaatgcagatgaccacattcaaggaagaaccttctgtcccagctttgcagaatgaaaagctttcctgcttggcagttattcttccacaagagagggctttctcaggacctggttgctactggttcggcaactgcagaaaatgtcctcccttgtggcttcctcagctcctgcccttggcctgaagtcccagcattgatgacagcgcctcatcttcaacttttgtgctcccctttgcctaaaccgtatggcctcccgtgcatctgtactcaccctgtacgacaaacacattacattattaaatgtttctcaaagatggagttaaaaaaaaaaaaaaaaaaaaaaaaaaaaaaaaaaaaaaaaaaaaaaaaaaaaaaaaaaaaaaaaaaaaaaaaaaaaaaaaaaaaaaaaaaaaaaaaaaaaaaaaaaaaaaaaaaaaaaaaaaaaaaaatttgggcccccttggcccaagccattttaaacctgaaaaattttattcatggcccccaaatttgggccaaattggccaaatccccctaaaggggggcgattaaaaattaaagggcccggtttttaaaaacgtggaactggaaaaaccctggggttacccaaataaaacccctttgaaaaaaacccctttttcccaagtgggataaaaacaaaaaagcccccaccaaacgcctttccaaaaaatttcccaacctaaatggcaaaggaaaattgaccgttaaaattttggaaaaaatcccggaaaaatttttgaaaacaacctaatttttaaacacaaaggccaaaattggaaaaacccctttaatattaaaaaaaattccccgaaaaaggttaaagggtttccacagttggaacacaagagccctcttttaaaaaccgggccttcaccctaaaaagcgaacccttataaagggcaaggcccattcgggcctcccct

SEQ ID NO: 687381 - DNA, 1838 bp, Homo sapiens
agcggataatttggaatgtgggtggagggggatcatagttctccctgagtgagacttgcctgctcctctggcccctggtcctgtcctgttctccagcatggtgtgtctgaagctccctggaggctcctgcatggcagcgctgacagtgacactgatggtgctgagctccccactggctttggctggggacacccgaccacgtttcttgtggcagcttaagtttgaatgtcatttcttcaatgggacggagcgggtgcggttgctggaaagatgcatctataaccaagaggagtacgtgcgcttcgacagcgacgtgggggagtaccgggcggtgacggagctggggcggcctgacgctgagtactggaacagccagaaggacatcctggaagacaggcgcgggccgcggtggacacctactgcagacacaactacggggttggtgagagcttcacagtgcagcggcgagtccatcctaaggtgactgtgtatccttcaaagacccagcccctgcagcaccacaacctcctggtctgctctgtgagtggtttctatccaggcagcattgaagtcaggtggttccggaacggccaggaagagaaggctggggtggtgtccacaggcctgatccagaatggagactggaccttccagaccctggtgatgctggaaacagttcctcgaagtggagaggtttacacctgccaagtggagcacccaagcgtgacgagccctctcacagtggaatggagagcacggtctgaatctgcacagagcaagatgctgagtggagtcgggggctttgtgctgggcctgctcttccttggggccgggctgttcatctacttcaggaatcagaaaggacactctggacttcagccaacaggattcctgagctgaagtgcagatgaccacattcaagggggaaccttctgccccagctttgcatgatgaaaagctttcctgcttggctcttattcttccacaagagctttctcaggacctggttgctactggttcggcaactgcagaaaatgtcctcccttgtggcttcctcagctcctgcccttggcctgaagtcccagcattgatgacagcgcctcatcttcaacttttgtgctcccctttgcctaaaccgtatggcctcccgtgcatctgtactcaccctgtacgacaaacacattacattattaaatgtttctcaaagatggagttaaaaaaaaaaaaaaaaaaaaaaaaaaaaaaaaaaaaaaaaaaaaaaaaaaaaaaaaaaaaaaaaaaaaaaaaaaaaaaaaaaaaaaaaaaaaaaaaaaaaaaaaaaaaaaaaaaaaaaaaaaaaaaaatttgggcccccttggcccaagccattttaaacctgaaaaattttattcatggcccccaaatttgggccaaattggccaaatccccctaaaggggggcgattaaaaattaaagggcccggtttttaaaaacgtggaactggaaaaaccctggggttacccaaataaaacccctttgaaaaaaacccctttttcccaagtgggataaaaacaaaaaagcccccaccaaacgcctttccaaaaaatttcccaacctaaatggcaaaggaaaattgaccgttaaaattttggaaaaaatcccggaaaaatttttgaaaacaacctaatttttaaacacaaaggccaaaattggaaaaacccctttaatattaaaaaaaattccccgaaaaaggttaaagggtttccacagttggaacacaagagccctcttttaaaaaccgggccttcaccctaaaaagcgaacccttataaagggcaaggcccattcgggcctcccct

SEQ ID NO: 687382 - DNA, 626 bp, Homo sapiens
cagtcgccatctaacgaccgctaggggggtcgactgctatagccaatcaaagcgatgcctaaatcaaaggaacttctttcttcaagctattctgccagcgattctgacagtgaggttgacaaaaagttaaagaggccaacgcaagttgctccacaagatcctgcaaagttttcagagggtggggagacttaaagagccctcccagaaaataacagagcaagtttatttatcttggtcccatgtttcagattacgcaatagagactcgttcgggtcctgatataaaaagataaacgaccacctcatataagcgattctcaacatagaccctcaatggcttataagtaaaacgccttgaccacttatgttttctaatttctaacacaccgccacaaaggtaacaccccctccttctcccgtactcgttcagagtcacactaccactaccttccttcttttcttcatcgcataagcatctctaccttctcgtaacacccacttaaatatatatcattcagtaatattatatctcttcaccttacaccccccccttcttgcacattcctctctacaattcactactttttcctacatcattcattttttccttcacatccaaattataat

SEQ ID NO: 687383 - DNA, 366 bp, Homo sapiens
  misc_feature (47)..(47): n is a, c, g, or t
  misc_feature (78)..(78): n is a, c, g, or t
tctaggtgtttgtaagccaggaggcccagagtgtctgactcctttgntatgctggggaatagcatgacttcagggttntgtggacccagatctgcagcaatccatatgtgagtttgatctgtcttccgtgattccatcacagatgtccaaccagacagtgaactatttccctcaagggaaaatctcaggccataaacaatgccagggtttttgcagatggaggaggtgacaggcagataagttccacggtggcactggcattgcttggtctagggtcagcacaagctctgagcatcctttgggtacaagtgtatcctttccagactttgtcaatgacattgctggcctttctcaagcaataacacc

SEQ ID NO: 687384 - DNA, 984 bp, Homo sapiens
cgttatggcaagaggattgtgccgcccacgccgcctgcattggtatggcttgggttgcagaaggacaacttcctgttgttgaagaagaacaacgtttgtgtggtttcgttccgctcccacgcataggtggttgttgtttgtcgctgccgccccccgccgcttgttgtatggtgaggagaaggagatggaatagagtattggaataggtgtgtttgacggacatacgacccaccccgggcgcccacagaagatttagtatagttggttgccacagcaatctggtaagagcacgcccccgcacacacttctcttttattagagggaagaccccagtctttttaagagagaacttcttttgggtggcgccgaacacgatgatgctatcagtgtgaggacggacaaccaccacgcctgtggggtaggaagagggcgctctctctctctatagacagggttgcgcacatgtttctggattcactcctcccacccctctgggataatagtggagggtgtgaatgagcgcacacacaacatcttatgtattagaaagagcggtctggaacaataccagtggaggacaacacacacaacaacaagcactgtctgactcacacttattatgtgtgcgcacccgtaatagcgctgcgcacccccagcctactcatgtggatatctcttgtacacataacaacacccacattggcgttatcacacatcttttatcaccacaaagatctcagagatctcctggtgctgccattgagagaaaccacataatttgttgtgcctcttgcctttattacacacaagttgctacaataaaaatttataaccaacctgcccccaaactcccaaggataatatacgttcctacaccctttccaaattttggggacccgttttgggcccccaaaaggcccccccccggggtcccaaacagggttccttggaatttccccccgcttttttttttaaaacccctta

SEQ ID NO: 687385 - DNA, 353 bp, Homo sapiens
gtcacgccgtgtcacaacacacacaagctcacaaagagctaagacactacacacatctccacagcacacaggcacatctcaaaagggtctgtccagtagttccaggcgagggaagggtgatggcctaagccaccagctccagctttcttttctttcttttttttttttgggagcgggagtttggcccttgttctcccaatgggtatatacaattttcagagcctctggtatatgggaaggcggaaagggcccagacttgggaatagtgtctgggttacactgtttgggtttggattttttttgggtttggatttttttaaacctaaggctatataaggttggggaacttgggc

SEQ ID NO: 687386 - DNA, 1744 bp, Homo sapiens
gtttttgcaaatcacaaattctacaatcatatgatacgtatatgacctatcatagatactgggaatttaggtttgcagagctgcacgatggtggctattgggccaaatctatcttgaacacttcttaaatttggatcaaagaatttcaggaggggagaaaacacttcctttaaattgaatggcttcatttaaaaaaaaatccagagatttaggcctaaagtcaaatttcaccttcttacaaacaaaaaatcaaaggtctagcaatcttcaattcagcagttccatattgacagagcacaatttccatattcatagactacagccctacagggagtaagacatccatggatgtcagcaagaaattcacatataattacttgcaaaataagttggtttatcaaataacatatcttggattgatttatgtcattcttcctcctggaatatttttgccctttatccttcaaggcataaagtcttgaaggtacatctaagtataataccactttatcagaaattcaattcaacacatctctacaagaagtaagataaataaataaataaattagcctggcgtggtggtgtgcctgtagtcccagctacttgggagggctgaagccaggggattgctgggcccaggtgttcaaggttatagtgaactatgatcttaccactacacttcagcttgggtgatgaagtgagacccctgtctctaaaaacaaacaaaggaacatttcataacgtgaaaattatataaaatttgaattttaatgtccataaataaaatgttattggaacacagccacactgacttgtttatatattgtctatagctgttttacacattacaagggcagagttgagtagttatgacagagactacatggcccacaaagctgagaatatttactatctagcgcatgttatgaaaaattctgctgaccccagctttaggaaagatcatgtctactaggaggaacagtgactctggaccacaataaacatgattttttttcccattaatattccatttagctttaggcaagtcatttaagctctctgagccactgaattctctactgttatatgggaatgatatctataatataggatttttgatgcaaagataagcagtattttttcattgcagcagtggcaatgcaataaatgttatttgatattattattgcatattgtttacttagcattgcatcaaacttttaattacctctgactgaggaatcataatttatgggaagcagtctactatgggattttattcactatagcctcctatatacatggcctgaaaaataggatggaattgtcgttatcttcatggtagttgtgaatactggtacctgtgttcagttatctggtttgagcaaataaatgcaagtattaagtctgagacaaaaggttcctattaatctgtggaaggtagtaacttcaaaaagagggggaaaagggggaatcagtataatgcccactggatcagttctcattgagagacaattctccagcaagtatttactttctaccccttcttcaaataattactcaccaaagcaatatcaatgggaaactcaacaaaataagcagcaaagagctttcaaaaaccccatgaggcagaaaaaaaacattagattcttttatactgttatttattttctcctataatagaaataatggccatagcactgagtattctcatttgtttggctgcataatcaagcaaaaaaaa

SEQ ID NO: 687387 - DNA, 281 bp, Homo sapiens
ctctcagcagtcagaggctttgcttgcctctgtgcagatttttaattttcttttttgggccctaggctgggttggggacctcctacagcttcattctttcaccattaaatagtgggcctttttcagtattttccctcttccccttttataaattatgctaaagccacaaagtcacatttttggggatcatagataggttgggggttccatgataaggcatctgttgtgatgggttccattgatgtgggatttcccttactttgcttgtattctcagtttct

SEQ ID NO: 687388 - DNA, 934 bp, Homo sapiens
  misc_feature (136)..(136): n is a, c, g, or t
gaggatctactatcgttatctccatgcgtatgcttcggatcgtcggggcctggttgatcacactagttgtataacacgtctagctaggcgcgatacttcggaagagtagtggcatagcatattatggttacacttntgtgtgatacgatcatcgtgcgagtgactgacgtgctcatagggattcaaatgtgtacctgtaaccaacatcagatatccgctcatatcctgtactggtcctctgtctattactatggtctcactcaagatgcgataatacggatcgtcatatgtaggttatagtcgctcgacatactttaactattgccaatgcgggactgactattccatccagtgtgtctccatccgaggtcgtgtataagcatcgttaccatgcaagttatgtgggcatagtgtttcacttagtctcgagagtcaggactggtttgaggatttgtaagtgggtttgtgaggatcgcggaattgaaagatacgtagctctgtcaacgtttgctgttgaagatagtaatgtggggctgggatggggtatctctagtgtcaatcccatgcacattgtgggaggccgatggcgggtgggatcagctgaggtcgaggcatcttggaagaccagagctggacggacatggtgaaaccagtgtctcttcccaaatggatgatttcgcagcttttgtagaagaatttgctgccaaggctgacgcataaaggaagaccttgctttagccgattgatgggtagccccaagcgtggctggctggaatgtcgaagctgccgtgtacggccttattaccttcaaatagaaaccagggatctaagcctagccgtggagaatttgagcacagaaaaatggacgctcgggggcctactgcagcttgttaacactatccagaggggtacagcgaccacctggggaaacaac

SEQ ID NO: 687389 - DNA, 706 bp, Homo sapiens
atggcacatgcagcgcaagtaggtctacaaggacgctacttcccctatcatagaagagcttatcacctttcatgatcacgccctcataatcattttccttatctgctttcctagtcctgtatgcccttttcctaacgaactcacaacgaataatctaagctaatacataaactatctcacgacgctcacggaaatagaaaccgtctgaactatcctgcccgccatcatcctagtcctcatcgccctcccatccctacgcaatccctttacgataacagtacgtaggtcaacgatccctccctttaccatcaaatcagattgtgccacgcaatgtgtactgaacctacgatgttacaccgactacggctggactaatcttcaagctcctacattacttcccccattattctctagaagcatggctgacctgcgactccttgacgtttgacaatcgagtagtactcccggattgaatgccccctattcgtataataattacatcacaagactgtcttgctactcatgtagctgtccccgcattaggcttagaaacagatgcagatgcccggacgtctaaagcaaaccactttcaccgctacagcgaccgggggtatactacggtcaatgctctgaaatctgtggagcataccacaagtttcatgcccatcgtcctagaattaattccctaaaatctttgaagtagggc

SEQ ID NO: 687390 - DNA, 183 bp, Homo sapiens
  misc_feature (178)..(178): n is a, c, g, or t
ggcacgagctcaagtgatctccaagtgaccctcctgcctcagcctcctgagtaccctcctggggactgcgggtgcgtgctaccatacccggctaatttttgtatttttttggtggagacagggtttcgccgtgttggttaggctggtctcgagctcctgacctcgtgatccgcccgcntcggc

SEQ ID NO: 687391 - DNA, 572 bp, Homo sapiens
acagctcttagatcaatctatacggagctcttactagtttggtgaaaatgaaaaagaaaatgtgcatgccaaggagttcctctcagcacaagacaacaagagagctcatgaattaatagaggcagaaggaatagaagatataaaaaaagaggacatcgaaagtcaggaaattgaagcacaagaaggtgaaaatgcatcacctttctcaccagcccaggatggtgaggaagaagaaacatgagaaaggtatagcaggtgcaggtgatggtacacaagaatgtcatctcaacacctcttccttcagaagggagcctagctgaggctgcatcacacagctcatgaagcagcatgggcagctcatacgactgtgaaagaagctgaggatgcacaccatctcggtcacaatccaggctgaagatgccatcacgtctgaatttggatggtgatgacctcctagaagcaggtaaaaatgtgaaaattacagatactgaagcaagtaagccaaaggatgggcaggcagccattgcacagagcccggaagaaggcaagacaggataatgagatgaatggaa

SEQ ID NO: 687392 - DNA, 684 bp, Homo sapiens
caattccattgccagacgtacaacaactatctgatcttagacaaacctgagaaaaacaagcaagggggaaaggattccctatttaataaatggtgctgggaaaacgggctagccatatgtagaaagctgaaacgggatcccttccttacaccttatacaaaaatcaattcaagatggattaaagatttaaacgttagacctaaaaccataaaaaccctagaagaaaacctaggcattaccattcaggacataggcgtgggcaaggacttcatgtccaaaacaccaaaagcaatggcaacaaaagacaaaatagacaaatgggatctaattaaactaaagagcttctgcacagcaaaagaaactaccatcagagtgaacaggcaaccgacaaaaggggagaaaattttcgcaacctactcatctgacaaagggctaatatccagaatctacaatgaactcaaacaaatttacaagaaaaaaacaaacaaccccatcaaaaagggggcgaaggatatgaacagacacttctcaaaagaagactttatgcagccaaaaaacacatgaaaaaatgctaacatcactggccatcagagaatgcaatcaaaacactagagatatcatctcacacagtagaaggcgacatcaaagcggaacaggggacgtgaatgatgggtacgagccgat

SEQ ID NO: 687393 - DNA, 245 bp, Homo sapiens
gggttagtgatctgtctttcttggcattttaaaataatatataggcaggcacagtagctcacacctgtaattccaacacttggggaggccaaggcaggcagatcacttgaggtcaggagttcaaccagcccggccaatgtggtgaaatcccatctctactaaaaatacaaaaattagccaggtgtggtggtgtgtgtctgtaatgcatataattgtgtgtgcctcagctacatgggaggctgagg

SEQ ID NO: 687394 - DNA, 877 bp, Homo sapiens
ggctggcgcgtcgaggggagaggcagctgccgggatggacgtgtcctcatgatccggcgccataaagaccacgcatcttcacgtgcctgccgaatggtagtacagctacggtgtatcgacacctgaaggcgcatcgtccgatgggcaatcctctaagcggcctccgtgagcgagcagtcggctgtcacaaggcatgagccaactctatggattgagtgcgcaatgatactgtgcgacgcaggttgtaggtttacacgcagtcgaaaccaagaaactggtcaccaggcgcccagtctacatgtggggctggcctttccgggccagatgacacctgtgtgaggccctgtgtgctttcgaagccggtattttccagctccgccagagtcttgcccggagtgtgatgaatgccccaggactcgggaagcagtgccaattgaacaagcctgtgcaagtgagacctccgcaagagggcccattttccccccaataacaacgagattttgggagtcacataagacacaaccaaattacattattataaaaattctttgtggtgaggtggtttcggtcttagggaaaaatacttttttttaaagcccattctctgtttgggagcgcgagggtggccactaattgtgttagtcgtgtgcatttgtggcctatgggctgtgcctcagaagagaaatctcgggcgtctaggtacagatggggctgggggtgtttctcacactaatttgaaaaaaaagcgcgcggggggaacacccgaagtgttctgaaacaacttcccacagagggagtccaggagggggcaccacagcggggctcttacacacgggagtcccagagggacgcgagatttcattaacgcggcggtgtg

SEQ ID NO: 687395 - DNA, 590 bp, Homo sapiens
gagctccgcctttgcctccaaggctttgctggcttgtgcggcatcctgctccgtctgcaggttgtgcttccggtgcggaggtcagggacaagatggtgccaccggtgcaggtctctccgctcatcaagctcggccgctactccgccctgttcctcggtgtggcctacggagccacgcgctacaattacctaaaacctcgggcagaagaggagaggaggatagcagcagaagagaagaagaagcaggatgaactgaaacggattgccagagaattggcagaagatgacagcatattaaagtgagtgaccctgcgacccactctttggaccagcagcggatgaataaagcttcctgtgttgtgtgaaaaaaaaaaaaaaaaaaaaaaaaaaaaaaaaaaaacaaaaaaaaacaaaaaacattagtgtggcggggcccgcccggcgcgcccacgcgagaaagagttttacaaacacaccaccggtggggggcggggcggcgcgccacaaggtgtaggaacacgggggacaaagggggtcccagaaggaaaaccgggggaccaaaagggggggggtatcccacccaaaaaaggc

SEQ ID NO: 687396 - DNA, 580 bp, Homo sapiens
tgattgtggaaagatgagacattgagataactagttggaatttgtttttgtgagctgtgtaaagaactaaattgattttctccccagatgaatcagagttatgtaaaaagtgaaatcattaaaaatgtatgtacaggccgggcgtggtgactcacgcctgtaatcccagcactttgggaggccaaggcaggcggaccacaaggtcaggaggtcgagaccatcctggctaacacggtgaaaccccatctctactttatatatacacactgaggcaggagagtggcctgaacccactacgtagagcttgcagcgagccaacatcgttccactgcactccagcctgggcaacagaccgagattccatttcatagcaaataccaacatgtgcgtacacaatccctatgaaaccaccattcgaatatgccccaactacttcgatccactgggaaggcgccgtctgatgaacattgaccttcaatcccatgtggagatggcttattccgggcttaccttcactcggattccctacattatttccttgccatccagtcccacgccatacttcctccttgctttttcg

SEQ ID NO: 687397 - DNA, 135 bp, Homo sapiens
ctgtgtgctcagcaagaattcccggatgttgtcacctgtgctgggctccctagactcctccccaaagccctgcgtgtccttctttttcagcttaaagttcagcaccgccccggcattcatcagcaacgtgtggat

SEQ ID NO: 687398 - DNA, 357 bp, Homo sapiens
gagctccgcctttgcctccaaggctttgctggcttgtgcggcatcctgctccgtctgcaggttgtgcttccggtgcggaggtcagggacaagatggtgccaccggtgcaggtctctccgctcatcaagctcggccgctactccgccctgttcctcggtgtggcctacggagccacgcgctacaattacctaaaacctcgggcagaagaggagaggaggatagcagcagaagagaagaagaagcaggatgaactgaaacggattgccagagaattggcagaagatgacagcatattaaagtgagtgaccctgcgacccactctttggaccagcagcggatgaataaagcttcctgtgt

SEQ ID NO: 687399 - DNA, 163 bp, Homo sapiens
gggacctccattcaaggtcaagttcacagttaggcgaccacagccgctttgtcaactgtgtgcgattctctcctgatgggaacagatttgccacagccagtgctgacggccagatatacatctataacgggaagactggggagaaggtgttcggttgagcgga

SEQ ID NO: 687400 - DNA, 611 bp, Homo sapiens
aatcccagcatttaaggaggtgggaaaattgcttgagcccaggagttcaagaccagcctgggcaacatagggagaccctgtctctacaacacataatttaaaaaaattagctgggtatgttggtatgcacctgtggtccctgctactaggtgtgtggtatgcacctgtggtccctgctactacagaggctgaggtaggaggattatttgagcccaggaggttgaggttacagtgagcaataattatgccttgcacactctagtctaggcaacagcatgagaccctgtcccaaaaaaaaaaaaaaaaaagaacacaaaaaaattttttggggacgcgacagcgggcccacgggaaaacggtatttacaaaacaacaagcggtggaggggcgggcggacccccaataaggaaagaaccactgtgaacaaaaggtgcgcaccacagaaaacaccgcggtcagacaaacaagggggggggtgatacccacacacataaaaaaagggcgcggggaacacacgacacgatgaagaaaacaaccaggagaggagcagcaggggccacaagggccatcacaaaggaggtcacgagaccgaaaaaaatggcgcacgtggt

SEQ ID NO: 687401 - DNA, 398 bp, Homo sapiens
  misc_feature (363)..(363): n is a, c, g, or t
  misc_feature (383)..(383): n is a, c, g, or t
gagctccgcctttgcctccaaggctttgctggcttgtgcggcatcctgctccgtctgcaggttgtgcttccggtgcggaggtcagggacaagatggtgccaccggtgcaggtctctccgctcatcaagctcggccgctactccgccctgttcctcggtgtggcctacggagccacgcgctacaattacctaaaacctcgggcagaagaggagaggaggatagcagcagaagagaagaagaagcaggatgaactgaaacggattgccagagaattggcagaagatgacagcatattaaagtgagtgaccctgcgacccactctttggaccagcagcggatgaataaagcttcctgtgtgtggtnaaaaaaaagactatattacngaatctttcctttgt

SEQ ID NO: 687402 - DNA, 738 bp, Homo sapiens
tggaatcttgatgatcagttggctccctgtcaccattgatgctgctggtacctccaatggtgtccgggttacaggctatgccatctatgctgatgggcagaagattatggaggtggcttcccccacagcaggcagtgtgctggtggaggtgtcccagctgcagctgttgcaggcctgccatgaggtgactgtacgcactatgtcaccccatggcgagtccagtgactccatcccggcccccgttgccccagccctggcttctgcctgccagccagccaggatgtcctgtctctcaccacgaccaagcccagaggtcagaacaccccttgcttcagtctccccaggcttggggataccagctttcccctccggcatcctgtcccccatggaactcaagatttctctgcaagtctttccatagagatgtccaaaggaccccaggaggaacctccagtcccttgctctcaggaagaggctggggcagctgtgcggagcatctcagaagagaagagggctatcgagccaactctgggccaggaaggccctgagcctgtggctccttccctggctaagcaggaagtggagtgcacttcaggagatgctggccctgtaccttgtccacccaaggagagctgacccagaagaagccaagtattgaaggctgccatgggggagatctggactccggggctgaaactttgatctgggaaagaaatttgtgacttggagtcacctggg

SEQ ID NO: 687403 - DNA, 1162 bp, Homo sapiens
gcccattggacccccgtggctggctgcagggcccacacctggtgttagacctcgcacagtggacgctgctgccacagtaataaagctgtgcctacacgcttctgaaactggtgtagtgaacaacctcagttctgtgaaaggctggacgcagcaggaccagaatctccgtggacatctgtctggaggagcaattttactgctgacattttaaatgaaacaaatttaattgatttccaagggtgtccatcagcgcttccttcactgccttgatcatgtcggggtcaccacctgctgggggtttgtcctgcagaccctgactcaacgacggctgaataatgtacacaagacacagatcttatgcttgtcagtcctgctgagcaatccaggccacttacagactccaagaagagtcctgtcagccacggctctgacttgttggacctcccggcatttatttagcacacatttactgacagaagtctcaggctggacaacactcttattgtagaacatacaaatggacattactaacgcacattgaggcctataatgccaacatcaaatatcccaccaatgcacacactagaaggaagctatctgtgcataaatgcttagtaggtgtatggattcatctcactgactgaacactgagtgaagatcaccaggttggaactctttctggcacgaatcttgcacagacactcttcttgagacccactgacggccacagtggcacactgacatttaccgtgctcacatagaacacacctaactgtgacaatgctcggacggtggcacactcctcctcgcatggacccactgttgaccacacggtgtacaccatacagacgcaacccacggacgtaccacatattttgtgggcgcatacagtcgcctcacggagaaacagtagaaccaggacataaaagtacgaagactagtttggtcacatgcagtggcgactagctagctcaagtagtatagataatgtggcatcaccgacattagcaccgccatcgtgacaaatcatacacacgttagacgcctgcaggctgattacgaccccatcgtcgaggtgcgtagctgaacaccagaccaagctgcctcatgcgtacatgacgaacatcacatcgtgcctccaccgatcgcgcccgccagacac

SEQ ID NO: 687404 - DNA, 654 bp, Homo sapiens
gagctccgcctttgcctccaaggctttgctggcttgtgcggcatcctgctccgtctgcaggttgtgcttccggtgcggaggtcagggacaagatggtgccaccggtgcaggtctctccgctcatcaagattacctaaaacctcgggcagaagaggagaggaggatagcagcagaagagaagaagaagcaggatgaactgaaacggattgccagagaattggcagaagatgacagcatattaaagtgagtgaccctgcgacccactctttggaccagcagcggatgaataaagcttcctgtgttgtgtgaaaaaaaaaaaaaaaaaaaaaaaaaaaaaactttttgggcgcggccttgggcccttggaaaaggttttctataaacccattcgcggtggggcgcgcggggggcccaaggtggggaaagtgtgagaactggggccaaaaggcgggtgcccaaaggggaacccggggcacatgagaaaaggggcgggggttctctccaccatttaaaaaaccgccgggggggaaaccggaggggtccttggaacaacttccagagaggggggtccggaggggccaataacggggagctcttatcaccggggggcccaaggggaggctggatactaaattagccggccgggggggggaa

SEQ ID NO: 687405 - DNA, 204 bp, Homo sapiens
tgaagtttaatagcagcacaacacacacaatatcttcacctcctagcacacatctgcccttgttgaagaacctaccagctactacagcagcccgggcgcggttgcagcaacacactttcctgagagctccacaacctcaggccgtagtgaggaatcaacagcatccccaggcagcaatgtgctattgaaacttctaaaactagg

SEQ ID NO: 687406 - DNA, 288 bp, Homo sapiens
gctgtattccagctcgctgccgccggccctcagcgccagcggccactgcgccaggcccgccggtatcgcgcccatcggctcctgcagctgcagcatcagctgcttgcggcccagcttcttcatcagcgtcgccttgtcttccaccaggatcagctcgcccttgctgatcacgccgatacggtcggccatttcctcggcttcctcgatatagtgcgtggtcaggatgatggtcacgccacgctcgcgcaggccgcgcaccagcgcccacatgtcgcggcgcagctccgc

SEQ ID NO: 687407 - DNA, 436 bp, Homo sapiens
  misc_feature (402)..(402): n is a, c, g, or t
  misc_feature (404)..(404): n is a, c, g, or t
  misc_feature (406)..(407): n is a, c, g, or t
  misc_feature (410)..(410): n is a, c, g, or t
  misc_feature (412)..(413): n is a, c, g, or t
ccccgcccccatgatcctcgccccgtgaccctcgcccggcgaccggacccccacccctcctgcgacctctgcccagcgaccccgccccccctcctcccgcgacccccgtcccgcgagccccgtttcgcgccgcctctgaccaacctctttcgcagctcggccgctactccgccctgttcctcggtgtggcctacggagccacgcgctacaattacctaaaacctcgggcagaagaggagaggaggatagcagcagaagagaagaagaagcaggatgaactgaaacggattgccagagaattggcagaagatgacagcatattaaagtgagtgaccctgcgacccactctttggaccagcagcggatgaataaagcttcctgtgttgtgtgataaaaaaaaanantnnacncnnccgcgaatttagtagtagtaggc

SEQ ID NO: 687408 - DNA, 486 bp, Homo sapiens
gaaatgcaaaactgtataatctctgttataggggaatttggcaattttacatttaaatttgccttgtgacccagcaatcctgctatattattcctttcatattgctataaaaaaatctgaggctgggtaatttataaagaaaggaggtattttttttcatggttcttcaggctgtatacaagcagggctgttagcatctgctcagcttctgatgaggcccaggaagcttttggtcttggtggaagagaagaggagccagcatattacatgacgagaggaagcaagagagataccaggctcttttaagcaaccagttctcatgtgaacgcattgctactgagaaagtgccaaaccattcacgagggatccactacctagacccaaacacctccccctaggccccgtctccaacagcggggatcatatttcaacatgagacttcgaggagacaaatatccaaaccatatcgcccacgtttaggaatgt

SEQ ID NO: 687409 - DNA, 761 bp, Homo sapiens
gtaccatatgcgacaagattcagaacctagagtgcagggtacatgtttatctctgttacatgaacttacagtgtgctttgagcactgggatcttttagccaagatccatacaaaaagaataggatgtgttccagcatttattaccttactttgctataagtaagagtgaagataggccgggtgtgatggctcatgccagtaatcccagcactttgggctgaagcaggcagatattttgagcccaggaccagcctgggcaacatggtgaaagctcatctctatgaaacaaatttgaatatacatatatatatatatgtatatttaaaaagtgaactataatttgaggcacagaagaatattcttaaaaccttttgtattatacaatagaaacatacaaggttccatcttttattaaatgcttgtgctaaacatgcatagtggcatcaatcagacaaagtgaacaacatttcaacaacaggcacagcagacaacttcagccctttctaagctcgatagcatgttccattaacttttagatcaaagatccttatagcactgaaagaatgtagccttctgcattaatggtaacacggtctagcaagtttccgtgtccactgaggctaccgccactcgctatattaaaccttcctgctatggtacggatatggtcaggtcctcaacaaaaactcatgctggaggcctggagtccccagtcacgataggggatcggcaggtggtgcctctaagaggtgatcaggtca

SEQ ID NO: 687410 - DNA, 952 bp, Homo sapiens
  misc_feature (18)..(18): n is a, c, g, or t
  misc_feature (79)..(79): n is a, c, g, or t
  misc_feature (82)..(82): n is a, c, g, or t
  misc_feature (90)..(90): n is a, c, g, or t
  misc_feature (94)..(94): n is a, c, g, or t
  misc_feature (109)..(109): n is a, c, g, or t
  misc_feature (120)..(120): n is a, c, g, or t
  misc_feature (143)..(143): n is a, c, g, or t
  misc_feature (165)..(165): n is a, c, g, or t
  misc_feature (170)..(171): n is a, c, g, or t
  misc_feature (182)..(182): n is a, c, g, or t
  misc_feature (186)..(186): n is a, c, g, or t
  misc_feature (189)..(189): n is a, c, g, or t
  misc_feature (206)..(206): n is a, c, g, or t
  misc_feature (332)..(332): n is a, c, g, or t
  misc_feature (340)..(340): n is a, c, g, or t
  misc_feature (372)..(372): n is a, c, g, or t
  misc_feature (381)..(381): n is a, c, g, or t
  misc_feature (447)..(447): n is a, c, g, or t
  misc_feature (465)..(465): n is a, c, g, or t
  misc_feature (467)..(467): n is a, c, g, or t
  misc_feature (506)..(506): n is a, c, g, or t
  misc_feature (519)..(519): n is a, c, g, or t
  misc_feature (523)..(523): n is a, c, g, or t
  misc_feature (571)..(571): n is a, c, g, or t
  misc_feature (613)..(613): n is a, c, g, or t
  misc_feature (754)..(754): n is a, c, g, or t
  misc_feature (759)..(759): n is a, c, g, or t
  misc_feature (763)..(763): n is a, c, g, or t
  misc_feature (772)..(774): n is a, c, g, or t
  misc_feature (776)..(776): n is a, c, g, or t
  misc_feature (778)..(785): n is a, c, g, or t
  misc_feature (789)..(789): n is a, c, g, or t
  misc_feature (820)..(820): n is a, c, g, or t
acatgcagggttacggtngagggcagaataaagaagggctgcagaacgtggaagacgaaattcagtaaaacataagccnacnagagaaancatntctgaccaccccccncctccccatcncaccctttggaaactccccaatntaactgagaaccacccaatctnacttnnacattgggtcncagnatntaggtacctgccctgtnggttttttttttttttttttaaacagttttcaaaagttctaaaaggcaagagtgaatttctgtggatttgactggtcccagcttttaggttctttaacacactgacaggactacatagaggctttntcagcatnactttgtcgtctccgtgccaggtgtggcaagntcaccattngcaaatgggaatgacatttgaaagccattagacttataggtgatgcaagcatctaagagagaggtnaatcacactatagaggcntnagtggtatcagttttcatttttctaattgtttaaactgngttttataccagngttngcaagtaattgggtgttagcttagagatggttaaaggtggtttggggnagggacttcgttgtaatggttttgctgtaaaaaatgtttccnactccgctgaaatgttgctgaaaagcatggtgctggtaacagttcaacaatccgtggctgctcattcttgcctactttactctcccactgaagcaggttagcgttgaaggtggtatggaaaagcctgcatgcctgttcaantcttntgtntcttctccnnncncnnnnnnnnaccnccttcccctcactcctcccctccttcgtcgntcaacctcttttgttcagtatgtgtaacttgaagctaatttgtactactggatatctgactggagccacagatacagaatctgtattgttcttactgaaatacagcatggaattaacattaaacttaaataa

SEQ ID NO: 687411 - DNA, 1231 bp, Homo sapiens
agcggataatttggaatgtgggtggagggggatcatagttctccctgagtgagacttgcctgctcctctggcccctggtcctgtcctgttctccagcatggtgtgtctgaagctccctggaggctcctgcatggcagcgctgacagtgacactgatggtgctgagctccccactggctttggctggggacacccgaccacgtttcttgtggcaggataagtatgagtgtcatttcttcaacgggacggagcgggtgcggttcctggacagatacttctataaccaagaggagtacgtgcgcttcgacagcgacgtgggggagtaccgggcggtgacggagctggggcggcctgacgctgagtactggaacagccagaaggacatcctggaagacaggcgcgggccgcggtggacaactctgcagaaaatgtccatccttgtggcttcctcagctcctgcccttggcctgaagtcccagcattgatgacagcgcctcatcttcaacttttgtgctcccctttgcctaaaccgtatggcctcccgtgcatctgtactcaccctgtacgacaaacacattacattattaaatgtttctcaaagatggagttaaaaaaaaaaaaaaaaaaaaaaaaaaaaaaaaaaaaaaaaaaaaaaaaaaaaaaaaaaaaaaaaaaaaaaaaaaaaaaaaaaaaaaaaaaaaaaaaaaaaaaaaaaaaaaaaaaaaaaaaaaaaaaaatttgggcccccttggcccaagccattttaaacctgaaaaattttattcatggcccccaaatttgggccaaattggccaaatccccctaaaggggggcgattaaaaattaaagggcccggtttttaaaaacgtggaactggaaaaaccctggggttacccaaataaaacccctttgaaaaaaacccctttttcccaagtgggataaaaacaaaaaagcccccaccaaacgcctttccaaaaaatttcccaacctaaatggcaaaggaaaattgaccgttaaaattttggaaaaaatcccggaaaaatttttgaaaacaacctaatttttaaacacaaaggccaaaattggaaaaacccctttaatattaaaaaaaattccccgaaaaaggttaaagggtttccacagttggaacacaagagccctcttttaaaaaccgggccttcaccctaaaaagcgaacccttataaagggcaaggcccattcgggcctcccct

SEQ ID NO: 687412 - DNA, 411 bp, Homo sapiens
  misc_feature (53)..(53): n is a, c, g, or t
tgggtttggactaaaaattttattttaaaagtataaaggatggaggcccgaantttggcatttttaatttaggtttgttttatttaagtttaatgttaattccatgctggtaacagttcaacaatccgtggctgctcattcttgcctactttactctcccactgaagcaggttagcgttgaactcggccgctactccgccctgttcctcggtgtggcctacggagccacgcgctacaattacctaaaacctcgggcagaagaggagaggaggatagcagcagaagagaagaagaagcaggatgaactgaaacggattgccagagaattggcagaagatgacagcatattaaagtgagtgaccctgcgacccactctttggaccagcagcggatgaataaagcttcctgtgt

SEQ ID NO: 687413 - DNA, 771 bp, Homo sapiens
atacaagagaacgcattgccactgatgcttgctgagcccccacagaacttaattgcccaagtctcaggtctggtactggtaaaacagtctgccttcgttgctggccatgcttagccacatgtagaacctgcacaacaatactaccccctagtgtctatgtctctccccaactgtttgagctcgccctccaacccaggaaagagtgtattcgtagactaaatgtgcgcgaaattcttaccctgaactgaatgctagcttatgctcgtgtcgaggcgaataaatagggacagacggccagactgcactcagtgacgcagattgtcattggccacccctggctactgtgcttggcactggtgctccaccgctcgaagttctttgatccccaagtcaaagtcgaaggtgtttggttcttggcttgccgtgctgatgtcatgatcgccactcagggcccacctaaggatcagagacatccgcatccagaggctgctgccctaggaactgccagatgctgcttggcatccgccaccttggaatcactctgtgtggaagtcagcccacgaaagtggtcccagacccacaacgtggtccacctgcatgcgtgaggcatagaccctggcactccatcaagcagtactatgtcctgtgcagcagcagagacgagaagtcctggcctgtgtcacctctacggggccgtccccctgctcaagcctgatctctgcctactcgcgacgtagttggtggctgagactctcaagatgcccccgtggt

SEQ ID NO: 687414 - DNA, 804 bp, Homo sapiens
  misc_feature (53)..(53): n is a, c, g, or t
  misc_feature (110)..(110): n is a, c, g, or t
  misc_feature (193)..(193): n is a, c, g, or t
  misc_feature (212)..(212): n is a, c, g, or t
  misc_feature (214)..(214): n is a, c, g, or t
  misc_feature (216)..(216): n is a, c, g, or t
  misc_feature (218)..(218): n is a, c, g, or t
  misc_feature (272)..(272): n is a, c, g, or t
  misc_feature (320)..(320): n is a, c, g, or t
  misc_feature (406)..(406): n is a, c, g, or t
  misc_feature (426)..(426): n is a, c, g, or t
  misc_feature (435)..(435): n is a, c, g, or t
  misc_feature (449)..(449): n is a, c, g, or t
  misc_feature (485)..(485): n is a, c, g, or t
  misc_feature (493)..(493): n is a, c, g, or t
  misc_feature (511)..(511): n is a, c, g, or t
  misc_feature (559)..(559): n is a, c, g, or t
  misc_feature (561)..(561): n is a, c, g, or t
  misc_feature (573)..(573): n is a, c, g, or t
  misc_feature (588)..(588): n is a, c, g, or t
  misc_feature (599)..(599): n is a, c, g, or t
  misc_feature (607)..(608): n is a, c, g, or t
  misc_feature (629)..(630): n is a, c, g, or t
  misc_feature (634)..(634): n is a, c, g, or t
  misc_feature (656)..(656): n is a, c, g, or t
  misc_feature (669)..(669): n is a, c, g, or t
  misc_feature (687)..(687): n is a, c, g, or t
  misc_feature (691)..(691): n is a, c, g, or t
  misc_feature (694)..(694): n is a, c, g, or t
  misc_feature (696)..(697): n is a, c, g, or t
  misc_feature (723)..(723): n is a, c, g, or t
  misc_feature (743)..(743): n is a, c, g, or t
  misc_feature (775)..(775): n is a, c, g, or t
tgggtttggactaaaaattttattttaaaagtataaaggatggaggcccgaantttggcatttttaatttaggtttgttttatttaagtttaatgttaattccatgctgngtttcagtaagaacaatacagattctgtatctggggctccagtcagatatccagtagtacaaattagcttcaagttacacatnctgaacaaaagaggttgancnancnaaggaggggaggagtgaggggaaggagggagggggagggggaaggagaagaaanaaaagaattgaacaggcatgcaggcttttccataccaccttcaacgcnaacctgcttcagtgggagagtaaagtaggcaagaatgagccgccacggattgttgaactgttaccagcaccatgcttttcagcaanatttcagcggagttggaaanattttttanagcaaaaccattanaacgaagtccccccccaaaccacctttaaccatctnaagcaaanacccaattacttgcaaanactggtataaaacacagtttaaacaattagaaaaatgaaaactgaaancnctaatgcctctntagtgtgattaaccnctctcttagangcttgcannacctataagtttaaaggcttnnaaangtaatttccatttgctaatggngatcttgccacanctggcacggagacgacanagtnatncnnaaaaagcctctttgttgtcctgttantgttttaaagaacctaaaanctgggaccagttaaatccacagaaattcactnttgcctttaagaacttttgaaaactgttt

SEQ ID NO: 687415 - DNA, 515 bp, Homo sapiens
aatcggccggtacctgctacctggcgtatggaaaagtgctgggagaaacttggggagttgatttagaaacaattaggctttggcttgtgttaaaaatctgtggatcatttagattttcgattgttgctgtccccatgtctcctgttgcccatactatagatggtgttaaattgttagacacttccatgaatgtacttcatacatgtaaaacttcgtagatgcatgactcatggctctgggtggtctagctaaactagtcttttacgtcatacgtgtaaaactttgtagatgcaataactcatggctctgggtagtctagctaagctagtctttccactcaaagagcacgatacttaagctttctcctggtgagtcatgaattgtcatcagggaatttctcactgtttggcttaattcgattaggaactgctactggtgatagtttagtccttatttagttttagtctaagagaaccttactgacgttactataaatctaaaaaaaaagtcgacgc

SEQ ID NO: 687416 - DNA, 626 bp, Homo sapiens
agcggataatttggaatgtgggtggagggggatcatagttctccctgagtgagacttgcctgctcctctggcccctggtcctgtcctgttctccagcatggtgtgtctgaagctccctggaggctcctgcatggcagcgctgacagtgacactgatggtgctgagctccccactggctttggctggggacacccgaccacgtttcttgtggcaggataagtatgagtgtcatttcttcaacgggacggagcgggtgcggttcctggacagatacttctataaccaagaggagtacgtgcgcttcgacagcgacgtgggggagtaccgggcggtgacggagctggggcggcctgacgctgagtactggaacagccagaaggacatcctggaagacaggcgcgggccgcggtggacaactctgcagaaaatgtccatccttgtggcttcctcagctcctgcccttggcctgaagtcccagcattgatggcagtgcctcatcttcaactttagtgctcccctttacctaaccctacggcctcccatgcatctgtactccccctgtgtgccacaaatgcactacgttattaaatttttctgaagcccagagttaaaaatcatctgtccac

SEQ ID NO: 687417 - DNA, 972 bp, Homo sapiens
ttttttttagaaaggcgtttttgatgagaaaggaaatttcctggtccctccggagaaatccatcaacaaaattggccacgctctgcacgcccacgaccccgtcttcaagagcttcacacactccttcaaggtgcagaccttggccagaagtctgggcctccagatgcccgtggtggtgcagagcatgtacatctttaagcaacctcactttggcggtgaagtctcccctcatcaggacgcctccttcctgtacacggagcccctgggccgggtgctgggcgtgtggatcgcagtggaggatgccacgctggagaacggctgtctctggttcatccctggctcccacaccagtggtgtgtcaagaaggatggtccgggcccctgttggctcagcgcctggtaccagcttccttgggtcagagccagcccgggataacagcctctttgtgcccaccccagtgcagagaggggccctggtcctcatccatggagaagtggtacacaagagcaagcagaacctctctgaccgctcgcgccaggcctacactttccacctcatggaggcctctggcaccacctggagcccggagaactggctccagccaacagctgaactgccctttccccaactgtacacctaaaggctctcgcagggcaggagccctcgcccctcccgggtgaagctgtgggctgtaaacaccagtgccttgctcagcctcctggttgcaacagggaggtcttgtctcccctcctgggctttcctcctgccctgtgggcagcagcctaggctgggtcaggggcttccctaagatcttcacctctctgcctccctactgccccaacatagccttgaggaggcttctcagccaccaaagggttctggccccttctcactctcctctcctctcagatggaactctggttattatggtgttagttatcgaataaaaacgacttcagaatgcaaaaaaca

SEQ ID NO: 687418 - DNA, 372 bp, Homo sapiens
  misc_feature (34)..(34): n is a, c, g, or t
  misc_feature (110)..(110): n is a, c, g, or t
  misc_feature (338)..(338): n is a, c, g, or t
  misc_feature (340)..(340): n is a, c, g, or t
  misc_feature (342)..(343): n is a, c, g, or t
  misc_feature (346)..(346): n is a, c, g, or t
  misc_feature (348)..(349): n is a, c, g, or t
ttgtgttgataatagggtggagtagtggttgagnttgatgagtggagagacttgtattggtggtaccattttgtccttgacttctgcactggaagcacaacttgtagacntgttctttggtgtggcttatggagccacgtgctacaattacctaaaacctcgggcagaagaggagaggaggatagcagcagaagagaagaagaagcaggatgaactgaaacggattgccagagaattggcagaagatgacagcatattaaagtgagtgaccctgcgacccactctttggaccagcagcggatgaataaagcttcctgtgttgtgtgataaaaaaaaanantnnacncnnccgcgaatttagtagtagtaggc

SEQ ID NO: 687419 - DNA, 109 bp, Homo sapiens
caggggggcacagaaaacaataggttatgttactaaatgcatagaaaaaaaagtggggaagaatactctcaaacgagtaactttataccagcaaaagaacggagtatta

SEQ ID NO: 687420 - DNA, 829 bp, Homo sapiens
tcgcagcagtcctggaccctgacttcggacttggagaagaaacgccgaggagtgaacgtggagttaggtgtgttagcagcttgtgcgcgctgggagccggccacccctgtgtctccgtgacttacacttcccagtgagtgcctctgctgctgctgacttggaatgttgcttgcgatgccatataatgaatgtgctgattgctgtgcactcctgcctgcatctgcttctgtgtgtgctgtgcagtttgcacatgcctgtgcattgtacgtgccattcatgtgtgcatgagtgtcatatacttgcactactcacctagctgacaccctctgtgagactgcgtgcatgcatccctggctggccattggtgtatgctgcatgatgtgctgtgtgattccctgtgcagactcacctgagcacatcaacttatctggtaccacagctatgttgtgcttacatgtgtgtgattgactgtcccttgtcaagcattgtttaattgttgcattcttgctccaatgtgtatgcccacttttcagcatgtgagatttggacgccccatgtgtcctagcttcttcttgatgccctcatccattcagtgtgtctaaatgtgacgtgctgttgatccatgacactggttgtcctgggactgtgttctacctttgtccttgccctgcttgcttgggtgtcccttgtgtgctcctatgttgcatccttcttcactactctacttggattccgctactgtctgtggtggctttgcctggaattggcagcatcttacattgttcaactgtgcccccagctgcttctgtttgctggcgatggtggtcac

SEQ ID NO: 687421 - DNA, 1199 bp, Homo sapiens
  misc_feature (9)..(9): n is a, c, g, or t
ggagagccnactaaggctaatggaattacactggatcctgtgacagacacttcaggcttcatgggtcacatggtctgtttctgctcctttctgccctggttggtgtgggttgtggtgttagagaaatctcaggtgggagatctggggctgggacattgtgttggaggacagatttgcttcaataacttttaagtgtatatcttttcctctttttcccaggacactctggacttcagccaacaggattcctgagctgaaatgcagatgaccacattcaaggaagaaccttctgtcccagctttgcagaatgaaaagctttcctgcttggcagttattcttccacaagagagggctttctcaggacctggttgctactggttcggcaactgcagaaaatgtcctcccttgtggcttcctcagctcctgcccttggcctgaagtcccagcattgatgacagcgcctcatcttcaacttttgtgctcccctttgcctaaaccgtatggcctcccgtgcatctgtactcaccctgtacgacaaacacattacattattaaatgtttctcaaagatggagttaaaaaaaaaaaaaaaaaaaaaaaaaaaaaaaaaaaaaaaaaaaaaaaaaaaaaaaaaaaaaaaaaaaaaaaaaaaaaaaaaaaaaaaaaaaaaaaaaaaaaaaaaaaaaaaaaaaaaaaaaaaaaaaatttgggcccccttggcccaagccattttaaacctgaaaaattttattcatggcccccaaatttgggccaaattggccaaatccccctaaaggggggcgattaaaaattaaagggcccggtttttaaaaacgtggaactggaaaaaccctggggttacccaaataaaacccctttgaaaaaaacccctttttcccaagtgggataaaaacaaaaaagcccccaccaaacgcctttccaaaaaatttcccaacctaaatggcaaaggaaaattgaccgttaaaattttggaaaaaatcccggaaaaatttttgaaaacaacctaatttttaaacacaaaggccaaaattggaaaaacccctttaatattaaaaaaaattccccgaaaaaggttaaagggtttccacagttggaacacaagagccctcttttaaaaaccgggccttcaccctaaaaagcgaacccttataaagggcaaggcccattcgggcctcccct

SEQ ID NO: 687422 - DNA, 833 bp, Homo sapiens
ttttttttagaaaggcgtttttgatgagaaaggaaatttcctggtccctccggagaaatccatcaacaaaattggccacgctctgcacgcccacgaccccgtcttcaagagcttcacacactccttcaaggtgcagaccttggccagaagtctgggcctccagatgcccgtggtggtgcagagcatgtacatctttaagtctcccctcatcaggacgcctccttcctgtacacggagcccctgggccgggtgctgggcgtgtggatcgcagtggaggatgccacgctggagaacggctgtctctggttcatccctggctcccacaccagggccctggtcctcatccatggagaagtggtacacaagagcaagcagaacctctctgaccgctcgcgccaggcctacactttccacctcatggaggcctctggcaccacctggagcccggagaactggctccagccaacagctgaactgccctttccccaactgtacacctaaaggctctcgcagggcaggagccctcgcccctcccgggtgaagctgtgggctgtaaacaccagtgccttgctcagcctcctggttgcaacagggaggtcttgtctcccctcctgggctttcctcctgccctgtgggcagcagcctaggctgggtcaggggcttccctaagatcttcacctctctgcctccctactgccccaacatagccttgaggaggcttctcagccaccaaagggttctggccccttctcactctcctctcctctcagatggaactctggttattatggtgttagttatcgaataaaaacgacttcagaatgcaaaaaaca

SEQ ID NO: 687423 - DNA, 305 bp, Homo sapiens
  misc_feature (46)..(46): n is a, c, g, or t
  misc_feature (292)..(292): n is a, c, g, or t
gttcaatttctacactgcattaacataaagagcgggaacagcaggngcgtctggtttacagcgtcgctgaagataccttgacctgtggactcagttccttttgtacagcatttccagtgaattttattctcctgcattccgccaaacagattacctaaaacctcgggcagaagaggagaggaggatagcagcagaagagaagaagaagcaggatgaactgaaacggattgccagagaattggcagaaggtacgagtgacactggctcttatagattgtccctcccaggtttntgtagaaattgaa

SEQ ID NO: 687424 - DNA, 201 bp, Homo sapiens
aggtaggtaccggttgttgaaggactagagaagcgatacaaagaactagtagctgagcgagcagttacagatgctgcgtctgagggctttgcgtcctgagcctccgttgctgcccttgccccagctcagtcgtccctccaggtagcaaagagctggttgtaagaatcgatggagccatgcttggtgatcttgattgcgtca

SEQ ID NO: 687425 - DNA, 1288 bp, Homo sapiens
  misc_feature (331)..(331): n is a, c, g, or t
  misc_feature (896)..(896): n is a, c, g, or t
cgggggggagtcggaatcaggtaatacctgttaatcctcttttagaaacagattcagttttcatagaatgatggcagaggtgataaggcatgagacagaaatagcaggaaagactgggatccaaattcctgatcaggcaatttataccaaaactcctcctctccacttaggcctgtgctctgcaggagtattggttcagggagacttaggaacttgtttttcttcttcctgcagtgctctcatctgagtccttgaaagagaggaaaagaagctgttagtggaaccaggtctgaaaacaacactttcctctctctctgcaggactcgtgagntgaagtgcagatgaccacattcaagggggaaccttctgccccagctttgcatgatgaaaagctttcctgcttggctcttattcttccacaagagaggactttctcaggccctggttgctaccggttcagcaactctgcagaaaatgtccatccttgtggcttcctcagctcctgcccttggcctgaagtcccagcattgatggcagtgcctcatcttcaactttagtgctcccctttacctaaccctacggcctcccatgcatctgtactccccctgtgtgccacaaatgcactacgttattaaatttttctgaagcccagagttaaaaatcatctgtccacctggctccaaagacaaaaaataaaaagaaaagaaaaagggaagattatttcctaatagcaaaaaaaaaaaaaaaaaaaaaaaaaaaaaaaaaaaaaacaaaaagaaaagaggggggcggcgccgccaccagagaatatacccccccgggggggggccccacagtttacagccgcgtaccccgcagttcttctctgggaccacaagggggcccccctataggangagagggcgctattatatataacaacaggagcggccggggcgccggttgttaaacaaccggtcccggagacggggcaaacacggctgccaacggggggaccacttcgggggggagggagaacccctaaaaccgccgggggggtgcggaccaccaatagggggggcacaacactacttccctaacaggagagatttttagaaggccctccaggagggggcaaacataataaacaccaatctgaaaagcggggttctcagcgggggtcgaaaaacacaagagggggaaatatctgctgaggcgtgttaaaaaaaaattgtgggcaccaacgcgggagaatgtatatgtgcagaacaaattttttccccgggagtggtagtattataataatcag

SEQ ID NO: 687426 - DNA, 951 bp, Homo sapiens
ttttttttagaaaggcgtttttgatgagaaaggaaatttcctggtccctccggagaaatccatcaacaaaattggccacgctctgcacgcccacgaccccgtcttcaagagcttcacacactccttcaaggtgcagaccttggccagaagtctgggcctccagatgcccgtggtggtgcagagcatgtacatctttaagcaacctcactttggcggtgaagtctcccctcatcaggacgcctccttcctgtacacggagcccctgggccgggtgctgggcgtgtggatcgcagtggaggatgccacgctggagaacggctgtctctggttcatccctggctcccacaccagggccctggtcctcatccatggagaagtggtacacaagagcaagcagaacctctctgaccgctcgcgccaggcctacactttccacctcatggaggcctctggcaccacctggagcccggagaactggtaggtgacagggtgggtgtgtgtgcccgacagtcccctggaggctgggaacagtgaccctgcacctcaaggttgtttctcctctatcctctgcaggctccagccaacagctgaactgccctttccccaactgtacacctaaaggctctcgcagggcaggagccctcgcccctcccgggtgaagctgtgggctgtaaacaccagtgccttgctcagcctcctggttgcaacagggaggtcttgtctcccctcctgggctttcctcctgccctgtgggcagcagcctaggctgggtcaggggcttccctaagatcttcacctctctgcctccctactgccccaacatagccttgaggaggcttctcagccaccaaagggttctggccccttctcactctcctctcctctcagatggaactctggttattatggtgttagttatcgaataaaaacgacttcagaatgcaaaaaaca

SEQ ID NO: 687427 - DNA, 302 bp, Homo sapiens
  misc_feature (50)..(50): n is a, c, g, or t
ttttttttggcccccttcccaaggcctaaagttttggacccaaggaaaantgaaggagaccgcttttcgggttaagaatggaacccccaacttttaacccaacaattatttaaagcaatgctgatgaatccctgtttttagaccccttcattttgaggggaggagttccccagattgtttctatacaaatataaatcttaaaaagttgttcaactattttattatcctagattatatcaaagtatttgtcgggggtagaaaaaaaaaacagctctgcaggcttaataaaaatgccaggctga

SEQ ID NO: 687428 - DNA, 853 bp, Homo sapiens
  misc_feature (391)..(391): n is a, c, g, or t
  misc_feature (440)..(440): n is a, c, g, or t
  misc_feature (443)..(443): n is a, c, g, or t
  misc_feature (445)..(445): n is a, c, g, or t
  misc_feature (448)..(448): n is a, c, g, or t
  misc_feature (476)..(476): n is a, c, g, or t
  misc_feature (483)..(483): n is a, c, g, or t
  misc_feature (508)..(508): n is a, c, g, or t
  misc_feature (543)..(543): n is a, c, g, or t
  misc_feature (573)..(573): n is a, c, g, or t
  misc_feature (596)..(596): n is a, c, g, or t
  misc_feature (604)..(604): n is a, c, g, or t
  misc_feature (606)..(607): n is a, c, g, or t
  misc_feature (618)..(618): n is a, c, g, or t
  misc_feature (624)..(624): n is a, c, g, or t
  misc_feature (630)..(630): n is a, c, g, or t
  misc_feature (634)..(635): n is a, c, g, or t
  misc_feature (638)..(638): n is a, c, g, or t
  misc_feature (642)..(642): n is a, c, g, or t
  misc_feature (645)..(645): n is a, c, g, or t
  misc_feature (653)..(653): n is a, c, g, or t
  misc_feature (655)..(655): n is a, c, g, or t
  misc_feature (663)..(664): n is a, c, g, or t
  misc_feature (674)..(674): n is a, c, g, or t
  misc_feature (679)..(679): n is a, c, g, or t
  misc_feature (681)..(681): n is a, c, g, or t
  misc_feature (684)..(684): n is a, c, g, or t
  misc_feature (698)..(698): n is a, c, g, or t
  misc_feature (706)..(706): n is a, c, g, or t
  misc_feature (745)..(745): n is a, c, g, or t
  misc_feature (774)..(774): n is a, c, g, or t
  misc_feature (786)..(786): n is a, c, g, or t
  misc_feature (840)..(840): n is a, c, g, or t
agcggataatttggaatgtgggtggagggggatcatagttctccctgagtgagacttgcctgctcctctggcccctggtcctgtcctgttctccagcatggtgtgtctgaagctccctggaggctcctgcatggcagcgctgacagtgacactgatggtgctgagctccccactggctttggctggggacacccgaccacgtttcttgtggcaggataagtatgagtgtcatttcttcaacgggacggagcgggtgcggttcctggacagatacttctataaccaagaggagtacgtgcgcttcgacagcgacgtgggggagtaccgggcggtgacggagctggggcggcctgacgctgagtactggaacagccagaaggacatcctggangagagcgggcagtgccggacaggatgtgcagacacaactacgagctggncgngnccntgaccctgcagcgccgagtccagcctanggtgaangtttccccctccaagaaggggcccntgcagcaccacaacctgcttgtctgccacgtgacngatttctacccaggcagcattcaatccganggttcctgatggacaggaggaancagtgggntnngtccaccaacntgatcngtatgnagannggncttncanatctggtnangcggaaannaccccccagnagganangtntaccctgccaatgnagcacacnagctggacagtctgtcacgtggatggaaggcacatctgnttctgcccggagtaagacttgacgggagngggggctcatgnggggctcatcatctgtggattggcatttcatgcacaggaggagcaagttcaagnggtctgcatcggg

SEQ ID NO: 687429 - DNA, 1073 bp, Homo sapiens
ttttttttagaaaggcgtttttgatgagaaaggaaatttcctggtccctccggagaaatccatcaacaaaattggccacgctctgcacgcccacgaccccgtcttcaagagcttcacacactccttcaaggtgcagaccttggccagaagtctgggcctccagatgcccgtggtggtgcagagcatgtacatctttaagcaacctcactttggcggtgaagtctcccctcatcaggacgcctccttcctgtacacggagcccctgggccgggtgctgggcgtgtggatcgcagtggaggatgccacgctggagaacggctgtctctggttcatccctggctcccacaccagtgaggaaccctgtctcttctgcccacttgggactccccaccccctagggagagggaccttgagaaaggaggagtttaaggctctccatcttggcctgcaggtggtgtgtcaagaaggatggtccgggcccctgttggctcagcgcctggtaccagcttccttgggtcagagccagcccgggataacagcctctttgtgcccaccccagtgcagagaggggccctggtcctcatccatggagaagtggtacacaagagcaagcagaacctctctgaccgctcgcgccaggcctacactttccacctcatggaggcctctggcaccacctggagcccggagaactggctccagccaacagctgaactgccctttccccaactgtacacctaaaggctctcgcagggcaggagccctcgcccctcccgggtgaagctgtgggctgtaaacaccagtgccttgctcagcctcctggttgcaacagggaggtcttgtctcccctcctgggctttcctcctgccctgtgggcagcagcctaggctgggtcaggggcttccctaagatcttcacctctctgcctccctactgccccaacatagccttgaggaggcttctcagccaccaaagggttctggccccttctcactctcctctcctctcagatggaactctggttattatggtgttagttatcgaataaaaacgacttcagaatgcaaaaaaca

SEQ ID NO: 687430 - DNA, 769 bp, Homo sapiens
  misc_feature (273)..(273): n is a, c, g, or t
  misc_feature (294)..(294): n is a, c, g, or t
gccggcgccgagatctgctagtagagcgggcccgctcgagagaagtggggccgagatcgcgccgtcccagcccgcccgccggcgtctgcgctgctccggcgcccttacccctgctggcccttgcaaggcgcgaccgtgcggccatgcatgcccctggggctgagtgcctgccccatggcaaagcctggcggtccctggcgacgacgtgctgcatggagaacttccgtaaggtgcgctccgaagaggctgccagcggtggtgctgggggccgangggaggcggccctgggctccnggccccttcgcagacctggcgccgtggcgctgcggtgcacattgcgggtcaaggaaaggcagcaagatcctggaacctgatggccttcgccaccggccagcattggctgcagccagccacgctgcgcccatcgtcttcagcggcttgcgtgcctgggccaccaccaagaaccgtcacgtgcgcctgagatcctcaagcgccgcctggcgggcctgcaccaggtcacgcggctgcgctaccggagcgtacgcgaggtgtggcagagcctcccgcctgggcccacgcagggtcagacgcctggcgagccaggcgcatagtctcagcgtacattaaggaacgtgcccggcctcgccatcctactttccaaggacgcgcatggatccgcgacagcccggataccagccccccgaattccccaatcctggtccctcgtccccgcaagaacggccaacgtccaagaagagctaggggaagc

SEQ ID NO: 687431 - DNA, 630 bp, Homo sapiens
ttcagtgtacccgattgccagttgtaccctagccgtgagtcgataactggctcctggtgcttccagaccctggtgatgctggaaacagttcctcgaagtggagaggtttacacctgccaagtggagcacccaagcgtgacgagccctctcacagtggaatggagagcacggtctgaatctgcacagagcaagatgctgagtggagtcgggggctttgtgctgggcctgctcttccttggggccgggctgttcatctacttcaggaatcagaaaggacactctggacttcagccaacaggattcctgagctgaagtgcagatgaccacattcaagggggaaccttctgccccagctttgcatgatgaaaagctttcctgcttggctcttattcttccacaagagaggactttctcaggccctggttgctaccggttcagcccttgtggcttcctcagctcctgcccttggcctgaagtcccagcattgatggcagtgcctcatcttcaactttagtgctcccctttacctaaccctacggcctcccatgcatctgtactccccctgtgtgccacaaatgcactacgttattaaatttttctgaagcccagagttaaaaatcatctgtccac

SEQ ID NO: 687432 - DNA, 675 bp, Homo sapiens
aacgatcccttagctggagaacggctgtctctcgtcatcgttgctccacaccagtggtgtgtcaagaaggatggtccgggcccctgttggctcagcgcctggtaccagcttccttgggtcagagccagcccgggataacagcctctttgtgcccaccccagtgcagagaggggccctggtcctcatccatggagaagtggtacacaagagcaagcagaacctctctgaccgctcgcgccaggcctacactttccacctcatggaggcctctggcaccacctggagcccggagaactggctccagccaacagctgaactgccctttccccaactgtacacctaaaggctctcgcagggcaggagccctcgcccctcccgggtgaagctgtgggctgtaaacaccagtgccttgctcagcctcctggttgcaacagggaggtcttgtctcccctcctgggctttcctcctgccctgtgggcagcagcctaggctgggtcaggggcttccctaagatcttcacctctctgcctccctactgccccaacatagccttgaggaggcttctcagccaccaaagggttctggccccttctcactctcctctcctctcagatggaactctggttattatggtgttagttatcgaataaaaacgacttcagaatgcaaaaaaca

SEQ ID NO: 687433 - DNA, 607 bp, Homo sapiens
  misc_feature (185)..(185): n is a, c, g, or t
  misc_feature (194)..(194): n is a, c, g, or t
  misc_feature (210)..(210): n is a, c, g, or t
  misc_feature (213)..(213): n is a, c, g, or t
  misc_feature (215)..(215): n is a, c, g, or t
  misc_feature (217)..(217): n is a, c, g, or t
  misc_feature (220)..(221): n is a, c, g, or t
  misc_feature (228)..(228): n is a, c, g, or t
  misc_feature (235)..(235): n is a, c, g, or t
  misc_feature (238)..(238): n is a, c, g, or t
  misc_feature (246)..(246): n is a, c, g, or t
  misc_feature (261)..(261): n is a, c, g, or t
  misc_feature (263)..(263): n is a, c, g, or t
  misc_feature (267)..(267): n is a, c, g, or t
  misc_feature (273)..(273): n is a, c, g, or t
  misc_feature (275)..(275): n is a, c, g, or t
  misc_feature (281)..(282): n is a, c, g, or t
  misc_feature (286)..(288): n is a, c, g, or t
  misc_feature (291)..(291): n is a, c, g, or t
  misc_feature (293)..(293): n is a, c, g, or t
  misc_feature (298)..(299): n is a, c, g, or t
  misc_feature (311)..(311): n is a, c, g, or t
  misc_feature (314)..(314): n is a, c, g, or t
  misc_feature (316)..(316): n is a, c, g, or t
  misc_feature (326)..(327): n is a, c, g, or t
  misc_feature (344)..(344): n is a, c, g, or t
  misc_feature (356)..(356): n is a, c, g, or t
  misc_feature (372)..(372): n is a, c, g, or t
  misc_feature (382)..(382): n is a, c, g, or t
  misc_feature (397)..(397): n is a, c, g, or t
  misc_feature (420)..(420): n is a, c, g, or t
  misc_feature (430)..(430): n is a, c, g, or t
  misc_feature (436)..(437): n is a, c, g, or t
  misc_feature (440)..(440): n is a, c, g, or t
  misc_feature (456)..(456): n is a, c, g, or t
  misc_feature (458)..(458): n is a, c, g, or t
  misc_feature (467)..(467): n is a, c, g, or t
  misc_feature (483)..(483): n is a, c, g, or t
  misc_feature (513)..(513): n is a, c, g, or t
  misc_feature (515)..(515): n is a, c, g, or t
  misc_feature (534)..(534): n is a, c, g, or t
  misc_feature (537)..(537): n is a, c, g, or t
  misc_feature (544)..(544): n is a, c, g, or t
  misc_feature (575)..(575): n is a, c, g, or t
gccggcgccgagatctgctagtagagcgggcccgctcgagagaagtggggccgagatcgcgccgtcccagcccgcccgccggcgtctgcgctgctccggcgcccttacccctgctggcccttgcaaggcgcgaccgtgcggccatgcatgcccctggggctgagtgcctgccccatggcaaaggngggggtggnggggaggagggggganggngnanttnngtaaggnggggtcngangagggggnagggggtgggggggngngggngggggngngggctnngggnnnttngnagagnngggggggggggnggngnacatgggggnnaaggaagggaggaaganggggaaggtganggggttggggaggggnaggatggcgnagcagcgaggggggngatggtgttgagggggtggggcngggggaggancaaaanngtnaggtggggggagatgntnaaggggggngctgggggggtggagnaggtgaggggggtgcggtaggggagggtangngggtgtgggagaggctggnggntgggggnaggcgagggtgagaggggtggggaggggggnggtagtgtgagggtagttaagaaggtgggggg

SEQ ID NO: 687434 - DNA, 1169 bp, Homo sapiens
  misc_feature (548)..(548): n is a, c, g, or t
agcggataatttggaatgtgggtggagggggatcatagttctccctgagtgagacttgcctgctcctctggcccctggtcctgtcctgttctccagcatggtgtgtctgaagctccctggaggctcctgcatggcagcgctgacagtgacactgatggtgctgagctccccactggctttggctggggacacccgaccacgtttcttgtggcaggataagtatgagtgtcatttcttcaacgggacggagcgggtgcggttcctggacagatacttctttaaccatggtaggtacgctccgtgcgcttcgtacaggcgacgctggtgggagatacctgggcggtgacgtgatgctgcgtggctggccgtgcatcgcgtgtaggtacctggatacagccaatatagggaccatcctaggaatgatcaggcgtcgcctgcggtctggatcatccttacctgcagtactagcgagacctactcgggcttgcgtcgcaagagcattacacaggtgctaagcgtggcagagattcaatccctaaaggctgacntgtatatcccttctaatgggacccagactcactggcaggaccatcgataaggtaccctgagtcatgactcgtgtgatgtggatttcataatcgcatggctagcattgacatgtcaggtggattccctgaaacggacagtgacagagaaggcatgggatgtgtgttccaccaggccctgatcctagacatgggatgactgtgatgcattcctagaccccttgggtgactgctggaaacaagttccctcgagaggttggaagagggttaacacccttggcaagttggatgccacccaagcgttgacaagacctcatcacaagtggaaatggaggagcacgggtctgaaaatctgcacacgcagccaaaggatggctcgaagatggagacacaggggcgcctttggtgcctgagggccctgagttctttcaccttggaaggaccggagcctggatccatctaacattaagtgaattcacgaaaagggaacctccttgggaatttcaggccaaacagagattcctgtagatgaaaatgcgacaattgaacaaactttacaggaaaaaactaactgcccagtattgcgtgatttataggcttcctagctaaggaattatcttcaca

SEQ ID NO: 687435 - DNA, 793 bp, Homo sapiens
ggagagaactagtttcgagtttttatgttttttttttttggccctaaaggggttaaagggggtcccaatcgggtaaacacgggccctttttcaaaattttaagggaaataatctctaggagcgcatggggcattaaaccgtggggattggcctcccacagaatactcagaagacatttgccacgatcgattataccccgaggacggtgttcgcggataacaagtgtggattgggtatacaacacgttaccggaaaatggcaaatcgtgtataatacacacccatagagtggtggagacacaagcacctcagagaagagtgacagaaagagactactgcgagaccctgcaacaatatatataagtcaccaaagagtaggggagctatcacaaaaagcgcgagaaagatcacatcaccccgcaagagtgtcacacacgcggccacacagagagagacaccgagaagagtgaccgacagcaggaagcataaacccgatcacacagacgaacatcctaacgccgatgggaagccgacgaacaaagaaccaactcctggacaaaagaagcgcacagaaaacaacccaagcagagctagatacgaaagaccagcccccgaaccaccgcacgaaaccaccccgcaacggcgaaaaaccaccacagacacaaaagaaaagacacacaaagaagaaaacagaccaaccaactagaggcagcagaagcacacacaacacagaaccgacgcacacacagaagcaaaagaggagcaacacagacgaggagacgatgaagaacaaa

SEQ ID NO: 687436 - DNA, 253 bp, Homo sapiens
tgtatttgggcacagaaatttcccattgtatttcccccacacaggcacagcctccctcatcatcagcatcccccaccagagtggtatgtttgttacagttgatgagccgacattgacacatcatcacctaaagtccatagtttacactagggttctctcttggtgttgtacatgctgtgggattggacaaatgtataatgacatgtattcactattatggtgtcatacagaataatttctgtgcccatttcaa

SEQ ID NO: 687437 - DNA, 852 bp, Homo sapiens
ttttttttttaactccatctttgagaaacatttaataatgtaatgtgtttgtcctcccttgtggcttcctcagctcctgcccttggcctgaagtcccagcattgatgacagcgcctcatcttcaacttttgtgctcccctttgcctaaaccgtatggcctcccgtgcatctgtactcaccctgtacgacaaacacattacattattaaatgtttctcaaagatggagttaaaaaaaaaaaaaaaaaaaaaaaaaaaaaaaaaaaaaaaaaaaaaaaaaaaaaaaaaaaaaaaaaaaaaaaaaaaaaaaaaaaaaaaaaaaaaaaaaaaaaaaaaaaaaaaaaaaaaaaaaaaaaaaatttgggcccccttggcccaagccattttaaacctgaaaaattttattcatggcccccaaatttgggccaaattggccaaatccccctaaaggggggcgattaaaaattaaagggcccggtttttaaaaacgtggaactggaaaaaccctggggttacccaaataaaacccctttgaaaaaaacccctttttcccaagtgggataaaaacaaaaaagcccccaccaaacgcctttccaaaaaatttcccaacctaaatggcaaaggaaaattgaccgttaaaattttggaaaaaatcccggaaaaatttttgaaaacaacctaatttttaaacacaaaggccaaaattggaaaaacccctttaatattaaaaaaaattccccgaaaaaggttaaagggtttccacagttggaacacaagagccctcttttaaaaaccgggccttcaccctaaaaagcgaacccttataaagggcaaggcccattcgggcctcccct

SEQ ID NO: 687438 - DNA, 234 bp, Homo sapiens
tactcgtccgcgggtctctaaaggtacaccggtgcaatctgctcataatcgctcacggactcacgtcctcatcactatcctgcctagcaaactcaaactacgaacgcactcacagtggcttcataatcctctctcagggacttcaaactctactcccactaatagcttggtgataacttctagcaagcctcgctaacctcgcctattttacaccaaccccgccgttaggccgat

SEQ ID NO: 687439 - DNA, 308 bp, Homo sapiens
ccactcgtcatgtgagaagaagcaggccggatgtcagaaggggtgccttgggtaaccctctgagactacagaagtgaacagggtggctattccctagtatttatttggctattagccatttatgatttattaattgattgagtatttgattcggtaagtatttggttattggttcatttgtccgggagagtaatattggttgaaagagggattagctattaagaagggattatggaatgcgggttggctttgccgttgaggaaaatactttgattggcagtcttcttgtgggaaacggagggggttta

SEQ ID NO: 687440 - DNA, 121 bp, Homo sapiens
tgttcggtgctgggctgtgaacacgaccgcatctcgctgtgaggaatctttcccggaatctttctctgcagaatgaaattgccaaagaaactctccctgatttggtttccatcattcctga

SEQ ID NO: 687441 - DNA, 138 bp, Homo sapiens
ctctcaccggatccttatactcgagggtactatcttgacggcatcagcagggatgtgtgtcgatgtcaacgagtgcagcgctaccccggcctgctgttgtggccacaatgtgcgagaacacgctgggctcttacctct

SEQ ID NO: 687442 - DNA, 581 bp, Homo sapiens
tcagaggatccggtgttccgttgtctatatatcagtttggtaccagcatcatgcgtgtttggttactgcagcctgtagtatagctgaagttgggtagtgtgatgcctccagcttagttctctggcttaggattgtcttggttatgtgggctcttttttggttacatatgaaatttgaagtagttttttctaattctgtgaaggaaagtcaatggtagcttgatggtgatagcaatgaatctataaattaccttgggaagtatggccattttcacaatattaattcttcctatccatgagcatggaatgttcttccattggtttgtgtcctctcttatttccttgagcagtggtttgtagttctccttgaagaggtccttcacatcccttgtaagctgtattcctaggtattctattctctttgaagcaattgtgaatgggagttcactcattatttgggtctctgtctattattggtgtataggaatacttgtgatttttgtacatcgattttgtatcctgagacttggctaaagttgcttatcaacttaaagagatttggggctgagacaaagggaaaca

SEQ ID NO: 687443 - DNA, 486 bp, Homo sapiens
ccagtgcatccgctatctctttccccttctgtacccagggtatagacggggcccattctccttcagagatgcaatgtgtcgtggcttttagcagtggtaagagacttcctgtaacaatgcatctcatatttgtgaatgactattaaagaaaacaacaatgtgcaatcaacgtcctcggccacattgtgaactttgggggatgctcgctccaaccgactgctgtcaccttcaccgtaccagtttttaaatcctgagtcaagccaaaaaaacccaaaaaaaccaagacaaaacaaaaaaaagaattaaggccatgccaatctcatctggtatcctgacgcaaataaggtatggtacaagaagggttgtaccgcaactaagtcatagtccgcctagaagcttttgcggtgaacgatggagggcccgaactcgtaaataccccctgattgaagatccacatctgatgaaaggtgaacagcaagcccagga

SEQ ID NO: 687444 - DNA, 192 bp, Homo sapiens
accagaagacttcttgtccaatgctttgatgacacccaccgcaaatgtacggtctcatatcacgaacagcaaagcgaaccacaggtgaatcgtctgagaagctctccacacacatgggcttgccaggaaccatatcaacaatggcagcatcaccagacttcaaaaatatagggccatctaccagctattgac

SEQ ID NO: 687445 - DNA, 923 bp, Homo sapiens
atcgcaacattgtggaaggccaaggtgggcggatcatctgagggcccaggagttcgagaccagtctggacagcatggtgaaaccctgtctctatctatgaaatacgaagaaatcatgcctggcatggtggtgcggtgcctgtagtcccagcctactcagtggctgagtgcaggacgaattgcttggagacccgtgtgggcagaaggttgcagtgagccgagatcggccctgttgtagtcacaagcctgggtgacagagggagatatccggctcaggaaccaatgtcaggtctgccagttgtcccataaaattaatggtataagagcgcacgccaaaaacgcctgtaagtttacatggcactccatttttccataatttattaacctgcatcagagtgttttgtacagggccttctgcactattggtaatatcctcttcaacggtttcctacaatgtagggccacaacaataatttctcctcagtggaggcttttccatgattgttctgctcctgggaccagctaatcggttacaaagggggcgggatattaggattgccccctctagtatttcacacaaacgttctggctcttagaggtggaataccagaagagagcaccctagcggcaaggtcgtgcacgactatacgatgacggagtgtctttcacggatctcggagaaggcctactgattccgcttacatgtaggcgaaggcttcaaaaatctgtatacctgtgtatcatgcgactttggacgaaggtgttcagcaggggagggtgcgggcctggcggcgacacaaacgagtccccaagaagtgtggtgggcgcggcattggctccatgattggcggttccttgtgctattcccgacccgtgttacggtgactctgtcatgttcataagcttataattgggagactatca

SEQ ID NO: 687446 - DNA, 263 bp, Homo sapiens
  misc_feature (208)..(208): n is a, c, g, or t
gatagctgattctagaggatcccagaagggcgacgtcattccgactgcaggttcgagtcggggctcaggtgatcttgcccacctcagcctcctgagtagtggggactacaggcgcgcgcgagcactccgggttaatttttatattttttataagaggcggggtctctctatattaccctggcgtggtctcgaaattccgtgggctcanagcagcccatccgtgcttcggacctcccaagagtgctgggcgttacagtgcagta

SEQ ID NO: 687447 - DNA, 151 bp, Homo sapiens
  misc_feature (12)..(12): n is a, c, g, or t
  misc_feature (35)..(35): n is a, c, g, or t
  misc_feature (80)..(80): n is a, c, g, or t
  misc_feature (104)..(104): n is a, c, g, or t
  misc_feature (130)..(130): n is a, c, g, or t
gttttcaggccnggtctggcttggtcttcccccgnaagaaatggccggggagctccaggggacccaggcgccgtcgcttnagcgactgggctgaccagccaggncagcggggtaaacccgaacaattctncgcgaggtagggaggccatgg

SEQ ID NO: 687448 - DNA, 485 bp, Homo sapiens
  misc_feature (50)..(50): n is a, c, g, or t
atggtgatcatcataatacaacttcaaaaggatttcaggctgagtgttgngtgtcacgcctatacacccagcactttggaaggctgaggaaggaggatcgcttgaggcccaggagtttgagacttagcctaggcaacacagtgaggccttatctcaacaacaaccacaaaatctaaaaattagctgggtgtggtggtgcatgcctgtgatcctggctacttcagaggctgaggtggaaggatcacttgaggccaggagtttgaggctgcagtgagttatgatggcactgctgcactccagcctgcgggacagagtgagaccctgtctgaaagaaagagagaaagaaagaaagaaagagagagaaagaaagaaagaaagaaagggaaagatggaaggaaggaaggaaaaagaaagagaaagagagagagagagaaagaaaaagaaagaaaagtaagaaagaaaaaagaaaaagaaagaaaagtaag

SEQ ID NO: 687449 - DNA, 362 bp, Homo sapiens
ccaaaaagaaatattgaatttttatttttgaagtttttgttttttaaaaggttgggggtgttcaccccctcagggacccccattacgcatctaatttcagctcatattgtcaggcaaagtattttcccccctcccagacaggccctccctgtctccagggcccccaccgaggttcccagggctggagacttcctctggtaaacattcctccagcctcccctcccctggggacgccaaggaggtgggccacacccaggaagggaaagcgggcagccccgttttggggacgtgaacgttttaataatttttgctgaattcctttacaactaaataacacagatattgttataaataaaattgta

SEQ ID NO: 687450 - DNA, 5367 bp, Homo sapiens
  misc_feature (229)..(229): n is a, c, g, or t
ttagaggatctcaaacaccgcaatctagaggaacgtttctgatcttcgccaacggtactacctgcgcaagtcaacctggacgggtccaactacacgttacttaagcagggcctgaacaacgccgttgccttggattttgactaccgagagcagatgatctactggacagatgtgaccacccagggcagcatgatccgaaggatgcaccttaacgggagcaatgtgcagntcctacaccgtacaggcctcagcaaccccgatgggctggctgtggactgggtgggtggcaacctgtactggtgcgacaaaggccgggacaccatcgaggtgtccaagctcaatggggcctatcggacggtgctggtcagctctggcctccgtgagcccagggctctggtggtggatgtgcagaatgggtacctgtactggacagactggggtgaccattcactgatcggccgcatcggcatggatgggtccagccgcagcgtcatcgtggacaccaagatcacatggcccaatggcctgacgctggactatgtcactgagcgcatctactgggccgacgcccgcgaggactacattgaatttgccagcctggatggctccaatcgccacgttgtgctgagccaggacatcccgcacatctttgcactgaccctgtttgaggactacgtctactggaccgactgggaaacaaagtccattaaccgagcccacaagaccacaggcaccaacaaaacgctcctcatcagcacgctgcaccggcccatggacctgcatgtcttccatgccctgcgccagccagacgtgcccaatcacccctgcaaggtcaacaatggtggctgcagcaacctgtgcctgctgtcccccgggggagggcacaaatgtgcctgccccaccaacttctacctgggcagcgatgggcgcacctgtgtgtccaactgcacggctagccagtttgtatgcaagaacgacaagtgcatccccttctggtggaagtgtgacaccgaggacgactgcggggaccactcagacgagcccccggactgccctgagttcaagtgccggcccggacagttccagtgctccacaggtatctgcacaaaccctgccttcatctgcgatggcgacaatgactgccaggacaacagtgacgaggccaactgtgacatccacgtctgcttgcccagtcagttcaaatgcaccaacaccaaccgctgtattcccggcatcttccgctgcaatgggcaggacaactgcggagatggggaggatgagagggactgccccgaggtgacctgcgcccccaaccagttccagtgctccattaccaaacggtgcatcccccgggtctgggtctgcgaccgggacaatgactgtgtggatggcagtgatgagcccgccaactgcacccagatgacctgtggtgtggacgagttccgctgcaaggattcgggccgctgcatcccagcgcgttggaagtgtgacggagaggatgactgtggggatggctcggatgagcccaaggaagagtgtgatgaacgcacctgtgagccataccagttccgctgcaagaacaaccgctgcgtgcccggccgctggcagtgcgactacgacaacgattgcggtgacaactccgatgaagagagctgcacccctcggccctgctccgagagtgagttctcctgtgccaacggccgctgcatcgcggggcgctggaaatgcgatggagaccacgactgcgcggacggctcggacgagaaagactgcaccccccgctgtgacatggaccagttccagtgcaagagcggccactgcatccccctgcgctggcgctgtgacgcagacgccgactgcatggacggcagcgacgaggaggcctgcggcactggcgtgcggacctgccccctggacgagttccagtgcaacaacaccttgtgcaagccgctggcctggaagtgcgatggcgaggatgactgtggggacaactcagatgagaaccccgaggagtgtgcccggttcgtgtgccctcccaaccggcccttccgttgcaagaatgaccgcgtctgtctgtggatcgggcgccaatgcgatggcacggacaactgtggggatgggactgatgaagaggactgtgagccccccacagcccacaccacccactgcaaagacaagaaggagtttctgtgccggaaccagcgctgcctctcctcctccctgcgctgcaacatgttcgatgactgcggggacggctctgacgaggaggactgcagcatcgaccccaagctgaccagctgcgccaccaatgccagcatctgtggggacgaggcacgctgcgtgcgcaccgagaaagcggcctactgtgcctgccgctcgggcttccacaccgtgcccggccagcccggatgccaagacatcaacgagtgcctgcgcttcggcacctgctcccagctctgcaacaacaccaagggcggccacctctgcagctgcgctcggaacttcatgaagacgcacaacacctgcaaggccgaaggctctgagtaccaggtcctgtacatcgctgatgacaatgagatccgcagcctgttccccggccacccccattcggcttacgagcaggcattccagggtgacgagagtgtccgcattgatgctatggatgtccatgtcaaggctggccgtgtctattggaccaactggcacacgggcaccatctcctaccgcagcctgccacctgctgcgcctcctaccacttccaaccgccaccggcgacagattgaccggggtgtcacccacctcaacatttcagggctgaagatgcccagaggcatcgccatcgactgggtggccggaaacgtgtactggaccgactcgggccgagatgtgattgaggtggcgcagatgaagggcgagaaccgcaagacgctcatctcgggcatgattgacgagccccacgccattgtggtggacccactgagggggaccatgtactggtcagactggggcaaccaccccaagattgagacggcagcgatggatgggacgcttcgggagacactggtgcaggacaacattcagtggcccacaggcctggccgtggattatcacaatgagcggctgtactgggcagacgccaagctttcagtcatcggcagcatccggctcaatggcacggaccccattgtggctgctgacagcaaacgaggcctaagtcaccccttcagcatcgacgtctttgaggattacatctatggtgtcacctacatcaataatcgtgtcttcaagatccataagtttggccacagccccttggtcaacctgacagggggcctgagccacgcctctgacgtggtcctttaccatcagcacaagcagcccgaagtgaccaacccatgtgaccgcaagaaatgcgagtggctctgcctgctgagccccagtgggcctgtctgcacctgtcccaatgggaagcggctggacaacggcacatgcgtgcctgtgccctctccaacgccccccccagatgctccccggcctggaacctgtaacctgcagtgcttcaacggtggcagctgtttcctcaatgcacggaggcagcccaagtgccgctgccaaccccgctacacgggtgacaagtgtgaactggaccagtgctgggagcactgtcgcaatgggggcacctgtgctgcctccccctctggcatgcccacgtgccggtgccccacgggcttcacgggccccaaatgcacccagcaggtgtgtgcgggctactgtgccaacaacagcacctgcactgtcaaccagggcaaccagccccagtgccgatgcctacccggcttcctgggcgaccgctgccagtaccggcagtgctctggctactgtgagaactttggcacatgccagatggctgctgatggctcccgacaatgccgctgcactgcctactttgagggatcgaggtgtgaggtgaacaagtgcagccgctgtctcgaaggggcctgtgtggtcaacaagcagagtggggatgtcacctgcaactgcacggatggccgggtggcccccagctgtctgacctgcgtcggccactgcagcaatggcggctcctgtaccatgaacagcaaaatgatgcctgagtgccagtgcccaccccacatgacagggccccggtgtgaggagcacgtcttcagccagcagcagccaggacatatagcctccatcctaatccctctgctgttgctgctgctgctggttctggtggccggagtggtattctggtataagcggcgagtccaaggggctaagggcttccagcaccaacggatgaccaacggggccatgaacgtggagattggaaaccccacctacaagatgtacgaaggcggagagcctgatgatgtgggaggcctactggacgctgactttgccctggaccctgacaagcccaccaacttcaccaaccccgtgtatgccacactctacatggggggccatggcagtcgccactccctggccagcacggacgagaagcgagaactcctgggccggggccctgaggacgagataggggaccccttggcatagggccctgccccgtcggactgcccccagaaagcctcctgccccctgccggtgaagtccttcagtgagcccctccccagccagcccttccctggccccgccggatgtataaatgtaaaaatgaaggaattacattttatatgtgagcgagcaagccggcaagcgagcacagtattatttctccatcccctccctgcctgctccttggcacccccatgctgccttcagggagacaggcagggagggcttggggctgcacctcctaccctcccaccagaacgcaccccactgggagagctggtggtgcagccttcccctccctgtataagacactttgccaaggctctcccctctcgccccatccctgcttgcccgctcccacagcttcctgagggctaattctgggaagggagagttctttgctgcccctgtctggaagacgtggctctgggtgaggtaggcgggaaaggatggagtgttttagttcttgggggaggccaccccaaaccccagccccaactccaggggcacctatgagatggccatgctcaacccccctcccagacaggccctccctgtctccagggcccccaccgaggttcccagggctggagacttcctctggtaaacattcctccagcctcccctcccctggggacgccaaggaggtgggccacacccaggaagggaaagcgggcagccccgttttggggacgtgaacgttttaataatttttgctgaattcctttacaactaaataacacagatattgttataaataaaattgta

SEQ ID NO: 687451 - DNA, 300 bp, Homo sapiens
attgtttcaacttacaactatcacttgcatggataattgatgggggagggagattagagtcttccggccctttttgattttgaattttacacagataacgtggggaataaccgtcggtctagtggctaagtatgggtggagaacaccgcgttccggcttaacctccccctagcttaatctaacgactgtcaaccagttgtttccattccccttaacgggtatatgtccgggaatggatgcacttatgacacgaaaatataaccgtggtacggactgtgggatatctaatgatgtccttac

SEQ ID NO: 687452 - DNA, 5749 bp, Homo sapiens
  misc_feature (229)..(229): n is a, c, g, or t
ttagaggatctcaaacaccgcaatctagaggaacgtttctgatcttcgccaacggtactacctgcgcaagtcaacctggacgggtccaactacacgttacttaagcagggcctgaacaacgccgttgccttggattttgactaccgagagcagatgatctactggacagatgtgaccacccagggcagcatgatccgaaggatgcaccttaacgggagcaatgtgcagntcctacaccgtacaggcctcagcaaccccgatgggctggctgtggactgggtgggtggcaacctgtactggtgcgacaaaggccgggacaccatcgaggtgtccaagctcaatggggcctatcggacggtgctggtcagctctggcctccgtgagcccagggctctggtggtggatgtgcagaatgggtacctgtactggacagactggggtgaccattcactgatcggccgcatcggcatggatgggtccagccgcagcgtcatcgtggacaccaagatcacatggcccaatggcctgacgctggactatgtcactgagcgcatctactgggccgacgcccgcgaggactacattgaatttgccagcctggatggctccaatcgccacgttgtgctgagccaggacatcccgcacatctttgcactgaccctgtttgaggactacgtctactggaccgactgggaaacaaagtccattaaccgagcccacaagaccacaggcaccaacaaaacgctcctcatcagcacgctgcaccggcccatggacctgcatgtcttccatgccctgcgccagccagacgtgcccaatcacccctgcaaggtcaacaatggtggctgcagcaacctgtgcctgctgtcccccgggggagggcacaaatgtgcctgccccaccaacttctacctgggcagcgatgggcgcacctgtgtgtccaactgcacggctagccagtttgtatgcaagaacgacaagtgcatccccttctggtggaagtgtgacaccgaggacgactgcggggaccactcagacgagcccccggactgccctgagttcaagtgccggcccggacagttccagtgctccacaggtatctgcacaaaccctgccttcatctgcgatggcgacaatgactgccaggacaacagtgacgaggccaactgtgacatccacgtctgcttgcccagtcagttcaaatgcaccaacaccaaccgctgtattcccggcatcttccgctgcaatgggcaggacaactgcggagatggggaggatgagagggactgccccgaggtgacctgcgcccccaaccagttccagtgctccattaccaaacggtgcatcccccgggtctgggtctgcgaccgggacaatgactgtgtggatggcagtgatgagcccgccaactgcacccagatgacctgtggtgtggacgagttccgctgcaaggattcgggccgctgcatcccagcgcgttggaagtgtgacggagaggatgactgtggggatggctcggatgagcccaaggaagagtgtgatgaacgcacctgtgagccataccagttccgctgcaagaacaaccgctgcgtgcccggccgctggcagtgcgactacgacaacgattgcggtgacaactccgatgaagagagctgcacccctcggccctgctccgagagtgagttctcctgtgccaacggccgctgcatcgcggggcgctggaaatgcgatggagaccacgactgcgcggacggctcggacgagaaagactgcaccccccgctgtgacatggaccagttccagtgcaagagcggccactgcatccccctgcgctggcgctgtgacgcagacgccgactgcatggacggcagcgacgaggaggcctgcggcactggcgtgcggacctgccccctggacgagttccagtgcaacaacaccttgtgcaagccgctggcctggaagtgcgatggcgaggatgactgtggggacaactcagatgagaaccccgaggagtgtgcccggttcgtgtgccctcccaaccggcccttccgttgcaagaatgaccgcgtctgtctgtggatcgggcgccaatgcgatggcacggacaactgtggggatgggactgatgaagaggactgtgagccccccacagcccacaccacccactgcaaagacaagaaggagtttctgtgccggaaccagcgctgcctctcctcctccctgcgctgcaacatgttcgatgactgcggggacggctctgacgaggaggactgcagcatcgaccccaagctgaccagctgcgccaccaatgccagcatctgtggggacgaggcacgctgcgtgcgcaccgagaaagcggcctactgtgcctgccgctcgggcttccacaccgtgcccggccagcccggatgccaagacatcaacgagtgcctgcgcttcggcacctgctcccagctctgcaacaacaccaagggcggccacctctgcagctgcgctcggaacttcatgaagacgcacaacacctgcaaggccgaaggctctgagtaccaggtcctgtacatcgctgatgacaatgagatccgcagcctgttccccggccacccccattcggcttacgagcaggcattccagggtgacgagagtgtccgcattgatgctatggatgtccatgtcaaggctggccgtgtctattggaccaactggcacacgggcaccatctcctaccgcagcctgccacctgctgcgcctcctaccacttccaaccgccaccggcgacagattgaccggggtgtcacccacctcaacatttcagggctgaagatgcccagaggcatcgccatcgactgggtggccggaaacgtgtactggaccgactcgggccgagatgtgattgaggtggcgcagatgaagggcgagaaccgcaagacgctcatctcgggcatgattgacgagccccacgccattgtggtggacccactgagggggaccatgtactggtcagactggggcaaccaccccaagattgagacggcagcgatggatgggacgcttcgggagacactggtgcaggacaacattcagtggcccacaggcctggccgtggattatcacaatgagcggctgtactgggcagacgccaagctttcagtcatcggcagcatccggctcaatggcacggaccccattgtggctgctgacagcaaacgaggcctaagtcaccccttcagcatcgacgtctttgaggattacatctatggtgtcacctacatcaataatcgtgtcttcaagatccataagtttggccacagccccttggtcaacctgacagggggcctgagccacgcctctgacgtggtcctttaccatcagcacaagcagcccgaagtgaccaacccatgtgaccgcaagaaatgcgagtggctctgcctgctgagccccagtgggcctgtctgcacctgtcccaatgggaagcggctggacaacggcacatgcgtgcctgtgccctctccaacgccccccccagatgctccccggcctggaacctgtaacctgcagtgcttcaacggtggcagctgtttcctcaatgcacggaggcagcccaagtgccgctgccaaccccgctacacgggtgacaagtgtgaactggaccagtgctgggagcactgtcgcaatgggggcacctgtgctgcctccccctctggcatgcccacgtgccggtgccccacgggcttcacgggccccaaatgcacccagcaggtgtgtgcgggctactgtgccaacaacagcacctgcactgtcaaccagggcaaccagccccagtgccgatgcctacccggcttcctgggcgaccgctgccagtaccggcagtgctctggctactgtgagaactttggcacatgccagatggctgctgatggctcccgacaatgccgctgcactgcctactttgagggatcgaggtgtgaggtgaacaagtgcagccgctgtctcgaaggggcctgtgtggtcaacaagcagagtggggatgtcacctgcaactgcacggatggccgggtggcccccagctgtctgacctgcgtcggccactgcagcaatggcggctcctgtaccatgaacagcaaaatgatgcctgagtgccagtgcccaccccacatgacagggccccggtgtgaggagcacgtcttcagccagcagcagccaggacatatagcctccatcctaatccctctgctgttgctgctgctgctggttctggtggccggagtggtattctggtataagcggcgagtccaaggggctaagggcttccagcaccaacggatgaccaacggggccatgaacgtggagattggaaaccccacctacaagatgtacgaaggcggagagcctgatgatgtgggaggcctactggacgctgactttgccctggaccctgacaagcccaccaacttcaccaaccccgtgtatgccacactctacatggggggccatggcagtcgccactccctggccagcacggacgagaagcgagaactcctgggccggggccctgaggacgagataggggaccccttggcatagggccctgccccgtcggactgcccccagaaagcctcctgccccctgccggtgaagtccttcagtgagcccctccccagccagcccttccctggccccgccggatgtataaatgtaaaaatgaaggaattacattttatatgtgagcgagcaagccggcaagcgagcacagtattatttctccatcccctccctgcctgctccttggcacccccatgctgccttcagggagacaggcagggagggcttggggctgcacctcctaccctcccaccagaacgcaccccactgggagagctggtggtgcagccttcccctccctgtataagacactttgccaaggctctcccctctcgccccatccctgcttgcccgctcccacagcttcctgagggctaattctgggaagggagagttctttgctgcccctgtctggaagacgtggctctgggtgaggtaggcgggaaaggatggagtgttttagttcttgggggaggccaccccaaaccccagccccaactccaggggcacctatgagatggccatgctcaacccccctcccagacaggccctccctgtctccagggcccccaccgaggttcccagggctggagacttcctctggtaaacattcctccagcctcccctcccctggggacgccaaggaggtgggccacacccaggaagggaaagcgggcagccccgttttggggacgtgaacgttttaataatttttgctgaattcctttacaactaaataacacagatattgttataaataaaattgtaaaaaaaaaaagaaaaaaaggccaaaaaaaaaaaaaaaaaaaaaaaaaaaaaaaaaaaaaaaaaaaggggggggggtaagaagaatactcacagggggggcgccaaacgcactagacgaggaccaccgaggttgtttatggataccaagagggggccccatataggggagcagcatataaaatacagcaacggacacatggcacgcgggtattaaaaaacacggcaccgagtagcgcgacaaacagcggctaaccaggggagaacccttgggagcaggacaaccacaattcggggggtggagggacacatacttgggggcacagacaccccacgacaatcaaaaggccgagccgaaaatataaaagctatcaggcgggtcaag

SEQ ID NO: 687453 - DNA, 383 bp, Homo sapiens
  misc_feature (68)..(68): n is a, c, g, or t
  misc_feature (105)..(105): n is a, c, g, or t
  misc_feature (107)..(107): n is a, c, g, or t
  misc_feature (134)..(134): n is a, c, g, or t
  misc_feature (150)..(150): n is a, c, g, or t
  misc_feature (193)..(193): n is a, c, g, or t
  misc_feature (243)..(243): n is a, c, g, or t
  misc_feature (288)..(288): n is a, c, g, or t
tatctagagcgatccgttcaccgacgggtgggaggggaataggctaggtggggtgcaccctctagtgntgtgagagcagtggccagagcagcaccgcaggttgcncnacctagctggtaggatctcatccaganacacagctgctctggngacgtaaagtcgaagctgagctcttctgcagctgcggatgcanacttgtagggcgtggccggtcgcggctgtggagtacttgagcatgcaggngtaccaggccaggctcaggccatagtggcagacgcagggcttccngcggtcccccacctgcctgcagcgaggcagctccgcctgctctgaggccttgggcagagcctcgaacacagaactgtccaccccgtcgggtggag

SEQ ID NO: 687454 - DNA, 997 bp, Homo sapiens
gcctacgtgatgtttatgcagatgagttcatcttccttccaggaagacacactaaaggacttcgaagaaggctgttacctgctttgtaaatagtgaagccatacaagtgatctactaaaagacatccgtagttacagagaaaggaaatactgtgttaggaatttttagtaggactcgttgtaaaccttttgtggaaaggctatcagataatttgcaaggtaccttttgagtgaagaagaggagcacttcagtgaggaacagtacttggctgcagtcaggaaaatacacaagtcatgcttctcgatcaatggtacctctcgaatgtcgactgatgtacttagtcttctgactgtgcagaaccaacgccttagcagtcctgtgtgaggctcggagtccctggagaagacgacagactataatagactaacctggtgtcatctaagtgctgcaatgaaaccgtgcgcagcaaggccttagagtgagcatcgtgaaatgcctttggcttgataaggactacacaatgtaggcaaaaccgagacaacccgtccacatgggagttcatttatctgaccaacatgtaggtcctggaagagctttcgggaccagggtctagttacttcttcagtcggatagggaactacgatgtacgagaggaacaccgtgggggatgcgcttggaagcgaaaagagaaagcattccgtcgtcaatacctccccttgaggacctcgtgagggaacctacgtgtgaccggccagacgtggacatgcatgacttgcgaatcagtttcggcacaagccaattcacggttttagactcgtgtccctcggaagcaccaggtggggttcaacccaaggggcaattaagcgtattcctagaagcacctacaagtggtgctagttgttaaaaacctaacatttttcaggcacgggatggctggggacacaagtcacacggctgaggctcaaattggcccaaagaagttccctgggttaccaaa

SEQ ID NO: 687455 - DNA, 5953 bp, Homo sapiens
  misc_feature (229)..(229): n is a, c, g, or t
ttagaggatctcaaacaccgcaatctagaggaacgtttctgatcttcgccaacggtactacctgcgcaagtcaacctggacgggtccaactacacgttacttaagcagggcctgaacaacgccgttgccttggattttgactaccgagagcagatgatctactggacagatgtgaccacccagggcagcatgatccgaaggatgcaccttaacgggagcaatgtgcagntcctacaccgtacaggcctcagcaaccccgatgggctggctgtggactgggtgggtggcaacctgtactggtgcgacaaaggccgggacaccatcgaggtgtccaagctcaatggggcctatcggacggtgctggtcagctctggcctccgtgagcccagggctctggtggtggatgtgcagaatgggtacctgtactggacagactggggtgaccattcactgatcggccgcatcggcatggatgggtccagccgcagcgtcatcgtggacaccaagatcacatggcccaatggcctgacgctggactatgtcactgagcgcatctactgggccgacgcccgcgaggactacattgaatttgccagcctggatggctccaatcgccacgttgtgctgagccaggacatcccgcacatctttgcactgaccctgtttgaggactacgtctactggaccgactgggaaacaaagtccattaaccgagcccacaagaccacaggcaccaacaaaacgctcctcatcagcacgctgcaccggcccatggacctgcatgtcttccatgccctgcgccagccagacgtgcccaatcacccctgcaaggtcaacaatggtggctgcagcaacctgtgcctgctgtcccccgggggagggcacaaatgtgcctgccccaccaacttctacctgggcagcgatgggcgcacctgtgtgtccaactgcacggctagccagtttgtatgcaagaacgacaagtgcatccccttctggtggaagtgtgacaccgaggacgactgcggggaccactcagacgagcccccggactgccctgagttcaagtgccggcccggacagttccagtgctccacaggtatctgcacaaaccctgccttcatctgcgatggcgacaatgactgccaggacaacagtgacgaggccaactgtgacatccacgtctgcttgcccagtcagttcaaatgcaccaacaccaaccgctgtattcccggcatcttccgctgcaatgggcaggacaactgcggagatggggaggatgagagggactgccccgaggtgacctgcgcccccaaccagttccagtgctccattaccaaacggtgcatcccccgggtctgggtctgcgaccgggacaatgactgtgtggatggcagtgatgagcccgccaactgcacccagatgacctgtggtgtggacgagttccgctgcaaggattcgggccgctgcatcccagcgcgttggaagtgtgacggagaggatgactgtggggatggctcggatgagcccaaggaagagtgtgatgaacgcacctgtgagccataccagttccgctgcaagaacaaccgctgcgtgcccggccgctggcagtgcgactacgacaacgattgcggtgacaactccgatgaagagagctgcacccctcggccctgctccgagagtgagttctcctgtgccaacggccgctgcatcgcggggcgctggaaatgcgatggagaccacgactgcgcggacggctcggacgagaaagactgcaccccccgctgtgacatggaccagttccagtgcaagagcggccactgcatccccctgcgctggcgctgtgacgcagacgccgactgcatggacggcagcgacgaggaggcctgcggcactggcgtgcggacctgccccctggacgagttccagtgcaacaacaccttgtgcaagccgctggcctggaagtgcgatggcgaggatgactgtggggacaactcagatgagaaccccgaggagtgtgcccggttcgtgtgccctcccaaccggcccttccgttgcaagaatgaccgcgtctgtctgtggatcgggcgccaatgcgatggcacggacaactgtggggatgggactgatgaagaggactgtgagccccccacagcccacaccacccactgcaaagacaagaaggagtttctgtgccggaaccagcgctgcctctcctcctccctgcgctgcaacatgttcgatgactgcggggacggctctgacgaggaggactgcagcatcgaccccaagctgaccagctgcgccaccaatgccagcatctgtggggacgaggcacgctgcgtgcgcaccgagaaagcggcctactgtgcctgccgctcgggcttccacaccgtgcccggccagcccggatgccaagacatcaacgagtgcctgcgcttcggcacctgctcccagctctgcaacaacaccaagggcggccacctctgcagctgcgctcggaacttcatgaagacgcacaacacctgcaaggccgaaggctctgagtaccaggtcctgtacatcgctgatgacaatgagatccgcagcctgttccccggccacccccattcggcttacgagcaggcattccagggtgacgagagtgtccgcattgatgctatggatgtccatgtcaaggctggccgtgtctattggaccaactggcacacgggcaccatctcctaccgcagcctgccacctgctgcgcctcctaccacttccaaccgccaccggcgacagattgaccggggtgtcacccacctcaacatttcagggctgaagatgcccagaggcatcgccatcgactgggtggccggaaacgtgtactggaccgactcgggccgagatgtgattgaggtggcgcagatgaagggcgagaaccgcaagacgctcatctcgggcatgattgacgagccccacgccattgtggtggacccactgagggggaccatgtactggtcagactggggcaaccaccccaagattgagacggcagcgatggatgggacgcttcgggagacactggtgcaggacaacattcagtggcccacaggcctggccgtggattatcacaatgagcggctgtactgggcagacgccaagctttcagtcatcggcagcatccggctcaatggcacggaccccattgtggctgctgacagcaaacgaggcctaagtcaccccttcagcatcgacgtctttgaggattacatctatggtgtcacctacatcaataatcgtgtcttcaagatccataagtttggccacagccccttggtcaacctgacagggggcctgagccacgcctctgacgtggtcctttaccatcagcacaagcagcccgaagtgaccaacccatgtgaccgcaagaaatgcgagtggctctgcctgctgagccccagtgggcctgtctgcacctgtcccaatgggaagcggctggacaacggcacatgcgtgcctgtgccctctccaacgccccccccagatgctccccggcctggaacctgtaacctgcagtgcttcaacggtggcagctgtttcctcaatgcacggaggcagcccaagtgccgctgccaaccccgctacacgggtgacaagtgtgaactggaccagtgctgggagcactgtcgcaatgggggcacctgtgctgcctccccctctggcatgcccacgtgccggtgccccacgggcttcacgggccccaaatgcacccagcaggtgtgtgcgggctactgtgccaacaacagcacctgcactgtcaaccagggcaaccagccccagtgccgatgcctacccggcttcctgggcgaccgctgccagtaccggcagtgctctggctactgtgagaactttggcacatgccagatggctgctgatggctcccgacaatgccgctgcactgcctactttgagggatcgaggtgtgaggtgaacaagtgcagccgctgtctcgaaggggcctgtgtggtcaacaagcagagtggggatgtcacctgcaactgcacggatggccgggtggcccccagctgtctgacctgcgtcggccactgcagcaatggcggctcctgtaccatgaacagcaaaatgatgcctgagtgccagtgcccaccccacatgacagggccccggtgtgaggagcacgtcttcagccagcagcagccaggacatatagcctccatcctaatccctctgctgttgctgctgctgctggttctggtggccggagtggtattctggtataagcggcgagtccaaggggctaagggcttccagcaccaacggatgaccaacggggccatgaacgtggagattggaaaccccacctacaagatgtacgaaggcggagagcctgatgatgtgggaggcctactggacgctgactttgccctggaccctgacaagcccaccaacttcaccaaccccgtgtatgccacactctacatggggggccatggcagtcgccactccctggccagcacggacgagaagcgagaactcctgggccggggccctgaggacgagataggggaccccttggcatagggccctgccccgtcggactgcccccagaaagcctcctgccccctgccggtgaagtccttcagtgagcccctccccagccagcccttccctggccccgccggatgtataaatgtaaaaatgaaggaattacattttatatgtgagcgagcaagccggcaagcgagcacagtattatttctccatcccctccctgcctgctccttggcacccccatgctgccttcagggagacaggcagggagggcttggggctgcacctcctaccctcccaccagaacgcaccccactgggagagctggtggtgcagccttcccctccctgtataagacactttgccaaggctctcccctctcgccccatccctgcttgcccgctcccacagcttcctgagggctaattctgggaagggagagttctttgctgcccctgtctggaagacgtggctctgggtgaggtaggcgggaaaggatggagtgttttagttcttgggggaggccaccccaaaccccagccccaactccaggggcacctatgagatggccatgctcaacccccctcccagacaggccctccctgtctccagggcccccaccgaggttcccagggctggagacttcctctggtaaacattcctccagcctcccctcccctggggacgccaaggaggtgggccacacccaggaagggaaagcgggcagccccgttttggggacgtgaacgttttaataatttttgctgaattcctttacaactaaataacacagatattgttataaataaaattgtaaaaaaaaaaagaaaaaaaggccaaaaaaaaaaaaaaaaaaaaaaaaaaaaaaaaaaaaaaaaaaaaaaaaaaaaaaaaaaaaaaaaaaaaaaaaaaaaaaaaaaaaaaaaaaaaaaaaaaaaaaaaaaaaaaatttttggcccctttggcccaaggctttttaaatttggaaaagtttttttattgggcccaaattggggcctatttggccaaattccccttaaggggggcgttttaaaaataaatggcccgggtttaaaaaacgtggattttgaaaaaccctggggttccccaatttaaagcccttggaaaaaaacccctttttcacaagtgggtttaatccaaaaaggccccaccctatacgcttttccaaaaatttgccacccttaatgggaaagggaaaatttaagccataaaattttgtaaaaaacccggtaaaatttttgtaaaacaacttattttttaaccaaaggccaaatttggaaaaactcttttaatctaaaaaatattccccaaaagcggttaagtttctcccattttgaaaaaggccccctttttaaaaacggggctccaacctaaaggggaa

SEQ ID NO: 687456 - DNA, 965 bp, Homo sapiens
agcgcggagcacctgcgcgcgaggttgacaacttcgctcgcagttggttcgcagtttactgcgtcacctaccgagattatccgcccatgcgcgcgttggcattagtgtgagtcgtcagactcaaggcaaaggtgggatatcatggcatctatgctggggttggacaccgaggaacagtaagagattatccagactttatcccatcagtggatgctgaggctattcagaaagcaatgcagaggaatcggaggtgatgagaaaatgctcatcagcattctgactgagaggtcaatatgcgcagagggatgctgaatgttaaggaatatcggagcagcatatggaaaggagcgtgaaagatagacttggaagggtgatctctactggccgagttttgagccatctcagtggtggccctaggtgagtccaccagcagttcttgtgatgcaaagcatgtaaagaaagatccatgaagggccgcgggaaccgaatcgaagatgccgtgatttgaaatgttaattacggaggacgagcaggcaactggaaggatatctgtcaagccctattatacgagtatacaagaagagtctgtggagagtgacattagtttccgaatacattttgttgacttccggaaaagtcgtgagattgggagaaagggggaaagaggatgaaaagtctcgacaggtgggatgaagcgttttgggccaacaaagatggcgcagaatttcctattaaaggtgggtgagaacacgatggggcacggattgaaggacaaagttcctggaggattccgggtggttaagggaggtttgccttcaaattgaaacttagtcattcgggggaactccggcaatattggccacaggggcttgtggggcaaggttaaggggaagattatcgggggattggaaaactatgtggggccaagacaatggtgttggaaaacgcaggagtttagcgaagat

SEQ ID NO: 687457 - DNA, 386 bp, Homo sapiens
attcgcttgtgatcagaggatcccaacctacagcgctgtgaggttggagctgtatcaatgatgtcccccccagtatatcagcaccgggatcataccgggcaaacggtgtggatgcttatagaccggccctgagctatcccggggctctaatgaatcctgggccactggtaaataactggcaagaacaataagttccccagccctccggccttaatcttcatgatggaggtctcctacaatgccatcaggacgggtctggtaaggctcctcggtgaggagctcaagtcactggttagacttcctacctagggagggtggggcagaagagtcagcaatcggcgtgggcttggtcacctacaataaggcgctgtaggtggggtaccgag

SEQ ID NO: 687458 - DNA, 3308 bp, Homo sapiens
gagccactgttatctatggggttgccgtgggaggaggaggcgggcgagaatacccaggcctaaagcctctgccctcctcagagccccccacagcccacaccacccactgcaaagacaagaaggagtttctgtgccggaaccagcgctgcctctcctcctccctgcgctgcaacatgttcgatgactgcggggacggctctgacgaggaggactgcagcatcgaccccaagctgaccagctgcgccaccaatgccagcatctgtggggacgaggcacgctgcgtgcgcaccgagaaagcggcctactgtgcctgccgctcgggcttccacaccgtgcccggccagcccggatgccaagacatcaacgagtgcctgcgcttcggcacctgctcccagctctgcaacaacaccaagggcggccacctctgcagctgcgctcggaacttcatgaagacgcacaacacctgcaaggccgaaggctctgagtaccaggtcctgtacatcgctgatgacaatgagatccgcagcctgttccccggccacccccattcggcttacgagcaggcattccagggtgacgagagtgtccgcattgatgctatggatgtccatgtcaaggctggccgtgtctattggaccaactggcacacgggcaccatctcctaccgcagcctgccacctgctgcgcctcctaccacttccaaccgccaccggcgacagattgaccggggtgtcacccacctcaacatttcagggctgaagatgcccagaggcatcgccatcgactgggtggccggaaacgtgtactggaccgactcgggccgagatgtgattgaggtggcgcagatgaagggcgagaaccgcaagacgctcatctcgggcatgattgacgagccccacgccattgtggtggacccactgagggggaccatgtactggtcagactggggcaaccaccccaagattgagacggcagcgatggatgggacgcttcgggagacactggtgcaggacaacattcagtggcccacaggcctggccgtggattatcacaatgagcggctgtactgggcagacgccaagctttcagtcatcggcagcatccggctcaatggcacggaccccattgtggctgctgacagcaaacgaggcctaagtcaccccttcagcatcgacgtctttgaggattacatctatggtgtcacctacatcaataatcgtgtcttcaagatccataagtttggccacagccccttggtcaacctgacagggggcctgagccacgcctctgacgtggtcctttaccatcagcacaagcagcccgaagtgaccaacccatgtgaccgcaagaaatgcgagtggctctgcctgctgagccccagtgggcctgtctgcacctgtcccaatgggaagcggctggacaacggcacatgcgtgcctgtgccctctccaacgccccccccagatgctccccggcctggaacctgtaacctgcagtgcttcaacggtggcagctgtttcctcaatgcacggaggcagcccaagtgccgctgccaaccccgctacacgggtgacaagtgtgaactggaccagtgctgggagcactgtcgcaatgggggcacctgtgctgcctccccctctggcatgcccacgtgccggtgccccacgggcttcacgggccccaaatgcacccagcaggtgtgtgcgggctactgtgccaacaacagcacctgcactgtcaaccagggcaaccagccccagtgccgatgcctacccggcttcctgggcgaccgctgccagtaccggcagtgctctggctactgtgagaactttggcacatgccagatggctgctgatggctcccgacaatgccgctgcactgcctactttgagggatcgaggtgtgaggtgaacaagtgcagccgctgtctcgaaggggcctgtgtggtcaacaagcagagtggggatgtcacctgcaactgcacggatggccgggtggcccccagctgtctgacctgcgtcggccactgcagcaatggcggctcctgtaccatgaacagcaaaatgatgcctgagtgccagtgcccaccccacatgacagggccccggtgtgaggagcacgtcttcagccagcagcagccaggacatatagcctccatcctaatccctctgctgttgctgctgctgctggttctggtggccggagtggtattctggtataagcggcgagtccaaggggctaagggcttccagcaccaacggatgaccaacggggccatgaacgtggagattggaaaccccacctacaagatgtacgaaggcggagagcctgatgatgtgggaggcctactggacgctgactttgccctggaccctgacaagcccaccaacttcaccaaccccgtgtatgccacactctacatggggggccatggcagtcgccactccctggccagcacggacgagaagcgagaactcctgggccggggccctgaggacgagataggggaccccttggcatagggccctgccccgtcggactgcccccagaaagcctcctgccccctgccggtgaagtccttcagtgagcccctccccagccagcccttccctggccccgccggatgtataaatgtaaaaatgaaggaattacattttatatgtgagcgagcaagccggcaagcgagcacagtattatttctccatcccctccctgcctgctccttggcacccccatgctgccttcagggagacaggcagggagggcttggggctgcacctcctaccctcccaccagaacgcaccccactgggagagctggtggtgcagccttcccctccctgtataagacactttgccaaggctctcccctctcgccccatccctgcttgcccgctcccacagcttcctgagggctaattctgggaagggagagttctttgctgcccctgtctggaagacgtggctctgggtgaggtaggcgggaaaggatggagtgttttagttcttgggggaggccaccccaaaccccagccccaactccaggggcacctatgagatggccatgctcaacccccctcccagacaggccctccctgtctccagggcccccaccgaggttcccagggctggagacttcctctggtaaacattcctccagcctcccctcccctggggacgccaaggaggtgggccacacccaggaagggaaagcgggcagccccgttttggggacgtgaacgttttaataatttttgctgaattcctttacaactaaataacacagatattgttataaataaaattgta

SEQ ID NO: 687459 - DNA, 3127 bp, Homo sapiens
agccttccataaatatttattataattaaaagaccgtagccataccccccccccccagacccttcacccagaaatagagagattggaattgtaaacaccgtatcccgttgagaccgcggcctactgtgcctgccgctcgggcttccacaccgtgcccggccagcccggatgccaagacatcaacgagtgcctgcgcttcggcacctgctcccagctctgcaacaacaccaagggcggccacctctgcagctgcgctcggaacttcatgaagacgcacaacacctgcaaggccgaaggctctgagtaccaggtcctgtacatcgctgatgacaatgagatccgcagcctgttccccggccacccccattcggcttacgagcaggcattccagggtgacgagagtgtccgcattgatgctatggatgtccatgtcaaggctggccgtgtctattggaccaactggcacacgggcaccatctcctaccgcagcctgccacctgctgcgcctcctaccacttccaaccgccaccggcgacagattgaccggggtgtcacccacctcaacatttcagggctgaagatgcccagaggcatcgccatcgactgggtggccggaaacgtgtactggaccgactcgggccgagatgtgattgaggtggcgcagatgaagggcgagaaccgcaagacgctcatctcgggcatgattgacgagccccacgccattgtggtggacccactgagggggaccatgtactggtcagactggggcaaccaccccaagattgagacggcagcgatggatgggacgcttcgggagacactggtgcaggacaacattcagtggcccacaggcctggccgtggattatcacaatgagcggctgtactgggcagacgccaagctttcagtcatcggcagcatccggctcaatggcacggaccccattgtggctgctgacagcaaacgaggcctaagtcaccccttcagcatcgacgtctttgaggattacatctatggtgtcacctacatcaataatcgtgtcttcaagatccataagtttggccacagccccttggtcaacctgacagggggcctgagccacgcctctgacgtggtcctttaccatcagcacaagcagcccgaagtgaccaacccatgtgaccgcaagaaatgcgagtggctctgcctgctgagccccagtgggcctgtctgcacctgtcccaatgggaagcggctggacaacggcacatgcgtgcctgtgccctctccaacgccccccccagatgctccccggcctggaacctgtaacctgcagtgcttcaacggtggcagctgtttcctcaatgcacggaggcagcccaagtgccgctgccaaccccgctacacgggtgacaagtgtgaactggaccagtgctgggagcactgtcgcaatgggggcacctgtgctgcctccccctctggcatgcccacgtgccggtgccccacgggcttcacgggccccaaatgcacccagcaggtgtgtgcgggctactgtgccaacaacagcacctgcactgtcaaccagggcaaccagccccagtgccgatgcctacccggcttcctgggcgaccgctgccagtaccggcagtgctctggctactgtgagaactttggcacatgccagatggctgctgatggctcccgacaatgccgctgcactgcctactttgagggatcgaggtgtgaggtgaacaagtgcagccgctgtctcgaaggggcctgtgtggtcaacaagcagagtggggatgtcacctgcaactgcacggatggccgggtggcccccagctgtctgacctgcgtcggccactgcagcaatggcggctcctgtaccatgaacagcaaaatgatgcctgagtgccagtgcccaccccacatgacagggccccggtgtgaggagcacgtcttcagccagcagcagccaggacatatagcctccatcctaatccctctgctgttgctgctgctgctggttctggtggccggagtggtattctggtataagcggcgagtccaaggggctaagggcttccagcaccaacggatgaccaacggggccatgaacgtggagattggaaaccccacctacaagatgtacgaaggcggagagcctgatgatgtgggaggcctactggacgctgactttgccctggaccctgacaagcccaccaacttcaccaaccccgtgtatgccacactctacatggggggccatggcagtcgccactccctggccagcacggacgagaagcgagaactcctgggccggggccctgaggacgagataggggaccccttggcatagggccctgccccgtcggactgcccccagaaagcctcctgccccctgccggtgaagtccttcagtgagcccctccccagccagcccttccctggccccgccggatgtataaatgtaaaaatgaaggaattacattttatatgtgagcgagcaagccggcaagcgagcacagtattatttctccatcccctccctgcctgctccttggcacccccatgctgccttcagggagacaggcagggagggcttggggctgcacctcctaccctcccaccagaacgcaccccactgggagagctggtggtgcagccttcccctccctgtataagacactttgccaaggctctcccctctcgccccatccctgcttgcccgctcccacagcttcctgagggctaattctgggaagggagagttctttgctgcccctgtctggaagacgtggctctgggtgaggtaggcgggaaaggatggagtgttttagttcttgggggaggccaccccaaaccccagccccaactccaggggcacctatgagatggccatgctcaacccccctcccagacaggccctccctgtctccagggcccccaccgaggttcccagggctggagacttcctctggtaaacattcctccagcctcccctcccctggggacgccaaggaggtgggccacacccaggaagggaaagcgggcagccccgttttggggacgtgaacgttttaataatttttgctgaattcctttacaactaaataacacagatattgttataaataaaattgta

SEQ ID NO: 687460 - DNA, 1578 bp, Homo sapiens
aaaaagaaaaaataaaactctcattattggtggtgggctaatcataatccagcggtatttaaggcacataaaggaccaaaaaaaaaaaaaaggaattccaaaggacccaaactttttttaaacctaacaaaatatcctccttgggagagtatggcacagtgtgggccttattatcatctctgtgggccaataagtggtaacgcgtaagttgggcccacggtaaacaatttccatttgaagaatatccactgggggaccacgacaaccctgtgtgtaccccgctatacgggcatcacccgggagaatagcaaagagtcagcaaccccctagggagggactaaaagggcgatagagaccacacacccaatgtacaaggacagggcacaaccggcgacacctaataaaaaagcgaccagtgagaaagaggcacccccaatacataggggacataactagacacatcgggggaaggtcacagaaattggggccacgaaactatcaaagttaccaccaaggtggggtagaacacaggcgccaaatgtgacactacaaaagagatccccaaagacaagagccctgggaaacacggggggaacacatcggggagaacaacaatcggcccccaatatagtagaacaaccacagagaagagatggggaacaaaggcgtgaaacaaacgagcgtcccacccaaaaaaatacacccaaaggagaagaagaacaaaggggaggcaaacacacaaatgacacaaaacaactcactaacgaccgtacaacaacaacatacagtgcggaagccacccacaatacaacggggtcaaacccccatacaaaaccgtcgcaacggcctacaacaacgtgggcccatagggaaaagatgaaggcaaaccataagagattcggttggacaaacgaatactacaagaacaatttagggcacagccaaacacaatgggggcgacagaacaaagatatataccaaaggacgccaacaccaacaaagaaccccggtgtattacaacacatcacagaacgaagaactagcacacagacggggacaagattacacaacacaagtgaatagaaccagaacgaaaaacagaggcaaccattgcgacgacacagcccatagaactaagcacatgaaacaggtgaaaaccggaataaaaacacacacaataggtgaacagcaactaggaacctcaaaagaaacaatcgccgcgggcaccacacataagcacacaacaggacgaggccagaggaccctgataggaacaggattgacaacaacggcaagaaaaaaccgggacaacagtgctgagaaagaaaagaaagcaagacaaaagaaaaaaggggggcacacaaacagaccagaaaagatgaacgcgcaaggcaaatcaagcacaaacaggaggaagaagagacatcacgtctcgtggaacagaggacgcccaagacacagaacgagcacgcgactagtccagcacgaaaaacaacaaccagccaacaaagcagcacgagaagcaagagacagaacgaagcaaagcagcaagcaggcaagactgacgaagccagagca

SEQ ID NO: 687461 - DNA, 5121 bp, Homo sapiens
  misc_feature (229)..(229): n is a, c, g, or t
ttagaggatctcaaacaccgcaatctagaggaacgtttctgatcttcgccaacggtactacctgcgcaagtcaacctggacgggtccaactacacgttacttaagcagggcctgaacaacgccgttgccttggattttgactaccgagagcagatgatctactggacagatgtgaccacccagggcagcatgatccgaaggatgcaccttaacgggagcaatgtgcagntcctacaccgtacaggcctcagcaaccccgatgggctggctgtggactgggtgggtggcaacctgtactggtgcgacaaaggccgggacaccatcgaggtgtccaagctcaatggggcctatcggacggtgctggtcagctctggcctccgtgagcccagggctctggtggtggatgtgcagaatgggtacctgtactggacagactggggtgaccattcactgatcggccgcatcggcatggatgggtccagccgcagcgtcatcgtggacaccaagatcacatggcccaatggcctgacgctggactatgtcactgagcgcatctactgggccgacgcccgcgaggactacattgaatttgccagcctggatggctccaatcgccacgttgtgctgagccaggacatcccgcacatctttgcactgaccctgtttgaggactacgtctactggaccgactgggaaacaaagtccattaaccgagcccacaagaccacaggcaccaacaaaacgctcctcatcagcacgctgcaccggcccatggacctgcatgtcttccatgccctgcgccagccagacgtgcccaatcacccctgcaaggtcaacaatggtggctgcagcaacctgtgcctgctgtcccccgggggagggcacaaatgtgcctgccccaccaacttctacctgggcagcgatgggcgcacctgtgtgtccaactgcacggctagccagtttgtatgcaagaacgacaagtgcatccccttctggtggaagtgtgacaccgaggacgactgcggggaccactcagacgagcccccggactgccctgagttcaagtgccggcccggacagttccagtgctccacaggtatctgcacaaaccctgccttcatctgcgatggcgacaatgactgccaggacaacagtgacgaggccaactgtgacatccacgtctgcttgcccagtcagttcaaatgcaccaacaccaaccgctgtattcccggcatcttccgctgcaatgggcaggacaactgcggagatggggaggatgagagggactgccccgaggtgacctgcgcccccaaccagttccagtgctccattaccaaacggtgcatcccccgggtctgggtctgcgaccgggacaatgactgtgtggatggcagtgatgagcccgccaactgcacccagatgacctgtggtgtggacgagttccgctgcaaggattcgggccgctgcatcccagcgcgttggaagtgtgacggagaggatgactgtggggatggctcggatgagcccaaggaagagtgtgatgaacgcacctgtgagccataccagttccgctgcaagaacaaccgctgcgtgcccggccgctggcagtgcgactacgacaacgattgcggtgacaactccgatgaagagagctgcacccctcggccctgctccgagagtgagttctcctgtgccaacggccgctgcatcgcggggcgctggaaatgcgatggagaccacgactgcgcggacggctcggacgagaaagactgcaccccccgctgtgacatggaccagttccagtgcaagagcggccactgcatccccctgcgctggcgctgtgacgcagacgccgactgcatggacggcagcgacgaggaggcctgcggcactggcgtgcggacctgccccctggacgagttccagtgcaacaacaccttgtgcaagccgctggcctggaagtgcgatggcgaggatgactgtggggacaactcagatgagaaccccgaggagtgtgcccggttcgtgtgccctcccaaccggcccttccgttgcaagaatgaccgcgtctgtctgtggatcgggcgccaatgcgatggcacggacaactgtggggatgggactgatgaagaggactgtgagccccccacagcccacaccacccactgcaaagacaagaaggagtttctgtgccggaaccagcgctgcctctcctcctccctgcgctgcaacatgttcgatgactgcggggacggctctgacgaggaggactgcagcatcgaccccaagctgaccagctgcgccaccaatgccagcatctgtggggacgaggcacgctgcgtgcgcaccgagaaagcggcctactgtgcctgccgctcgggcttccacaccgtgcccggccagcccggatgccaagacatcaacgagtgcctgcgcttcggcacctgctcccagctctgcaacaacaccaagggcggccacctctgcagctgcgctcggaacttcatgaagacgcacaacacctgcaaggccgaaggctctgagtaccaggtcctgtacatcgctgatgacaatgagatccgcagcctgttccccggccacccccattcggcttacgagcaggcattccagggtgacgagagtgtccgcattgatgctatggatgtccatgtcaaggctggccgtgtctattggaccaactggcacacgggcaccatctcctaccgcagcctgccacctgctgcgcctcctaccacttccaaccgccaccggcgacagattgaccggggtgtcacccacctcaacatttcagggctgaagatgcccagaggcatcgccatcgactgggtggccggaaacgtgtactggaccgactcgggccgagatgtgattgaggtggcgcagatgaagggcgagaaccgcaagacgctcatctcgggcatgattgacgagccccacgccattgtggtggacccactgagggggaccatgtactggtcagactggggcaaccaccccaagattgagacggcagcgatggatgggacgcttcgggagacactggtgcaggacaacattcagtggcccacaggcctggccgtggattatcacaatgagcggctgtactgggcagacgccaagctttcagtcatcggcagcatccggctcaatggcacggaccccattgtggctgctgacagcaaacgaggcctaagtcaccccttcagcatcgacgtctttgaggattacatctatggtgtcacctacatcaataatcgtgtcttcaagatccataagtttggccacagccccttggtcaacctgacagggggcctgagccacgcctctgacgtggtcctttaccatcagcacaagcagcccgaagtgaccaacccatgtgaccgcaagaaatgcgagtggctctgcctgctgagccccagtgggcctgtctgcacctgtcccaatgggaagcggctggacaacggcacatgcgtgcctgtgccctctccaacgccccccccagatgctccccggcctggaacctgtaacctgcagtgcttcaacggtggcagctgtttcctcaatgcacggaggcagcccaagtgccgctgccaaccccgctacacgggtgacaagtgtgaactggaccagtgctgggagcactgtcgcaatgggggcacctgtgctgcctccccctctggcatgcccacgtgccggtgccccacgggcttcacgggccccaaatgcacccagcaggtgtgtgcgggctactgtgccaacaacagcacctgcactgtcaaccagggcaaccagccccagtgccgatgcctacccggcttcctgggcgaccgctgccagtaccggcagtgctctggctactgtgagaactttggcacatgccagatggctgctgatggctcccgacaatgccgctgcactgcctactttgagggatcgaggtgtgaggtgaacaagtgcagccgctgtctcgaaggggcctgtgtggtcaacaagcagagtggggatgtcacctgcaactgcacggatggccgggtggcccccagctgtctgacctgcgtcggccactgcagcaatggcggctcctgtaccatgaacagcaagatgtacgaaggcggagagcctgatgatgtgggaggcctactggacgctgactttgccctggaccctgacaagcccaccaacttcaccaaccccgtgtatgccacactctacatggggggccatggcagtcgccactccctggccagcacggacgagaagcgagaactcctgggccggggccctgaggacgagataggggaccccttggcatagggccctgccccgtcggactgcccccagaaagcctcctgccccctgccggtgaagtccttcagtgagcccctccccagccagcccttccctggccccgccggatgtataaatgtaaaaatgaaggaattacattttatatgtgagcgagcaagccggcaagcgagcacagtattatttctccatcccctccctgcctgctccttggcacccccatgctgccttcagggagacaggcagggagggcttggggctgcacctcctaccctcccaccagaacgcaccccactgggagagctggtggtgcagccttcccctccctgtataagacactttgccaaggctctcccctctcgccccatccctgcttgcccgctcccacagcttcctgagggctaattctgggaagggagagttctttgctgcccctgtctggaagacgtggctctgggtgaggtaggcgggaaaggatggagtgttttagttcttgggggaggccaccccaaaccccagccccaactccaggggcacctatgagatggccatgctcaacccccctcccagacaggccctccctgtctccagggcccccaccgaggttcccagggctggagacttcctctggtaaacattcctccagcctcccctcccctggggacgccaaggaggtgggccacacccaggaagggaaagcgggcagccccgttttggggacgtgaacgttttaataatttttgctgaattcctttacaactaaataacacagatattgttataaataaaattgta

SEQ ID NO: 687462 - DNA, 2324 bp, Homo sapiens
gaggagcattgacgcctacagctcttcacgttcgactcgagactatgcgactcacggccgtgacactgcgcacaggcatctcaccgaatttgttgtgactagcttgacaggcacagatcgatgtgtccatcaatgtcatcgcccgtttcatggtatcagaccgtcgtttggatcgattcacgatgctcatatgagtcgtaccactcataaataatcatgaatcgtggtgtttgactacaatatccgagtaatgtgtatggcacggacccttggtcaacctgacagggggcctgagccacgcctctgacgtggtcctttaccatcagcacaagcagcccgaagtgaccaacccatgtgaccgcaagaaatgcgagtggctctgcctgctgagccccagtgggcctgtctgcacctgtcccaatgggaagcggctggacaacggcacatgcgtgcctgtgccctctccaacgccccccccagatgctccccggcctggaacctgtaacctgcagtgcttcaacggtggcagctgtttcctcaatgcacggaggcagcccaagtgccgctgccaaccccgctacacgggtgacaagtgtgaactggaccagtgctgggagcactgtcgcaatgggggcacctgtgctgcctccccctctggcatgcccacgtgccggtgccccacgggcttcacgggccccaaatgcacccagcaggtgtgtgcgggctactgtgccaacaacagcacctgcactgtcaaccagggcaaccagccccagtgccgatgcctacccggcttcctgggcgaccgctgccagtaccggcagtgctctggctactgtgagaactttggcacatgccagatggctgctgatggctcccgacaatgccgctgcactgcctactttgagggatcgaggtgtgaggtgaacaagtgcagccgctgtctcgaaggggcctgtgtggtcaacaagcagagtggggatgtcacctgcaactgcacggatggccgggtggcccccagctgtctgacctgcgtcggccactgcagcaatggcggctcctgtaccatgaacagcaaaatgatgcctgagtgccagtgcccaccccacatgacagggccccggtgtgaggagcacgtcttcagccagcagcagccaggacatatagcctccatcctaatccctctgctgttgctgctgctgctggttctggtggccggagtggtattctggtataagcggcgagtccaaggggctaagggcttccagcaccaacggatgaccaacggggccatgaacgtggagattggaaaccccacctacaagatgtacgaaggcggagagcctgatgatgtgggaggcctactggacgctgactttgccctggaccctgacaagcccaccaacttcaccaaccccgtgtatgccacactctacatggggggccatggcagtcgccactccctggccagcacggacgagaagcgagaactcctgggccggggccctgaggacgagataggggaccccttggcatagggccctgccccgtcggactgcccccagaaagcctcctgccccctgccggtgaagtccttcagtgagcccctccccagccagcccttccctggccccgccggatgtataaatgtaaaaatgaaggaattacattttatatgtgagcgagcaagccggcaagcgagcacagtattatttctccatcccctccctgcctgctccttggcacccccatgctgccttcagggagacaggcagggagggcttggggctgcacctcctaccctcccaccagaacgcaccccactgggagagctggtggtgcagccttcccctccctgtataagacactttgccaaggctctcccctctcgccccatccctgcttgcccgctcccacagcttcctgagggctaattctgggaagggagagttctttgctgcccctgtctggaagacgtggctctgggtgaggtaggcgggaaaggatggagtgttttagttcttgggggaggccaccccaaaccccagccccaactccaggggcacctatgagatggccatgctcaacccccctcccagacaggccctccctgtctccagggcccccaccgaggttcccagggctggagacttcctctggtaaacattcctccagcctcccctcccctggggacgccaaggaggtgggccacacccaggaagggaaagcgggcagccccgttttggggacgtgaacgttttaataatttttgctgaattcctttacaactaaataacacagatattgttataaataaaattgta

SEQ ID NO: 687463 - DNA, 386 bp, Homo sapiens
actatggtgcccacctcacaatcccacgtcttcacccccaatatcacgatgggatcggactcaggacagggacgcatgtgtgttttgaataggagccctaactgtagttacttctttcacagcagggacggatgagacaataggcagctgtggagaccatgaggttgagggaggtggggtatctcgctgctctgaccttaggtagagtcctccacagaagcatcaaagtggactggcacatatgggctcccttcacaggccacaatgatgtgtctctccttcgggctggtccggtatgcacagttggggtacctggagccgtttgtcaggcggcagtctgtgatgtgcatgctggagttgctcttgtagcagttgccctgcccgtt

SEQ ID NO: 687464 - DNA, 112 bp, Homo sapiens
cccaacccccattttaattggcaccctttttttttcatgggttggcaaaaacatttttttaacttttttctatttgactggggggtgaattaaaattgtcccatttgcttta

SEQ ID NO: 687465 - DNA, 261 bp, Homo sapiens
agtatatgctccataccccaatgtgttacgtgcaaacatcctccaaaactgtgtatgtgaattagctataaccttcagccctgaattcaccttcatttgaccccatcagttacagggccttacatatacatttccactgacctgatcaatgtatgcaatgctatttaagaagtgatatgtgatttactggaaagctcgtatgagagaagtcaaaggaatgccaactgcacatcaaaggacatcttcaggcaattcaggatc

SEQ ID NO: 687466 - DNA, 2321 bp, Homo sapiens
agttgaagtgtcgaaggggctgtgccgatggcgtactatacggtggtgtgggagcgagggagggtgtggagttgggtagaggggcatgaggcccgtaagcttttagtgatcggattggatcacggaggaatggcatggatcagcgatcgtggattgttgaggcaggttcgatggccataagtcagctttcaggtatcgacgttgttggatgattagatttatagtgtgtcataaaatatagtgtaatccgtatgtggctgtcacccttggtcaacctgacagggggcctgagccacgcctctgacgtggtcctttaccatcagcacaagcagcccgaagtgaccaacccatgtgaccgcaagaaatgcgagtggctctgcctgctgagccccagtgggcctgtctgcacctgtcccaatgggaagcggctggacaacggcacatgcgtgcctgtgccctctccaacgccccccccagatgctccccggcctggaacctgtaacctgcagtgcttcaacggtggcagctgtttcctcaatgcacggaggcagcccaagtgccgctgccaaccccgctacacgggtgacaagtgtgaactggaccagtgctgggagcactgtcgcaatgggggcacctgtgctgcctccccctctggcatgcccacgtgccggtgccccacgggcttcacgggccccaaatgcacccagcaggtgtgtgcgggctactgtgccaacaacagcacctgcactgtcaaccagggcaaccagccccagtgccgatgcctacccggcttcctgggcgaccgctgccagtaccggcagtgctctggctactgtgagaactttggcacatgccagatggctgctgatggctcccgacaatgccgctgcactgcctactttgagggatcgaggtgtgaggtgaacaagtgcagccgctgtctcgaaggggcctgtgtggtcaacaagcagagtggggatgtcacctgcaactgcacggatggccgggtggcccccagctgtctgacctgcgtcggccactgcagcaatggcggctcctgtaccatgaacagcaaaatgatgcctgagtgccagtgcccaccccacatgacagggccccggtgtgaggagcacgtcttcagccagcagcagccaggacatatagcctccatcctaatccctctgctgttgctgctgctgctggttctggtggccggagtggtattctggtataagcggcgagtccaaggggctaagggcttccagcaccaacggatgaccaacggggccatgaacgtggagattggaaaccccacctacaagatgtacgaaggcggagagcctgatgatgtgggaggcctactggacgctgactttgccctggaccctgacaagcccaccaacttcaccaaccccgtgtatgccacactctacatggggggccatggcagtcgccactccctggccagcacggacgagaagcgagaactcctgggccggggccctgaggacgagataggggaccccttggcatagggccctgccccgtcggactgcccccagaaagcctcctgccccctgccggtgaagtccttcagtgagcccctccccagccagcccttccctggccccgccggatgtataaatgtaaaaatgaaggaattacattttatatgtgagcgagcaagccggcaagcgagcacagtattatttctccatcccctccctgcctgctccttggcacccccatgctgccttcagggagacaggcagggagggcttggggctgcacctcctaccctcccaccagaacgcaccccactgggagagctggtggtgcagccttcccctccctgtataagacactttgccaaggctctcccctctcgccccatccctgcttgcccgctcccacagcttcctgagggctaattctgggaagggagagttctttgctgcccctgtctggaagacgtggctctgggtgaggtaggcgggaaaggatggagtgttttagttcttgggggaggccaccccaaaccccagccccaactccaggggcacctatgagatggccatgctcaacccccctcccagacaggccctccctgtctccagggcccccaccgaggttcccagggctggagacttcctctggtaaacattcctccagcctcccctcccctggggacgccaaggaggtgggccacacccaggaagggaaagcgggcagccccgttttggggacgtgaacgttttaataatttttgctgaattcctttacaactaaataacacagatattgttataaataaaattgta

SEQ ID NO: 687467 - DNA, 2034 bp, Homo sapiens
gcactcaggcatcattttgctgttcatggtacaggagccgccattgctgcagtggccaacccatgtgaccgcaagaaatgcgagtggctctgcctgctgagccccagtgggcctgtctgcacctgtcccaatgggaagcggctggacaacggcacatgcgtgcctgtgccctctccaacgccccccccagatgctccccggcctggaacctgtaacctgcagtgcttcaacggtggcagctgtttcctcaatgcacggaggcagcccaagtgccgctgccaaccccgctacacgggtgacaagtgtgaactggaccagtgctgggagcactgtcgcaatgggggcacctgtgctgcctccccctctggcatgcccacgtgccggtgccccacgggcttcacgggccccaaatgcacccagcaggtgtgtgcgggctactgtgccaacaacagcacctgcactgtcaaccagggcaaccagccccagtgccgatgcctacccggcttcctgggcgaccgctgccagtaccggcagtgctctggctactgtgagaactttggcacatgccagatggctgctgatggctcccgacaatgccgctgcactgcctactttgagggatcgaggtgtgaggtgaacaagtgcagccgctgtctcgaaggggcctgtgtggtcaacaagcagagtggggatgtcacctgcaactgcacggatggccgggtggcccccagctgtctgacctgcgtcggccactgcagcaatggcggctcctgtaccatgaacagcaaaatgatgcctgagtgccagtgcccaccccacatgacagggccccggtgtgaggagcacgtcttcagccagcagcagccaggacatatagcctccatcctaatccctctgctgttgctgctgctgctggttctggtggccggagtggtattctggtataagcggcgagtccaaggggctaagggcttccagcaccaacggatgaccaacggggccatgaacgtggagattggaaaccccacctacaagatgtacgaaggcggagagcctgatgatgtgggaggcctactggacgctgactttgccctggaccctgacaagcccaccaacttcaccaaccccgtgtatgccacactctacatggggggccatggcagtcgccactccctggccagcacggacgagaagcgagaactcctgggccggggccctgaggacgagataggggaccccttggcatagggccctgccccgtcggactgcccccagaaagcctcctgccccctgccggtgaagtccttcagtgagcccctccccagccagcccttccctggccccgccggatgtataaatgtaaaaatgaaggaattacattttatatgtgagcgagcaagccggcaagcgagcacagtattatttctccatcccctccctgcctgctccttggcacccccatgctgccttcagggagacaggcagggagggcttggggctgcacctcctaccctcccaccagaacgcaccccactgggagagctggtggtgcagccttcccctccctgtataagacactttgccaaggctctcccctctcgccccatccctgcttgcccgctcccacagcttcctgagggctaattctgggaagggagagttctttgctgcccctgtctggaagacgtggctctgggtgaggtaggcgggaaaggatggagtgttttagttcttgggggaggccaccccaaaccccagccccaactccaggggcacctatgagatggccatgctcaacccccctcccagacaggccctccctgtctccagggcccccaccgaggttcccagggctggagacttcctctggtaaacattcctccagcctcccctcccctggggacgccaaggaggtgggccacacccaggaagggaaagcgggcagccccgttttggggacgtgaacgttttaataatttttgctgaattcctttacaactaaataacacagatattgttataaataaaattgta

SEQ ID NO: 687468 - DNA, 211 bp, Homo sapiens
  misc_feature (123)..(123): n is a, c, g, or t
agacaaaacagatacacaagcaggttaagcgctaaagcatcactaggcaagtagcattcaaacatgtgatgtgggtagagaaaggagtacctggcatgcatgtacctgctatagtttgactgnaatccgttgatgtttaatcttggtcttgtcatgggtccgctcataacgaccaagcgctgtggtgcaggtactggtagatcagtctgcg

SEQ ID NO: 687469 - DNA, 1592 bp, Homo sapiens
acaccggttggtggggggccacatcacattcgtccagactcgagctgtcgatgacgagttcggtggtgatccccaaacaacaccgcgggtgctttcgtccgtcaggaaaatggtggtgtggaccacgcacttctggtcggcgtggtgtagtgagatgattcgttgtcttcttgcgtggggtgaccacccaacgtgatctcatcaactggtggtagcctcccctcttcctgtctcggccagctgtgtctgtttttttgtgttgttgtctcccgtgctgaattcacccagccctcctgtctgggtgggtagattttgtcttctccccccccttcctttcggcaggcgggggaagaacccacaacagacgggctgctgcctgtcgtcggtgtggggacggatcctcctcgtccgcgacccttcgtctggcgtccatcatccccgtcggcggactctgttggtagctcagctccgggtcgcctgcctccaaccaggcggcccgcctactttcgtccgtccaacctacgtggggggagggggccaccacaacctatcggtgctagcattcgttccgtccccctcggtgtggtgtgccgcagatcgtccgtcccttccgttcgttcgttggtggaacaactagcggtaaagtcttggttgtcggcccccaccgacgaggaccgccgcgggggcgaccaccccacgcgccccacggaggaggaggcggacgccacacgcggccccccacgaggcctcaacagaagagaagcgacgacacctacgtgttgtggggtgccgcaaggagcctcaacgacgacaccaggagagtcgttgtggggcacacacaaacacatggcgcgtctgtggcctcatcgtgtggtgatgacagccccgggggagccactctccgtcgcgggagccgcctcctcgtggagcgacactcgtgggcccacatggtctgtcccacctcgtgagtagtgtcccgcgcgcacactcacacaccctcgtgtgcgtgtgtgcctcgggtgtctcatcgcgccacaagcgcactctccccccgagagagaggagaccccctcgagagagagccctctgcgggagagagacacgtctgttggagagagcacaccaccaactaggcgtcgtcgcccgacgcctctggcgcggcgcgcgcgacgcctctcgagataagagagagccccctctgtctgtgcgctctgtgtctgtgcggtgtcacacctgtggaacacacccacacactgtctccggcgcacctctcgcctcccgagagcgcgcaccagcgcccgtgtgtctgtgaggtgttgtgtgtctgtctctgtgagaggcccgcagaggccccccgagaggagagctcgcctcggctctctccgcgagggcgctgacgcggcacgccgccttgagggaccctcgctgccctcacccctggagagcggcacctcttcacgcgcggtgcacccacggagccctccccggcccccccttttttgtgacattcccgtggcacacacactggagactcccccgggcccgccccccccccccccccctgggaaaccccttaaggccccctgcccctt

SEQ ID NO: 687470 - DNA, 408 bp, Homo sapiens
  misc_feature (62)..(62): n is a, c, g, or t
caaatgcctgactaaatcttaagaacctgaattaacatagtagtttacgaaggactaagganctatgttggtagatggtatactctttgtttgattggaagatctatggtgacaagggaaggatttaacatagaaatggcattatttattcgatgcaaagctgagtgcaaacatcattatatctctgaatcttttgcagatgttcatgttatttagtagcggtattaacctcattggtagctgaactctagggaggtttattggtgaagcctcacagtcctctgtggtctgcactgctagagactcaacattgtggcatggaaatgcattgacacatcctatgccatgactttaatttcctgatttgtaatctcttattttatcattaataaaatgcatttttgaact

SEQ ID NO: 687471 - DNA, 100 bp, Homo sapiens
tgctggaccgcaagcactctttcttcagccaagctggagtgatcttcctgtttgtttcaggataatgtctaatcctaccattccatttgatcactgagaa

SEQ ID NO: 687472 - DNA, 1840 bp, Homo sapiens
agcattctcagaagatgatttcttggtatcaaaatgtgcagtttctacaacagtttagatcaccaccaccattttcttcttttttaaaaataaataactgctcccatttcaggcagtgcaaaccttcatctgctggagaccagaggtacaaggagatcagggggttgcagcaccgctagcggcttgcaagatcggggagttgggagggcgagagaggaggaggtgcagctttgatgctgggacctccctgagtggggctgatgaatgtatattcattagcaccatggctcacttcccaggaagactgatcaggagcccttcagggacaattttgttctcaagattcacaccttaggaacacatttttatcacctcaaaattttgatccatcacccctctctccacctatatttttacaaataccattcagacttaaattaagctgaagaaactagcctttggtaacatagggtgtcattggttttcagggatgtaaccaattccagaaatacattcttttgcctggcatgaagactttgaaacacgggccgcttattttcagagttcctgttttgggacgtgacttggctacttgttacttccaggtggttaccacacggcgggggtcatgcctttccctcccccaagatgataatagatttaatagactcaaagaagttgttcagaatcaaagaagaaaaagtctggcttaaacatagtaacttctgtgtgccaggttaatgacaaccaaaagctctctatttaccattattgccaaacttcatcagttgcccatcctgcaccaaaatcctgtgcgtgtttaaattcacgttgtcaccaaagaggtgcacagatcaacaacctggatgacgcaggtgttctccagggaaaccagaccaagtcaagtctccaggtaacttttttgaagtcttttttttaaggcgcgcaggtaccaagcaacagaatagagtaacctgaacgttcttactctcccaggcatggcccacgtggtgcttcaggtagaaatgtgcttcaccctcctggtggggggcgaggacacagcccactgcatgcagcatggtagagagctggggcgaatatctccatgtctttggaggatgtcagctggccgctttcagggcagagtcgggtgggcgttggtgccaccttaggaaggagagcgatgcgtgggtctggccagagctctggagccaatgccgggctgcctgagagcagaggaaatgcatggcccatgtgcatttctgagtattttaaactcgttcaggcgcgcgggcagccttcatgatgatgtagctcgcagagaagagcaggagcagaattagccctttcttcaggccatcttgcctcaaagggtacacatgtttggcggttaagatgaaactaacccttatgtttcatcctggccccatgatgtacacatcttagccatgtagtggccttggggggccacagagatttcctttgaggagcatggtagagtccacagccatggctgaagtcagtggacaccgaggggacaggactgcaggccaccaggggcctctgcccagagggaggcagagaggatggcggccacgggtgctctcctggcatcctcatggggtgatgccaggccgggcacttcaaaacaggctcagccgactgggagatcctttgtactttgcacagttcacacacacaaacacacacaccctatcccaagtgtttttgttagacacaaatgtcagcgtgtgattttggaagacttgtcagtgatgacaaaccatgatgcctgtgtttctgagtctttaaataaaaatgaacatggagaaaaaaaaaa

SEQ ID NO: 687473 - DNA, 1003 bp, Homo sapiens
gacccctggtgtccagagcccccacccctcccgcaacaagcagctgatgccccagtgattctctatacatttttcacctcggccaatatgtccaggaaaactgcttacttctcttttcttgcctggagcttcattgttcacccttacgttgcaatataggaattaatgctacaagaataacaagtaaagcttacctgaaaagtgcataggtttggggggccaaattgggttaattcttaacaattcttcccaactggtggggaaaaaccgagcaagagctatcaaacactctacaaatctctccgtggttacgcgaagtgcagatctgaacttataagatgtttatgtgagaccagtggtttcaacaatgggattgtgttacgaattatccctttaactgaaaccctcagttttactgtttacattattaggaaaacagggatatcttttgaatctaaaaatttgatgtacagcatgtgatgttgaagtttacatgtaaagtcacagtataggtgaaataacgtatgtcatattttgacgacgtatcctgcagccatgtttttaccgtgagtgtaaaagtcaaagtacatggtagatagtctttcacaataacaggaaacaggattcatgttcctccaaatgtacatttatcaaagctaatggatgattttagtaaaaagagattcggcccagtcaggtttatgacagtcatggcctaatgtggctgatggttaaagcaagtataaatttccaactagatcacgtattctacaaatctcctgcatttacaaaagtgcttgagttaactatagacttgtaaagaaggtacccataatgacggccaaagcagtccttgaacaccggttaaaaagaaagactgcgggcctaccgaaagaacacaagaaatcgacaaaaatacgcaagaaaagccagccagacatccgacaaagaggaccaaacagaccgatgcacaacaagcgcacacaagcacaagacactaacg

SEQ ID NO: 687474 - DNA, 137 bp, Homo sapiens
ctagatttccccaggcggtactacaggcggtacttttgccgggactactggcgggactactggcgggactactggcgggactactggccgggactactggcgggactactggtcgggactactggcgggactactgg

SEQ ID NO: 687475 - DNA, 104 bp, Homo sapiens
gtcatctgtacagctgataggaacacgcaagcaacgctgaaaattttgcttacctgacttgatgctaaagtggtcatagtgctacgacttgacttgggcgtgtg

SEQ ID NO: 687476 - DNA, 924 bp, Homo sapiens
ctcgcccgccgaattgacacgaggcggcagagctgccgccattttgcgggaagaggaggctctgtacctgcattaactgattcgctagcctagactctaggcaactatccgagctccactccccacaacatactcaaagcgaacggagagaaccgggacccccctgcggggacccggcaactgactctgacaggatggacatcctgactgacctttgcaacactagctgactccgagcgccactgcatgcgcaagccctccccctactacacacacacacgaacccagcgcactgcacgcacacaacacgcgcaaacgcaagctcacacacaacggcacttactccatagacaactaccaccacgacagccacccagcagacagctgcgcacactgcagcaccccacgctgcgcacacgccagccacacaatcgcgcgcgaacgcaccacacgccaaactccgctcagatcggacgcactcgcgcgcatcggcctactacgcaccggagcacgcaaacatacgctccggccacgccccgcaacacgctcacaaggcgctccgcgacagctgctcagctcccaccaacgccaacagcacgcaaacgacatagcgcacgcacctccgcccgcacccacctgcgcctacaccatgcaagcatccagaccagaaaacgactccgcgagacaccccacctccagcctcccgctcgccacgcgcactccgactagcttgaccacatccaccaagcgcaagcttcccactccccaaccctctcccccaccactgggcctacaccacacggcactacttgcgcaccacccacgctaccaccgaacgcatctcctcccactcctcacgcacccacaacaccacgcccccacgcctccacgcggcaacgccccacgccctgcactacactactg

SEQ ID NO: 687477 - DNA, 933 bp, Homo sapiens
tcaagcttgttatcatgtaaattctgtacaaagaatagttatttttctctttttgtgtggtggttctgtgtgtgttattgatgtttattttttaattcctttcccccaggccctctctattatgagactgtgcccgccggtttcaagatcacggaaattggtggcaacaagacacagatggggtacctgggcacagcggcgaacttctcttccgtttgcggttttctgcctaattgtgcaactgaggaacataattctatttttcacgatgaggaaatgcgtagctttgtacagacggctgattcaagttacatgtaacagcctccaaagggctgtctccattctgtccccttcccataaaagaagtgggggtgtcgagaagaccagggaagggacccttgcctcagccctccccctggactcaccttgcctcccagacaatcgtgcccaggttgttaaccctcggattgtgcttcaactaaggggacctagactccctctcccacaggagccccagaccccagaagtggtttgcaattaatcaagatatgtgtcgagtcctctttcttttcacgtccctcatcttcattgaaacaaatcatatgctttacacaaagctgggggtgcatgaatattatggatacttacctacccctgcaagttgagaaccaaggagttaagggatgtgggcgggtaactcacatgcaatgtacttgttgaagagaggtgacggggggtcggattaacattgggcacattggacacacagccctgtcccgcttatggacgtatagcacgaaaatcaaagaaaacgggggtaagaacggagacaagaccagctgcaaagactatcgacacacaggaaagaaggagcagggagaacaggacggaacaaacagaaaacgcaggtggctatcatgaaaaacgaaaata

SEQ ID NO: 687478 - DNA, 128 bp, Homo sapiens
tgaactacagggggtcccatctatatacacaggattcctgccacactggatgcagagcatcgacggcttcatcgcagtgtctagtctgcttcagctgtggtaccttcggctagtggggggtcgagctc

SEQ ID NO: 687479 - DNA, 418 bp, Homo sapiens
  misc_feature (61)..(61): n is a, c, g, or t
  misc_feature (65)..(65): n is a, c, g, or t
  misc_feature (207)..(207): n is a, c, g, or t
cggattggcgaccatttcaactgaagggcagtcaaaacatcagctgaggccgggcatggtngcgnacgcgcctctagtcccagctactcagtaggctgaggcagaagaattgccaggaggcaattgaacttgggaggcggaggttgcagtgaaccaagatcacaccatgcactccagcctggatgacagaacaagactccatctcanaaaacaaaaacaactctatgtggctaagtactgcattctccccagtactatcatttcctcccaaaagtggaggaaacccaggtataaagggctatgtagcttttgatcccttacataaatgggattataggcgtgagccattgcgcccggcagaacaccgtcgcttcgacggtgttctgtagctaggagaaagtggtacatatttcttttt

SEQ ID NO: 687480 - DNA, 400 bp, Homo sapiens
gcgtcgaccaaaaacaaacaaacaaaaaaaaacacactagctgatgccaggtgctgtggctcatacctgtaatcccagcactttgggaggccaaggcaggtggatcacgagatcaggagttcgagaccaacctgaccaacatggtgaaaccgtgtctctactaaaaattcaaaaaaattagctgggcgtggtggtgcgcacctgtaatcccagcactttgggagtgtatggcatgatcacaactcactgcagccttgacttcccaggctcaagctatcctctcacttcagcctccccagtagctgagactacagatgcgtgccaccacacctggctaattttttttttttttttttgagatggagtctctccctgttacccagtgagccgagattgtgcc

SEQ ID NO: 687481 - DNA, 137 bp, Homo sapiens
aattcccggttttttgctggccaagtctgccttgttacccgcgagtgcaatgacgatattggggctggcctgcctctgtagctcgttcacccagttcttggcccgtgcaaatgtatctgtgttggagatgtcataga

SEQ ID NO: 687482 - DNA, 103 bp, Homo sapiens
  misc_feature (50)..(50): n is a, c, g, or t
  misc_feature (61)..(62): n is a, c, g, or t
  misc_feature (71)..(71): n is a, c, g, or t
gaacaaatgaccttttatttcatacagagacgagcagaaggcaagctagngtgcagaaacnntccatgacngcaggccagtcacaaactcggtcgggaggaag

SEQ ID NO: 687483 - DNA, 370 bp, Homo sapiens
gtttgagtattttttttaagcaagattcttgcccagtcgccaggctgaagtccagtggtgcgttctgggctctctgcaacgtccgcttcgtgggtccaagcgattcttatgcgccagcttctcgagcatctgagaccacaggcatgtgccaccatgcccagtttaccctttttggtatttttagtagaaatggggtttcccacatgttagaagggtctcgatctcctgaccctcgtgatccgccggcctcggcctccaaagtgctggattcagtgtagcggcacgcgcggctcggaaagggcttttgagacacacacacacacacacacacacacacacacacacacacgcggtacagagagctctgggg

SEQ ID NO: 687484 - DNA, 237 bp, Homo sapiens
aagaggctgatcccgtcagagcaggacaggttacacccaaggctgccggccagtgtctaaccgtctctagatccgatcctggtatagcttctaccaaatagttatgtgtctgtgtgacagtgtgtgtgaaatggagttctgctgtgattgcccaggttgagtcttgaactcctgggctcaagcgactctcccaccttggcctcccatgcgtggatcgccagggagatcctctagagt

SEQ ID NO: 687485 - DNA, 789 bp, Homo sapiens
  misc_feature (41)..(41): n is a, c, g, or t
acacaaaaacacaaaagaaaatatcggctaggtacgagccnggttgagtgtcttgtgctttctcaccatagttcgtactacttgtaaatacatttttctattttctattttttgtattttttttttgtgacatttggtttcatgggtgtgctgtatatttccatgccctcactcctttaagaaaaaaaaaaaggaaaaaagcaacacaatcctgtccttgctgttgtgattatagtctgggttaacctggtggtgacaaccggggtgttgggggacacatggtcaaatggcccctactgagatggggccctaaatctccagtaactgggggaacagaaccagctggctggtgtcctggagagcctgggccctgtcgctgtggtctctgctgcaacgcccagatttctggggagtaactagtggttaggtctgctgacctttacctaagcagcccctgcctgggtaagaagggtgcccatggttcagaggcaaagagaagcctgcggttgggcatgaggatgcctgacaacaaaggctgggagaagggccctgagttccagcctctccccaagggtccccgccccagtgggctgcctctgtcttgacctggtggtaatgaattagtggtgctgtgtcactggtgggcttgaagtcacggggggatcgagctcacagggggcacccatcctgtttgtcaacagagtctgaagcagcagggtgtggatcctctgttgttgtcatcaattcctgctgaggggtcacaggggtacggttcataaatgactccta

SEQ ID NO: 687486 - DNA, 194 bp, Homo sapiens
cctctgaagtgggctcacagtcatagccttgaatacggaatctaggtcaccacaaaggcaaagacaatgctctttatgataccgttgtatacgcttcgttggcggtactgggccttgacttcattttgaccgccttgatgtttggagatttctgatgcaaaaccgcactgtggaaatcggtgtcggccttttct

SEQ ID NO: 687487 - DNA, 560 bp, Homo sapiens
cctccgcgagcaagaggccgctcccgagaccgaggccgaggggcacgggcactaggtccggacccgcgtacccctttcccggacgcctgcgtccccacaaagacctcgtgcttctagcaagactcccgcatggattattctcgctgtggtcacgaggccgttcctatagcgctctagttggcccagactgagaactctggcatctggctgctcggagctggaacctcagggaggtctgctgcaacaggtgcgaccctgaccgctccatgctcgcgggcgcggggaggcgtggcctcccccgggccggccacctctgttggctgctgtgcgctttcaccttaaaactctgcgaggcagaggctccggtgcgcgaggagaagctatcaggtgggtgattgcccgagaaccctgtacctctatggcttgtttctaatgtctttttagtatacccagaacacagaaaaataaggtgccacatggaatgagggcaagcactgtgttgggaagctagatgggcagagcctttgagagaaatgttttttgaatggtcttcggctggc

SEQ ID NO: 687488 - DNA, 174 bp, Homo sapiens
cctgtaaggcagcttacagattcgctatgatcaaccaggcaacagcaggttggaaaatctgcctccagtagcagccagcatagaacagcttttggaagaggcagtggagttgaaggaccagccaatttttactaagaaccagggttactcctcagtgacattttacggaatgct

SEQ ID NO: 687489 - DNA, 507 bp, Homo sapiens
gtctagaggatcacccagtcttggggggactttgaatcagcacccctctgcatcgtctccctggtagcagaaaggcaggacaggcgccgagtgtgtggggcggacttagttacgctcctcgcccagggacctggtggggctgaggggctcgctcggggtgcatgactgacctgcacgtcgccgtgtccacagagttgcgctagctgccgctggtggaggaggtgcaggacgctcggcgcggtcactctggtgcacggatgattgcgccgttcctatggcgtgccttctcgtcctcatcgtagcgctcgccgtcttcctccaacggcccgttccggggttcctcctcgtcctcactctggtgcgggctgcattgtcgttactgcgaccctgcgggtggcccgaggctggccgtgggtagcggtacccctgggccgcatccgcctcgttgggctcgtaggtgaagtgctctggaaaggccttggacagcgccatgtggcgcgcagacat

SEQ ID NO: 687490 - DNA, 378 bp, Homo sapiens
  misc_feature (36)..(36): n is a, c, g, or t
  misc_feature (93)..(93): n is a, c, g, or t
  misc_feature (115)..(115): n is a, c, g, or t
  misc_feature (119)..(119): n is a, c, g, or t
  misc_feature (131)..(132): n is a, c, g, or t
  misc_feature (348)..(348): n is a, c, g, or t
gagctcatactggagaccagccatgtaagtgtactncatgtgggaaagcattctcctttatacattaaagagtccacactggtgagaaacccnccaaatgtgctcaatgtgccgnagcnttcagcaggaanncagaactcattatacatccgataattcatactggggagaaaccgtatgaatgtacagaatgtgggaaaacattctctcgcaagtcacaactcatcatacatcagagaacccacactgggagagaaaccctataaatgtaccaaatgtggaaaatccttctgttcagcagtcacatgcttcattgggacatcagagaattcacacgggagaacaacnttatggtatgtttcttgaatgtggggaaag

SEQ ID NO: 687491 - DNA, 1465 bp, Homo sapiens
ggccgacctgatgagcgggacctcgctgctgtaacctgctgcttcaccgtacgcaggatcgtgccaggtggagcaggcacaagcaagatgacgccccgtgtgaacctggagcgagtcggtgttctggtgcaaccaacgcgtgcgttcaggtcaacggagtcccagactgatggcacagacgtgatccttcgtccgtccctgtgtggattatctcccaatcgaggcccgtgatcgatcgcatactcttctatccgtcgcagtacggactggtcttcgaggaggagccggacggagacctcatcgggggacctggacgtgtcatccgatcgcagacagagttgagcgtacattgtcctagagtggcctgtagcctggctggcgggcagaggctggatggtgcttacccggcgtgtcaggagtgctgcgtgggtcggacacaggatgcagaggaaagttccccgaggtagtggtcctaaactgactctcgggacgtcgtgaggctacgacgtgacgggcgctccgaagactggcctgtccgtcagtcgggaggggccaaggtgtgccttggcgggctagactcaagacgtatacctgcgagacatgaaagtaagacgacagtgggggccaaagccattaaagagaggatgggacataccttgggggacagaaccccagcaatggaggggcacatgaatgcaagggagacaggccaaagactcggtaagaggcagcaaaataaaggtcctgtagtggaacgtgttatgcggagtggcaatcagggggtgtacccgagagagagacttagaacaggggtcccacagtagcaacagacgtaccgtcgatggggaactttcgaaaccagaccaaagccaaagtgtgtccaataccacataggtcaggttgagcctctagctagggggcccaccctatctttggccgcccgccaataggaaagttgcaatcaccggttggggccttgggagcatgatggtaattgaatcgtcctatgttgggaggttaccacctgttgcgcaagcgcagacaacaagggaggccatcagccctggtgacacaattacacctgagtggctcacacacagtctttgagatggagtttggggacggacaatggcagcgaaaacgaaaaacaaaacgagatgaaggcaagctagcagatcaatcacctaggggaccgatggtacatcagcaagttggattcaacacgtactcatagacacaacggagtacctccccgaggccagaacacaagcggaggacaactacagagcgttacaacgaggataggagacacgaggtacatagtggcaggacaccagcaatggtacgcggacagcaaaggcgggaccctgcggcacggtaacacggaaccagaagcacgaaccgacaagagccggggggcagacagtacattacccacagaaggagaggagacactaccaaagga

SEQ ID NO: 687492 - DNA, 1806 bp, Homo sapiens
  misc_feature (446)..(446): n is a, c, g, or t
  misc_feature (1730)..(1730): n is a, c, g, or t
ggcgggggcccaggcacagcatgagatagacaggtttaacgagtctccagacgaacaaactctggtactttataggcccaggaagtcggagagcttggggtcttgaggatatagatgaacggggagagagaaagcttgaaggagaatgtcctacacaagaggactcaagtctagccatgagaagctaacaggtcgtgatcagcttgtggtggcaagtggagctagagtgtgacagcctacaagaggctaccatcttctggcacaagagagaaagcgcatagaagcgatagggagacaccgcgacggacatagtccaggagcagagcgcatagggcatcccagaccctagcgcctatgagatcaagcatcacacgccgatgtaactcggtggcttggaaagatgggattgcgcgaaggggaattggtctaccgagctatggagacgngaaccccggtaggtggcctggtacctgcaattcaactcgagaatcgattccagcctaagcgatatcgcttgggggccggccataacgaggagcttttggagcgcctttcttcctaggtttggcacaaattctcattgccaacccagaagtatacattagcctcaagggaactaaaggtcactttggggagtcgttaagttgcgccgtaccgggccgtttaggaaagctcgcgaaacgattacgagaagacgagataaccacaaggcgaccacgatatactcgaaaaacaagaaggttccaggcgggcccctttatcggaaactgtgggccctattccgaggcgagaggaacgtgtccttggggggccgcgttggtttcaggccgggctctggtccagtggtgaaggggccctcttggccatgtggaaacaatttgggattaggcctataccctcgttcgagagtttggccgcttggaaacaagatcgtccttccattaccggttcaattttgaacactgttaaacccttgtgtttggccccattgagcacttccctagtcaggcccttttgccttgtcaacccctggtggggccacggcgaaagtcttgggcaacggcatagggggtactacaacctgggggcaatgtggaggccagaggcaaagggggctagaagtcaggcccgaggggcagctcagttcagcccaggcaggttgggggggggcaagaggtggcccacaaggtcacccaagatccccagggacccctggaaacgtgaaccctttgggtgaacatcgcactgggggaagtggcccttggtgtcagaccacagacgggagcagtagccggccagagtgttcacacggggggggcccagaagcgggaggggacccccaagagggaaggccgccaacagggaaaggccccgcaaggaaccctgagaggacacaggaaccagggtgtgccagagcccgccgcgggggggtgtgggggcgcctaccacgacgaaaacggacgggtggtccaagcggaggcccagcgggccatctccacacgggagcggggggaggggggaccgaaaggggcgccccccgagtggagagctatgcaggacccccacgaggacgcggcaaaggggtacccattcacctccacgggttgcagacaagcaggagacccgggtctacgaaaacacaggcggcctcgagggctggctcggaaacgagacacctgggtagtatcgaatgagggagaccggaaggagacgaagacccagtggaagcngtcggagtcaaagagacgggacgacgaagacagacagagagacgagcgagggcacgacacgaagcatcctcagcga

SEQ ID NO: 687493 - DNA, 106 bp, Homo sapiens
  misc_feature (99)..(99): n is a, c, g, or t
  misc_feature (105)..(105): n is a, c, g, or t
cctgacaccaatttcgcccacatgtatgcgggaagaggcctgagactagaagtcgttgccctgtccatctcccggccacaggcttcattcccagatttntcttgnt

SEQ ID NO: 687494 - DNA, 384 bp, Homo sapiens
tatgtatgtatatatatacatacatacacacacagtggaaaattataatcctgggagtgtgacgacatggatgaacctggagcacataatgttaagtgaaataggccaggcacagaaagataaatactacaggatcttacttatatgtgcaatataaaaaagttgaactcatagtagagaatagaatggtgattaccacgggctagacggggagagggaaagttggggaaatgttagtcaaagcatataaaatttcagacaggaagaataagttcaagagatctgttgtacaacatggtgactatagttaataacgatgtactatatacttgaaaattgctaagagtaggttttaagtgttcttactacataaaaaaatgaagt

SEQ ID NO: 687495 - DNA, 1808 bp, Homo sapiens
  misc_feature (1223)..(1223): n is a, c, g, or t
tacaaaaaaaaatagtgggattttattcccccttttataaaatccccaaaagataagtgtgtgccttgggtggcccctttctgtgaatttattagcttacattttcatttatgtgcccccttcttgtgctctcccttctccattttggcgctacgtgcggtgtcattctctgtgtgtgtcctcgcggcgtggtgcccctctaccaggaggttctccatatagtggggtgtgtgacacgaggggtttatatcttatatatattgtgtgtggtctcatgtgaaatattgtgagagagtttcacaactcactactcttgtggcatataaaaaatatgtggtcccacaccgtggaaatgtggggggttcacaactctttgtgtggccccctcagaaggatatcttgctttatgacaccaaaactccctcttattgtgtggagagggtgggtctccttgtgggctattaagagatatgtgtgagaagagaggcttttcacaccggggtatctgtgtgtggctcctctgtgctattaaaaactgctgtgtttatttcaagaccccagagtataaggagagctcctcacattatcctctatggggtagaaatatatcccgcgggtctatcacaaagtatctgtgggagaatcccccgaaagaaggaattttttgttgtgcgaaagaaatcttttctgagaaaaagctgttcttcacaccaaatctctcttttaaaacacagtggtcgcaaaagagtatatattccctatatataatacacatacgagggacgtatcgaaggaatcgttctccctgcgggttgtttctcccacaacatctataacctactacagaatctttttaaaacaagaaaactattatttctgggcgaacccggcggtgattcactgaagagtagtagtcacaaacaccacggcccttgtgtttaaatatgccccccaagcggacacttgatatgtaggggggggggcgaccacaagaaaagaagcagaggagggtagggaagaaccacaccacccaggagagatggtcctcgtagagggaagatacatatgttgggagaaacgcccaaacatcgccggcggtcgtaagaaacacgagcggaggtgtgaacaaaaaccccgcacgacgaccacatcaatctgctatataggagaaacagcaacaacaacacacagaggggcgcggggcagcgaacccactccaagangaacgatctatcccccccgctgaggagagggaggggccccgacaagaaagaaagaacagcgagtatcaaccgcacacagaggtgcatcgtctggtatcaacaagacagaggggtgtcaccccaaccaaaagtgagaggcaacggaatcaaaataaaagagcgaaaacaacagacagggcgcacgcactgccgatttaacacaccaagcgtccgaatcggcggggcgaaaaacacactgagcccacctgagacaacaatgtggggaggaagacaccacaaacacctggagggagggagacaaagaagtggggacaacccaaccacaaaagaaagatatcgacgcacggaggaagacaaaaaaaccacagagagaagacgtagatactaaagaaccaacacacgatgagatgaacaacaagcaaacgagaaagattgtgaaaactcacacgcagaccggaagcaaagagccactagaggcgggcgaggaggacggtgagtaagcagcgcacgtcagaccgacgactgaagcgtcactacgaccgagactagacagacacggaacgaagatagcgacaactacagaat

SEQ ID NO: 687496 - DNA, 150 bp, Homo sapiens
gtcacgattgtgtatgggcactgtacggcgctttactcgtaagtgtatgtgcatcatgaccctcatgactcactactggttacatgtcatatgatcacctggaatctggcccgagagagacggagtgctatggatcctccctttcggggg

SEQ ID NO: 687497 - DNA, 225 bp, Homo sapiens
gaaatttcaacaccacatgttctcactcacgcagaagctaaaaaaaaaagttgatcttatagaagtaaaaagtagaacagaggatactgcaggctgaaaagggtagggagaaaggaggaatagtaagagatttgttaatggatacaaaattacagctaggtaggagtaataagttctagtgttctatagtaccgtagatgactatagttaacaatactatattat

SEQ ID NO: 687498 - DNA, 411 bp, Homo sapiens
ttctataataatcattgcttatactggcttacagtgatttactggattaacaaaagctttttaatcagaactgggattggatctaataagaagactagaggcatgaccatttaggtaatctaaaaaatggatagaattttaaaaaattaatttcagggggcctttaaggtataaagggaaggaggctaaccaaattttaaaatcttggcacaaaaaaggataccggattttgcataatggtttattattaacctctctatgatcttttcgcttatcatttcagataagaccagttcccattcctggagaggtagatgaccatgaagatgttgaggatgtggaacttcagagtctgggttcgcgatatcaactgttggactcacttccccttgggttaccagtgcgtcttgt

SEQ ID NO: 687499 - DNA, 348 bp, Homo sapiens
tatgaggatccccgcacagctcgggtattttggttgggactgtaggctgctcataaatccttactgtcgtcactggtaagcaccctgacccgtttgattctatacccaatcaagaatagacccttcacacaggaaatgtgaacaattgttatatatgaacactcaaatcttttactgtaacgaaaccaagaaacttgtttagaatgtgataggcagctaaaactgttatgcccactgtgctcaatttgaagcagaattcagtgaaaaattatttttccacattgaaacactttgcagacacaaatatctatgaaaagatgctttgtcagccaccgtgcttatctcaat

SEQ ID NO: 687500 - DNA, 200 bp, Homo sapiens
gagacacttacggaatgggagcaattttgtatctacccctccacaagatctatatccagaacttacagaaacttaaacaatttaccagaaaaaaacatccccttaaaagtcagcaaaggatatgaacagacacttctcaaaagaagacatttatgttgggcccagaaaatattgaaaaaactccaacatcactgatccat

SEQ ID NO: 687501 - DNA, 250 bp, Homo sapiens
catacatatgagactgagcggatcaaagttttactacaagtctttatgatctttcaattaaatacactccaagacatcgagtttggcagatattgcgcccgccgttttgctcttcttatctttgtatccagccaagcctgaaaagtctctagacatttgcttgaaatttgatgagagcttgcacaggccgactgaaggatgccggacatgattctctgctttctggttcaacaaaaaaaaaaagttccag

SEQ ID NO: 687502 - DNA, 109 bp, Homo sapiens
caactgtcattttatttttacgttgttacattttgtgagttgtgtgattgaggtggagtaaattacagcctatgtagaagtagagagttataggaacggtagatggggc

SEQ ID NO: 687503 - DNA, 133 bp, Homo sapiens
gacgtagccacctgtaactcccagctcaccagtccaaacagggtgcagggtgtctggccctgaagaacctgagtggagtggaatgtgcactggttgtgccactcatgctcgagcgtggcgcacgtgcccctta

SEQ ID NO: 687504 - DNA, 106 bp, Homo sapiens
cgcgtggccgcctggtctagcatagggcagccgaccaatgggactttgagacaccaaggcagtatcatgagcaggaagaaacacctgacatgatggcagcccgcat

SEQ ID NO: 687505 - DNA, 212 bp, Homo sapiens
attcgcggccgcgtcgacggggcctcaccttgttacagctttcaatggcagcatagaaggcctgtattttcatatgacacatggccatgttgaggtgagaggcctgtcgaagggcctgtgctttctgtgctttcttattggaaaaactagactcatattccagccaagacacgcatcttattatactgtagtaaagcttgcttgtatttacc

SEQ ID NO: 687506 - DNA, 354 bp, Homo sapiens
  misc_feature (77)..(77): n is a, c, g, or t
atcaggtcacagggggtgcgtgacgcggcgatcattgccttgctgtacggcacaggcatgcgcccgccggagtcggncgacatcgacctcgaccaggtcgactttcaagcgcgcagcttgcaggtggtgggcaaggacaaccaccagttggtcaagtacgcaccgccgtgggcgttcgagaagatgcaagcctgtcttgacctgcgccgccaggacctgtctgccggggcggaagatgacccgtttctgttcaactcgatccggcgtgggaggcacattacccgagcgcgaattaccaagcgtgcgatttactatattttcccgcagcgctgtgcgctggttggggtttatatt

SEQ ID NO: 687507 - DNA, 441 bp, Homo sapiens
agtcagtccccccggcccccctcccagtccctgttggctttcggtagctttcgcatgcagttttattaacacccgtttagaaacgatgctttagtggcctaacccagggtcaaatacagctctttttagcaaaatcaggcagctttgccccctcggtaggggccccgattagttttctaacagccaaaggtccatttagcagggtgccgggaggagtttagcccccggaggtgggctcctggtgacgggtgtccaaaaaacggtttccttgggagcttttgcccccgtgggcctttcagccccccccgtgtggccgcccgggggtgggtcaaccatgtcccccccccaggtccttcattccccccccccccccccccagtggaattgtttaagtgtggggagtttgtgctcgggacaataaagcttgtggcgggtcccgga

SEQ ID NO: 687508 - DNA, 314 bp, Homo sapiens
atccagctgttgggcttttgagaacccaaaccaactgagggcagaagggatcccccacgcagacagctgctctaccaaaatgtggccagactgcctctccaagtggatccccaatccattcctcctcgcttgggcggcacctcccagccggggcctctagctacccactctggatatctcaggctgacagagatttgacatctccctgggaatggcgtgccctgatggaggcgtgggccgccatatttgaggtatgggcaacttagccatcccagcctttgggctttaaggagtcccagcaagcaagtggcagg

SEQ ID NO: 687509 - DNA, 258 bp, Homo sapiens
gttaaaccgtgctatactctgtgtttcctgacgtttgttccagtctcttctgtctctgggaagctcactggcatgatgctgtttggtttcagagcttcatgtgggttctctttttttttatctctctctgtctctcttttcatttcaacggcgatcatcctttcccggaggaagtatcttcagtgtcttagggaggtcacagcctgtcgtgcaatcaataattaaagtacaacagaaggtagtgcagttctcgctgtg

SEQ ID NO: 687510 - DNA, 209 bp, Homo sapiens
tcccttttacccagtaatgaggggcagggaagggaattgggaggcacccgtttagtcctccctgccctgcccactgcttggatggggggatgccacccctcatccttcacccagttttggcctttgggtccccccacccagccccccgtgtcagaacaatttttgttttgtacaatgggcctttttacaataaaccctcctgctcccca

SEQ ID NO: 687511 - DNA, 131 bp, Homo sapiens
cgacgcgaactctaatgaggttgcacacaggtgttatgatcatctgaagaattctccaggactggaggaaatgcttccacatggcttacttgcatacctgctggcaagagtcagttctctggctggtggat

SEQ ID NO: 687512 - DNA, 244 bp, Homo sapiens
tttttgggacaatgcctctgtcccaattctgagtaacagttgtggttcttgccactaccagagttctgtagcaaagatgagcatgtgatcagggtgaaaaattctgattggcttcttgatgcctgactttatgggatcaaattcaagttgcacgatgacattcagtgcccttgtggtatcatatgtcgcaagacgcagggcctgcttcaccacagccacaataaagtcctttcaagccctgcta

SEQ ID NO: 687513 - DNA, 370 bp, Homo sapiens
gaaggcatgtgaagacaggcggaaatggagtgatgtgttccttgaaaatggaaccaagcaacatcaaggagagaggcctggaagagattctccctcacagcccccagaaggaactggctctgtggacaccttttcagacttctggcctcctgagctacagagaatcgattcctgttcttttaagccctcccatttgtggtagtttgtcacagcggccacaggaagcgaatgccctgagctctgcagtgcaactctggcatctgactgggcctctgagccgggatggggtgaaaagttttagctacaggatgattttgatgcaaagatttagacacaaatgccaggcaacccagaagaggagagtgctgcg

SEQ ID NO: 687514 - DNA, 1213 bp, Homo sapiens
cggcgcgcgaaccagttgcggcgcagggctcgctcctgaggcttccagtgatccaccgatcttcgcgtgactggaggcgtcgtcacaaagatggcgctcgttgactaggcttccagagtgtccatgtgccctacgatctgctgcgcctctgaggcgggagtccgggcgacacatacggtcgtgcagctgcggggtcatgggcgttgcgtggcctgcctgtgtggaggtctgtgctgttgttcgcgtatcctcttcgctgcctgcagtcgtgtgtatcggctcctgactcatggattctggattacaccgtcttggtgctaagcacaatctgagggggagggatcaactccagatgtcctcatggctcatcacaggagcccttcctgtctttgttgcagttacatctcagatccagtacctatgtgctcgtacaaccccatctgtcaatgcggagggagcacggacgtttgttggcatattaagggcagttatccctttgaaaagaccgaatgaagttagcaacgcccttactatagggctaggtgggtcaaggtctgagtatgtgattcgggaccggacggccaagtgggaacaccaagaggaatggtttccccattgtaggcgttgatcccccgaaaagccgccaatgcaaggaagagataacgcacttgcggggggttggtcccttttcttggtgcgttgaagaacaattgttaccgggttagccggaatagttgctcgcattgcggcgatcgtgtgccagttgccttgcaggaaactatgacaggcacaagaatggcatagcactccaagggggccctggttgggggtttgataaaccgaaacttctcttgttgggccaagactttgacgacttccacttattgcctagaagtaccaggatgacttgggggttcctcaaggcaacctcccagtaaacaggtaagttcgcctaggttggaaaaggcgctaggcttcggataattaccttacgaaattgagaggaaccacagctttgtgacggttgcacttggggcgggaagcccagaggaaagcccccgttgttaacgttggtgtgggcaattcaagtagccattgtgacggcatgggttggacccccgttgaaccacgttggaacaggcttggtttaagccattaaggacagggcttggattccgattagaataagatctcccgtttagaaacccaattt

SEQ ID NO: 687515 - DNA, 529 bp, Homo sapiens
taagggaggtgaatgtgattggtaagcagggtgccagcatgctgtatagagacagaaacaatttcttaggacttgcacccatatccatccaaaaaaaaaaaaggcgtgattagcccatccccattttatgggttctgaagcatttattgaccataggtttagtttatattttccacgggcgcctagtttgaccagcgctaaaagctcgatccatggagtatgtagctacaactgtaacaaacctgacatatgtccttgacctttcatacaatcgtgaccacaatccagtggctggattcaccactctccttgggtttatacaacgctgaaggacaggagactgaatagtactacgaacgtggctcccaacttttctggaatttccaactgccctattgttgtacccaccccaaacaccaaggggggaaaaacaaacccacacagaacgggggaggagaaaaaatatcctttttacacgccaccaaaaaaaaaataacacaaaacaaaacaaaacagcaactccttctta

SEQ ID NO: 687516 - DNA, 174 bp, Homo sapiens
ggtcaagcctctatgccatcgcgtctctctagagcatcttctacatgaagtgacatacttaactgatagttaaaaggaagtttccagaaaagaagttaacatgctaactcttgaagtcacaccacggcgacaactctgtagtgaatcgagcactattgacacatgcacagagga

SEQ ID NO: 687517 - DNA, 139 bp, Homo sapiens
agacgctccacccaaggatgatgagatggaaacagatagcaggagaagaaagaagtccctaagtgtggatttctcccttggaatgagaaagtcctgtccctgctggccctggttaagcagggtacaggactttctcatt

SEQ ID NO: 687518 - DNA, 1299 bp, Homo sapiens
gcagggccagtaggcagccatggctgcccagccggaatggactatggtcttgaataccccgacgttccgacaaggacatgtggcagacggcggacgtggccacgttgtgttcaagccaagtccgggcacctgtaagatccgcaagacggtaaggcccgggaatgccaaggtctgcgccgcatcgcctccgtggaccccgacgttcgggtcaccgatccagggccacatcggtatgctgctagtccacaacggttacgggtgaccgacaacagtaagggtagcggctgaccaggactgctgtgtttctagcacttggtacggagctctagtggtgggccagggcaattcagacaaggcacagtgtcgtgcgccggtgatcgcaagttcgagagctagcttgtcaatggtggaattcgcagactgggaatgtggctgtgaaaactagatcgtacccactgtgactggtcgctctttgctaatagaacccataactgttggctagggcggagccatgataccgcggagagtaaccgtgcttcccagagacattcattcctttcggtatactccctcatgtgcatatggccccttacggtacgccctccatacgaaacgtgggaggaccacgtttgcttgcctttggagagaaaatcttggaaaagctatgggcacaaccccaatgtgcttggaccctgggaccctgtgtccatttgccgctggtcccgggaacacgggtgctaactaaccagaacaggggacacgaaaagggcctccggaaggtccagtacaacttgagcgcgacacggaggaaatggacactttttccacaaaatgccctttcggctaaggtccttcccggtagatttgggcccctgttggcccgagaacgcccctgggcatcctttctgggcattaactgggggcgaagaaaagaggcccacatgtgaaatgcccccctgagacagaccaccactgcagatttgtttgttcgacaacaccctgagcagcacaacacttaaagacggcgccctttcccttaggggtgctgaacctgttgggtggacgattccaaacacactgaccaaaccacactctaacagagacacctcctgcgagggagagagatcacaaaatgagacgccgcgagagtggccgagaagaacacacaagtgctgatcaggagcaactttgggcgccacagttggcgccaaatcaacgcatagtgtctcctccggcagaccccaggacgttattctttttggtgtcacaccagctgtgtggcagcacatctagccgcgg

SEQ ID NO: 687519 - DNA, 662 bp, Homo sapiens
  misc_feature (15)..(15): n is a, c, g, or t
  misc_feature (65)..(65): n is a, c, g, or t
  misc_feature (68)..(70): n is a, c, g, or t
  misc_feature (73)..(73): n is a, c, g, or t
  misc_feature (109)..(110): n is a, c, g, or t
  misc_feature (112)..(112): n is a, c, g, or t
  misc_feature (114)..(115): n is a, c, g, or t
  misc_feature (140)..(140): n is a, c, g, or t
  misc_feature (143)..(143): n is a, c, g, or t
  misc_feature (147)..(147): n is a, c, g, or t
  misc_feature (162)..(164): n is a, c, g, or t
  misc_feature (169)..(169): n is a, c, g, or t
  misc_feature (173)..(174): n is a, c, g, or t
  misc_feature (178)..(178): n is a, c, g, or t
  misc_feature (180)..(180): n is a, c, g, or t
  misc_feature (182)..(182): n is a, c, g, or t
  misc_feature (186)..(186): n is a, c, g, or t
  misc_feature (190)..(190): n is a, c, g, or t
  misc_feature (192)..(192): n is a, c, g, or t
  misc_feature (198)..(198): n is a, c, g, or t
  misc_feature (200)..(201): n is a, c, g, or t
  misc_feature (239)..(239): n is a, c, g, or t
  misc_feature (267)..(267): n is a, c, g, or t
  misc_feature (518)..(518): n is a, c, g, or t
  misc_feature (537)..(537): n is a, c, g, or t
  misc_feature (546)..(546): n is a, c, g, or t
  misc_feature (655)..(655): n is a, c, g, or t
atcaccacaagaagntttaattaggaaatcaaaactttaaactttccctaaacatgaacatcaantgnnnatngcggaatatacaagtcacccgtcatccttcaaactnncngnnaaactactctctcttatttcatttnggntttnctagggagtattttnnnaggcncttnnaaangngnggcngggngnttgggngnncagaaatgcaattacttacatacaatatgatgagaagngtttcatgatatacaaattgacataggncaagttattaacatagtacaagtttttactgtgtagaaaaaataaacttacagtgaataaataaacagctttctatatcaagttatgtatggggtataaaaagtagttactatatatatatacatatacatatatatataaatgtgcatgttctagagtataaatatactatatacttaaatatttcacgtggcagaacattatttcatctggtttcagttttgtacattaaaatacatctggcagttggngtctcccctgatctctggngacccaggnatcctcttcccattccaagggtagacgctccagcagaatcccgcctctccatccatggatgtcccacactgtctgctgtgataaaatccattcttgttgcagtttgganggaaaaa

SEQ ID NO: 687520 - DNA, 982 bp, Homo sapiens
  misc_feature (54)..(54): n is a, c, g, or t
  misc_feature (247)..(247): n is a, c, g, or t
  misc_feature (352)..(352): n is a, c, g, or t
  misc_feature (384)..(384): n is a, c, g, or t
  misc_feature (386)..(386): n is a, c, g, or t
  misc_feature (404)..(404): n is a, c, g, or t
  misc_feature (419)..(419): n is a, c, g, or t
  misc_feature (429)..(429): n is a, c, g, or t
  misc_feature (436)..(436): n is a, c, g, or t
gggggacgtgcttggcagcgggacgcaccatttcagttgtgttcttggttcatntcgtgtctcggcgatgtttcctagagtctcgacgttcctacctcttcgccccctttcccgccaccctttgtcctctggaagcccggagacatcagcggctgcgattatgctactcactgttcggcacggaacagtcaggtaccgcagttcagcgctgttggcccggacaaaaaataacatccaaagatatttnggcactaacagtggtgatctgtagcaaggaaagataagcagtctgttcgaactgaggagacttccaaggagacttcagagagccaagacagtgacaagggaaacntacgacacaaaagacttgtacaggcattattnangggcatgacacgttgaanttaagcacagtacantgtacgaacnaataaangccccccaaaagaagaccacttaacacagttgggaagcttacactttggcaggcttcgaagagctacagaatatgctccaaagaagagaattggagccctgagtcctgagcttggtggcagctgcatctgctgtgggcagattctctccctttggataggcaacacagccaaggtcagagctgctgagccagctccagcagcactgacggacgacgtcacgcggcacagagagactgcatcatcgatctcaccttagtttcacgtacacctacttctcccatctcgccagttgcccgatctgcttaacgtcacgagtccgtcacgaccagaagcctgtccggaatcctcagcttggccgtacaggtactgacgacacgtgattcttggctccgtggagacacacctgagtgccttttacccacgggacacaatactttctccgggcaccaacgcacttaatactctgtggaatggatggctggtcactacatagaaagcctggaaaactaggatacaatcaccctgtccttgtggcctgtcgcatc

SEQ ID NO: 687521 - DNA, 295 bp, Homo sapiens
atgtaggcataaatttacctccttgatattctgcgtagaaaattttaaatgatcgactttagcattccatatcatggtatcttaattattaagcccaaattggcatgtaattcctgcttaaagattaactctttaattatcaatgtcatgtgagaggcagaagagaaaatgaagcttattggtgtatacagaagtcccatgtgggcaagtgtttgcttttctaacattttctttttaaaaaattatttttattgggatattgacaagttataattgtatgtatttatggggatac

SEQ ID NO: 687522 - DNA, 853 bp, Homo sapiens
  misc_feature (502)..(502): n is a, c, g, or t
gttgtccttcgagcgtcccggctgtaccaaatggagcctgaagagttcggcgcagattactggggtctccacagctgagcgcaggttggtcatgatcattagggttcctgctcggcatggcggcgacgctgatcctggagcctgcgggccgctgctgctgggacgaaccggtgctaatcgccgtgcgcggcctagccccggagcagccggatcacgcatgccgccgcggtccctggccgcgaactacgcaatgggcgcgcattttccagtgcccacgcgtcgctacctgggccgactactcttggcggagctggtaccctggtatcgcgcgccctgcgcttgggcggcagcttcgtcggggcttgtagcccatggggcgtgctctgggtccgtttagggaggccccggaagtaaaatccgttttgagtcgacgcgtcctgggatttggaaaggccgccggaacggtattccgcatatctggcttcacctattgggacccccntttggcgaaggtcataggggaagtgcttgcccttgggggtaatttgggccacaaacggaatacccacccaggaagacccccctggtggaggcggtggccctgcgctttggttggctcgcgagggaaccggtccgttggcaatcggggaatgtcaggcctattatccttgtttccagttcccgccggtcctcgggcgaggggtattcgccttggggccagggcctgggaaagaccccagggggggtttggccgcgggtcttggtctttggcggagcgcccccgggtcgggtttgccaggaggggggcgaaccgggccgtctgtttccccttggcccctgttgcccagggaac

SEQ ID NO: 687523 - DNA, 706 bp, Homo sapiens
ggaaggtctccatagaaggttcccccagcaaagtagggaggggtactccccgagaggagtcgaggtgccggagcctgctgcctcgccgacgctgggaggagccccgtgtcccgcacgcgcttgccaagggtggctgcgcgtgcggcgggagtagaggcgcctgcgcacaggaagtgactgttccccgccgcagcaaaccaggccatccgctggccttttagattgccgactcaggtggatttcagtgtgttctctggatggcaggccttaagagaagagtcccactgcacagtctcagatacttcatctccatggctggctgatgttgtgacacgcactcttggggaggggttgaggccctaatggaaaggaaaccaggtcgtccaaggggtgggaaacaatttgttggcgaggttcagagaggaaaatttttacacaagactagaagtcttagcatccaaagtgctcaagtggagtcagtgtgacaagcggcatgtagcccaaatctgagaggctctcttgtacttcatccatcctattatacacctctcctgtcatcaatggttaccgaaataagtccaccttctctgtgaaccgaggtccagatggcaatccacagactgtggggttctacctgggaacttggagagatgggacccgtgtctgtgtgcagtctaatcatctgaaaaacattcctgagaaacaa

SEQ ID NO: 687524 - DNA, 152 bp, Homo sapiens
ctgtcacggaaggctgagggatggggcggtgggacccaggccatcaggagcgtggtgcaccgagttctcaaagaccttgtctgcctggccttcctgtctggcctccaggtggcaccagatctccacccagtgcgtgatcacccctctcccca

SEQ ID NO: 687525 - DNA, 430 bp, Homo sapiens
cccacggctcctccttatgactccattcaaatctacggttatgaaggcaggggctcagtggccgggtccctgagctccctagagtcggccaccacagattcagacttggactatgattatctacagaactggggacctcgttttaagaaactagcagatttgtatggttccaaagacacttttgatgacgattcttaacaataacgatacaaattgggccttaagaactgtgtcgggcgttctcagaaatctggaggatgttaaaacgggtatttttttaatccagggaagggctcatttaaacaggccaagttttaccaggggggtacctttaaataaaactgcgaggccttcaaagggttaataactgggaattccctttcttaccaaaaggccaattatgaagttggttatcaacctccctaggaaa

SEQ ID NO: 687526 - DNA, 114 bp, Homo sapiens
gttcaagtgattctcctgtctctactgaaagtacaaaagttggctgggcttggtggtgtgtgcttttagtcccagctacccaggaggatgaggcaggagaatcgctggaatccg

SEQ ID NO: 687527 - DNA, 524 bp, Homo sapiens
  misc_feature (68)..(68): n is a, c, g, or t
  misc_feature (72)..(72): n is a, c, g, or t
  misc_feature (129)..(129): n is a, c, g, or t
  misc_feature (205)..(205): n is a, c, g, or t
  misc_feature (219)..(219): n is a, c, g, or t
  misc_feature (247)..(247): n is a, c, g, or t
  misc_feature (274)..(274): n is a, c, g, or t
  misc_feature (499)..(499): n is a, c, g, or t
  misc_feature (504)..(504): n is a, c, g, or t
gcagccggttttcgaggcgggcgccgagcggatccgcggcggaggttgagggacccccctcccccggncacngcctccgctgagtctgccccctccccatccgcagggctcttccgtgggcggcggctntcgagggcttggagttcgcagacggccgcaggagtcggagccgcagggaccatcggacctgggggccccaccggancgtggacgaggggncggcggacaggggccccggactccgtcnggcagcacatccccgatcccagcgcangagagccaccccaggaaaagccccggcatggacgaggtcatggctgccgactgccccttacaagcctgtccacacagcaccgtctccattcatgggggccccgagttgcagccttcagacccagagcctggcctggagccctggaatggaggccctggtgcaggccccaggcagatacagcagcagcacgcaacagtgagagactggggatgggacactggccanatgancagtccatctccggacagcg

SEQ ID NO: 687528 - DNA, 664 bp, Homo sapiens
tagtacgggtataccaagggttgtatcgaggctagtaaaagcacagttgtaagagagattccttcttctttggtccagtttcccttatgggagtccttaaaagccctctggtcatcggaggcaggatcatgtggtgcgattcttggcagtcagcagtctgtggagcttttgcaggtggatttgccgctgcagtcaccacccctctagacgtggcaaagacaagaattatgctggcaaaggctggctccagcacatgctgatgggaatcgtagctctctgtcctgcatggggtctaggcggtcaacaggggctggcaggattattcgcaggtgtcttccctcagaatggcagccatcagtctgggaggtttcgatctttcgtgggggcttagtgaccgaatcgcacagcttgctgattggaagttggcagaaagtagtccttgaagcatgagactaagcacatcaccgtccactatctgtacaagagtaggggcactgacagtgacaaacccttttccgctgagcagctgtctgaacatataggccccagtgactgaagaccatgttgtgctcaagatagccggcatggagattgtgccatgccgtggtaataggctggctggtatgaagtcattggcctgtatgccagagagctaagagaatat

SEQ ID NO: 687529 - DNA, 117 bp, Homo sapiens
caaatacagtgcaagtcggtagagatagcgcagaaacatagcttataggcatagaggccaagcaatcaaatagtccacaaactcattcttcacacaaacatttaaaacactatgcag

SEQ ID NO: 687530 - DNA, 535 bp, Homo sapiens
ctagggtggtactggaggtaacgtgtgtcatacagctgctgcaggcagaaggggcttacttggtcaccgagtatctgtcattgtcatcactatatcatgaaagcacagttctcagttaggtacacaatgacctacattcagccaaaaagggcagtgctagtgtaaacagtatgaaacatgaaaccaacggtgcatagctgacctcagtgacaacatagcgaatgagtgaaatgtcagctgtccagcttctccgagacacgtttcggatgtaactgaccacaggaagtacataacctcgactcagcaggtgaaccatcctgtccagcagtgtcttcttcaactcaagctgctccatcacgtccagctgggagtgctcagtctcaaaaagcttaacaagcagctgcaggacctgggggtgcaggagctggtggcaggtgctgatctcatccagcaacgccaggtgggccaggcgtatggtcagtctgcagctgaaagtaccttggttctgatacagtccaatccacccacttcagca

SEQ ID NO: 687531 - DNA, 142 bp, Homo sapiens
aggcatggacaggtcgtagaaggcctagcccgggggacatataaactcccgcgatctggcggtagtagcgcagagggttggagctgttgattcggggtgcctcccagccactcactgtcccgtccacacctgtctgcgctcc

SEQ ID NO: 687532 - DNA, 457 bp, Homo sapiens
  misc_feature (2)..(2): n is a, c, g, or t
  misc_feature (4)..(4): n is a, c, g, or t
  misc_feature (272)..(272): n is a, c, g, or t
  misc_feature (299)..(299): n is a, c, g, or t
  misc_feature (302)..(302): n is a, c, g, or t
  misc_feature (311)..(311): n is a, c, g, or t
  misc_feature (320)..(320): n is a, c, g, or t
  misc_feature (344)..(344): n is a, c, g, or t
  misc_feature (358)..(358): n is a, c, g, or t
  misc_feature (364)..(364): n is a, c, g, or t
  misc_feature (367)..(367): n is a, c, g, or t
  misc_feature (402)..(402): n is a, c, g, or t
tncnggaaatcctccaaggactcttgtcagctgtgttggaggccaaagccagcttagtgggacttccgcgtctctccctagtcttatcccctttggatgatggaagaaacttcatgaaccagccctttctcagagccagtgatgtgagtgtatcagaatgccagggagggcaccagccctgatccacagacctcggaaagatgcccctgttcctttgttgcgggtggtttgggtaaggcagagccctctgctgagaatgtagtattgttttncccctctccctcctgctttcttttggnggntccttgggntaaaaaganatggaagtggttcacagttttctnatactgtgaatgtngggaanatntccgtggcctacacctctccaggtacccttttccnacaacagaaggaggggctcagctaagtgctccccctagctcccatctcaggagac

SEQ ID NO: 687533 - DNA, 172 bp, Homo sapiens
agtctcgaagcttttatccaaataggaatgggagggcaagacagtgactgcggataggtaggcgtggggacgtggcttgggagttaggaaccccaacctggtttcatgaccgctctctacacctcgtctagacctctgtatccctctatctgtcttatgcatcctcttccat

SEQ ID NO: 687534 - DNA, 129 bp, Homo sapiens
ccctttttttttggggggggggggggggggggcccccccccccttttttccctccccccccggggttttcctaaaaaaaggggggtttgggtttttggggggggcccccctttttttttccccccccca

SEQ ID NO: 687535 - DNA, 347 bp, Homo sapiens
gctacttggtgccaaaaatcatgttgtttgggatggaaatgcctgcctcttgtctgtgtgtgttggacttatatgtctaaatggatgagcctggcatgaacaccagtgggcctgggtcatttggacaatctcctccccccccccaatcccctgcaactttgctgttcccccattacccttggcagggggtggtggggggcagggaccccctgaggcaatgaaaaatgtagaataaaaatgagtgcccccccctaacctagtttgagtttttatgtgtaaagatcataaaacgttgtaagttttttaaaacccataagctctcaataaacgttagcttatcattgtca

SEQ ID NO: 687536 - DNA, 190 bp, Homo sapiens
tcgcagtactagggaggctgaggaggagaatcacttgaactcaggaggcggaggttgcactagagccgagatcgtgcgcactgcgatcccacaggccaaagatccctgtgcagctccgatattatatcgcatcctatgtgagacaaggtgagagccgaggggtaccgatgctcggatattcgtatatcag

SEQ ID NO: 687537 - DNA, 157 bp, Homo sapiens
acatctacagatccccgggatgtcacagaattcttccctccactccatccctccctcccgtccttcccctcttcttctttccttccatcaaaagattattctaattcatagctaaaattcagtgtgctttgtctagatgctgtgactaggtatgcca

SEQ ID NO: 687538 - DNA, 130 bp, Homo sapiens
  misc_feature (94)..(94): n is a, c, g, or t
atgtgcacgttaggttcacttgtgtgtctacgtggtctcacgtgtgggtgtgtgtgtgtatgtaccctgcaggtggaatagtgtcctttccagngcgggtgcccgcctggtactgagctgccagaatagg

SEQ ID NO: 687539 - DNA, 432 bp, Homo sapiens
tcgccggtccgcacggggcttcgcgttgctgggactactggtgtgcgcatcacacccggctaatttttatatttctggtagagacagagttccaccatgttggccaggctggtctctaactcctggactcaagtgatccacccgcctcagcctcccaaaagtgctggaattacaggtgtgagccactgcgcccagccctgttcctgtctttatgtagatccacagttccgacctatgtgattttcgtctctgaagaacttctttaaacatctttacccaagtcagacctacgtggcaactctaaagccccaagcgataatgaacagcgatcagtcttattccttctaggaatcactagtatatagctcacacctcatatcctccctactatgcaaagaaggactcataccatcgctgtacataatagcaaca

SEQ ID NO: 687540 - DNA, 395 bp, Homo sapiens
cgcgtcgacccagtcagttcacctttggcaaaaccccctggttcgttatagttgtcacctgaccagattccacgtgcccgttgcggacagcccacagtgtgaaggtcgccgacccgcgtcccagtgtttctagtttctagtcgcaacttcccggtggcccccttcactaatgccgaaaccacttctaaaggcggattcatacttacgccatgctgacagcggtcgaggtgacagcgccaagcgaagatcaaaagctaaaatagggtgagttaattatttttctcaaacttttgaagaatctgtcgcaacacgtttaaacaggtggggcattggaaacccaatcctgatctgaacgtatacgtctgtacatagacgtcgagatcaaacgtcgacgc

SEQ ID NO: 687541 - DNA, 94 bp, Homo sapiens
catttttttattaaggtgacttttacagttttttttttctttaaatgagacacctgcactccagcctgtgggcgacaagagtgaaactgtctca

SEQ ID NO: 687542 - DNA, 1270 bp, Homo sapiens
ggaacaccaagtaggcccgtatggctgcagcagacgtgtggagcggtgagagtgggaggagggaagggcaaggagagtacggggccagtcatgcagggcctctgtgggctgcagtgaggatttgagcttcgacccccatgggaggtgggatgccatgtgcagggctgcgtggagagcaggacgggacatggacctgactcattggtgcccctctgtgtgggcagctttgcgggcaagacagagcgggtgtgcgacggctggcaacttgagtgaccagtgtcctgggtaactaactttgactggcgggcctggcccaagtgcaacggcgtacactacgacgcgcgggggcaacacgctgcgactcggactacgcgcgggacacgaatcttcctgcgcgctccacccacaagcagaaaacctattggcctgacggacttgcgcatgtttgacaggatgcggcttgacacacgcgcccccttttaccttcttgggccgtggcccacgggtgcgcagctgccttgctggggcttacaaccaggctggccaagcccgctccttgggaaccttcccgttggcggtgcccccctggggctttccctcgcatctcccccatgccttttgggccccacttctccttggggcgcttggctggcggaccccctctggtgcccccccaagttcccccgtctggcccaccgaactcacctggtgcgcccccggggaccgcgtttctccccccaccaagccatcacctgacgcaaacctggaggtccagcaccaagaactgcccacccgtggtatggacccctaccgcccacaggccctgcagagacactccaacgcatcgacgacggcaaaccagacgcgccccgggcgccaaaccccacctgagcgcagacacggagggcacacccccctctcgcttaaaaaccatcgttcaatacggcaccacgctcacgtcccaccactcattcctcgcaaacacgaacgcacccagagatccctctcccgacgcgcctccactagcaacaaaccccatccgtccaagcagctccaccacaattatccacgccactataccaccagcaccattcccctctgcacccaattcaacacccaataccaaacccatgccactcacccccaattaacaaccctccaaaaacaccctgatcccacccaccacgttctgacacgacactactcaagaccccacactccactcaaaaccacccaaaagcaccactcactacactcaaccaccaccccc

SEQ ID NO: 687543 - DNA, 328 bp, Homo sapiens
tccttcatcatactaccccctctctaccaaaaatacaaaaaattagctggcgatggtggcatgaacacgtggtcctagctactagggaccgacctgagtctgggaggtcgagtctgcagtgggctgagattgtgccactcatgccaagcctgggtgacagagaccctgtctcagaaaaaagatgcatacgtacatatattgatgacatggctttctaaaattttctttaaattattaccactttaagctgtgagatggaagtttcttactatttgatggataagtcttagtatcactttcttgtaataggtaggtattatgcaggacg

SEQ ID NO: 687544 - DNA, 634 bp, Homo sapiens
  misc_feature (179)..(179): n is a, c, g, or t
cttttgccagctctataccgatcccccacaggaaagttacaccagctatcacagtcctggtcgccaccactgtaatctgatgatcgatatccagaaagacactgcggtggaaggtgaggagattgaagtcaactgcactgctatggcgcagccacagccagactcacagactatcaggntggttcgaacagggaatcacagagctaaaaggcaaatcggaggtggcaagagtggtcagacatgtacactgtgaccagtcagctgatgctgaaggtgcacaaggaggacgatggggtcccagtgatctgccaggtggagcactcctgcgggtcactggaaacctgcagacccagcgggtatctagagagtacaggtataagcctcaagtgcacatgtcagactgacttatcctcgtagcaaggcttaagcccgggaaggggacgcgctatgagttaacgatgtgaagccagtcgggaagccccagcctgtgatggtagacttgcggtgagaagtcgatgattgaaattgcctcaacacgccgtactggtctgggcccaagctgctcatcaactaacctaaacgaaaccagatcatggtacataccgtctgttgaagcttcaacacatagtgggga

SEQ ID NO: 687545 - DNA, 84 bp, Homo sapiens
ctagaagattcagcaaagtacttttgtgctcttggggaaagggactgggggatgcggagctcctgggacacccgacagatgttt

SEQ ID NO: 687546 - DNA, 139 bp, Homo sapiens
cgttcaaataaaatccacacactatcaaactatgatcaagatgagccagtggataaaattaccataaatataccgtactctctctgaagacagctacaagacatcttaggttttgcaaaagtatacatatgtttgctca

SEQ ID NO: 687547 - DNA, 206 bp, Homo sapiens
tcgctctacgaggatcccctccataatgtgtgcaccaatcatataataatgctcactttattttttttttggaaacaggtctcacttggtcacttaggcgggagtacaggggcatgatcaaggttcagggcagcctcaacctcccaggctcccatctcagccccccaagtagctggaattacgggtgtgcacaccacttggcccaa

SEQ ID NO: 687548 - DNA, 134 bp, Homo sapiens
cacaatcatagcatttattacacgatttacatctgatcctcacgcaattttcttcctcaccaataaagaactaataggacagcatattagaagcaacatacattcttttattcttgcatcgctataaagaagta

SEQ ID NO: 687549 - DNA, 437 bp, Homo sapiens
gctcggtttcctccactagtgcaggcgtcagcctcgaagcagtagaagaaactcaccggattaaaagccaggccccaactgcgggcctgggtcagcaggcagatagcgccctggggcgtatgccccagggccttgccgacttcctggcgcacggcatcgctcaggctcatgccgtggcgtgtgaattcacgcaggtaatcctgctggcggaaaccgaagggcgccaggcgccccgtgccggccagcggcgagagccccagtacttcatcctcttcactgaggtccaggtacaacaggccgatgcggtagcgaaaggcgtgggccttgggcgtaaaccggcgatgggcgatccagccgctgtagagggcgctgttcacagggtttccccaaacgcctgggccacgcgcagagcgctgaccacgccgtcttcgtgaaag

SEQ ID NO: 687550 - DNA, 446 bp, Homo sapiens
  misc_feature (347)..(347): n is a, c, g, or t
  misc_feature (356)..(356): n is a, c, g, or t
  misc_feature (401)..(401): n is a, c, g, or t
  misc_feature (442)..(442): n is a, c, g, or t
agaccacttggctccctggctttacccttttccaggggagtgaatggttctgtctcactggcattccaagtgcaactggattatgaaaaaaaactactcagtgtctgcccaaatggctgcccagttttgtgttggaaacccaggaccctggtggtgtaggcactggagggaatctcctgatctgcgggttgtgaagacagtgggaaaagctcagtatctgggccagagtgcatggtacagtccctaatgacttcccttggctaggagagggagttccctgacgccttgcacttcctggggtgaggtaacaccctaaccctgttttggcttcaccctccttgggctgncatccactnttccaaccagtcccagttgagatgaaccagggttaccttcagttnggaaatggcagaatttacccacctttttggcattgattttnaatg

SEQ ID NO: 687551 - DNA, 174 bp, Homo sapiens
tatgctatacaccgtccccagtcagaaatcacggacttcatgtccttctctggggattccataaatttggataactgctcttcctctagcagtgccaggtcgtctgctggggtctgcatccgtaccaggagtcaaacaatttaaagtaaacaaggctaaatgtggtggtatcag

SEQ ID NO: 687552 - DNA, 416 bp, Homo sapiens
  misc_feature (26)..(26): n is a, c, g, or t
ctcataaaattaggaataatcattanagtaaaaaagaatgtgctttaagaactaagcctaagcctcagaccttgtctaagcttaatgtaaattaagatttcctgggctgtttcagtcacctgcaggccagagtagactaagatttatgtaactaaccaattaatgcagatgttccgactttcacattaggcagtcacattaaagtaaacccttttgatccaatctttccttcactaaatctcaaaaggcccctaaagtgatctctacccacatatccatttcactattaatacaatttgcatttaacctacatttatgcaaggtatatttcagaataagtctttcataaaatgtataaacattaaataagtagcaaaagtggtcagactaaaatacatgtaacacaaatagacaaa

SEQ ID NO: 687553 - DNA, 860 bp, Homo sapiens
tggcggtgctggtggtggctgctgctggagaccctggtccagacgcctgtgctgtgcctgcctgtgcacacaatggcgctttctagctccctcccccgaagcgcacatgccctgcctccttcctgctggctgcctgcaagtgtgcagtgcttgctctgccctacctgtgactgctgctcctgtgatgactgctcattgctgtgtgtccttgtgacacctgtgtgtcctgctgtgctgtagtgtgtgactgacatgactgtgatgggctgaactgccattctgttgtaggcctggtcctgctgatgccatctgtactggggctggcaagtcctcgtcccctgtgcttgtgccctccctttctcctgtggggcagttctgccagccctgcttcccgttgggcttgaggacggaacgcggggttcggtctgcctccctttgccccttgtgacccggtctgctacggaagctcagggtttgtgacggtttgctgtgcatgtctggccactagcttgacgttgtgaagaccagaaaattgttcagctacaatgttgttgccaatgagtgaagcactggaaaagttctccagggggcccgaggccatgctggtgctcgccaatattaaagcattctaattctatggtttccaacaagaatggttcctacacttaaacggcctggaacaagctgtgaccatacaaggtacaacacttgaaaattcattataacatggccaatgcaagacctgttctctattcaactttgaaacagtaccctatcttacccgattgtccctggaaagtaagtgaaacttaccccttttgtgcacaccgaggacaagatggctgagagtgccattcgag

SEQ ID NO: 687554 - DNA, 621 bp, Homo sapiens
ttctgcgagcgtgtcggtgccccctgcccggggcctcctgaagaggcggctgctcagacagcactactgattattctagcagatggacgatctgatgaaataccagtgcaacaagactcacagatttagtatgtgcttgtattcacgcaagtgaagaaacagtcgtcatacaatgctgcctagtcgtatagtgttggcattcgccattcgcagtctggaccgacgaagagcccgatggtaacttctgctgtgtaatggagacacggaatgtggccccttcaggagaggtatttgcgaagctcttcatcttgtgagctgacaggttctggatcctgtgaacaaccatgctgaaactgtggtaataagatctcctaatggacataagtgagctatccaaagatcagagtgacagttacccgaggatcagcacacgcagagtcctgccttccgtttggagtatggtccagttggatgatgttccatgtacacttgacaagaatgcatattctgcatgttgttgggtagaagtgacgcatagaattgtcgagttatcactgttgaagctcagaaggctgtaatagaagaccaggtgggcgtcgccataggaaaggtaatccagag

SEQ ID NO: 687555 - DNA, 134 bp, Homo sapiens
taaactgaattttttttaaaaatccctttcccccccaggtttgcctttgtttgctgaaatttccccttttttagttatatatatgtgtgtgtgtgtgtgtaatttctccccataaatttttaattccaaaggta

SEQ ID NO: 687556 - DNA, 212 bp, Homo sapiens
aaacgacccgaagactgcaggtcagggttaagatatagggagaaacagaatgcaaaactgtgttatgattacagttgtttagaaacatgtctgcttacaggcaggccctggaagggaagattaaaaacagttgatttgcttcagtgatgggattaggagtgattaaagcaacatttctgttatggttttacagtgtggtcttcgggtcgttt

SEQ ID NO: 687557 - DNA, 853 bp, Homo sapiens
aagactttgggaggccgaggcgcactgatcacccaaggtcagaagttcgagaacagcctggccaacattggcgaaaccccatctctactaaaaatacaaaccattagctggctgcggtggcctttctaccagcttttgtctcaaaaaaaaaaaaaaaaaaagggtactttgggttatcttttaacctttcctctttccccatataatttataacagtgtggcccatatacatattcggggttacctcgtggagcatacttcttcgtggccccatttcctccttcctctcttaatcttcgagtttcctctcctataggcgggtcagaagccattctgtggaaagtgaaaaacatttatagggccggggcaataggggggtccaatggcctggataattcccaggaccactttgggagaggcgctggaggcgcaggcgcggagactcagctgagaagggccaagggagtttcagagaacccaccctgggggccaaacatgtgggtgaaaacccccaattcctcttactataaaatattccaacaaaatttattccccagaaccatgtggggggccacatgtggccttctatacttccccagcattaacgtgggggaaagcgcctggaaggcccagggagaaaactcgtttggaaaacccttaagagaggggcaagcggttgttggccacgtggaggcccagataatttggagcgcacacttgggagaactcataagccgtgggggcagaccagactcttggacgaacttttgggctctttaaaaaaaacctttcaattttccactttacacctggaaaccttggcacctcataatatcacacacacacacagggg

SEQ ID NO: 687558 - DNA, 347 bp, Homo sapiens
cagtatgctagaggatctgtgtcaggcactgaagtctggtgcactggtagctaggctttgggaagtctaggcattgagcgggcaggctcatgggtagagcaggtgtgtccaggagtcttctcccctagaagtggggtctgaagggtggtacctgggcatagtaaggaaccaggacagtggctggggacagaatgtggtcacagtcatggtttcactctcagaaatattctgggcctatgggttaaggcgtcgtgactgagcaagggaagtgcccgtggtggttatttacaaagggtgggccatataaaaggcatttgaaatatggagtaggctatcagttgctgagc

SEQ ID NO: 687559 - DNA, 272 bp, Homo sapiens
tttgagacagagtctaccttgtcgcccaggctggagtgcagtggcgcgatctcggctcatttccatttcagtcttagtgtgtgtgtgtgtgtgtgtgtgtgtgtgtgtgtgtgtgtgtgtgtgtgtgtgtgtgtgtgtgtatttttttagagacagtctcgctttgttgcccaagctgttctctaactcctagactcaaggggtcccctgccccagcctcccaactagctgggaccacaggcagacaccactgtaccgattttatttatatt

SEQ ID NO: 687560 - DNA, 197 bp, Homo sapiens
gggtggaaactcgcggggtgtgagccaccggcaaccggcccctataatattgttaagaggtgtagccacgcacggtgggcagcgcgtgtctgtagtcccagctacttgggcagttgtggcaggaggattatttgagcccaggagttcgcggctgcagtgagctatgattgtgctattgcactccagtctgggcaaca

SEQ ID NO: 687561 - DNA, 255 bp, Homo sapiens
gttttcctgaggccttcccagccatgctgaacttaaagtaaattaaacctttttctttataaattactcagtctctggtggttctttatagcagtgttgaaaataggactaatgaagttcccattaatgaattttgcttttgttgcaattgcttttgacatcttagtcatgaaatccttgcctgttctaaggccaggatggtattgcctaggttgtcttccagggttttgctaattttgtgttttgcatttaggt

SEQ ID NO: 687562 - DNA, 207 bp, Homo sapiens
gggtggccggggagtgagtagacactcggaggtgtcttgagattatcatccgctgagggtggaaggggagtgagcagacactcaggaggtgtctggagattatcatccgctgagggtggaaggggagtgagcacacacgtcgggaggtgtcttgagattatcatccgattccaccctcagcggatgatactctcaagacaccttgtt

SEQ ID NO: 687563 - DNA, 107 bp, Homo sapiens
tcagcgtgatgggtatctttatttattaagctttattttctgtagaagcaaggtttgctatgctgtccaggctggtctcgaactcctggcctcaagtgatcttcctg

SEQ ID NO: 687564 - DNA, 415 bp, Homo sapiens
aagggaaaccaaaagggcaaggtgcccatttccttcttagaactgctccattaagtaggtgggctatgaaaaggttgcccatcatgaccttggatttatatacaattaactctaataaagcagggtaaggattttccatgttaatgtgtttagagactgaaaaaaccagccatcaaaaactggcctttttgcccataaaggtgcatgggaaaaatttccttacagaatttatggtaaagccttcaagccaaaaaagttttcctacaaaaatctccttttaatgagggttccctaataagcaggttttacctttgagcccccacttaaaacagaactggtttttactggatttttcattaacagccagcctttttttttatggaaaataaatctattgtggattggaaaaaaaaaa

SEQ ID NO: 687565 - DNA, 1071 bp, Homo sapiens
  misc_feature (36)..(36): n is a, c, g, or t
  misc_feature (51)..(51): n is a, c, g, or t
  misc_feature (54)..(54): n is a, c, g, or t
  misc_feature (163)..(164): n is a, c, g, or t
  misc_feature (221)..(221): n is a, c, g, or t
cgcgtcactgcttcggatgcacgggtgtacgcaaancatcattgatacccnttnggatggctatgaaacagcccgctatgggacaggggtctttggccagaatgagtacctacgctatcaggaggccctgagtgagctggccactgcggttaaagcacgaatnngagctctcagcgacatcaccagtcagcagccaaagacctaactcagtcccctgaggnctccccaacaaccatccaggtgacatacctcccctccagtcagaagagtaaacgtgccaagcacttccttgaattgaagagctttaaggataactataacacattggagagtactctgtgacggagctgaaggactcttgccgtagattaagccagtcagttgcaatgtgcaagacaggctgcttgccgggccgccctcggaacatctggcccagcaggcccagactgtatccatccaagttcccgttgtatccagagttcttagagcttgtgtctaaagggtaattccccaacccttccttatgagcatttttagaacattggctaagactattttcccccagtagcgcttttttctggatttgcattcgggtgttattcttaatgtttctgtcaaagcttcttaaaaatcttcacttggtttcagccatagttcaccttccctgttccaggtttatttaattccaaaggtgagagttggagtgagatgtcttccatatctatacctttgtgcacagttgaatgggaactgtttgggtttagggcatcttagagttgattgatggaaaaagcagacaggaactggtgggaggtcaagtggggaagttggtgaatgtggaataacttacctttgtgctccacttaaaccagatgtgttgcagctttcctgacatgcaaggatctactttaattccacactctcattaataaattgaataaaagggaatgttttggcacctgatataatctgccaggctatgtgacagtaggaaggaatggtttcccctaacaagcccaatgcactggtctgccttaataaattttttaataaaatgaccttttttcaaat

SEQ ID NO: 687566 - DNA, 1117 bp, Homo sapiens
  misc_feature (36)..(36): n is a, c, g, or t
  misc_feature (51)..(51): n is a, c, g, or t
  misc_feature (54)..(54): n is a, c, g, or t
  misc_feature (163)..(164): n is a, c, g, or t
  misc_feature (221)..(221): n is a, c, g, or t
  misc_feature (768)..(768): n is a, c, g, or t
cgcgtcactgcttcggatgcacgggtgtacgcaaancatcattgatacccnttnggatggctatgaaacagcccgctatgggacaggggtctttggccagaatgagtacctacgctatcaggaggccctgagtgagctggccactgcggttaaagcacgaatnngagctctcagcgacatcaccagtcagcagccaaagacctaactcagtcccctgaggnctccccaacaaccatccaggtgacatacctcccctccagtcagaagagtaaacgtgccaagcacttccttgaattgaagagctttaaggataactataacacattggagagtactctgtgacggagctgaaggactcttgccgtagattaagccagtcagttgcaatgtgcaagacaggctgcttgccgggccgccctcggaacatctggcccagcaggcccagactgtatccatccaagttcccgttgtatccagagttcttagagcttgtgtctaaagggtaattccccaacccttccttatgagcatttttagaacattggctaagactattttcccccagtagcgcttttttctggatttgcattcgggtgttattcttaatgtttctgtcaaagcttcttaaaaatcttcacttggtttcagccatagttcaccttccctgttccaggtttatttaattccaaaggtgagagttggagtgagatgtcttccatatctatacctttgtgcacagttgaatgggaactgtttgggtttagggcntcttagagttgattgatggaaaaagcaactgtttgggtttagggcatcttagagttgattgatggaaaaagcagacaggaactggtgggaggtcaagtggggaagttggtgaatgtggaataacttacctttgtgctccacttaaaccagatgtgttgcagctttcctgacatgcaaggatctactttaattccacactctcattaataaattgaataaaagggaatgttttggcacctgatataatctgccaggctatgtgacagtaggaaggaatggtttcccctaacaagcccaatgcactggtctgccttaataaattttttaataaaatgaccttttttcaaat

SEQ ID NO: 687567 - DNA, 441 bp, Homo sapiens
tgctgaggtgggcggatcatgagagtcaggagttcaaggccaagctggtgaacgttgtggaaccctgtctctactaaaaatacaaaagaattagccaggcgtggtggcgggcaacttttattccctgctactcaggaggctgagtcaggagaatcgcatgaacccgggaggcggaggttgcagtgagccaagattgcgccactgcattccagcccgggcgacagtgtgagactccatctcaaaaagaaaaagagaaataactcaattgttggtgtgtgtctaatgctggagtctgttttgtgccattgatctatttgtctgtctttatcccagtatcacactatcttgattactgtgggttaataaactataggtaagtcttgaaatcagggtaagatctcaaacttggttttgtcttttcaaaattgctttagctattct

SEQ ID NO: 687568 - DNA, 196 bp, Homo sapiens
taaacccaacaatttttttattaggaagtcacccctggggcccaaaggaaaaaaagggaccggggacaccccaacgaggctggggcgggggccccccccggatttcccaaccccgggggcggaatttcctccactccaaatgctggccaagggcccaaaactgccgtatcccctgccaaggggggggctaaaagct

SEQ ID NO: 687569 - DNA, 220 bp, Homo sapiens
ctggggctgtatgaatgcgggcgatacctgaggacgccatccctgtaggagagtggcgattgaggacgaagacgaggcgctgacaagcgcatctcgatctgctcctctgacaaacgaattgcctgtgaggaagagttctccgattctgaagaggagggagaggggggccgcaaggaactcttccaaccttcaataaaagccaaggagagtcaaagacaga

SEQ ID NO: 687570 - DNA, 759 bp, Homo sapiens
  misc_feature (482)..(482): n is a, c, g, or t
agcggggcagtccctgacagccgtggcgccgcgagtcttctcctctacctcactgaccgaggcagatgctagatcagttatggtcagaaccttgtgcttgctggcatgctaggttactcttctgctggtctcaccatgtgatgtgatccttgggtcctcgtgtcggagaatgcgctccgaagtccatggtaggactggaatcgactggtgggcatgccgagtacccgggggcatgtggtcatgtctccttgagaaggctaagcacagacttagcccatcttctagggtccgggtgagatggctctgagttgtgctaagctcttccatggactggatggggcttggcgtggctagctgcttccatggctcgtgctgcgctcgcgtgcgtgtcagcccacctatggctgagtgggcctggctgcgtacctggcctcccatggctcgcgctgtgccttggggtggtccccgggtacgcgcatggnccaccccgatgaggtccagcttgtgttgaaccatagccacgcacgtgaacatgctccaaaaaaaacttggaaaccattggagagcaacaatgtggctctccgggttggcattgcccacgcaaaagaccttaggcgggcgcgcaaggtagggctgagagccggaagggcacatttggggcccgagcgttcacagggtcggcttggcgggggaccaagggtgtcccggattcgaaaggccaacgttgccccttatttccattgacagattcttcccggg

SEQ ID NO: 687571 - DNA, 413 bp, Homo sapiens
tctacatgggccaccgccaggttgttactccaaagggatctaaggaaactctacgctgtgttctataggcatctaggctacaaacccaggaagtgttatccctggtgtcccacccgatttaagtatacagctctacgacatgggcagttatagttggacccgttccccaccagccttaccagggccccacaatttgtcatggctaagagaaggcgagcagatggaggagagagcagagacagaggagggacagagagagagagcatgggaggacagcagagagcagcaaagagggagtccaaagagaaaacaacagagaaagatagaaatagtacaaaacagtgtgccctattcctttaaaagccagggtcaatctaaaacctagtaattgataattgaaggtcttctccatg

SEQ ID NO: 687572 - DNA, 703 bp, Homo sapiens
ggatgccattagacactttctaaaaacagatatttagatgttttttcatatacaagaatcggatggaaatctaaaattaactcaaagcaattaaagtttctgtttaaacggagtgtcttgccatgccattcttttactgaatacacttttcaaattaattttttttttttttgggtcgggagctttggggaaaagcttgtaaatctcactaaggtgttgaaaaaaaattcccaaatgtccgtggctctctggaatttggttccccagaaagtagataaggaatggctgagagatgggagagacttaacacgtacccagttccagatagcggtggtgacctctaggaatggtcctccggtatcagacatctcttcaaacggttcaatttcatagatgtgaaattttccaaaaggtttcggaatcttcattagcctaatccctcagcaattggtccaatttttacctaactctgcaaaccaccttataacttcggatttcctttggtacttgaacccagagggcttcatgattggcacaacattaaaattccttagaggatcctttacagagtattcggcaccgatggtcgtggagtgtatctctattagactcatttttttatacgcacacaagtgtggtccgaaagccatatccatcgagcggaaataggctaaatgtgttatcacagagtttgtatcctaca

SEQ ID NO: 687573 - DNA, 618 bp, Homo sapiens
tgtctggattcccgtcgtaacttaaagggaaattttcacaatgtcctggagcccttgatgtcctgcaaatgaaggaggaggatgtccttaagttccttgcagcaggaaccacacgttacgggtgggctaccccaacgtcctatgcacattccacgatggaacacgtacactctataaacaggaaaagtgactggcactctatactcactaacatcctcacagacggaccctggcgcagcaacgccttcctaggctggggccagcgcctcgcttgcaacatttggttagcacaatctggacaaaagcccctgactagatgttacagatgctatatatacctagccacggcacattactaggaccaagacacgggggcatgttggccttgccaacacaggcatatattagggcattgggccataggaccccaaccactggtagaaaggaacacaaacattcccaaatttaggcttgtgcacgacatatacagctaccttgtgtaagcgctatcgacctgaaagcaccagaagtaccccagcggcaacggcccatttcccccgagggcaaggacccacacgcggcaccttataccattttgggatggggagtttaaacctt

SEQ ID NO: 687574 - DNA, 767 bp, Homo sapiens
gggaaggcatgacccactcaagtcacatgcactatcatatatgtaagaacccagacccatgacccctaacaggggacctcgtcagccctcctattgacctcgggcctatcgatgtgatttctacttccactccataacgctcctgcatactaggccttactaaccgagcatagctaacgcatataccaatgatgggcgcgatgtgaacacggagagaagcaaggatactcgaagggccaagccatcactatcacgctgtgccaagagagtggtccgttcgatacgggataatcctattgtattacctcataacacttttgttcttcgctggagttacctgagcctcttgaaccagcttctagggtgtaagtactcatatgactgcaactataggagaaggggagatgtgttactcaaacaaggacttaattacacgggtacatctcactggaagagttgctagctcgttaatgaatctagttcggtagtttagcgtcggtagtgcagagatgtagtaagctcggtatgaatggctaaagaaatggggtctgaatcaggaagaagcaagtgggaatatctaggattatattaaagtgggggtgtataaaaaataatagtgggtgtcttaatatttaatggttcttcaaaatgaagtcagacttacttgtcgagtcttgacatttgaagagaaaatcgaggaggtcatacgggtcttaacatttattggtaagtcggatggcttccacggaactacaaagtatttgtgg

SEQ ID NO: 687575 - DNA, 132 bp, Homo sapiens
cccccccccccccggggggggggttgtttttgtccccccccctgggcccccccccgggggggggggccccccccccccccccccagggggggggccggggggccaaaaaaatccctttttttttccccccca

SEQ ID NO: 687576 - DNA, 682 bp, Homo sapiens
gaggctaactctttcacgcccggttggattttttgggggaagccgccactttgctttaatgaggggtgggtaagcatgaaagggtacatgtccttcctccacccctccccaaaggggctacatcctttacgctttaccccgcctgcggatgcctctgctctgggctcaaaagtggggcccggcgccctggctgatcccagtgaacaggcagtttctccctgcacaggggcctcaccgggcgtggaagtgttccttgcaccatgattggtcctcagttccatccacgcacattcaagcttggagcccctctgtgtggagtctttcctggatctgtcgcaaccgatgctgttgtgccaccatttcccgcctttggcgcttcacgtggcctgttagggcccataggatgtggttttgcttgtcaacgtgagcctttaaggacctaaattctcggtagggagggcccagccaggcgctccttaaatggacttctaaccggtgaacgcttgcccgtaacaccctttgtgcctgggcccacctccccaacacctagattgtggctttggctgcactttcaaaaatccctctccatctaattttcaacaaagtttgcccaaaattctggggtgaatcccgggcccggtgacctcctggcccaggagttttatttgccgggcataagacc

SEQ ID NO: 687577 - DNA, 792 bp, Homo sapiens
cacattctttgaactgtagttgtcattttagtttatttttcaaaaacttttgcagtacctttttggtctgtcttgtgtgtgccttgcagtgaacagtctggatttggacagtggtctgtctgttagttcagtttctcaagcctttgtcacactaataggattggatttatgtatgtccagcttgggaattattacaggaattaaaaacaactttttagagtgctttcctgagctctctttctatttgttcccccttctactttttgcttccctgtggctgctgtttctatcctccagccagagagctagtgtttattttctccattgtgttacacacttgtgcagctgcaagcaccatatccagggctcaatggtaggaggtagagaagaaaagcaaaagggattggcctcatcctcttacaacgatagttccattgaatagagagaaaggttttcctgcctcagagtgttggctgcactaggcttttgttactgtagtctggccctgttaccatgggattgcttgcatgtggggatacaggagaattcagaaaagaaaaaaagattgctatttctacattctccctgagcattacgacttcccttgccattgctcaagttaaaagctaaggcttcttctggaagctggctctgtgggcgggatcggggagataaccacaggagaaaaagtaccactgttgatatggaggtatatcaaattctgggtctaaacctatttcacaatgcctgtaacttacaagaactgacagatggctgtccatgattcgtccg

SEQ ID NO: 687578 - DNA, 140 bp, Homo sapiens
cagtacggttgtggctttagactcaacaagccgtatcttcaccagtgttctatctggttcccctaaattaataaaatgtttttccccaggatttgggttgagggtgggctgtggctggtcgttttccacatccgtacggg

SEQ ID NO: 687579 - DNA, 777 bp, Homo sapiens
atgacccaccaatcacatgcctatcgatatagtaaaacccagcccatgacccctaagaggggccctctcagcccgtcctaatgacctccggctagccatgtgatttcattccatccataacgctcctcatactaggcctagctaaccaaagactaaccatataccaatgatggcgcgatgtaacacgatgaaagcacttaccaaggccatcaaacaccagctgtccaaaaaggccttcgatccgggagaatcctatttattacctcagaagttggttcttgcgcagggatgtttcggagccttttaccagctccagcgtaggcccttaggcccgccaatatggatgggcactgggccccatacaagggatcaccgcgttagatcccctagaagtcccattcgtaaacaccatcggtattacatcgcgatcaggagtatcacctcagttgagctcgccagagtctagtagaaaactaagcgaaggcaaataatccgaagcatgctaatagaatttcactggtcgtctataataccctcgtgaaatgacctgcagaagtagttctgaagtctccctttctaacatttccgaagggaatactacggctcaagattaggagtaagccagaggattacaacggaggttaaccgtaattatgggggcaaatttcctcaatatgaggtgtagcggcaaataatatacactttacttcaaaacttggtggggtttgaagcgcagctggaaggcttggggaagtggcgcactttgagtcaatatgg

SEQ ID NO: 687580 - DNA, 479 bp, Homo sapiens
agcggggcggagcccagccgcggggggacggtccgggctcccgctcccgagcgcgtcgcggcgcgtggcccagccgagcttgagacacccgcctgccggtcgcatcgcgatgtcggtgccgggtgagaacagttccacaaagccgagccagtcatatgtagtgaagacactaagtggtgctgaaggaactatgctagacgatgattttctgtgagatggaataggacaatgggatgttaccaataaagttgtgcgggaaattctttcaaaagggcactgaagtatcttcagccaaatccagagctaagctaggaatgctgaacattgtgtcgaagatcctgagggcaggtgaatgaccacaggatacccgcatgacaggaaggcttgctgggggactgtatgctgaaatacgggcaggggagctcggggaagactccacctttggcaatgcattgattagaagctggtgaatccatgaa

SEQ ID NO: 687581 - DNA, 943 bp, Homo sapiens
  misc_feature (44)..(44): n is a, c, g, or t
  misc_feature (135)..(135): n is a, c, g, or t
  misc_feature (170)..(170): n is a, c, g, or t
  misc_feature (180)..(180): n is a, c, g, or t
  misc_feature (197)..(197): n is a, c, g, or t
  misc_feature (202)..(203): n is a, c, g, or t
  misc_feature (211)..(211): n is a, c, g, or t
  misc_feature (283)..(283): n is a, c, g, or t
  misc_feature (905)..(905): n is a, c, g, or t
  misc_feature (911)..(912): n is a, c, g, or t
tcttcaagtgacctgtactgcttggggactattggagaaaaaangtggagtcctacttgtttaaaaaatatgtatctaagaatgttctagggcactctgggaacctataaaggcaggtatttcgggccctcctcntcaggaatcttcctgaagacatggcccagtcgaangcccaggatngcttttgctgcggcccngtggnntaggaggnacagagagacagggagagtcagcctccacattcagaggcatcacaagtaatggcacaattcttcggatgacngcagaaaatagtgttttgtagttcaacaactcaagacgaagcttatttctgaggataagctctttaaaggcaaagctttattttcatctctcatcttttgtcctccttagcacaatgtaaaaaagaatagtaatatcagaacaggaaggaggaatggcttgctggggagcccatccaggacactgggagcacatagagattcacccatgtttgttgaactaagagtcattctcatgcttttctttataattcacacatatatgcagagaagatatgttcttgttaacattgtatacaacatagccccaaatatagtaagatctatactagataatcctagatgaaatgttagagatgctatatgatacaactgtggccatgactgaggaaaggagctcacgcccagagactgggctgctctcccggaggccaaacccaagaaggtctggcaaagtcaggctcagggagactctgccctgctgcagacctcggtgtggacacacgctgcatagagctctccttgaaaacagaggggtctcaagacattctgcctacctattagcttttctttatttttttaactttttggggggaaaagtatttttgagaagtttgtcttccnatgtanntataaatagtaaataaagtttttacccatta

SEQ ID NO: 687582 - DNA, 593 bp, Homo sapiens
  misc_feature (13)..(13): n is a, c, g, or t
  misc_feature (555)..(555): n is a, c, g, or t
  misc_feature (561)..(562): n is a, c, g, or t
atttctcatgcancaacaactaaaagaaaccacacatagcacacatatcaaaaaaaagaatagtaatatcagaacaggaaggaggaatggcttgctggggagcccatccaggacactgggagcacatagagattcacccatgtttgttgaactaagagtcattctcatgcttttctttataattcacacatatatgcagagaagatatgttcttgttaacattgtatacaacatagccccaaatatagtaagatctatactagataatcctagatgaaatgttagagatgctatatgatacaactgtggccatgactgaggaaaggagctcacgcccagagactgggctgctctcccggaggccaaacccaagaaggtctggcaaagtcaggctcagggagactctgccctgctgcagacctcggtgtggacacacgctgcatagagctctccttgaaaacagaggggtctcaagacattctgcctacctattagcttttctttatttttttaactttttggggggaaaagtatttttgagaagtttgtcttccnatgtanntataaatagtaaataaagtttttacccatta

SEQ ID NO: 687583 - DNA, 333 bp, Homo sapiens
ttatgggatcatcacctggcattatgaaggtgctcacttgagcagaggggctccagggccaggctgagtgaagcacctcaagattaagagccaccagcctgagaggctgctgctttggagacctcataaagcaccagtaataagtcaaagtgaacttttaactcaagatttgatgcactgagcttggatttgatctatgatgagactcgatctgcttttaaagactagttgacttaagcccgaaagaactgagacctgtcttatgagaattaatataggctttcacaatattgcctcatttccctctgaactattaactcttgagtttctggt

SEQ ID NO: 687584 - DNA, 380 bp, Homo sapiens
  misc_feature (62)..(62): n is a, c, g, or t
  misc_feature (80)..(80): n is a, c, g, or t
  misc_feature (182)..(182): n is a, c, g, or t
  misc_feature (185)..(185): n is a, c, g, or t
  misc_feature (233)..(233): n is a, c, g, or t
caaagaacgcacaaacagtcgcaacaaaacctctccgaagggcttcaaactcaaccccaacnaaaagctatatgaggacntcaagcaagcctcgcaaacctcgccaacccccccacaataaacatactgggagaactctctgtgcaagtaaccacgttatcctgatcaaagatcactctccnacnaacaggactcaacaactaagtcacaggcgtatactccctctacaaatngaccacaacacaatggggctcactcacccaccaccccccacacaaaaaaccctcattcacaaaaaaaaacaccctcatgttcatacacctatcccccattctcctcctatccctcaaccccgacatcattaccgggttttcctctta

SEQ ID NO: 687585 - DNA, 117 bp, Homo sapiens
ttaggtcgcgttcaccacccagtcttaaaatcccagattgtacagccacacgcaaagagaatgtgcatgcaggcgctggtccatacagccatgcaggtctctgtcactcagactgac

SEQ ID NO: 687586 - DNA, 465 bp, Homo sapiens
tttgcctaagtgagtggaaatgttttcctttcatttactggaaacaaaagtgatgccgcatcagcagataggctacgaaataaaacattaaaaaaaaaaagatgatgcctagttaatggaaacaaggcacacgacaggagactccattagggcatgaattttgcaataaaaaactgtattgggagccgggctcagtggctctcacctgtaaccccagcacttggggaggccgaggcgggtggatcacttgaggtcgggagttggagaccattctggccaacatggtgaaacagcatctctactaaaaatacaaaaattagccaggtatggtggtgcatgactgtaatcccagctactcaggaggctgaggctgaaaaatcacttgaacctgggaggcggaggttgcagtgagccgagatcgtgctactgcactccagcctgagcgacagagcaagactctgtctc

SEQ ID NO: 687587 - DNA, 106 bp, Homo sapiens
cactcggacctcctaaacatttgtccatgtacgcttcaaaacagcgttaactgagttatcaatgtagcagtacttaaatgatacaattcttgaagcagtttcaatg

SEQ ID NO: 687588 - DNA, 100 bp, Homo sapiens
cgctaggaggggatatactgcctgacagctggcagcatgacccaaaggaacaatgggcctgttacacactagcaccttttccagaaagactgcatgtgct

SEQ ID NO: 687589 - DNA, 236 bp, Homo sapiens
tccgattgtgacattcagttgtccttaaccactcacatctccacaacagttgccctcgcaggtcacaccaagcttgagctctaagtgaccgagtccccatccatcttatccagctgcccttcctctttctagtccatctctctacaatctcccctccccacctctcattcctccttgcactgcacttcatttctcattagaagcaggtgtcagggcgaagtgcaggcaaacaagca

SEQ ID NO: 687590 - DNA, 424 bp, Homo sapiens
agggaaaaaagagacaataacccctaaagggaagtgaaagatagatgggagaatttttcaagatgggagagatttaggtacatttattcctaattttattagagtcataaagctgtaactgatgcattgaagtcctggagaggatggcaagggatgatatccacagcacaggtggaagaaaagctaggggtggaaagataagagatttccagatatgagacaagaggttgagggaattcacattgggtgaccatgaatccttacctggaaggaagcccattggtgggcaggggagttggggacagtgggaaatgttcagagctgcagatatgaacagtgagtgagcttgatataccatacgatatttgctagatgacgctgaagttgaggataataaaattatactggcattctttggtatggc

SEQ ID NO: 687591 - DNA, 337 bp, Homo sapiens
  misc_feature (56)..(56): n is a, c, g, or t
  misc_feature (58)..(58): n is a, c, g, or t
  misc_feature (65)..(65): n is a, c, g, or t
  misc_feature (68)..(68): n is a, c, g, or t
  misc_feature (216)..(216): n is a, c, g, or t
aacgtataagttgtgttctctgtcaccgtcataaggtcgtttttcccagcgtagtntngcgccanatncaatcacgtcattccaactaatgcgttgcccgtagccgagttgggtgacgacatccgtgccataatgtttttgccaggaggcaccaacacctgcgctgaatatttgctcccagctattttcatagcttcgccataacaaatggcttgnctcaaatgccggaacaatatcgaacgtttttatagggttgtagtatggggtatcgtgttctgtattttgttcgtaatacagactgggtaggaaatcgacaatcaaatatggtgaagaccag

SEQ ID NO: 687592 - DNA, 130 bp, Homo sapiens
attattttgtaggttatcggtattagaagcttaggaaattatatgctatttttatagttttatgctattattattattaatcatccattcatgtgcattaagcagcattgattaatatttagattttcag

SEQ ID NO: 687593 - DNA, 1027 bp, Homo sapiens
  misc_feature (2)..(2): n is a, c, g, or t
  misc_feature (82)..(82): n is a, c, g, or t
  misc_feature (272)..(272): n is a, c, g, or t
  misc_feature (277)..(277): n is a, c, g, or t
  misc_feature (282)..(282): n is a, c, g, or t
  misc_feature (286)..(286): n is a, c, g, or t
  misc_feature (424)..(424): n is a, c, g, or t
  misc_feature (715)..(715): n is a, c, g, or t
  misc_feature (719)..(721): n is a, c, g, or t
  misc_feature (724)..(724): n is a, c, g, or t
  misc_feature (854)..(854): n is a, c, g, or t
  misc_feature (879)..(879): n is a, c, g, or t
  misc_feature (1015)..(1015): n is a, c, g, or t
tnctggaaaggtgaaattaaagacaaaatggacattcctctacataataaaggcagtttacaaaaagcccacagccaacatnaatttagatggagagaaactcaaaacaattctattaaagtcaggagcaagacaaggctatctattttctccacacctattcaatatagtccttgaagtcttagttgaagcaataagacaactgaagaaaattgaggggatacaaattggaaaaaaaaaagaagttaaagtagttttattttgcaaatganatganagtanacanaagtgaccctaaaatttctaccaagaaacttctacagctgataaacactttccaaaacaagtagctggttataatattaactgataaacagagaaagaagtcagggaaacaacacctttcacaactgcctcaagtaanacaaaatgtcttagagtaactctaaccaagcaagtgaaagacttgtatgataaagactttaagacattgaagaaagaaattgaggaagatgtcagaagacgaaaagctctcccatgctcatggatcagtaggattagcgtagtagaaattgccgttctaccaaaagcaatctacagattcaatgcaatccccaccaaaatccaacacaattctttacagatcttgaaagggcaattttcagcttcatatggaagtacaaaaaattcagcatagctaaaacaatcttaaatnatannnganctattggaggtatcatcattcccaggctcaagttgtactatagagttatagcaatacaaacagcatagtattggtacaaagacagacacactgatcaatggaatcaattgatgacccagacatatatganggcaatctaaatgaaatttccaaanaatggagagacagagtcccaacaaaatgaagcttgcagtactgggaatgggttacatctaaggagttgttagacaaaggggtccatgggcatccccacacaacccaggatgttaccgagacgatagattgctctcntaagttgacagt

SEQ ID NO: 687594 - DNA, 714 bp, Homo sapiens
  misc_feature (2)..(2): n is a, c, g, or t
  misc_feature (169)..(169): n is a, c, g, or t
  misc_feature (392)..(392): n is a, c, g, or t
  misc_feature (397)..(397): n is a, c, g, or t
  misc_feature (402)..(402): n is a, c, g, or t
  misc_feature (407)..(410): n is a, c, g, or t
  misc_feature (497)..(497): n is a, c, g, or t
  misc_feature (500)..(500): n is a, c, g, or t
  misc_feature (577)..(577): n is a, c, g, or t
  misc_feature (595)..(595): n is a, c, g, or t
  misc_feature (599)..(599): n is a, c, g, or t
  misc_feature (636)..(636): n is a, c, g, or t
  misc_feature (654)..(654): n is a, c, g, or t
  misc_feature (702)..(702): n is a, c, g, or t
gnagaggaaggctggcaccagccacccaatcccgagaccccacctccaggccaagtacatgcccctgggactggctcagtcccagcaccaccctgcaggctccaacaaggtggcgttttgtcccctttcactcaatccagcgtcatcctcaggcctctagcggcctcancctcaacgggcccgggacactgaacaggtagggatggcagagcccagctgcggcccaagctgggcagagcgggccctcaggcagggcaggtttccaagggagggcccgggaggacggcctggtgtggggtaggggctcagcgccagcgggcgctgggtgagggccggggaggggactccctggagatgaagggagccccaggggtacagcgagctcggctgcnaagcntgggnggggnnnncgcgagatgcacgaaacagatctgtgcgtgctggatcagctctacccccaccaaacagatggagagacagacaggcaggcagcattnctnaacccagggaggggaaaaccacagaacaaaacagcaagtcgggcttgggccgccggcttccagggcgcccaggacantgggcgggcgaatctctnggtntatgtgggaggggccgctgggccaggggcctcctgcnctgggactctcctctgtntctgtgctggcgcgcggacgccttgggaactagaggcgggcagcctcngcgaaccaaccc

SEQ ID NO: 687595 - DNA, 348 bp, Homo sapiens
gcgctcaatggaattctcgttccaggatgggagacagccccaccatcgtgaaagagtagccggcttcagtgcctgccttggggtgaggaagacacctctgccccagtggattagcaagtgtggcaggcttaacatgtccaggttctccccaataacatcgtccaggtcggttttaaaatccccaggcagggggagagtgacatggggagtgacttcttaatgggtaagaagctgcttactccgtgagatatcgtagatgctcgaggactgggtagaggtgcctgtactaaatgccattaaataaggataccccagactgctcgtcatgaacacttaggatcgaccgga

SEQ ID NO: 687596 - DNA, 424 bp, Homo sapiens
ctgtaggaattcggcacgaggccacctctactctacttttgtggagccctatgacagacacctattgtcaaactctgtggctgttggcacattagatgctataggtgtgtggtggaacaccactttcttctactatggaagggacaggagcccactgggtggtgctggagccatgcttcccacaggtggagagggctaccggtatgggccagagagtgaattatctcaagctttcgcaactacaccgaattctctgtatgaaatgggccggtatgaaccggagcagtatgtggaccgagcccgggactcaaccttttaaaaactggaagtgagagaagggtgggaatgggtaaaagaatccatttaattcccttggagccatgctctatgaggcttgagacacctgtgctctccggaccggttc

SEQ ID NO: 687597 - DNA, 290 bp, Homo sapiens
  misc_feature (108)..(108): n is a, c, g, or t
  misc_feature (280)..(280): n is a, c, g, or t
tcctggaagtgcggattgaagtagccccggcgccaacccacctggtctttctccgacttcgagatctgcccgtggtcgagatcgtggtagatgatgcggtctttcggnccgccgaggttgtcgtacaggaaatcgaccgccgtgctgtcgaccgttccatcgccggtgctgtacaccacgtagctcggcaccgtcacgctgtggtagagcgcggccaggcgctggctgtcggtggcatcgaacgccacgagcggcagccggtcatactccggattgctgngcgtaagctt

SEQ ID NO: 687598 - DNA, 111 bp, Homo sapiens
tacattttctgtgtgtgtgtcgttgttgtgtgtgtgttgttcgtgcttacttctctttccaggactctatactatactttacaggcagttcctcatccttgggagcaattc

SEQ ID NO: 687599 - DNA, 107 bp, Homo sapiens
tgctgcccacctacgtggttctggcgctcgtcgtcgtcgcgctgagaaagtggtctgcctcgtgcagcgcataaagggcccgcgcccgtccgcggcgcgagtccgca

SEQ ID NO: 687600 - DNA, 361 bp, Homo sapiens
gctcgtgggcaacggtgcactttcttcggtcgtccgaatccggttcatccgacaccagccgcctcaccatgccgcccaagttcgaccccaacgaggtcaaagtcgtgtacctgaggtgcaccggagcgaggtcggcgcacatccgccttggcccgaagatcggtactttggtctgtctacgaagaaagttggcgatgacattgccaaggctaccggtgactggaagggtctcagaattacagtgaaactgaccatccagaacagacaggcccagatcgaggtggtgccttctgaactcagccctgaatcatcaagccctcaaggagacaccgggagacaggagaagcagaagaaaataaaa

SEQ ID NO: 687601 - DNA, 105 bp, Homo sapiens
aaaaaattgattttgattttattttttttctggaaaactccaaagggggttttcccctttcaattcctgggatttaagccaaaaaaagttgcccctggtttttca

SEQ ID NO: 687602 - DNA, 535 bp, Homo sapiens
cgctggctgtcgtcccgcattcgccgatggagcggccgcccggttcccggggtgcgccctcctcgtgtcccgcgccctccttgggctcgctgggacgtctcctccctcccggctcgcggccccgtccgagagtcggcccactgcatctagagagcaatctagtcgctcaatgaattgttgagcaatgatgagctgtcagtgggtgaccagacagtgaacacgctactgaggaagcgctgaagagtcatccttgagacgccagtacagaaagtacgcgaatccgtgtgacagaatcgcagcagagatagcagtctactgcatgaggccataacgccatatgatccactcttacacgtcatccgatggggatggcagagccgatccgatatagtgagaaaccggatagagcctggacactcggcgaggaggagaaggctcacaaaggatgacacgcggtgaacctgaacactatgaccgtggcaccttcgaccaaaatagaaacaaagacaaatctaagaggaacacaagggaaatg

SEQ ID NO: 687603 - DNA, 866 bp, Homo sapiens
ggcagcagcatgagtaatagcagacagaccaacagtgagcaaggatacaacgaaaccccccacacagaaaaaaaaaaaaagaaaaacagaaatagaatcccaaattggcacacacagtccatgggcccatttaattcaagggcccaaaagcccaactctcttctgggggtctctaaggcttcactggttttcaacacaaggtccccccctacctcaggatttggaaatcttacaaaggagcaaaacctgggctcataaaaatagtaattaattaattggtcacctggtggtcaatcagtttcagaagatgcgtaaaataatatctctttattcaatcttttactaaaatagtctttaaaatgcttacactatgagtggcagagcttcagccttccacttatcttcttccaccaaaataccatgaattaacttctggtcctattaaccactatttcattctgattaaacactaaaggagattataataatatacaaacaagaaatatattctaagggactctgcaaggtccgggaagaaagaatggttctggacagatgtgatacctagctttcaatgtggtggtgaaaattctactgggtggagatctctctagagtccagacttagaggggcctgggcaagaacgttaaggggagggcagatttctaaccaattagggattccgtgggaaagaatttctttatggacaatggtgtgggcaaatggggagaggcctcctaagggagtctttaggcaattcaatgaattaccaactatgtgtttctacaagggagaagaaaaacccagggtgcgccaatgggagaaaagtcggttaaccttcaggagatggggggggggagtttacc

SEQ ID NO: 687604 - DNA, 210 bp, Homo sapiens
ttaaaaaaagagtttcgcaggagctttaagttaaaaaaaggcccaagggggaccaaactttcccctcttgaagaaatccccaaagttagttctctaaaagtgcaatattgtttaatcttaaaactgggcactttggaagaactttttacagaagcctcaatgatgatccctttgaattgcttgtgatttcaaaaataaagcagtgaagca

SEQ ID NO: 687605 - DNA, 176 bp, Homo sapiens
tcccccgctatcatcggccccccccggagattgtgcctgccacccttacgccgtagcctgtccagagtactggcagcgcctcgtgctctaataggtctggatcggtgagcgatcctgcgagtactcacacagaggggagagctgacagaggatacctacagagcggagtgttgtgc

SEQ ID NO: 687606 - DNA, 355 bp, Homo sapiens
  misc_feature (11)..(11): n is a, c, g, or t
cgctgtgcttngagctcttcaacgggattggcagtagccgtgccctgagcacaggcagaactgtgtgatcccggagtgtgaacctgaagttcaaaggactgggcaagctctgtactgtgttggtttttcccccccaaaatgggtcctaaggagggtaaagtgacttgtttcaaagatagttggagcacagtgggtctctcacggatctcggcctgaggctgtggaggagaaggtctggacagaccctcagggccgggtgtgttttcccaccagccgaagagagccaggatggacgttcctcggacggacggttcacctgcttgggaatgttcctgggctgtgagatccactcttc

SEQ ID NO: 687607 - DNA, 136 bp, Homo sapiens
  misc_feature (44)..(44): n is a, c, g, or t
  misc_feature (63)..(63): n is a, c, g, or t
  misc_feature (100)..(100): n is a, c, g, or t
  misc_feature (111)..(111): n is a, c, g, or t
gcttattcttctttgaagaaactgacccgatcagtgccagaagncattgtattcaaagaagantaagcaagaaagaaaagaaggaaggaagagaggtagncagatacaagntgaaatcctgtcaaaaaatggaagg

SEQ ID NO: 687608 - DNA, 106 bp, Homo sapiens
ctcataagtgcctcttctatatctactaactatcatagctgggagtgagaggagcgactttaactgagactgaggagatgagacagcttactccacgataaagatg

SEQ ID NO: 687609 - DNA, 411 bp, Homo sapiens
  misc_feature (49)..(49): n is a, c, g, or t
  misc_feature (93)..(93): n is a, c, g, or t
  misc_feature (131)..(131): n is a, c, g, or t
  misc_feature (144)..(144): n is a, c, g, or t
  misc_feature (162)..(162): n is a, c, g, or t
  misc_feature (185)..(185): n is a, c, g, or t
  misc_feature (206)..(206): n is a, c, g, or t
  misc_feature (224)..(224): n is a, c, g, or t
  misc_feature (240)..(240): n is a, c, g, or t
  misc_feature (373)..(373): n is a, c, g, or t
  misc_feature (396)..(396): n is a, c, g, or t
  misc_feature (409)..(409): n is a, c, g, or t
accaacaatattttgaaaatagtagctgatttttttgcaagttttaaanagccacataccctattacagagagtcaaagcctgcacaacagangaggttcaggagatgctgatgcaaattaccagtttgcnttcactgattgcnttcttgctgccaattaanactgtaggtttgcagggtgactntcgttcctacagttacgtgtntggaatctccagtaaagntgaacctgactgggantcacttatttttttggctaggcttatacctcgcatgtgtcacaacgttaacagagttgtttatatatttggcccaccagttaaaggaacctcctacagatgttactcccacttttcttgacaacaggggtgcncagtactttacgccaagctggantttgagggcccanaa

SEQ ID NO: 687610 - DNA, 795 bp, Homo sapiens
  misc_feature (35)..(35): n is a, c, g, or t
  misc_feature (65)..(65): n is a, c, g, or t
  misc_feature (91)..(91): n is a, c, g, or t
  misc_feature (110)..(110): n is a, c, g, or t
  misc_feature (118)..(118): n is a, c, g, or t
  misc_feature (136)..(136): n is a, c, g, or t
  misc_feature (159)..(159): n is a, c, g, or t
  misc_feature (171)..(171): n is a, c, g, or t
  misc_feature (177)..(177): n is a, c, g, or t
  misc_feature (179)..(179): n is a, c, g, or t
  misc_feature (192)..(192): n is a, c, g, or t
  misc_feature (213)..(213): n is a, c, g, or t
  misc_feature (216)..(216): n is a, c, g, or t
  misc_feature (220)..(220): n is a, c, g, or t
  misc_feature (356)..(356): n is a, c, g, or t
  misc_feature (638)..(638): n is a, c, g, or t
  misc_feature (664)..(664): n is a, c, g, or t
  misc_feature (710)..(710): n is a, c, g, or t
  misc_feature (777)..(777): n is a, c, g, or t
ggagggggagaggaaacaagagaagaggaggggcnagagggcaaggggccggggcgggggcagcnaggcgggggagggggaaggggaaggncacggggggacgggggggngggcgggngggaggggcgggcgggcngggggggcgagggccggccaggnggcgggcgcggngggggngnacgagggcgagangcacggggacggggggcaagnggncgangcggcagagcccagcgcggaacggggggaccgaggcgagccggccacggcgcagcgagagagccggccaccaagagggagcgggaacgggccgcagcggcagagcccaggaggagagaggccgcaggaacgagganggggagggcagaggcagcgcagagcggggagagagggggacaggggcccggggaagggggaccagagagggcgggagaagcgccggcaccgccacgacggcagggacagcagggcacgcaggcgggagcgcgggaacgggagcccgaaggacagaggggggagggggccggaaagagggcggcgggggagcgcgaagaggcggacagggacagcgggcacggcgggccccgcgacaggggccgggacgagaagccagaggaaaagcagcgccggccgcaggnacgagggccgcgggagagaggcacangccccgggcggacacgggcagcgccgcgcaggccaggggcgccggncacgaggggcgggacgggaggaggaggggcgcacagcccggccgggcccgcgcgcacacagacgganagggcgggaggggcgcgg

SEQ ID NO: 687611 - DNA, 117 bp, Homo sapiens
tgtagataaggtatccatgcagaaagaattgtaagaaagaggaatgggaagaagctagaacgattctgccaagccctatggagcacacctattctagcttcagccatgtgagatgaa

SEQ ID NO: 687612 - DNA, 257 bp, Homo sapiens
agcctcttcaactaagctaagaaaagtcctggggctatgtctcgttggccatgtgaagagtcccctggaaatggaagtctatgtgctctgctcctaagatcactataaggacagagattaggtttgcctcaccctggacctgcatatgagctactacatttgcataaaccatgacctaaattagtgaatttagcatattgtctggatggcaaccacctgggaggtttgtgagctcccttccctgcagcacaccgtca

SEQ ID NO: 687613 - DNA, 2737 bp, Homo sapiens
  misc_feature (41)..(43): n is a, c, g, or t
  misc_feature (46)..(46): n is a, c, g, or t
  misc_feature (54)..(55): n is a, c, g, or t
tgctggtactggccgggattttgggatcgcgccgagcgccnnnccngccccggnnccctccgccgccgccggcccggacatggccgccaacatgtacagggtcggagactacgtctactttgagaactcctccagcaacccatacctgatccggagaatcgaggagctcaacaagacggccaatgggaacgtggaggccaaagtggtgtgcttctaccggaggcgggacatctccagcaccctcatcgccctggccgacaagcacgcaaccctgtcagtctgctataaggccggaccgggggcggacaacggcgaggaaggggaaatagaagaggaaatggagaatccggaaatggtggacctgcccgagaaactaaagcaccagctgcggcatcgggagctgttcctctcccggcagctggagtctctgcccgccacgcacatcaggggcaagtgcagcgtcaccctgctcaacgagaccgagtcgctcaagtcctacctggagcgggaggatttcttcttctattctctagtctacgacccacagcagaagaccctgctggcagataaaggagagattcgagtaggaaaccggtaccaggcagacatcaccgacttgttaaaagaaggcgaggaggatggccgagaccagtccaggttggagacccaggtgtgggaggcgcacaacccactcacagacaagcagatcgaccagttcctggtggtggcccgctctgtgggcaccttcgcacgggccctggactgcagcagctccgtccgacagcccagcctgcacatgagcgccgcagctgcctcccgagacatcaccctgttccacgccatggatactctccacaagaacatctacgacatctccaaggccatctcggcgctggtgccgcagggcgggcccgtgctctgcagggacgagatggaggagtggtctgcatcagaggccaaccttttcgaggaagccctggaaaaatatgggaaggatttcacggacattcagcaagattttctcccgtggaagtcgctgaccagcatcattgagtactactacatgtggaagaccaccgacagatacgtgcagcagaaacgcttgaaagcagctgaagctgagagcaagttaaagcaagtttatattcccaactataacaagccaaatccgaaccaaatcagcgtcaacaacgtcaaggccggtgtggtgaacggcacgggggcgccgggccagagccctggggctggccgggcctgcgagagctgttacaccacacagtcttaccagtggtattcttggggtccccctaacatgcagtgtcgtctctgcgcatcttgttggacatattggaagaaatatggtggcttgaaaatgccaacccggttagatggagagaggccaggaccaaaccgcagtaacatgagtccccacggcctcccagcccggagcagcgggagccccaagtttgccatgaagaccaggcaggctttctatctgcacacgacgaagctgacgcggatcgcccggcgcctgtgccgtgagatcctgcgcccgtggcacgctgcgcggcacccctacctgcccatcaacagcgcggccatcaaggccgagtgcacggcgcggctgcccgaagcctcccagagcccgctggtgctgaagcaggcggtacgcaagccgctggaagccgtgcttcggtatcttgagacccacccccgccccccccaagcctgaccccgtgaaaagcgtgtccagcgtgctcagcagcctgacgcccgccaaggtggcccccgtcatcaacaacggctcccccaccatcctgggcaagcgcagctacgagcagcacaacggggtggacggcaacatgaagaagcgcctcttgatgcccagtaggggtctggcaaaccacggacagaccaggcacatgggaccaagccggaacctcctgctcaacgggaagtcctaccccaccaaagtgcgcctgatccgggggggctccctgcccccagtcaagcggcggcggatgaactggatcgacgccccggatgacgtgttctacatggccacagaggagaccaggaagatccgcaagctgctctcatcctcggaaaccaagcgtgctgcccgccggccctacaagcccatcgccctgcgccagagccaggccctgccgccgcggccaccgccacctgcgcccgtcaacgacgagcccatcgtcatcgaggactaggggccgcccccacctgcggccgccccccgcccctcgcccgcccacacggccccttcccagccagcccgccgcccgcccctcagtttggtagtgccccacctcccgccctcacctgcagagaaacgcgctccttggcggacactgggggaggagaggaagaagcgcggctaacttattccgagaatgccgaggagttgtcgtttttagctttgtgtttactttttggctggagcggagatgaggggccaccccgtgcccctgtgctgcggggccttttgcccggaggccgggccctaaggttttgttgtgttctgttgaaggtgccattttaaattttatttttattactttttttgtagatgaacttgagctctgtaacttacacctggaatgttaggatcgtgcggccgcggccggccgagctgcctggcggggttggcccttgtcttttcaagtaattttcatattaaacaaaaacaaagaaaaaaaatcttataaaaaggaaaaaa

SEQ ID NO: 687614 - DNA, 209 bp, Homo sapiens
  misc_feature (25)..(25): n is a, c, g, or t
  misc_feature (36)..(36): n is a, c, g, or t
  misc_feature (44)..(44): n is a, c, g, or t
  misc_feature (63)..(64): n is a, c, g, or t
  misc_feature (110)..(111): n is a, c, g, or t
  misc_feature (116)..(116): n is a, c, g, or t
  misc_feature (127)..(127): n is a, c, g, or t
  misc_feature (134)..(134): n is a, c, g, or t
  misc_feature (164)..(166): n is a, c, g, or t
  misc_feature (168)..(168): n is a, c, g, or t
  misc_feature (194)..(194): n is a, c, g, or t
  misc_feature (199)..(199): n is a, c, g, or t
  misc_feature (202)..(202): n is a, c, g, or t
gcttccactgaatgagtctcttttnattctcttggnaatctctnccagttaactacttccgtnntaggtgatgaaatgggtaaggctccacacttcagatgttggcactnntatgngcatggtcttnccctttnttgcaactcaaaatcagaacctttgattcnnntnatattccagtcccagaggtagtctcnctgtngangttaatt

SEQ ID NO: 687615 - DNA, 3130 bp, Homo sapiens
  misc_feature (41)..(43): n is a, c, g, or t
  misc_feature (46)..(46): n is a, c, g, or t
  misc_feature (54)..(55): n is a, c, g, or t
tgctggtactggccgggattttgggatcgcgccgagcgccnnnccngccccggnnccctccgccgccgccggcccggacatggccgccaacatgtacagggtcggagactacgtctactttgagaactcctccagcaacccatacctgatccggagaatcgaggagctcaacaagacggccaatgggaacgtggaggccaaagtggtgtgcttctaccggaggcgggacatctccagcaccctcatcgccctggccgacaagcacgcaaccctgtcagtctgctataaggccggaccgggggcggacaacggcgaggaaggggaaatagaagaggaaatggagaatccggaaatggtggacctgcccgagaaactaaagcaccagctgcggcatcgggagctgttcctctcccggcagctggagtctctgcccgccacgcacatcaggggcaagtgcagcgtcaccctgctcaacgagaccgagtcgctcaagtcctacctggagcgggaggatttcttcttctattctctagtctacgacccacagcagaagaccctgctggcagataaaggagagattcgagtaggaaaccggtaccaggcagacatcaccgacttgttaaaagaaggcgaggaggatggccgagaccagtccaggttggagacccaggtgtgggaggcgcacaacccactcacagacaagcagatcgaccagttcctggtggtggcccgctctgtgggcaccttcgcacgggccctggactgcagcagctccgtccgacagcccagcctgcacatgagcgccgcagctgcctcccgagacatcaccctgttccacgccatggatactctccacaagaacatctacgacatctccaaggccatctcggcgctggtgccgcagggcgggcccgtgctctgcagggacgagatggaggagtggtctgcatcagaggccaaccttttcgaggaagccctggaaaaatatgggaaggatttcacggacattcagcaagattttctcccgtggaagtcgctgaccagcatcattgagtactactacatgtggaagaccaccgacagatacgtgcagcagaaacgcttgaaagcagctgaagctgagagcaagttaaagcaagtttatattcccaactataacaagccaaatccgaaccaaatcagcgtcaacaacgtcaaggccggtgtggtgaacggcacgggggcgccgggccagagccctggggctggccgggcctgcgagagctgttacaccacacagtcttaccagtggtattcttggggtccccctaacatgcagtgtcgtctctgcgcatcttgttggacatattggaagaaatatggtggcttgaaaatgccaacccggttagatggagagaggccaggaccaaaccgcagtaacatgagtccccacggcctcccagcccggagcagcgggagccccaagtttgccatgaagaccaggcaggctttctatctgcacacgacgaagctgacgcggatcgcccggcgcctgtgccgtgagatcctgcgcccgtggcacgctgcgcggcacccctacctgcccatcaacagcgcggccatcaaggccgagtgcacggcgcggctgcccgaagcctcccagagcccgctggtgctgaagcaggcggtacgcaagccgctggaagccgtgcttcggtatcttgagacccacccccgccccccccaagcctgaccccgtgaaaagcgtgtccagcgtgctcagcagcctgacgcccgccaaggtggcccccgtcatcaacaacggctcccccaccatcctgggcaagcgcagctacgagcagcacaacggggtggacggcaacatgaagaagcgcctcttgatgcccagtaggggtctggcaaaccacggacagaccaggcacatgggaccaagccggaacctcctgctcaacgggaagtcctaccccaccaaagtgcgcctgatccgggggggctccctgcccccagtcaagcggcggcggatgaactggatcgacgccccggatgacgtgttctacatggccacagaggagaccaggaagatccgcaagctgctctcatcctcggaaaccaagcgtgctgcccgccggccctacaagcccatcgccctgcgccagagccaggccctgccgccgcggccaccgccacctgcgcccgtcaacgacgagcccatcgtcatcgaggactaggggccgcccccacctgcggccgccccccgcccctcgcccgcccacacggccccttcccagccagcccgccgcccgcccctcagtttggtagtgccccacctcccgccctcacctgcagagaaacgcgctccttggcggacactgggggaggagaggaagaagcgcggctaacttattccgagaatgccgaggagttgtcgtttttagctttgtgtttactttttggctggagcggagatgaggggccaccccgtgcccctgtgctgcggggccttttgcccggaggccgggccctaaggttttgttgtgttctgttgaaggtgccattttaaattttatttttattactttttttgtagatgaacttgagctctgtaacttacacctggaatgttaggatcgtgcggccgcggccggccgagctgcctggcggggttggcccttgtcttttcaagtaattttcatattaaacaaaaacaaagaaaaaaaatcttataaaaaggaaaaaaaccaaaaactgtgttggggcgccggggccccctggaaaggtttcgagaacaccattcgctgtgggcagcccggaggcccccaacaggcacacgtggaaacttggccacaaatgcggcgcgtcctccaaagggaaaaccccgggaccaatgagacataggcgcacgggaaattcttcacaccccatattaataaaaaaccgccccgcggggggtacaaccacgtcagacgtgttttttctaggaaaacaatttcccacaatattgtgcacaccaagaaaagggactaacaacggggagcggctctcatatcaacaacgcggagagtgcccaaaaagcgagaagcgccccggaattcaaaattatacgccccgtccttcctgcgtggtggtgccg

SEQ ID NO: 687616 - DNA, 148 bp, Homo sapiens
gaaggccaagagtactaccaagctaggagagtaggacagtagcccaccaagctagccagaaaggccaaagacagccaaggtaccagagtagagacagtagacgaaagcaaggtacatagaacatagagtcctaggtagtagacagagc

SEQ ID NO: 687617 - DNA, 2873 bp, Homo sapiens
cccctcaagccgcggtgtactccagcggcccctgtggcctctccatccgcggcggatctcagaggtgtggacaagcagcctactagggctagagatggacagcaggaaactgtccccccgggggaagaagctggagtcgcacctctcccaagagcacaggcggccccactgggcctgatagcagcctggggccagcccagtatccagagcagcgttcagcagggactgcagactcaggactggactacgtctactttgagaactcctccagcaacccatacctgatccggagaatcgaggagctcaacaagacggccaatgggaacgtggaggccaaagtggtgtgcttctaccggaggcgggacatctccagcaccctcatcgccctggccgacaagcacgcaaccctgtcagtctgctataaggccggaccgggggcggacaacggcgaggaaggggaaatagaagaggaaatggagaatccggaaatggtggacctgcccgagaaactaaagcaccagctgcggcatcgggagctgttcctctcccggcagctggagtctctgcccgccacgcacatcaggggcaagtgcagcgtcaccctgctcaacgagaccgagtcgctcaagtcctacctggagcgggaggatttcttcttctattctctagtctacgacccacagcagaagaccctgctggcagataaaggagagattcgagtaggaaaccggtaccaggcagacatcaccgacttgttaaaagaaggcgaggaggatggccgagaccagtccaggttggagacccaggtgtgggaggcgcacaacccactcacagacaagcagatcgaccagttcctggtggtggcccgctctgtgggcaccttcgcacgggccctggactgcagcagctccgtccgacagcccagcctgcacatgagcgccgcagctgcctcccgagacatcaccctgttccacgccatggatactctccacaagaacatctacgacatctccaaggccatctcggcgctggtgccgcagggcgggcccgtgctctgcagggacgagatggaggagtggtctgcatcagaggccaaccttttcgaggaagccctggaaaaatatgggaaggatttcacggacattcagcaagattttctcccgtggaagtcgctgaccagcatcattgagtactactacatgtggaagaccaccgacagatacgtgcagcagaaacgcttgaaagcagctgaagctgagagcaagttaaagcaagtttatattcccaactataacaagccaaatccgaaccaaatcagcgtcaacaacgtcaaggccggtgtggtgaacggcacgggggcgccgggccagagccctggggctggccgggcctgcgagagctgttacaccacacagtcttaccagtggtattcttggggtccccctaacatgcagtgtcgtctctgcgcatcttgttggacatattggaagaaatatggtggcttgaaaatgccaacccggttagatggagagaggccaggaccaaaccgcagtaacatgagtccccacggcctcccagcccggagcagcgggagccccaagtttgccatgaagaccaggcaggctttctatctgcacacgacgaagctgacgcggatcgcccggcgcctgtgccgtgagatcctgcgcccgtggcacgctgcgcggcacccctacctgcccatcaacagcgcggccatcaaggccgagtgcacggcgcggctgcccgaagcctcccagagcccgctggtgctgaagcaggcggtacgcaagccgctggaagccgtgcttcggtatcttgagacccacccccgccccccccaagcctgaccccgtgaaaagcgtgtccagcgtgctcagcagcctgacgcccgccaaggtggcccccgtcatcaacaacggctcccccaccatcctgggcaagcgcagctacgagcagcacaacggggtggacggcaacatgaagaagcgcctcttgatgcccagtaggggtctggcaaaccacggacagaccaggcacatgggaccaagccggaacctcctgctcaacgggaagtcctaccccaccaaagtgcgcctgatccgggggggctccctgcccccagtcaagcggcggcggatgaactggatcgacgccccggatgacgtgttctacatggccacagaggagaccaggaagatccgcaagctgctctcatcctcggaaaccaagcgtgctgcccgccggccctacaagcccatcgccctgcgccagagccaggccctgccgccgcggccaccgccacctgcgcccgtcaacgacgagcccatcgtcatcgaggactaggggccgcccccacctgcggccgccccccgcccctcgcccgcccacacggccccttcccagccagcccgccgcccgcccctcagtttggtagtgccccacctcccgccctcacctgcagagaaacgcgctccttggcggacactgggggaggagaggaagaagcgcggctaacttattccgagaatgccgaggagttgtcgtttttagctttgtgtttactttttggctggagcggagatgaggggccaccccgtgcccctgtgctgcggggccttttgcccggaggccgggccctaaggttttgttgtgttctgttgaaggtgccattttaaattttatttttattactttttttgtagatgaacttgagctctgtaacttacacctggaatgttaggatcgtgcggccgcggccggccgagctgcctggcggggttggcccttgtcttttcaagtaattttcatattaaacaaaaacaaagaaaaaaaatcttataaaaaggaaaaaa

SEQ ID NO: 687618 - DNA, 771 bp, Homo sapiens
tgcatcggacggtcgaagcctagagtctctgcgtctttcgctcttccgctgcctcattcctttcctttctagaccttggtcgtcgccgcaccatgaacaagaagaagaaaccgttcctagggatgcccgcgcccctcggacatacgatgccggggctgggccggggcgccactggcttcaccacgcggtcagacattgggcccgtccgtgatgcaaatgaccctgtggatgatcgcacatgacaccccacaggcaagagaaccgttggggaccagatgaagaaaacatcaggctgctgacgatgacgacgaggatctaaactgacacccaattacgatgagtcttcatggctactgctgggagacctcttactcaagtggaccctacgacgaaccgatgactgacggaacgcagatgctatctatgcagccctggaatcaacacaggatggctgacaacgaagaaaacgaacagacgggagcccacagggagacacgacacacacactacgaagaactatcgtatggaaacgccccaacaatccaacaggagttctcagaacatcaaagaagagaacggttggccagcacgctccacagcaagaacagaacatggcattgagccaattccaccgaaggatatgagacgaaggaacagaaacactacacagaccagggggaaccccaacgcgaaccgacgcaacgactgaccccatggtacacaggacacgaaacataggcccacaccatacaaccgaacccgggagccaaa

SEQ ID NO: 687619 - DNA, 161 bp, Homo sapiens
gatctggctgctgatacgctaggaatggcgctgtcacactactgccatgttctactcttctgtgtcaaagcttgtgccaggttgccgccacatccgccgtagaagaatggggcacacttcccttcagatcacatcaaagtaccagcgggagatcattggga

SEQ ID NO: 687620 - DNA, 2686 bp, Homo sapiens
  misc_feature (41)..(43): n is a, c, g, or t
  misc_feature (46)..(46): n is a, c, g, or t
  misc_feature (54)..(55): n is a, c, g, or t
tgctggtactggccgggattttgggatcgcgccgagcgccnnnccngccccggnnccctccgccgccgccggcccggacatggccgccaacatgtacagggtcggagactacgtctactttgagaactcctccagcaacccatacctgatccggagaatcgaggagctcaacaagacggccaatgggaacgtggaggccaaagtggtgtgcttctaccggaggcgggacatctccagcaccctcatcgccctggccgacaagcacgcaagggaaatagaagaggaaatggagaatccggaaatggtggacctgcccgagaaactaaagcaccagctgcggcatcgggagctgttcctctcccggcagctggagtctctgcccgccacgcacatcaggggcaagtgcagcgtcaccctgctcaacgagaccgagtcgctcaagtcctacctggagcgggaggatttcttcttctattctctagtctacgacccacagcagaagaccctgctggcagataaaggagagattcgagtaggaaaccggtaccaggcagacatcaccgacttgttaaaagaaggcgaggaggatggccgagaccagtccaggttggagacccaggtgtgggaggcgcacaacccactcacagacaagcagatcgaccagttcctggtggtggcccgctctgtgggcaccttcgcacgggccctggactgcagcagctccgtccgacagcccagcctgcacatgagcgccgcagctgcctcccgagacatcaccctgttccacgccatggatactctccacaagaacatctacgacatctccaaggccatctcggcgctggtgccgcagggcgggcccgtgctctgcagggacgagatggaggagtggtctgcatcagaggccaaccttttcgaggaagccctggaaaaatatgggaaggatttcacggacattcagcaagattttctcccgtggaagtcgctgaccagcatcattgagtactactacatgtggaagaccaccgacagatacgtgcagcagaaacgcttgaaagcagctgaagctgagagcaagttaaagcaagtttatattcccaactataacaagccaaatccgaaccaaatcagcgtcaacaacgtcaaggccggtgtggtgaacggcacgggggcgccgggccagagccctggggctggccgggcctgcgagagctgttacaccacacagtcttaccagtggtattcttggggtccccctaacatgcagtgtcgtctctgcgcatcttgttggacatattggaagaaatatggtggcttgaaaatgccaacccggttagatggagagaggccaggaccaaaccgcagtaacatgagtccccacggcctcccagcccggagcagcgggagccccaagtttgccatgaagaccaggcaggctttctatctgcacacgacgaagctgacgcggatcgcccggcgcctgtgccgtgagatcctgcgcccgtggcacgctgcgcggcacccctacctgcccatcaacagcgcggccatcaaggccgagtgcacggcgcggctgcccgaagcctcccagagcccgctggtgctgaagcaggcggtacgcaagccgctggaagccgtgcttcggtatcttgagacccacccccgccccccccaagcctgaccccgtgaaaagcgtgtccagcgtgctcagcagcctgacgcccgccaaggtggcccccgtcatcaacaacggctcccccaccatcctgggcaagcgcagctacgagcagcacaacggggtggacggcaacatgaagaagcgcctcttgatgcccagtaggggtctggcaaaccacggacagaccaggcacatgggaccaagccggaacctcctgctcaacgggaagtcctaccccaccaaagtgcgcctgatccgggggggctccctgcccccagtcaagcggcggcggatgaactggatcgacgccccggatgacgtgttctacatggccacagaggagaccaggaagatccgcaagctgctctcatcctcggaaaccaagcgtgctgcccgccggccctacaagcccatcgccctgcgccagagccaggccctgccgccgcggccaccgccacctgcgcccgtcaacgacgagcccatcgtcatcgaggactaggggccgcccccacctgcggccgccccccgcccctcgcccgcccacacggccccttcccagccagcccgccgcccgcccctcagtttggtagtgccccacctcccgccctcacctgcagagaaacgcgctccttggcggacactgggggaggagaggaagaagcgcggctaacttattccgagaatgccgaggagttgtcgtttttagctttgtgtttactttttggctggagcggagatgaggggccaccccgtgcccctgtgctgcggggccttttgcccggaggccgggccctaaggttttgttgtgttctgttgaaggtgccattttaaattttatttttattactttttttgtagatgaacttgagctctgtaacttacacctggaatgttaggatcgtgcggccgcggccggccgagctgcctggcggggttggcccttgtcttttcaagtaattttcatattaaacaaaaacaaagaaaaaaaatcttataaaaaggaaaaaa

SEQ ID NO: 687621 - DNA, 192 bp, Homo sapiens
  misc_feature (98)..(98): n is a, c, g, or t
atgttggccaggttggtccagaaccctgacctcaagtgatccgcctgcctcggcctcctaaggtgctgggatcacaggcgtgaaccactgtgcctggncttcatacacttttaaataaccagatctcaggtaaactcacttatcaccaaggggatggcactaagccattcatgagggatcggccccccgtga

SEQ ID NO: 687622 - DNA, 2525 bp, Homo sapiens
ggcaggccgccaccctgtgctgaccgtgctgccgggtgctgtctgtctgttatatagccctgtcagtctgctataaggccggaccgggggcggacaacggcgaggaaggggaaatagaagaggaaatggagaatccggaaatggtggacctgcccgagaaactaaagcaccagctgcggcatcgggagctgttcctctcccggcagctggagtctctgcccgccacgcacatcaggggcaagtgcagcgtcaccctgctcaacgagaccgagtcgctcaagtcctacctggagcgggaggatttcttcttctattctctagtctacgacccacagcagaagaccctgctggcagataaaggagagattcgagtaggaaaccggtaccaggcagacatcaccgacttgttaaaagaaggcgaggaggatggccgagaccagtccaggttggagacccaggtgtgggaggcgcacaacccactcacagacaagcagatcgaccagttcctggtggtggcccgctctgtgggcaccttcgcacgggccctggactgcagcagctccgtccgacagcccagcctgcacatgagcgccgcagctgcctcccgagacatcaccctgttccacgccatggatactctccacaagaacatctacgacatctccaaggccatctcggcgctggtgccgcagggcgggcccgtgctctgcagggacgagatggaggagtggtctgcatcagaggccaaccttttcgaggaagccctggaaaaatatgggaaggatttcacggacattcagcaagattttctcccgtggaagtcgctgaccagcatcattgagtactactacatgtggaagaccaccgacagatacgtgcagcagaaacgcttgaaagcagctgaagctgagagcaagttaaagcaagtttatattcccaactataacaagccaaatccgaaccaaatcagcgtcaacaacgtcaaggccggtgtggtgaacggcacgggggcgccgggccagagccctggggctggccgggcctgcgagagctgttacaccacacagtcttaccagtggtattcttggggtccccctaacatgcagtgtcgtctctgcgcatcttgttggacatattggaagaaatatggtggcttgaaaatgccaacccggttagatggagagaggccaggaccaaaccgcagtaacatgagtccccacggcctcccagcccggagcagcgggagccccaagtttgccatgaagaccaggcaggctttctatctgcacacgacgaagctgacgcggatcgcccggcgcctgtgccgtgagatcctgcgcccgtggcacgctgcgcggcacccctacctgcccatcaacagcgcggccatcaaggccgagtgcacggcgcggctgcccgaagcctcccagagcccgctggtgctgaagcaggcggtacgcaagccgctggaagccgtgcttcggtatcttgagacccacccccgccccccccaagcctgaccccgtgaaaagcgtgtccagcgtgctcagcagcctgacgcccgccaaggtggcccccgtcatcaacaacggctcccccaccatcctgggcaagcgcagctacgagcagcacaacggggtggacggcaacatgaagaagcgcctcttgatgcccagtaggggtctggcaaaccacggacagaccaggcacatgggaccaagccggaacctcctgctcaacgggaagtcctaccccaccaaagtgcgcctgatccgggggggctccctgcccccagtcaagcggcggcggatgaactggatcgacgccccggatgacgtgttctacatggccacagaggagaccaggaagatccgcaagctgctctcatcctcggaaaccaagcgtgctgcccgccggccctacaagcccatcgccctgcgccagagccaggccctgccgccgcggccaccgccacctgcgcccgtcaacgacgagcccatcgtcatcgaggactaggggccgcccccacctgcggccgccccccgcccctcgcccgcccacacggccccttcccagccagcccgccgcccgcccctcagtttggtagtgccccacctcccgccctcacctgcagagaaacgcgctccttggcggacactgggggaggagaggaagaagcgcggctaacttattccgagaatgccgaggagttgtcgtttttagctttgtgtttactttttggctggagcggagatgaggggccaccccgtgcccctgtgctgcggggccttttgcccggaggccgggccctaaggttttgttgtgttctgttgaaggtgccattttaaattttatttttattactttttttgtagatgaacttgagctctgtaacttacacctggaatgttaggatcgtgcggccgcggccggccgagctgcctggcggggttggcccttgtcttttcaagtaattttcatattaaacaaaaacaaagaaaaaaaatcttataaaaaggaaaaaa

SEQ ID NO: 687623 - DNA, 552 bp, Homo sapiens
ctcagtgatcctctccccaggtctgcaggtaggaccaggccaacctggatgtatctttcagtagcaaggaactgtgaactgtcttccctagaggggtcatgccccagggtttctcagtgaactttgggaagcataaaacaattcggcctgaaggtgtctcaaaaaaataagtgctaaaccaaaagaggtctttgcacaaacagagcgcagtaccagggaaaccatgccagtctttgagtccaccagtgtagccaagcactgtagtccccagacttagcagctgcttgctccctcccgtcttacgtgacaccatgtgaatgtactcaccactggaccagagaggagcaggtgcctccgctcccagacagttaagtggcgccaagtaaaatggaaaatgtgctggactagccctgagtggcctgtgtaggacactggctctaagacagtggaccttgctaggctcccagagccaggttatattgatcagttctgagggtggaccacaacccttagatcctttgagatttcaggaaatcagaagctgaggatcac

SEQ ID NO: 687624 - DNA, 2643 bp, Homo sapiens
  misc_feature (41)..(43): n is a, c, g, or t
  misc_feature (46)..(46): n is a, c, g, or t
  misc_feature (54)..(55): n is a, c, g, or t
tgctggtactggccgggattttgggatcgcgccgagcgccnnnccngccccggnnccctccgccgccgccggcccggacatggccgccaacatgtacagggtcggagactacgtctactttgagaactcctccagcaacccatacctgatccggagaatcgaggagctcaacaagccctgtcagtctgctataaggccggaccgggggcggacaacggcgaggaaggggaaatagaagaggaaatggagaatccggaaatggtggacctgcccgagaaactaaagcaccagctgcggcatcgggagctgttcctctcccggcagctggagtctctgcccgccacgcacatcaggggcaagtgcagcgtcaccctgctcaacgagaccgagtcgctcaagtcctacctggagcgggaggatttcttcttctattctctagtctacgacccacagcagaagaccctgctggcagataaaggagagattcgagtaggaaaccggtaccaggcagacatcaccgacttgttaaaagaaggcgaggaggatggccgagaccagtccaggttggagacccaggtgtgggaggcgcacaacccactcacagacaagcagatcgaccagttcctggtggtggcccgctctgtgggcaccttcgcacgggccctggactgcagcagctccgtccgacagcccagcctgcacatgagcgccgcagctgcctcccgagacatcaccctgttccacgccatggatactctccacaagaacatctacgacatctccaaggccatctcggcgctggtgccgcagggcgggcccgtgctctgcagggacgagatggaggagtggtctgcatcagaggccaaccttttcgaggaagccctggaaaaatatgggaaggatttcacggacattcagcaagattttctcccgtggaagtcgctgaccagcatcattgagtactactacatgtggaagaccaccgacagatacgtgcagcagaaacgcttgaaagcagctgaagctgagagcaagttaaagcaagtttatattcccaactataacaagccaaatccgaaccaaatcagcgtcaacaacgtcaaggccggtgtggtgaacggcacgggggcgccgggccagagccctggggctggccgggcctgcgagagctgttacaccacacagtcttaccagtggtattcttggggtccccctaacatgcagtgtcgtctctgcgcatcttgttggacatattggaagaaatatggtggcttgaaaatgccaacccggttagatggagagaggccaggaccaaaccgcagtaacatgagtccccacggcctcccagcccggagcagcgggagccccaagtttgccatgaagaccaggcaggctttctatctgcacacgacgaagctgacgcggatcgcccggcgcctgtgccgtgagatcctgcgcccgtggcacgctgcgcggcacccctacctgcccatcaacagcgcggccatcaaggccgagtgcacggcgcggctgcccgaagcctcccagagcccgctggtgctgaagcaggcggtacgcaagccgctggaagccgtgcttcggtatcttgagacccacccccgccccccccaagcctgaccccgtgaaaagcgtgtccagcgtgctcagcagcctgacgcccgccaaggtggcccccgtcatcaacaacggctcccccaccatcctgggcaagcgcagctacgagcagcacaacggggtggacggcaacatgaagaagcgcctcttgatgcccagtaggggtctggcaaaccacggacagaccaggcacatgggaccaagccggaacctcctgctcaacgggaagtcctaccccaccaaagtgcgcctgatccgggggggctccctgcccccagtcaagcggcggcggatgaactggatcgacgccccggatgacgtgttctacatggccacagaggagaccaggaagatccgcaagctgctctcatcctcggaaaccaagcgtgctgcccgccggccctacaagcccatcgccctgcgccagagccaggccctgccgccgcggccaccgccacctgcgcccgtcaacgacgagcccatcgtcatcgaggactaggggccgcccccacctgcggccgccccccgcccctcgcccgcccacacggccccttcccagccagcccgccgcccgcccctcagtttggtagtgccccacctcccgccctcacctgcagagaaacgcgctccttggcggacactgggggaggagaggaagaagcgcggctaacttattccgagaatgccgaggagttgtcgtttttagctttgtgtttactttttggctggagcggagatgaggggccaccccgtgcccctgtgctgcggggccttttgcccggaggccgggccctaaggttttgttgtgttctgttgaaggtgccattttaaattttatttttattactttttttgtagatgaacttgagctctgtaacttacacctggaatgttaggatcgtgcggccgcggccggccgagctgcctggcggggttggcccttgtcttttcaagtaattttcatattaaacaaaaacaaagaaaaaaaatcttataaaaaggaaaaaa

SEQ ID NO: 687625 - DNA, 550 bp, Homo sapiens
gtcaggatgactctataggatccccctaggtgagcgacgtgaaaaaattagtgtgaccaagttgggaagaaagctatcagcaccaactcaaaactctccaccttcagtatcagacattctagatctcctgtctagcaacgtcgttgagattgcagaaacctctcggcgaagaacaaggatacgctggagaagttacaggcgagcggggatgctctggtggacaggcagagtcaattgaaagaaactttggagaataactctttcctcatcaccactgtaaacaaaaccctccaggcgtataatggctatgtcacgaatctgcagcaagataccagcgtgctccagggcaatctgcagaaccaaatgtattctcataatgtggtcatcatgaacctcaacaacctgaacctgacccaggtgcagcagaggaacctcatcacgaatctgcagcggtctgtggatgacacaagccaggctatccagcgaatcaagaacgactttcaaaatctgcagcaggtttttcttcaagccaagaaggacacggattggc

SEQ ID NO: 687626 - DNA, 2929 bp, Homo sapiens
cagagatgctgctggtctcttttcctgtgatgaggagcatgggaggttgggtgctgtctgctggcagcacagccacgcgtgggatccagactgcttctgcgtgtgcggtccgtggtcactgtggccgggtgtgctcggagctgtcaggccccccacgtgcccgccccgaggacttcctctccctgcagactacgtctactttgagaactcctccagcaacccatacctgatccggagaatcgaggagctcaacaagacggccaatgggaacgtggaggccaaagtggtgtgcttctaccggaggcgggacatctccagcaccctcatcgccctggccgacaagcacgcaaccctgtcagtctgctataaggccggaccgggggcggacaacggcgaggaaggggtacctgccaaggagccgccgggccgccatagggtggggcagtgggacagtgtccggcagcaggaggaggcacgcctcccaggactgggcctcctgcgtgctggcgccagggaaatagaagaggaaatggagaatccggaaatggtggacctgcccgagaaactaaagcaccagctgcggcatcgggagctgttcctctcccggcagctggagtctctgcccgccacgcacatcaggggcaagtgcagcgtcaccctgctcaacgagaccgagtcgctcaagtcctacctggagcgggaggatttcttcttctattctctagtctacgacccacagcagaagaccctgctggcagataaaggagagattcgagtaggaaaccggtaccaggcagacatcaccgacttgttaaaagaaggcgaggaggatggccgagaccagtccaggttggagacccaggtgtgggaggcgcacaacccactcacagacaagcagatcgaccagttcctggtggtggcccgctctgtgggcaccttcgcacgggccctggactgcagcagctccgtccgacagcccagcctgcacatgagcgccgcagctgcctcccgagacatcaccctgttccacgccatggatactctccacaagaacatctacgacatctccaaggccatctcggcgctggtgccgcagggcgggcccgtgctctgcagggacgagatggaggagtggtctgcatcagaggccaaccttttcgaggaagccctggaaaaatatgggaaggatttcacggacattcagcaagattttctcccgtggaagtcgctgaccagcatcattgagtactactacatgtggaagaccaccgacagatacgtgcagcagaaacgcttgaaagcagctgaagctgagagcaagttaaagcaagtttatattcccaactataacaagccaaatccgaaccaaatcagcgtcaacaacgtcaaggccggtgtggtgaacggcacgggggcgccgggccagagccctggggctggccgggcctgcgagagctgttacaccacacagtcttaccagtggtattcttggggtccccctaacatgcagtgtcgtctctgcgcatcttgttggacatattggaagaaatatggtggcttgaaaatgccaacccggttagatggagagaggccaggaccaaaccgcagtaacatgagtccccacggcctcccagcccggagcagcgggagccccaagtttgccatgaagaccaggcaggctttctatctgcacacgacgaagctgacgcggatcgcccggcgcctgtgccgtgagatcctgcgcccgtggcacgctgcgcggcacccctacctgcccatcaacagcgcggccatcaaggccgagtgcacggcgcggctgcccgaagcctcccagagcccgctggtgctgaagcaggcggtacgcaagccgctggaagccgtgcttcggtatcttgagacccacccccgccccccccaagcctgaccccgtgaaaagcgtgtccagcgtgctcagcagcctgacgcccgccaaggtggcccccgtcatcaacaacggctcccccaccatcctgggcaagcgcagctacgagcagcacaacggggtggacggcaacatgaagaagcgcctcttgatgcccagtaggggtctggcaaaccacggacagaccaggcacatgggaccaagccggaacctcctgctcaacgggaagtcctaccccaccaaagtgcgcctgatccgggggggctccctgcccccagtcaagcggcggcggatgaactggatcgacgccccggatgacgtgttctacatggccacagaggagaccaggaagatccgcaagctgctctcatcctcggaaaccaagcgtgctgcccgccggccctacaagcccatcgccctgcgccagagccaggccctgccgccgcggccaccgccacctgcgcccgtcaacgacgagcccatcgtcatcgaggactaggggccgcccccacctgcggccgccccccgcccctcgcccgcccacacggccccttcccagccagcccgccgcccgcccctcagtttggtagtgccccacctcccgccctcacctgcagagaaacgcgctccttggcggacactgggggaggagaggaagaagcgcggctaacttattccgagaatgccgaggagttgtcgtttttagctttgtgtttactttttggctggagcggagatgaggggccaccccgtgcccctgtgctgcggggccttttgcccggaggccgggccctaaggttttgttgtgttctgttgaaggtgccattttaaattttatttttattactttttttgtagatgaacttgagctctgtaacttacacctggaatgttaggatcgtgcggccgcggccggccgagctgcctggcggggttggcccttgtcttttcaagtaattttcatattaaacaaaaacaaagaaaaaaaatcttataaaaaggaaaaaa

SEQ ID NO: 687627 - DNA, 144 bp, Homo sapiens
  misc_feature (23)..(23): n is a, c, g, or t
  misc_feature (133)..(133): n is a, c, g, or t
gtaccgtcactgcagcataggtngtaattgtggtcaagattcagtccctggtccaggaacttccatgagccgtgggtgcagccattaaaaaaagaagaagaagaagaagaagaagaagaagagaagtatcctngcctctctggt

SEQ ID NO: 687628 - DNA, 531 bp, Homo sapiens
  misc_feature (401)..(401): n is a, c, g, or t
  misc_feature (478)..(478): n is a, c, g, or t
gtcgaggatcccctcaacgctttatacttcactatgtatatgcaaatattccaagatctaaaaaagttcaaaatctgaaacacttcccattccaaacattttctataaggcaggctcaacctgtacgattttttttctcaagattttttttttaagaaatatcagcaaactggccaaaaaagaaataacaaacctatgagtgatatatttatgccattttcaaaaaaaaaaaaattaggaagtggagaatggataatactagaaagaaaaggggcggagtggtcattcagaacatgttccctagttcaggttagactgggcctcccaaatgaagaggtgtgtgtcgggggatgggggtggggggatatgggatccgggagatggccagcttccagaatatnacggtgactgggactaatctggtgctcctcagtacctacgtctatgcccttgggcggttgggatgagggctcctggntgcagagtccaggaagtataaagggttgagctcaacgctttataattcattag

SEQ ID NO: 687629 - DNA, 2762 bp, Homo sapiens
  misc_feature (41)..(43): n is a, c, g, or t
  misc_feature (46)..(46): n is a, c, g, or t
  misc_feature (54)..(55): n is a, c, g, or t
tgctggtactggccgggattttgggatcgcgccgagcgccnnnccngccccggnnccctccgccgccgccggcccggacatggccgccaacatgtacagggtcggagactacgtctactttgagaactcctccagcaacccatacctgatccggagaatcgaggagctcaacaagacggccaatgggaacgtggaggccaaagtggtgtgcttctaccggaggcgggacatctccagcaccctcatcgccctggccgacaagcacgcaagggaaatagaagaggaaatggagaatccggaaatggtggacctgcccgagaaactaaagcaccagctgcggcatcgggagctgttcctctcccggcagctggagtctctgcccgccacgcacatcaggtagcccccagcagctcccgccctgggcccctcgggctgccctcgcctttccagcctgcccgtccttctcttccaggggcaagtgcagcgtcaccctgctcaacgagaccgagtcgctcaagtcctacctggagcgggaggatttcttcttctattctctagtctacgacccacagcagaagaccctgctggcagataaaggagagattcgagtaggaaaccggtaccaggcagacatcaccgacttgttaaaagaaggcgaggaggatggccgagaccagtccaggttggagacccaggtgtgggaggcgcacaacccactcacagacaagcagatcgaccagttcctggtggtggcccgctctgtgggcaccttcgcacgggccctggactgcagcagctccgtccgacagcccagcctgcacatgagcgccgcagctgcctcccgagacatcaccctgttccacgccatggatactctccacaagaacatctacgacatctccaaggccatctcggcgctggtgccgcagggcgggcccgtgctctgcagggacgagatggaggagtggtctgcatcagaggccaaccttttcgaggaagccctggaaaaatatgggaaggatttcacggacattcagcaagattttctcccgtggaagtcgctgaccagcatcattgagtactactacatgtggaagaccaccgacagatacgtgcagcagaaacgcttgaaagcagctgaagctgagagcaagttaaagcaagtttatattcccaactataacaagccaaatccgaaccaaatcagcgtcaacaacgtcaaggccggtgtggtgaacggcacgggggcgccgggccagagccctggggctggccgggcctgcgagagctgttacaccacacagtcttaccagtggtattcttggggtccccctaacatgcagtgtcgtctctgcgcatcttgttggacatattggaagaaatatggtggcttgaaaatgccaacccggttagatggagagaggccaggaccaaaccgcagtaacatgagtccccacggcctcccagcccggagcagcgggagccccaagtttgccatgaagaccaggcaggctttctatctgcacacgacgaagctgacgcggatcgcccggcgcctgtgccgtgagatcctgcgcccgtggcacgctgcgcggcacccctacctgcccatcaacagcgcggccatcaaggccgagtgcacggcgcggctgcccgaagcctcccagagcccgctggtgctgaagcaggcggtacgcaagccgctggaagccgtgcttcggtatcttgagacccacccccgccccccccaagcctgaccccgtgaaaagcgtgtccagcgtgctcagcagcctgacgcccgccaaggtggcccccgtcatcaacaacggctcccccaccatcctgggcaagcgcagctacgagcagcacaacggggtggacggcaacatgaagaagcgcctcttgatgcccagtaggggtctggcaaaccacggacagaccaggcacatgggaccaagccggaacctcctgctcaacgggaagtcctaccccaccaaagtgcgcctgatccgggggggctccctgcccccagtcaagcggcggcggatgaactggatcgacgccccggatgacgtgttctacatggccacagaggagaccaggaagatccgcaagctgctctcatcctcggaaaccaagcgtgctgcccgccggccctacaagcccatcgccctgcgccagagccaggccctgccgccgcggccaccgccacctgcgcccgtcaacgacgagcccatcgtcatcgaggactaggggccgcccccacctgcggccgccccccgcccctcgcccgcccacacggccccttcccagccagcccgccgcccgcccctcagtttggtagtgccccacctcccgccctcacctgcagagaaacgcgctccttggcggacactgggggaggagaggaagaagcgcggctaacttattccgagaatgccgaggagttgtcgtttttagctttgtgtttactttttggctggagcggagatgaggggccaccccgtgcccctgtgctgcggggccttttgcccggaggccgggccctaaggttttgttgtgttctgttgaaggtgccattttaaattttatttttattactttttttgtagatgaacttgagctctgtaacttacacctggaatgttaggatcgtgcggccgcggccggccgagctgcctggcggggttggcccttgtcttttcaagtaattttcatattaaacaaaaacaaagaaaaaaaatcttataaaaaggaaaaaa

SEQ ID NO: 687630 - DNA, 166 bp, Homo sapiens
  misc_feature (46)..(46): n is a, c, g, or t
  misc_feature (87)..(88): n is a, c, g, or t
  misc_feature (109)..(109): n is a, c, g, or t
  misc_feature (151)..(151): n is a, c, g, or t
cggctagcggccctgcgtggaggcgtggaatccgcatctatgttgntgtccctgcatcccatgtgtcggagctgatggccttcatgnngtggaagttgtgggacctggngcagcaggtgaaggcccagactgatgagatactgtccaaggntcagaagatagcggc

SEQ ID NO: 687631 - DNA, 2440 bp, Homo sapiens
  misc_feature (9)..(9): n is a, c, g, or t
cctgatgantggccgtggggttcttcggatgctgcggctgtgagttggagcctggggaggcgctgtgctggagcccggctgtgggtctaagtgtggggaagtcactgtgctgaggcctgtgggtctgagtgtggtccttctctctccaaggggcaagtgcagcgtcaccctgctcaacgagaccgagtcgctcaagtcctacctggagcgggaggatttcttcttctattctctagtctacgacccacagcagaagaccctgctggcagataaaggagagattcgagtaggaaaccggtaccaggcagacatcaccgacttgttaaaagaaggcgaggaggatggccgagaccagtccaggttggagacccaggtgtgggaggcgcacaacccactcacagacaagcagatcgaccagttcctggtggtggcccgctctgtgggcaccttcgcacgggccctggactgcagcagctccgtccgacagcccagcctgcacatgagcgccgcagctgcctcccgagacatcaccctgttccacgccatggatactctccacaagaacatctacgacatctccaaggccatctcggcgctggtgccgcagggcgggcccgtgctctgcagggacgagatggaggagtggtctgcatcagaggccaaccttttcgaggaagccctggaaaaatatgggaaggatttcacggacattcagcaagattttctcccgtggaagtcgctgaccagcatcattgagtactactacatgtggaagaccaccgacagatacgtgcagcagaaacgcttgaaagcagctgaagctgagagcaagttaaagcaagtttatattcccaactataacaagccaaatccgaaccaaatcagcgtcaacaacgtcaaggccggtgtggtgaacggcacgggggcgccgggccagagccctggggctggccgggcctgcgagagctgttacaccacacagtcttaccagtggtattcttggggtccccctaacatgcagtgtcgtctctgcgcatcttgttggacatattggaagaaatatggtggcttgaaaatgccaacccggttagatggagagaggccaggaccaaaccgcagtaacatgagtccccacggcctcccagcccggagcagcgggagccccaagtttgccatgaagaccaggcaggctttctatctgcacacgacgaagctgacgcggatcgcccggcgcctgtgccgtgagatcctgcgcccgtggcacgctgcgcggcacccctacctgcccatcaacagcgcggccatcaaggccgagtgcacggcgcggctgcccgaagcctcccagagcccgctggtgctgaagcaggcggtacgcaagccgctggaagccgtgcttcggtatcttgagacccacccccgccccccccaagcctgaccccgtgaaaagcgtgtccagcgtgctcagcagcctgacgcccgccaaggtggcccccgtcatcaacaacggctcccccaccatcctgggcaagcgcagctacgagcagcacaacggggtggacggcaacatgaagaagcgcctcttgatgcccagtaggggtctggcaaaccacggacagaccaggcacatgggaccaagccggaacctcctgctcaacgggaagtcctaccccaccaaagtgcgcctgatccgggggggctccctgcccccagtcaagcggcggcggatgaactggatcgacgccccggatgacgtgttctacatggccacagaggagaccaggaagatccgcaagctgctctcatcctcggaaaccaagcgtgctgcccgccggccctacaagcccatcgccctgcgccagagccaggccctgccgccgcggccaccgccacctgcgcccgtcaacgacgagcccatcgtcatcgaggactaggggccgcccccacctgcggccgccccccgcccctcgcccgcccacacggccccttcccagccagcccgccgcccgcccctcagtttggtagtgccccacctcccgccctcacctgcagagaaacgcgctccttggcggacactgggggaggagaggaagaagcgcggctaacttattccgagaatgccgaggagttgtcgtttttagctttgtgtttactttttggctggagcggagatgaggggccaccccgtgcccctgtgctgcggggccttttgcccggaggccgggccctaaggttttgttgtgttctgttgaaggtgccattttaaattttatttttattactttttttgtagatgaacttgagctctgtaacttacacctggaatgttaggatcgtgcggccgcggccggccgagctgcctggcggggttggcccttgtcttttcaagtaattttcatattaaacaaaaacaaagaaaaaaaatcttataaaaaggaaaaaa

SEQ ID NO: 687632 - DNA, 179 bp, Homo sapiens
cagtctgtaagaagtgctatgagaaatttccattggagctgaagaaaagacttaagaacctagctgagacctcaggagggaaataagtccctctaatttattcctctcctatccaagataagacattcccaccattccttgcctggatcccccctatttaaagctatacctcaaagcag

SEQ ID NO: 687633 - DNA, 150 bp, Homo sapiens
gatctgcggttcgacacctgacctagcacacactggacacaggggctggacaagcccgcctctctggtctccaaaatcccaaagcagctggtagagactttggggacttttatttgctaacagctttggttgttcatagagatctcgtta

SEQ ID NO: 687634 - DNA, 2690 bp, Homo sapiens
  misc_feature (41)..(43): n is a, c, g, or t
  misc_feature (46)..(46): n is a, c, g, or t
  misc_feature (54)..(55): n is a, c, g, or t
tgctggtactggccgggattttgggatcgcgccgagcgccnnnccngccccggnnccctccgccgccgccggcccggacatggccgccaacatgtacagggtcggagactacgtctactttgagaactcctccagcaacccatacctgatccggagaatcgaggagctcaacaagacggccaatgggaacgtggaggccaaagtggtgtgcttctaccggaggcgggacatctccagcaccctcatcgccctggccgacaagcacgcaaccctgtcagtctgctataaggccggaccgggggcggacaacggcgaggaaggggaaatagaagaggaaatggagaatccggaaatggtggacctgcccgagaaactaaagcaccagctgcggcatcgggagctgttcctctcccggcagctggagtctctgcccgccacgcacatcaggggcaagtgcagcgtcaccctgctcaacgagaccgagtcgctcaagtcctacctggagcgggaggatttcttcttctattctctagtctacgacccacagcagaagaccctgctggcagataaaggagagattcgagtaggaaaccggtaccaggcagacatcaccgacttgttaaaagaaggcgaggaggatggccgagaccagtccaggttggagacccaggtgtgggaggcgcacaacccactcacagacaagcagatcgaccagttcctggtggtggcccgctctgtgggcaccttcgcacgggccctggactgcagcagctccgtccgacagcccagcctgcacatgagcgccgcagctgcctcccgagacatcaccctgttccacgccatggatactctccacaagaacatctacgacatctccaaggccatctcggcgctggtgccgcagggcgggcccgtgctctgcagggacgagatggaggagtggtctgcatcagaggccaaccttttcgaggaagccctggaaaaatatgggaaggatttcacggacattcagcaagattttctcccgtggaagtcgctgaccagcatcattgagtactactacatgtggaagaccaccgacagatacgtgcagcagaaacgcttgaaagcagctgaagctgagagcaagttaaagcaagtttatattcccaactataacaagccaaatccgaaccaaatcagcgtcaacaacgtcaaggccggtgtggtgaacggcacgggggcgccgggccagagccctggggctggccgggcctgcgagagctgttacatgtcgtctctgcgcatcttgttggacatattggaagaaatatggtggcttgaaaatgccaacccggttagatggagagaggccaggaccaaaccgcagtaacatgagtccccacggcctcccagcccggagcagcgggagccccaagtttgccatgaagaccaggcaggctttctatctgcacacgacgaagctgacgcggatcgcccggcgcctgtgccgtgagatcctgcgcccgtggcacgctgcgcggcacccctacctgcccatcaacagcgcggccatcaaggccgagtgcacggcgcggctgcccgaagcctcccagagcccgctggtgctgaagcaggcggtacgcaagccgctggaagccgtgcttcggtatcttgagacccacccccgccccccccaagcctgaccccgtgaaaagcgtgtccagcgtgctcagcagcctgacgcccgccaaggtggcccccgtcatcaacaacggctcccccaccatcctgggcaagcgcagctacgagcagcacaacggggtggacggcaacatgaagaagcgcctcttgatgcccagtaggggtctggcaaaccacggacagaccaggcacatgggaccaagccggaacctcctgctcaacgggaagtcctaccccaccaaagtgcgcctgatccgggggggctccctgcccccagtcaagcggcggcggatgaactggatcgacgccccggatgacgtgttctacatggccacagaggagaccaggaagatccgcaagctgctctcatcctcggaaaccaagcgtgctgcccgccggccctacaagcccatcgccctgcgccagagccaggccctgccgccgcggccaccgccacctgcgcccgtcaacgacgagcccatcgtcatcgaggactaggggccgcccccacctgcggccgccccccgcccctcgcccgcccacacggccccttcccagccagcccgccgcccgcccctcagtttggtagtgccccacctcccgccctcacctgcagagaaacgcgctccttggcggacactgggggaggagaggaagaagcgcggctaacttattccgagaatgccgaggagttgtcgtttttagctttgtgtttactttttggctggagcggagatgaggggccaccccgtgcccctgtgctgcggggccttttgcccggaggccgggccctaaggttttgttgtgttctgttgaaggtgccattttaaattttatttttattactttttttgtagatgaacttgagctctgtaacttacacctggaatgttaggatcgtgcggccgcggccggccgagctgcctggcggggttggcccttgtcttttcaagtaattttcatattaaacaaaaacaaagaaaaaaaatcttataaaaaggaaaaaa

SEQ ID NO: 687635 - DNA, 582 bp, Homo sapiens
ctggagacggggtccaggagagtatcatgggtgaacattaactggtaacatacctgatatccacaggaaagctaccaaaaatatccacaggaaagcaccatcaaatatctaaccggatggattcaccttctctctcaccatagtggttctcgggtaaagtgagaccgggcacctttaacgggggtgacttttggggtgaaaagcctgacctggattatctatctcccagtgaagatatcaaaaacaggaggaggtgaaaggtggccggggggagggaaaatgattaaagattcaagcgccccaggcatggcacatgcttacaaaatcggagggaaagagcggcataataatttcggacctcgcctatttaacatgcttggaatttagggatcattgcatgggatgttctcataggactcaacacaaagaccaaagggggggggataagaaccaatctaggggggggggaagacatccggagagtctttgcccaattccccaaggtcacttgtacatgatactgttcccccttatacacctcatccttccaggtggtttatccttaagattctacaggatgga

SEQ ID NO: 687636 - DNA, 502 bp, Homo sapiens
tagtcatggggtagaagacacaccctgctcataacgacatgcactacatgtggaatctcagcagagaaatgcacataattaaaaagaaccaaatagaaagataatgcaattgtaactagtacttttaggttgcattccatagcattcagcaacccgcaccagaaccaattgaaattattcaatctgcaacaaaaagcagtaaaaaacagtttgaagaaaatgaacagagtcttacaatctgtgggcagattgtgtcctagaccagcagtgaagggacagcacaaattaacatggggttgcaccaagtaacacactaatcgctagaaaacttgcaaaaatttgtcaaaaccccacattttatatccacgcagtcaacagattccaaaaagaaaatccaagtaaaatcgtacaaaggccacattgtgatttacgaaactggccaggaccagggcttccaattgactttctaaaatttctaatttttactaattatcatgatggc

SEQ ID NO: 687637 - DNA, 678 bp, Homo sapiens
  misc_feature (522)..(522): n is a, c, g, or t
  misc_feature (634)..(634): n is a, c, g, or t
aaacctacgaatgcctaatccaaggttcccaaatcgcccgcacatcctggggcgggttctcgtccggaggtaatgactgaatggggtgtgaaaggaaatagaccgtgttcctgtacgacgtcggtttgttagcggtcgaatgtttctcttggcgatttaatcttcttgattcggaggtgggaaatgtcgtctttggtggtggacgttccccgggggttaggagaacgatcgcgcgcttggatatataactttgaggggacacgtactggtttgggagtgtgcgaaggagaggggatgaagattggattaagtattattgaggattaagtattgatgttgccttcgaaggcgagtccccgtaacgtatcgcgaaccttggttgtgtgcctaactttctttgttatctccgcttttgtcgtagaaagcgaaatcttaatttccgtaaagaaagcttctccgttagggtggggtatctaccgtatcgacgccatttattccctcgatttttggtgtggtaagccntgtgtttgggcgttgttgggcgtgtgttttggggtataatatttactatatctctgacgaagtctagggttttggggggtttacttctaatcctatttcgaggggggcgttnaccccgaggggtttcgtgaagttaggggatattccctggacgaa

SEQ ID NO: 687638 - DNA, 177 bp, Homo sapiens
tctgtccgtcgctaaaaatcgactcgggtactgcaggatctctagagatcgacaggctccagctatacgatatttggaggtcagaccacggtgctcacgtgtcgacggaactatgtacagagaaggcatacaccgcagtggtagaatacacgtcgaccaggctccagactaaacgat

SEQ ID NO: 687639 - DNA, 104 bp, Homo sapiens
agaggaccatcagagtcatatcacaatagggtttcgacctcgatgtggatcaggacatcccgatggtgcagccgctattaaaggttcgttgttcaccgattaaa

SEQ ID NO: 687640 - DNA, 897 bp, Homo sapiens
  misc_feature (8)..(8): n is a, c, g, or t
  misc_feature (104)..(104): n is a, c, g, or t
  misc_feature (121)..(122): n is a, c, g, or t
  misc_feature (166)..(166): n is a, c, g, or t
  misc_feature (196)..(196): n is a, c, g, or t
  misc_feature (226)..(226): n is a, c, g, or t
  misc_feature (260)..(260): n is a, c, g, or t
  misc_feature (309)..(309): n is a, c, g, or t
  misc_feature (335)..(335): n is a, c, g, or t
  misc_feature (353)..(353): n is a, c, g, or t
  misc_feature (414)..(414): n is a, c, g, or t
  misc_feature (462)..(463): n is a, c, g, or t
  misc_feature (472)..(472): n is a, c, g, or t
  misc_feature (487)..(487): n is a, c, g, or t
  misc_feature (553)..(553): n is a, c, g, or t
  misc_feature (841)..(841): n is a, c, g, or t
ctgaagcntccgctcccgcttgaacttcctctgcagctgcaggatgccgtagagcagggcctcggccgtaggtgggcagcctgcagggaccttgcctcagtatnaattccagcagccggannacgcgtgaacgcgtgcacagcgcagcggctcggatttggaaggntttcccgggccggcctctgaaggtggaggntgacagccctgggtgggcgcagtgccaggnactgggagccggcgcagggtaggtccctgcaggnagagtggggtcctcccctgggcaaggtcccactgctctccacccgtggntcatcccgggctgtcacagggacctntcggacaagatgctgacntcactaacccggcccctggccccagccctcaggatttaatgggggccagcgctcagcaganacacttagcagttgggagcagggcccggggctgccctggacggagatnnaggtttgtnggctgggtggatttnggggaggtggcccagagcccgggcatcccacgaggacccgatgaccctctttctgagccccaagcnagagctctttgctggggatccccagtcccggctgccacgcaggttcagaacaaagggcttgagcaagaggacgaagcccagggcccaacggggacagcaggagtggaaacaggtgagagaggacaaggccactgcatgggcctgggaaagggcggccaggccccacctggcagagctctggcaagtccaggctgctcaagggagggagaagcacagtccgcaggaggggagcagcacagtccgcaggaggggagggaggagcgaggtcccagggagggaggagcgcgncgctgggagggagggcgcggtcccagggagggcgaacgcggtctgagggagggagc

SEQ ID NO: 687641 - DNA, 638 bp, Homo sapiens
  misc_feature (3)..(3): n is a, c, g, or t
ggntcgatccctcgaatgcaaaagttgaaaagaaaaaacaacatcagggctggtcactagctctgttctcgagattataaccaaactaaaatgtcagtgatggggatatgagctctgcatcttaccagagactagaaaaggggcttactgccttataggatacatcagccagacatgaaggctaggccataagcatacattttcttcacaggtccatccactttatgggatttttctcaaggaaagtatagatacagccagtgggcaaggaggtttacctaaaacagaatgaaataaagtccttgttggctctctctttcaagatggaaaatgaagtggacgtgaccaattgtagaagatcacagaacgcttacaaatgaaaaacaatggggtatgtttctcttgagcagtcagtacgtgaaattatcaaaggtctaaaatttcccaaataaactgacaacaaacatataaggtcctggagattgtcagtgccatagatcaaaaaaccaatttttcatctttgcttttaattaaagctgcaggattccatgagtgaccagcagtaaaatattaatacattaaagaataaaccaaaggaaaacatttggtacaatgtaagtggtccaacaatagaagac

SEQ ID NO: 687642 - DNA, 886 bp, Homo sapiens
caggcgccatggatcttcctcaccgcgccagcatctggctgcggaatcgcgtcaccgaccgctactttcggatccaggaggtgctgaagcacgccagcgcacttccggggcaaggaaaaatcgcatgctacaggttggcggctcagaaccgtgattcgagccttcgtgaaactgcaccaaagcccgatacctgaacgaaccaagaacatgaggaccctctggcatcaactcgaattacagctgctagcccaggcaacatggcactgccagctatccagcgctacctagggcaatccagttaaacggcacttccaggctcggctcaacacggcgttacccataggaccagcagtcagctcagctcagggctggctgcaccaaggaccctgaacaaggtgatcggtaccccgggccgaccacccagcggctgcacgatccagcctccctgcacgcataccacagcacgccaggtggagctcaaccaggacagtcctacacggatctggccatctaccagccacaagactacccaaatccttgcctcgccttggcccagcacgagacgcaccacacggataacgcccgcctgccctcgccggaatgcggacacgacaccacgccggccatacccccaagagcggacgccgtcacccatgcaggactgatgactgaactgcaaaggcaaacaacaacaacaaaaccaaacaaacacccagcacggcgcccaggccaccgttcgagcagcgctctaacaaaccaacgacagagagcaacgcggccaacacgagcaacaacacacggcgtccccgcggcacccaagaacacctgcaaagacaacgcggtgcacgccacacgaaaaaaaccacacgggcccccacaaactcac

SEQ ID NO: 687643 - DNA, 145 bp, Homo sapiens
ttgctgcttggtgatctagaggatcccagacgtcattcttgcattagtggcacatgaaatagagaaggagaggagggcagtggcatgagggtgtgggccagaggcagtgggacaatggaggggagaagagaagggagggaagcag

SEQ ID NO: 687644 - DNA, 380 bp, Homo sapiens
ctctttttacccagaagcaagacatagattagaaagagaaaaggtatcctgccccactcctttaccagggagaacaaaggttaaccactgaagacagcgtcagaccctcattagccttgaaatgatatcagaggaattaatattagctttttttaaaccatcttttgtctgctatttgtttgcttagcccaagttactgcctgtagagactcagagtccttttcctttgtcacatctctaaaaatttcctagtctttgttgaagatgctatacaagctggaattcaaagacgcttctttgagaactactcattctctgggtgttcctcatatataaatgaaatacattaataaacatctgtttttctcaagttaaaaaaa

SEQ ID NO: 687645 - DNA, 111 bp, Homo sapiens
atgactcgttctatatctacattctaagaaagcaacgtaaaggacaaacactccacagcgtgcagtacacttatttaaaagccttaaaaaattcacagaatgttcttgcct

SEQ ID NO: 687646 - DNA, 377 bp, Homo sapiens
ggtcgactggagtacagtggcgcagtctcaactcacttcaacctctgtctgctgggttcaagtgattctcctgcctcagcctcccgagtagctgggattacaggtgcccaccaccatgcccagctaatttctgtatttttagtagagatggggtttcaccatgttggccaggctggtctcaaactcctgacctacggtgatctgcccgcctcagcctcccaaagtgttgggattacaggcatgaaccacccctccgaactctttttgtgtttgtgttttgttttttcttttgagacaagttctcgccctgaggctggagtgcagtggcgcaatcacagctcactgaggcctccaattcctggactcagggatcgtcc

SEQ ID NO: 687647 - DNA, 363 bp, Homo sapiens
caaattagaaaaataatgggagaagaggaaaagttggccagagaagggtaagaaagtttgcatagtggagatgggtaaaggagccccctcaagtatttccagcttcagccagtgatgccttggcccttagctgctttttaaagcatagggcaaagggtgcagatactttctacccttaaatagtgtgtggccttgggcaagtgttttaacatttttttggttcattttcctccctaagattgtccccccttatggagttaatgatccctactggacctccctcccaggattgtagtgggggtagaatgaaaaaatcgatgtgaaagtgttttgatagtaaaagctttttatgatggcaggtga

SEQ ID NO: 687648 - DNA, 271 bp, Homo sapiens
tcgcctgcatctcgccgctccgcgcacactgagattcggcgcggcccgccctgctaccgcgaacttgagcagtcaagtgaaggtttttgggttggggatctcacccccactccccctaagctggactcgggactcccagtcctcggagggcacagatgactgtaatttcttctccttccaacaacaggacagcgtggctttcctgagagcctgaaacgacgagcacgccatctcaaccgggaccccaagacacagagctctgcggcggccg

SEQ ID NO: 687649 - DNA, 309 bp, Homo sapiens
  misc_feature (16)..(16): n is a, c, g, or t
  misc_feature (51)..(51): n is a, c, g, or t
  misc_feature (95)..(95): n is a, c, g, or t
  misc_feature (106)..(106): n is a, c, g, or t
  misc_feature (114)..(114): n is a, c, g, or t
  misc_feature (142)..(142): n is a, c, g, or t
  misc_feature (146)..(146): n is a, c, g, or t
  misc_feature (157)..(157): n is a, c, g, or t
  misc_feature (171)..(171): n is a, c, g, or t
  misc_feature (200)..(200): n is a, c, g, or t
  misc_feature (210)..(210): n is a, c, g, or t
  misc_feature (216)..(216): n is a, c, g, or t
  misc_feature (219)..(219): n is a, c, g, or t
  misc_feature (234)..(234): n is a, c, g, or t
  misc_feature (240)..(240): n is a, c, g, or t
  misc_feature (268)..(268): n is a, c, g, or t
  misc_feature (270)..(270): n is a, c, g, or t
  misc_feature (274)..(274): n is a, c, g, or t
  misc_feature (278)..(278): n is a, c, g, or t
  misc_feature (283)..(283): n is a, c, g, or t
  misc_feature (286)..(286): n is a, c, g, or t
cgtgggctgtgtggcngtcccccccccccgccctgggtttttcagggtatngcccccctatggaatcccttgcagaatggggctcatataatggntttaaaccacnccttcatnattggctctgggcaggatgtccccccanccgnttggggttgcnttatttttttttanaaaaaaattttttgggatcccggcccctnccgtgggggngaaaanagnttttttatatttggnccaagntttattttatttttattgttttatggananaacngccnttttnaanaatttaaaaaaagttttttttga

SEQ ID NO: 687650 - DNA, 937 bp, Homo sapiens
  misc_feature (7)..(7): n is a, c, g, or t
  misc_feature (69)..(69): n is a, c, g, or t
  misc_feature (80)..(80): n is a, c, g, or t
  misc_feature (109)..(111): n is a, c, g, or t
  misc_feature (116)..(118): n is a, c, g, or t
  misc_feature (121)..(121): n is a, c, g, or t
  misc_feature (124)..(124): n is a, c, g, or t
  misc_feature (130)..(130): n is a, c, g, or t
  misc_feature (153)..(155): n is a, c, g, or t
  misc_feature (239)..(239): n is a, c, g, or t
  misc_feature (263)..(263): n is a, c, g, or t
  misc_feature (267)..(267): n is a, c, g, or t
  misc_feature (270)..(270): n is a, c, g, or t
  misc_feature (284)..(284): n is a, c, g, or t
  misc_feature (287)..(287): n is a, c, g, or t
  misc_feature (306)..(306): n is a, c, g, or t
  misc_feature (308)..(308): n is a, c, g, or t
  misc_feature (312)..(312): n is a, c, g, or t
  misc_feature (319)..(319): n is a, c, g, or t
  misc_feature (374)..(374): n is a, c, g, or t
  misc_feature (383)..(383): n is a, c, g, or t
  misc_feature (385)..(385): n is a, c, g, or t
  misc_feature (419)..(419): n is a, c, g, or t
  misc_feature (440)..(440): n is a, c, g, or t
  misc_feature (660)..(660): n is a, c, g, or t
  misc_feature (829)..(829): n is a, c, g, or t
  misc_feature (844)..(844): n is a, c, g, or t
  misc_feature (847)..(847): n is a, c, g, or t
  misc_feature (861)..(861): n is a, c, g, or t
  misc_feature (904)..(904): n is a, c, g, or t
gagatcnacacagccacatgaggatggggacagccattccttgggtttctgaataacgtatcaagtgancagtgaatttnaatcaagcttgtacatcaggaccgttttnnnaaaannncanttncttttngttgctggtagctgtagcttttnnnaacgttcacacattatacaatgtatcgtcgatgtttttaaatagacttacagggagggtggcacacagcaaaggcccgcaggcnctcgtagcaccgcagtccaggtangatnctnggcggcggggggtngtngagggggttctatttacantntctnggctttnactccactaactgttggttttgttattctttcttaaaccttttccttcaagtctnagaagcctntngagggcctgtcaccttaaaggcaaggattccttntttgcaccaggcagacaaatntcaaaccacgaccccaggggctgcactaggcatcgggcccagaagcccctggccatccagccccgactctttcatgcctctgccccatgatgagggagacccagggtaccctcaaggggacacagaagggaggctgcatcctagtccagtgtcaaagtgaggggggcgctgcaggagcctggacaggaccacctagcccagccagggacaggagggtganaccacctggaacaaaggcacagaggctggagagaaggcggcatgttcccagactgcatgggctcggggtagggggatgcgaggtcagaactggcatagtggccaggatctcgggctctactccatgggcaggggggaagccctggggctgcatggggccatgggggagncgggcgcagaaaganacngctgctgtgccaangcccagtccagctgctctctgcagcagaggcagagacaagggntggccagtggctcgtggacgggggaaagaggac

SEQ ID NO: 687651 - DNA, 127 bp, Homo sapiens
atccccagtaccgtctgagacatcgtgtgagggtgggactgtctactgagtatgcctcctcacgattcattgaactaggtctgtcccacatgtatgggatggctggatagtaaagtttgtaatatac

SEQ ID NO: 687652 - DNA, 540 bp, Homo sapiens
  misc_feature (158)..(158): n is a, c, g, or t
  misc_feature (488)..(488): n is a, c, g, or t
  misc_feature (490)..(490): n is a, c, g, or t
  misc_feature (532)..(532): n is a, c, g, or t
agcctctcccctcttgcccaacccctcatgcctaacccctgctgccctctacccccctattcctagagccctaagagacccccatcccacccatcattcattcattccattcaattcattcaattcatcaaacataaatccataacttgcatgcattncccccagcacagggaatacccctctagagacaatctccctccctagggctcatggccctagtggaggagacagattaaaacttaattagaaaaactggctgggtacagtggctcatgcttgtgatccccagcactttgggaggctgaggcgggtggatcaccctggggtcgggagttcaagaccagcctggccaaaatggtaaaacctgtctctactgaaaatacaaaaatgagctgggcgtggtggtgcatgcctgtaatcccagctatcaggtgctgaggcaggagaatcacttaaatgggaggtggaggttgcagtgagccgaagancnccaccgcactccagcctgggtgacagagtgagactccatctnaaaaaaaa

SEQ ID NO: 687653 - DNA, 1063 bp, Homo sapiens
ctttttgtactgttgctatttgatgtttgtttaatctgtgttgtctccgtgttggtgagacacgtatgcacctatttgttggattgattcgtaggaacatatgattatgcgcgtcataaagatggagaacatatgctatccaaagatgttaagcgtgggaagaggtcacgtggaataacttgtaaaagaagaattgacaagtacatggctttgtaagaataatacgttgacgtatgttaagatttggtgtacaaagttggaaatgtctgtactgatcctcaatcaataaaatctcagttatgaaaaaaaaaaaaaaaagggggggagcggaaaataaaatatccacaaaaaaggggcccacagaacaacaaaccgctgtaaccaaaggcatacaacgaggtacccaaaggagggcccacataaagaagagcaccgaataacataacgcataagcgaccaagggccagcacgttaagaacacaacgcacgaaaaatcgggacaaaacacgcggacaaaaacctggaggaaaccatagcgcggcagcgagaacacccaaaacatcccgcgccgcggcggagacccacacacagcgcggccccaacagcaacccaaacaacaaaaatacaacgcacccccccaaaagcgaaaaaccaacaaaacatcttcacaaccgtggctccacaaaggggtacacaacccacaaaaccccgcgcacaccatcccacatgcaagccctataaaaacacgcataagccgatcaccgggaaagaacaccgaaactacatcgaagacaacaccataataccaccagaacacccaaaccccccaacaaacccgacaaacccccaaaaccaaccaggaagcacagagcaaaaccacaacgagaaaaccaacaaaacgatgactaataaacaaccacagaaacataaagaaacaaaaaaaaaaaaaacaccacacacaaaacaaaataacgactcacacaaaggtagacgaagatcaagaccagaaccacaaaaaacacaaaaacgacaagaatacccacaacaacaaaagacatcaaga

SEQ ID NO: 687654 - DNA, 194 bp, Homo sapiens
aacagagaagggacaagatatgatcccaaatgcagtacacttgatggcgtcatggttcatgacacaaaccagatactgaagcactcacggtcaggtcagcaacctcactttgatggaccccacaaaagctgactgaccaggcaaacatgcttacaagtgaatgaaacgagtggacgggtagggacttgatagca

SEQ ID NO: 687655 - DNA, 240 bp, Homo sapiens
gctcagacatggccctgtacttgccgtgctggagcatggcagcgacgaggaatcgtctgatgtgtgtgacaggagagtgagagtgagagtgagagtgagagcgagagaaggattcagagcgtacactgccggccggagtgatcatggcacaagccagccttgatgtgtctgcactgcgcctcactgcccagagatgcagcttattttcacggccttcgccctggtgatctggggtcgacg

SEQ ID NO: 687656 - DNA, 405 bp, Homo sapiens
ccgaactggatcagtcactcggcatcggcagtgagtacttcgaggctactcttgctctgagaacatcagctcctgtattgtatatggccgcatgactgacgctagcactatatatgatgagcaagtcagaaggagcgaattagaatacagcggctttgttaaccttaaacggctgctcgctcctgcagctcgaatccatgttgactcctaaacatgggatctctattatgctaacctctgacgctaccgaagaccagaccgcgtctgtacctgcctaactgatgagtgcctatattaacttggctcgaacttgttgctagacatcaacatgtggaggaccccctctcacagttccttctgtagcatctcggcctactatcttacagcttgtcggttgtacattcg

SEQ ID NO: 687657 - DNA, 425 bp, Homo sapiens
acgggaggaactgggcattctaacagccgtgctagcatgcgggcacccgcctctccagatgccttgtcacgggtcgcaggaaaaaccctatagtgcctgtgatagagaaaatggagcgaggacgcccactatggcttggttctacttcctttatcccgattggccgtcgtattacagccagtgcggcggatccggttggctgcaaagcagatccgggtcacaggctgaaactctggattggggttctcatgggccaagcatctgcattcaaaaggcttccttgtgtttgctggctgcttgatgaaggacaaaggccatgatggggtcaaggagctggacagcctaaacagtgaccgattgagaaccgtccagctcaatgtctgcagcagcgaagaggtggagaaagtggtgggtcagaacataag

SEQ ID NO: 687658 - DNA, 400 bp, Homo sapiens
ggattagcagctactctgactactcaagacaaactggaaacctggatattagtgtaagagtttcagatctttataattccatgtgagtgagacaatagtcctcttgccaggatggggcaggtaagtatctatctagaatgtgctgggggtgctagtctcaatacttccatgagtaaaacctaaaataacagagtgaagaacaggaacaacaacaacaagctgtttcagctactctccctccctcaccatactggtgaattactgtagcgattctgtaagagcggaaaaagtgggatgtaacatgacaccatcttctacgtgtatcattatcgctgtgtggaaattgagatacgtgtatagtcccaacctattcagatggggggtatccaaaagagaaagg

SEQ ID NO: 687659 - DNA, 242 bp, Homo sapiens
actaatataagatacctgcgtgagcgtctgcggattccgcttccagcatcagccgatgataatctcaagacaccttccgagcgtcagctcactccccttcacaccgctcagctccaccctcgtgcagatgataatatcaagacacctgccgagtgtctgtgggagctgattccaagcctcagcggatgataatctcaagacagcttccgagcgtcagctcactccccttacaccctgagatc

SEQ ID NO: 687660 - DNA, 124 bp, Homo sapiens
tcccccgcaatcgggtaagccgggcgcgtggcgcgtgctgtagtcccagctactcgggaggctgaggctggaggatcgcttgagtccaggagttctgggctgtagtgcgttacgccgatgcggg

SEQ ID NO: 687661 - DNA, 467 bp, Homo sapiens
cagtgagccgagatcatgccactgcacttcagcctggacaacacagcaagactccgtctcaaaaaaaaaaaaggatttctcctatgaaagcccagcttattaaatttggcccatctttctggtatatgtaggtcattttggatacatattctatccctcttaggttacagccatcagcaactattactggtgtgcttgctatgtcctcatctgcaaatagaaaagactttttattagacaggatggataacagagcctgcacctcccccaagatctcctgccccatagccagcctctctgggatgtagttgtgtccatttaaaagcaaagtgttggtgttttcccattatgtccctttagagagtaattgtatctctaaagacatgaaggcaacgtgtgtctgatggtggcatttcaactttatggcacaaggatggaggtgaaatacaggacattcagtgccttaa

SEQ ID NO: 687662 - DNA, 638 bp, Homo sapiens
atcgcacaagtgaaagatgtgtacgtggtgacagatcagattcctgtgtctgtgactatgttccagaagaaggatcgaaattcatccgacgaagaccttccgtcaaagagtctcgcccagttatgtttgatgtcctgattgcatgatcctagctcactgcctcaattattctaccagtgtaagctacaagtggagcttcggggataatactggcctgttggtttgcagcaatcatactgtgaatcagaggtatggtgcctcaaatggaaccattcagccgttagacctcaacgtgtgagaagcatgcatgcacgcgatggaccgtgtggtccgactaccggccagcacgcaccgcgagagctttcataaaccctaggccgcgttcatttaggcaactagtcgtaaaatcttatgggttcaatagcaggcccaaggacctgctggtgataacccccgtggagctgagtaggattcctggatgaagagactgcctggcattcaacagatatggccactttcgagccatcatcaacaatttgtagcagggaatcttagcaggttaacatcatccagatgacagaggtccgtgatgccggtgccatggctgaaagctcctaatagacttggtcgtgactgca

SEQ ID NO: 687663 - DNA, 393 bp, Homo sapiens
  misc_feature (29)..(29): n is a, c, g, or t
  misc_feature (45)..(45): n is a, c, g, or t
aactataaactcccctgtgcttgtattgnaagctatggccgtganaatgtacagtgtgtaagtctatttcattgcccattcccatcagataccagttgacttcatctcccacgtgattgctttctatgaattcctcatcatctttgttacttttctcggggtgatcagagtatgttttgatgttgtcatctaagtaccaagattcattctcatcaacaactagaacaagaagggcaaattccagttttctttgtgggattgaaactttccaagtaggtttttcgacaaacaatcaggggcccaattaatcccctgagagggcctttactttgacccccagttgaataataggcccatgaaatacaaccagaatccttggttccggctggtgcg

SEQ ID NO: 687664 - DNA, 185 bp, Homo sapiens
  misc_feature (89)..(89): n is a, c, g, or t
tgggtcgttcttcggtgggtcgttcttcggtcggtcgttcttcggtcggtcgttcttcggtgggtcgttcttcggtgggtcgttcttcngtgggtcgttcttgggtgggtgtgggtataatactaattgagatgatatcatttaccggggaaggcgctttgtgaagtaagccttatttctcttgt

SEQ ID NO: 687665 - DNA, 104 bp, Homo sapiens
tctaacactctaggggcaccacagcctaattattagcatcatccctctactactttttaaccaaatcaacaacaacctatttagctgttccccccattaaaaat

SEQ ID NO: 687666 - DNA, 173 bp, Homo sapiens
actgaaatctaccttgaagagtctcctgatcctggtggtaataagaaccatacaatacaacatgacaaggacacgagacatgtaccctcacacaaattgtttggcagcttaagcaaatatagtcggcacagatatacgaacacaccatcagatatgctgcccagaggatcatc

SEQ ID NO: 687667 - DNA, 474 bp, Homo sapiens
ttccgcacagcctgtaactactgcaaactcttcccgtgaaccctatctcttaccgtggtagtgtcctattttaggtaggtctctgcaaacttaatagcatcaaactgggccatcttctcacacagtttcacttcgcccaagacagcccggaactggggctggttaatgcaggtgaggaaccagcggttggtattgggaaaggcctggcggaaagaaggctctagaacctgcttatagagccacaacagggtgcatgatgcccaatgtggggaacacccaggtactggctaggggcactatatcggaatcagcaaagctcacccactgcaccacctgggctgctgcctctggagtacttccccgcagctcctcattgctcacatagtaggcaatggcgttgctctcaaacacacagaatccatcatcaccctcaaatgctgggaccttgccggcaaggagaacgcgtacaaatcg

SEQ ID NO: 687668 - DNA, 758 bp, Homo sapiens
cggtaacgcgcgcgggcaggtgtcgaccatgagcgtcgggtcgcacgggtagcgtgggtcaggtgcttgggcgccagctaccgccgcggcgcctcgagcttcccggtgcctccgccgggcgcccaggtgtagcggagctgctgcgagatgcgaccggggcggaggaggaggcgccctgtgtgcggcgactggagctggctgaatgcctggtgccaggtgctccagtgctgctcttccctggtgccagtggcagccacggtggtggtgcatgggtccgctgtgtctgcttcaactacccggcgcgtccgcagaactctacgccgccgcctgccgcgtgctgtgggctacggacctggcttggaacttgagccttgcacggggccgcaggagaccctggacctgcaccgttgcacattgtcatgcccggctgatcttcggttggcatctgctggccggcttgttcgaggaaagctactatcacgctgcagcccatcggtgattgaggacactgtgttgctgctgctggattcagtgtgggagagtttgcagccctagtgtttgccggagccatggaaatttgctgaaggttagtatgcagtgaaaatccgagctgaggccatgcaggaagcttcagaagctgtccccagttgggatgctgtcttgtcctcggccaggctcagtccaagttcaacttcgcctgtttggaagcccgggaacactgcaaggatcgtttaggcatagagaacgccgtatgttag

SEQ ID NO: 687669 - DNA, 325 bp, Homo sapiens
atgcttatagttgaacagcccaagctatatgttatggcttatttgtgttgaagagtcactaagaagtggtgtgccattgatcttcagagtacatccatgcggagtccatctatgtgagtttgacatttaataactttgctggaaaatctgtaaaaaagaaaaacaagtttgctagtgactaagccccgcctatgtgagtgaaagtacttcaggcacgctgcctcctggtaacagctatgcagggagggaggacccacactgctacacttctgatcccctttggttttactacccaaatctaaatagatacttttgataatagata

SEQ ID NO: 687670 - DNA, 112 bp, Homo sapiens
ttcatgagagcagtggaattgtaggcagggaatacgtgatctcgatgtgagtgaagaagtagagcaagaggagaaatgggaaggtgcgtacctacggaatcaccacagtacg

SEQ ID NO: 687671 - DNA, 742 bp, Homo sapiens
  misc_feature (390)..(390): n is a, c, g, or t
  misc_feature (742)..(742): n is a, c, g, or t
cagatttttctcatcaaaaatgtattccagaggcaatcaggtggattacagtttcttgctgcattgaaaatgcacttataaagaaataacatgtagagctccagactgttgtaaaatatacagagggagcaggggaaagttaagcatgtgctagtgtctgaacccggtttcagttgtatctccagtttgaaagtgatatacactatagttatgtagtaacactgtagtacagcagcttcctatatgtagtccacatatatatagtgtatatattataacatgtatacggtcgttgtatatgtagcatatagtagcacatcagtgcagcattaagcaagaagtcaagagtgcgtcacttacataatcctacgatgctcatatacaaaaccnagatgctaaaacaaacagcagcggaggaaacaaggttggacgtctctgcaacgtgatcagaaggagtaaaaacgggctacttgcagtcgactattgggtcattatctgtaatgttcgatagtcgcaattgggatgggtccacacggtgacaaacaagggaagcaggtgttaagtggaaaataggaaaaaatggcgcgaagaccatctttgatccgaatgccgaattgccagctagtgttctatagtaccatctcgagttcaggtcatccctccaagcccactgttgactcgcactccccgtctccggcttatggcacgactttcttaactcgaccgcccacaaaacatgagn

SEQ ID NO: 687672 - DNA, 215 bp, Homo sapiens
gaagtaacaatcgtctttaaaccctgcgtggcaatccctgacgcaccgccgtgatgccagggaagacaggcgactggagtccactacttcttaagatcatccactattgatgattatcgaatgttcattgtggagcagacatgtggctcagcagatgcagcagatcgcatgtccttcgcggaagctgtgtctgatggcagacacatgatgcgcag

SEQ ID NO: 687673 - DNA, 541 bp, Homo sapiens
atggtatacaacgaggaccagatcaacagaggcatactctaccctcaccgtaccccatcgatacacagcatcgtcgccaacagagacgacatggataaaatctggcaccacacctaactacaatgagctgcgtgtggctcccgacgagcaccccgtgcggcagaccgaggcccccctgaaccccaaggccggccgagagaagatgacccagatcatgttagagaccttcaacaccccaaacatgtacagtagccataccaggctgtgctatccctgtacgcctctagccgtaccactggacatcgtgatggactccggtgacggggtcacccaacactgtgacccatctacgaggggtatgccctcccccatgccatcctgcgtactggacctggctggccgggcacctgactgactacctcatgaagatcctcaccgagcgcggatacagctacaccagcaaggaacgagcgggacatcgtgcgtgacattaaggagaagctgtgctacgtcgccctggacttcgagcaagagattccac

SEQ ID NO: 687674 - DNA, 113 bp, Homo sapiens
tccaagaccctagccacccgcagcagattgcactccttgaccagacataaacattggcagagtctgcctgcagttgctatacactgccatgaggctggtggtaacccaaagca

SEQ ID NO: 687675 - DNA, 463 bp, Homo sapiens
agtatgaggctaggataccgggctcgatctcagtagtcagtctgatagctagtcagagaggggtctggagaacatcataagcacgtagttgggagtctccaattacggcatatggggaagaggtttgggaaagaagaactgtgggtaaggggtctctatgagactagacagaaaaaaattctcttaaatgactggagcatgactttaaagctgatactaaataatttatttcggcctaacctttcataagacttttaaaactatatgaggaatacccattggtaagagatgattggcccttcctaagggatatcataagtacaaaattataacccttagaatagcaagccagagaggtacagggatctcggtccgtgcgaccctttaaaactagccccggccaggggtgggggcacagggccggtggtctcagctactggagaggctgaggcaagaggatcac

SEQ ID NO: 687676 - DNA, 214 bp, Homo sapiens
cggggttctcagtcagcctaaagcccgtgacagcaaatctgatagacgtcagaggccagctccctcaaggcactgatggcgactgtgccagagagggtggctggcttccccaagatcacacagcaggcgctgggcccttggcagagtcggaagcagctcctcccattgcccctgccaaagcagtcactgcgcattcaagtctgggatctgagcc

SEQ ID NO: 687677 - DNA, 382 bp, Homo sapiens
  misc_feature (19)..(19): n is a, c, g, or t
  misc_feature (60)..(60): n is a, c, g, or t
  misc_feature (76)..(76): n is a, c, g, or t
taaaagaacccgtaagggnaagaaaccctatgttggagcaggtaggaaacagcatccccnggacgccccggattcngcaacaagcagttaaaagtatagagcctgcccaggtcaggggatggttactttgtgtaaactttgtagaacatttacaacattcttagaagtggtgaactgatgccacctgaagagtctatactgaagcctatgaccttccctgttcccccaactgaggactcttctccttttaatcaaagcagtcaatttaattacatctacattgagaaagtatcactagatatcttttgctatcttgtttcctaggaggaaaatagatcataaagaaatgtgtcatataatccctgctgtcaaaacaaaataa

SEQ ID NO: 687678 - DNA, 993 bp, Homo sapiens
ggtgggatctcaaaagcttgccctgagaagcatttcgctttaaaatggcaagtggagcagccaacgtggtgggacgcaaaatctgccgtggcaagcataatgttttaatgcagtggtgttcaagcaatcaatgttggcaagcagggcatcgaatgttagcacttggacaacatgggtaaaaatatggagcaagatattcagacacttaacatatatattgacaattgtggagtgcacgcagcatcgtgtgcgaccgatgttcatatgcagattatcttgaaagcgccatattacgaaggcatgtgaaactaaatagatatttcaagtgggcaacaattaccgaatgcattggcaaacatagccgaagacattcaattgactgaaggacatcggctggaactcagttgactggatatgtgtcgggaagacaacaatcataatgtactaagtgcttgagatatttaagacgaacaaacatggaggtcattcttgtgcgtggagacagggccattacagacaaaagaagaccctatttgacacagatacgataaatgaacaagtacaggagtacaaatcaaagtattgacaggatgtgcctgaacgttgtacgacatgggacaaggcattgctattacaccgcaagacagccaaggacataactgggacacctgttgtgcacgcagcacttctgacagcacaacggcgcgacctttatccacctcctttcaatggcgaagaagcacgaactaccacattgcggccagcacggccaacttggctggcttaaacacttacgttccttcacaccgacacggccacttgtccagttcgccaaccaccaatatgcgcgttgctgtcttgtccagatgtgaacggattacatttggcatcacttcgatagcgactgggacgctaaggtcaacagaggcacataccacattacgaacttatcatggacattaccaacgagattacgacatgtcaggcacagta

SEQ ID NO: 687679 - DNA, 400 bp, Homo sapiens
ctcgtcctaaaaaaaaagacaagaaaagaaatataagtgaaatcctacctttatttaaaaaaaaaaagggggccgggtacaggggctcacgcctggtaatcctaacactcggggaggctgaggggggcagatcacttgagattagaagtgggagaccagccgggccaaggtgacaaattcacttccatctgtactagaaatacataaattacgccaggtgtggtggcgggggcctgtaatcccagttactcaggaggctcaggcaggagaatcgcttgaacccggggaggcagacacggcaatgagctgagatagtgctacggcactccagctggggcgacagagttgagactccatctcaaaaacaaaccttaacatttttggtggcgggtggttccat

SEQ ID NO: 687680 - DNA, 219 bp, Homo sapiens
aatagcaggtgtgacgtggacaaaattcctgggttactaggtgtcttgcagaagctgatggcatccaaagcaaatgaccaccaacggttatgtatcttctacaactgtataatacgagcacatgcctccgtgaatcagttgaccaataataggaaacaaatcttcattctgctcatccagagcactcagaataccaaaacaaccaagtgtatcaagagt

SEQ ID NO: 687681 - DNA, 821 bp, Homo sapiens
  misc_feature (52)..(52): n is a, c, g, or t
  misc_feature (494)..(494): n is a, c, g, or t
ggagagttctggtgttcctcatcttcgacagcatttggtgtgttcaccgttntgtgttttagccattctgataggtttacagtgatatctcgttttaatgtgcaattccctcacaacaaatgattttgagcatctttctcatatgcttatttgccatctttatatcttattaatgaggtgttcagatctttcaccttttttttttttttgggctgtggggtggttaagtcctcagaaattctccattttttggggccgagcggtttttcccatcgagaattttgtgggaaatttttttcccccgagttgtgggggatgggcttttccacatttctctggaaccaggtggtcttccaccacacaaccaggaggtttcacaatcttaaagggagggctacaattaaaatattttttcacataagcgaaggagaggtcgcttgggcgttgggtcatctaaagaaggccttcttggacccagggatccctaagaattntctcatatagaactctctaagggactcctaatgggttgggccccttaatttacagtgtggaaaagattccattttaactagagggttataatacactggctttccgcgggagtcgactcaattgcggcagtgtgggttgccacgttgttcattacaccaattttttggggcaggggactatcgtggggggttaaagttggctttaaccctccgtggaggaccccgggctgtattttcgcctgtttgtggcccggatctcaaggctcaagtggtggggttccttttccccaaattccacattggggtccgacatagtacctgaatggg

SEQ ID NO: 687682 - DNA, 221 bp, Homo sapiens
  misc_feature (126)..(126): n is a, c, g, or t
caattttataaccttatgaaatagctttcactttataagggaagataatatataccatctcagaagcagcaagtatatctattcaacagatacttgttgaatacggtgagagcttgacaaacgtcnaggagctaagaaacataaaacgatgacaacaaagaaaagagagagtttagagagttgcttttagagagtgtgaaagcttgttgaggaatcagagt

SEQ ID NO: 687683 - DNA, 878 bp, Homo sapiens
tttcttgtgttttgtgttttctctcttaggggtccttctgttcgggtccaggttcctggctcctgttggtggttgaggcctgtctgcattcgttggtattcgttttattgttgtcccccgtgtcttctttcgtgtagttgtccctcttttccgtattttctgtgcccctttctctagttcagtttgtgatcgccaggcgtctctcccacatggtccccatatactccctgaagagaccgaatcagcgctcatccagtgcgccagaaagatatagacacagagtggggtacacttcagaaggacagcacatatggcggcgtgaagattctgcgggacacacgagaatcgagctgaggatgggatggacagagcacaaggaagcacagagaatgtccccctgctcgcaggaggagaaatggggaagaccacgtatgcacggctcctacagggatgagaacacaggcgagcacgagaggagacacccaggagcacatcttgatctgctctatgtccactgagcctcaccaaagatttattccatgggcaagcaacttcatattctttacaggggagatcatctggggacagagcggcgggaaacatcatcactcgatactgtcacacgcacgcttctaatggggggctcgaggactatatgagtgaccgggttcagtgtgtgagcacagcacaggaatgggatcccagctttgaggaggcccttgatggactaacccctctctggcattcgttcgtccccgatggatatacacttgcgagtgagagacaagaagttacttcactcaccaagctctataggggtgtgccgccaggcatgaagtatgtgctatacacacacatacacacagacacaatcaaat

SEQ ID NO: 687684 - DNA, 434 bp, Homo sapiens
actgggatcctcgcaataaccgaccagtgcaggaacatatgagtagacagtcttgcactctacagacggttctaagagggggctgtgttgctccgtgcagagaggctggaactgagtgcagcaaggcacgagtgccctcagggtccctgggcaagactgagtgtcaccgtaaggaacagaggtcttagctgcgggtctaggctcgtgatcctacatcttctagtctaggatgagatctgagtttctagggagtggtcagcacgtacatgcaccatagcagtgctgcagtgagcagagaggacagtacggacggggatgagccatcagtgtgaatgatcacagcagcctgacataggacaatggaaagacagagactagaaatttaagactgtttccatggctgaactgcgagaaataagtgattgattcacaaa

SEQ ID NO: 687685 - DNA, 350 bp, Homo sapiens
  misc_feature (334)..(334): n is a, c, g, or t
gggggtttcaccatgttggccaggttcgtcccaaactcctgacctcaagttatccacccgcctcagcctcccaaagtgctgggattacaggtgtgagccactgtgcctggcccctcgcaccattcctaatccctggtgaaccctaatctgttttccatctatagttttgtcatttcaagactgctatataaggctgagaacggtggtttattcctgtaatcccagcactttggctgggcaggaggattgcttgagaccagggagtttggggaccagcctggggcaatatgggtgagaccttgttcactacaaaaattaaaaataaatattaggntggggcattggtggta

SEQ ID NO: 687686 - DNA, 252 bp, Homo sapiens
gcacccttctggaggtaggcgagttttgtgagcagaactgcgcgtacaacagagggggtctcgatgattgacctcacctcccaggaatccccgtagccccttctcctagagcgagtgagtctctcagaggactaggaagactcttgggtgcccacactcagacgaagttctgggcccaggattctgaagccattctcaccgctgtcaacagctcaaggagaactcacggatgcttcttgacgggtacccgag

SEQ ID NO: 687687 - DNA, 608 bp, Homo sapiens
gggaatggctgtgaaaatgctttgaaaatataaaaccaggccagtcaatatggctcacgcctgtaatcccagcagtttgggaggctgaggcgggaggatcgcctgaggtcaggagttcgggaacgggcctgggccaacaatgggcggaaaaccccattcgatccctaaaaatacaaaaacttagcttggacatggtggctgtgggcctggtagtccacacctacccatggaggctgtaggcaaggagaaatcggctgggaccccgttgagggcatgagggctggtaagttgaggccggaggatttggtggcccaactggcgaacttcacaggccctggaagttgaacggaagcaaagaacttccatcctcaagaaaaaaacaaaaagaagggagcaagggcagaatttttttaacagcgcaaggcacaagaggggccaatatagggagaactcaagggctcagtgtgggtcacagacagcacatcaggggaactagaagctcaggttcctgggagcactggtgttgggtattaagggccttgtccacctggggaagaggtggacagggggtgcattttcccctggggcctactagtcccttgagaata

SEQ ID NO: 687688 - DNA, 888 bp, Homo sapiens
ggccgcttccggcacaaaccaacctgcgtctcacagcaagattcacaagcgatccgaggggtcggccaggccgcccccggcccggggagcccccagctgccagccggccccaggagtccgcggcgagcccaccccggggtacctctgaaaccggcccaggagccgcgccaggggccccgccagagcacccgcaggacccgatcgaagcccccccctccctctacagctgcgacgactgcggcaggagcttccggctggagcgcttcctgcgggcccaccagcggcagcacaccggggagcggccttcacctgcgccgagtgcgggaagaacttcggcaagaagacgcacctggtggcgcactcgcgcgtgcactccggcgagcggccttcgcctgcgaggagtgcgggcgcgcttctcccaggcagccatctggcggcgcatcggcgcgaccacgcccccgatcggccttcgtgtgtcccgactgggcaaggccttccgcacaaacctactggcgggcacgggcatccacacgggagaagcctacgtctgcccgatgggaaagcttcagcagaagtcaactggtgtcgcacggcgcattccacacgggcgagcggcctacgcctgtccgactgggacgagttccgccagaagtccaactcatcaccaccgaagagcaatcgggagggcttctggtgtgccactgtggcagacttcgacgacgaggagagattctggccaccgaagagctcgagttggacggggggcggttgggaagagggggggcctcgggggaggcaggcggggcgcgagcaatgggtggggggaccaggggcgaccggggggcccacaacagccaggtgctctacacgggggcgtcctccggccga

SEQ ID NO: 687689 - DNA, 270 bp, Homo sapiens
  misc_feature (33)..(33): n is a, c, g, or t
  misc_feature (36)..(36): n is a, c, g, or t
  misc_feature (117)..(117): n is a, c, g, or t
  misc_feature (179)..(179): n is a, c, g, or t
  misc_feature (209)..(209): n is a, c, g, or t
accgcagagaatttcggggtctacccagacagnagntcaccccatggagactttctactaggggacttgaaagaggactgaggggcccaaaaataaacttcaccttccattaagtgntcaagcatgtctgcaaattaggggggagtttgaaaaagtctttttcatcctttgtggtgaancctgaaattgtgccgtgttgccttatatgnatatgcagtatggggctttggaataatgattcataataaaatactaaacgtgtgtcttcaa

SEQ ID NO: 687690 - DNA, 534 bp, Homo sapiens
cggaccttataagcagacagaaggggagacgacaagaattggaagacaatgttgaagatgaagcccacagtgggcagaccatctgcatcaatttttaaggaaaaaattaatcttgttcatgccttaattgaagagggccaatgattaaccgaaaaaataacagccaacaccacagacatctcaattggttcagcttacacaattctgactgaaaaattaaagttgagcaaattttccacttggtaggtgccaaaaccattgcacttcgtatcagctgcagacaaaagcagagcattcaatggatgttgcaaacaagtgggatcaagatcccaaagcatttcttcaaagaattgtaaagagatgaaacatggctttaccagtatgatcatgaagacaaagcacaatcaaagcaatggctaccaagatgtagaggtggcccatcaaagcaaaagtggattagtgatgagcaaaggtcatggcaacagtttttgagaatgctcaaagcattttgcttgttgactttctggagagcca

SEQ ID NO: 687691 - DNA, 100 bp, Homo sapiens
gtcacaccgaaccagaaattcacagctcatactgttctcacctggtatacttgagaaaacggctacatgatgagcgggaacggtaggcagaaaggtaaag

SEQ ID NO: 687692 - DNA, 332 bp, Homo sapiens
ccggggttttttttttccgggggggaaaattccccaaaatgggttttaaaaatttgttttttttttaaaaaaggttttatttttccccctttcaccttcccaaaagattttaagggggggggccaaaattttttgggttttttttccccaaggttaaaatttttgggggattattttttcctttttcccccctttcccccggttttttaaaaagaaaaaaaaaaagggggcttaaaacaaattttttttttttattttttttggggggggaacccaaggccttttttttttttaaaaatgggttttttttaaaaaaaagggattccctttta

SEQ ID NO: 687693 - DNA, 323 bp, Homo sapiens
tgtgagccactgcacccagctctatggctatcatcagtatctgcacgagaggggacctatctatggaggccagtctgcagtgcaatgtgatgatcgtcgactcactgcaacactccaccttccagggtcaagcgaatcttccgacccagcctccccagtagctgggatcataggcacccgccatcatgccccgctaatttttgcattttttgtagagacagggtatcaccatgttggccaggctggtcttgaactccttcctgacctcaggttatccgcccacctcggcctcccaaaattctgggattacaggcgtgagccac

SEQ ID NO: 687694 - DNA, 818 bp, Homo sapiens
  misc_feature (504)..(504): n is a, c, g, or t
agcggttgcagtgagccgagacctcaccactgcactccagcctgggcaataagagtgagactctggctcaaaaaaaaaaaaaaaaagatgataatgaaattagccacagaatagcacagatgaagtgactttgctcaagaatcaaccagccagttaagttcatagaaacggggattgtgaaccccttagtgtggttcttacccagaaaatgtgtgctaatctttataaggaaggttgacgaatggggttttagaaaaattcgtgcagaaaactctcaaccatcccaaattgtggtggaaaatacttttatacacgtgaattataagtttctatcacgagaacttgtgtgttctatactctccaaatgaacaaaggcttctcccttttttattctccgaagaaccgagggttcctaggctcttgtttctcccaaggcctggaaggctccaagtgtggctctccaaggcgggctcagccttgcagggtcttcaaaccttcccaagngctttaaagccgggctcctatacccaccttcagaaccttcctgtgaagtgtagctgtgaagaactgtgccgagaaattgccgtttggccaaccaagtgcctgtggggctataaaaatatttgttatgtcacacctatctgtgggggtggaaagaaaccgagagtgtctctctcacacctaagtggtttggggcccagaggccgtggggctctcctcaaagagtctccggtggaacccctcaaaaactgtgacactcatatccggtgaccccctcggaggcctttccccgagaaagcccacggtggggaaattca

SEQ ID NO: 687695 - DNA, 859 bp, Homo sapiens
ggacgcgtgggtccacgccgtatcctgttgtgcgaacagcggttggaaggatctgggtgtgttggtatcctttattcacagggaggagtacagcttatatctcattccattcgatggggatctcttatccatggaatcagagggtgcattcaaagagtgctacctggagggtgaccagacgagcctgtaccactgcagccaaggaggcttgatgaccctgcaagctctgtatggaacgatcccccagagtctttgcggcaacagcgagaatgcgctcgggacagtggccaatatgcatgatcgaggatgacgagagagtttacatggaagccagaattcaatatctcctgttttggataatctcttgttgcttgatcggaatgtggattttattacacgacctcgtgtgccagctcaggctgacatatggaatggactcattgatgacaatttctggcatccagaacagtctatggtgaacattacctccagcagaaatttgcacctataggaaaccagggcgatggtggtcaaggacctccccgacggaagcaacacgaagctgcagctgaattcgtgcagaggagctctatgctgaggatcccgatgatgatgaaccttcaagccgcagttgggcgtcttggtgctcaggcacagaagcgcaacagatcaattctctggtcagcattcgacggaaagggaggcacaatggcgtaagaccgtgggcgggacgaatcaaggcagtcttggtttgccctgttggcccacaatgtctgggcagacaatggggggctcgtcttgcaaagtcattatcttcaattgccgaaattgaaccccagggtggtggactaaacttctt

SEQ ID NO: 687696 - DNA, 1016 bp, Homo sapiens
tttctgaggttggtccgagacctcagtgctcaccctcttcgtgtgaccaggaaacataaccctagctgtaagcgagtgacatgggtatttacccttcctcatcatgatcttctgccctcgttccttctgtttcttgtggtgcgtttcaagatacactcaacacgacagttctcgacaaaattaatgatatgaaccttaagcgtgtagattcgtaacactgaaacgttcccctcagttactaactgtctatggttatctccctgatcgtgtcatttgttatctcgtagaggcagttccatagcgtattaaaagaccattgtgagacatgcaatcggtgtatttgggaacgtgttagaaatgactctgaaattccgacgcctgttttcatcacggaacatcgcccacatagcagatatactgtctggtaagcttaacaatacatcgtaacccctgctcgtcctttgttgtaattagtttatttctgagtgtacatcaatttttttgtctctattaaccttcgaatagcagagagagtaaactcatataggagtttagtgacaaatcgttagccgatgaacaatattttatggccccccctcgagggatagttgccctgctagatgcctagacaagttcatctctaccaggaaagtaactcggaaaacctctagagggggaatgttgctcctttgctgccaatgggacttgttcattcaagcataggagtattgaccaatttcatcgaagcgagtagagctagattagagagtttcccttgtaacgttatctagttcagtgctcggctcctttggttcccatgtcgtttaattgaatggaacttgccgaaaggaacctctcctagtaggtggaaaattcctaaagcaccatatcgctccaaggagggcaaaatctcggttttccccacctaaaccgttaaaccctggaaatagcaagggattcacccaacccaaatgggatttccccttctccttaccccctctacttccccacgcgcg

SEQ ID NO: 687697 - DNA, 502 bp, Homo sapiens
  misc_feature (428)..(428): n is a, c, g, or t
  misc_feature (441)..(441): n is a, c, g, or t
  misc_feature (463)..(463): n is a, c, g, or t
cctgtgagtagttcctccctgctcacaactcagggagcttttggcagggtaggaaggcccgggaagtgaatggtgtttggaggcactgtcttcaaaaacgtcccaggtccatagagaaggcttgatggtcatagtcgcacacccatctgtatcattcctaggattcttcaacggcttgcagtgctctctcctgctggtgtcagcacagccctgtagtgtggcctggcatctgtccttcccctctggatggttgatgggaacctttattgtcccttccccacttatccagtttttagtccaggtctagtacatgcatagaggcttcacttgccatctacctgaattctaacagtagcagccattcattttttccaggggcttactgtaggccagggaaatatggttaagcaccaagtgttgtggccctnttcatttaaggcntcacaacacacctgtgtgggtnacatcttattcatcatccccatttttacatttggggatg

SEQ ID NO: 687698 - DNA, 1097 bp, Homo sapiens
  misc_feature (626)..(626): n is a, c, g, or t
gatcacttgaacctgggaggcagaggttacagtgagccgagatcgcatcactgcactccagcctgggtaacagagcaagactctgtctcaaaaaaaaaaaaaaaaaaaaaaaaaaaaaagggaaagccaaaaaattttttttaagggccataaccccaaaacttacaaaaattggctttgaaaatttttaaaaaaataaatttcggggggaaataaaccgtgtgcgggggctcaaaacgagttggttaagtgttaaaagacgaagatccagttctttcacgtaaatgtggatcctcccgagatcccaaggcatttgctgattaaacaatatccccaggtgggctgttggggtcagaattttccaaggcctggattcctacccatttgtattgggtgactggtccatggattcagcacaatgattaactatcgccattttttcgacaccaattaggggggaatgcatttccacaaccatatttcccagaaatttcctcaagggcctatgaaaactctcaccggattctgtggcggctgcggtgtggaaccaccacaaacctttagaataaatattcttctccgggcgtcaggaagaagaggacagtctcccgaaaattacaattgcntccccctggtttgtgcctcataaaggggaagtctgtgagggcagcttttattttttgtgtgttttatactgccccccaagaaacatcgcagccccaatcccgtctgtgtcgttccgtggggcgcgcgggggctactacctcataattaatatatgtactacggccggattcagaacacatcatttccaaccgctgcaaatgcccagcaatgtacagtccatgtactgatacccacgcccgccacgtatatatataagtgacgcctggcataaacaggaaccaacacggataatgctattctattgcccagaacaatatgcgatcaatagtaacggaacactccttgacacatctacacacagacacacgcaccactagaaatcatgagcggcgagacccgcacaccttaacgttcagcgcagtacactcaaaaacgatacgtagcattaatgactcgcgtcactagtcaac

SEQ ID NO: 687699 - DNA, 614 bp, Homo sapiens
gttcttcagtgtgtgaaaaatactgaggatgcatcttgcacatttgcgatctgagccattcgttgtggttgttttagcttcttgagctcttgtggattatgtcatcatacatgactcagcatacctgctggtgcacagattaagattttgcaaggtccttcacaatcaggtctatgccaaagacggaagcctttttcctctaagtcttaaaataacttatatcatcaacatacctctattgtgatctatcaatagtaaagaaaaattattgtatatgaatagaatgaaaaatgtactggaaggtactatactgtaatcctcatatgatccttttatgttatgcatgtattggtaacatatctttgtattgaaaaatgatcagaccatagctatcttattacaacatgcaactgacaaaacgtgaatgctcaagacatttacagagcggttcattctcaaatgagatgcatgaggcacagagaagggaagtatgctcagagattacctcttgcaaaattcgccacgaaagttgaggtcaccgccggctaagcctggatgacagcttctcctcattgtgtcaggcatatgccttgccaaggtgccagggattcctg

SEQ ID NO: 687700 - DNA, 720 bp, Homo sapiens
gaacatagacataatcgccgtcataatgtccgcaggccgttgacttgattgtcattgaacattgatgatcataggatatctatatgtatgactctgcgaggtgactgtatttccatggtcagctataagttgtgcctaatatccgcataccagtaatagaggtccaagactagaggtccagaccttgtcgtagagttagtccgtacctataatttactgacgcgttatactgtaacgataccaaatgtcgatactttccgttcagcataagcttctagtgacgtacgtggccactttcgaatattcgagaaggtcgttccgagaaaaacaggacataatggcctctctataagaatacctaggtatgtatcctggtgagtaatggattcctttgcacggtctgtgccttccgtgagtaccttcgtggaacttcttctcgtgtcctcttctatctaattcctgaaacgctgtagtgatatcatgctggcagagttgcagtcgaggagctcggtacactatgctttaccgttcccttagggcgtgctttgcggtacctccgtggattgcttggtgtatcctgaagcaagttttgattaaagctaggagagtatacgctcatttgacgggccatactgtgggcccaagagtaaaattgagagataaggcctcctgggtgactctgtaacaaaaggcccgggtctcgatgcaacgagtttatcc

SEQ ID NO: 687701 - DNA, 113 bp, Homo sapiens
  misc_feature (5)..(5): n is a, c, g, or t
  misc_feature (82)..(82): n is a, c, g, or t
  misc_feature (90)..(90): n is a, c, g, or t
ccaantctacaagaatgtgtacacagagatctaggagcaagaacaaagaagatgaaaggacgcaaggtgaagaaaagtctcngagttgcncacagtgtgggagaacattacca

SEQ ID NO: 687702 - DNA, 141 bp, Homo sapiens
ctagagctacttgtgagtgaatcattggcttctagaaatcagatgcccagatgatccaaggactagtttgtgtatctcatcttggaccctacaccaagagatgcagtcagcgatcttagaggtaaaatggtcatgggggct

SEQ ID NO: 687703 - DNA, 559 bp, Homo sapiens
  misc_feature (27)..(27): n is a, c, g, or t
  misc_feature (51)..(51): n is a, c, g, or t
tcaaagcacccccacatttccttaggntaaagcttatccagagcaaggccntcgtttcaattctgtgaagcctaagagaggtgatgaagctgcagaagaaaaattggaagctagcagaggttggttcctgtggtttagggaaagaagccatctccatgagtgcagaatgaagcagcaagtgctgatgtagaagctgctgcaagttacccagaagatctagctaagatcattgatgcagatgactaaacagattgtcagtgtagaggaaacagccttccattggaagaaggtgccgtctaggactttcataactagagagaagacaacatctgctttgaaaggacatgctaactctcattagtggataatgcagctggtcacttttaagtggaagctagtgctcatttatcattctgataatcctaggacccttagaatttgctgaatctactctgcctgtgctttataaatggaacaacaaagcctggatgacagcatgtctgtttacatcatagtgtactgagtattttaagcccactgttgggaccgactgctcagg

SEQ ID NO: 687704 - DNA, 273 bp, Homo sapiens
tgaacattctgtccgaattgatccaagtacttgaacaacggagcaagttaccctagggataccagcgctatcctattctagagtccatatctaacaatacggtgtacgacctcgatgttggtatcacggacatcccgagtggtgcagccgctattgaagtgttcgttagttcaacgagttaagagtcctacgtgatctgagttcagaccggactaatccaggtcggtcgctatctacttcacattcctccctgtactataggacacgaagtgt

SEQ ID NO: 687705 - DNA, 891 bp, Homo sapiens
  misc_feature (584)..(584): n is a, c, g, or t
  misc_feature (641)..(641): n is a, c, g, or t
  misc_feature (706)..(706): n is a, c, g, or t
  misc_feature (710)..(711): n is a, c, g, or t
  misc_feature (722)..(722): n is a, c, g, or t
  misc_feature (731)..(731): n is a, c, g, or t
gaggattatggagtttctgagcgagaagtttgccctcaagagccctccgagtaaaaacagtgacttttacatgggcgcaggaggtcctctggagcacgttatggagacgctggacaatgagtccttttacagcaaagcgtctgcaggcaaatgcgtgcaggccttcggacccctgccccgcgccgagcatcacgtgcgcttggagaggacctcgccctgtcaggacagcagcgtgaactatgggatcactaaagtagaaggacagccccttcacaccgaactgaatagagctatggacaactgtaacagtctccgaatgtctcccgtgaaagggatgcaagagaagggagagctggatgaacttggggataaatgtgatagcaatgtatccagcagtaagaaacggaggcaccgaaccaccttcaccagtttgcagctagaggagctggagaaagtctttcagaaaactcattacccggatgtgtatgtcagagaacagcttgctctgaggacagagctcactgaggccagggtccaggtttggtttcaaaatcgaagggccaaatggagaaaaagggaacgtnatggccaaatacaacaagcgaaaagccatttgctgccacctatgatatatcagtttngccaaggactgacagcttaccacagattccgaaccattgtgggcggaatgcagggggtctgggtnctcnntgctgttccantgaacttcntcgttgaactttttatgctcgagatccgttacgggtgtacccccaacatatccgcccaaattttggcttctctgggccgcacgctgaaaccagttaggggctcctcgaaagacccatggggacactttgaatatccagtggggctaagcaccaccctaac

SEQ ID NO: 687706 - DNA, 134 bp, Homo sapiens
gatcagcctcaggatgaaaataccggaaaaagtaactacaagtcaaggaggagcatatcaagaataaaacgaaagtcagccgggcatggatggctcacacctgtaatctcagcacttcgggagcccaaggtggg

SEQ ID NO: 687707 - DNA, 101 bp, Homo sapiens
agaaaacaacaaaccaacaaaagactacaggaagcagacagtatgcctatgtcgccgtggctcagcgaagacgagcgcaggagctaggagcgaggaagcgg

SEQ ID NO: 687708 - DNA, 210 bp, Homo sapiens
tatcaggaacgtgttgagcggtggtgtttgaacatggtggcagcagtgggccctgtgctgaggatgggcacatcttggtcacaggtcgcatgaggttcctgctgcgaagggctaggggatgatcatccatctacatgggtgtgttccggttgaggaaactcagtcccagcaagtgagcttgagaaagggctggctcagccccaatgctct

SEQ ID NO: 687709 - DNA, 800 bp, Homo sapiens
tcatcttgggttcttttttcccaaaaggatcagaatatatggctttagcccctaaataaaaccctcagccctggtttctgttcaaaggacaagcggcaaaggacaccgagtgccctcgatgggcccctcgaggccgaaatcagcaccatacacgggcaaagcgacgacagggcagcaagaacggcggcgtcaacaaagccgggcacaggtgcacaaatacgtgacagaggggagaaacgaaccgcgtgtcacaagaggaagacgcagtcagggggcagagatccccgggcctcgggacagaggccagtatgcgacgcggcacggccacccagcacaatgtagccagcacgagggagggacaccaaatgacgaacaaccgggcacccgctgtgacaaccggtgggaccacgtcgagacagactggcagggccaacaacaagcgctggcaacacagagggtgtaatatgtgggagcccagacgttgcacccactaagcggtcgagaagacgtccgcacgacaggaggatgtcggacaacgagtgcaggcgagcggccacatatggaccgagatggccagcgtggcacgaggagcaatgagacaagcggagacgggcaaacgatcacgctgatgttgcacctggaacggcggcacaagatgtgggccacgagacacgtgctacctgcggcaccgaacgcggcccgcgtggtgcgaagaggatgagatagcatcactgggccgaacgcatgctaacacacgtggtggcacaccatctcaaagaaatcacggagagcacggagac

SEQ ID NO: 687710 - DNA, 672 bp, Homo sapiens
gtgtcactctatctcccagactggggtgcagtggcacagtctcatctgactggaacctacggctttcaggtttaagcaattctagggccttagcctcccaagtagatggtactataggtaagcgtcacgcacccaggtaattcatatatttttattagacacagagtttcaccttgttggccaggctggcctcaaactcctgacctcatgagatctgcctgcctcagcctctgaaagtgctgggattacaggcatgagccactgccacgagccgttgctcccatattgataacgcatgtcaagacaagataatgtctaggtggggccgtataaaccatgatgtggccccctagcgggcagcactgtagctcaaaacatcatatttttgggttacgcaagccccgtgttgcttttgcataccaagatggtgagagggttctggcccacggcttgcaggccaaaaaccctttcactaaccataaaagatgttaaaaagagtttttagggctagctggggacactttgacctctggcaaccccctcttgggttgacggtaaaaatagccccagaggcaagccggcaaggggctttttggccctattctgcggatggtgggctgaggataaacacccgtagggaacccgcttgcacctgacaacaggagggagggg

SEQ ID NO: 687711 - DNA, 1326 bp, Homo sapiens
cgtattttcccggggtatttcgtcttagctccaccgcgctccctcgtttgggttgtgggaccaccccgtgggccagctgggtccccgcgtttcggtatgatttctggggttgctcccctgcacctgggggcacccctgtagtttgggtgcccggggccgaatcttttctgtagatgggggggcttgtctcttctcgcctcctgcagcctttcgtgctgagcctttgtgttttgctgggatgcctgggtggccccccggagatggcttccgttttccgcttattatgggccctttcttcgcgctgtcttgtgtatggctcccaatatgtcctcccggggggtgaattccaaacaggtgttttgtttttatatggggtcgttaaaagggtcactggtgttttcgcggtgtgtagatctccccgcgtgcaatgcttgtaaatggcgccttattgtggcgctcccacaactgtgggcccctcgtggaaaatgttcgctcccacacacaggatccgggtattttgtttatgtcgaccggtggggcgcacaacatttggttcgcccccctggggagacgctttgtgtctttggtcagatcccccactttctttctgatagaagccgcgtccctctggggtctcacaaagggccttcaccaacaaccccctcgtttggttggtaaaactttgtgtgaactaggggagtgctcacacagagcctgtttagatgaggggcttgggaaacacacgccgactttctttgggggcacacagaggatctgggatatctttacacaacaggggtctttcgcttttctctgcggctctttgggaacaccctgtaggtaacccctcctttcctgtcctccatctctcccacaataacacacggggttttttgacaccaggaagtgttaacctctcttgtcgttatagttctcctctcttgtgtgggggcctgacacatttgtcgcgtgtcctttgcgccctctcccacacatgttggaagtgtagagggggcacacaagggagttctctcttcacaatctcttgttgtctcccacacgggcgtctctgtttctcctcccttcttttccttggcgcgtcttgtctcctttgtctgaacttccttgttccttaacccacgcagaacctcacaccctggggtcggggcacatggggaaggggcctaatccacactgcttttcctatgtccttggcaagctggcctaaggtgggcagagcatatataggagggactggttaggagatttgcattgctttgacttcccttttccttggttaataaaccccaaaggcttgtttttcca

SEQ ID NO: 687712 - DNA, 345 bp, Homo sapiens
  misc_feature (180)..(180): n is a, c, g, or t
gagaggttcgtagtgtgctcttcaggtcagggaaactgcttctgccttttcagcccagggtcactgcatcattggccggactcttcccccaacccaaagcagcagcacacatctctctgaccttcatccgttgtccctctcccccagccccatgggacaagggtctccaactcctgaganccatgggattagactaggcctacctggatgatctgggatcctctcccatgtccaggtctctatccctaaacacatcagcaaagtcacttttgccatggaaggtatttgcaggctctgactttgtgtgtattagggcaggacatctttggcggggcagtggtgggg

SEQ ID NO: 687713 - DNA, 422 bp, Homo sapiens
  misc_feature (100)..(100): n is a, c, g, or t
  misc_feature (198)..(198): n is a, c, g, or t
  misc_feature (390)..(390): n is a, c, g, or t
agaatggaaggcagcacatgtttgttgacttcttgctcaatatcgggcactgtgctagataccatacacgccatcaacatttaggacagtatgacaaagnagaatgaaagctgtctcttgtagataggatattttcagccgtcatcaccatggactctttgaaatgtactacttcagaaaagccacagtgactccctntgggcctcacccacctgagatgacatcacgacgcaaatctaggacttacgctcttcatacggatggaatggttggttcacttggctttcagagtgcagacaagccattcagtggagggcatgcctcagcctgcactcttctgactcatgacatgacttctccatggagagccaggatttttctcaagtgtancaatattaattatcaagtcactttaaaacaaa

SEQ ID NO: 687714 - DNA, 209 bp, Homo sapiens
agatttgctaactcagtgtgctaaggccgagaagtggcacttgttttcgcattctgtccatgcgaacttagcctcatggccatacacagccacaaaggagcctgcaagttataacctagttgggccggcgagtgctgggctaccattactatggaagatggcgactgcagacactgccacaactagcatatatgaagctatctcttagt

SEQ ID NO: 687715 - DNA, 231 bp, Homo sapiens
  misc_feature (218)..(218): n is a, c, g, or t
  misc_feature (227)..(227): n is a, c, g, or t
ggccacagactgaaggctgcactgaccattttcctacttttgaggttttgggacttggactgagccgctactggcttccttgctcttcaacttgcagacagcctgtagtgggacttcaccttgtgatcatgctgctgactaacttaatgaactgaacggattaaaatggtgcaaagagaaaaagggcattttttacaccaaaaggaagcattttctgntgttcccgnttaa

SEQ ID NO: 687716 - DNA, 1417 bp, Homo sapiens
  misc_feature (1)..(1): n is a, c, g, or t
nggtgaccaccgtctctgtgtttgtgtctcgcgtggttccctgtgaggaacagcgctctgccttggtggtgggggtgtgtggtgcctcagccgttctggcgcgtctggcggcggtgggggagacccccgcgtggtgctgtctcccttgagaggtatggggtgtgtcaaaggaccgtttagagaccgtctcgttgttcgtgtggggtcgcctcggtgagagggtcttgactctctttttcgttgcgccccctcggtggttgtataggttcttcgccccggggccacaccagggggggcttgtgcgcccgccctcggaggatgcgctgctcgtgttgatggcgaacaacccccgtgtgtggtgtgtaagttgttgccgcccccagtgtgggcgcccccccggttgggttgggttgtgtgccccccggttgtgcccgggtgccgcccccccccgatatgcgggggcgcacaccttccctcagagccgtggtgggacccaggggaagcctttttgtgacagtgcgtgtttgcgccggatatgtgcacagaggggtttgaccacccgggggggtggcctttcggggtctctgtgttggggaccggtgttgtacagcgcccccagtttgctctcagagggacacccagttctcgcggtagggaccggctgtgtttagagggtgtctcccccctgggtccccagaatgacatcccagggtgtacccccgcccactctgggggtctcccccagcgtgtgttgttgtgtgtcccccccacgaaaaagcgggagatgtgttatatatatatctcctctgggggcgcgctcccccacgggcgcacacagggtgttataagcgcgccctgagaatctctatgagagcccctgcgctggagaagcgccccggccccgcttatactctctccctggtgaaaccccctcgggggcccctcgagaactgggctcacgagaactctgtctcgcctgttcttctgtttgctcgcgagatggaatgtgagaaggttcgtgaatgtgaatgtggtgtgagatggcccgcgtgtgaatgtgccccgtggagatggcgccacgctgccctcgtgcacatataccccaacccacgcgtgggaggccctctttgtttgaggccactgaccacgccccgccacgccacggaaataataatggtggtgcctatatttttgtgtggacccacaaaaatttacacctctaagggtttggaagcttatttccaagaaggaaatagttcaccacgagaacaccgcttaacccacaggagctgagcacaccctctcttggagtttcttgaattctcacaagattgggggcacagggctctgtgcttgaaggcccttctgagtcatttgtttagggccttggttccaataaagccctgccccaattgta

SEQ ID NO: 687717 - DNA, 160 bp, Homo sapiens
cccggcagcctgtcaggggatctatggagccgcattcaaaagaatggttactcatccagggaatcacaggtgaaacttggggagaatgcacgtgggagacagctccccagcatattctctttccaacctggaagaacttgctactggtgcaggcatacct

SEQ ID NO: 687718 - DNA, 369 bp, Homo sapiens
ttctgttctccagcccgggattctggcgcggcaaaaaaatgtattcgccggacagcgaagcgtatctgaagaacccggcgttctgggtaaagatgaataacggctgggacgattacagtatcccgaaagaggtcgcccgggcggtcattgccatgcatgtgaagcgcggcgacagcatttacttcgtcaccggtcgtagtcagaccaaaacagaaaccgtctccagaaccctgcaggatgatttccagatcccggctgccaacatgaacccggtcatttttgcgggtgacaaagaagggcaaaacaccaaaacccagtggctggagaagaaaaacatcaaagtggtctatggtgattcggataacgact

SEQ ID NO: 687719 - DNA, 346 bp, Homo sapiens
ttccaccaagcctaatcgccacacaccaccaaagtcaggctatgctatagtacaagccactagcccgcctatcagaacctatgatttcctttccatcctggaaatctatcctgaaggaaataacttctcagtgttccatctgctattctactactcctcagggattattgaggccctctcccttacctacacatcaagctcgaggatttgcccccacccaggactggcaaattagctttactcaacatgcccgagtcaggaaactaaattacctattactgtaaatagacactttcaactgaataaatcaagacctttcctacggggtctgagaaggccaccgaac

SEQ ID NO: 687720 - DNA, 228 bp, Homo sapiens
agtcaggtgggcggatcatgaggtcaggagatcaataccatcctggctaaccatagtgaaaccccgtctcaatctaaaaatacaaaaaattaggtgtgcacctgtactcccagctacttagccttgccatatgcaattgcatatggctaggccaaggagttgtgttaggcagcggacatcgtgccgaaatagaataagtgcccctacgcttggccttgccatatgcaa

SEQ ID NO: 687721 - DNA, 211 bp, Homo sapiens
acggaggtgcagctggacagcacagaggctgtacagcactgaagaggtggacagcacaaagatggatgagggtccccgcatgcttggtccccttttctccgtcctggtcctgtgaagagaactgtactgacgtgcacggggaaccgtgcggaactagatcatggtggagcgcactgatttcgaggctttgtgttcatttcggccctaggcc

SEQ ID NO: 687722 - DNA, 506 bp, Homo sapiens
actagaggacttagtattgagtggcatgtgacatggaggttgcagtgagccgagatcgcacacctgcactccagcgcgggctacagagtgagactctgtctcaaaaaaaaaaaaatggcaaaataaaaacattttaaaaacttttgggctgggcagggtggctcacgcttgtaatcccagcacttggggaggccgaggcgggcggatcaccaggtcaggagatcgagaccatccgggttaacagggtgaaacccggtctctactaaaaacacaaaaattagctgggcgtggtggcaagcgcctataatcccagctactggggaggttgaggcaggagaatggcttgaacctgggaggtggaggttgcagtgagccgagatcgcacacctgcactccagcgcgggctacagagtgagactctgtctcaaacaaaaccaatcggcacatacaacttccaagaaccttcgggcctgggcagggggcccaggctggaatcccagcacttg

SEQ ID NO: 687723 - DNA, 191 bp, Homo sapiens
actttccaggggtagggcagtgtcaggcagagcatttcagcagggtctactttatgtagaagtctctcttgagatgtctttttttgggggggtggggggaaaggaggatgaattttactatttaaaaatttgaaaaactaacatagtccaaaatgcccgctttgtagattagaacactaagatctacaaag

SEQ ID NO: 687724 - DNA, 283 bp, Homo sapiens
gttacatcagccagcgacgagcagggttacctggcgattggtgatccccgcagagtgggtaacgggctgaatgagtcatgaggtcgagggaatggggtgtggaggggatacccctcctcccacagttttgaggcgtcaggctgctgaaaatgattgtcttttctgtttgggaggtaatgtacctgagctaggtagttccaaagctgcactcctggagcttttgccctcacagctggcgtggctttttggttaatactgtagcatgatctttggtagcctgcag

SEQ ID NO: 687725 - DNA, 387 bp, Homo sapiens
  misc_feature (207)..(207): n is a, c, g, or t
  misc_feature (250)..(250): n is a, c, g, or t
  misc_feature (298)..(298): n is a, c, g, or t
  misc_feature (320)..(320): n is a, c, g, or t
  misc_feature (325)..(325): n is a, c, g, or t
  misc_feature (354)..(354): n is a, c, g, or t
  misc_feature (370)..(370): n is a, c, g, or t
  misc_feature (381)..(381): n is a, c, g, or t
ctctttctaatgtgtagggcaaacgccaaaagattcacattttattcagattcaagtgagggatctttatctgtgcttagaagctgtttaaaatgatatcttatgttttgcaacacttgtccgattctacctttccaaaaacacttgaaatctattcttggccaccaccagcccagatctagggtaactccaaagaggaaactgggnccatcagcgtgagtgggcagtcagagttcattaaaacttgaangatatggcatttcaacggaatataggtctaggcatttaatcctgtgtngggactcctgttacaggatgcnggggnttccaggctcctggaaaccggagtcactntctttggggggttttnccgggggttgnaggggg

SEQ ID NO: 687726 - DNA, 128 bp, Homo sapiens
atgtaacgtggccgtcgttttacactggcctgtcgttttacactggcctgtcgttttacacgtggccgtcgttttacactggccgtcgtatttacactggccgtcgttttaccctggccgtcgtttta

SEQ ID NO: 687727 - DNA, 253 bp, Homo sapiens
gggggggggggcccccaaattccctttggaaaaaaggactttccccccgggcccctccccggggtggggggttttggggccaaacccaaaaaaatttgttttgcccccccgaacttttcgggcaatttgggtttttccttttttttttttttttaaaaagggccaaatttttttaagcttgggcccctacccgggtttttttcccaataaaaaaagggggggggtgggggccttaaaaaccctttttccctca

SEQ ID NO: 687728 - DNA, 772 bp, Homo sapiens
  misc_feature (6)..(6): n is a, c, g, or t
  misc_feature (107)..(107): n is a, c, g, or t
  misc_feature (203)..(203): n is a, c, g, or t
  misc_feature (209)..(209): n is a, c, g, or t
  misc_feature (214)..(215): n is a, c, g, or t
  misc_feature (222)..(222): n is a, c, g, or t
  misc_feature (224)..(224): n is a, c, g, or t
  misc_feature (233)..(233): n is a, c, g, or t
  misc_feature (276)..(276): n is a, c, g, or t
  misc_feature (299)..(299): n is a, c, g, or t
  misc_feature (319)..(319): n is a, c, g, or t
  misc_feature (335)..(335): n is a, c, g, or t
  misc_feature (351)..(351): n is a, c, g, or t
  misc_feature (372)..(372): n is a, c, g, or t
  misc_feature (407)..(407): n is a, c, g, or t
  misc_feature (600)..(600): n is a, c, g, or t
  misc_feature (766)..(766): n is a, c, g, or t
ggaganaccccctccctccttttccctctccaggcccacagcctccccagagcccaggtagggaaggtccagatgtactataacaggattgctcatcccaggctatnggagaagtctggaaagcaggcctagaaggttgctgggctctttgaggccaggaaagaaaaaaaaaaaaaaaaaaaaaaaaaaaaaaaaaacctggnaaaggngttgnnttctcancnccccttccncctggccctagttggcccctgtggcagcagctgtggggctganaagggggaagaactgggtccaangccaggtcgtctattcttgntttgtgcagggaagcngaggaaagttggtggnctgtgacaggtggtgaggaanccttaaaaggcactgtgggagctgaggtctaagangggggggcatctaaactatctcagggacccctgaacgctcacaggtagagaggggtcaggcctagcaatggaaaaacagctcctgcaggcctgctgccccgccagtgcctcttgctgtactaccaccttcgccttcctgctggcggcctgcaaaaccagccaagctggaggccacagcagcagttggcaaggntggtccccatctggtgcccaccctccacgtcaaggcacttttgtccattttccaatcaagtgagttagtttctaatatctctggaagcagcaaaacatcaggggtcctcttccccctcccaatttttgtttccctccagatgaggcagaatttgaatgttggttcnaaaatt

SEQ ID NO: 687729 - DNA, 104 bp, Homo sapiens
ggtgactctaaggatcccgtacagggcgccgttcaccttgaattgagacttgccgcgtttgcagtgcgccacagctgtcgctgtcttcttgctgcctcaagtaa

SEQ ID NO: 687730 - DNA, 398 bp, Homo sapiens
  misc_feature (5)..(5): n is a, c, g, or t
gcganactccatctctaagaaaaaaaaaaagggggctgatctcattaccaatatggcttcggacagactacctatcaattcgaaataatacccaggaggtaaaagatgccggctcgtagaaaagtataccactgatcaaatcatttaaagatgcaattaattggaacaatatcccatgtccgtagatgggacgattattggtaaaaattcccataactccccaaagcaatctatagatccaatacatttcctgtcaaaattccttgggcctttgtcacagaattcggagaacacactcctaaaatccacgtggacccacagacagcttctattcgccaaaccagtcttgtgaaagaccaaggttgaagcatttgcagtccctgattcccaccttgcca

SEQ ID NO: 687731 - DNA, 198 bp, Homo sapiens
gggttcccccccggcccaaaaattgggggggttttttacaaaagggggcccgggtatttccccccccccccccgttgggggggggcccccccactttgggggggtttttttttttccccaatttggggggaagggggggggggggccccccccggggtttcttttttaaaaaaaaaatttgggggcctttttttttta

SEQ ID NO: 687732 - DNA, 267 bp, Homo sapiens
gtgtccgacgaggtacttcagcagctcgaactcggtgtaggtgaggtcaaggtccttgtccccgacactcgctgtgtacccgtcctcgtcgacggtgaacggtcctgccacgagttggttagtgacttggatcgtaaacagacagcgaagccgggtctcggcttctgacggggttgccgaatcgcacaggaagtcgtccattccccagtcggggctgatgaccgaaagagtgtcggagccgaccaacagcaggaccggcactcgtct

SEQ ID NO: 687733 - DNA, 462 bp, Homo sapiens
  misc_feature (5)..(5): n is a, c, g, or t
  misc_feature (26)..(26): n is a, c, g, or t
  misc_feature (38)..(38): n is a, c, g, or t
  misc_feature (52)..(52): n is a, c, g, or t
  misc_feature (64)..(64): n is a, c, g, or t
  misc_feature (100)..(100): n is a, c, g, or t
  misc_feature (132)..(132): n is a, c, g, or t
  misc_feature (303)..(303): n is a, c, g, or t
  misc_feature (450)..(451): n is a, c, g, or t
  misc_feature (453)..(454): n is a, c, g, or t
  misc_feature (459)..(459): n is a, c, g, or t
cgctngggccacacgggaaagataanggaagcttgcgncccacaagatattnccgtcaacagcngcccctattggaagcaaccgaactgactgctcgggnaactttgtttgttccggtcggaaacccaaggnccttctgttcagagatgacacagtatgtttggccaaacttcatgacagaaacacatatgaaaaatacttaggagaagaatatgtcaaggctgtggtaacctgagaaaatctccacctcataaccccctgaagcctgcacttcccggaaccttaaaacctaagggtaggctngccccccaagtaaaagatggaacccaaatgacccatgagtttgccctggtttcactggcccaagtggtttgtgctaaccacgtctgtcttcacagctctgtgttgccatgtgtgctgaacaaaaaataaaaattattattgatttanngnntcaanaaa

SEQ ID NO: 687734 - DNA, 120 bp, Homo sapiens
agatacaccacagcttgttgaaaatgtcgtgttgtggagatgtggtatagagtggtatagagtggtatacgaggtggtatagcgggtggtatggtgggtattatgctcgaggtaccgatg

SEQ ID NO: 687735 - DNA, 1078 bp, Homo sapiens
gacatggcctgttcctattgaatgatgattcgatacattatcatgaagaaatggacgacgtacatctgaagattgtacaaggtagtgcttttgagagtactgagtagtaggagataatcggcgttgtaatatatgcctcagcgtgacattcccttttcgcacttcagcactacagagtgatatatgcatgactctctagattacaggtcgcagttatcttatcattggtgaactgatcgcgagaattctctactgccgattgtaatacgactttgatgcactcgttctaacgatgggggcgtagtatagtctaaaggtcctaagcagtcacgtaagtgagtcgctcacattcgagatcatcgcccgaggcatcatcgcgtggtagctcgtctattgttctatgattaccatgtcattgccacttgaatagaagtcatgtcgctccttcattttatgactcccagtaatacatctgcccagatggagtctctctcaactaatactggcagtacaggacctgatgctcctgatagactgagttgaggaagagtttcgtaatagtgaacaacggactttgatccgcgctgaacgccagtttgacacataaaaaggcatagactatcacgctttgacggtaccatttgttcttgaaagatagtgcctgatcctgtcaattgatacaattgcagcaactctggatcgagatgtccttagattgtgcggacacttgcataaacgcaatgctcagctgctctgcaagataaaacccatggaatttgctccagtcctttgccaagcagctaatacattctggggacagcaattcttacaagttgcttcgatggaccagcagtggactgcacacattgagcctaagattaatagttcaagtaccgacacacttacattgagtgaaattactagtcagatcaaccagcaggtcaggataacattcaggtagtcagccagcgtcgacccatgacaggcaggacaatattgcaagtcgcccaagaggcccgagggagaaaccccccggtcccttgagggacggacctgtaccaaaagtctttcaaaagca

SEQ ID NO: 687736 - DNA, 328 bp, Homo sapiens
caataataccagggtaccaaccaattaaaaactggttaaccctcatggattaatagagatgaccttatttaccctaacaatcttaaaatagcctacaaacacatcataagttgatttgctccacagggcagcaacgccacctgaggtgtatactacttagggatccgtgcacgtaaacgattactaggactatgcagaaaccagagaatttaagaataccgcaatgaatacttattttcacactattctttcatttctctctttctctacattatttcttcttattccattaatccccaacccacccatcgcttcccattacattcaa

SEQ ID NO: 687737 - DNA, 162 bp, Homo sapiens
aatagcggtccgacttatcaacgccgtgactgcatcaacgccgctgacgatacaacgccgctccagccagcaggttaccctcctcagtgtcaaaccccgtaccccaccctggcagaacactgaggagggtaacctgctggctggtgcggcgttggatgcatt

SEQ ID NO: 687738 - DNA, 402 bp, Homo sapiens
  misc_feature (187)..(187): n is a, c, g, or t
ccctgaatctgttacaaatcataccaaaaatggccatgcactgtggctcaaacttgtaataccagcactttgggtgtaagtggtgtgtgcctgtggtctcagctactacggaagctgaggtgggaggatagcttgtgcctggaagatggagattgcagtgagccgagaccgcgctacctcatcccantctgggcaacaaagccagaccccatcccaaaaaaaaaaaaaagggaaagaaagaaagaaaaagaattaaagaatctcttccacaaaaagggacggctttaaaaattgtcctaccccatttctgaagaagaaaaaatttacaattttggagacggggtgcgggggcccacgccgttaaccccagcactcgtggaggccagggcttgtgtttggcaa

SEQ ID NO: 687739 - DNA, 669 bp, Homo sapiens
  misc_feature (419)..(419): n is a, c, g, or t
tccagtcagagatgaacccatctgccaacatgggaaccgttctctattgaatacccattaactgcgctgtggcgtgccccgtgatcttcaacactttgggaggccgagttctgtcggatcccctgagccagagagttcacagaccagcccggcccaacatagtgtaaccccccttctctcactgtgagaatatagcacaattagccgggcatgttggcgtgtacccgcaagtcccagctacttgggacggccgagccaaggagaattcacttgaaacccgggaggtgcgacggctccacgtaacgcacgagcatcgcgccagctgcaactccacgcctgggcacacagacgtgagaccctgtctccataaaactaaaataaactaaataaataaattaactaaaacagtaacaaaatanccaacaagttagctggggttggtggcgtgtgcctgtagtcccagctactcgggaggctgaggcagaagcatcacttgaaccccggcacggcggaagctgcacgctgacgcccagaccgcgcccctgcactcccagcctggtgactagagactctgtctcccaaacaagaaacaacattaaattaaacaactttcatgtaccccataattatatacacctactatgaacctgaaaaatctaaaaataaaaa

SEQ ID NO: 687740 - DNA, 520 bp, Homo sapiens
gtatgtccacacacagaaatagctgcccgatggtgaaattcacaaaatcatgtgacacatactagatagagtccacccaggagataaaggggtttgatgaagcccctgaattttgctcagtgtgtgactgccttgacccttagtactgtcagctctatcacagtcccacatgcctcatgtcttggtcttcctgtgagtctgtctaggagtgtaactggatatgttattgtaaaccagtggttctcaacttgtgggctgtgtccccacaaaggggtcacatatcagatatttacattataattcataacagtagcaatactacagttatgaagtagcaacagaataattttataattgttgggggggtcaccagaacagaagaaactattaaagggtcacagcataggaaggttgagaaccactactataaattatgattttttttttttttttgctttcagtctatatgccttgggtatccatccccaaagtaactggttatggaataaacaatgcaatg

SEQ ID NO: 687741 - DNA, 153 bp, Homo sapiens
atggtgttagcgtgcggctcccgagcggggagaggctgggcggagttgggggcctggcggctggggcctggttacttggttgacgtgcagagctctctactggggggctgcagctcatcttggggggcgctggactcagatgcccccgtagtg

SEQ ID NO: 687742 - DNA, 131 bp, Homo sapiens
ctaacttttatttttttttgcacttgtgcagataactttattaccataaacatatgaatactcctgaatagtttcccaattctggggcacttagggagcaaaagcaaatgtttcaattttcgtttacaaaa

SEQ ID NO: 687743 - DNA, 418 bp, Homo sapiens
aatcccccgtccttagtgcaacctggtggtcccccgtctcccgtggaggtcgaccatacttgatgccgattcttagtgcggacacccgatcggcatagcgcactacgagcccagaactcctgggctcaagcgatcctcccacctcagcctcccgagtagctgggactacaggcgcccaccactatgcctggctaatttttttgtatttttagtagagacagggtttcactgtgttagccaggatggtcttgatctcctgacctcgtgatctgcccatctcggcctcccaaagtgctgggattacaggcgtgagccaccgcgcctggccaggtcgtagtagtttttcaagtatccaagcagatttgtggacagcctctgccctgtgccaagcactggaatatgggggagccccggaggg

SEQ ID NO: 687744 - DNA, 784 bp, Homo sapiens
  misc_feature (545)..(545): n is a, c, g, or t
atgtgaatagacagcctttgttgcttacagcagaagcctgtatagagtggtcttctatacggacacgcgtgacacccaggcagcttcgagacgagttcatgggcagtcatatactgaggggaagaaaaaagccttccgtttcctgcggaaagtgcaggaagccacgcaagcggccgagagttcctccggagcccgcaaggaggcgcgatggcgtgcgcagagaggcgcgcttcccagcctggagagcctaggaacggctggggcgtggcggaggcgacagacgaggacccaaggctgggggttacctagcttggcatcaggacgtgctctgagggtattggagtcgctccactccgttggttgcgatgcttccagagacgctctcatgggacgtgctgcgcgctttttcgggcatgcggcctaggctcgactagagacatctggcaagctcggacgtcgtagctgtgcaatgactgctgtcctgcacactgcacctgccttcgacatggacaatatcagcgaggcgaaagctcagtgtacttggnccgtcacgtttttggctagaccatgtatgtcccgggactcggtgagcttcgtcagaacgtggcagagaagtttcccaaacaaagagggagtgggaccctgctggacccagctcagaggaatctctacagagacgtgatgctggaaaattctaggaacttgggcattcatagattggtgcaactccatgttaaaccaaagaggcaaaccctcagcggatatatctccaaaagaacatttc

SEQ ID NO: 687745 - DNA, 203 bp, Homo sapiens
tccccgtgggcctacgcccgtgctcaggagggacccccagccgatgtttcgtgagtttggtaaatgttcacagtttatccttctgtcattaactcttacttttgacctttgtattgctgattcttggatccccttggtctctgggctgctgatggtcagctctgagactgtggtttgagagcaggcagaacggtgcgttggcc

SEQ ID NO: 687746 - DNA, 161 bp, Homo sapiens
gaagcggggaatttcgaccccgacaccctacacatctggaaaaccaacaggtggcgggtgggggggcgtgtggacttcactgtgccactggggccccagtggcaggggttcagagtctagtcttctggcctcgcttgcttggggtcaagccctcctcagct

SEQ ID NO: 687747 - DNA, 1502 bp, Homo sapiens
  misc_feature (375)..(375): n is a, c, g, or t
atttgtgtactctccccgacatgtttgttgatgtaaccaaacaccgtacgatgggggcttcccggcgcgtgtggacataagccgctgtccctcttggtttgcgttggttaataggcggcgcttttatagatttggtaattttaatacaaaataatctttccccactagtcggaagaattgcgccccctgtgtttgtggcttgtgctatctgcacactgggtgatcaacctttcctggacgtccggatatttcctttggtcccacaggagggacgccagagacgtcttcttttgtgtcgagagaagtcgtgtttgtgcggtaaaaatgtgggttcccaccccggtttgaacgacgtcgttaattttgagcgggttncccccccaccgcgagtggagtctctgggcctgttttcaagtaatttaccctggtgcaaaggaattgggttgaaaatcaaactcgctttaaaaatgggtggggcaacacctgtttagtggggccgtgttttttaccatgtcgtcaaccccagagatttcgtaattttggggcataattataagcacttttctatgtggggcaaaacgtgaagtgggaagaactttttgatcctctcctcaccacagcggagccggtgtgttgggaaagtcctaaatggtgtctgaccccgcaccagagtgcgccccccgtgctgacacaaagtggggtttcggctccccacacatgttgaagccttggaagattttggcacacctcgaggtgctaatatcccccggtaccctcgcagacttcgaggtgtctctcgagaaataatatctctaccgaggtaatcttgtttcgtctgtggaccctcactatgccgtggacctctgttctctcttatttctctctcggggtgctacccctttattttttatccgtgaaacacttctttcctggtggtagaataatatgtcggtctatctcttttgtatgagactggatacacagtgggaatgtggggaaatacgcaaaaggggggtatttgctcacaaaggccacactgagtttactgtgggtgtgcagggaccctgcgtctgtgtaacacactttcttttgaaagatacatcggttctctccctgaaaataaatgctcttagaccacaacagtgtcttgggagatatagaagagtctctctcacggtggtgcccaccaaggagtttacgcacataaaagattataatgtcttgggatggagattatccactttttacaagaaggtttcagtaggtgtttcttgttgctcactaattatcttcttgcaccctaactctcccagaatacattgtaaatgcacaaaagtggcacgtaaatgagtttggtatgtatttaattttgtggtcacattgttctctcttcgagttaacttgtacttcttcagttatatagcttaattagaggggttctcgtaatgtttttcaaatatgtgaaatgtgaaactgctgtcttttatatttttagtaactta

SEQ ID NO: 687748 - DNA, 179 bp, Homo sapiens
gtactaactttcctattgctgctgtgacgaatgccacaaactcaggggctaagatacgagattcagcgtcctaaagtgtaggtgtcagtgtcccatgctcccacgggactgtgggggagtctgcgcttcctcaccgcttccagcttccagaggccactgtgttcctcggcttgttatgc

SEQ ID NO: 687749 - DNA, 509 bp, Homo sapiens
ctgcggaccctttatgtttgctggcgagcagacaggccgtgggaagccacacagacgaaaggcagggggaatcatcatccacaaaatccctgttgctcaacaccacactgaagaggaagctagagtgccaatttagagacaagagagatgggctgagacaggggatgagatgggacaggatggtggggatgaaggcaagagcacactttccagcagtggtcatcaccaggcccagctgacgagcaggaccaggggcaggaatggaatgagagaaaggaaggaggtcagagtaaagctgagaattctagattgagaaactatgtggaggtaacacctgtgcaggaaccatgaaaggaaaggctaaaaaaggaagaagactagagggaaaatcaggacttccatttgacactgagatcggaggtgacatccagacacactgcagtgaagccgtccagcaggcaggtgggcgcatctgtgtctgagcccaggcaaggggccaggcaaacatc

SEQ ID NO: 687750 - DNA, 312 bp, Homo sapiens
gtgtcgctctttggcccaggccggattgcaatggcgctattttagctcactgcaagctccgccttctgggttcatgccatactcctgcctcagcctcctgagtagctgggactacaggtgcccaccaccacgcccggctaatgttttgtatttttagtagagatggggtttaactgtgttagccaggatggtctcgatctcctgaccttgtgatccacccgccttggcctcccaaagtgctgggattacaggcgtgagccaccgcgcccagccgacttttcatatatctctacatcaagtctcacctcgtgc

SEQ ID NO: 687751 - DNA, 659 bp, Homo sapiens
gcccgtgaaaacagaagaacagcaaaaaaaagaacagaacagaagcaaaacagcaaaaaaaaagaacacaccaacaagaaaaaaaaaaaaaaacaaacaaagaaagaaagaaaaacaaccaagagacacgaaacaaaacaacaaagacggcaaacaaaaaaaaagcaacacgacaacacaaagaagaaagaaaacgaaacacaaaaaaaaaacagtacacaacaacaacagacaagaacgaacaacacacaaagaacagaaacgacgagaagaaaacaaacaaagagaaagaggacacagcacagcagaacgacggaagccaaagaagagaaagcagagaccaaagagaaagagagaagcacaaaagagaaagaagaaacggccgaggagacagacgagcgagacaaaaaaaaaagaaaacgagagaggaggacaaagagaggagggcagcggaatgaacggacaagaggaaaaagggacaggggaggagggagggagggaggtgacggggaggggggagaaagaaagaagagagagaagcagcagagacaggagagagagaggaggcgaggagagagaaagagaggaagagaggaggggaagagcaagaggagagggggagcagaaggagagagagagcgcgaagagcgggagggaag

SEQ ID NO: 687752 - DNA, 107 bp, Homo sapiens
aagacatcctaagctatgttgaggagggagaagatctgagactcaagttctgctgttaaccatgaggtgatttagtagctaagtacgccttagccttttagagtctt

SEQ ID NO: 687753 - DNA, 533 bp, Homo sapiens
  misc_feature (487)..(487): n is a, c, g, or t
aggatcactacactctggtgacgtggcagagactcaccagagacggtgaaacgatcagtcgagctaaaatatcgtgttgtatcacggtttgctccaaatgaagaatattcttcttgttatgttcccaatttttgctatatcatcctgttctggggacagtcaggtattaaaacactttaatatcgatccggtggtatggctgagaaaacaattgctttacttgtcgctggtactagtgatcactgtcattgtcgtagttggagccattctttacgtcccaggtgaatattcattagagaatgctactggccgtggtttaacagtgagttctacagggatattaatatgacttcactagtatgtgtttagtacagcgataggattaacctccttcgtcattgccatattggttattcaggtgatagcctatatcctcgctgtggttggactgagtctctgtattgcggcgtgtataccaatgcatggncctcttctgatttcaggtttgagtatcttagctctagcacaattac

SEQ ID NO: 687754 - DNA, 677 bp, Homo sapiens
  misc_feature (164)..(165): n is a, c, g, or t
agcggatggtctgagggtcagccgtgttttttcgtgctcgctagtcgccgccgccgctccgccatggggaagcgacagcaccaaaaggacaaaatgtacattacctgtgctgaatacactcacttttatggtggcaagaagccagatctcccacaaacaaattnncgacgtttacctttggaccactgcagtctctctctgcagccctttgtctacccagatctgcactcccgatggcatcgtcttgacgttacgtgaacattgttgccatggacttaagaagtacgggaccaacccagaaatggagagaagctggacgggaggtccctgatcaaagctgaacttttccaagaacagtgaggggaagtaccaatgaccagtgcttgtttaccagagttacaccgaacaacacccacaaacgtggactgtgagagacgaaacggcgaacgtctacagcctatgaggcagaggcaacagctaaatatcaagggcaagaacttccgggacctgctgaccgacgaggccttctaccggcaggacatcatcaaccatccaggaccccaccaattcgggacaagttcaaacgtctctaacttctatcatgtgacgaataccatgaaaatacatagaccccgatgacgagacggccacacaggaccggtcttcattatctgaca

SEQ ID NO: 687755 - DNA, 121 bp, Homo sapiens
ctaaagtaacccttttttcaggtatttggtgtcatgttttggagttaatatttagtgcttatatacttttgagttattacataattgcgattggtatatatttgataggtactaggtattg

SEQ ID NO: 687756 - DNA, 302 bp, Homo sapiens
  misc_feature (87)..(87): n is a, c, g, or t
cctcttagtgactgactataggaacacctagaattggctcttgagaaatagagatagttgtaaaaacctaaaaaaaaaatttttaanccagtgaaaaacaaatccagccaaaataaaattgagttatggccgggcatagtggctcagtcttgtaatcctagcattttggaaggctgaggtgggaggattgcttgagctcaggaatttgagaccagccagggcaacatagtgagaccctgccactacaaaagtaaaaaaaaatagccaggcatggtcgctcatgcgtgtagcgacagcaggca

SEQ ID NO: 687757 - DNA, 684 bp, Homo sapiens
gaattactgcagtgggcagtgccctccccagcctggctggcagaccagagcattgctgcctctttccattctgtccgtcttcagtccttcctcaaagcgcaatcaatccttggcctgaccaggtaccgtccgtgttgtgttccactatctgcccgtaaggaccccttctctctccatcgtacctggaatcagtaatggcagatgctggtcaatgacggactgtgcccagtatatggttggtggagggctgtgaggtcgcagctttagctcatggtaggaccggtgggtgcttcttgagcaggctgcagaggcagggaccccagagcgaatgtaaaggttgtccactaggagcacactcacgggacccagtcctctggtgcacctcggtgacggcagatcgcacgaatctcacatggaatccgaacaaccctcaagacgctctagagcgagagcctcggacgcgttgtggcgaaagtgatttgaagcttccaacttcttgaaaacgcgccccttaattggagagcaaccctccgaaaagagctggcagtgaccatcactctttacttgtgtgatccctcaggacggcaacttccctgcggccttctatatttcaccccatgggggttatacggcgcccttaggacgtggtttagtttgggggagaaggcaatttgcgggttcaag

SEQ ID NO: 687758 - DNA, 378 bp, Homo sapiens
ttcttcttccacatttcctggaaatgacatagaagtagtaagaaatagaataaatcttttctttttgtgagactctgcctcaaaaaaaaaaaagtaggccgggtacggtggctcatacctgtaatctcaacactttgggaggctgaggtgggcgggtcacctgaggttgggagttcgagaccggcctggccaacgtggaggaaccccatctccactaaaaatacaaaattagctgggcgtggtggtggatgcctgtaatcccagctactcaggaggctgaggcaggagaatcagttgaacccaggaggcggagtttgtggtgagccaagatcatgccattgcactccagcctgggcaataatagcaaaactccatctc

SEQ ID NO: 687759 - DNA, 323 bp, Homo sapiens
aattcctaggaaatataaccccatctgtgagcacgcattccacctggagtgtgtaattatttgcaacatttgccacatttagtccctctgggtattcacacccttttacaattcacgccctcttctaatacagaggtagactctattttccaactccttgaatatgggttgcctttatgacttgcttcagccaagcaaacatggcagaagtgaaggtgtactagttccaagcctaggcctcaagaagccttgtacaattctgttctctctctcagaaccatgcatgccatgtgagtaagcccaggctgacctgctgaatcatg

SEQ ID NO: 687760 - DNA, 801 bp, Homo sapiens
  misc_feature (5)..(7): n is a, c, g, or t
  misc_feature (12)..(12): n is a, c, g, or t
gaggnnnaccancaatcacttcaaccaaacaaaatacccgcccttaccacctttttcaacagcaaacaacccaacctaaataccacacttacaccaccacattgaaccacaataacatctacaacataactccctctacaaacattaaccaaaactatttattggggggccaccttaatactcacacacccccaataaataacaacgccaccatttaatcgaccgattaacagctactctacatcattcaccaacacccaatcacattatatccccaacaaaaaaacaaaatatattattaatgccaatcatacgattaccccaaccctcacccaaaattttcaaaaacatactcacgctcctttccacattttacaaatttcactcgcagtcctccccaccaattaatcatttccccaaaacaacacacaattttccctaaatatcccttatttaaacaacacacccctactaccccagaatcaataatacagggcggttaacaaacaagtctcaccttttccctaaaaaccgaactcttccaagtccccacatacccacaaaaaaaacacctcccttaaccccatattcattctacattcaaataaaccacccctctttacccagacattcctaatctaacccaaaaaactacctaccacactactctatatgtgatacaaccctcgtgaaagattcattattaaaaaaggtaattattttaaaactccttataatccacctcattatttttaggcaaaatatatacatactgctcatacgtcccctaataattataac

SEQ ID NO: 687761 - DNA, 625 bp, Homo sapiens
  misc_feature (86)..(86): n is a, c, g, or t
  misc_feature (199)..(199): n is a, c, g, or t
  misc_feature (201)..(203): n is a, c, g, or t
  misc_feature (234)..(235): n is a, c, g, or t
  misc_feature (243)..(243): n is a, c, g, or t
  misc_feature (266)..(270): n is a, c, g, or t
  misc_feature (300)..(300): n is a, c, g, or t
  misc_feature (322)..(322): n is a, c, g, or t
  misc_feature (326)..(330): n is a, c, g, or t
  misc_feature (334)..(334): n is a, c, g, or t
  misc_feature (336)..(336): n is a, c, g, or t
  misc_feature (342)..(343): n is a, c, g, or t
  misc_feature (349)..(349): n is a, c, g, or t
  misc_feature (351)..(351): n is a, c, g, or t
  misc_feature (360)..(360): n is a, c, g, or t
  misc_feature (382)..(382): n is a, c, g, or t
  misc_feature (397)..(398): n is a, c, g, or t
  misc_feature (401)..(401): n is a, c, g, or t
  misc_feature (409)..(409): n is a, c, g, or t
  misc_feature (411)..(411): n is a, c, g, or t
  misc_feature (413)..(413): n is a, c, g, or t
  misc_feature (415)..(415): n is a, c, g, or t
  misc_feature (421)..(423): n is a, c, g, or t
  misc_feature (430)..(431): n is a, c, g, or t
  misc_feature (434)..(434): n is a, c, g, or t
  misc_feature (456)..(458): n is a, c, g, or t
  misc_feature (463)..(463): n is a, c, g, or t
  misc_feature (472)..(472): n is a, c, g, or t
  misc_feature (475)..(475): n is a, c, g, or t
  misc_feature (545)..(545): n is a, c, g, or t
  misc_feature (611)..(611): n is a, c, g, or t
ggggacccgggggctgcgggcgcgcgtccctgcggcggcgtccccggggcccgcgtcccgtgcgcccccgcgcccgctgcgggcgnctgctccctccgccgagcggcgtctttgtgtgcgggggtgtgggaggcgagcgcgagtccgcgcagccgccgagtgcccgctccctcccagggcgggtgggggcctctccgcncnnnccgccgccgccgcctcgcgaggacgcccgtnncccgcgcngcccgcaccgcgccgggcgcgcnnnnncgcgcccgcggccgctcgcacatgcccganccgcagccccgcgagcaggcancgcnnnnncccncnccgcannccgggncnggctaaggngtcgtacctcctcccggccggnggccgcggccccggnncgncggggggngncntnggccgnnncgcctcnncangaaggggccgaggggaaagaannncggantacctcggnagnacaaccggcaccgcgagcaggagaaggagggccgcgcgggccaggcggacatcgagcagctggagtcccngcggccggacgccccctgcacctggccaccacgctgggggaccttgagtgtgcccgcgtgctcctngcgcacggccagac

SEQ ID NO: 687762 - DNA, 189 bp, Homo sapiens
  misc_feature (138)..(138): n is a, c, g, or t
gactatccacatactctcggtccctcgatgctcttagtgagtgtccgcggccgagcgttatttgaaaaatgagtgtcaagcaggccgagcgctgatacgagctagaataatgaataggaccgcgtctatttgtggttncggactgaggcatgattagagggacggcgtggctttcgtattgcgcgctag

SEQ ID NO: 687763 - DNA, 161 bp, Homo sapiens
ctactatgcttcaccaccctcaccatcacccatccttaacatctacattctacctacgccatatattacaccataccccataccaggacaaggatggattattagcaagttccaacctgagaaaggccatcggactttgtcaaggcatgtagccaacatct

SEQ ID NO: 687764 - DNA, 325 bp, Homo sapiens
ggaagcagttaaaaccttgaaagaaacaaaaccctttcctcaggatttttattaaggtgttatttaaggatggttccttaaagggtttaagaagcagtaagcaggcattctaaaggccacacatctatttatatatactataattccacctagatggtacacatctctcagggggtttcatacgtgtatatagctacatccacatcatagttgtaactacgtataacgcagatctgtaattgactgcttgcttgacatacacattctgccagccttacagagtctgcacatggagatatctcctgtgctccagtaatggtctcga

SEQ ID NO: 687765 - DNA, 491 bp, Homo sapiens
  misc_feature (107)..(108): n is a, c, g, or t
  misc_feature (118)..(119): n is a, c, g, or t
ggtgagggatcacagcttagcatgggtgagagatatttaaagcacagggagattcttgtcacattggggtctccaaagctagaatggatttcatgtgcttgaaaaanncccttttttnngccccaaggggttttaaaagaaatccaagggactgacatcgcagttcctctcctctcttcattccctcacagcagattggccggcaccaatcttagtcaagagtggctgtgatcacatttgtgatcaattatgtgagaattttatataattgtcttcatttcaattaaggctgaaagcataaactctagaggtgactcagtcaggactgacagtaatgtgataattgccttcattttcaacccaggagtgcctctcacagctatatgactacggatccattagtgaggagcgacacacacacctgtaggcatcctgtgcaaacactttgtcattatcaagagagatggcagtattgaccaattaaattagtt

SEQ ID NO: 687766 - DNA, 292 bp, Homo sapiens
acgccgcatgcataagaaagcaggccaaaagctgcttacagaggcttgccctcaagcgatatgagggcactgccctccagcttctctgccaggctgcagcgtaccttgacctcctcgtagcagtttgcttgcaattcatgcttgatccctgtcagctccttcttgatggcgcccttggagctgtcataaatcattttgctcttaaggggcgcagactcggtgtcccaaaagataaacaccagatcctccttcttgctctccttgatctcataggttgcatcatagagggcat

SEQ ID NO: 687767 - DNA, 330 bp, Homo sapiens
tgtggcatgtacagcaaaactacctgggtgtagctgttgaactattaggaatatgtcatagatctggtccttgaatccacggcttaacattgcgtcagcttcatccagtacacacatctatgatgtactcagagggacaggtatctccggttaagcatatcaaacacacggccagagtgtacccacgatgatgtggggagcttccatctgcagttttctgcacctcagcacgcacgttggtgccccggatacaggcgtgacaggaggcgcccatgtagtctcctagtgccatgaccaccttctgtatctgctgagccaattctcgagtgg

SEQ ID NO: 687768 - DNA, 341 bp, Homo sapiens
ggccattatttgatttttgtacgaaaaaaagctttgttataaaaatcagcaaactatttttttaaatttggagagaaaatattttggtgactgaaagtatggtcgggtgtcaaaaataaatgggcaaaagccttcttgctgtcctgtcggtttcaggacgttccctttaaagctgctggcaaaatcgaaggttccttttttgtttgggtaaactctaatttctatcaaggggtcatggatttttaaaattagtatttcattacaaatgtttcagcattggttaactaatttttgccaggcccattattgatcaagcaaataaattccacacccctttggga

SEQ ID NO: 687769 - DNA, 229 bp, Homo sapiens
ttttgttgatacatagcttgtgagtgaatcagattactgtttagaacttgtccatttatttgaagtctactaatacgtttgaaggcactaaagtttcttctcagattcttcatttggaatcaggacctgccatggttgtctgtcatctcaacagttaatccttggaaacagttttatcgctttatttatttaaaaaaatatatatatagcctttcaaccaaaaaaaaaa

SEQ ID NO: 687770 - DNA, 1035 bp, Homo sapiens
atgatatgagccctcgtcgaggacaactccccctcctcgcggacgaggcggcgctggtggtagcaggagctcggaatcttcctcttcctccaccaccaccacctagagggggagacctcatgggctatgacagaagagggagacctggagaccgtgacgacggcatggttggtttcagtgctgatgagacttggcgactgctgcaagtagatacgtggagcccatcacgcaatggcatgatgggcttattgaaccacagggtggctccggatatgattattcctatgcagcggtggtcgtggtctcatatggtgatcttgggtggacctattattactacacaagtaactattcccaaagatttggctggatctattattggctgaacggtggtctagccggattaaacgaaatccgtcatgagtcgggagcttcgaatcaatcacttgatgagcctttaagaaggatccgaacgatcggatctagttaccattacaggaacacaggaccagatacagaatgcacagtatttgctgcataacacgtgtgaagcagtatgcagatgtcgaacggagttctaactgcaagatatgtttgctttcttatagtgtgcagcaggattctggcaagtttttctaagactagtgaagacctgaaggagccctgcctctttatgggatatctgccttgcgtgtaggacgccaagattcctccgcgtcataggagttccgcgatttgaagggtgcgcgccctgtttggctgtcccgcaccagttatggtttccgttcccttaccccagggtgggcggggggcaggctgccagctaccatggaaacttggagcccgcgagggatgcttactccggcatgggggggtaaaatcccccctgttttgtggaccgtgttgcggccgtcctcgtggggggccggccggcgatatccgttcggctccgcacggcctacgtctgcaagcgtcgacaaatccggggcgcgtgtggtgtgcccccccatcgtcttttgtctcgttgtcctctct

SEQ ID NO: 687771 - DNA, 351 bp, Homo sapiens
atctggttccgcaaagtgtttttgaggatcagattgttgaactgaactgacaatcagatttcactgccacttgctgtattgggatgattaagacacattcgtgtagcttcaaaggagaagcataagctttattagtcataacttaagatttacttccttccaaaagctaagcacttctcaccatgggcattttatttcatctctcatgctttattatgtacaaggcataggcacttaatctacttttaaaaggaaagatatttccaagtctgtgaagcaagttagaagcactagctctatcctaatttcaggcagggacaaagtcccaatttactggggttccatgtaatg

SEQ ID NO: 687772 - DNA, 345 bp, Homo sapiens
caactccagggaaagcagaggccaccagggtcctcccaaggcagtgcccggtgcaggctgagaaaagtcatggggctcccctggagtaagtcacggggctcccctggagtaagtcactgagcctttcctgcagaatgtttggttccaccctaaaaccacagggatgatcactgtcagagtgaataagacagcttcacagtttagacatggcctacctgtcctgcctcttcaagtgtggaatgtataccactgatagcccttgaaatgattttgggtagtgtgggacatgattttcagtaggacacatgcagtatttaaagaccattattctcagctgggcacatg

SEQ ID NO: 687773 - DNA, 194 bp, Homo sapiens
actacatacttccgagggcacgggattcaaagttaacctggttcggtgataggcaagcacagggaagacctgtcagagggcttagtaaggcccattgaggctccaagggtgagggcctggtttgccgttcgagctcccttgggtgaccatgcaagaacttcattgtgctgagggaaattgtaccctggctgacg

SEQ ID NO: 687774 - DNA, 1027 bp, Homo sapiens
  misc_feature (1027)..(1027): n is a, c, g, or t
tgcatgctgctctggcaatttaatggattttaaatgtttctcatttggatttttttttaggtaggcatgtatggattataatttggtatttcaatatagctgggctactttaaaaggtagttcgataggctgaaattacaaaagataatggaagcacttttcacaagtggttttatttctgcaacaatgaataaaaaggtaagaactctaatttatataaatgaactatatagcttatggggcactttagtgaatactggaaacaaaatactaaaatgaagagttaaggttcgttctcattacaaatcaagagttcagcgtgtgtgtgtgtgtgtgtgtgtgtgtgtgtgtgtgtactctagaggggctatagagaataataggccatggtctactgggcaaatagagataagagaacatctttaatatatgtgtgtgtgtacatagtgtgtaatgtagatatagagagagagagacacggagagacagacagcccagagagagacaccgagagaaagacggccccaaggaggaaggcctatgtccgggaaacagccacgggggaaccccaacggggccctgggaacaaacagcgggcgaggggacccacttacaagaagaagattcacacacatggcgagaagatataccaacgtgaggaaccccctaggggcgcgcaaaaaaccctgaaggggtgcaccacatgggcgaaaataggggcacacacccaaaacaacacgagtccgccagagacatcaacaagcagggaggaattgactgcaacaacaccacactggtgcacaccacaacaagcgagtacagaaccaccacacatactatacacctccactgagatttcttttgtgttctttgcatcacacacactcataaccagaagactcgtcatcatcacaacacacacacgcacacgacaccccccacccacacacaccccagcaaccacccaccaccccaccacacgccacgcacaccaacgcaccctcccacacccaccccaccggtggtn

SEQ ID NO: 687775 - DNA, 132 bp, Homo sapiens
  misc_feature (56)..(56): n is a, c, g, or t
  misc_feature (99)..(99): n is a, c, g, or t
agaccgtaggccaaggtgatctccctcttctattgggagaacctctaatttctttnccaccctctcaacaagcccaataccccctccaagttcttcttnctgctgagggctgtaggaccttattgaaagctt

SEQ ID NO: 687776 - DNA, 764 bp, Homo sapiens
gacaatgaaccgatatctcctctggccgtccattattttctgaagcagatggttcatcatgtcctgggctgttaatcaatgcgaggttatggttagactcttgggatactcagcatagatttatcatagcttattagggtgcagaaggagaaatgaatagggataaacctcgctagatatcagtttgtgagtgtaaacagttatgtattaggtaatcagattgatcgccgagaagggctgagaatagtgtttgacgtcatgtaatgagcgtgagaagagacagacgcatatctgtgtatttggaaaacatagattgtaacagtaatatgcggccgcaatttagacaggagcatcgtaattttggactctgtattactatctcgtaaatgcaattttatggaaacatttaagtgaggtttacattatttctcgtgacattgtatatcagttcttaatgtccatattcacgtgtagaccaggttcggctggtgattagggttagacaagaggtcctaagttactagggagaatgagatgcagtttcaagtgtagatgcagtaaagcagagtacgaactgagctgtggcctattctaggtagttccaaatgagtgattgttgtgtcgaactttatgaatgtgtacttaatttggaaatgttgtctctgagtaagactggagtttctggattatgatccggagtattgtcaatgtttgattacgagaaggtctttttcaaggtttcgggaagtgggtgttgaaccttt

SEQ ID NO: 687777 - DNA, 364 bp, Homo sapiens
catcatcaagcatccatatggtagccagcaagaattacggttgaactacaggtcctccccgggacatggaagctaccttctctagggggcagagataatccgaaaggacaatgtaccaagtacagcgagaacatgacatggcatgaagtgggacacaaagggcttgtgatggccacactacctccttgctgaggatgtaaaactgggactccacctactggagaaaacatgaaggaacctggcatgaacactgaacaggccaccgccgaacgtcatcccgcatcaagcctcggcacaggggcccgaaggtatatattccggcctcggccctatccagactcttgtggaacatctcaaagcctgt

SEQ ID NO: 687778 - DNA, 416 bp, Homo sapiens
catttatttatttatttatgttgagacaagggctgtactatcacccagagtagagtgcagtagcatgaacagtgggtgactggagcctcaagcacaggggactcaaggcatccttcctacctcagccttccatgtagctgggacaacaggtgtgtgccatcatgcccaggtaatttagcgatttgggtatcaatgaggtcttacttcgttgcctaggctggtcttgaactcctgaccgtcaggtgatcctcccgcgctggtctcccaaggtgtagggataatagacatgagccattgtgcctggctggagctgtgtggtattaaaagtttattgtagcaagaacaggcagaaggccagattagtgccggtaagtcatggcttatggacgcattttctagggcagcttccactaacg

SEQ ID NO: 687779 - DNA, 374 bp, Homo sapiens
cgacagagcattctgtgcctggcagacaggccaagtacctacctagggcttacatctacttgacattttgttgttcagtctgtggttgactcatctgtttgcttgttacagatgtggctttgtctaaatactttgccattttacttaaactggaatgtgtgttctggttttgttggatgtgatatgctgggtcaggtaacagtgaaccctcacctgtgacatctcatgtttaccctgtgcttgtgctgtcttggctcctggaggacttgcctgtgtagtgtcctcgaattgagcaataggagaactgataagagcagagtggcattgctcatggacacctgtccttcatctccatctaggcagggacccactcg

SEQ ID NO: 687780 - DNA, 283 bp, Homo sapiens
gagtaagagtgtcaaaaggagcatttgtgtaatctttcactccagagattttaatctccttaatagaaagtgttgtattgatgaatgattaacctttattaagaattttgtgtctcaggcactggattagtagctttacacatttcatttaaatctcacatttgatagcttctactatggttattattttacagaagaaactgaagttaagagaagttaagtagcttgttgaaaatagcctgcctggccaggcagggtggctcatgactgtaattccaacact

SEQ ID NO: 687781 - DNA, 259 bp, Homo sapiens
caattagcagggcactggccagagtttgtaccctgtgttttaccttaacaaccttctatttgctccttgtatatttaagtgtcgtaaggaaacgtgtttccatctaaactgcccatgagattaaggttatagctgtggcttctgtcatattttatcactaacacttatcgtatctctgtatcatggcgatgtatgtatgcatgtcagtggttttgtcctgatgttgctactcccctggcaaagcccaaaaaaaagaatg

SEQ ID NO: 687782 - DNA, 553 bp, Homo sapiens
ataagttgaccaaccagaggagaggaaagggtaggcagcaagggggtctgtccgtgaatctcgatcctgaaggatgttcaagcccaacggtgaactgcagtgtccacagataaagcctaatgggtgatcttagatgtgctcgagtgaccagaaaaaaaaaatcaaatccagcttattattcctttggtggggaggggagaggagctattgaccatgatagttccaatccatctgagtattaagtccttctccagtctgtaaggtaaatgcatctccatccagtcaaagtgtgaacagcatccggttccctcattgaaagttaggccacaggagattccagtcttagctctgctggtgtgtgcaagcaaactgcatgtcttggcttgcatggcacttccttcccctccagggcaggcctatacccaaaagccttggggaacagttccagcttcagctaggtaaggtatacatgtacctaacaggtagcccacttggtgccaggctgcaacagccaacacacagtgtcaggtggccatgtcccagagaggcccag

SEQ ID NO: 687783 - DNA, 604 bp, Homo sapiens
  misc_feature (14)..(14): n is a, c, g, or t
  misc_feature (176)..(176): n is a, c, g, or t
  misc_feature (215)..(216): n is a, c, g, or t
  misc_feature (236)..(236): n is a, c, g, or t
  misc_feature (317)..(317): n is a, c, g, or t
tcaggttatcccanttcatagaggcccacggacttaaggccagttcatgcaggaagccaaagatacagatcttcaatgagagaccaggaaaggaccctgagaagccagaggccagcatggaagtgaaggggcagaagctgatcatcaccaggggcttacagaaagactacagaacngatctagtgtttggaacggacgttacctgctggtttgtnnacaacagtggaaaaggattnattagactgggctattacaagagattactccggtggcctcgttgaattaatctaagaggccacgagaacagaattctacantaggttcatctctcgtgctttttttctagttcagattcaccccgtttggaaggccttatttaggtcaggcctgcttatggtactgtttataaattgggttcagattctgcgtggaagcatccatgtggttttaattaagtgcctcatgtgactccaaaatgaggctagaatcaagtataaaaggttcaagatacatacacaagagttaagttttacttggcactaaagggtggttacagggcctgtcctgtatgggtctggtagggacaggacagttgtggcccata

SEQ ID NO: 687784 - DNA, 760 bp, Homo sapiens
tacctttggaattcccccagaagagtcgtttgcaaagactagaacattccagaatgaatgtcgctcttcaataggaacgtctttattgtgctggaagtatgtcttctctgggtggtaattcttaaattgacagagtcattgtgaggctttctcccctcccgctagtatcgtttacaggagcagggaagagcagatagaggatgtataatttagggcgaagttggaattacaatttgatttgaggttattcctaaaccgtatttatttggtgtttaggaggagatcacatactaggagaacgttgattgcactcggtctatcgtgctggctggacacttgggtcacttgtgaagcatgttaataaatgtcactgattaaaacagctggagcatttccttccctttccagtgaaggagcagcatagtgaaatcctggcacccctcacctttgtgtgatgacaagatggctgacagtcacggagtccaggagcaaggtgctgctctccttgctttctgagtaaacagagtaatgtttcgatcttattttcccaaagaaagaaacagggggaacaatatatcggtatgtctagaccagccaaattctgtcattattttagtatcaaccttgctgtatattagagcaagtgaatatactatggaataaggtttgaccaggtcaagttgaggatatagttgaatttcttttaacaacgtttctatgtttatctaaaaatctttcttattatatctaaattagaatg

SEQ ID NO: 687785 - DNA, 213 bp, Homo sapiens
ctcggccctgtctctgacttaggctactatgggtgttaattttactctctctacaaggtttttcctagtgtccccgagctgtgcctctttggactaacagtgtggttttccacggggtttaagggttctgtgggcgaatttaaagttgaactaagattctatcttgggcaaccagctatcaccaggctcggtaggtttgtcgcctcgtgcggg

SEQ ID NO: 687786 - DNA, 165 bp, Homo sapiens
tggaaacaggtctggctggtgtggcccagttgggattgcaggggggggatttggactcatggtagcctcggccaccgggattcaagtgattctccggcctcaaggtcctgagcagcggggttaacaggcacgcaccattacaccgggctaatttgggtatggtaa

SEQ ID NO: 687787 - DNA, 152 bp, Homo sapiens
attaccggtttttgggggggccccccccccccgggcccgggttttctttttttttacccccccccctggggccccgggcccccggccttttgggttttaaaaaaaaaaaattagaccccttttttcccccttttgtttttttttttttttta

SEQ ID NO: 687788 - DNA, 296 bp, Homo sapiens
acttattttacaagatacaggcttggggtctaatcagagctacagctgccagcatacaccagagccacagcaacaccagatccaagccatgtttgcaacctacaccatagcccatggcaaccctggatccttaacccacggatacccccggggatcaaactcgtatcctcatgaatactagtcgggttcattaccgctgagccacatcaggaactcccagaaacccttctatagtcacccagaacaagctttggaactagatgaccttgggtttcaggtatcttgtaaaataaata

SEQ ID NO: 687789 - DNA, 211 bp, Homo sapiens
  misc_feature (133)..(133): n is a, c, g, or t
catgatttataattatttaaattacttattataaaataagacacagaagtgctgttgggttttctggcatgagccctttggattctgtgtttagcattcagatcattctctgggccactttattcttacacanaccttttttttttttttttttttttaaaatactccaggtcctagggtcccgtgtgcccaacgcgcgggtttggtcctt

SEQ ID NO: 687790 - DNA, 781 bp, Homo sapiens
gaggtgcccgcgatcacacccaggtaatttaactatcttgttagtcactgcctgggtaatcttcggtattttctgaagtagagatggggtttcaccgggtgaggccaggaatggtcttccaatcttccttagcctcgacaatccggacgcgaactcagaccatcccaaaggtgtggggattagcaggcgatgagccagcgtggcccgggactatagaaagtcaatctttttgacgtcttctcacttttatctcgccatgcccaaggttgttctgttccagttaacagtcactcccttcccccttgctaatcagaagccatgctcctctcagtgtcatgatctctgctcgtgtcagtacgatgattacagtcatggggtagagagtgcttgctaaattatgcagttaatcctatggtgctgtaaattttcaggccttcaaaaaacagttgtacagagatgtgcagattttaaacagttgaacttcctggtactacagtttttgtattgacagccaaattgtctttcattcttcagacttgtgaataaagtgatttttacagggcttccagacaaagttgataccctttcaatctaagggcttgtagaacctagcttatatagactgcttacatgagaaatgcaaaatctgtattcacaatgattagtaacaaaggtaacgtttttagttagtggccaggcaggaggacaacttggggggagaacaaagtttggccaaatggggttccggtgattggagggtcctccgggatggggttttaac

SEQ ID NO: 687791 - DNA, 101 bp, Homo sapiens
gacctagagtatcccaatcgcacgaacaaggagctgatacatcacctagggcagcaagctggggaagggaagtggctgtgcattgctgtgtgtcctttaag

SEQ ID NO: 687792 - DNA, 237 bp, Homo sapiens
atccggcgagtgcatggctacgaagtaaatggtggaccatcaaaggcaattgcaaccataaggatgtttcgttccctgatggaggtctgtcgggagaaatcagtgttcttttagtctacccatctcccttcagtttgataaatggtcttagaccggtacatgagaaccaaaaaaacaacccaaggcgttttggaggaataagatcaaggatctggcaggttccgaacagataatacc

SEQ ID NO: 687793 - DNA, 140 bp, Homo sapiens
agaccaagaaggcacgcaaagcgccaaaagctgcacgtgcagtgacccaggcagacttcgaggggtacgggctgcaagaccgaacggcccacgagagcgccaaaccaaagaaacatggcagcagggccatatgggaggcg

SEQ ID NO: 687794 - DNA, 105 bp, Homo sapiens
gaaaccctaataacggatagtctagaaagtgttgtggaaagaatgttatatttactcctacgaatataattacaaagtgaatttgggctcatgcttggttgagtg

SEQ ID NO: 687795 - DNA, 196 bp, Homo sapiens
acattgctgcccagtgaagaggcgggcatgacacagcaagacgagaagaccctatggagctttactatattaatgcaaacagtaccataacaaacccacaggtcctaacaataccaacacctgtcattcaaaaattatcggttaggggacgactcgagagcagaacccacacctccgacgcagtacatgctcaaga

SEQ ID NO: 687796 - DNA, 482 bp, Homo sapiens
tcgtgaccttgtcaccgaggctttcgcattttatcgccgatatcatgccctctgagggccactgttcttgatgcttagcctcacagtcgacgtagacctagtatgccgtactttgatagcagatagcctatgcacaatgcggcatccgaggatcactgtgagtgaatgcactggactatcctgactgagccgttcacgtagattaatcctgactcagacatccggaggttcattcacgctgactcggacctcttcacttactcttgcttgctgttgtgcatgatcattattcattctggtactataagaactgtgcaatttagagaacgcttggcttctccatagtactgcaattgtatttgagccccctaacgctctctgtcgattgtcacagatccttcgtctcatgtccgtcttcccacccatcagtcctgactccgcacctgtctggctttacatgtcctagaccgttatgccactcc

SEQ ID NO: 687797 - DNA, 975 bp, Homo sapiens
cacgcgtcgctcgtgctagaatgctcagtcagtagtgtgtataagcagcagccggaagtgactgcttacagtgtgtagtggtgagtgctagctggcacccctgcgcctggacttcccagacactgtaacgcaggtgcaggagaggcagcgagggctgggtccccacggtggccctggcatgccccgacatcacccatcccctgacactgtgctgctccctccatcatggatccctgaccctcagcacagctggagagagacccgctgggcaccttaccctgaaccgtacgacagatcaatcaaatgaaacacatgcagcagagataagatgagatgatagaaaggagagcacaagtgagactagagagacaataaaacaacaaaaatgtagcaaaaaaaaagaaggagagaagaaggtgatactaagataatgaaagagagcgaagagagagtaaccggagggaattagtgagtgtagataggcaagaaattgaataagaaaatagagtaaaagatgtatgagagaaaacgcagaaaaatcgagaaatgataatacaaagaagaataagatagatagaaatgataagagtagatagtaaaatagaggaataagaaaattaagataagaataaaataagagatgatagaagagtacttgagaatacgattaaggcatcgagacggggggaacgtgggggagcctaagacgaagaacagtagacgagcgagaagaaagagaggggaaacgagcaagagcagggagcgggagggactgcgataacgaagagaagagaggagcggcggaggagacagcgcgaggagggggtctcgagggcacaagaggactgaaggcgacggcgagtatacagaagagagagcgaaatgagagtgacgagacgtctacgatgacgcaagagaaatagagagggagcaggagagacagaaggcaatagcagagaggaggaggagagaggg

SEQ ID NO: 687798 - DNA, 677 bp, Homo sapiens
gggcacagtggctcacgcctttaatcccagcactttgggaggctgaggcagatggatcgcctgaggttgggagttcgagaccagcctggtcagcatggtgaacaccctgtttctactaatacatacaattaatttagccagttgtggtgtgcgggcctattatacctcgccataggctatatcgtcggatgagcgggatgaggtgcagaggaagatattcgtcttggacactcatcagatgagccgcagagcgaagtgcatgacgacgccagagtaggtcggctccgcatgtgacatcttacgatctgctggtgtatgagctgaactgatgatcttcccacgtcctctcaaacaaaaaaaagaaaacacatatttggtggaggagtatatttaccactcctgagtatggaaattgagctgacctaccgcccgagtgatttttgcgtaggacgaaaactgactcccaaccaggaaagtgtggggtgccgcacccttaaatttgttcgacccgcccaccgagggtggatcaccacccccgatgttggctcgcacacgtgggtggatcagtgaatctttccaggcagagagcctcatcacaccacagagtcagtcctcgcattgcgtggtccacgtatacatcggtgagcgtcccaagcgagtgggagtgggatactacg

SEQ ID NO: 687799 - DNA, 364 bp, Homo sapiens
tgggctccgcttgacgagagacgcgacaagatgcgtccgcgggtcacagtctcgcgcaacttgcgcgcgcgccggcccctgggagccagccgtgcgctgaaaccaggcgtcgggctgggagagggccgggagcgtcgcaggtggcgctggcccggatctcccgaccccaggaagggatcccggagcttcctggaggcggcgggcggcgtgtcgctccaggaaccgcgctgccgcggaaactccgcgcgcctccgcggatgcccctcgccctagcccccagcgcgcggggttcgggggccctgcgaggtccccccttcccccgcggtgcttcccaagctgggctaaggcgggcttctcttcctcc

SEQ ID NO: 687800 - DNA, 149 bp, Homo sapiens
gacagcgccttacgaaggcggcaaaaggagccaagagaagtggttatcatttctagaagattgtatatgtgaagcactctatgttcatataagaatattggaagacgttcgtcacaggaccaaggaccaaattgcatctgatggttcaa

SEQ ID NO: 687801 - DNA, 225 bp, Homo sapiens
  misc_feature (5)..(5): n is a, c, g, or t
tcggntccacctttagcttcggctccacttccaccttcaacctcagcttcagatccagcctcaacctcagctccacttgcagcaaccttaactccagtttcagcctcaacctcagtttagatgacagacagagaccgaagtgagttagtgaagtcatttagagtatgactggcctcttaaggggagcaacatactggagaatgtgagcagcgggctgaataacaa

SEQ ID NO: 687802 - DNA, 335 bp, Homo sapiens
aagcttgcggccgccttggccgagcgccggcgttgggcatttgcacagcaccctccgtaagggcaccgggagagcccggaagtgcgttccggggctttcggagcaacggtgtgaggaccagcagagagaagagattccatcttccagaggttgccactgtctgcctccccacttgtccccatccacagacatcttttttatatatataatgacacattagttgtctagctcttcataggtaatcgacgataacgtctggacggcataagatgagcaggaaacgtacgccttagggttattctcactgaaaattgcctttgagtttgataaactct

SEQ ID NO: 687803 - DNA, 261 bp, Homo sapiens
cttaaccacaaggagtaaactagtaatgattctacaacgtctatggtaggcattcgaactggtcctttacacttagagatacttatatcttttgcgcctcttatcaagtcagtacaaaccttttcccaggattttacgttgcggacttgttcgggtgattcgaattcggtgaatttgcaactccggctccacgggtgtttttccggtatccttcaaagccatggcttgttgcgcgcgggcttcagccatggagtaaattcg

SEQ ID NO: 687804 - DNA, 1614 bp, Homo sapiens
  misc_feature (1017)..(1017): n is a, c, g, or t
  misc_feature (1069)..(1069): n is a, c, g, or t
gttcacttagatggctagcggccgctagttgtttctcgccgctctggatcttgctgcttctcgatcttcgtttgcttcttgttgttgtgttgtctgtcgttggcgtctcttctgtggtccgccccttctggcctccgttgtgtgtgtgtgcgctcccctgtctcgtccgcgcgttgtgtcctgttgttttcttgtcctgggtgggcctgtcttcttgggccccgggctcacttgtgggttacttcttttttgcttcgccctttgttgctgcccttttaccccccgcattgtctccgtttgtagtgcgcccacgccggattccccggagtgtggcttcgatgtggcgcccttctaccctccctcaacagtgtcgtttcattgattcccagtcgatgctcttattgaattgtgcttctcctcctctgctccgttgttttggtcctgccttggagtctagtccgtggggtgtttcgtgtgaacgtcactatctcgacagaccgttgggtgggttcagccaccagtggagattgtcttcttttccgcccccgtagcacccaccctgtggtgatggttccccccggagaaattcctttgttgagtttcccacaaattattggttctccgtggtgttttgcattttggtgaacttgtttacgggattccccgctatggggtgcacccctctcgtgtattaccggggccacatgtttgtgccaactccacgagttcattcctttttattgtgttgaagaattgtgtttggggcattgtgttggtgattcttaccccacaggattttgccccccctctatttagaaattggggtgtgccccctcttataggcgctgtccgcttgtggggcactttgtacccacgaggcgccacccccaaattggcacaaagttggtgaatcctcgttccccacacacggtgggcacacttgtctgtcgcacacttgaacagacggatatagattggttccacgcgcaccgagtcacccacaatatataatacagnggtggggttccctctcttggctttgtaaatagacacagagacacttatatanacgtgtccacagccttgaacagagatgttctatatatttatagcgacactcgtgtatacacacacagacatcagagcgatatagagagatgaatagagatcgacacacccccacatgccactctgtgtctcacgggcacaccccaccctctttataaggagttttacgcactatgaccacacttcgctcattatagatctctgccaccttgaaatcttaatggggttgctatgtttaatcacacatgtacacgcttaatttatgttaatgcacctcctggtgttgctattgagatatttattctcccgttatgcccttggattatttctccgctggcccacactatgcacgaccactcttgtactgcctcacaccctcttttctccaagtatatgggcactttctactgactttagaccttccagggattcccactgactggcagattttaaggacaagtattttatattccaccacggtatattttgctgcatgtttctgtactcccgagctgttatgtaacccctgtatataaatggttgcca

SEQ ID NO: 687805 - DNA, 1049 bp, Homo sapiens
ggtaggtcatgaagtattctgaggcaggagagtaagaaaaataacttctgaaatacgtgtactggtcagaatttgcttaaagagagacacatctggcctatggtggctcacgcctgtggtcccagcactttgggaggctgaggctgggcgaatcatcagagttcacgagttcatgagcagcctgggcgaaccatggcgagaccccattctctactaataacatatatgaaacacacttggtcgtgcattgggtggtgcacgcctgtagttcctctgctacgatgggtggggggcctgtcgagcaaggagaattgacttgaaatctggagagggtggaggttgcatgatgggactaaagactggactccattgtaactaccaagtctggagtgaagaggacgcaagaccctgacctacagacaacataacggaacataactagacaattcaacaacaaatcctagctatatttcacaaattcgagagataattgtgagtaacctccctatggcgatagccccagacccagcttttcctgcagcgggccgacgaccagggcgagtcgcttgggggttaacacgcttggtgaggaatccaccctttggaccttatgtccaacaaacaatacttttacccaaaaggtcaacatgggcaaagccacataggattcacggcgaataatcttagattattaaaacacactgggcatttctaaacgttgttccactattgacccacataagatcacttcacagtaacagtgcttggggcgcagcaccaatttacttgaaaagcatatcgttgtgcgtcccacacttagagcgccaagtctccgctgcactgtagcacaaattatgacattgtgtactaaacccttttgtgttcacaacaatcgtaaacgaatacatattcctaactggcctatccatagataccactgcgcacgcagataggtccagagcgccgggtgcacgaggttccacccagaccataccagggctggggcaccccctgaagagcacagaggtttcaaaacaagacccggcaca

SEQ ID NO: 687806 - DNA, 378 bp, Homo sapiens
  misc_feature (1)..(1): n is a, c, g, or t
  misc_feature (364)..(364): n is a, c, g, or t
nttcagtcccattacttcttaaaatttgattgaaaaaattaagtcacatgtaaccccatgctgttttaggaatatgaaaccgataaatgcattttaatgatagtggtcccttcatatgagcttcttttaaaaagtggaaacaaaccaggtatctgctttctagttaatcactgttggctattccatagaggtgtgtctggaacagggagggggctctgcttccctttgggcataattagtcagtgcactaacaattatgtacattcaaacttgattattttaaatatgatcttcagctgtactgtaaatagagtactgcattgtagtctccatatgtttattatttcctataatatttaagaanttgcctaaacatat

SEQ ID NO: 687807 - DNA, 344 bp, Homo sapiens
tggaggtgtggggggtgcgttgcgcgcgccctgtggggtggtgggcgaggggcagaggagctgtgcttcttgctcgtactgctggtggtattaggccgagagaggtccgagtaaagacgggtctctgcgatccggggcagttctgggacgtgaggcccggctgctgtcttgtatcatcctgaggacgcccgctgacgtgtggttactggaggccttgtgggcagaagctcagagaactggggaattcgcaggggtggcttaccagctaaggttctctgaaccatccttggctcccctaacaggtcgaagcttcagcactcctccttgaaagagaccctcccctt

SEQ ID NO: 687808 - DNA, 446 bp, Homo sapiens
  misc_feature (125)..(125): n is a, c, g, or t
tatcccccatgcagctggtgtgattgaagaccactcgaatcgtaacacgtcttgctaaagcttcttaggttccagtcttctcatctatccaacatgatcattactagacctagacacagtatgtnggaaatgaatgaagcgaaaaacaagacataaatctacttcatggcgtgggtccagcatcaaaagaggctgaatcttctccatttgttgagcgacttctgaaatagggctatgaacgttatttacctcacataacctgtggatgattactgtcattcaggcccttcccgaatttgatgggaataggttccagaatgttgcccaagcaaggagtgatgctcgatgaaagtgagaaaactaaggagagtcttgaaactggtgacacgactttggagctctgctgaattggatgaaagataaagcccttaaggacaagattgaaa

SEQ ID NO: 687809 - DNA, 232 bp, Homo sapiens
ctaggcggcatcgacgaatccctagcgcaatgaaacagagagggatctcagatagagttccgaggaccctacgtccacagcgcatgctctgctcgatacgcgagtcactgcactcgtgcaccccgcgttggcatttgacctctcttgctagagacccatagtctaaccaagcctatgcatcagtgcagacgatagagcatcaggacgcatgcgtagcactgcatgcgcgcag

SEQ ID NO: 687810 - DNA, 113 bp, Homo sapiens
ctccctgggtcgtatacggttcgctcttacgccaatattgtgcctattgccatactagtctttgccgcctgcgacacagtggtgggcctagccctactagtctcaatctccaa

SEQ ID NO: 687811 - DNA, 731 bp, Homo sapiens
  misc_feature (152)..(152): n is a, c, g, or t
  misc_feature (664)..(664): n is a, c, g, or t
ggacctgacaataatcactagaatggcctactctgactctagtgtgtgatacatggaaagatggagaaccaggcacccgtgtggttgacttagtggatgggcgtgaagactggggtctgggacctttcaactcaacagccttcagatgggangatcatcaacgtattccgaagctaaccaatctggtatctctagggaccacaaatagcggttgtcctggagtgccacgccgagccgagacccatatgaactcgtgagagagccattacttgagcatagaggggctttgtggcaagctgtgcaacgagcaggcttacagaaaaagtctgtgatagaccgaagggaccccttcaaacaaatatacagtgctaagccttttctgtgataaatagatgagctgagaaggactgttcatagtaaaaagctctgttccggtggctcagatgaatgcctatccagtacaatagcaaacaattctttgcggcttgcaggtcctctagacgtttgggagttttgaactgcctgaagagcaccggatgtgcgcagctgcccttgagttggggtgcctctcatgatccgttgactgaggagagagagtcttgaatagagcgtgattatcaaggtgggggcccccttcgactggtgaaaatgtgcctctcgaacnatgggaatccaagctgttgcagtctccttcaagcatactgtggagcctggatgttgaagtggcagct

SEQ ID NO: 687812 - DNA, 222 bp, Homo sapiens
ctttctttctttctttctttctttctttctttctttctttctttctttctttcgtaagctctatgcccagggtgggccttgaacccacaaccctgagatcaatagtcaagagtcacatgctctacctactaagccacccaggtacctgaagggaagactttttaatgaaagatataaaaactacaaagcctagagggaaagactggtgaatctatctttttg

SEQ ID NO: 687813 - DNA, 582 bp, Homo sapiens
agagagagtgagagagagagagagagagagagagagagagagagagagagagagagagagagagagagagagagagagagagagcgcgtgcgctcgaccgagagagagagtgcgttagtgagcgttctcatttccactcatccctcctgttgcttgtgtttcaccactttttcttacccttgtgtcgtgcacactcctgtgattcctactttctctgcgctctcggtctcctcccgctctataccagatccttcgcttttgcttgggcgttccctccccagtctgctctccatatttcccttatccccccattcctttttacattcttcttagaggttgcctttttgtttctcctctgtatacccaccccatggccctttggaggtgtgtttctctctttacagtgtctccattcctccccctataaccctcccccctccgctaaacatttgttttttctttttttccacaccccctcaatttcccctttgtacattttctttttccccctccccgccaattgtttttttgcccttttgtcagccctctctcttttttattttattcatttcttgccccccc

SEQ ID NO: 687814 - DNA, 264 bp, Homo sapiens
ctggcctgcgttttacactgtccgcagtgttatactgtttgtcgttttacactggccgttgttttattattgttctttctgtttattctcttttctgtcttgttttcatctgtctcattatggtgcttctttgtttttcttgtttttattccctttttgcttctttttatattctattttgttttttcgtttttcattctgacgcttattattttatggtttccatctgttttttttttttaattgttcttttttttttctccg

SEQ ID NO: 687815 - DNA, 198 bp, Homo sapiens
ccccctccaaagtgctgggattacaggcttgagcctccactgcacctggctattaaaatttttttaacttttacttttggagactggggtctcaccttgttacccaggctggacttgaactcctgagctcaagtgatctgcagtagctgggactaagggcatgtgccactgtgcctggcttaaggaaacttaatcact

SEQ ID NO: 687816 - DNA, 178 bp, Homo sapiens
catcgtttaccttggttgtgggatagggacctgtaggttatggagatatggagagtgagaggcagagctacagggagctgagccactggaagggatatgttcatcccttgtgacttcatgtgctgtgaccacaacctggggtctgggaacagtgacccagtgaagtcccttcatcccc

SEQ ID NO: 687817 - DNA, 285 bp, Homo sapiens
gggagtctacacatttattaagtaaaaccaaactcagtgtcagacacgttatatttgattgggtctcaaatttggctaatgtccaaatccacgcagagaagaccggtggggcaaagggacacagtgttgctgccaaggtcacatgtgacacaacacagttctcctttaatgtgtaaaagcgggcttcgcacagttggtgtgagtcatattaccagaggcagagaggggactctatgtttcacgagcagagggaaccccagagtgcgcagagctctctcaagagag

SEQ ID NO: 687818 - DNA, 104 bp, Homo sapiens
ctccccaagtgctgggattacaggcctgagccaccatgcctgccacggaactggttcttagtaggccatagacagttgacaattttgagccattgcactcccgg

SEQ ID NO: 687819 - DNA, 1528 bp, Homo sapiens
gcctataatccacagtcggctagacgaagataggcaggaggtagcaggtacctaggtagctatgataggtacagaaggccaatactacctaggagaccagactaggaacgagccaatacgtaggcctaccaacacggtaactagctagggacacgcgcacgcgtgtgttgagtacgtacagcctagtagacacgcgcaatacacacatatatctaggacaactaatcatacagcacacaccaagctacgccagcctacccatggactaaaccataccgacaaacgcgcgcatagaaacaacccaaccaccctatacacaacagcagggacccacactaacaccaactaatcccgagcagacacaccacaagacacagacaaatactcatcactcgagacgcgcaccaccgctagcacggcacaggataaatagcctcgccacaccacacacaaaacccaaacagccggacggaccaccagaggacccacgacaacctaaggaaacaccccgggaactcaccagacgcgctcgcacgccggaaccagagacaatacacccaacacaggaccactaaacacgcgaaacaaaacaggaacaacaacagacgcgcgcaaaacaggaaggcatcaaccctaaggcctaagcaacccaacaaaaagcagaacggactaggcagagtactaagaacatgacaccctaaaccaccgggcagccaaggtacaagggcccatacaataccctagggcggcgacgggccctttagggcactagaacacacacgtcgccaacacgccttgcgcgacatgggaagaaaaatgcacgcgggcacaactgcactgacacagcccccacgcaacgaacacccacacagttacaaccggaggacatgcgaaagaggcaaccacacactagcgtcaccacacagaacgcagctacccgaagacacacacccacggcgccccagaccacgacagacaacacgacgggacaagcaacagccaaagcaacgctcggatccgaccttacagcaccaccacagaagaggctctccacccaacagcaaccccccaccaggaccaacccacacccgcatgacagcgaccactgacgacgcaccagcaaaacagaacagacaccatgccacaagcatatacacatccaaacctgcccggccaccctacccacattgaaccccaatcacaccaacaccgaccaacataggacaacactgatctcacccagtcgcaaacactttgtataaccaggcggaacacaccagcagaccgtagctcacgccgagcagtcaggccatcacaaacgagcatgctcacacaatagtgatgctagacccccgatagctagcagatacacaatacaacagaacagagccatgcgatgaactcaaacatggccaactgagccacataacaacctagccaagagccgaccaacgagaacagagccctagataagaagcagccccaacgcggaatgacacgatacgagacacaacaagacgatcaccac

SEQ ID NO: 687820 - DNA, 361 bp, Homo sapiens
acagaacatgacccacgtcccaaggaaatctctagagaagctggtgattggcccagatagatgcttgaaggagattataagccgtcaaccatttttgcacccgaacgggtagctctgtggatgagtaggcacgatgaggcttacgaagctactagacccacggctgagcagctggcaggcggctgcacaagtgagacccgcactctggtttcctggtcgtcctggacgcagctggagtgactacaagtgctaatgttgtcaagatctccacggaggcacttgaccagtgcccttaaccactgtcagggaatgccgacagatatgacacagggccacatgcagccaggcacgccggaccatg

SEQ ID NO: 687821 - DNA, 954 bp, Homo sapiens
aagcggtacctccatgacatgttcagtaagagtaagtgtgtgattgccctggtttggggggtgtaggcaaaaggttgggggggaactgtggcgggtcagttatgggctattcctgcggctgcgttaatagggggttgttcacggcagtcgggggtttcctgcccaacggggggttattttaaagggcgccttgtatttcggcgggtgctgtgctagggttacagcgtggtccttgcggttgggggcccgccctagctactgggcggcccccttcgtgtttaaccgtcggttttgttgccccccgtgccgcccctgttgggctgtcccccccacgggggggcacattcgtcctacgctccggggcccggagccgtccgtttttcaaagagccggttgcagcagagccaaaatctttggtgagctccactgttcggccgccaaaaacatggggaacacattcctcaggggacgcccccctctccgtgatctccggggtgtgccccaccaccccgcttcgcccgggggtttcttgtcgtgtgcgccacagtttcttaggcatcttagctgtgtgccgagcggggggccaccgagtggctgctgttaattacactgctctacgggcgtgatgcaaccccgccttgcaaataaagacctacatgtccctcctgacacctttttattcttccgggcgctatcccctgcatcttaacgtggtggtgacatcaacgtgtgatctacaaaacaatggtgttacaaaaaaaaggccgtttcaatattctcccactatttgaacagagtagttctcctttcttttctccctctttcgtgcgcaataaagagcgccccgttcatattttagttgtccctcgttgacaatgtaagcccggatacaccaatactgggtccccccaaccccgggatcttccttcagcggggtttcttccaaacaaaaca

SEQ ID NO: 687822 - DNA, 156 bp, Homo sapiens
cttgtgatccgcccgccttggcctcccactcctgaccttctgatctgcccgcctcagcctccaaagtgctgggattactggtgtgaaccactgcgactggctgggacttttcaattgtttgcgagattctggttttagaaggtgagctgaagctaa

SEQ ID NO: 687823 - DNA, 156 bp, Homo sapiens
gggactgaaggtcacaccacagcgcagtctcactctgtccttcaggcatgtgagtgcagtctcctgatcttggctcactgcaacctctgtctcctgggttcaagtgattcttgtgcctcagcctaccaagtagctgagatacaggattgacttcta
